United States Patent Application Publication US 2013/0332133 A1 - sequence listing, part 39

SEQ ID NO: 267660 - DNA, 1171 bp, Unknown
  Bacterial polypeptide expressing nucleotide sequence isolated from the Sargasso Sea
atgagcggaacagtcgaaacaatattattatatacaattggagcaggtttactatctatcgtttatggatttttaactggtaaaaatatacttaactcaagtgcaggaaactcaaaaatgcaagatattgcatctgcaattcaaattggtgcaaaagcatatttagcaagacaatataaaactattgctattgttggtgctgtagttttagtaattgtaagtattgcattcagcccattagtaggtctaggatatttaataggtgctgctttatctggtatcgcaggttatgtcggaatgttagtttctgttgaagcaaacgttaggacagcagaagcatctagaaaaggtttagcacaaggtctatctgttgcttttaaatctggtgctgttactggaatgttagttgctggtttagcattgttagctattgcagtttattattatatattattgaaatctaatgttgatgaaagagaaattgtaaatgcattagttgcattaggttttggtgcttctcttatttctatttttgcaagattaggtggtggaatttttacaaaaggtgcagacgtaggtgcagacttagttggaaaagttgaagctggaattccagaagatgatcctagaaaccctgctgtaattgcagataacgttggtgacaacgtgggagattgcgctggtatggctgctgatttatttgaaacttatgcagtaacaatagttgcgacaatggttttatcttcaattttctttgttggtgatttaaatatgatgatttaccctttatcaattggtgccgcatgtttgttaacatctatagttggaactttttttgttaaactaggaaaaagcaataacgtcatgaatgcattgtataaaggatttgttgtctctgcagtagcatctttagtaatactatggcctgttacagatcatgtaattggttttacaaatgaatatacaataaatgataagatttttaatggaatggatctatattattgtggtgttatagggttagttattacaggattattaatctggattacagaatactatacaggaacaagttatagaccagttaaatctgttgcattatcatcaacaactggtcatggtactaacgttattcaaggtttggctgtttctatggaagcaacggctatcc

SEQ ID NO: 267661 - DNA, 1837 bp, Unknown
  Bacterial polypeptide expressing nucleotide sequence isolated from the Sargasso Sea
tatggatagtttaataattccacctgctttaggtcttttaggtatggctatggcatatgtagtttatatgcttgtaatgaaatatcctgatggtgaagataaagtaaaaaaaatcggtgatcagattcatactggagcattgacctttatgaaaacagagtacaaatatttatttatttttatgactgttatagttggtttagcatggtttgcattagggccattcactgcaatagcagttgttgtcggtgctttatgttcatcaattgcagggtttattggaatgtatgcggcaactaaagcaaatgtaagaacagcaacagcagctcaaaaagatggctcagcagcagctttatcggtatctttttatggaggctcgatcatgggtctttgtgtagcatcattaggcttgataggtttaggtggcttatattatttttatataccagctgaaattgatcctcataagcttgaaggttttgctatgggagcatcagtagtcgctcttttttctagagtaggtggaggaatttttactaaaagtgcagatgttggagctgatcttgttggcaaaattgaagctggaattcctgaagatgatccaagaaatcctggtgtaatagcagacaatgttggtgataatgttggtgatgttgctgggatgggatcagatatatttgagtcatattgcggctctatgattgcttcaatagctatagcttatacattaggtaacaaagatatgatgatgcttcctttagctttagcctcaactggtttaatagcctcaataattggaatatttatagttaaacttcagtcagcgaaagcacctgcaagcgcattaagatctggaactcttctagcgcctgtaatatttgttgcaatggcatactttataattgattcttttgatggagttggaatgaatgtttggtggtgtgttatatctggtgcagtaggtggcgtcttaattggacttattacagaatactacacaggcggcagcccagttaaaaaaattgctgaatcaggaaaaactggatcagcaacggttatgatttcagggctatctgttggtatgcaatcagttgtaatacctattgtaattttagctggaattattcttgcctcaacacagttatctggtatttatggcgttggaattgctgctgttggtatgctagcaactgttggaataacaatggctatagatgcatatggaccagtcgcagataatgctggtggcatttctgaaatgtctggtatgggagaagaagttagagaaattactgattctcttgatgaattaggaaataccactgctgcaattggtaaaggttttgcaattggtgctgcagctttagctgctctagcaataatttcagccttttcagctgtagtggctgacgcaaatcctgaattttctttagcacttactgaaccaattgttttagttggaatgtttattggtgtatgtatacctttcttggtttcttcaataacaatgacagcagttggagatgcagcttttgaaatgatcaatgaaataagaagacagtttaaagaaatagaaggtttaatggagggtacagcagaacctgattctgaaaaatgtgttgaaattgccacaacagcagcccttaaaaaaatgatgttacctggagtaatagcggtatcaatgccggctatcgttggatttgggcttggcgcacaagccttgggaggaatgcttgctggcggactacttggttgtgtttcattagctcttatgatggcaaacgcaggtggcgcttgggataatgcaaaaaaatatgttgagaaaggcaatttaggt

SEQ ID NO: 267662 - DNA, 460 bp, Unknown
  Bacterial polypeptide expressing nucleotide sequence isolated from the Sargasso Sea
cttgtttgccatagcttatttaaaggaaacagacatgagcttactcaacgtccctgccggtaaagacctgccggaagatatctacgttgttatcgagatccctgctaacgcagatccgatcaaatacgaagttgacaaagagagcggcgccctgttcgttgaccgcttcatgtccaccgcgatgttctatccgtgcaactacggttacatcaaccacaccctgtctctggacggtgacccggtagacgttctggtcccgactccgtacccgctggagccaggttcagtgattcgttgccgtccggttggcgtactgaaaatgaccgacgaatccggtgaagatgcgaaactggttgcggtaccgcacaccaagctgagcaaagaatacgatcacatcaaagatgtgaccgacctgccggaactgctgaaagcgcagatcacccacttcttcgagcactac

SEQ ID NO: 267663 - DNA, 1027 bp, Unknown
  Bacterial polypeptide expressing nucleotide sequence isolated from the Sargasso Sea
cttgaaatgttttctgcaaccaaagcaaatgttagaactgcaactgcagcatctgagtcaggagcgcaagcagccctttctgtggctttttatggtggatcaattatggggctatgtgttgcttctcttggattagtaggtctaggaggtctttacttttatttcggaggcgatcctgatactgctagagcaatagaaggtttcggaatgggagcgtcttgcgttgctcttttctctcgtgtagggggtggaatttatacaaaaagtgctgatgttggtgctgatttagttggtaaagttgaagcaggaataccagaagatgatccaagaaatcctggagttattgccgacaacgtcggagataatgttggagatgttgctggcatgggttctgatatttttgaatcatattgcggagccatgattgcatcaatcgcaattgctgcgacaatcgacaataccggaatgatggcgctacctttagctttagcttcccttggactattggcatctatacttggaattataattgttagagtattttccaaagcagatcctggaacagcattaagaacgggaactataggatcagcgattctttttataattgcagcttactttttaattcaaatgattttgactgaaaatgccttaaatacttggttggcagtattagctggcgcagtaggtggagtcattattggattgattacagaatattacacaggatcaaaaccagttgagaaaattgctaaatctggtgaaacaggtcctgctacagtcatgattacgggactttcagttggcatgcaatctgtagttcttcctattcttgtccttgctacaataattctggtttctacctcacttgttggtctgtatggtgtaggcatagccgcagttggaatgcttgctacggttggaataacaatggctattgatgcttacggtcccgttgccgataatgccgggggtattgcagaaatgtctggtatgggaagtgaaaccagagaaataacggatttct

SEQ ID NO: 267664 - DNA, 1006 bp, Unknown
  Bacterial polypeptide expressing nucleotide sequence isolated from the Sargasso Sea
aatgatgcaaacatttatattactgtgcggtcttgcggctgttttttatggtttaattacttcaagacaaattctatctcttagtacaggcaatgaaaaaatgtctgaaattgcaaatgcaattcaagaaggtgctagagcttatctaaatagacaatacttaacaattggtattgtaggtattgcaattttcatattaatttggattatctttggattatcttctggactaggttttttgataggtgcttttttttctggtgcagcagggtatgtaggaatgaatatttctgttaggtcaaatgttagaactacacaagctgctagttcaagtttgtctgagggtttatcagtttcttttaaagcaggtgctgtaacaggcatgttagtagctggctttgcattactttctatagcaatttattattttctattagataattctggactttttcccggtagagaaattgttgcaccacttgtttctttaggatttggagcttctctaatatctatatttgctagacttggtggaggtatctttactaagggagctgatgttggtgcagatttagtaggtaaagttgaagcaggtattcctgaagatgaccctagaaatccagctgttattgctgataacgtaggagacaatgttggagattgcgcaggaatggcagcagatctttttgaaacatatgtagtgacagtcgtagctacaatggtattagcatcaatttttttctctgaatctttaagctcgacaatgatgatgtatcctttagcaattgcgggagtatgtactttagcaagtattattggaacatattttgttaagttaggtaaaaatcaaaatattatgatggcactttataaaggatttgcagtttcagctattttatctgctattcttttatattttattacagatcatgtcgttggaaatgatgaagtatttaatatagatgataaaacttttactggactatctcttttttattgtggaatt

SEQ ID NO: 267665 - DNA, 1027 bp, Unknown
  Bacterial polypeptide expressing nucleotide sequence isolated from the Sargasso Sea
atgagcggaacagtcgaaacaatactattatacacaattggagctggtttattatctatcgtttatggatttttaactggtaaaaacattcttaattcaagtgcaggaaatgcaaaaatgcaagatattgcatctgcaattcaaattggtgcaaaggcatatttagcaagacaatataaaactattgctattgttggtgctgtagttttagtaatcgtaagtatagcatttagtccactagtaggtcttggttatttaataggtgctgccttatcaggtattgcaggttatgtaggaatgttagtttccgtagaagctaacgtaaggacagcagaagcgtctaggaaaggtctagctcaaggtctttcagttgcatttaaatctggtgctgtaactggaatgttggttgctggtttagctttattagctatagctgtttattattatatattactgaaatctaatgttgaagaaagagaaattgttaatgctttagttgcattaggttttggtgcatcattaatttcaatttttgctagattaggtgggggaatttttacaaaaggtgctgatgtaggtgctgacttagttggaaaagtcgaagctgggatcccagaagatgatcctagaaatcctgctgtaatagctgataatgttggagataacgttggtgattgtgcaggtatggctgctgatttatttgaaacttatgcagttacgattgttgcaacaatggttttatcttcaattttctttgttggtgatcttaatatgatgatctaccctttatctattggtgcagcatgtttgttaacatctattattggaacatttttcgttaaacttggaaaaagtaataacgttatgaatgctttgtataaaggatttgttgtttctgcagtagcttctttaataattttatggcctgttacagatcacgtaattggttttacaaacgaatatacaattaatgataagacttttaatggtatggatctatattattgtggtgttataggattagtta

SEQ ID NO: 267666 - DNA, 673 bp, Unknown
  Bacterial polypeptide expressing nucleotide sequence isolated from the Sargasso Sea
tatgcctgcatacatacccccacttttaggtcttataggtctacttatcgccctaggaatatttagagttgttcttagctacccagaaggaaaccctgaagtaaagaaaatcggtgacatgattcattcaggcgcaatgagttttatgaaaaccgagtatatgtacttagttgttttcgtccttgttttagctgttttagttttctttgccctaggctgggaaacagcaactgcagttttagttggtgcttcaagttcagcattagctggatttattggaatgtatgctgcaactaaagctaacacgagaacagctgcagcagcccaagatagtggagcagcttcagctttatcaatttctttttacggtggatcgataatgggtctctgtgttgcttctttgggtcttcttggcttgggaggattattttatttccttggagagggtcattatcttgaagggtttggaatgggggcttcagtagtagcgctattctcaagagttggtggaggaatctttaccaaaagtgctgatgtcggagctgaccttgttggaaaagttgaagcaggaataccagaagatgatccacgaaatccaggtgtaattgctgacaatgttggagataatgttggtgatgttgcaggaatgggttcagatatctttgaatcatat

SEQ ID NO: 267667 - DNA, 1521 bp, Unknown
  Bacterial polypeptide expressing nucleotide sequence isolated from the Sargasso Sea
tggatcaataaacaaagccaaggtaatgaccgcatgaagtctattggtgctagcatagcagatggtgcaatggcatttctcagggctgaatatcgtatcctggtagtttttgttatagcggttgcttttatcttggggtttgccaattcagggagatctgactcaagtgcgatgatatctttatcattcgttgttggtgcgttggcatctggtttagctggatttcttggtatgaaagttgcaactaaagcaaataacagaaccactcatgctgctgaaactagtttagcaaaggctcttaatgttgcctttagcggtgggtcagttatgggtttaagtgtagttggcctaggtgttttaggtttggggggattgttatatctttattcaaacatgtatggttttgaaaattcatcggccgtttctatggtgctaaacattttatcaggtttctctttgggggcatcatcaattgctttatttgctcgagttggtggggggatatacactaaagccgctgatgtgggagcagatttagttggcaaggtagaagcggggataccagaagatcatcctcttaatccagctaccattgcagataatgttggtgataatgttggtgatgtggccgggatgggagcagatctatttgagtcatatgtaggttcaattattgggtcaatggttttaggatcgagtattcttgtcgctggggggatggatttaaattttattattctacctttgttgattgcgggcgcaggtattgtagtgtccattttagggacctttatggtttcagtaaaagaggggggagacccgcaaaaaggattaaatcaaggggaatttggtagcggactcattatggttggcgtaatatattttttaattatgaaatttttacctgatagctattttcaggctggtgtatcctacaaaagcacgggagtcttttacgctactataattggtttatttggaggtttaggcattgggaaaataacggaatactatactggaactgggacgaaaccagttaagtctatagctgaacaatcaataacaggtccagcaaccaatattatagctggtttaggtgtcgggatggagtcaacagcgataccaatcattataatatcttctagtataatgggggcatactattttgctggtttatatgggattgcaatggctgcattagggatgctagcaaatacaggaattcaattagcagtagatgcatatggacctatttcagataatgcgggaggaattgcagaaatggctgaactcccaagtgaggttcgtgaaaggacagataggcttgatgctgttgggaatacaacagctgcgattggtaaagggtttgcaataggctctgctgcattaacagcactggctctttttgccgcatatatggttaaaacgggtatttcaaccattgatatatcaaaccgcaatggttatggctggtttatttattggtggtatgttgccatttctattttcatcaatagcaat

SEQ ID NO: 267668 - DNA, 1527 bp, Unknown
  Bacterial polypeptide expressing nucleotide sequence isolated from the Sargasso Sea
cttagggctgaatatcgcattctagcagttttcgttatagcagtcgcttttatccttggatatgctaattcaggtagatctgattcaagtgcaatgatatctctatcatttgttgttggtgcgttggcatctggcttagctggatttcttggtatgaaagttgcaactaaagcaaataacagaactacacatgctgctgaaagtagtttggcaagggctctcaatgtcgcctttagcggtgggtcagttatgggtttaagtgtagttggcttaggcgttttaggtttgggtggattattatatctttattcaaatatgtatgggtttgaaaattcatcaaccgtttctatggtgctaaacattttatcaggtttttccttgggggcatcatcgattgctttgtttgctcgagttggtggggggatatacactaaagccgctgatgttggcgccgacttagtgggcaaagtagaagcagggataccagaagatcaccctcttaatccagctactattgctgataatgttggtgataatgttggcgatgtagccgggatgggtgcagatttatttgagtcatatgttggttcaattattggatcaatggttctgggttcgagcattcttgttgctggaggaatggatttaaattttgttattcttcccttattaattgcggcttcaggcattgtagtatccatattagggacttttatggtttcagtgaaagaaggaggggatccacaaaaaggattaaatcaaggcgagtttggtagcggactcattatggttggtgtaatatatgtattaattgtcaaaattttacctgaaagctattttcaaggcggtgtgtcctacaatagtacaggggtcttttatgctactataattggtttgtttggaggtttaggtattgggaaaataacagagcactataccggaacaggcacgaaaccagttaaatctatcgctgaacagtcaatgactggtccagctaccaatattatagctgggctaggtgttgggatggagtcaacagcagtacctatgattataatatctgccagtataatgggcgcatactattttgctggtttgtatggaattgcaatggctgcattggggatgctagcaaatacagggattcaattagcggtagatgcatatggtcctatttcagataatgctggtggaatcgcagaaatggctgagcttccaagcgaggttcgtgaaagaacagataagcttgatgctgttggtaatactacagctgccattgggaaagggtttgcaataggctctgcagctttaacagcgttagctctttttgctgcatatatggtaaaaacggggatttcaactattgatatatcaaatccaatggttatggccgggttatttattggtggtatgttaccattcctgttttcatcaatggcgatgggtgcagttggtcgagcggctatggctatgattgaggaagtaagaagacaatttagagaaaatcctgagctaaaaaaggcactg

SEQ ID NO: 267669 - DNA, 958 bp, Unknown
  Bacterial polypeptide expressing nucleotide sequence isolated from the Sargasso Sea
cgtcccaaatgtcgcagcttcaagtgaaaccggatcagcaacgaatatcatttctggtttggctaatggaatgttttcaactgccttgccagtactagtaattgcactttctatccttggagcataccactttgctcatctatatggtattgctttagctgcacttggtatgctgtcaacaataggaattcaattagcagttgatgcttatggtccaatcgcagataatgctggtggtattgctgaaatggcagaacttccaaaagaagtacgcgaaagaactgataagcttgatgcagtggggaatacaacagcagctattggtaaaggttttgcgattggttctgccgctttaacatctttagctctatttgcagcatttagagaaacagttggtggtttaaccttggatattaataatcctcaagttatggcaggtctattaataggatcatcattaccatttgtattttcagctcttgcaatgcaggcggttggagatgctgctttcgaaatgattgaagaggtcagaagacaatttagagaaataaaaggcttgcttgatggaaaagcaaaagcagattacgctaaatgtgttgatattgctaccacagctgcaatcaacaaaatggtattacctggagcattggcagtattcactccaattgtatttggcttggtattaggtcaaaaagaaatgcttggtggtattttagctggagttacagtaactggtgttttactagcaatctttatgtcaaatgctggtggttcatgggacaacgcaaaaaaatacattgaatctggtaatcacggtggaaaaggcagtacagcacataaagctgcagtggttggtgacacagttggggatccttttaaggatactgcaggaccatcacttaatattttaatcaaattgatatcagtggtatcgctcgtaatcgcaccacttatttaa

SEQ ID NO: 267670 - DNA, 1297 bp, Unknown
  Bacterial polypeptide expressing nucleotide sequence isolated from the Sargasso Sea
tttgggcggcttatattatttttatatcccagctgagattgatcctcacaagcttgaaggtttcgctatgggagcatctgttgttgctcttttttcaagagttggcggaggaatttttacaaaaagtgcagatgttggagccgatcttgttggtaagattgaagccggtattcccgaagacgatccaagaaatccaggtgttatagcagataatgttggtgataatgttggtgatgttgctggaatggggtcggatatatttgagtcgtattgtggttcaatgattgcatcaatagcaatagcttatacattaggcaatcaagatatgatgatgcttcctctagccttagcagcgactggcttaatagcgtcaataattggaatattcatagttaaacttcaatctgcgaaagcgcctgcaagtgctttgagatctggaacacttttagcgccagtaatatttgtggctatggcatatttcataatcgattcctttgatggagttggaatgaacgtatggtggtgtgttatcgccggagctgtcggtggagtattaataggacttattacagaatattacacaggcggaggcccagttaaaaaaattgctgaatcaggagaaactggttctgcaacagtaatgatttcaggattatcagttgggatgcaatcagtagtaatacctattgttattttagccggtattattcttgcctcaactcaattatcaggtatttacggagtaggaattgctgcagttggtatgcttgctactgttggaataacaatggcaattgatgcatacggaccggttgcagacaatgctggtggtattgctgaaatgtcaggcatgggtgaggaagttagagaaattacagactctcttgatgaattaggaaatactactgctgcaattgggaaaggttttgcaattggagctgcagccttggctgctctagcaataatttcagctttttcagccgttgtaggtgtggcaaatcctgaattttcattagcacttacagaaccgattgttctagttggaatgtttatcggagtttgtataccttttttagtttcttcgataaccatgacagctgttggagatgctgcttttgaaatgattaatgaaataagaagacaatttaaagaaataactggtctaatggaaggtactgcagaacctgactcggaaaaatgtgttgaaattgccactaaagcagctttaaagaaaatgatgttgccaggagtgatagcagtatcaatgccagctatagttggttttggtcttggtgct

SEQ ID NO: 267671 - DNA, 910 bp, Unknown
  Bacterial polypeptide expressing nucleotide sequence isolated from the Sargasso Sea
atggtcgcaattatcatagctgcagcatttcttggacttgggacagcccttttctattggataaaagtttcatcgattccgcttactcatggaattgagaataaagaagaagctgagaagctttcaaaaataactcatgcaattgaaattggtgcaatggcttttctcaaagcagaatataagtacatggtatatttcatggccggattcgctatcttgatagcattcctcatagatgatcctcatactccagatgtgagcgaaggcatttatactgcgatttcatttttacttggttgtgtgatttcaattgcttcaggattcatcgggatgagaattgctacaatcggcaatgccagaactaccaccgccgcaaaaaattcaattgcggacgcattcaaagtcgccctcaattcaggcgctgtaatgggttttggacttgtgggacttgccgttttaggtcttgcagtaatttacctagttctcgattttttactgcctggaatagacaaacatatcttaatggaagtcatggcgggatttggacttggaggttcttcgatcgccttgtttgggcgcgtaagtggtggaattttcacaaaggcagcagacgttggagccgatcttgtaggtaaagttgaacaaggaatcccggaggatgaccctcgaaatcctgcagtaattgctgataatgttggagataatgttggtgatgtggcaggaatgggagccgatttgtttggctcatgtgcagaaagcacttgtgcggcacttgtgattggtgctgtggcatttgcaactaacacggaggctcttttattccccaattttgatatctgcagttggaattccaataagtctgattactatgttctcagccacgggttaaagaagaaaaagacgtgctcca

SEQ ID NO: 267672 - DNA, 1213 bp, Unknown
  Bacterial polypeptide expressing nucleotide sequence isolated from the Sargasso Sea
tatgaaactgagtatacctatttggttgttttcgtctttgttttagctgttttcgttttctttgcactaggctgggaaacagcaacagcagttttggttggtgcttcaagttcagcattagctggatttattggaatgtatgccgctactaaagctaatacaagaacagctgcggcagcccaagaaagtggagcagcctcagctttatctatttctttttatggtgggtcaataatgggcctttgtgtagcttctttagggcttcttggcttaggaggattattttattttctgggagaaggtcactatcttgaaggatttggaatgggagcttcagttgtagcactattctctagggttggtggaggcatctttactaaaagtgctgacgttggggcagaccttgttggaaaagttgaagcaggaataccggaagatgatccgcgaaatccaggtgtaattgctgataatgttggtgacaatgttggcgatgttgcaggaatgggctcagatatttttgagtcatattgtggctcgatgattgctaccatagcaattgcttacactatgaaagaagcaaataatggacccttaatgagtctacctctagcattagcgtctattggtttaatatcatcaattttaggtatcttaattgtaagggctcaatctgcgaaagcacctgctgcagcattgaggactggaacaataggttccccagttatttttatagctttagcttttggattaatttcatatttggatatttcattaaatgtttggttttgtgttcttacaggagctgttggaggtgtattaattggattaataactgaatactatactggtagcacacctgtagagaagatagcaaaatcaggtgaaacaggatctgcaactgtgatgatttctggtctttcggttggaatgcagtctgttgtaattcctatcttaattttggcaacaattatttttatttctacaacattatttgatttatatggagttggcattgcagcagttgggatgcttgctacagttggcataacaatggcaattgatgcatatggtcctgttgcagataatgcaggtggaattgcagagatgtcaggaatgggagaagatgttagagaaattactgattctcttgatgagcttggaaatacaacaacagccatcggtaagggatttgcgataggtgcagctgccttgg

SEQ ID NO: 267673 - DNA, 1324 bp, Unknown
  Bacterial polypeptide expressing nucleotide sequence isolated from the Sargasso Sea
aggagtaatagttttaatcattattagttattttttcagtttgttagttggtcttggatatttaattggagccgtactctcaggattagcaggatacgtgggtatgttaatatctgttcaagcgaatgtaagaacagctgaagcatccagatcaagcttacagagtggtttaacaatggcttttaaatctggagctattactggtcttttagttgctggtttagctttgttagcaatttcaatatattattgggctttattatcttttaatgttgaaagtagagaattaataaacgcattaattgctttaggttttggtgcctctttaatttcaatatttgcaagattaggtggtggaattttcacaaaaggagcagatgttggagcagatttagtcggaaaagttgaagctggaataccagaagatgatccaagaaatcctgcagtaatagctgataacgtcggtgataacgttggtgattgcgcaggtatggcagcagatctattcgagacctatgccgtaacaattgttgccacaatggttttatcctcaatattttttttagaaaatcaaacaatgatgatttatcctcttgcgattggtggtggatgtataattgcatccattattggaactttttttgtaagattaggaaaaggtaaaaatattatgggagctctatataaaggttttattgtaactgcgatattgtctttaattcttctgtatccaataacattaaatacaattgggctcgaaacttcttatattgttggcgacaaaacatttaatggattagatttatattattgtggagtaattggtttaattgttactggattaataatatgggttaccgaatattatactggaacaaattatagacctgttaaaagtgtagctaaatcttcaactactggtcatggaacaaatgtaattcaaggcttagcggtatccatggaagcaactgctttaccagctttaataattgttggtggtattataataacaaatcaacttgcaggattatttggtatagcaattgcagttacagcaatgttagctttaacaggaatggttgttgcacttgatgcctacggcccagtgactgataatgctggtggaatagcagaaatgtcaaagttacctaaaaatgtaagaaaaactactgatgctttagatgcagtgggtaacacaacaaaagcagttacaaaaggttatgcaattggatcggctggcttaggagctctagttttgtttgctgcttatactgaagatataaagtttttttccaacgtacctggatcagctttagaaggtata

SEQ ID NO: 267674 - DNA, 1048 bp, Unknown
  Bacterial polypeptide expressing nucleotide sequence isolated from the Sargasso Sea
gtttctcctcggcgcggggtgctccgccgcgtccgggtacgtgggcatgtgggtcagcgtccgcgcgaacgtccgcgtcgcgggcgccgcccggcgcgggttcagggaggccctcggcgtcgcgctgcgcgcgggcgggttcgcggccatcctggtggtctccgtcgccgtcttcggcgtcgcggggttgtttgcgacgttttcgttcctcctcggctcgacggaccaggtgccgctgatgctcgtcgggtacggattcggcgcgtcgttcgtggcgctgttcgcgcaactgggcggcggcatctacacgaaggccgcggacgtgggcgcggacctggtggggaaggtggaggccggcatccccgaggacgacccgaggaaccccgcggtggtggcggatctggtcggggataacgtcggggactgctccgctcgcggcgcggatctcttcgaatccatcgccgcggagatcatctcggccatgatcctcggcgcgtcgatggcgaagaaaaccgacgtccccgaagccatcgccccgggcttcatcgcgttcccgctcgtcgtccacgccatggactgcgtcgtgagcgcgatcgggatcatgtccgtgcagacgacggaggatgcctcggcgtcgtcctccgccggcgggtccctcgagagcggcgccgccgccgcgtcgaacggcgcgtccgacccgtacgaggtgatgaagtccgggtaccgcgtcgcgatggcgtgcggggccgtgttcttcgccctggcgtgccgcttcatgctccacgtgccctccgtcccccaggcgtgggtccacttttacgggtgcgggttgatcgggatggcgagctcgtacgcgtttgtgttcctcgcgcagtactacaccgattacaagtacccgcccgtgcgcgtcatcgccgaggcgtcgttgacgggccacggcacgaacgtcatcgcgggcgtgggcgtggggatggaggcgaccgcggcgccgacgctcgtgattggcgccgcgatcgtgggggcgtactggtgcgggcagacgtgcggg

SEQ ID NO: 267675 - DNA, 1033 bp, Unknown
  Bacterial polypeptide expressing nucleotide sequence isolated from the Sargasso Sea
attgggttttggtgcatcattaatttcaattttcgcaagacttggtggtggaatttttactaaaggtgctgatgtaggtgctgatttagttggtaaagtagaagcaggtataccagaagatgatccaagaaaccctgcagttattgcagataatgtaggtgataacgtacgagattgtgctggtatggcagctgacttatttgaaacctatgcagtaacaatagttgccacaatggttttatcttcaatattttttcatggagatcttaacatgatggtttaccctttatctattggtggtggatgtatattaacttctattattggaactttttttgttaaattaggtaaatctaaaaatattatggctgctttatataaaggttttattgttacagctataacatcgctaataattctatatccaatcacagattatgtattgggattagaaaatacatattcagtttctggtaaatcattcacaggaatgaatctttatatgtgtggtgtaataggtttaattataactggcttattaatatgggtaactgaatattatactggaactaactatagacctgtaaaaagcgttgcttcatcatcaacaacaggtcatggtactaatgtaattcaaggcttagctgtatcaatggaagccactgctataccggcattaattattgtcggtggaatattattaacaaattatattgctggactttttggtatagcaatagcagtaacaacaatgctagcattagcaggaatggtagttgctttagatgcttacggtcctgtaactgacaatgccggtggtattgctgaaatgtctaatctaccaaaaaatgttagaaaaactacggatgcattagacgctgtgggaaatactacaaaagctgtaactaaaggatatgctattggatctgctggattaggagcactagttctgtttgctgcatacactgaggatattaaacacttttcaatgattgctggatcaaaattagagggagttgttgtaaacttttga

SEQ ID NO: 267676 - DNA, 1306 bp, Unknown
  Bacterial polypeptide expressing nucleotide sequence isolated from the Sargasso Sea
tcttgtataatcacttctataataggcacatggtttgtacgtttaggaaatagtaaaaatattatgaatgctttatataaaggtttcattgcaacggcatttctatctttgttaattttatatccattgacaaatgctactttaggactgaatgaaaattattcatattctaacataacattttctggttttgacttgtatatttgttccgtaattggattagtaataacaggtttgattatttggataacagaatattatacaggcactaattttaggccagttaaaagtgtagcaaaatcatccactacgggacacggtacaaatgtaatacaaggattagcaatttctatggaagcgacagctgttcctgcgctaattattgttgttggaataataagcacttataactttgctggactttttggtatagcaatagctgttacttcaatgttggctttaactggtatggtagttgctcttgacgcttatggtccagttactgataacgcaggtggaatagctgaaatgtcaaaacttccaaaaaatgttagaaaaactacagacgctttagatgcagttggtaatacaacaaaagctgtaacaaaaggatatgcaattggttctgctggtttgggcgcattagttttatttgctgcttatacagaggacataaaatattattctatggacaaaacctcatctttgtatcaaatggaagtaagctttgatttgtcaaatccttatgtcgtaatcggtttgctaattggaggacttttaccttatctttttggttcaatgggtatgcaagctgttggcagggccggtggagctgttgtggttgaagtaagaagacaatttaaaaagataccaggtatcatgaaaggaaaaagaaaacctgattatggaagactggtagatttgctaacaaaagctgcaattaaagaaatgataacaccatctttactaccagtgctatctccaatagttttgtatatcataattttattaattgcggggaaggtagcagcattagcggctttaggagcaatgttacttggtgtgatcgtaactggcttattcgttgctatatctatgacagctggtggtggtgcttgggataacgcaaaaaaatatatagaagatggaaattttggtggaaagggttctgaagctcataaagcagctgtaacaggtgatactgtcggcgatccatataaagatacagctggtcctgcagttaatccaatgatcaaaataacaaatattgttgcccttttattactttctattattgctcattaaa

SEQ ID NO: 267677 - DNA, 536 bp, Unknown
  Bacterial polypeptide expressing nucleotide sequence isolated from the Sargasso Sea
tggaatgttaccttatttatttggatcaatgggaatgcaagctgttggtagagcaggcggagctgtagttgttgaggtaagaagacaattcaaaaaatacccaggtattatgaaaagaaaacaaaaacctgactatgccaaattagtagatttattgacggtggcagcaattaaagaaatgatcatcccttctttattgccagtactttcaccagtcgtattatatttcataattctggccattggtggacaagttgcagcattagctgcagtgggtgcaatgttattgggtgtaattattactggtttgtttgttgcagtttcaatgacagcaggtggtggagcatgggacaatgctaaaaaatatattgaagacggtaatcatggtggaaaaggctctgaagctcataaagctgcagtgacaggagacactgttggtgatccttacaaagatactgctggacctgctgttaatccaatgattaaaattacaaatatagtagcattgttattgttagctgttatcgctggctaat

SEQ ID NO: 267678 - DNA, 1525 bp, Unknown
  Bacterial polypeptide expressing nucleotide sequence isolated from the Sargasso Sea
ttagcaattgctgtatattattttttattaattaaatatgaagtagacgaaagagagatagtaaatgctcttgttgctttaggatttggagcttcattaatttcaatttttgcaagattaggtggaggtatttttaccaaaggtgcagatgttggcgctgatcttgttggtaaagttgaagctggtattcctgaagatgatccaagaaatcctgcggtgattgctgacaacgttggagataacgtgggggattgcgctggaatggctgcagatttatttgaaacatatgcagttactattgttgctactatggttttatcatcaattttctttgtgggtgatcttaatatgatgatttatcctcttacaattggcgccgcttgtttattgacatctattctaggtacgttctttgttaaacttggaagagataacaatgtaatgaatgcattgtataaaggatttattgtatctgctgttgcatcattagctattctttggcctgtaacagatcatgtaattggttttacaaatgaatacactgttaatggaaatacatttaatggaatggatttatattactgcggagtaattggtttagttattactggtttattaatttggattacagaatattatacaggaacaagttatagacctgttaaatcagtagctttatcatcaacaactggtcatggaactaatgttattcaaggtttggctgtatcaatggaagcaacagcaatacctgcattaatcattgtggctggtattttaattacaaactctattgcaggcttatttggtattgcaatcgctgttacaacaatgttggcattagctggaatggttgttgccttagatgcttatggcccagtaactgataatgctggagggatagctgaaatgtctaacttggataaaaaagttagaaaaactactgatgctctagatgccgttggtaatactactaaagctgttacaaaaggatatgctattggttctgctggtttaggtgcactagttttatttgctgcttacactgaagatatcaaacatttctctaaagaagctggttctgctcttgaaggaatagttgtaactttcgatttatcaaacccttatgttgttgttggtttattaattggtggaatgttgccttacttatttggttctatgggtatgcaagctgtaggtagagcaggtggtgctgtggtagtggaagtaagaagacagtttaaaaaatttccaggcattatgaaaagaaagcaaaaacctgattatgcaaaattagttgacttgttaactgttgcagcaatcaaggaaatgataataccatcattattacccgtattatcacctgtagttttatattttattatactttcaataggtggtcaggtagctgccttagctgcagttggagctatgcttttaggagttattattactggactgtttgtggctgtttctatgactgctggaggtggcgcatgggataatgctaagaaatatatgaagatgg

SEQ ID NO: 267679 - DNA, 910 bp, Unknown
  Bacterial polypeptide expressing nucleotide sequence isolated from the Sargasso Sea
atgacaacactgcaggtattaattgttttatgcggtctagcagccgtactatatggtctagttacatctaggcaaattttatcacttggttctggaaatgataaaatgcaagaaattgctggcgcaattcaagagggagctagagcttatttaaacagacagtatatgacaatcgcgatagtaggtgttgttatttttgcgctcatatggattgtttttgatttagcatcaggaattggttttttaattggtgcttttttttctggtgctgcgggttatgttggaatgaatatatcggttagatctaatgttcggacaacacatgctgcaagtaatagcttagctgaaggtttatcagtatcatttaaagcaggtgctgtaactggaatgcttgttgcaggattcgcactactttctattgcaattttttattttgttttgcacaactctggttcatttcctggtagagagattgtagctcctttagtctctttaggatttggtgcttcattaatttcaatatttgcaagattaggcggtggtatttttaccaagggtgctgatgttggtgcagatttagttggtaaagtagaagcaggtattcctgaagacgatccacgaaatcctgctgttattgcagacaacgttggcgataatgttggtgattgcgctggtatggctgcagacctttttgaaacttacgttgttacagttgtggcaacaatggttttggcttctatttttttcatagaaaattcctatacaatgatgatcttccctttagctattgcaggtgtttgtgctttaactagtataattggtacttattttgttaagcttggaaaaaataataatatcatggcagctctttacagaggttttgctgtatcagctattttatcagcaaata

SEQ ID NO: 267680 - DNA, 886 bp, Unknown
  Bacterial polypeptide expressing nucleotide sequence isolated from the Sargasso Sea
tatggataatttaatcattccaccagttttaggcctattgggtatggtcatggcatttgtagtttacatgctagttatgaaatatcctgatggtgaagataaagtaaagaaaattggtgaccaaattcacaccggggcattaacctttatgaaaacagaatacaaatatctgtttatttttatggctgtgattgttggcttagcatggtatgcattaggtccttacactgcaatagcggttattgtaggtgctttgtgttcatcaattgcaggatttattgggatgtacgccgctactaaagcaaatgtgagaacagcgacagcagcccaaaaagatggctctgctgcagctttaacagtatctttttacggcggctcaataatgggtctttgtgtagcatcattgggtttaataggtttaggaggcttatattttttctatatacctgctgaaattgatcctcataagcttgaaggttttgctatgggggcatctgtagtagccctcttttctagagtaggcgggggaatttttacaaaaagtgcagacgttggagctgatcttgttggtaagattgaagcaggaatacctgaagatgacccaagaaatccgggtgttatagcagataatgttggtgacaatgttggtgatgttgctggaatgggttcagatatatttgaatcatattgtggttctatgatcgcatctatagctatagcttatactctaggtaacaaagatatgatgatgcttcctttagctttagcatcgactggtttaatagcgtcaataattggaatatttatagttaagcttcagtctgcaaaagcacctgcgagcgcattaagatctgggactcttttagcacccagtaatatttgtggc

SEQ ID NO: 267681 - DNA, 1213 bp, Unknown
  Bacterial polypeptide expressing nucleotide sequence isolated from the Sargasso Sea
tcttctttagcacaaggattgtcagtatcattcaaagctggtgcagtaacaggtatgttagtagctggttttgcattattatcggttgcggcatattattttattcttgataattctggaaattttgaaggaagattaatagttgctccactagtttcacttggctttggtgcttctttaatttcaatttttgctagacttggtggaggaatttttactaaaggagctgatgttggagcagatttagttggcaaagtagaagctggtattcctgaagatgatccaagaaatccagcagtaatcgcagataatgtcggtgacaatgttggagattgtgcaggaatggctgcagatttatttgaaacttatgttgtcacagttgtagctactatggttctcgcatcaattttttttacaactgaattatcttcaaaaatgatgatgtatcctttatcaattgccggtgtttgcactatagcaagtataattggaacttattttgtaagattgggaagtagtgaaaacataatgatggcattgtataaaggtttcttggtttcagctattttatcagcgatttttttatattttataactgatcatgttgtgggaatgtcaacatctctagatgcattaggtaataatataacgggtctatcacttttttattgtggtattttaggtttaattattactggcttaataatttgggttactgaatattatactggtacaaattatagacctgttcaaagtattgcgaaatcttcgactacaggtcacggaacaaatgtaattcaaggcttggctattagtttggaagcaacagctttaccagctataatcatagttgcaggtataattataacatattcaatagcaggattatttggaatagctatcgcagttactacaatgcttgctcttgcaggaatggtagttgcgctcgatgcttatggcccagttactgataatgctggaggtatagctgaaatggctaatcttgatgatagcgttagaaaaactactgatgctcttgatgcagtaggcaatacaactaaagctgttactaaaggttatgcaattggctctgctggcttaggtgcattagtattatttgcagcatatacagaagatgtatctcattatgggtttagaagtctctttttgatttatcaaatcctttacgttgtagttggcccttttactttgg

SEQ ID NO: 267682 - DNA, 1248 bp, Unknown
  Bacterial polypeptide expressing nucleotide sequence isolated from the Sargasso Sea
tatggataatttaatcattccaccagctcttggcatattgggtatggtaatggcatttgttgtttataaacttgtcatgaaatatcccgatggcgaagataaggtaaaaaaaataggcgatcagattcatgctggagctctcgctttcatgaaaacagagtataaatatttatccatatttattgcggtaatagtattactagcatggtatgcattgggaccttatacagcaatatctattgttgttggagcaatatgctcatctgttgcaggttttattggtatgtatgcagctactaaagcaaatgttagaactgcaactgcagctcaaaaagatggtccagcagcggctttatcggtttctttttatggtggttctataatgggtctatgtgttgcatcattgggtctcattggtttaggtggattatattatttctacatcccagctgaaattgatcctcataagcttgaaggttttgctatgggagcatctgttgtagcacttttttccagagtaggtggaggaatttttacaaagagtgctgatgttggagctgatctcgttggtaagattgaagctggtattcctgaagatgatccaagaaacccaggcgttattgccgacaatgttggtgataatgttggtgatgttgcaggaatgggttcagatatatttgagtcatattgcggttctatgatcgcatcaatagcaatagcttatacgcttggaaaccaagatatgatgatgcttccactggctttagctgcgactggcttaatagcttcaataattggaatatttatagttaagcttcagtctgcaaaagcacctgcaagtgcattgagatctggaactcttttagcgccagtaatatttgtggctatggcctatttcattataaatacttttgacggagttggaatgaatgtatggtggtgtgtaattgctggagctgtaggaggtgtattgattggacttattacagaatattatacaggtggaggcccagtaaagaaaattgctgaatcaggagaaactggttctgcaacagtaatgatttcaggtttatcggtaggaatgcaatcagttgtgataccaattgtcattctagccggcatcatccttacttcaactcaactatccggcatttatggtgtaggaattgccgctgttggtatgcttgcaactgttggaataactatggcaatagatgcatatggaccggttgctgacaatgctggcgg

SEQ ID NO: 267683 - DNA, 1468 bp, Unknown
  Bacterial polypeptide expressing nucleotide sequence isolated from the Sargasso Sea
atggacgcttcaattgatacaattttatattacataatatttgcaggattattatcaatcatttatggattttttactggttctaatattatcaaatcaagtccaggaaatagcaaaatgcaagaaattgcatctgcaattcaaattggagcaaaagcatatttaaacagacaatacaaaacaatagctatagtaggtgttgttgtattaattataattacatttgcatttaattacttagtcggactaggttacttaattggtgcaactttatctggtatagctggatacgtaggtatgctagtttcagttcaggccaatgttagaacagctgaagcttctagaaaagggcttgctagtggattatctgtagcttttaaatctggagctataacaggtatgttagttgctggtttagcattattgtccatagcggtttattactttattttacttaaatttggtattgatgaacgagaaattgtaaatgctttagttgcattgggatttggggcttctctaatttctatatttgctagactaggtggtggtatttttacaaagggtgctgatgtaggggcagatttagttggaaaggtcgaagctggaattccagaagatgatccaagaaatccagctgttattgctgacaatgttggagataacgttggtgattgtgcaggtatggcagctgatctttttgaaacttacgcggttacaattgttgcaaccatggttctttcttcaattttctttcatggagatataaatatgatgttgtatcctttaacaattggagctgcatgtataataacttcaattgtaggtacattttttgttaaattaggaaattcaaaaaatgttatgaatgctttatataaaggctttattgctacagcaatattgtcattagttattttatatccagtaacagaatacgttattggttttgaaaaaaactatgtagttggttctaacgtttttacaggattaaatttgtattattgtggagtgataggattaattataacagggttgcttatttgggtaaccgaatactatacaggaaccaattatagacctgttaaaagtgttgccgcttcatctacaactggacatggaactaatgttattcaaggtctagcagtctctatggaagctactgctataccagctttaataattgttagtggaattttattaacaaattatattgcaggattatttggtattgcaattgcagtaacaactatgcttgcattagctggaatggttgtcgcccttgatgcttatggtccagtaacagataatgcgggcggtatcgccgaaatgtcaaatttgcctaaaaatgttagaaaaactactgatgcattagatgccgtaggaaatactactaaagctgtaaccaaaggttacgcaataggctccgctgggttaggagcgcttgttttatttgctgcatataccg

SEQ ID NO: 267684 - DNA, 937 bp, Unknown
  Bacterial polypeptide expressing nucleotide sequence isolated from the Sargasso Sea
atgagctcatctgttgaaacaattttaatttatacaattattgctggattattatctattgtgtacggcttttttactggcaaaagtatactaagctcgagctcaggtaactctagaatgcaagaaattgcatcagcaatacaaattggtgctaaggcttatttaaatcgacaatacaaaactatagctattgttggtgtagttgtattaattataattagtattgcttttagtccattagttggtcttggttatttgattggagcaactttgtcaggaattgctggttatgttggaatgttagtttcagttcaagctaatgtgagaacagcagaagcagcaagaaaaggtttatctgctggactttctttagcatttagatcaggtgctgttactggaatgttagttgctggtttagcattattatcaatagcagtttactattttttattattgaaattcaatattgatgaaagagaaatcgtaaatgcattagttgcattaggtttcggagcatctttaatttcaatatttgcacgtttaggagggggaatttttactaaaggtgcggatgttggtgccgacttagttggaaaagtagaagcaggtatcccagaggatgacccaagaaatcctgcggtgatagctgataatgtaggtgataacgtaggtgattgcgctggtatggctgcagaccttttcgaaacatatgctgttacgattgttgctacaatggttctttctcatattttttttcatggtgaccttaacatgatgatttaccctttaacgattggtggcgcatgtattattacatcaattattggtacttatttcgtaaaacttggaagggataaaaatgttatgaatgctatgtataaaggttttattattacagcaataagttctttaataattttatatcccaataactgat

SEQ ID NO: 267685 - DNA, 1003 bp, Unknown
  Bacterial polypeptide expressing nucleotide sequence isolated from the Sargasso Sea
attttagcaagattaggtggtggaatttttaccaaaggtgctgatgttggtgcagatctagttggtaaagtagaggcaggaataccagaggatgatccaaggaatcctgctgttattgcagataatgttggtgataatgttggagattgtgctggtatggctgcagatttatttgaaacttacgctgttactattgttgctacaatggttctctcatccatttttttcatgggagatttaaatatgatggtttaccctttgacaattggtgctgcatgtttgatcacatctattgttggaactttttttgtaaaacttggaaaaaataataacgtaatgaatgctctatataaaggttttatagtatctgctatagcttcattattaattctttggccagtcactgattatgtgattggtttttctaatgaatatacaataaatgacaaaacttttaatggtaaggatttatattattgtggtgtgattggtcttataattacaggtttactaatatggatcactgaatattatacgggaacaggatatagacccgtcaaatcagtggctttatcatctacaacaggacatggtactaatgtaattcaaggattagctgtatctatggaggcgactgcaatacctgctttaattattgttgcaggaattttaattaccaattcaattgcaggactttttggaattgctattgccgtaacaacaatgttggcattagctggaatggttgtagcattagatgcttatggacccgtaacagataatgcaggtggtatcgctgaaatgtcaaatcttgacaaaaaagttagaaaaactactgatgcattagacgcagttggaaatactacaaaggctgtaactaaaggctatgctattggttctgcaggtttaggtgctttagttttgtttgctgcttatactgaggacataaaacacttttctaaagaggcaggatctgcattagaaggtattgtggtaactttga

SEQ ID NO: 267686 - DNA, 1055 bp, Unknown
  Bacterial polypeptide expressing nucleotide sequence isolated from the Sargasso Sea
acttgtaggacttttaacggaatattacacttcacatgattttaaaccggtaagagaagtagctaaatcatcagaaacaggagcagcaaccaatataatatttgggcttgctttggggtatcacagtgcaactggctcgattttgttacttgcaattagtattttcgtacctttcacgcttgcaggtatgtacggtgtagctatagcggctataggcatgttaagcaccctggtagtcggtctgacaatagacgcatacggaccagttgccgacaacgctggaggaattgctgaaatgaccggtatgggcgaaaacatacgtgacagaacagacgtgctggattccgccgggaatactaccgctgcaataggaaagggttttgccattggttctgctattttaacatctttggctctcttttcagcttttctgactagggccgatcttctggatccagaggcaaatataatggagagcataaatctacttgaccctcttgttttgacagggctattcgtaggggcaatgttgccattccttttctcagcaatgacgatgaagtctgttggcaaagctgcatttgacatgattgaagaagtacgcagacaattccgtacaattccaggaattatggacggtaaagctgaaccagattatgagaaatgcgtagagatttctacagcagctgctttgcgggaaatgatacctccaggtatactgattatggggactccccttcttgtggggttcctttttggagtgccagcagttgcaggtattttggcaggctcactggtttccggtggtgtacttgcaatctcttccgcaaactctggaggtgcgtgggataatgcaaaaaagtatattgaaaaaggtaatttcggaggtaaaggtacagaaacacataaggcagctgtagttggagacactgtgggtgacccttttaaggacacctctggtccatctcttaacatacttataaagctatctgcaatactcagtctggtttttgttccatttttcattaactatggagggttactaaccagttgat

SEQ ID NO: 267687 - DNA, 1612 bp, Unknown
  Bacterial polypeptide expressing nucleotide sequence isolated from the Sargasso Sea
ttactctagtatctacaacatagattccgcaaatataactactgtattaaatatattatctggattttctcttggagcatcatccatcgctctgtttgctcgtgttggtggtgggatttacacaaaggcagcagatgttggtgcagatttagttggtaaagtggaagcaggaatccctgaagaccatcctcttaatccagcaacaatagctgacaatgtcggagataatgttggagatgttgctggcatgggagccgacctatttgaatcctatgtcggttcaataataggatcaatggtgctcggttcgagcatacttgctttaggggggtttgatattaatttcattttattacctttgttgattgccgcttcaggtattattgtatccattatagggacctttatggtttcggttaaagagggcggagatccgcaaacatccctaaatagaggggagtttggtagtgcatttattatgattgctgtaatctatacgttaattcaaaaatttcttccagccgaattcactcaaggaggagagccttttaccagcatgggtgtcttttatgccacggttattggtttgctagctggtcttggaattggcctcattactgagcattatacaggcacaggcacatcgcccgtaaaagctattgctcaacaatctattactggaccagcaactaacataatcgcgggcttaggggtaggtatgcaatctaccgcggtcccaattttaatcattgcctctagtatcattggagcgtttcactttgcggggctttatgggattgctatggctgcattaggtatgttggcaaatactggaatacaattagcagtagatgcttatggccctatatcagataatgctggtggtatagctgaaatggctgagttaccagaagaagttcgtgagcgtacagataaacttgatgcagttgggaatacaactgcggctataggtaaagggtttgctattggttctgcagcattaaccgctcttgctttatttgctgcttttatggttcaaagtgatattgaaaaaattgatattgcagatccctgggttatggcaggtttatttgttggaggtatgttgccttttttgttttcctcaatggcaatgggtgctgtaggtagagccgctatggcaatgattgaagaagttaggcgccaattcagagagattccagaacttaaagaagcgcttgggttaatgaatctaaaaaaagaaagtgattggacagaaagtgatagaagtatttatgaaggtgcattaagtaaagctgagcatggccgttgtgttgctatttcaacagagtctgcaattaaagaaatgatagcgcccgggcttttagctgtgattactcccgtggttgttggaatactttttggagctgaaactcttggtgggctgttagcaggtgtcacggtttctggagtactaatggctatttttcaatcaaatgctggaggagcttgggataacgcaaaaaaaatgatagaagaaggtataagcgttggaggtgaaactttaaacaaaggatcggaagctcataaagcttcagttgtggagatacagttggagatccatttaaggata

SEQ ID NO: 267688 - DNA, 895 bp, Unknown
  Bacterial polypeptide expressing nucleotide sequence isolated from the Sargasso Sea
tatggactataatatgatatttgttttagccgctggggtgctagcgcttcttttttccgtttggaagacccaatggatagaggcgcaagaccaagggacggaaaaaatgaaagtaataggttctagcatagcagaaggagctatggcatttttgaaagcggagtatcgtgtgctaactgtgtttgttatagcagtagcgattcttttgggcatagcaaatagtaatcgtgaagattcaagtatactgatttctctttctttcttggtaggtgcgcttacatcgggcctcgcaggttttcttggaatgaaggtcgcaactaaagctaataatcgaaccacaaatgcggctagggagggattagcaaaagcgcttaacgtagcatttagtggaggttctgtgatggggctaagcgtcgttggccttggagttttagggttgggaggtctttttttattttactctaacttgtataatgtagaccacacaaatataaccactgtattaaacatattatctggcttttctcttggggcatcttctattgccttatttgctagagttggtggaggtatatatacaaaagccgcagatgttggtgctgatttagtagggaaggttgaagctgggatacctgaagaccaccctcttaatcctgccacgatagctgataatgtgggagacaatgtaggggatgttgctggtatgggagctgacttattcgaatcttatgtcggatctataataggctctatggtccttggttctagtattgttgttgccggtgcagttggggggtttgatattaactttatcttactacctcttttgattgctgcatcaggaattattgtatccattgttggaacttttatggtatctgttaaagaaggtgga

SEQ ID NO: 267689 - DNA, 340 bp, Unknown
  Bacterial polypeptide expressing nucleotide sequence isolated from the Sargasso Sea
ttgccagttttatcgccaattattttatattttataattttacaaataggtggtcttgaagccgctctttcttctttaggcgcaatgttattaggagttataataactggattgtttgtagctgtttcaatgactgcaggaggcggagcttgggacaatgctaaaaaatacattgaagatggaaattttggcggaaaaggttccgaagctcataaatctgcggttaccggcgacacggttggtgacccttacaaagacacagctggtccagcagttaacccgatgataaaaattactaatattgtagcactattactactagcagtaattgctcattaat

SEQ ID NO: 267690 - DNA, 1693 bp, Unknown
  Bacterial polypeptide expressing nucleotide sequence isolated from the Sargasso Sea
ctgcctattgaggtaattattccaattcttgccgcaattgcatcatttgcagttgcagccggatatactggttgggttgccaaacaaaaccctggtacaaaacaaatgcaggaaatatctgaagccgtaagagttggtgcagcagcatttttgagacgtgaaatgagaattattgttccaatagcaattggattatctgtcataattggattcttcattggtgattcaaacggaatcgcttttgcagtaggtgcaacactttctgcagtggcaggatttatctcactaaaagttacagtaaaggctgcagtaagagcagcacatgcaacaggttccggtttaggaaaaacttttgctattacatttagaggcggtgcaacagtaggtcttgcagttcctgcaatggcattagctgcaaccgcaattttgtatatgatttatccaaacccaattactattgccggtatcggaattggtgcaagtctaattgcattgttcattagaatcggtggtggaattttcacaaaggctgcagatatgggtgcagacttggtaggaaaagtagaagcaaacattcctgaagatgacccacgaaaccctgctacaattgcagataacgtaggtgataatgttggagatgcagcaggcatgggttcagatgtatacgaatcatacattgtaacaattttggcatcattactaattgcagcactaatcggttcaccagaaaactttgcatatccaatcttaattggagcatctggattagtcgcatcaatcattggtacagcaacaattggttcaagaaagattactgatgttatgaagccactgaatatttcattttatgtttcagcagcaatagcaattgcactaaactttgtattcactcagatagttttaggcgatactccaattgcttatgcactatttggcgctacagttattggtgtaattctggttccagttatacaaaaaattacagactattacacaaacgcaaactcaaaacctgttagagaaatatctgaatctgcaaagtggggttatgcatcattaacattaatgggaattatcaaaggattacaatcaactggaccattcatgattgcactagttgcagcaattatcatttcatttgcaattacatctgcagcagcaccagaaggtaccgacccattactatacggaatctttggtacatcactaactgcaatggctatgctatctcttgcaggaattgttctttcaattgacgcatttggtccaattgcagacaatgcaggcggtattgtagaaatgacagaaatgggtgaagaaaatcgtaaaatcactgatgaaattgacgcagtcggaaatacgacaaaggctgtaaccaaaggctttgcaattgcaagtgcagcactagcagcattagcaatgattcaagcattccaattcgaagcatcacactatttccaagacatggtaattgattatggtctatcaaacccatcagtcattatcggattattagttggtggattaattccatttatcatcacaggccaattaatcagcggcgtagaacgtgcagcaaagaaaatggtctatgaagtaagaagacagttcaaagaagatcctgaaattttaaccggtaaatcaaaaccagattatgcaaagtgtgtagacgtagcaacacttgcatcaattg

SEQ ID NO: 267691 - DNA, 1503 bp, Unknown
  Bacterial polypeptide expressing nucleotide sequence isolated from the Sargasso Sea
tatgagcggaacagtcgaaacaatactattatacacaattggagctggtttattatctatcgtttatggatttttaactggtaaaaatattcttaattcaagtgcaggaaatgcaaaaatgcaagatattgcatctgcaattcaaattggtgcaaaagcatatttagcaagacaatataaaactattgctattgttggtgctgtagttttagtaattgtgagtattgcatttagtccactagtaggtcttggttatttaataggtgctgctttatcaggtattgcagggtacgttggaatgttagtttctgtagaagctaacgtacgaacagcagaagcatctagaaaaggtttagctcaaggtctatctgttgcatttaaatctggtgctgtaactggaatgttggttgctggtttggcgctattatctatagctgtttattattatatattattaaaatctgaagtagatgaaagagaaattgtaaatgctttagttgcattaggttttggagcatcattaatttcaatttttgcaagattaggtggtggaatttttacaaaaggtgcagatgtaggtgctgatttagttgggaaagttgaggctggaattccagaagacgatcctagaaaccctgctgtaatagcagataacgttggtgacaacgtaggagactgtgctggtatggctgctgatttatttgaaacatatgctgttacaattgttgcaacaatggttttatcttcaattttctttgttggtgatctaaacatgatgatttatcctttatctattggtgctgcatgcttgttaacatctattgttggaacatttttcgttaaacttggtagaagtaataacgttatgaatgctttatataaaggatttgttgtctctgcagtagcatctttagtaatactatggcctgttactgatcatgtaattggttttacaaatgagtacacaataaatgataagacatttaatggaatggatctatattattgtggtgtcatagggctagttattactggattattaatttggattactgaatactatacaggaacaagttatagaccagttaaatctgttgcgttatcatcaacaactggtcatggcactaatgttatccaagggctagctgtttctatggaggcaactgcaataccagcattaataattgttgctggaattctcattacaaattctatagcaggactttttggtattgctattgctgtgactactatgcttgctttagcaggtatggttgttgcattagatgcttatggaccagtaactgataacgctggtggtattgccgagatgtcaaatcttgataaaaaagttagaaaaacaactgatgctttggatgctgtaggaaacacaaccaaagctgttacaaaaggttatgcgattggttcagctggtttaggtgcgttagttttattcgctgcttacacagaggatattaaacatttttcaaaagaagcaggttc

SEQ ID NO: 267692 - DNA, 1555 bp, Unknown
  Bacterial polypeptide expressing nucleotide sequence isolated from the Sargasso Sea
atgcaagatattgcatctgcaattcaaataggtgcaaaagcttacctggcaagacaatacaaaacaattgctattgttggtgctgtagttttagttattgtgagtattgcttttagtccattagtaggtcttggatatctaattggtgctgctttatctggtattgcaggatacgttggaatgttagtttctgttgaagcaaatgttagaactgccgaagcttctagaaaaggtctcgctcaaggtctttctgttgcatttaaatctggcgctgtaactggcatgttggttgctggtttagctttattagcaatagcagtatattattttttattacttaaatacgaagtagatcaaagagaaattgtaaatgctctagttgctttaggctttggagcttctttaatatctatctttgcaagattaggtggaggtatttttacaaaaggtgctgatgttggtgcagaccttgttggtaaagttgaagctggtatccctgaagatgatccaagaaatcctgctgtaattgcagacaacgttggagacaacgttggagattgcgctggaatggctgctgatttatttgaaacatatgcagttactatcgtggctactatggttttatcatcaattttctttgtgggtgatcttagtatgatgatttatccacttacaattggtgccgcatgtcttttgacatcaatcataggtacattttttgttaaattaggaaaaaataacaatgtaatgaacgcattgtacaagggatttattgtatctgcagttgcatcattagttatcctttggcctgtaacagatcatgttattggttttacaaatgaatacacagttaatggaaatacattcaatggaaaggatttatattactgtggtgttattggtttagttattactggtttattaatttggattacagaatattatacaggtacaagctatagacctgttaaatcagtagctttatcatcaacaactggtcatggaactaatgttattcaaggtttagctgtatcaatggaagcaacagcaatacctgcattaatcattgttgctggtatcttaattacaaattctattgctggacttttcggtattgctatagctgttacaacaatgctggctttagctggaatggttgtagcactagatgcttatggtccggtaactgataatgctggaggtatagctgaaatgtctaacttagataaaaaagttagaaaaaccactgatgctctagatgctgttggtaacactactaaagctgttacaaaaggatatgctattggttctgctggtttaggtgcgcttgttttatttgcagcttacactgaagatatcaaacatttctccaaagaagcaggttctgcgcttgaaggtatcgttgtaacttttgatttatctaatccatatgttgttgttggactactgattggtggaatgttaccttacttatttggatcaatgggaatgcaagctgtaggtcgagcaggaggagctgttgtagtggaagtagaagacaatttaaaaaatttcc

SEQ ID NO: 267693 - DNA, 1372 bp, Unknown
  Bacterial polypeptide expressing nucleotide sequence isolated from the Sargasso Sea
atgttagaaagttatcttgctgtaccaccaatgctcggtgttttgggcttattagttgctttgggtatatatcttgttgttactaggtttcctgaaggagatgagagtgtaaagaaaatcggtgaccaaatacatcttggtgcaatgacctttatgaagaccgaatatacctacttaagcatttttgcattaatagttatagttttagtatggttttccttgggcgaaggaacagcaatagctgttttcgcaggggccttatcttcctctgtggccggttggataggtatgtactctgctactaaagcaaatgtaagaacagcaacagctgcttctgactccggtgctgaagcagctttatccgtagctttttatggcggttcgatcatgggtctttgtgtagcttcactcggtttgattggcctgggaacgctcttttatatattaagtggtgacgcacattcaattgaaggttttgcgatgggtgcatctatcgtggctctattttcaagagttggtggagggatctataccaaaagtgcagatgtcggcgcagatctagtgggcaaagtagaggctgggattccggaagatgatccaagaaatcctggagtgatagctgataatgttggagataatgtaggtgatattgctgggatgggctcagatatttttgaatcttattgcggttcaatggtggcttgtatagcaatagcgtcaacttatctcataacttctgaattttctcaagcagacaaagatggaatgatgttcttacctttggcattggcttcaataggtttgatagcgtctattctaggaattgtaattgttagactgttttctaagtcttcacctgcaaatgcaatgagatggggcaccatgggtgcgccacttatttttatcatagcggcttattttttaactaatgctctagttggaacgaatggttttgatgtttggttggctgttgtttgtggttcagtaggtggaatagctattgggttaattacggaatactatactggctctagcccagtaataaagatcgctgaatctggccaaactggctctgcgaccgtaatgatcacaggactttcagtaggtatgcaatctgtggtactacctatagcttgcattattctcattatttatatttcaactgaattaactggcctttatggtgttggtattgcagcggtcggtatgttgtcgactgtaggtataaccatggctatagatgcttatggacctgttgcagacaatgctggagggatagcagaaatggcaggtatgccttctgagactagagtaattacagatgaattagatgagcaaggtaatactaccgctgccattggtaagggtttcg

SEQ ID NO: 267694 - DNA, 985 bp, Unknown
  Bacterial polypeptide expressing nucleotide sequence isolated from the Sargasso Sea
atgaataactatttagaattactatacttaatatcattcacaggaattctcgctgtagcatatagctatctattatcaggtcaaattctttcatcaagtccagggaataatagaatgcaagaaatagctgaagcaatacaggtgggtgcaaaggcatatctaaaccgtcagtacaaaacaatagctgttgtaggtattatagtattagcaatcgtaacctatttttttaattatcttgtaggcttaggttattttattggagcatttttatctggagttgccggatatgttggcatgcttatttctgttaaagccaatgtaagaaccgcagaagcatccagaaaaagtttacaagccggtttaacaattgcttttaaatcaggtgcaataacaggtttgttagttgctggattggcattattagctattacaatttattatataatattaattgaattggatgtagatagcagagaaatcattaatgctttagtcgcattaggctttggagcatcgttgatttcaatttttgctagattgggtggtggtatatttactaaaggggctgatgttggagctgatttagttggtaaagtggaagctggcattccagaagatgatccaagaaatcctgctgttatagctgataacgttggagataacgttggcgactgtgcaggaatggctgcagatttattcgaaacatatgctgtaacaatcgttgctactatggttttagcatctatattttcacctcaggattataatctgatgatttatcctttagctataggtggtgcatgtataattacttcaatagtcggcacatggtttgttaaattaggtaaaaataaaaatatcatgggagcactttataaaggatttatagtaacagcagttacatctttgttaattttgtacccagttacagacgctattgttggattaaaaagtacttataataataatgcaggggcaatttttt

SEQ ID NO: 267695 - DNA, 799 bp, Unknown
  Bacterial polypeptide expressing nucleotide sequence isolated from the Sargasso Sea
ggaggtatagcggaaatggctgatctaccagatagtgttagaaagactactgataatttagacgcggtcggtaatactacaaaggcggttactaaaggctatgcaataggatctgcaggactaggagcacttgtactttttggagcttatagagaagatctagattactttataagtaattcagagagttatccttattttgcaggtttagatattagtttttccttagataatccttttgttataatagggcttatatttggaggattactaccatttttgtttggtgctatgtcaatgacagctgtaggcagggctgcttcttcagtggtactagaagttagaaaacagttttccgagaataaaggtataatgactggaaaaactaaaccaaattatgaaagaacggttgatttattaactaaatctgcaattaaggagatgattgttccttctttacttccagttcttgctccaataatattttattttgtaatagaattagttgctagtagggaagatgcatttatatctttaggtgcaatgcttttaggggtaatagtaacaggtttatacgttgcaattagcatgacttcaggcggaggagcctgggataatgcaaaaaaatatatagaagacggaaatcacggaggaaagggttcagatgctcataaagctgctgttactggagatacagtgggagatccttataaagatacttctggtccagccgtaaatccaatgattaaaattactaatatagtggctctgttattattagcatttttatctcattaac

SEQ ID NO: 267696 - DNA, 784 bp, Unknown
  Bacterial polypeptide expressing nucleotide sequence isolated from the Sargasso Sea
atgttggcactagctggaatggtcgttgctttagatgcttatggcccagtaacagacaatgcaggtggtattgcagaaatgtcaaatcttgatgagaatgtaagaaaaactactgatgccttagatgccgttggaaatactacaaaagctgtaacgaaaggttatgccattggttcagcaggtttaggtgcgcttgttttatttgcagcatatgtagaagatttaaaattaataccagaattaacacctaatttcagccttgaaaatccttatgtagttgttggattacttattggaggccttcttccttacttgtttgcatcaatgggaatgatggccgttggaagagctggaggtgccgtggttgaagaagtgagaaaacaatttgctgataacccaggaataatgactggagaatcaaaacctgattattctcgttctgttgatatgttgacgaggtctgcaattaaagaaatgataattccatcaatgcttcctgtcctatctcctttagttctttttttcataatctcaattgttgcagaccagaatgctgcagtatctgctgttggtgcaatgctgctaggagtaatagtcacaggaatatttgttgcaatttccatgactgctggtggaggagcttgggataatgcaaaaaagtatgttgaagatggaaactttggaggtaaagggtctgaggctcataaagcggctgtaactggagatactgttggtgatccatataaagatactgcagggcctgctgttaaccccaatgattaag

SEQ ID NO: 267697 - DNA, 631 bp, Unknown
  Bacterial polypeptide expressing nucleotide sequence isolated from the Sargasso Sea
gctaattatctgggttactgaatactatacaggcactaattatagacctgttcagagtattgctcaatcatctacaactggtcatggaacaaacgtcattcaaggactagcaattagtttagaagctacagcattgccagcattaataattgttgcaggcattatctcaacttattcattagctggtttatttggtatcgcaattgcagtaactactatgttagctcttgcaggaatggtagttgcccttgatgcttatggacctgtcacagacaatgcaggtggtatagctgaaatgtctaatttagatgaaaatgttagaaaaactacagacgcacttgatgcagttggaaacacaactaaagctgtaactaaaggttatgcaattggttccgccgggctaggggcattagtattgtttgctgcctacactgaagatcttgatcatttcgctaaagactcaagtagcccattgtatggaattgaagtatcatttgatttatctaacccatatgttgtagtcggcttattacttggtggtttattaccttttctatttggtgctttaagtatgactgctgttggcagagcagctggatcagttgtattagaagtaagaaggcaattttaa

SEQ ID NO: 267698 - DNA, 799 bp, Unknown
  Bacterial polypeptide expressing nucleotide sequence isolated from the Sargasso Sea
aatgctggaggaatagctgagatgtccaatcttccaaaaaatgtaagaaaaacgactgatgctcttgatgcagtaggaaacactactaaagctgttaccaaaggatatgcgataggatcagctggtctaggggctttagtattatttgcagcttataccgaggacattaagtttttttcaaaaatttccggttcttcactagagaatgtttctgtaaattttgacctatcaaacccttttgttgtaattggtctactaatagggggtatgctgccttatcttttcagttccatgtctatgcaagcagttggtagagcaggaggagctgtagtaatagaggttagaagacaatttaaaaaaattccaggtattatgaaacgtaaaaaaaaacctgactatggaagactagttgacttgcttactaaagccgctatcaaagagatgataattccctctttgcttccagttttgtctccaataatattgtattttgtaattttgcctataggtggattagaagctgctttatctgctgtaggtgcaatgttattaggtgttatagtaactggactttttgtagcaatatcaatgaccgcgggcggtggagcttgggataatgcaaaaaaatatatcgaagatggtaatctcggaggaaagggttccgaggcacataaagcagcagttactggtgatacagtaggcgatccttacaaagatacagctggtcctgcagtaaatccaatgattaaaataactaatattgtcgctttattgcttttagctgttattgcacattaaa

SEQ ID NO: 267699 - DNA, 457 bp, Unknown
  Bacterial polypeptide expressing nucleotide sequence isolated from the Sargasso Sea
gacgacagtttcgagagaagccagagatcatgaaaggaccccaagaacccgactatgcgctccctgtgaaatcagcacgaaggctgctcaaaggaaaatggtgtgcccatcatgtttggcgcttcttgtgccaatcgtttccggtctgttgctggtgtcgggtggagtcatgggtcttttggttggtggtctgacaagtggtttttgcgttgctgtgtttatggccaatgcaggtggtgcatgggacaatgcaaaaaaacacatcgaaagtggcgtccatggagggaaggggacagatgcccacaaggccgctgttgttggggacacggttggcgatccgtttaaggatacgagcggtccgagtctcaatattcttatcaaattgatgagcatggtcagtgttgtggttgctggcttaattgtgcgttactcattggaagccatgggcattttctag

SEQ ID NO: 267700 - DNA, 1306 bp, Unknown
  Bacterial polypeptide expressing nucleotide sequence isolated from the Sargasso Sea
atgggcgcagatctttttgagtcgtatgttggttcaatgattggagctatggttttagctgctactgcaggagaaaaaagcctagtatttttaccactatttttggccgcagcaggaattttagtttcaatatttggtacattttttgtaaaaactaaagagggcggcaatccacaaacagcacttaatattggagtttttggttcaggagctgttatgacaattgtgagttattttttaattggtaagcttattgaaaatccagtagcactggctgatgggtatcaaaatgtacaagctttagacctttttcttgcaactgttgttggtttagtgtctggtattttgattggagttttaactgaatattatacctctgatcatcaaaaaccttctcagaatgtagcagctgctagcgaaacaggttcagccactaacattatttctggcttagctaatggtatgttttctactgcattaccagtgttagtaattgcaatgtctatattaggagcatatcattttgctcatctatatggaattgctttagctgcattgggtatgttatcaacaattggaattcagttagcagttgatgcttacggaccaattgctgataatgcaggcggtattgcagagatggcagaacttccaaaagaagtacgtgaaagaactgataagcttgatgcagttgggaatacaacagcagcaattggaaaaggctttgctattggttctgctgcattgacttcattagcactttttgcagcatttagagaaacagttggagggcttactttagatatcaataatccatatgttatggcaggactattaattggttcatctttgccatttgttttctcagcactagctatgcaggccgttggggacgctgctttcgagatgattgaagaggtaagaagacaatttagagaaatcaaaggcttgcttgatggaaaagctaaacctgattatgctaaatgtgttgatattgctacaacagcagctatcaataaaatggttcttcctggcgctttagcagtctttacaccaattgtttttggactagtattaggacaaaaggaaatgcttggaggtatcttggctggagttacagtaaccggggtattattggctatatttatgtccaatgctggcggatcatgggataacgcaaaaaaatatattgaagctggtaagcatggaggaaaaggtagtacagctcacaaagcagcagtggttggtgatactgtgggtgatccttttaaagacacagcaggaccatcattaaatattttaatca

SEQ ID NO: 267701 - DNA, 235 bp, Unknown
  Bacterial polypeptide expressing nucleotide sequence isolated from the Sargasso Sea
aatggctatcttccaatcaaactccggtggggcatgggacaatgcaaaaaaaatgatagaagaaggttttgttgttaatggtcaagaaatcaaaaaagggtcagaagcccataaagctgctgttgttggagatacagtaggggacccgtttaaggacacctcggggccatcgttaaatattttaattaagttaatgtcagtggtgtctttagttattgcgccgctaattaaataa

SEQ ID NO: 267702 - DNA, 2107 bp, Unknown
  Bacterial polypeptide expressing nucleotide sequence isolated from the Sargasso Sea
atggaagcttcagcatcaaatatacttcaacttattattttagcaggtttattgtcaatcgtttatggttttttcacaggtaaaaatattttgagttctagcgctggtaacaataaaatgcaggaaattgcttctgctattcaagttggtgctaaggcttatttaaatagacaatataaaactattgctattgtaggtgttgttgttttagttataattagtttttcatttagtattttagttggtctaggctatttaataggagcagctttatctggaattgctggatatgttggtatgcttgtatcagttcaagcaaacgttagaactgcagaggcatcgagaaaaggtttatcacaaggactttcaattgcatttaaatctggcgctgtaacagggatgttagtagcaggtttagctcttttatcgattgcagtttattattatctactattatcttttggagttgatgaaagagaaatagtaaatgctttagttgctctaggatttggtgcctctttaatttcaatttttgctagacttggtggtggaatatttaccaaaggcgcagacgtaggtgcagatttagttggtaaagtagaagcaggaatcccagaagatgaccctagaaatcctgcagttattgcagacaatgttggtgataatgttggagattgtgctggtatggcagctgatttatttgaaacttatgcagtaacaatagttgctactatggttttatcctcaatattctttcatggagatcttaatatgatggtttatcctttatcaataggaggtgcatgcatattaacatctatcattggaacattttttgtaaaattaggtaaatctaaaaatattatggctgctttgtataaaggatttattgtaacagctataacatcattaataattttatatccaattactgattatgttctaggactagaaaatacttatacaatttctaacaaatcattcacaggaatgagtttatacatttgtggagcaattggattagttataacaggtttattaatatgggttacagaatattatactggaactaattacagaccagttaaaagtgttgcatcttcatcaacaactggtcatggtaccaatgtaattcaaggactagcagtttcaatggaagccacagcaattcctgcgttaataattgtgggtggaatattattaacaaactatatagctggactttttggcatagcaatagcagttacaacaatgctggcactagcaggtatggtagtagctttggatgcatatggacctgttacagataatgctggcggaattgcagaaatgtctaatttgccaaaaaatgttagaaaaacaacagacgcattagatgctgtaggaaacacaactaaggctgttacaaaaggttatgcaataggatctgcaggtttaggagcactagttttatttgctgcttacactgaagatattaaacatttttcaaaggtaactggatcaaaattagaaggaattgttgtaacatttgatttatcaaatcctttcgttgtagttggtttattggtaggaggcatgcttccatacttgtttggttcaatgggtatgcaagcagtaggtagagctggaggcgccgtggttgttgaagtaagaagacaatttaaaaaaataccaggtattatgaaaagaaaagcaaagcctgattatggtaaattagtagacttgttaactaaggcagccataaaagaaatgattataccttctttactgcccgttttgtcaccaatagttttatatttgtttattttaccaatcggtggtcaagtagcagcattatcatcagttggagccatgttattaggagtaattataactggattatttgtagcaatatctatgacagctggtggaggtgcttgggataatgcaaaaaaatatattgaagatggtaactttggtggaaaaggttctgaagcgcataaggcagcagttactggtgatacagttggtgatccatataaagatactgcgggaccagcagttaacccaatgattaaaattacaaatatagttgcgcttttacttttagcagtaattgcaggttaaa

SEQ ID NO: 267703 - DNA, 1381 bp, Unknown
  Bacterial polypeptide expressing nucleotide sequence isolated from the Sargasso Sea
gttttagcatcaatattttttacagaaaattcttatacaatgatgatatttcctcttactattgcaggagtttgtgcattaactagcataatcggaacttattttgtcagacttggtaaaaataataatattatggcagcactttatagaggttttgcagtttcagctattttatctgccgtattattgtacttcgttactgattacatagttggtttaaataatgttttagttgttgagggttcatccactcaatttacaggaatgtcactttttatttgcggtttacttggattaataattacaggcttaataatatgggtaaccgaatattatacaggtactaactatcgacctgttcaaagtattgctcaatcatcaacaactggtcatggaacaaatgtaatacaaggtctggcaataagtttagaagcaactgctttacctgccttaatcattgttgcaggaataatttcaacgtattctcttgctggattattcggtatcgctattgctgttactactatgttagccttagctggtatggtagttgcattagatgcatatgggcctgtaacggataatgctggtggtattgcagagatgtctaacttagatgaaaacgtaagaaagacaactgatgcacttgatgcagtaggcaatacaactaaagctgtaaccaaagggtatgcaattggatcagcaggtttaggagcgcttgttttatttgcagcttatactgaagatcttgatcattttgctaaagatccaagtagtcctttatatggaatagaagtttcatttgatttatccaacccctatgtagttgttggtttattgcttggagggttattaccttttttgtttggagctcttagcatgactgcagttggtagagcagctggttctgttgtattagaagttcgaagacagtttaaagaaattcctggtataatggaaggtaaaggaaagcctgaatatggtacatgtgttgacattctaacaaaatctgcaattaaagaaatgatcataccatctatgttgccggttttatctccaatagttgtgtattttgctatattatttattgcagggcaatcagcagcattatcatgtttaggagcattattgcttggagtaattattacagggttatttgttgcaataagcatgactgctggaggaggtgcctgggataatgcaaaaaaatatattgaagatggtaatcatggtggaaaaggtagtgaagctcacaaggcagcagtaactggagacaccgttggagatccatataaggatacagccggtccagcagttaatccaatgattaaaattacaaatattgtagctcttttacttttatccgcaatatcactttaaa

SEQ ID NO: 267704 - DNA, 1313 bp, Unknown
  Bacterial polypeptide expressing nucleotide sequence isolated from the Sargasso Sea
ttatgttggtatgttagtttctgttcaagccaatgtaaggactgctgaagcttctagaaaaggtctttctgaaggtttatctgtagctttcaaatctggagcagtaacaggtttattagttgctggattagcattattagctattgcagtttattattattttttattaaaatttaatgttgacgaaagagaaattgttaacgcacttgttgcattaggttttggtgcatctttgatatctatatttgcaagattgggtggtggtatttttactaaaggagcagatgttggggctgacttagttggtaaagttgaagctggtattcctgaagatgaccctagaaaccctgcagtaattgcagataatgttggtgataatgttggtgactgcgctggaatggctgcagatttatttgaaacttatgctgtaactattgtagctacaatggttttatcctcaatatttttctatggagatcttaatatgatgatttatccgcttactataggtggtgcttgtattttaacatcaataataggaactttttttgtaaaacttggcaaagataaaaatgtaatgaatgcactttacaaaggattcatagtttctgccgtaacgtcattaattattttatatcctgttacagatcaggtaattggttttacaaatgaatacactgttaataataaaacttttaacgggatgaatttatattattgtggtgtaattggattaattattacaggattattaatttgggtaacagaatattacactggaactggttatagacctgtaaaatctgttgcttcatcatcaacaactgggcatggaacaaatgttattcaaggtttggctgtttcaatggaagctactgcaattccagcgttaattattgttgcaggtattttaattacaaattcaattgctggtctttttggtatagctatagctgttacaactatgcttgctttagctggtatggttgttgctttagatgcttacggtccagttacagataatgcaggtggtatagctgaaatgtcaaacttagataaaaaagttagaaaaaccactgatgctttagatgctgttggaaatactactaaagcagttacgaaaggttatgcaattggttcggctggcttaggtgctctagttttatttgcagcttatacagaggatataaaacatttttctaaagtatcaggatctaaattagaaggcattgttgtcacttttgatctatcaaatccctatgtttgttgtgggactgttaaattggcggtatgcttccatatctatttggttc

SEQ ID NO: 267705 - DNA, 885 bp, Unknown
  Bacterial polypeptide expressing nucleotide sequence isolated from the Sargasso Sea
tggcgccggtactgttcctggctgccattatcttcgtctcgaccaatctcgctggactttacggtgtgggtatcgccgcggtgggcatgctcgctactgtcggcgtcactatggcaatcgatgcatacggccccgttgctgacaacgcaggcggtatcgcagagatggccggcatgggcgctgacacacgcgaaatcaccgatggtctggatgaggtgggtaacaccactgcagcgattggtaagggttttgccattggcgctgcggcgctggcagcactggccatcatcgcagcgttcgtagagaccgtgacggtcaacaacccggactttgatttgcagctgtctgatccagaagtgctgatcggtatctttatcggcggcacaattcccttcctgattgcttccatcaccatgacagcggtgggcgatgcggcttttgacatgatcaacgagattcgtcgccagttccgagagattccgggcctgttggaaggcaacgccgagccggacaccgcgcgctgtgtggatattgcgacgaccgctgcgctcaagcggatggtggtccccggtgcgattgctgtactggcgccagtggtcgtgggctttgggctcggtgcgacctcgctgggcggtatgttggcgggcggcctgttgggctgcgtcctgatggcgctgatgatggccaacgctggcggcgcctgggataatgccaagaagtacatcgaaaagggcaacctcggtggtaagggttccgacacccacgccgcggcagtcgttggcgacaccgtcggcgaccccttcaaggatacctccggcccgtcgatgaacattctgatcaacgtaatggctatcgtgagtctggtgattgcaccgctgctctgat

SEQ ID NO: 267706 - DNA, 601 bp, Unknown
  Bacterial polypeptide expressing nucleotide sequence isolated from the Sargasso Sea
tctttgacactttttgttgcttttgctgcagcagccaaaattaattcggttaatttgctggaatacaaagttgtttgcgggcttctacttggaggaatggtaccttatttatttggtgctttaacaatgggggcagtaggaagatcagcagaaaaaatggttcaagaagtaagaaggcaattcaaagaaatagctggaatcatggaagggaaagctgagccagattatgcatcctgtattaaaattagtactgatgcatctttaaaagaaatggttttgcctggtattcttgcagttgtttgtcctatagttgttggatttgcattaggtcctgcgggcttagcctcatttttaggtggtgctcttatttcaggaattacattagcattaatgatggctaattctggcggagcatgggacaatgcaaaaaaatatattgaagaaggaaataaaggtggaaaaggatctgaagctcataaggcagccgttgtaggcgatacaattggtgacccatttaaagatacttctggtcctgctatgaacatattgatcaagcttatgacaatagtttcacttgtagttgcaccaatatttctataaa

SEQ ID NO: 267707 - DNA, 1144 bp, Unknown
  Bacterial polypeptide expressing nucleotide sequence isolated from the Sargasso Sea
atgagtattttgaatttaattatcttctcgggaattctttcaatagtatatggattctgggcaggaaattcagtcttaaaatcaagcgctggtaacgagaaaatgcaagaaatctcatcagcaattcaaataggagctcaagcatacttaaacagacaatacactacaattgcaattgttggcgctgtaatttgtatacttttatttcttttctttcgagatttatgggttgttggaggatatttgattggagcaatcttatctggtgcagcaggatacatcggtatgattatttcagtaagggctaatgttagaacagcacaggcagcaaatgaaagtttaggaaaaggtttaaatgttgcatttaaagctggtgcagtaacaggtatgcttgtagcaggcttagccttactttctatttctgtttattattatctacttgaagtcaactctgtttctgaagaaacactaaaacatgctttagttgctcttggttttggtgcgtctctaatttcaatctttgcgagattaggtggaggaatatttacaaaaggtgctgatgttggcgctgaccttgtcggaaaagtagaagcaggtattcctgaggatgatccaagaaacccagctgttattgcagataacgtaggtgacaatgttggtgattgtgctggaatggcagcagatttatttgagacttatgcagttacaattgttgccaccatggtattggcaactattttttttagtggcgaaacagcacaaatgatgactctatatcctatggctataggaggcagttgtttagttgcctctatcctaggaactttttttgtaagattggggagctcacagagtattatgggcgctttatataagggatttattgcatctgctattctatcattaatattcatttatcctgtcacacagtttgtcttaggagatatttcaacagaattcacatttcaagaaacaacatttacaggaatgtcgctatatatttgttcagtggtaggcattataataaccggtttgttaatttggattactgaatattacactggtacgaattacaggcctgttcaaagtgttgcaaaagcatcaaccactggtcacggtacaaatgtaattcaagggcttgctg

SEQ ID NO: 267708 - DNA, 1279 bp, Unknown
  Bacterial polypeptide expressing nucleotide sequence isolated from the Sargasso Sea
atggaaatttcaataattccaccagctcttggcatattaggtatggtaatggcatttattgtttacaggcttgtcatgaaatatcctgatggcgaagacaaagtaaaaaaaataggcgaccagattcatgctggagcactcgctttcatgaagacagagtacaaatatttatccatatttatagcggtaatagtattgctagcatggtggaagttagggatctatactgcaatctctattattgttggagctatatgctcatctgtagctggttttattggtatgtacgcagcaacaaaggcaaatgttagaactgcaactgcagcacaaaaagatggtccagcagcagctttatctgtttctttttatggtggctcaataatgggtttatgtgttgcatcattaggcctgataggtttagggggcttatattatttttatataccagctgaaatcgatcctcataaacttgaaggttttgctatgggagcatctgtagtagcccttttttcaagagtaggcggaggaattttcacaaagagtgcagatgttggggctgatcttgttggtaagattgaggctggcattcctgaagatgacccaagaaatccaggcgttatagcggataatgttggtgataatgttggtgatgttgctggaatgggctcagatatatttgagtcatattgtggctcaatgattgcatcaatagcaatagcttatactctaggcaatcaggacatgatgatgcttcctctggctttagcagcgactggcttgattgcttcaataatcggaatatttatagttaagcttcagtctgcaaaagcacctgcgagtgctttgagatctggaacacttttagcgccagtaatatttgtggctatggcgtatttcataattgactcctttgatggagttggaataaatgtatggtggtgtgttattgccggagctgttggtggagtactaattggacttataacagaatactacactggcggaggcccagttaaaaaaattgctgaatcaggagaaactggttctgcaacagtaatgatttcaggattatcagttggaatgcaatcagttgtaatacctattgttattttggccggtattattcttacctcgacactattatcagatatttacggtgtcggaattgctgcagttggtatgcttgctactgttggaattacaatggcgattgatgcatacggaccggttgccgataatgctggtgggattgctgaaatgtcaggtatgggtgaggaag

SEQ ID NO: 267709 - DNA, 679 bp, Unknown
  Bacterial polypeptide expressing nucleotide sequence isolated from the Sargasso Sea
atgagctctacagtcgaaacgattttattatatacaatagttgcaggtttattgtctattgtttatggatttttcacaggaaaaaacattctaaactcaagcccaggtaatgctaaaatgcaggaaattgcatctgctattcagattggtgctaaagcatatttggcaagacaatataaaactatagcaattgttggtgttgttgttttagtaatcgttagtatagcttttagtcctttagttggtgcaggatatttaattggtgctgctttatcgggtatagctggttatgttggtatgttggtatctgttgaagctaacgtaagaacagcagaagcttcaagaacaggtttagctcaaggcctttccgttgcttttaaatcaggtgctgtaacaggtatgcttgttgctggcttagcattattgtcaatagctgtttattactatctattattaaaattaaatgttgatgaaagagaaattgttaatgctcttgttgcactaggtttcggtgcttctttaatttcaatttttgcaagattaggtggtggaattttcacaaaaggtgctgacgtaggtgctgatttagttggaaaagttgaggctggaataccggaggatgatccaagaaacccagcagttattgctgataacgttggagacaatgtgggtgattgtg

SEQ ID NO: 267710 - DNA, 1042 bp, Unknown
  Bacterial polypeptide expressing nucleotide sequence isolated from the Sargasso Sea
ggatgtcttcggcgtcaaggtccaagctatcccatacataggtgaggccagtaaaactggaagtgctaccaatgccatagccggtttagcagttgggatgcaatctgttttcattcctgttctactgatggccgctggaatctttggagctaatcatgtcatgggcggtggagatgctggattgtatggcatagccatggcggcaatgggcatgctcggcactgttggagtcacaatgaccgtagatgcatatggcccagttgctgacaatgctggtggaatagccgagatgtcgggacttggcgatgacgttagggaaatcacagatggactggactccataggaaatacaactgcagctattggaaagggcttcgcaattggaagtgcagcgcttaccgcactcgctctttttgcggccttcaagaccagtgcagaccttcaggcagcagacctcagcctgaccgagccgcttgtagtgatcgggctgctggtgggggcatcgcttcctttcgtggttgctgctatgacaatgaagtcagttggtagagctgcagaggatatgattaccgaaataaggagacaatttagggagattgacggacttttggaaggaagagatggagtagagcctgacagtgcaacatgtgtcgaaatatcgaccaaagctgcacttagggaaatggtcatgccaggtgttgttgcagtgtcagcaccggtaattatcggtatcttactgggaagcgcggctctaggtggagccctagccggagcgactgcgtccggagttctaatggccctcttcatggctaatgctggaggagcatgggacaatgcgaagaaggcaattgagcaaggtcacatagatggagcatcaaaaggtgacgaagcccacagcgccgcagttgttggggacacaataggagaccctttcaaggatactagtggtccatcactgaacatcctaatcaagttgatgagtatcgtcagcgtcgtgatagccggccttctaactaagacaggagagctaggtgcgctttga

SEQ ID NO: 267711 - DNA, 1408 bp, Unknown
  Bacterial polypeptide expressing nucleotide sequence isolated from the Sargasso Sea
tttgtatttagcaatcagttctggaatcattgcaatgctatttgcattttggaaaacaagttggatcaataaacaagatcaaggtaccgaaaaaatggaacgtattggccaagatatctctgatggcgcaatggcatttcttaaggcagaatatagagtattggctatatttgttttcgttgttgcgcttcttttgggttttgcaaattataataaagatggatcaagttcgctagttgcattatcttttattattggtgcattagcttctggctttgcgggttttttaggaatgcgtgtagctaccaaggcaaataatagaaccactcatgcagcccgaacaggccttgctcctgctttgaatgtggcatttaccggtggatcagttatggggctatccgttgttggtcttggagtcattggtctaagtatattatttatgttttatctatcatattttagtagcgattatgataagattttaaatgtgatttctggtttttcattgggtgcctcatcaattgctctctttgcaagagtaggtggtggtatttatacaaaggccgcggatgttggcgcagacttagttggaaaagttgaggccggtatccctgaagatcacccgcttaatcccgcaacaattgcagataatgtaggagataatgttggagatgttgctggaatgggagccgatctttttgaatcttatgttggatccattattggatcgatggtgcttggagctacaattttgtctttcggatcgtttgatgcctcatttgttatattgccattagtaattgcatcttcaggtattattgtttcaattattggtacatttcttgtctctgttaaagagggtggtaatccacaaaaagcattaaatattggcgaatttggctcatctgcaattatgattgctgtaatgtattttttaatttcaaatcttttacctaactcatttaccctaggtgataattcgtatacaaatttaggtgttttctgggcttcaactattggtttacttgcaggtcttggcattggtatgattacagagcattacactggaacaaatacatcaccaactctttcaatagcccgacaatcattaacaggtcccgcaacaaatatcatcgcaggtcttggtgttggtatgcagtcaacagctgggcctattttgattattgctgcaggtattgttggtgctcattattttgcaggactttatggtgtagcaatggcagcattaggaatgcttgctaatacaggaattcaacttgcggtagatgcatatgggcctatttcagataatgccggaggcattgctgaaatggcagagcttccagccgaagttcgcgaaaggacagataagctagatgctgtaggtaatacaaccgctgcaataggc

SEQ ID NO: 267712 - DNA, 1593 bp, Unknown
  Bacterial polypeptide expressing nucleotide sequence isolated from the Sargasso Sea
gctgaagcatctagaaaaaatctagcaagtggattatcaatagcatttaaatctggtgcagtcaccggaatgcttgttgctggtttagcattactttcaattgcagtttattattatattttggttaaaacaggggttgaagaaagagaaattgttaatgcacttgtcgcattagggtttggtgcgtcattaatctctatttttgctagacttggtggaggaatttttacaaaaggtgcagatgttggtgcagatttagtcggtaaagttgaggcaggaattccagaagatgaccctagaaacccagcagttatagcggataacgttggtgacaatgtgggggattgtgctggtatggctgctgatctttttgaaacttacgctgtcactattgttgctactatggtcctttcatctattttttttgtaaatgatttaaatatgatgatctatcctttagcaattggaggtgcatgtataataacatctattcttggaactttttttgttactcttggtagtgataaaaatattatgaaagcgatgtacaaaggtttcgtaataacagcaattagctcattagtaatattatttccaattacaaagcaagttataggctttacaacagaatatgttgtaaatggaaaatcattcaatggattaagtctgtatttttgtggaattattggtttaataattactggtttaataatttggattacagaatattatacaggaactgattacagaccagtaaaaagtgtagctaaatcttcaacaacaggtcatggtacaaatgttattcaaggtttagctgtttcaatggaagcaaccgcattaccagcattaataatagttggtggaattttatggactaaccatatagcgggactttatggtattgctatatctgtgacaacaatgcttgcattagcgggtatggttgtagctctagatgcatatggtccagtcacagataatgctgggggaatagctgaaatgtcaaatttaccaaaaaatgttcgtaagacaactgacgctcttgatgcagttggtaatacaacaaaagcagtaacaaagggttatgcaattggttctgctggtcttggtgcattagttctttttgcagcatatacagaggatataaaacatttttcaaaagttgctggttcaaatttagaagggatagctgtaacttttgatttatcaaatccttatgttgttgttggtttacttataggtggaatgcttccttatttattcggatcaatgggtatgcaagcagttggtagagcaggtggtgaagttgttattgaagtaagaagacagtttaaaaaaatacctggaataatgaaaagaaaagcaaagcctgattatggtaaacttgttgatttacttacaaaagcagcgattaaagaaatgataattccatctttattgccaattttatcacccattgttttatacatagtaatttatttcataggtggacaagtcgcagctttatcatctcttggagcaatgttattaggagttataataacaggactctttgttgctgtttcaatgactgctggtggaggagcttgggat

SEQ ID NO: 267713 - DNA, 726 bp, Unknown
  Bacterial polypeptide expressing nucleotide sequence isolated from the Sargasso Sea
aatgttagaaagttatcttgcaataccacctttgttgggtgttctaggcttattggttgccttaggaatatatatagtagtaaccagattttcagaaggcgaagaaaacgttaagaaaattggtgatcaaattcatttaggtgcaatgacttttatgaaaactgagtatacctatctcagtatatttgctttagtcgttattattttagtttggttctctctaggagaaggtacagcaatagcagttttagcaggagctttatcttcctctatagcaggctggataggtatgtattcagctacaaaagctaatgtgagaactgcaacagctgcttcagaatcaggtgctgaagctgcactttcggtggcattttatggcggttcaatcatgggattatgtgtcgcctcacttggtctaattggactaggaagtctattctatatactgagtggcgatgctcattccatagaaggctttgctatgggagcatcgattgttgctcttttctcaagagtgggtggaggaatttatacaaaaagtgctgacgtaggtgctgacctggtaggaaaagtagaagctgggatacctgaagatgatcctagaaatcctggagttatagctgataatgttggtgataatgttggggatattgcaggaatgggttcagatatcttcgaatcttattgtggatcaatggtagcttgtatagctatagcttcgactta

SEQ ID NO: 267714 - DNA, 334 bp, Unknown
  Bacterial polypeptide expressing nucleotide sequence isolated from the Sargasso Sea
gtattatcgccaattgttttatatttatttattttaccaatagggggtcaggttgctgcgttatcggcagtgggtgctatgttgttaggtgttattattacaggattgtttgttgctatatcaatgactgctggtggaggagcttgggataatgccaaaaaatatattgaagatggaaactttggcggaaaaggctcagaagctcataaagcagcagttacaggtgatacagttggtgatccttataaagatacagctggaccagctgttaatcctatgattaaaataactaatatagttgcgcttttattattagccgtaattgctggttaat

SEQ ID NO: 267715 - DNA, 2092 bp, Unknown
  Bacterial polypeptide expressing nucleotide sequence isolated from the Sargasso Sea
tttggacagtttaacattaattatcttagttggtattcttgctgttgtttacagttattttttaagtaagcaaattttatcttcaagcccaggtaattctaagatgcaagaaatagctgaagcgatacaaattggtgcaaaggcttatctcaacagacaatacaaaacaatagctatagttggattaatcgttttagttataataagttatttttttagtttacttgttggacttggttactttattggcgctttactatctgcggttgctggttatgtgggaatgttaatttcagtagaagcaaacgtgagaactgctgaagcttcgagatcaagtttacaaaaaggtcttacgatggctttcaaatcaggtgctataactggattgctagtcgctggtttagcactcttatcaatatctgtttactactggattttattatcttttaaagttgaaagtagagagttaattaatgctttaatcgcgttaggatttggagcatcattgatttctatttttgccagacttggtggaggaatatttactaagggtgcagacgttggcgcagatttagttggtaaggtagaagcaggaataccagaagatgatcctagaaatccagcagtaattgctgataacgttggtgataatgttggagattgtgcaggtatggctgctgatttattcgaaacatatgctgtaacaatcgttgcaactatggttttagcttcaatattttttcaaaacaatacagatttaatgatttatcccttagctattggaggcgggtgtataattgcctcaattattggaactttttttgtaaaattaggaaaaagtaaaaatataatgagtgcattatacaaagggtttatagtcactgcaatcatatcattagttttactttatccaataacttcaaaaattattggattagatgaattatttaaagtgggaagcaaaacattcagtggattagatttgtactactgtggggtagttggtttaattgtaacaggattaattatttgggttactgaatattatacaggaacaaattatagaccagttagaagtgtagcaaaatcttcaacaactggacatggaactaatgtgatccaaggacttgcggtttctatggaagctacagctctgcccgcattgataattgttgcaggaattattgtaacaaatgaatttgctggtttgtttggtatagcaatagctgttacagcaatgttggccttgaccggcatggttgttgcattggatgcttacggaccagtaaccgacaatgctggaggtattgctgaaatgtcaaaattaccaaaaaatgttagaaaaactactgacgctttagatgcagttggtaataccacaaaggcagttacaaaaggttatgcaataggttctgctggtcttggtgctttagtcttatttgcagcatatactgaagatataaaattcttttctaatgtttctggttcaccccttgaaggtataaatgttagttttgatttatctaatccttttgttgtaattggtcttcttgtaggtggaatgttaccttatttatttggatctatgggaatgcaagctgttggtagagcaggtggtgctgttgttattgaggttagaagacaatttaaaaaaatacctgggataatgaaaggtaaaagaaaaccagattatggaagattggttgacttattgacaaaggcagcaattaaagaaatgataattccgtcacttttaccggttttatcaccaatagtattatattttgttatttattcaattggcggattagaagcagccctttcatcagttggtgcgatgcttcttggtgtaattgtaactggtttatttgtagctatttcaatgactgcaggtggtggagcttgggataatgcaaaaaaatatatagaggatggtaattatggtggtaaaggatctgaaacccataaggctgctgtaacaggagatactgttggagatccgtataaagataccgctggaccagcggttaacccaatgattaaaattactaatatcgttgcacttcttttgttagcagtaatttctcattag

SEQ ID NO: 267716 - DNA, 337 bp, Unknown
  Bacterial polypeptide expressing nucleotide sequence isolated from the Sargasso Sea
ggaaatactacaaaggcagtgaccaaaggttatgccattggttcagctggacttggtgctttagtactttttgctgcatatacagaggatataaaacatttctcaaaagaaactggttcaaaattagaaggtatagttgtaacatttgatttatcaaacccatatgttgttgttggtttattaattggaggcatgcttccttatttatttggttcaatgggaatgcaagctgttggcagagcgggaggtgctgtagtcgttgaagtgagaagacaatttaaaaaatttccatggtataatgatagaaaaaacaaaaaccagattatgcaaaattagt

SEQ ID NO: 267717 - DNA, 1783 bp, Unknown
  Bacterial polypeptide expressing nucleotide sequence isolated from the Sargasso Sea
atggataatttaataatttcaccagttttaggtctattaggtatggccatggcatatatagtttatatgcttgtaatgaaatatcctgatggtgaagataaagtaaaaaagattggtgaccagatccacactggagcattaacctttatgaaaacagaatataaatatctctttatttttatgacagtgatcgttggtttagcttggtttgcgttaggtccttacacagcaatagctgtggttgttggtgctttatgttcttcaatagcagggtttataggaatgtatgctgcaactaaagcaaatgtaagaactgcgacagccgcacaaaaagatggtcctgcagcagctttaacagtttctttttatggtggctcgataatgggtctttgtgtggcatcactcggtctaataggcttaggtggtttatattatttctacataccagctgaaattgatcctcataagcttgaaggttttgctatgggagcatctgtagtagcacttttttctagagtaggtggaggaattttcacaaaaagtgcagatgttggagctgatcttgttggcaagatcgaggctggcatccctgaagatgacccaagaaatcctggtgttatagcagacaatgtaggtgacaatgttggtgatgttgctgggatgggttcagatatatttgagtcatattgtggttctatgatcgcatcaatagctatagcttatactttaggtaacaaagatatgatgatgctacctctagccttagcatcaactggtttaatagcatcaataatcggaatatttatagttaagcttcagtcagcaaaagctcctgcgagtgcgttgagatctggaactcttttagcgccagttatatttgtggctatggcttatttcataatcgactcttttaatggagttgggatgaatgtatggtggtgtgttatcgctggtgcagtaggaggagtcttaatcggacttattacagaatattacacaggcggtagcccagttaaaaaaattgctgaatcaggagagactggttctgcaacagtaatgatttcaggattatcagttggaatgcaatcagttgtaatacctattgttatattagctggtattattcttgcctcaactcaattatcaggtatttatggtgttggaattgctgcagttggtatgcttgcaactgttggaattacaatggcaatagacgcatatggaccagttgcagataatgctggcggtatcgctgaaatgtcaggtatgggtgaagaagtaagagagatcactgattctcttgacgaattaggtaatactactgctgccattggaaaaggctttgcaattggagcagcagctttagctgccctagcaataatttcagctttttcagctgtagtagcggatgcaaatcccaaattttcattagcacttacagaaccaattgttttagttggaatgtttattggagtgtgtataccttttctagtttcttcaataaccatgacagcagttggagatgcagcttttgaaatgattaatgaaataagaagacagtttaaggagataccaggtttaatggaaggctcagctgagccagactctgaaaaatgtgttgaaattgctacgacagcggcccttaagaaaatgatgttacctggagtaatagcagtatcaatgccagctattgttggttttgggcttggcgcacaagccttgggtggaatgcttgctggtggattgcttggttgtgtttcattagcgctgatgatggcaaatg

SEQ ID NO: 267718 - DNA, 2035 bp, Unknown
  Bacterial polypeptide expressing nucleotide sequence isolated from the Sargasso Sea
gatgaatgaaggtcaagctttatggattgcattaactgcgtcagtagtggcaatcatttgcggagttgttttttcgctccaaatcatcaaagaatcagacggtaatgaccgaatgagagagattgcaggggcaattcaagaaggagctcaagcttatctaactagacaatattctacaattgcaatcgtgggagttgtcatatttatattaatgggcgtcagcggaattggttgggctagtgcaattggttttgcaattggtgcaatcttctctggtctagctggatacattggcatgagtatttcagtcagagccaatgtgagaaccgctcaagcagctcatgaaggaatgaatgctgctctctctatggcatttagaggcggtgctgttactggactactcgttgttggtttgggtttattaagtattgcaggatactatctcattctgacatcttccggtgtttctgttgatgacagcctgcatgcattaataggattggcatttggtggttcattgatatctatatttgcaagacttggtggtggaatatttacaaaaggtgccgatgtcggtgctgaccttgttggaaagattaatgctgggataccagaggatgacccaagaaatgcagcagtgatagcggacaatgttggagacaacgtaggtgactgcgcaggaatggcagcagacctttttgaaacatatgcagtaacaatcattgcaaccatgctgctaggtggcttattgttcagcggaacagaagcgactaatgcgattatgtatccgcttgtattgggtgctgtctctatagtcgcctcagttatcggagcactttttgtaaaagctaaagaaggtggaagcgtaatgggtgctctctacaaaggcgtcattatctcaggattgcttgctgcgatcgctttctatccaataacaggaatgatgggaatggagatgggtcttttttggtcagcaatcattgggcttgcattgactgcttttatggtgattgtaacagaatattatacgagcacagaatatagtcctgtaaagaaaatagcagaagcatcggagactggtcatgcaacgaacatcattgctggtctgggcgtttcaatgaaagccactgcacttccagtactggccgtctgcctaagcatttggggcgcttacatgcttggtggtctctatggaattgcgattgctgcgacctcaatgctttctcttacaggaatgattgtagctttggatgcattcggtcctattacagataacgctggggggattgctgagatggcagaacttccaccagaaatcagaggaataactgatcctttagatgctgtaggtaatacaacaaaagctgtaacaaagggttatgcaatcgggtctgctggtctagctgcattggtcttatttgcggatttcacagcaaatctggagtcagaaggcaaaatggttcagttcatgctaaatgatcctgcagtgatcatcggcttatttgtgggtggaatggtaccgtatctttttgctgcactcgcaatggaagccgttgaacgagctgctagctctgttgtagctgaggttagcagacaatttgaggaacctggaatcatggacggaacagtaaagccagattattcaaaagctgtcgatttacttaccaagtctgcaatcaaggaaatgataatcccttccttgcttccggtacttgttccagttgtcttagcagttcttatgaatattatgatgccagaagatggaggcattaaagcacttggcggactgctcattggaacaattgttacaggaatatttgttgcaatctcaatgaccacaggaggtggtgcttgggacaatgcaaagaaatacgtagaagatggtcattgtggcggcaagggatctgaagcacataatgcttcaatcacgggtgatacagttggagacccttataaagatactgctggtccagcaataaatcctctgattaagataattaatatcgttgcattattgctaataccattgctctaa

SEQ ID NO: 267719 - DNA, 2017 bp, Unknown
  Bacterial polypeptide expressing nucleotide sequence isolated from the Sargasso Sea
tgctgctcttggattagctttagcagctttttatgcaaacaaagttttatcaataaaagttactgatgaaaaggttgaagagctttctgcttctatacgtgaagggtcaatggcttttttaaaaaggatgtattcatggattagtgtttttgttgttgtattagcagttttgatatcaacattaactgaatggggatatccatggggttcaatagcatttgtagctggagccttcctttcttcactagctggttttattggaatgagaatagctacagctgccaacggaagaacaacagaagctgcaagagatggtggaacactaaaagcattaccagtagctttcagagggggtgctgtaatgggatttacagtcgctggactaggacttcttggtgtatcagtaggatattgggttttcattgatattttagaattaccaaatggttatgatgttttagcagcaattggactcggaggttcttcgattgctctttttgcaagagttggtggaggaatttatacaaaagctgcagatgtaggcgcagacttagtagggaaagttgaagccggcataccagaagatgatccgagaaacccagcaacaatagctgacaatgtaggagacaatgtaggagatgttgcaggtatgggagcagatctttttgagagctatgtaggttccttagttgctcctcttgcctatgcagcaatagtttttagtggccaaaatgttttaccttcattattattttttccattagcagttggaacgattggtatgggagcttctatagtttcatcttttcttgttaaaccaaaagaaggaaaattagctcaagctttacatagaggaacttatagcgctgcggctttaacaactttaggcgtttactttcttagtgatagtatgttttcttcatatacagagaattcaatcggcctcttttttgctgtgataattggacttgctgtgggattgctagtcggccaaatttcagaatggtttacatccgatcattattcaatagtaaaaaatatagctgatcaagctaaaactggtcccgcaacacttgtattatctgggatctcagaaggaatgcggtcagctgctttttccgtaatagttgtagtttttggtataggaggagcttatacagcaggggactgggctttaggatctggtggtggaatttatggtattgcgatagctgcaataggtgttttagctacattaggaattacggttgctgtagatgcttacggaccaatagctgataatgctggaggtattgctgagatggcccaccttcctccagaagttagggaagctactgatgaattagactcacttggaaatacaacagctgcaattgctaaagggtttgcaatcggttccgcggctgtcacagctttagcattattttctgcttttgttcaaagtgcaggcttaagcgaaattggattaaacataacgaaggtagaagttactgctgggttatttttagggggaatgttccccttcctttttgcggcgatgacaataaatgctgtagggagggctgctttcaagatgattgaagaggttagaaggcagtttaaagaaatacctggacttagagaaggcaaagaaggagtaaagcctgattacacaagatgtgtagacattgctacttccgctgctttaaaagaaatgttgcttccaggaggtttagctatagcattgccattgattattggattttggaataaagaagctctaggtggtttcttagccgggtctcttgtaacaggcttcttgttagcaatatttatggctaattcaggaggcgcttgggacaatgcaaagaaatatatcgaagcaggaggcggagcagggaaaggctctgatgaacataaagctgctgtaattggggatacaatcggagacccatttaaagacacctctggacctgcaatgaatatagttataaaagtaatgactattgttagcttaatatttgcttcagcattttaa

SEQ ID NO: 267720 - DNA, 529 bp, Unknown
  Bacterial polypeptide expressing nucleotide sequence isolated from the Sargasso Sea
atgagctacagcaagatcccggctggtaaagacctgccgaacgacatctacgttgccatcgaaatcccggccaaccacgcgccgatcaaatacgaaatcgaccacgacaccgattgcctgatggtcgatcgtttcatggccaccccgatgttctatccggccaactacggcttcatcccgcacaccctggctgacgacggcgaccccctcgacgtgctggtcgtgaccccttatccggtcgcgccgggttcggtgatccgcgcccgtccggtcggcgtactgcacatgagcgacgaagcgggcggcgacgccaagctggttgccgttccgcacgacaagctgaccgttctgtacaaggacgttcaggaatacaccgacctgcccgcgctgttgatcgagcagatcaagcacttcttcgagaactacaaggatctggagaagggcaagtgggtcaaggtagaaggctggggcggcgctgaagaagcccgcggcctgatcaacaaggcagtcgcggcttaccaaaaataag

SEQ ID NO: 267721 - DNA, 692 bp, Unknown
  Bacterial polypeptide expressing nucleotide sequence isolated from the Sargasso Sea
tatgaactcatctatagaaacaattttatattatacaatatttgcaggttttttatcaattttatatggatatgttactggtattagcataattaaattgagtgcaggaaataataaaatgcaagaaattgcttctgcaattcaaattggtgccaaagcttatttaaatagacaatataaaacaattgcaatagtaggtgttgcagttttagttattattacttttgcatttaattacttagttggtttaggttacttaataggagcaactttatcaggaattgctggctatgttggtatgcttgtatctgtacaagcgaatgtaagaactgccgaagcatctcgaaaagggttgtcacacggcttatcagttgcctttaaatctggtgcaataactggaatgctagtagcaggtttagcattactatcaatcgcagtttattattttattttgcttaagtacggcgttaatgaaagagaaatagtaaatgcattagttgcattgggttttggtgcatctttaatttctatttttgctagattaggtggaggaatattcactaaaggtgctgatgttggtgcagatttagttggcaaggttgaggctggaattccagaagatgatccaagaaaccctgcagttatagcagataatgttggagataatgttggagattgtgcgggtatggctg

SEQ ID NO: 267722 - DNA, 1987 bp, Unknown
  Bacterial polypeptide expressing nucleotide sequence isolated from the Sargasso Sea
atgagctcatctgttgaaacaattttaatttatacaattatagctggattattatctattgtttacggctattttactggcaaaagtatacttagctcgagcccaggtaattccaaaatgcaagaaattgcatcagcaatacaaatcggagctaaggcttatttgaacagacaatacaagactatagcaattgttggtgtggttgtattaattataattagtattgcttttagtccattagttggtcttggttatttaattggagcaactttatcaggaattgctggatacgttggaatgctagtttcagttcaagctaatgtgagaacagcagaagcagcaagaaaaggtttatctacaggactttctctagcttttagatctggtgcagtaactggtatgttagttgctggtttagcattattatcaatagcagtttactattttttactgctaaaatttaatattgatgaaagagaaatcgtaaatgcattagttgcattaggttttggagcatctttaatttcaatatttgcgcgtttaggaggaggaatttttaccaaaggtgcagatgttggtgctgatctggttggaaaggttgaggcaggtattccagaggatgacccaagaaatcctgcggtgatagctgataatgtaggtgataatgtaggggattgtgctggtatggctgcagacctatttgaaacttatgctgttacaatagttgctacaatggttctttctcatattttttttcatggtgaccttaatatgatgatttaccctttaacgattggtggcgcatgtattataacatcaattattggtacttattttgtaaaacttggtagggataaaaatattatgaatgccatgtataaaggttttatcataactgcaataagttctttaatagttttatatcccataactgataaggttataggtttttctgctgaatatattgttaacgataagtctttcacaggtttaagtttatatttttgtggtattgttggtttaattataacaggacttttaatttgggtaacagaatattatactggtacagattatagaccagttaaaagtgtagcagagtcatcaactactggtcatggaaccaatgttatacaaggcttggcagtctcaatggaggctacagcaatacctgcattaattattgttgcaggtattttaataacaaattctatagctggtttattcggcatagcaattgccgtaactactatgttagcactagcaggaatggttgttgcacttgatgcttatggaccagtaacagataatgctggtggtatagcagaaatgtctaatttaccaaaaaatgtgagaaaaaccacagatgcattagatgcagtaggaaacacaacaaaagcagttacaaaaggttatgcaattggatcagctggtttaggtgctttggttttatttgcagcatacacagaggatataaaatatttttcaactgtaactggatcaaaattagaaggaattgtagtaagttttgatctatcaaatccttttgtagtagttggcttattaataggtggaatgttaccttatttgtttggatcaatgggtatgcaggccgttggaagagcagggggtgcagttgttgttgaagtaagaagacaatttaaaaaaattccaggtatcatgaaaagaaaagctaagcccgattatggaaaattagttgatttattaactaaagctgcaattaaagaaatgattataccttctctgttaccagttttatcaccaatagttctttacataattattttaccaataggtggtcaagttgctgctttagcttcagttggcgcaatgctgttaggggttataataacaggtttatttgttgctgtatcaatgacagctggtggaggtgcttgggataatgcgaaaaaatatatagaagatggaaaatttggtggtaaagggtctgaagctcataaagcag

SEQ ID NO: 267723 - DNA, 916 bp, Unknown
  Bacterial polypeptide expressing nucleotide sequence isolated from the Sargasso Sea
gttgccgtcagtggcggtggtagttgccatgattgggctctcctactggctaggaggagccgcttttggtgctgcaggtgatgtgaaagggctttacggcgtatctcttgcggctatcggcatgcttgcagtaacaggtgtgatcgtcgcagtcgatgcctatggaccgatagcagacaatgccggcggtatcgccgaaatggctgaactacccccagaagtgcgagaagtaactgacagcctcgatgcgctcggtaacacaaccgctgcggtggccaagggcttcgcagtcgggtcagccgctgtgacggccctcgctttgttcaaatccttcagccttaccgcaggtcctcaagtcgatcttgacattaatgacacagcggtaactatcggactgttcctcggtgcgatgaccccgttcatttttgctgcactgacaatgtcatcagttggcagagctgcacaagcgatgattgtggaagtccgacggcaattcgccgagattccaggtttgcgcgaagggcaaccaggggttaagcccgacagcagacgatgcgtcgacatttccactcaagctgctttacgcgaaatgctattgcccggtggcttagcgatcctattaccgctcgtgattgggtttattgatgtcaatgccctcggcggttttcttgccggagcggtagtgacaggattcctcatcgcgatttacatggcgaactccggtggagcatgggataacgccaagaaatacattgaggcaggcgctcatggaggcaaaggtaccgacgcgcactcagcggctgttgtaggagacacaattggtgatccctttaaggacacttcgggcccggcaatgaacatcttgatcaaagttatgaccattgtgtcgttggtctttgtgcccgcatttatctaa

SEQ ID NO: 267724 - DNA, 2014 bp, Unknown
  Bacterial polypeptide expressing nucleotide sequence isolated from the Sargasso Sea
tatggaaagttttattattggcccaatgactccttggggtcctgttgttactggcttaataggcctagtttttgcttttgttttgtatggattaatcatgaaatatccagcaggcaaagattctgtagttaaaattggagatcagatccatctcggagctaaagtcttcatgttcactgaatataaaattttgacaccagtggttatagcattagtagtagcttgtggcttttctccactaggttgggatactgcaatagcaattgctgttggtgcattatcctcagcaattgcagggtttataggaatgtattcagcaacacaagcaaatgtgagaactgcaacagcagcagaaaattctggacaagaacaagctttatcaatttctttctttggtggatcaatcatgggactctgcgtagcatctatggggctagttggtcttggtggtctttatttctactttagtggagttatagaagatccaaatgaacttgcaaaagcattagaaggttttggtgttggagcttctgctgtagcactattctcaagagttggtggagggatctttactaaaagtgctgatgttggtgctgatctagttggaaagatagaagctggcatccctgaagatgatcctagaaatcctggcgttattgctgataatgtcggtgataatgtcggcgacattgcaggcatgggatcagatatattcgaatcatattgtggagcaatgattgcatctattgctattgctgcaactatgggaagtacggatttaatgtttttaccattatggcttgcagcttcgggattattctgttcattactaggtattggtattgttagaacacaagtctcaagatcaccagcagttgcactcagatggggaacattcttatctcctgtcctattcttattatttgccggtttaagtatttattattcacctgccatagaaatgaaatatttttattcagttcttactggtgcaataggaggaatcttaattggcttaataactgaatactatacaggcggggagacagaaagctcaccagtaggaaaaatagctaaatctggagaaacaggaccggctacagtcatgattgctggtttaagtgttgggatgcaatcagttgtattgcctttatttgttattgcaggaattgttggtttatcgactcatttctctggtctttatggagtaggcattgcagcagttggtatgctatcaacagttggcattactatggctattgatgcttatggtccagtagcagataacgctggcggaattgctgaaatgagtggcatgaagagtgaagttagagaaattacagactcacttgatgaattaggaaatacaacagcagcaataggaaaaggttttgctattggagcagcagctcttgcagcattagcaattatcgctgcatatatgcttgcaacaggagtagaatcactttcattagatgatcctagagttttaatgggaatgtttattgggggttcaattccatttttagtttcatcaataactatgactgcagttggcgatgccgcttttgaaatgattgaagaaattagaagacagtttagagaaattccaggattactagaaggtaaggctgaacctgataatgctaagtgtgtagatattgctactaaggcagctttaaacaagatgttattgcctggagcaattgcgattggttcaccagttgctattggttttattttaggcccagtcgttttaggcggtatgcttgcaggagcgctattaggttgtgtcttaatggcactaatgatggcaaatgctggtggtgcttgggacaatgctaaaaagtttgttgaaaaaggcaactttggtggcaagggcacagatacacatgctgctacagtagttggagacacagttggagatccatttaaagacacttctggaccttccatgaatattcttataaatgtaatggcgattgtaagtcttgtaatagcaccgcttttataa

SEQ ID NO: 267725 - DNA, 2008 bp, Unknown
  Bacterial polypeptide expressing nucleotide sequence isolated from the Sargasso Sea
aatgttagagagttatcttgcaataccaccattattaggtgtttttggcttattagtagccctaggaatatatatagttgttacaagatttcctgagggagaagagagcgtaaaaaaaattggtgatcaaattcatttaggtgcaatgacctttatgaaaaccgaatatacgtatttaagtatctttgctttagttgtcatagtcttagtttggttttcattaggagaaggcacagcgattgccgtcttagcaggcgctttgtcttcttcaatagctggttggataggaatgtattcagctacaaaagcaaatgtcagaactgcaactgctgcgtcagattcgggcgctgaagctgctttatcagttgctttctacgggggatctataatgggtctttgcgttgcttccttaggcttgataggactaggaagtctcttttatattttgagtggagatgcccactctatagaagggtttgcaatgggtgcctctatagtagcccttttctctagagtaggaggaggaatctacactaagagcgcagatgtaggagctgacttggttggaaaagtagaagcagggatacctgaagatgacccgagaaatccaggtgttatagctgataatgttggtgacaatgtaggggatatagctggaatgggttccgatatttttgaatcttattgtggttctatggtggcctgcatagctatagcttcaacttatttaatcacttcagaatttacacaagctcaaaaagacggaatgatgtttttgcctttagctctagcttcaataggccttatctcttcaattttagggattgttatagtcagattattctctaaatcttctcctgcgaatgctatgaggtggggcacaatgggagctccattaatatttataatcgctgcgtatttcttgaccggttcgttagttggtaataatggttttgatgtatggcttgccgttgtatgtggatctgtaggaggaattgcaattggtttaattactgaatactacactggttcaagccctgtagtgaagatagcagaatctggacaaacaggttcagccactgtgatgatttcaggtctttctgtaggaatgcagtcagttgttttgcctatagcctgcattattctaatcatttatatatccacacaacttacaggcttatacggtgtaggaattgctgcagttggaatgctatcaaccgttggaataacaatggccatagatgcatacggtccagttgcagacaatgcgggaggtatagcagaaatggctggcatgccatcagaaacaagagtaattactgatgaacttgatgaacaaggtaatacgactgcagctataggaaaagggtttgcaataggtgctgctgccttagctgctcttgcgatcatttccgcgtttgtttcgacagtttctgcaaaccgatcagaacccctcgaattacttctgtctaatccaatagttcttataggtatattcattggtggagctattcctttcttaattgcttcaataacaatgacggctgttggtgacgctgcctttgaaatgattaatgaaataagaaggcaatttaaggaaataccagggcttttagaaggtaatgctgagcctgataccgctaagtgtgttgatatagcaacagcagctgcgcttaaaaaaatgttattgcctggaataattgctgtctcagcacctcctttagtgggtcttggaattggagctgaggcgttgggaggaatgcttgcaggcggtcttctagtttgtgtgttaatggcactttttatggctaacgctggtggtgcttgggataatgcaaagaaatacattgaaaaaggtaatcttggtggaaaaggaacagatactcactccgccgctgtagttggtgatactgttggagatcctttcaaggacacatcaggaccttcaatgaatatcttaattaatgtaatggcaattgttagtttagtaattgctccattactctaa

SEQ ID NO: 267726 - DNA, 298 bp, Unknown
  Bacterial polypeptide expressing nucleotide sequence isolated from the Sargasso Sea
ttttattgctacaaaaagtgatgcattttcagctcttggagcaatgcttctaggcgttattgttacaggattatttgttgctctttctatgactgctggaggtggtgcttgggataatgcaaaaaaatatattgaagatggtaattatggtggaaaaggctctgaggctcataaagctgcagtaacgggtgatactgttggcgatccttataaggacactgcaggaccagctgttaaccctatgattaagataactaatattgtagctttattactattggcagttttagcgcattaa

SEQ ID NO: 267727 - DNA, 1457 bp, Unknown
  Bacterial polypeptide expressing nucleotide sequence isolated from the Sargasso Sea
agttgaggctggtatacccgaagatgaccctcgtaatccaggagtaattgcagataatgtcggagataatgtgggtgatattgctggcatgggttcagatatttttgaatcttactgcggttcaatggttgcttgtattgctatagcatctacttacgcaataacttctgaatttgcacaagctgataaagaaggaatgatgtttttacctttggcgctagcttcaataggtttaatagcttctattatagggatagtaatcgttagattgttctcaaagtcctcacctgccaatgctatgagatggggcactatgggagctccattaatttttataatagcagcatatttcttaactaactctctagttgaaagcaatcctttacctgggagtgatggttttgatgtttggttggccgttgtttgtggttctgtaggaggtatagctattggtttaattactgaattttatactggctcaagtccagtaataaagatcgcagaagccggacaaactggtcctgctactgtgatgatcacagggctatcagtaggtatgcaatccgttgtgctgcctatagcatgtattattcttattatttttatatcaactcagttaacaggtctttatggtgtaggtattgctgcagtaggcatgttgtctactgttggtattacgatggcaatagatgcttatggacccgttgcagataatgcaggaggaattgcagaaatggctggtatgccatctgaaactagagtgattacagacgagttagatgaacaaggcaatactactgctgctattggtaaaggttttgctataggggctgcagctttagcagcgctagcaattatctctgcatttgtagaaacagtctctgctaatagagtagaagaccttgtactttcattgtctaatccaatggttcttatcggtatttttattggtggcgctataccctttttaatcgcttcgataacaatgacagcggttggtgatgcggcttttgaaatgattaatgaaattagaaggcaatttaaagaaataccaggacttctggagggtaatgctgagccagatacagaaaaatgcgtagacatagctactgcagcagctttgaagaaaatgttattgccaggcattattgcagtatctgctcctcccttagttggattaggcatcggtgcagaggctttaggcggcctgctcgctggcggtcttttagtttgcgttttaatggctcttttcatggcaaatgctggaggtgcttgggacaatgctaagaaatttattgagaaaggtaatttaggaggaaaaggcacagatacccactctgcagctgtagttggagatactgtgggtgatccattcaaggacacctcagggccttcaatgaatattcttattaatgtaatggcaattgtgagcctggtgattgctccattattgtaag

SEQ ID NO: 267728 - DNA, 2007 bp, Unknown
  Bacterial polypeptide expressing nucleotide sequence isolated from the Sargasso Sea
ccgcaatagcatcatttgcagttgctgctggatatactggctgggttgctaaacaaaaccctggtacaaaacaaatgcaggaaatatctgaagccgtaagagttggtgcagcagcatttttgagacgtgaaatgagaattattgttccaatagcaattggattatctgttatcattggattctttattggtgattcaaacggaattgcctttgcagtaggtgcaacactttctgcagttgcaggattcatttcactaaaagttacagtaaaggctgcagtaagagccgcacatgcaacaggctctggattaggaaaaactttcgctattacatttagaggcggtgcaacagtaggtcttgcagttcctgcaatggcactagctgcaactgcaatcttatacatgatttatccaaacccaattaccattgccggtatcggaattggtgcaagtctaattgcattgttcatcagaattggtggtggaattttcacaaaggctgcagatatgggtgcagacttggtaggtaaagtcgaagcaaacattcctgaagacgacccacgaaaccctgctacaattgcagataacgtaggtgataatgtaggagatgcagcaggcatgggctcagacgtatacgaatcatacattgtaacaattttagcatcattactaattgcagcactaattggttcaccagaaaactttgcatacccaatcttaattggagcatctggattagtagcatcaatcattggtactgcaacaattggttcaagaaagattactgatgtgatgaagccgctgaatatctcattttatgtatcagcagcaatcgcaattgcactaaactttgtatttacttacatgattttgggaacaactccaattgcttacgcactatttggcgctacagtcattggtgtaattctggttccagtaatacaaaagattacagactattacacaaacgcaaactctaaacctgttgtagaaatctctgaatctgcaaagtggggttacgcatcattaacattaatgggaattatcaaaggcttacaatcaaccggaccattcatgattgcactagttgcagcaattatcatttcatttgcaattacatctgcagcagcaccagaaggtaccgacccattactatacggaatctttggtacttcactaactgcaatggctatgctatctcttgcaggaattgttctttcaattgatgcatttggaccaattgcagacaatgcaggaggtattgtagaaatgacagaaatgggtgaagaaaatcgtaaaatcactgatgaaattgacgcagtcggaaatacgacaaaggctgtaaccaaaggctttgcaattgcaagtgcagcactagcagcattggcaatgattcaagcatttcaattcgaagcatcacactatttccaagacatggtaattgactatggactatcaaacccatcagttatcatcggactcttagttggtggattaattccatttatcattacaggccagttaatcagcggcgtagaacgtgcagcaaagaaaatggtctatgaagttagaagacaattcaaagaagatcctgaaattttaaccggtaaatcaaaaccagattatgcaaagtgtgtagatgttgcaacacttgcatcaattggtgaattatggaaatcagcatcagtagcagtagccgcaccaatcattgtcggtgtattattaggtccatctgcagttgcaggtctcttaatgggagcagttgtttctggaatcttcttagcatatcacctggcaaacactggtggtgcatgggataacgcaaagaaactcattgagatgaaaggtgaaaagggtactgaagaacacaaagtcgcagtagtcggtgatatcattggtgatccttacaaagacacagcaggtcctgcactaaacacagtaatcaaactcttaaacacaattgcaatcgtattcgtaccagtattctttgcaattattgtattatagt

SEQ ID NO: 267729 - DNA, 1822 bp, Unknown
  Bacterial polypeptide expressing nucleotide sequence isolated from the Sargasso Sea
atgaacgcatcaacagaaacaatacttttatacattatagctgctggaattatatcaatcatttatggtttttttacaggtcgaaatattttaaactctagttctggaaatgccaaaatgattgaaatagcatctgctattcaagaaggtgcccgtgcatacttaaatagacaatataaaactattgcaatagttggtgtagttgtgttgattattatttcagttgcatttagtcctttggtaggcctcggttatctaattggagcagcattatctggaatagctggttatgtaggaatgcttgtatcggttcaagctaatgtaagaacagctgaggcttcgagaaaaagtctagcaaacggtttgtcaattgcttttaaatcaggagcagtaactggtatgttagttgcgggattagctttgttgtcaattgctgtttactattattttcttgttaagattggtatagatgaaagagaaatagttaatgctttagttgcgttaggctttggtgcctcgttaatatctatatttgcaagattaggtggaggaatatttacaaagggtgcagatgttggtgctgatttagttggaaaagtagaagcaggtattcctgaagatgatcctagaaacccagcagtaattgctgataatgttggtgacaatgttggggactgtgcgggtatggcagcagatttatttgaaacttatgctgtaacaattgttgccacaatggttctgtcgtcaatattttttattggtgactttagcatgatgatttatcctttagcaattggtggcgcatgcatacttacatccattttaggaactttttttgtaacactcggaagtgataaaaatattatgaaagctatgtataaaggatttgttataactgctataagttctctaatcatcttgtatcctattactaaatatgtaattggttttactactgagtacgttgtaaacgaaaaatcatttactggattaagcttatatttttgtggaataataggtcttattattacaggattaattatatggattactgaatactatacaggcacagattatagaccagttaaaagtgtagctcaatcttcaacaacaggtcatgggacgaatgtcattcaaggattagcggtatcaatggaagcaacagctatacctgcactaattattgttggtggaattttattaaccaatcatattgcaggtttgtatggaattgcaattgcagttaccacaatgcttgctcttgctggtatggttgttgctttagatgcttatggtccagttactgataatgctggaggaattgcagaaatgtctaatcttccaaaaaatgtaagaaaaacaactgatgcattagatgcagttggaaatacaacaaaagcagtaacaaaaggttatgccattgggtcggctggacttggagctttagttttatttgcagcatatactgaggatattaaacatttttctaaagttgctggttctaatttagagggaataattgttacatttgatttatctaatccttttgttgtcgtaggattattaattggtggaatgctgccatatttatttggatctatgggaatgcaagctgtaggtagagctggtggtgcggtagtcattgaagttagaaggcagtttaaaaaaatacctggtataatgaagcgtaaagctaaaccagattatggtagattagtagatttattgacaagagcagctatcaaggaaatgataattccatcattattgccagttttatctcctattgtactttacataattatttattttataggtgggg

SEQ ID NO: 267730 - DNA, 1780 bp, Unknown
  Bacterial polypeptide expressing nucleotide sequence isolated from the Sargasso Sea
ctcacgattcaatcagcaattgcggtaatagttggtgctgcctgctcatctttagcagggtttattggaatgtatgcagcaacaaaagcaaatgttagaactgcaactgcagcccaacaagacggtgcagcagcagcattaagcgtttctttttacggtggctcagtcatgggattatgtgtcgcctctcttggtttaattggtttaggtggtctattctatttctttagtgaatctaatgttcacgctcttgaaggatttggaatgggtgcatcagtagtagccttattctctcgtgttggtggaggtatttttactaagagtgcggatgttggagcagatttagtgggtaagattgaagcaggaattcctgaagatgatccaagaaatccaggagttatcgcagacaatgttggtgataacgttggcgatgttgccggaatggggtcagatatttttgaatcttactgtggatcaatgattgcctcgattgctattgcctacactttaggctcaaaggaaatgatgatgtttccattggctttaacttcaattggtttaatagcttcgatcattggaatcataatagttaaattacagtctgctaaagcgcctgcaagtgctttacgctctggaactcttttagctcctgcaatttttattgtcatggcatattttttaacaaatagcatagacggcgtgtcaatgaatgtatggtgggcagttgtttgtggtgcaattggcggtgtcttgattgggctaatcactgagtattacaccggtggagacccagttaagaaaattgctgagtcaggtgaaaccgggtctgcgactgttatgatttctggtctttcagttggaatgcaatctgttgtaattccaatttcagttctagcaacaattattttaatttcaacaactctatcaggagtttatggagtgggtattgctgcagtaggaatgctttcaacagttggtataaccatggcgattgatgcatacggaccagttgcagataacgccggtggaattgctgagatggctggtatgggagaggatgtaagagaaatcaccgattctttggatgagctaggaaatacaacagcagctattggtaaaggattcgcaattggagctgcagctctagcagcgcttgcaatcatttctgcattctctgcagttgtcagccttaattttggtgaagcatttacgttatctttaggccaaccaattgtcttagtaggaatgtttataggaatttgtattccgttcttaatttcttcgattactatgacagctgttggcgatgctgcatttgaaatgatcaatgaaattcgaagacagttcaaagaaatcaccggcttaatggaaggcaatgctgatcctgattcggaaaaatgcgttgagatagcaactaaagctgctcttaagaaaatgatgttacctggtgttattgctgtagcaatgcctgcagtcattgggtttggtttgggtgccatggctttaggtggaatgcttgctggtggactattaggttgtgttgcacttgctttgtttatggcaaatgcaggtggagcttgggacaatgctaagaaatatgttgagaagggcaattatggtggcaagggttctgatactcatgccgcagtcgttgttggagacacggttggagatccattcaaagatacatctggaccatcaatgaacatcttaatcaatgttatggcaattgtgagtttagtcatagctccgttattaacattgaatggaatgttgtaaa

SEQ ID NO: 267731 - DNA, 816 bp, Unknown
  Bacterial polypeptide expressing nucleotide sequence isolated from the Sargasso Sea
ctctaactggaatgattgtagctttggatgcatttggtcccattactgataatgcaggtgggattgctgaaatggcagaattaccctctgaaattagaggtatcacagatccattagatgcagttggaaatacaacaaaagctgtaacaaaggggtatgcaattggttcagcgggtcttgctgcgctggtattatttgctgactttactgcaaacttagagtctgaaggtaaaaccgttcaattcatgctcaatgatcctgctgtaatcattggcctatttgttggcgggatggtgccatatctatttggcgctctcgcgatggaagctgttggtagagcagccagctcagtcgtaactgaggttcgcagacaatttaaggaaatccctggcattatggaaggcacaggtaagcctgattactctaactgtgttgacctattaacaaaagctgccatcaaggaaatgataatcccttcaatactgccagtgcttgtaccggttgtattggctgtgctgatgaatattatgatgccagaagatggtggaattaaagcacttggtggactcttgattggtacgattgttactggaatatttgttgcaatttcaatgaccactggtggtggtgcttgggataatgcaaaaaaatatgtcgaagatggtcattgtggtggtaaaggatctgaggcacacaatgcttcaatcacaggtgatacagtcggagatccatataaggataccgctggtcccgctatcaacccattgatcaaaatcatcaatattgttgcactgttgttaatccctcttctctaat

SEQ ID NO: 267732 - DNA, 1074 bp, Unknown
  Bacterial polypeptide expressing nucleotide sequence isolated from the Sargasso Sea
gtttaattatttgggtaactgaatattacacaggaacaaactatagacctgtccaaagtattgctaaatcttcaacaacaggtcatggcacaaatgtaattcaaggccttgctataagtcttgaagcaactgcattacctgcaattataattgttgcaggaattattatcacacattcgttggcaggtttatttggtatcgcaatagctgtaacaacaatgttagctcttgctggtatggttgtagctctagatgcttatggtcctgtaactgacaatgcaggaggaattgcagaaatgtcagagttagacgataaggttagaaaaacaactgatgctctagactctgttggaaacacaaccaaagctgtaacaaaaggttatgctattggatcagctggattaggagcgctagttctttttgctgcatatactgaagatctcgaacattttgccaaagatccatcaagctctttatatggtattgacgtttcttttgatttatcgaatccatatgttgtagttggattacttttaggtggtttattaccttttctatttggcgcgatgagcatgacagctgttggaagagctgcgggatctgtagttattgaagttagaagacaattcaaagatattccaggaataatggaaggaacaggaaaacctgaatacggaaagtgtgtagacatactgacaaaatcagctatcagagaaatgatagtaccatctatgctgcctgttttgtcacctatagttgtttattttgttattttattaattgcaggtcagtctgcagcactttcttgtttaggggcacttttacttggtgttattattacgggtttatttgttgcaataagtatgactgctggtggtggagcatgggataatgcaaagaaatatattgaagatggtaatcatggcggaaaaggaagcgaagctcataaagcagcagtaactggagatactgtaggagatccttataaggatactgctggaccagcagttaatcctatgattaagattacgaatatagtggctttactactgctagcatctatagcaatttaaa

SEQ ID NO: 267733 - DNA, 782 bp, Unknown
  Bacterial polypeptide expressing nucleotide sequence isolated from the Sargasso Sea
aatgaactcatcaacagaaacaataatgtattatattatagcggctggaattttatccatcgtatatggttttattacaggtagaaatattttaaattcaagctcaggtaacgccaagatgctagaaattgcctctgcaattcaagaaggagctagagcttatttaaatagacaatataaaacaattgcaatggtcggtgtagtggttctaataattattacagttttatttagtcctttagttggcttaggttatttaataggtgctgctttatctgggattgctggttatgttggcatgcttgtttctgtgcaagccaatgttagaacagctgaagcatctagaaaaaatttagcaagtggattatcaatagcatttaaatctggtgcagtaactggaatgcttgttgctggtttagccttactttcaattgcagtttattattattttttggttaaaactggtgttgaagaaagagaaattgttaatgcacttgtagcattaggatttggtgcatcgttaatttctatttttgcaagacttggtggaggaatttttacaaaaggtgcagatgttggtgctgatttagttggtaaagttgaggctggaattccagaagatgacccaagaaacccagcagttatagcagacaacgttggtgacaatgtgggagattgtgcaggtatggatgctgatctctttgaaacttatgctgtcactattgttgctaccatggttctttcatctattttttttgtaaatgatttaaacatgatgatat

SEQ ID NO: 267734 - DNA, 1387 bp, Unknown
  Bacterial polypeptide expressing nucleotide sequence isolated from the Sargasso Sea
cgctgataatgtaggagataatgtgggtgatgttgctggtatgggtgcagatttatttgaatcatatgttggaggtgtaattgctacaattgtaatagcatccagcatgtcttatggtacagaagctaaatttgcactatatggttttccaattattttaattattgttggaactttagcttcatttatagggactaaagttgtagatctaattcaaaattcggaaccatctggtgtactaagaaaagcgtctctaactgcgggaatattattcttagtcttcggatatttttctttgaactacgtaggctcaaatgcggggctaccaagttcaacaattttaagtatttttacatgctcaataattggtcttttttctggatctctaattgggggaataacagaatattacactgctggaaagccagttcacgaaattgcagatgcatcaaatagaggtggggttgctactaatattattagtggtctatcagttggtatgctaagtacagctctaccaataattgttatagtgcttgcaatttttctatctttcaacagctttggattatacggaattggtatagccgctgttagtatgctttcaacaattggaattacaatgtcagttgatgcatatgggcctattgctgataatgctggaggaattgctgaaatggcagggttgggtcctgaggttagaacaattactgacaaactcgattcgttgggtaatacaactgctgctattggtaaaggttttgctattggctctgcagctctaacgtctttagcattgtttgttgcgtttgcagcagctaccaatttaaattctgttgacatcttacaatacaaagttgtatgcggattgttacttggtggaatggtaccttacttgtttggtgccttaacaatgggtgctgtaggtagatcagcagagaaaatggttcaagaagtaagaagacaatttaaagaaattgcaggaattatggagggtaaagcggaacccgactatcaatcttgtattaaaattagtactgaagcatcgttaaaagaaatggtacttccaggaattttggctgttgtgtgtcctatagttgtaggattccttttaggggcgagtggcttagccggattcctagctggagctttaatctctggtgttgcattagcattaatgatgtctaatgctggtggtgcatgggacaatgctaagaaatatatagaagaaggtaaccaaggcggaaaaggttcagaagctcacaaggcagctgttgttggtgatacaataggtgatccatttaaagatacatctgggccggctatgaacattttgataaaacttatgacaattgtttctctagttatagcgcctatcttcctataa

SEQ ID NO: 267735 - DNA, 2050 bp, Unknown
  Bacterial polypeptide expressing nucleotide sequence isolated from the Sargasso Sea
tatggacggcttagttttggccttagcggctggagttttagcgatagtgtttgcgggatatcttgctaaacgggttctaagtgcagatgaaggaacagatcggatgcaagaaattggcgctgcaattcaggaaggtgcgaatgcttttttgaaacgtgaatatacggtcctagcaggctttgttgtgatcgtttttggtgtacttttaacactaggttatcttcaagatgagcagagccctgagactgcaatcgcttatttagtgggtgcaattgcatctgcaataacagggtttgtgggtatgcgtatagctgttaaatccaatatgaggaccgcagcagcagcgcaacacggcttaaataaagctttgcgggtagctttttctagcggtggagttatgggaactaccgtcgtcgggatagggatacttgggactgcaatattatggatgatttttgaggatcccaaaatagttgcgggatttagctttggcgcatccagcattgctttatttgcacgtgttggtggaggtatatataccaaggctgctgacgttggtggagatcttgcgggcaaagtagaagcgggtattcccgaagatgacccccgcaatgctgcagttatcgcagataatgtaggtgataatgtaggagatgttgcagggatgggagcggatttatttgaatcttacgttggttcaataattgcggctttggcgcttgctgctacggctagtgcctttattacttctgacagccctgtagataatttgtacatactacctttccttatagcttcggttggtattgtggcttcaattttaggtacgtttattgttcgtacaggagaaactgcaaatattggaagcttattgtggtcgctacgtcgaggaatatttgctgcttcgctacttgctcttttaggatcatttggagctatttattggttgttagaaattgaatcttccttaggtgtcgagaaagtttggcagttatggggggcagtagcagtaggtcttgttgcaggcgtgattattggggtaagtacggagtattacactagctatgagtacaagccgactaaaggtatcgccgctcgttccgttactggacctgcaacaattattatcacgggttttgctacaggaatgcttagtacagtcatacccttaatagtgattgctgttgcggtacttggagcttacgagctagcaggagtttatggcatagctatcgctgcagttggaatgctgtctaccttaggcataacgcttgctactgacgcttacggaccagttgctgataacgccggagctattgcagaacaggctcatctagaccctgaagtgagagaacgtactgacgctctagattccctcgggaatactacagctgcaacgggtaaaggctttgcaataggttctgcagtattaacatctttggctttgatggcagcttatgccgaagtcgtaggtttggatgcaattgatttgttgaaagtatcaacgctagttgggcttttaattggagctttgatgccatttgtgttcagcgcgcttactatggaagctgtaggtcgtgctgcccaggacatggttgaagaagtacgaaggcaattcaatgaaatccctggattgcgcgaaggtaaagaaggtgttcgtgcagaatatgctaaatgcgtggatataagcacaaaaggtgcgctgcgtgaaatgattatccctggcttgctagcggttattgttcccattgtggtcggattaataccatttttgggcgcagaagcggtaggaggtttgcttattggatctattgctgcaggctctcttcttgcaattacgatggctaatgctggaggagcatgggacaatgcgaaaaaatttattgaagcaggagcccacggtggcaaaggtaccgacgaacatgcagctgcggttgtaggtgatacagtcggagacccatttaaagacacttcagggccatcgctgaatattttgataaaattaatggcaattgttgctgtagtgtttggtagtacttttgtttcttaa

SEQ ID NO: 267736 - DNA, 1627 bp, Unknown
  Bacterial polypeptide expressing nucleotide sequence isolated from the Sargasso Sea
atggaaatcattcacttaataataggagcaggtattttagctgtagtctatggcatagttacatctatttcagtgctttcggcggatactggaaatgaaaaaatgcaggaaattgctggcgctatccaagagggagcaagcgcatatttatctaggcaatactctactattgctatagtcggtttagtaatattagtaatttcatattttctacttggattagaggtttctataggttttcttattggagcagtgctatccggaattgctggatacattggaatgcttgtatcagttagagcaaatgtaagaacaactcaagcggcctcaaacagtttggctgaaggcttaagtattgcattcaaatcaggagccgtaacgggtatgcttgttgctggtctagcattacttgccgttgccgtttattattatgttttaactaatctatggattccacagaatgacagaatagttatagatgctctagtagctctaggtttcggttcttctttaatttctatttttgctagacttggaggcggtatttttacgaaaggtgctgatgtcggaggtgatttagttgggaaggttgaagccggaatacccgaagacgatcctagaaatcctgcaacaattgctgataatgttggtgataatgtaggcgactgtgctggtatggcagctgatttatttgaaacttatgctgtaacagttgttgccacaatggttttggcctcaatattttttgcaggaaatgaaaccatgatgatttatcctttatcaatatgtggagcttgtgtaattacatctattcttgggacatattttgttaaattaggaaaaagtaactctattatgggtgctctttataaaggatttattgcaacagcaattctttcattagttgttctttattttgttaccgatttagttgttggttttggaacctctctcactatatcaggaaagagttttaatggtttagatttatacatatgtggtgtaacaggattagcaataacaggtttaatcatttggattacagaatattatacaggcgtagactataggccggttaaatcaattgcaaaatcttctgaaacaggacatggaacaaatgtcattcagggcttagcaatttcaatggaatcaacagctcttcctgctttagtgattgtttttggaattattattacttattcattagcgggtcttttcggtattgctgttgcggtaactacaatgttggcgcttgcaggtatggttgttgctttagatgcttttggtcctgttacagataatgcaggaggaatagccgaaatgtctgaacttcctgaagaagttagaaacacaactgattctttggatgctgttggtaataccacaaaagcagttacaaaaggttatgcaattggatcagctggtttaggtgcattagttctttttggcgcttatactgcagacttagaatatttctcatctaatgctgctgagggaagttatttctttggagtgaatcctgacttttctctttctaacccttatgttgttgttggtttattggttggtggtatgcttccttacttatttgcagcattaagaatgacagcagttgggcgtgcaggct

SEQ ID NO: 267737 - DNA, 1366 bp, Unknown
  Bacterial polypeptide expressing nucleotide sequence isolated from the Sargasso Sea
ttgccattagtaattgcatcttcaggtattattgtttcaattattggtacatttcttgtctctgttaaagagggtggtaatccacaaaaagcattaaatattggtgaatttggctcatctgcaattatgattgctgtaatgtattttttaatttcaaatcttttacctaactcatttaccctaggtgataattcgtatacaaatttaggtgttttctgggcttcaactattggtttacttgcaggtcttggcattggcatgattacagagcattacactggaacaaatacatcaccaactctttcaatagctcgacaatcattaacaggtcccgcaacaaatatcatcgcaggtcttggtgttggtatgcagtcaacagctgggcctattttgattattgctgcaggtattgttggtgctcattattttgcaggactttatggtgtagcaatggcagcgttaggaatgcttgctaatacaggaattcaacttgcggtagatgcatatgggcccatttcagataatgccggaggcattgctgaaatggcagagcttccagccgaagttcgcgaaaggacagataagctagatgctgtaggtaatacaaccgctgcaataggtaaagggtttgctataggctctgcagcattaaccacactagcactatttgcggcttatatggtaaagagcggaattattgataaaggaattgatatagcaaatcctgctgttatggctggattatttgttggtggaatgcttccgtttcttttttcatcaatggcaatgggggctgttggaagagcagctatgtctatgattgaagaagttcgtcgacagtttagagatattcctgaacttaaatcagctctagaaattttaaataaaagtgaagaatcacaatggtctgaaaaggaccgtgaagtttatgagttaggattaatgaaagctgatcatggtcagtgtgttgaaatttccacacaagcagcaataaaagaaatggtcttacctggtctacttgcagtgattacgccagttgttttcggttttggaccaaaattatttggaagcgatcttggaccgcaaatgctgggaggcttattagcaggagtgactgtctgtggtgtattaatggcaatttttcaatctaatgcaggcggagcttgggataatgcgaaaaaaatggttgaggaaggtcttaatattgatggggaatcatacggaaaaggttctgaagcgcataaagctgctgtagttggagatacagtaggtgatccatttaaagacacctcaggcccatctctaaatatattaattaaacttatgtccgtagtgtcattagttatagcgccactgatcgcataga

SEQ ID NO: 267738 - DNA, 1411 bp, Unknown
  Bacterial polypeptide expressing nucleotide sequence isolated from the Sargasso Sea
gctgcagctttaacagtatctttttatggtggctcaataatgggtctttgtgttgcttcattaggcctaataggtttgggaggcctatattttttctatataccagctgaaattgaccctcataagctagaaggttttgccatgggggcatctgtagtagccctcttttccagagtaggtggaggaatttttacaaaaagtgcagatgttggagctgatcttgttggtaagattgaagcaggcatacctgaagatgatccaagaaatccaggtgttattgctgataatgttggtgataatgttggtgatgttgctggaatgggctcagatatatttgaatcatattgtggctctatgattgcatctatagctatagcttatactttaggaaacaaagatatgatgatgcttcctttagctttagcatcaactggtttaatagcttcaataattggaatattcatagtcaaacttcagtctgcaaaagcacctgctagtgcattaagatctggaactcttttagcaccagtaatatttgtggctatggcatattttataattgattcttttgaaggagttggaatgaatgtatggtggtgtgttattgctggtgcagtaggcggagtcttaattggacttataacagaatattatacaggcggtagcccggttaaaaaaattgctgaatcaggagaaactggttctgcaacagtaatgatttcaggactatcagttggaatgcaatcagttgtaatacctattggtatcttagctggaattattcttacctctactcaattatcaggtatttatggtgttggaattgctgctgttggcatgctcgcaactgttggaataacaatggcaatagatgcatatggaccagttgctgataatgccggtggcatcgctgaaatgtcgagcatgggtgaagaagtaagagaaattactgattctcttgatgagttaggaaatactactgctgcaattgggaaaggttttgcaattggtgctgcggcgttagctgctctagcaataatttcagctttttcagctgtagtggcggatgcaaatccagaattttcattggcacttacagaaccaattgttttagttggaatgtttattggagtatgtataccattcttagtttcttcaataactatgacagcagttggagatgcagcttttgaaatgattaatgaaataagaagacagtttaaagagataccaggtttaatggagggttcagcagagccagattctgagaagtgtgttgaaattgctacaaaagcagcccttaagaaaatgatgttgcctggagtaatagctgtatcaatgccaactattgttggttttggtcttggtgcacaggctttaggtggaatgcttgctggtggattgctaggtt

SEQ ID NO: 267739 - DNA, 1612 bp, Unknown
  Bacterial polypeptide expressing nucleotide sequence isolated from the Sargasso Sea
tatccctacttttctatttatattggaggcttaaatggtaatgcagacttttcattagtaatgactaaagtttctggttttgcaatgggtgcttcatcaattgctttatttgcccgcgtaggtggtggaatctatactaaagctgccgatgttggtgcagatttagttggaaaagtagaagcaggtatacctgaagacgacccaaggaatcccgcaacgattgctgacaacgtaggtgataatgtcggagatgttgcaggaatgggtgcagatctttttgaatcttatgtaggttcaatgattggagctatggttttagcagcaacagctggagaaaaaagtctagtatttctaccattatttttagcagcagctggaattatagtttctatttttggtacattttttgtaaaaacaaaagaaggaggaaatcctcaaacggcactaaatatcggagtatttggctcaggagctgtaatgaccgtggttagttactttttgattggtagactaatcgaaaatcctgttgctttagctgatggataccaaaatgtacaagcgcttgatttatttcttgctactgtagtagggttggtttcaggaattttaatcggagttttaacagaatattatacttctgatcatcaaaaaccatcacagaatgtcgcagcttcaagtgaaactgggtcagcaacgaatattatttccggcttagctaatggaatgttctcaactgccttgccagtattagtaattgcactttccattcttggagcatatcactttgctcatctatatggtattgctttagctgcactaggtatgctatcaacaattggaattcaattagcagtcgatgcttatggtccaattgcagacaatgcaggcggtatcgctgaaatggcagaacttccaaaagaagttcgcgaaagaactgataaacttgatgctgtgggtaatactaccgcagctattggtaaaggttttgcgattggttctgctgccttaacatctttagcgctatttgcagcatttagagaaacagttggtggcttaacattagatattaataatcctcaagttatggcaggtctattaatcggatcatcattaccatttgtattttcagctcttgcaatgcaggcggttggagatgctgcttttgaaatgattgaagaggttagaagacaattcagagaaataaaaggcttgcttgatggaaaagcaaaagcagattatgctaaatgtgttgatattgctactacagctgcaatcaataaaatggtactacctggagcattggcagtattcacaccaattatatttggcttggtattaggtcaaaaagaaatgcttggtggtattttagctggagtgacagtaactggtgtgttactagcaatctttatgtcaaatgctggtggatcttgggacaatgcaaaaaaatacattgaatctggtaatcatggcggaaaaggtagtacagcacataaagctgcagttgttggtgatacagttggggacccttttaaagatactgcgggaccatcactaaatattttaatcaaattaatatcagtggtatcgcttgtaatcgcaccacttatataat

SEQ ID NO: 267740 - DNA, 1990 bp, Unknown
  Bacterial polypeptide expressing nucleotide sequence isolated from the Sargasso Sea
atgaatgtattaattgcccctgcattgggcgttcttggtttgattgctgcttttgtggtttttagtttggtcatgcgttattcagatggaactgatcaagtgaaaaagattggtgatgaaattcataagggcgcaatgaaattcatgaaaacagaatatacatatttattaatttttgtagccgtattggttgtgctggttgcaacatttctaactatccaatcagctattgcggttgtagttggagctgcttgttcatcgttagctggattcattggaatgtatgcggcaacaaaagcaaatgtaagaactgcaacagcagctcagcaagatggagctgcagcagcattgagcgtttctttttatggcggttccgtaatgggtttatgtgttgcgtcgctaggtttaattggtttgggcggcttattctatttctttagtgaatctcatgttcatgcgcttgaaggatttggaatgggcgcttcagttgttgctctattctctcgagtaggaggtggaatctttactaaaagtgctgatgtcggggctgacttagttggaaagattgaagcaggaattcccgaggatgatccaaggaacccaggagtaattgctgacaatgttggtgataatgtaggagatgttgctggaatgggatcggatatatttgagtcctattgcggatcaatgattgcctctattgctatagcatatactttaggctccaaagaaatgatgatgtttcctttagccttaacatccattggactaatagcttctatcattggaatagtaatcgttaaattacaatcagcaaaagctccagcaagcgctttgcgatctggaacacttttagctcctgtaatctttatagccatggcatatttcttaacaaacagtatggctggagtatcaatgaatgtctggtgggctgtagtatgtggagctgttggaggagtcctaattggattgattactgaatactatactggcggagcgccagttcaaaaaattgctgagtctggagaaaccgggtcagcaactgttatgatttcaggtctttctgttggaatgcaatccgttgtaatcccaatttcagttttagcaacaattattcttatttcaactactttatctggtgtttatggtgttggtgttgcagcggtaggcatgctttcaaccgttggaattactatggctatcgatgcatatggtcctgtagcagacaatgcaggtggaattgcagagatggcaggaatgggcgaggatgtcagagagattactgattcattagatgaactcggtaacacaacagcagctattggaaaagggtttgctattggtgctgctgctcttgcagcactagcaattatttctgcattttcagctgttgtaagtctaaactttggcgaagcatttactttgtctcttggccaaccaattgtattggttggtatgtttattggaatatgtattccatttttaatttcttcaatcactatgacagctgttggtgatgctgcttttgaaatgattaatgagataagaagacaatttagagaaattgctggtttgatggaaggtaatgctgatcctgactcagaaaaatgtgttgagatagcaaccaaagctgctttaaagaaaatgatgttacccggagttattgctgttgcaatgccagcagtagttggattcggtcttggtgctatggctttaggtggaatgcttgcaggtggccttttaggctgcgttgcgcttgccttatttatggcaaatgctggtggtgcttgggataatgctaagaaatatgttgagaagggcaactttggtggcaagggttcagacactcatgcagcagttgttgttggagatactgttggggatccatttaaagatacatctgggccttcaatgaacattttaattaatgtgatggcaatcgtgagtctagttatcgctccactattaacattgaatggcatgttataaa

SEQ ID NO: 267741 - DNA, 1939 bp, Unknown
  Bacterial polypeptide expressing nucleotide sequence isolated from the Sargasso Sea
agacaatataaaacaattgcaatagtcggtgttgttgttttggttataattaccttgccatttaattatttagttggtttaggttatttaataggggcaactttatctggaatagcaggttatgttggaatgcttgtttcagtgcaagcaaatgtaagaacagcagaagcatcaagaaaaggtctttctcatggtttatctgtagctttcaaatctggtgctataactggcatgttggttgcaggattagcattattatctattgctgtttattattttattttactcaaactacgagttgaagagcgtgaaatagtaaatgcacttgttgcattaggttttggtgcatctttaatttctatttttgcaagattaggtggaggtatatttactaagggtgcagatgttggcgcagatttggttgggaaggttgaagctggtattcctgaagatgatccaagaaatcctgctgtgatagcagacaatgtcggagataatgttggtgattgcgcgggaatggctgctgatttatttgaaacttatgcagttactatagttgctacaatggttttgtcttcaattttctttcatggagatacaaacatgatgatttatcctttaacaataggaggggcttgtattattacttcaattattggaacattttttgttaaattgggaaattcaaaaaatgtaatgaacgccttatacaaaggatttattgctacagcaattctatctttaattgttttatatcctgttacagattatgtaattggatttgaaaaaaattataccgtaggaatcaaaacatttggtggaataaatttatattactgcggtgtaataggattaattattactggattgcttatttgggttacagagtactatacaggaactaattatagacctgttaaaagtgttgccgcatcttctacaacaggtcatggaactaatgttattcaaggactcgctgtgtctatggaggcaacagctatacctgctttaataatagttgcagggattttattaacaaatcatattgcaggtctttttggtatcgcaattgcagtaacaacaatgcttgctctagcaggaatggttgttgcgcttgatgcatacggtccagttacagataatgctggtggtattgctgaaatgtcaaatttaccaaaaaatgttagaaaaaccactgatgcactagatgctgtaggcaatactactaaagcggtaacgaaaggttatgctataggttcagctggactaggagctcttgttttatttgctgcttatacagaagatattaaacatttttccaaagtagctggatctaaattagaaggaatagttgttacttttgatttgtcgaatccttttgttgttgttggtttattaattggaggaatgttaccttatctttttggatctatgggtatgcaagctgttggaagagcaggcggtgctgttgttgttgaagtgagaagacaatttaaaaaaatacctggaataatgaaacgtaaagcaaaaccagattatggtaaacttgttgatttactaactaaggctgcaatcaaggaaatgataataccatctttgttaccagttctatctcctatagttttgtattttattattttaccaataggaggtcaagttgctgccctatcctcagttggtgcgatgctgttaggtgtaattataactggtttatttgtcgctgtttctatgacagctggtggtggtgcttgggataatgctaaaaaatatatagaagatggtaaatttggaggcaaaggatcagaagcacataaagctgcagttactggcgatacagtaggcgatccttataaggatacagcaggtcctgcagttaatccaatgattaaaattacaaatattgtagctctattattgcttgccgttatagcagggtaaa

SEQ ID NO: 267742 - DNA, 1323 bp, Unknown
  Bacterial polypeptide expressing nucleotide sequence isolated from the Sargasso Sea
ggtgcagctttatcaggtatagctggttatgttggcatgttggtttctgttcaagcaactgttagaaccgctgaagcctcaagaaaagggttagctaacggtctttctgttgcattcaaatcaggtgctgtaacaggaatgttggtagcaggtttagctttattagctatagctgtatattattacttgttattaaaatttaatgttgatgagagagaaattgttaatgctctggttgcattagggtttggtgcgtctttaatatcaatttttgcgagattaggtggaggtatttttacaaaaggagctgatgtaggagcagacctagtaggcaaagtagaagccggtattccagaagacgatccaagaaatcctgcagtaattgctgataatgtgggagataatgttggtgattgtgcaggtatggctgctgatttatttgaaacctatgccgttactatagttgctactatggttttatcttcaattttctttccaggtgatatgtcaatgatgatttatccattaactatcggtggagcatgcattttgacttctataataggaactttctttgttaaacttggtaaaaataagaatgttatgggagctttatataaaggatttattgtttcagctataacttcattggtaattctttatcctgtaaccgattttgttttaggtttagaaaataattataatttaaataataaatcattttctggattgagtttatattattgtggaattattggattaataataactggtttgttaatttgggttactgaatattatactggtactaattatagacctgttagaagtgttgcaagttcatcaactactggtcatggaacaaatgtaatccaaggtttagcaatatcattagaggctactgctataccagcattgataattgtagcaggtattttactaactaatcatattgctggtttatatggtattgcaatagctgttacaactatgttggctttagctggaatggtagttgctttagatgcttatggtcctgtaacagataatgcaggaggaatagctgaaatgtctaaattgcctaacaatgttagaaaaacaactgatgcattagatgctgtgggaaatacaacgaaggctgttacgaaagggtacgcaattggttctgcaggattgggagctttagttctttttgctgcttatacagaagatattaaacatttttcaaaagttgcaggctctaaattagaaggtgttgttgtcacttttgatttatctaatccttatgttgttgtaggtttattaattggtggaatgcttcca

SEQ ID NO: 267743 - DNA, 1322 bp, Unknown
  Bacterial polypeptide expressing nucleotide sequence isolated from the Sargasso Sea
attagcgattggtggtgcatgcatactaacatctattttaggaactttttttgtaacacttggaagtgataaaaatataatgaaggctatgtacaaaggctttgttataactgctataagttctctcatcattttgtatcccattactaaatatgtaattggttttactaatgaatatattgtaaacgaaaagtcatttactggattaagcttatatttttgtggaataataggtcttgttatcacgggactaattatatggattactgaatactatacaggcacagattacagacctgtcaaaagtgtagctcaatcctcaacaacgggacatggtactaatgtcattcaaggattagcggtttcaatggaagcaactgctattcctgcattaataattgttggtggaattttattaactaatcatattgctggtttgtatggtattgcaattgcagtaactacaatgcttgcgcttgctggcatggttgtagccttagatgcatatggacctgttactgataatgctggaggaattgcagaaatgtctaatcttccaaaaaatgtaagaaaaactactgatgccttagatgcagttggaaatactacaaaggcggtaacaaaaggttatgcaattgggtcagctggacttggagctttagttttatttgctgcttatactgaggatattaaacatttttctaaagttgctggttccaatttagaagggattatagttacatttgatttatctaatccatttgttgttgttggtttattaattggtggaatgcttccatatttgtttggatcaatgggtatgcaagcagtaggtagagcaggtggagctgtagttattgaagttagaagacaattcaaaaaaattcctggtatcatgaagcgtaaggctaaaccagattatggcagattagttgatttattgacaaaagccgctatcaaggaaatgataatcccatctttgttgccagttttatctcctatagtgctttatataattatttatttcatagggggacaagtagcagctttatcagctgttggcgcaatgcttttaggagtaattattacaggtttatttgttgcagtttcgatgactgcaggaggtggagcttgggataatgcgaaaaaatatatagaagatggaaaatttggtggaaaaggatctgaggctcataaagctgcagttacaggtgatactgtaggtgatccttataaagatacagcaggcccagcagtaaatccgatgataaaaattacaaatattgtagctttactattacttgctgttattgctggttaga

SEQ ID NO: 267744 - DNA, 835 bp, Unknown
  Bacterial polypeptide expressing nucleotide sequence isolated from the Sargasso Sea
atttatggtgtaggaattgccgctgttggtatgctcgctactgttggaataactatggcaatagatgcatatggaccggttgctgacaatgctggcggcatagctgaaatgtcaggcatgggtgaggaagtaagagaaattacagactctcttgatgaattaggaaatactactgctgcaatcggaaaaggttttgcaattggagctgcagcgttagctgctttagcaataatttcagctttttctgctgtagtaggtgtagcaaatcctgaattttcgttagcacttacagagccaattgttttagttggaatgtttataggagtttgtataccgtttttagtttcttcaataacaatgacggctgttggtgacgccgcttttgaaatgattaatgaaataagaagacaatttagagagatatctggcttaatggagggcactgcagaacctgattcagaaaaatgcgttgagatagcaaccaaagctgcattaaagaaaatgatgttaccaggagtaattgcagtttctatgccagccattgttggttttggtcttggtgctcaagctttaggaggcatgcttgctggtgggcttttaggatgtgtatctctcgcacttatgatggcgaatgccggaggtgcttgggataatgcaaaaaaatatgttgagaagggcaacttgggtggcaaaggttctgatactcacgcagcagctgtagtaggtgataccgttggtgatccttttaaagatacgtcaggaccatcaatgaatattttaataaatgtaatggctatagttagccttgtaattgcgccattattaagcatataaa

SEQ ID NO: 267745 - DNA, 931 bp, Unknown
  Bacterial polypeptide expressing nucleotide sequence isolated from the Sargasso Sea
tatttgtgcagcaatattactctcctatgagtttgctggtctatatggaatagcaattgctgctgttggtatgcttgctaatacaggtatccagttggcagttgatgcatacggacctatttcagataatgctggaggtattgcagaaatggcagagttagatcctaaagttagagagagaacagataagcttgatgcagttggaaatacaactgcagcaataggaaaaggttttgctattgcatcagctgctctaacagctctagctttatttgcagcatttatgcaaacagctgaaattactgctattgatatttcaaaaccagttgttatggctggacttttactcggtgcaatgctcccatttgttttttctgccctttcaatgaaggcagttggtaaggcggcaatgagtatgattgaagaagtgagaagacaatttaaggaccttccaaaattgaaagcagctcttgaagtaatgagaaaatatgactcagatatttctaaagcttcgaaagaagatctaaagatttttaatgatgctgatggtgttgcagaatatagtaaatgtgttgaaatttcaacacaagctgcattaagagagatggttcttccaggattaatggctatttcagttccagttataattggatttgctggtggtgcagaaatgctcggtggtcttttagctggtgttacatcatgtggtgttctaatggctatttttcaatcaaatgctggtggtgcatgggataatgcaaagaaaatgattgaagaagatggaagaaaaggtactgaagctcataaagcagcagttgttggtgatacagttggtgatcctttcaaagacacatctggaccatcactaaacattcttcttaagttaattgctgttgttgctcttgttatagctccacttctagtaggctaa

SEQ ID NO: 267746 - DNA, 1597 bp, Unknown
  Bacterial polypeptide expressing nucleotide sequence isolated from the Sargasso Sea
gggtttagctttattagcaatagctgtttattactatttgttattaaaattcaatatcgatgaaagagaaatagtgaatgctcttgtagcattaggttttggtgcatctttaatttctatttttgcaagattaggtggtggtatttttactaaaggagctgatgttggagctgatttagttggaaaagtcgaggctgggatacccgaagatgatccaagaaatccagctgtaattgctgataatgttggagacaacgttggtgattgtgcaggtatggctgcagacttatttgaaacatatgctgtaacaatagttgcaactatggttttagcttcgattttttttccaggtgatatggcaatgatgatttatcctcttactattggtggagcatgtattttgacatcgattgttggaactttttttgtcaaacttggtaaaagtaagaatgtaatgggagctttatacaaaggctttattgtatctgctataacctcattagcaatattataccctgtcacagattttgttctaggtttagaaaatacatataatttaaataataaatcattttctggaatgaatttatattattgtggagtaatcggtttaataataacaggattgctaatatgggtaactgaatattatacaggtacaaattataggccagttaggagtgttgctaattcatcaacaactggtcatggtactaatgtaatacaaggtttagcaatttctttagaggcgacagctgtacctgcgttaattattgtggcaggtattttactaactaatcatattgctggtttatatggaattgctatagctgttacaaccatgttagctttagcaggaatggttgtagctcttgatgcttatggtcctgttactgataatgcaggtggtattgcagaaatgtcaaaattacccaatagcgttagaaaaacaactgatgctttagacgctgtaggtaatacaacaaaagcagtaactaagggatacgctataggatctgctggtttgggagctttggttctttttgctgcctatacagaagatataaaacatttttcaaaagaaataggttcaaatcttgagggtatagttgtaacttttgatttatcaaacccttatgtagttgtaggattattaattggaggtatgcttccttatttatttggatcaatgggaatgcaagcagttggtagagcaggcggtgctgttgtaattgaagttagaagacaatttaagaaatatcctggtattatgaaaagaaaacaaaaaccagactatgctaaacttgtagatttattaactgtagctgcaattaaagaaatgattattccatctttactaccagtattatctcctattgttttatattttataatttttgcaataggcggtcaggttgcagctttagcctctgtaggtgctatgttattaggtgtaattataacaggtctttttgtggccgtatcaatgacagcaggtggtggtgcttgggataatgcaaaaaaatatatagaagatggaaattatggtggaaaaggttcagaggctcataaagcagctgtaacgggagatactgtt

SEQ ID NO: 267747 - DNA, 922 bp, Unknown
  Bacterial polypeptide expressing nucleotide sequence isolated from the Sargasso Sea
agttgctggtatcttattaacaaattcaatagcaggtctttatggtatatccatagctgttacaactatgttggctttagctggaatggttgttgctttagatgcttatggacctgtcactgataatgctggtggaatagctgaaatgtctaaattacctaataatgttagaaaaactacagatgctttagatgctgtaggaaacacaacaaaagccgtaaccaagggatatgctattgggtcagcaggtttaggcgcattagttctttttgctgcttacacagaggatataaaacatttttctaaaattgcaggttctaaacttgagggtgtagtcgttacctttgatttatcaaatccatatgttgtagttggtttattaataggtggaatgttaccttatttattcggttcaatgggaatgcaggctgttggaagagcaggaggagcagtagttgttgaggtaagaagacagtttaaaaaatttcctggaattatgaagaaaactcaaaagcctgattacgcaaaattagttgaccttttaacaatagcagcaattaaagaaatgatcataccttcgttattgccagttttatctccgatagttttatactttgtaatattttcaattggtggacaggttgcagcattagcctcagttggtgcaatgttattaggtgttataataactggattgtttgttgctgtgtcaatgacagccggtggtggtgcatgggataatgcaaagaaatatattgaggatggtaactttggtggaaaaggatcagaagcacataaagccgctgttactggtgatactgtaggagacccctataaagataccgcaggtcctgcagttaatcctatgatcaaaattaccaatatcgttgcgttattattacttgcagtaattgcttcttaa

SEQ ID NO: 267748 - DNA, 1528 bp, Unknown
  Bacterial polypeptide expressing nucleotide sequence isolated from the Sargasso Sea
atttgatattgatgaaagagaaatagttaatgcacttgttgcattaggttttggagcatcattgatttctatttttgcaagacttggtggtggaatttttactaaaggtgcggatgttggagcagatttagttggtaaggttgaagctggaattccagaagacgatccaagaaatcctgcagtaattgctgacaatgtaggtgataatgtaggtgattgcgctggaatggcagctgatctatttgaaacttacgcagttacaattgtagctacaatggttttatcatcaatcttttttgtagaagacttaaacatgatgatatatccacttacaataggtgctgcttgtttgttaacttctattattggcactttttttgtaaaacttggaagaagtaataatgttatgaatgctttatataaaggatttattgtttcagcagtatcttcattagcaattttatggcccgttaccgatcatgttataggttttacaaatgaatacacagtaaataataaaacttttaatggtatgagtttatattactgtggagtaataggattggttattacaggtttattaatttggattacagaatactatacaggtacaagttacagacctgttaagtctgttgcactatcttcaacaacgggtcatggaactaacgttattcaaggattagcagtgtcaatggaagctacagctattcctgcattaattattgtttctggtattttagttactaattcaatagctggactttttggtatagctattgctgttacaacaatgctagctttagctggtatggttgttgcattagatgcttatggaccagtaacagataatgctggaggtattgcagaaatgtctaatttagataaaaaagtaagaaaaactaccgatgcattagatgcagtaggtaatactacaaaagcggttactaaaggttatgctatcggatcagcaggtttaggagctctagttttatttgctgcttatactgaagatattaaacatttttcaaaagtttctggatcagcacttgaaggtattgtagtgacttttgatttatctaatccttacgttgttgttggtctattaattggaggtatgttgccatacttgtttggttctatgggtatgcaagctgtcggaagagcaggtagtgcagttgttgttgaagttagaagacaatttaaaaaatttcccggtatcatgaaaagaaaacaaaaaccagattatgcaaaattagtagatttactcactgttgctgcaatcaaagaaatgataataccatctttattaccagttctttctccagtggtactttatttcataattttatctattggtggtcaagtggctgctctcgctgcagtaggtgcaatgttattaggagtaattattacaggattatttgttgcagtttctatgacagctggtggtggtgcatgggataatgcaaaaaaatatattgaggacggtaatcatggtgaaaaggttctgaagctcataaagctg

SEQ ID NO: 267749 - DNA, 1497 bp, Unknown
  Bacterial polypeptide expressing nucleotide sequence isolated from the Sargasso Sea
ttccggaggatgatcctagaaaccctgctgtaattgcagataacgttggtgataacgtaggtgattgtgctggtatggctgctgatttgtttgaaacctacgctgttacaattgtagctacaatggttttatcttcaattttctttcatggcgatattaatatgatgatttatccattaactattggtggagcatgtattttaacatcaataattggaactttttttgtgaaacttggtaatgacaaaaacgtgatgaacgctttatataaaggttttatagtttctgcacttgcttcattagcaatattatatccagttacagatcatgttattggttttacaaatgaatacactgttaatgataaaacttttaatggattaaatttatattattgtggtgtaattggtctaataataacaggattgttaatttggattacagaatattatactggtacaaattatagaccagtaaaatctgttgcagcatcatcaacaacaggtcacggtaccaatgttattcaaggattggctgtatctatggaagcaacagctattcctgcattaataattgttgcaggtattttagttacaaattctatagctggattgtttggtatagctatcgccgttacaaccatgttggctcttgctggaatggttgttgcgttagatgcttatggtcctgttacagataacgctggtggtattgcagaaatgtcaaacttagataagaaagttagaaaaacaactgacgcattagatgcagttggaaatacaactaaagctgtaaccaaaggttatgcaattggatctgctggattaggtgcattagttttatttgctgcttatgtagaggatattaaacatttttctaatgtcgctggttcaaaattagaaggtatagtagtaacatttgacttatcaaatccatatgtagttgttggattgttagtaggtgggatgctaccgtatttatttggttctatgggaatgcaagccgttggaagagcaggtggtgcagttgttgtagaagttagaagacaatttaaaaaatttccaggcataatgaaaagaaaacaaaaacctgactatgctaaattagttgatttattaacggttgcagcaatcaaagagatgatcattccatctttattaccagtgctctcacctgtagttctttactttattattctatcaataggtggacaagtagcagctcttgcagcagttggagcaatgttgttgggtgtaattataactggtctttttgttgcagtttcaatgactgcagggggtggagcttgggataatgctaaaaaatatattgaagatggtaaccacggtggaaaaggttcagaagctcataaagcagctgtaacaggagatactgttggtgacccgtataaggatacagctggtcctgctgtaaacccaatgatcaagattaccaatattgtagctttacttttattggcagttatcgctggctaat

SEQ ID NO: 267750 - DNA, 852 bp, Unknown
  Bacterial polypeptide expressing nucleotide sequence isolated from the Sargasso Sea
ggattaacatttttaaggcaccagttctagcaatgttatttattggtggaatggtacctgtagtattttcagcccttgcaatgaatgctgttggaaaagctgcaatggaaatggtttatgaagtaagaagacagtttaaagaaattcctgggatcatgaaaggaaaggaaaaacctgagtatgataaatgtgttgatatttcaacaaaagcctcactaaaagaaatgatgcttcctggaatattaacaattggtacacctattataattacggtattgccaatgttatttggactagataatcaattaattgctgagatgttaggtggatatatggcaggagttactgttagtggtgtgctttgggcaattttccaaaacaatgctggcggtgcttgggataatgccaaaaaatcatttgaagctggtgttgaaattaacggagaaatgacatttaaaggatctgacgcacacaaagcatcagttactggtgatacagttggagacccttttaaagatacttctggaccatccatgaatattcttattaaacttacttgtttaattggtttagttattgctcctattttaggaaatcatggtgaggatttagcagcttttgatttaaacaagagtgttgagaaaaatgttatacttgctgtaaatgatgagaatcctgaaaagagttcattaacaataataactaaatcagagattaatggtgtggttactgaaaaaactgaaaagtgttatggatctagagctgaacttttattaaaggcagcagaagtttcaggagaatcagaaattgcagatgcttacggatctttaaatattaaagtaagtaattaat

SEQ ID NO: 267751 - DNA, 625 bp, Unknown
  Bacterial polypeptide expressing nucleotide sequence isolated from the Sargasso Sea
tttctcaaagaagctggctcagctcttgaaggtattgttgtaacttttgatttatcaaatccttatgttgttgttggtttgttaatcggtggaatgttaccttatttatttggatcaatgggaatgcaagctgttggtagagcaggtggagctgtagttgttgaagtaaggagacaattcaaaaaatacccaggtataatgaaaagaaaacaaaaacctgattatgcaaaattagtagatttattgacagtagctgcaattaaagaaatgattattccatctttattaccggtactttcaccagtggtattatatttcataatcttagccattggtggacaagttgctgcattagctgcggtgggtgcaatgttattaggtgtaattatcactggtttatttgttgctgtttcaatgactgcaggtggtggagcatgggacaatgctaaaaaatatattgaagatggaaatcacggtggaaaaggttctgaagcacacaaagctgcagtgacaggagatactgttggagatccttacaaggatacagcaggaccagctgttaaccccatgattaaaattacaaatatagtagctttattattgctagctgttatcgctggctaat

SEQ ID NO: 267752 - DNA, 720 bp, Unknown
  Bacterial polypeptide expressing nucleotide sequence isolated from the Sargasso Sea
cacaacaaaaagctgtaacaaaaggttatgcaattggatcagctggtttaggtgccttagttttattcgctgcttatactgaagatattaaacatttctcaaaagaagctggctcagctcttgaaggtattgttgtaacttttgatttatcaaacccttatgttgttgttggtttgttaatcggtggaatgttaccttatttatttggatcaatgggaatgcaagctgttggtagagctggcggagctgtagttgttgaggtaagaagacaatttaaaaaatacccaggtataatgaaaagaaaacaaaaacctgactatgccaaattagtagatttattgacggtggcagcaattaaagaaatgattatcccttctttattgccagtactttcaccagtcgtattatatttcataattctggccattggtggacaagttgcagcattagctgcagtgggtgcaatgttattgggtgtaataattactggtttgtttgttgcagtttcaatgactgcaggtggtggagcatgggacaatgctaaaaaatatattgaagatggcaatcatggtggaaagggatctgaagctcacaaagctgcagtgacaggagatacagttggtgatccttataaagatactgctggaccagctgttaatccaatgattaaaattacaaatatagtagcattgttattgttagctgttatcgctggctaat

SEQ ID NO: 267753 - DNA, 1755 bp, Unknown
  Bacterial polypeptide expressing nucleotide sequence isolated from the Sargasso Sea
caatagcagttggagcattatcttcagcaattgcaggatttataggcatgtattcagcaacacaagctaacgtaagaaccgcaactgcagcagaagagtcaggacaagagcaagctctatcaatttcattttttggtggttcaataatgggtttatgtgttgcttctatgggtttagttggtctaggcggactttatttttattttagtggagttatagaagatcctaatgaacttgccaaagcattagaaggttttggggtaggagcatccgcagtggcattattttcaagagttggtggcggcatttataccaagagtgctgatgttggtgctgatcttgttggaaaaatagaagccggcatacccgaagatgatccaagaaatccaggcgtgattgctgataatgttggagacaatgttggagatattgctggcatgggttcagatatattcgaatcatattgtggagcaatgattgcttctattgctattgctgcaactatgggcaatagcgatctaatgtttttgcctttgtggcttgctgcttcaggattattctgttctttactaggtataggaattgttagaacccaagtttctagatcaccagcggttgcactaagatggggaacatttttatctcctgttttattcttattgtttgctggcgcaagtatttattattcacctgctatagagatgaattatttttattctgtacttacaggagcagttggtggcatcttaattggtttaataactgagtactatactggcggagatacagagaattcaccagtaggaaaaattgctaagtcaggtgaaacaggacctgctacagtcatgatttctggtttaagtgtaggtatgcagtcagttgtattgcctttatttgttattgcaggaattgttgggctatcaacatacttctcaggcctttatggagttggtattgcagcagttggcatgctatcaactgtcggtattactatggcaattgatgcttatggtccagtagcagataacgccggtggaattgctgaaatgagcggtatgaaaagtgaagttagagaaattacggactcacttgatgaattaggaaacacaacagcagctataggaaaaggatttgctattggagcagctgctcttgcggcgttagcaatcattgctgcatatatgcttgcaactggagtagaatcactctcattagacgatcctaaagtcttgatgggaatgtttattggaggctcaattccatttttagtctcttcaataactatgactgcagttggcgatgcggcttttgaaatgatcgaagaaattagaagacaatttagagaaattccaggcttgcttgagggtaaggctgaaccagataatgcaaagtgtgtagatatagctacaaaagcagctttaaataagatgttattgccaggagcaattgcaattggttcgccagtcgctgtcggttttattttaggtccagttgttttaggcggcatgttagcaggagctctattaggttgcgtcttaatggcattaatgatggctaatgctggtggcgcttgggataacgctaaaaagtttgttgagaaaggtaactttggtggtaaaggtacagatactcatgcagctacagttgtgggcgatacggttggagatccatttaaagacacttcaggcccatctatgaatattcttattaatgtgatggctatcgtaagtcttgttatagcaccgcttttataaa

SEQ ID NO: 267754 - DNA, 1984 bp, Unknown
  Bacterial polypeptide expressing nucleotide sequence isolated from the Sargasso Sea
atggaatctaatctaattttaccgccactttttggtatttttggtttggctgttgcctttattttgtacttattggttatgagatatgacgaaggtacagacaaggtaaaaaaaatcggtgatcaaattcacttaggcgctatggtttttatgaggcgtgaatacacttatcttgcaatgtttgtggccgttctaattgttctctcttacttatttttaggtctaaataccgcattagctgtaacagccggggcattatcatcatctcttgctggatggcttggaatgttctctgcaaccaaagcaaacgtcagaactgcaactgctgcatctgagtctggagcgcaagctgccctttctgtggctttttatggtggatcaattatggggctatgcgttgcttctcttggattggtaggtctaggaggcctttacttctattttggaggcgatcctgatactgctagagcaatagaagggtttggaatgggagcgtcatgtgttgctttattctctcgtgtaggaggcggaatttatacaaaaagtgctgatgttggtgctgatttagttggaaaagttgaggcaggaataccagaagacgatccaagaaatcctggagttattgccgacaacgttggagataatgttggagatgttgctggtatgggttctgatatttttgaatcatattgcggagctatgattgcatcaatcgcaattgctgccacaatcgataacaccggaatgatggcgctacctttagctttagcttcccttggactattggcatctatacttggaattataattgttagagtattttccaaagcagaccctgggacagcattaagaacagggactattggatcagcgattctttttataattgcagctttctttttaattcaaatgattttgactgaaaacgccgtaaacacttggttggcagtattagctggcgcagtaggtggggtcattattggattgattacagaatattacacgggatcaaaaccagttgagaaaattgctaaatctggggaaacaggtcctgccacagtcatgattacaggactttcagtaggcatgcaatctgtagttctacctattcttgtcctagctacaataatttgggtttctacctcacttgttggtctgtacggtgtaggcatagccgcggttggaatgcttgctacggttggaataacaatggctatcgatgcttacggtcccgttgccgataatgccggcggtattgcagaaatgtctggtatgggaagtgaaaccagagaaataactgattctttagatgaattaggtaattccacagctgcaattggtaaaggctttgcaataggagcagctgcattagcagctctggcaatcattgctgcttttgttgagacagttgctcacaatagaggtagctttgaattacttctctcagatcccagagttcttgtaggtatgtttataggaatttccattccttttctcatctcctctatcaccatgacagccgttggagacgccgctttcgatatgatcaatgagataagaagacaattcagagaaattcctggcttattagaaggtaatgcagaaccagatactgctaagtgtgttgatatcgcaacttctgctgcattaaaacgaatgcttctgccgggagtaattgctgtaagtgctccagctgtcgttggttttggtcttggtccagaatctcttggaggaatgttaggaggaggtttgataggttgtgtatccatggctttgatgatggctaatgccggcggagcctgggacaacgcaaaaaaattcattgaaaaaggtaacctaggaggaaaaggaacagatactcactctgcagctgtagttggtgacacggttggagatccattcaaagatacttcaggaccttcgatgaatatcttaatcaatgttatggcaattgttagcttggtgatttcacctctgttgtagt

SEQ ID NO: 267755 - DNA, 2107 bp, Unknown
  Bacterial polypeptide expressing nucleotide sequence isolated from the Sargasso Sea
aatgaacacatcaactgaaacaataatgtattatatcatagcggctggaatattatccatcgtttacggttttataacaggaagaaatattttaaattcaagctcaggtaatgctaaaatgctagagatcgcatctgcaattcaggagggtgctagagcatatttaaatagacagtacaaaactattgcaattgttggtgttgtagttctaattgttattacaatattgttcagtcctttagttggattaggttatttcattggagctgcattatcaggtattgcaggttacgtaggtatgattgtatctgttcaagcaaacgttagaactgctgaagcatcaagaaaaagtttagctagcggtttatcaattgcatttaaatcaggtgccgttactggtatgttggtagctggattagctttacttgcaatagctgtatattattattttttagttaagaatggagttgatgagagagaaatagttaatgctttagttgcattaggctttggtgcctcattaatctcaatttttgcaagactaggtggaggaatttttacaaagggagcagacgttggtgctgatttagtaggtaaggttgaagctggtatacctgaggacgatccaagaaatccagctgtcatagctgacaatgttggtgataatgttggagattgtgctggcatggcagctgatctttttgaaacttacgctgtcactattgttgctacaatggttctttcatctattttctttgtaaatgattttaatatgatgatctatcctttagcaattggtggtgcttgtatcttaacttcaattcttggaactttttttgttactcttggtagtgataaaaatattatgaaggcaatgtataaaggatttgtgataacagctattagttcattggtaattctatttccaataactaagcatgttataggttttacgacagaatatgtggctaatggaaagtcattcaatggtttaagtctttatttttgtggaatcattggtttagttataacaggattaataatttggattacagaatattatacaggaactgattacagacccgttaaaagtgttgctcaatcatcaacaacaggacatggcacaaatgttattcaaggtttagcggtttctatggaggctactgctgttccggcattaataattgttggtggtattttatggactaaccaaatagcaggcctttatggtattgctattgctgtaactacaatgctggcactagctggtatggttgttgctttagatgcttatgggcccgttacagataatgctggtggtatagccgaaatgtcaaatcttcctaaaaatgttcgtaaaacgacagatgctctcgatgcagttgggaatacaactaaagctgtaactaaaggttatgcaataggttccgcaggtcttggtgcattggttctttttgcagcatatactgaagatattaaacacttttcaaaagttgcagggtctaatctagaaggtatagttgttacttttgatttgtctaatccatacgtagttgttggacttcttattggtggtatgcttccttatctatttggatcaatgggtatgcaagcagtaggtagagcaggtggtgctgtggttattgaagtaagaagacaatttaaaaaaatacctggaattatgaaaagaaaagccaaacctgattatggtaagcttgttgatttactaacaagagctgcaatcaaagaaatgataataccatcattattacccattttatctcctatcgttttatatgtgataatttattttataggtggacaagtagctgcattatcatctcttggagcgatgttgttaggagttattataacaggactattcgttgctgtttctatgactgcaggtggtggtgcgtgggataatgcaaaaaaatatattgaggatggaaaatttggtggtaagggctcagaagctcataaagcagctgtaacaggtgatactgttggtgatccttataaagatactgctggtccagctgttaatccaatgattaaaattacaaatattgtagctctgcttttgcttgctgtaattgctggttaa

SEQ ID NO: 267756 - DNA, 619 bp, Unknown
  Bacterial polypeptide expressing nucleotide sequence isolated from the Sargasso Sea
ttggcagagcttcaagaaccagaattaggtcaagtcatatcgatcaacaagagggctaaacagttcggcgccctcgacctcggctccaacagttttcacttagtcatcgccaaagaaaatcatggcagaattcagatcttggaccgccataaagaaaccgtgcggttagcagagggactgacaaaaaacaaaaaaatcaacaaggctacagaggatcgagcgctagcctgcctcatgagatttgcggagagacttcaagcattaaacaccgacgatgttcgtgctgtagggaccagcgccttccgtcgagcgtctaactctaaaggttttctaaaacgcgctgagaaaattctcggaaaaccaatagagatcgtgtcaggtcatgaggaggcccgactaatctatctgggagtctgcagtaactacgaacatggggagagtccatcgttggttgtagatatcggtggaggaagcacagaaattattttgggagagaatttaactccaactacgctcgacagtctgaacatcggctgcattaccctttctcaaaagttcttccctagaggcgtagccacaaaaaaagggatggacagggcaataaatcaagccttggcag

SEQ ID NO: 267757 - DNA, 647 bp, Unknown
  Bacterial polypeptide expressing nucleotide sequence isolated from the Sargasso Sea
tatgcatgcgtgtatcgatctgggttctaatagtttccatcttttaattggcgaatggcaagaagggcgcctcaccatcattgagcgactcagtgaaaaagttcagttaggagaaaatattggcggcacgggtaatatttcccagcaagcctatcaaagaggcatggcgtgtttgcaccgatttaagttgctcatgcgtcagtaccccctagagaaatactgggctcttggtaccaacacgtttcgcattgccgaaaattcagaggattttgtaaaggctgccaagaaaattggtatcgatatctccataatttccggagttcaagaagcgatccttatctatgcgggagtaatatccgctttacccgtttctgactcccaccgattagtaatagacattggcggcggaagtacggaggtaatcgtgggggagaaacaccatagattgctcacagaaagtttacctataggcagcgttgcatggagagatagattcttccaagctgctagttttagtcattcgcatttgtcttcgcaaatggaaaaaggggtagaggaagcacgcagcttattcatgtctatatcacccggtgtcaaaaaagcctcttggagtgaggcctacgcatcttctggcacgacaaaaatgt

SEQ ID NO: 267758 - DNA, 757 bp, Unknown
  Bacterial polypeptide expressing nucleotide sequence isolated from the Sargasso Sea
aatgaccgacatcgccgaatcacttgtaacgcatcagcaggcctatatggccgccgttgacctgggctcaaactcctttcatatggtgattgcccgggtgattgccggcgatattcagctgctgcaccgcgaaaagcaaaaagtgcagctggccgagggcttaaacgatcaattggtattaagcgaagaagcgatagagcgtggcctgaatgtactggcgcaatttgccgacaccttaaagccctttgcgccgcagtcggtgcgggttatcgccacctacaccctgcgccgggcgcgcaacgccgctacctttttacgccgggccaaggcggtgtttccgtttcctatcgaggtgatttcaggtcaggaagaagcccgctttatttatcagggcgtagcgcattttgagcatttcgccggccgccggctggtgatagatatcggcggcggcagtaccgaatttgctattggcgagggcctgcaaccacttcggctcagtagccgtaatatgggctgtgtcagttatgccatgcagcatttcccgcagggccgcattagcgaaaagcgttttaaccgtgccattttgcaagccgagcaagagctggagcctattgtcagcagctttaaagcggctggctggcaacaggccgtaggcacctcgggcacggtaaaaacgatccgcgatattattgttggcctgggttttagcagcaatgcgattgaacgcgtgcatttattcgcgctaaaagatcatctg

SEQ ID NO: 267759 - DNA, 1531 bp, Unknown
  Bacterial polypeptide expressing nucleotide sequence isolated from the Sargasso Sea
tatggccgctgttgatttaggttccaacagttttcatatggtcatagctcgtgtggtagatggtgctttacaactattacaccgtgaaaaacaaaaagtgcagctggctgaagggcttacggaagacttgctgctgaccgaagaagctatgttgcgtggtctggctgttcttgctcaatttgccgacaccttaaaacctgtcccgggccaatcggtgcgggtcattgccacctacaccttaagacgagcgaaaaacagtgctatgtttttgcgccgggcccagacggtattcccctatcctattgaagtcatttcaggtcaggaagaagcccgttttatctaccagggcgtagctcattttgaacattatcagggcagacgtctggtgatggatataggcggtggcagtactgaatttgccataggcgaaggttttcagcctctgaagctggccagtcgtaatatgggctgtgtcagctatgcgcaactgcatttccccaatggtcggatcagtaacaaaaagtttgaacgagctattctgcaagccgagcaggaactcgagcctatagtctcggcttatcgtgaaacaagctggcaacaggcggtaggcacgtcaggcacgataaaaactattcgcgatattattgtcggtttgggctggcatccggtttgtattgaatatgaacacttgcagcaattaaaaaacctgttaatagcacaggaaaatagtctgcagctggatttacccggcttagccgatgaccgtaagctattgatttgctcaggcttagccattctgatcgcggcttttaatatgctgggtatctcgcaaatgtattatgtcgatgccgcacttcgtgaaggtgtgctctatgagatgagcgaccgtttgcatcatcacgatattcgcgagcataccattcaaagcctgatcaaaagatacagcatagacacagcccaggccgaaagagtgcgccggacagcactggaattgtttgctcagttacgcaccagctggaacttaacagatgaaatggccgatttattaagttgggctgccactgtttatgagattggtttacacatcaattcctccagtgtgcagcgtcactcgtcttatattttaaaaaatgccaatttgcccggctttaaccaggaacagcagcaattgcttgcgaccttagtccgctctcaccgccgcaaaattaaaagcgaagatttgtcgcaattttatttgtacaacacaagcacagtcgtgtccctactggtgctgctgcggctggccgttttactgaatcaaaaacgccgtgacgattttttacccgagctcaaagctcaaggccaaaatcaacagttgtgcctgcaactacccaaagcatggctggaacaacagccattattagtcgctgatctccagcaggagcaattgcatctgaaaaagattgcctttgtgctcgactgcccctatttaatagagtgcagtttgcaaagcccggggttcgacccagccagcgcagaagacgactcgtag

SEQ ID NO: 267760 - DNA, 1531 bp, Unknown
  Bacterial polypeptide expressing nucleotide sequence isolated from the Sargasso Sea
ttggcagagcttcaagaaccagaattaggtcaagtcatatcgatcaacaagagggctaaacagttcggcgccctcgacctcggctccaacagttttcacttagtaatcgccaaagaaaatcatggcagaattcaaatcttggaccgccataaagaaaccgtgcggttagcagagggactgacaaaaaacaaaaaaatcaccaaggctgcagaggatcgagcgctcgcctgccttatgagattcgcggagaggcttcaagcattaaacaccgaggatgttcgtgctgtagggaccagcgccttccgtcgagcgtctaactctaaaggttttctaaaacgggctgagaaaactctcggaaaaccaatagagatcgtgtcaggtcatgaggaagcccgactaatctatctgggagtctgcagtaactacgaacacggggagaatccatcgttggttgtagatatcggcggaggaagcacagaaattattttcggagagagtttaagtccaactgcgctcaacagtctgaacatcggctgcattaccatttcccaaaaattcttccctagaggcatagcaacaaaaaaagggatgaacagggcaataaatcaagccttggcagaaattgagccggtaaaacatgagttcctaaagcattcctggagcatatgtttgggtgcttcaggcaccgttaataccgtctttgcggtagcctcttccctgatggctaacccgatcattgatctcgagacgttgaacaaaatcgcagcgaagttgatctatgcgagttcaaataacgggaactcattggaaggaatgccagacgatcggcaagccgttttcccgggtggcttagcaattctgattgccctttttagagctctcaatatcgataaaatggaggtttcagaaggagccctaagagaaggccttttacaagacatggtcggtcggagttacgatcgagatactcgagaactaacggtaagcaatctggccgatcgatatagaatagatcgaacacaatcagaacaggtcagagatactgtgatgacttttttatctcaagtcgctataacttgggaattaaccgaaaccacacacaaaaacctgttgtcctggtcatcagcactacatgaaattggcatggacatctctcacgctggctatcaaaaacacggaggctaccttattgaaaacctggttatgcctggattttcaaaatcagatcagtctgatttagcgagaattgtaagaaaccatagaagaaagtttactcaagacgattttggcaaaaggaagaattccaaactcctgaaaatgacgattcttcttaggcttgccgcgctcctccacaggggaagaaatcatgaaccgataccgcatatacaagtagaggcacgcaaaaaagagatctccctgtccttctccaaacagtggcttgagggacaccctctcactcttctagatctagaaaacgagactaattacctgaaatccgagggcgtagagttagttgtcaaaactcactgac

SEQ ID NO: 267761 - DNA, 565 bp, Unknown
  Bacterial polypeptide expressing nucleotide sequence isolated from the Sargasso Sea
atggagcatggcgaacatctggctgccattgatttggggtcgaacagttttcatatggtggtagcccgacaagcgcagggagaaatccagattctcgacgggttgtcggagaaggtgcaattgggggccggcctagaccgggaaaatcgcttggatgaggaaacagtggagagggcgctggagtgccttggccggtttgcccaacggattgccggaattccacgcggtagcgtgcgggtggtggggaccaataccctgcgccaagcccgtaatgcccgggattttatccgccgcgcggaagccgtgttgggccacgatattgaggtggtagccggacgagaggaagcgcggctgatttacctgggggtggcccacaccttggctgatgacgctgggcagcggctggtggtggatattggcggtggttccactgagctgatcattggtgagcggtttgaatccacggaaaccgagtcgttgcatatgggctgtgttagctttgcccagcgttttttccccaatggcgagatcacggaaaaagcctttgatcgggcgggacggcggc

SEQ ID NO: 267762 - DNA, 1333 bp, Unknown
  Bacterial polypeptide expressing nucleotide sequence isolated from the Sargasso Sea
atagtaacagcagcaacaagtgcagttagggaatctccgaacggtcaagattttattagaagagtccttgatgaaactaatattcaaattgaaattataagtggttctgaagaagccagattgatttaccttggtgttctctctggtatggcttttgaagatcagtcctatgtaatcatagatattggaggaggatcaacagaattaatacttgcagataaaaaagatgctatagctcttaccagttcgagaattggtgcggtaagactaaagaatgactttttaaataaagagtctattagttcagaaagatcgaagtttcttaaaacttttatacgaggttcgttagaaccatctgttcgaaaaataaaaagtagatctaagggagataagcctttatctatgattgcaacaagtggtactgcaacttcattgggaaatttaatttcagatgatttaggagaatctaaacaaaagttgaatggttataaatttaaaagagaaaatttaaagaatgtattggaaaaactaattaaattaccagtttcggaaatcaagaaaataccttcattaagtgagagaagagcagaaataattattccgggtgcattgatattaaacaccgcaatggagatgttgaactttaatgaattaacaataagtgagagggcgcttcgagagggtttggttgttgattggatgcttcgtaaggggataataaaaaatgagttaaatattcaaagcaatattagaaaaacaacaatagtgcatcaggccagaaagtttggagtagataatacaagagctgagaaagttatcgatattgcctttcaaatctatgatcagactagaaatatctttcatagcgataatgactcgaaagctaaagaatttctttgggcagcttctaatctttataattgtgggaaatacgtaaatgttggttcatatcataaacactcttggtacttaataaaaaattgtgagttgttgggatattctgaagcagaaacaaatattattgcttcgatagctagataccatagaaagactctacccaagaaaagacatgagtcttggcaaaatttaacatccaaagaagataaaacgttagttcttgaaatgtcgttaattttgagactagcagcatctcttgatcaaagacctgataaggtaatctcctcagttcaaataaaattgcaggaaaatattcttacatttgaccttttacctttaaatagaaacaatgatcttctacttgaaaaatggaacttgggattatgccgtaatgtaataaaagaactaaagaatttggatttaaaagttatttagt

SEQ ID NO: 267763 - DNA, 1633 bp, Unknown
  Bacterial polypeptide expressing nucleotide sequence isolated from the Sargasso Sea
atgctggacgctgtgtctgaatcaaaggctccggcagggtcgcaactgacgagatcgtcggcccagacccgccgggtggccgccatcgacatcggcaccaattccacccacctgttggtggcctccgtggacaccaccctgggcaccttcagcatcgaacaggcggagaagtcgaccactcgactcggggagcgggatcctgatagcggcgaactcacgtcggagggtatgcagcgcgggtacgaaacgctgcggcgtttccgggacctggcgatcagtcacgacgttgagcaaatcgtcactgcagccaccagcgccgtgcgggaggctcccaacggtcgggagtttctccagagcattcaggacggtctcggtatggatgtggacctggtcagtggtccggaggaggcccgcctgatctatctcggggtgctgtccggtatgtccttcggagatcgcccccacctgcttctggatatcggtggcggatcgacggagctgatccttgccgatggacgcgatgcccgtgccctcaccagcacccgggtgggtgcggtgcggttgcaacgggatttcgtcaaggacgatccaatccccccccagcgccgctcgttccttcaggctttcatccagggctccctggagccggctgttgacaaggtgcaccggcggatcaaacccggtgaaatccctgttctggtggccaccagcggcacggccatggccatcggtgcactggcggccagtgaggacgatcgccctccactgaaactgcacggctatcgggtgtcgcgccagcggttggatcgggtggtcgagaagctcgtcgcgatgactccggaacagcgacgggatctatcgccgatcaatgaccgaagggccgaaatcatcgtgcccggggccctgattctgcagaccaccatgcagatgctcggcgtggatgaacttgttctcagtgaacgggcgctgagggagggactgatcgttgattggatgctgcgccatggcctgcttgaggaccgcttcagttttcagagcagcattcggcagcgcacggtgattcatcaggtgcagcgctttgccgtgaaccagcggcgagccgaacgggtggccacccatgccctgagtttgtatgacgccacggagggcctgatgcaccaggacgatggccaggggcgcgagttgctctgggctgccgcgatgcttcatgcctgcggacagcacatcaacctcagtgcttatcacaagcactcctggtacttgatccgtcacggcgagcttctcggctattccgaggcggagcatctgatggtggcggcgattgcccgctaccaccgccgcagtcttcccaagaaacggcatgagtcctggcaggcgctggtgacgcgagacaaccgtcgtcgcgtcagcgaaatggctttgctgttgcgcttggctgcagccctggaccgtcgaccagagcctgtggtggcgtcgttgcgggtgaacaccacaccggatgtgctcgatttggtgcttgtgccggagcgactcaaccagaacctgagcctggagcagtggagtctggagagctgcgcggaagtggttcgtgaggcttccggagtgaaacttcgggtcagcgttcagggttgag

SEQ ID NO: 267764 - DNA, 757 bp, Unknown
  Bacterial polypeptide expressing nucleotide sequence isolated from the Sargasso Sea
tatgccgataaatgataagaccccacgcccgcaggaattcgccgcggtcgatctaggctctaacagtttccacatggtcatcgcccgtgaggtggatggcgcgctgcagatcatcggtcgtctgaagcagcgcgtacacctggcggatggccttgatgaacgcagcatgcttagcgaagaggcgatggagcgcggcttaaactgtctgtcgctgttcgctgaacgcctgcagggcttttcgccctccagcgtgtgcatcgtgggcacccataccctgcgtcaggccctgaacgcgccagagttcctcaagcgggcggagaaagtgatcccctacccgattgagatcatctccggtaacgaagaggcgcgcctgatttttatgggcgttgagcatacccagccggaaaaagggcgcaagctggttatcgatatcggcggcggctctacagagcttgtgatcggcgaagactttgagccgcgtctggtggaaagtcgccggatgggctgcgtcagcttcgcgcagatgtacttcccgggcggcaccatcacccgtgagaacttccagcgggcgaggatggcggccgtccagaaactggaaaacctggcctggcagtaccggatccagggctggaacgtggcgctgggcgcatcaggcaccatcaaagcggcgcatgaagtgctgctggcgatgggtgaaaagacgggttatcacccccgagcgcctgacgctgctgaccgaagaagtactggaacataa

SEQ ID NO: 267765 - DNA, 1192 bp, Unknown
  Bacterial polypeptide expressing nucleotide sequence isolated from the Sargasso Sea
gtgctcaaccaccccatcgagatcatcagcggccaggaagaggcgcgcctcatctatcagggggtcgcccatacccagcacatcgaaggccaggtactggtggtggacatcggcggcggcagcaccgagctcatcatcggcgaggggttcgatcacaaggcgctcaccagccgcaagatgggctgcgtcagcttcacccagagcttctttgccaacggcaagctgagcgaaaaagccttcaacaatgccgtgctggaagctcagcaccagctcgcccccatcatcaaccagtaccgcaagctgggctggcagagctgcctcggcagctcgggctcgatccgcaccgtgcgcgatgtgttgcagggggaagagtggaccgatggcgccatcaccctggccgggctcgagcggctcaagcaggagatgatcaggcacaagcgggtcggcgatctcaagctggccggcctcaccgaggagcgtcaggaggtgtttgccgccgcggtggccatcctgcttgggctcttcacctccctgcccatcgagcggatggactattccgatggtgccctgcgcgaagggctgctgtacgagttcgaggagcgcttgcagcaccatgacattcgcgagcgcaccgccctagcactctccacccactatcgcatcgacaagcgtcaggctggccgggttgaacagagcgtgctgaccctgttcgatctgctcagcggcccctgggagatgccggaggagccctatcgcgccatcctcggctgggcggcgcggctgcacgaaatcggccttgccatcaactacagcggcatccacaaacactccgcctacatcttgcaaaacaccgacctgcccggcttcaaccaggacgatcaggccctgctggccgcgctggtacgctttcaccgcaaggggctcaagctctccgagctgccctccctgcccaaccacgacgaacagacggtactgcgctgcatccgcatcctgcgcctcgcggtcgccgcccaccacaggcgccaggacaacctgctgcccgattggcatgtgcaggccgccggcgatcagcttgtggtcaccctgccactggactggtgcgacgagaacaaattgctgatgcaaaatctggagaaggagcaccgctactgtcaggagcagggctggccactgctgttccagctcggctgac

SEQ ID NO: 267766 - DNA, 490 bp, Unknown
  Bacterial polypeptide expressing nucleotide sequence isolated from the Sargasso Sea
aactgcggtcacaaaactattataaataaggcaggccatcaaagaaattgtttgaacgaacaatgtctgaatattcattttcctagaactgacccagcagtaataatgctcatttataataatgataaaattttgcttgggagacaaaaagtttggccttctggaatgtattctacccttgctggttttgttgaaactggagagacaatagagaatgcagtaagacgagaagtttttgaagaggctggaattaagataaaaaatattcgataccattcatcacagccttggccttttccagcatctataatgctaggtttttatgcagaagcgtcttctacaaagattaaattagatgaaaatgaagttgaagatgtacaatggttttctaggaaagaagttattaatttcagcaatcagaataaatttctgccgaggaaaatctcaatagcacgtagacttattgatgattggattaatgaagtataaa

SEQ ID NO: 267767 - DNA, 508 bp, Unknown
  Bacterial polypeptide expressing nucleotide sequence isolated from the Sargasso Sea
ttctgcgccaaatgcggcgcggcgtccgaggtgaccatggcaggctggcaacgcacctgcccgatctgccactcgcatcattttccgcgcacggatccggttgtaatcatgctgatcacgtatggaaattccgtgctgatgggccggtctccgggctggcccgagggcatgttttcactgctcgccggatttgtcgaaccgggcgaaacgctggaagcggcggtgcggcgcgaggtgttcgaagaggcgggcgtacaggtcggtgaagtggattacctttccagccagccctggccttttccggcctccttgatgtttggatgtcgtggtcgcgccacaagccgggacatcaccctcgatccggcagaaatcgaagcggcaatgtgggttacgcgcgaggacatgatggatatattcgcgggaaaccaccccacggttctgccggcacgcaagggggccattgcacattttttgctggaaaactggcttgcggacacgctggaataat

SEQ ID NO: 267768 - DNA, 520 bp, Unknown
  Bacterial polypeptide expressing nucleotide sequence isolated from the Sargasso Sea
aatgggcagggcaaatcaattattgcattggcttaggagtaataaatattctggatattctggtgagttgaataaatttgatatgaaagaagaatcattagtttgtcctactacgtcaacgatgatatatccatcaatagctccttgtgtattggcaatggtaactaagggagatgagatcttgttagcaagaaataatttatttccagaaggtttatacagtgttttggcaggctttgttgaagtatcagaatctgctgaagaaacagtaaagcgtgaagtattagaagaagtaagtattaaagtaaaaaatcttaaataccatggaagtcagccatggccatttccatcacaattaatgttaggattttcatgcgaatatgaatcaggagaaataataatagataaaaatgaaatagctgaagctaactggtataaatacgacaaacttccttatgttccaccaacttcaagtttatcgggaaaattaattaactcttttgtcgaggatcattcttag

SEQ ID NO: 267769 - DNA, 601 bp, Unknown
  Bacterial polypeptide expressing nucleotide sequence isolated from the Sargasso Sea
tatgtattatgacctcaggactttgaatcctttactagataataatgatctagctttactaacaaactcccgcggtttaagttattggcataataagaacaggttttgtggtatatgtggacacaaaacaaaaatgacagactatggccatgcaagaatatgtagcaatgaagcgtgtaaaaataaaagctttcctagattagatcctgcagtaattatgcttataacctatcaagattattgcttattaggaagacaaaaggtatggccagtaggtatgcactctactttagcaggctttgtagaacacggagaaacaatagagcaagcagtagctagagaaacttttgaagaaacaggagtaaaaataagaaatattcagtataagtattctcaaccatggccatttccatcttcgttaatgcttggtttccacgcagaggcttatgataaaaagcttcatattgattattccgaattagaaaaagctgactggttttcaaaagagtatattaaagccagtccagaaaatgaaatttttaaattacctggtaaaatatcaatagcgcggagattaattacagattggattaataactaa

SEQ ID NO: 267770 - DNA, 520 bp, Unknown
  Bacterial polypeptide expressing nucleotide sequence isolated from the Sargasso Sea
atgggtagagcaaatcaattattacactggataagaagcaataaatattcaggctattctggtgaattaaataaatttgatacaaacgaagaatcattaatttgtccaacaacatctacaatgatatatccatcaatagcaccatgcgtattagctatggttactaggggtgacgaaatcttattagccagaaataatttatttccagaaggtttgtacagtgttttggcaggttttgtagaagtatcagaatccgcagaagaaacggtaaaacgagaagttttagaagaagtaaatattaaagttaaaaatcttaaatattatggaagtcaaccatggccatttccctctcaattgatgttaggattttcttgtgaatacgattctggtgaaataaaagttgacgaaactgaaatcgttgaagctaattggtataaatacaatgatttgccttatgttccaccaacaacgagtttatctggtttattaattaattcttttgtcgaggatcattcttagc

SEQ ID NO: 267771 - DNA, 565 bp, Unknown
  Bacterial polypeptide expressing nucleotide sequence isolated from the Sargasso Sea
tctgcatggtgggcagtggatctatcttggtcgcgatgagagcgggccggtgattgcggtcgatatcgcgccggtggtttccgatcgcgacgacgccgtgcgcagactgggcggcgggtttggcgacatgcgtacgcgtatggccaatctttcggttgatgaggcggcccttgccgcacaggcgcgcgcaattttccactggcatcaggggcatcggttttgtggtgcctgcggccatcccaatatggtggcggaggcgggatatcgcctgcaatgcagcaaccccgattgtggtaaatcgcatttcccgcgcacggaccccgccgtcatcatgttgatccatcatcaggatcacgtgttgcttgcgcgatcaccgcaattcctgccggggatggtgtcggttctggcgggctttgtcgagccgggtgaaacccttgagcaggctgttgcgcgcgaagtgtatgaagaagtcgggatcaagatcaaacggccgcgatatgttgcatcccaaccctggccgtttccggggtcattgatgctgggtttcattgccgaggccgaaacc

SEQ ID NO: 267772 - DNA, 385 bp, Unknown
  Bacterial polypeptide expressing nucleotide sequence isolated from the Sargasso Sea
atatctccatgtgttttagcaatgataactaaagaagataagattttacttgctagaaatacattatttccagaaggtctatacagtgttttagccggctttgttgaggtatcagaatctgctgaagagacagttgcaagagaagtcttagaagaggtaaatattaaagttaaaaatataaattattttggaagtcaaccatggccttttccatcacaactaatgttaggcttttcatgtgaatatgagtcaggagaaataatagtggatgaaaaagaaattgcagaagctaattggtatcaagtagatgatttaccatttatcccccccacaacaagtttgtctgggcgattaattaagtcttttgtcgaggatcattcttagc

SEQ ID NO: 267773 - DNA, 497 bp, Unknown
  Bacterial polypeptide expressing nucleotide sequence isolated from the Sargasso Sea
tggagtgtgcggaaaccggactaaaccatctaagtgcggtcatcaaagggattgtactaacagggagtgtgacacttcacattttccgcgtactgattcggcggtgattatgctggtgcatgatcgcgacaggacacttttgggcagacagcacttttggcctgaaggaatgtattctctccttgctggttttgttgaacctggtgaaactatcgagcatgcagtggcgcgagaagtttatgaagaatctggcattatcgttaagaacgtcaaatatctgcactcccagccatggccgttcccgtcctcacttatgcttggatttactgcagaggcagttacagaaaaaattaatcataatgataatgaaatcgaagacgtgcagtggtttacaagggatgagatgcttgatttcaagtctcaggggaaattcctgccacgggaattatctatctccaggcggctcataaatgactggcttggattaaaccactaaa

SEQ ID NO: 267774 - DNA, 553 bp, Unknown
  Bacterial polypeptide expressing nucleotide sequence isolated from the Sargasso Sea
tttgagaaaatatggtcctattctaaatgatatagaagcatcattcttagctctttctaacggaatgtttttttggcaaaatactcataaattttgtggttcatgcggttttcaaaacttttcaacagagggaggttttgtaatgaaatgttctagtgacaaatgtggtaaaagtcattttccaagaactgatcccgcgataattacgcttatttcttttcaagacaaagtactgttagggaggtcacccagatttcctgattctatgtatagtactcttgctggttttgtggagcctggtgaaagtcttgagcaagcacttgaaagagaggtttttgaagaggtggggataaaggtaaagaatattagatattttaattcacaaccttggccattccccgcttcacttatgctagggttttttgcagaagccgtaaacgatcaaatgacaattgattatgatgaaatcgaagatgctaactggttttcaattaatgagttgaaatccctggaacacccatccattagtggaggtttcaagctacctagagta

SEQ ID NO: 267775 - DNA, 748 bp, Unknown
  Bacterial polypeptide expressing nucleotide sequence isolated from the Sargasso Sea
tctggtattgaggccgcgttcctgaaagcaggtttttctgaagtgaacacctactccagcatcaggctagatcgggccgcccatttgcgcagggaaccggactggattcagaaaaaactgcgtccgggcaaaagcaactgcatccccctctggcaggggaaaaatctgattcggggggatgaccgtcaagaagcccttttccctagattctccacagacatacatgccgacccggatgaatgtatttttctgggcatgctggatggagaagcctattttgcttacgattgctccgaacttcaaaatcctccggcctccctggaaggaaaatttgaagacctaaggtccctggctggcctgcttcccccggaggaaggagcactgctggcatacgcgcgagggatgtgtcattggcatcaatccagccgcttctgtccccgttgcggtcaagcaacccggattttggatgcgggacatcaaaaaaaatgtatcaacgaatcctgtggattttcccagtttccaagaaccgacccggccgtgatcatgctcgtccaagacggcgaccgcgtggttctcgggagacagtcacgctggccggcaggaatgcattcgatcctggccggttttgtcgaacccggagaaagcctggaagacgcagtcgttcgtgaagtcatggaagaaaccgggatcgaagtcgaaaggccagaataccagtcatcccaaccctggccgtttcctgcttccctga

SEQ ID NO: 267776 - DNA, 553 bp, Unknown
  Bacterial polypeptide expressing nucleotide sequence isolated from the Sargasso Sea
aatggcttactcattagcaataagcaattggcataaaaataatatgttttgtggtaaatgtgggagagttacaaaagtaaccaaagcaggtcaccaaataaattgtcaagataaagactgtttattttgtatctttcctagaactgatcccgcagtcataatgttagtctatcataaaaataaaaccttattaggaaggcagaaaatttggcctaaaggaatgtactctactcttgcagggtttgttgaacccggagaaactattgaaaattcagtttcgcgagaagtttttgaagagtctggaataagcgttaaaaatattcagtaccactcttcccaaccgtggccatttccttcttcacttatgctaggttttaatgcagaagcaaagtctactaagataacaattgataaaaatgaaatagaagatgttcagtggttttccaagaaagaaattactaactttcataatcaagaaaaatttcttccaagaaagatctcaattgcaaggcgtttaattgatgattggatgaaatgttcaattcaaaattaa

SEQ ID NO: 267777 - DNA, 655 bp, Unknown
  Bacterial polypeptide expressing nucleotide sequence isolated from the Sargasso Sea
cctgggcgtactcgacggggtcggagcgtactcaatagacctaaatgactccagcgaggaagcggacttagagcccgttcacttaagaaagctctacggacggatttctgatgaggagtgggtacttgcaggccgagcagaacaaataatcaactacgaacgcacccaccagtactgcgggcgatgcggaaccccaaccgaaacaaacccccacgacagaggcaagttttgcccaaactgcaaacacatagcgtttcctcgcctaagcccagcgatgatagttctcgtcgagcgcgaagacgaagcactgctcgcgtggggacgccaattcccgagccgtttctacagcactcttgcgggattcgtggagccaggggaaagcttggaacaggcagtcgcccgagaggtaatggaagaggtggcagtagaagtcaccgatatccgatatttcggcagccagccgtggcccttccctcactcgttaatgtgtggctttcactgcaactatgtgtcgggcgaaatagctatacaggaagaagaaatcgttgaagcgggctggttcaaagcctctgacctgccaccgtgcccagttggggggatgtcaattgccggttggctcatcaaagactggcttgagcggcaaggtatccactaa

SEQ ID NO: 267778 - DNA, 405 bp, Unknown
  Bacterial polypeptide expressing nucleotide sequence isolated from the Sargasso Sea
gttatcctcgtgtttcaccttgtattattgtgtcaattcacaatcatgaaaaaatattactagccagaggcgtccggcaccgcgaagcgaacatgtattctacattggcaggctttgtcgaaagtggagagagtttagaagaggcagttcaccgtgaagtatttgaagaagtaggggttaaagtaaagaacctgcgttatttcaacagtcaaccttggccatttcctcactcgttaatggtgggttttattgccgaatatgacagtggtgatatccgatgccaagaaaatgaaattgacgatgcacaatggtttgatactaatgcattgccaaatgttccaccgaaagtttcaattgcaggtcagcttattgctgaaacagtgtctctgatcggcgacaaataaa

SEQ ID NO: 267779 - DNA, 505 bp, Unknown
  Bacterial polypeptide expressing nucleotide sequence isolated from the Sargasso Sea
aatgggtagggcaaatcaattattacactggataagaagcaataaatattcaggctattctggtgaattaaataaatttgatacatacgaagaatcattaatttgtccaactacatctacaatgatatatccatcaatagcaccatgcgtattagctatggtaactaggggtgatgaaatcttattagcaagaaataatttatttccagaaggtttgtacagtgttttggcaggttttgtagaagtatcagaatccgcggaagaaacagtaaaacgagaagttttagaagaagtaaatattaaagttaaaaatcttaaatattatggaagtcaaccatggccatttccctctcaattgatgttaggattttcttgtgaatacgattctggtgaaataaaagttgacgaaactgaaattgttgaagctaattggtataaatacaatgatttgccttatgttccaccaacaacgagtttatctggtttgttaattaattcttttgtc

SEQ ID NO: 267780 - DNA, 571 bp, Unknown
  Bacterial polypeptide expressing nucleotide sequence isolated from the Sargasso Sea
ctcttttttagcccttgctaaaggtatgacattttggcatatgaatcacaatttttgtggaacttgtggtgcaaaaacaaaagttcaagaagctgggtttgttaaaaagtgtcagaataaaaattgtaatttaagtcatttccctagaacagatccagcaataattacgcttgtttcttttaaaaatgaaattttattagctaggtcacctcgatttccagaaagaatgtatagtactttggctgggtttgttgaacctggagaaactcttgaacaagcagttgaacgggaagtttttgaagaagtaggagtaaaagttaaaaatattaaatattttgattctcaaccatggccatttccagcttctttgatgttgggattttttgcagttgctgaaaacaaaaaaataaaaattgattataatgaaattcaagatgctcattggttttcatataaaaatttgaatgaattaaatcatccgaatatttcaagtggttttaaattacccaggaaagattcgatagcaagaaggttagtaaataattggattaaaaataataaatttaattaa

SEQ ID NO: 267781 - DNA, 786 bp, Unknown
  Bacterial polypeptide expressing nucleotide sequence isolated from the Sargasso Sea
aatgatccaacccttttatgctagttctgcaattaatcgtcatggtaactatagaaatgatgaaaaattattaaatactataatttctgaaaaagatactaaattcattccattttataatggaaaaaatctattttcacaaattgatgataaaataaaacctattatttttaataaaattcaactttataattttcttcctaatggaataggaaccacaatttttttaggtgttgcgaataccttaaaatatgttggtatagatttaagttctcccaatcaaaaatttgattgttggttaaaagaaaataatattattattgatgatttacgaaaatatggtccaattctaaacgatatagaagcatcatttttagctctttctaatggaatgttcttttggcattatactcacaaattttgcggttcatgtgggtttcaaaacttttcaacagagggaggttttgtgatgaaatgttctaatgataaatgtggtaaaagtcattttccaagaacggatcctgcgataattacacttatttcgtttcaagacaaagttctattaggtaggtctcataggtttcctgattctatgtatagtactttagctggttttgtagaacctggagaaagtcttgagcaggcacttgaaagagaggtttttgaagaggtgggaataaaggtaaagaatattgaatattttaattcacaaccttggccgtttcctgcttcacttatgctaggtttttttgcagaagcaataaatgatcaaatgacaattgatta

SEQ ID NO: 267782 - DNA, 439 bp, Unknown
  Bacterial polypeptide expressing nucleotide sequence isolated from the Sargasso Sea
aatggcaatgcattgtcaccgctgccaacatcgcagttatccaagagtgtctccctgtatcattgtttctatacacgacaacgaaaaaatattgttggccaaaggcgttcgccatcgagaatccaatatgtattcaacccttgcaggcttcgtagaaagtggtgaaagtctggagcaagcggtccacagagaagttttcgaagaagttggcgttaaggttaaaaacttgcgctattacaatagtcagccatggccatttccacattccttaatggtcgggtttgttgccgagtatgacgaaggggaaattcgttgtcaggagaacgagatagatgatgcgcaatggtttgatatagatgcgctgccgactattccaccgaaagtgtctattgcgggacaattaattgctgaaacggtgtctctgatcggcgacaaataa

SEQ ID NO: 267783 - DNA, 910 bp, Unknown
  Bacterial polypeptide expressing nucleotide sequence isolated from the Sargasso Sea
aatgaattcgcacaatcattacgccgatgaatttcttgatcgggcatcacatcttaggaccgatgaaacctggttgaccgcgcagttcgaggatgagcgtacgttggtcatcccggtatggcggacgcgaaacctggttgttaaccgggaacagccgcagggcgtgatgctgccgacgacgcgagccagagacctgatagacgccgcaagggcgacggtactgctcggcatcagaaacgacgtcgcccatttcgcggtcgacatttctcccctggaagaacgcgacgtgtgcggcatacacgacgatagcgaattcgtcgatctacgatccgtcggccccgtaatggaccgttcggaagcatcgatcctggcctacgccaaaggcatcatgtactggcacgcgcggcacgaattctgcggctcgtgcggccatccgacggagatccgggaggccgggcatctacgtagatgcacgaacccggaatgcggcgccctccattttccgcgcacagacccagccgtcatcatgctagtggctaaggacgaccgcgcccttttgggacgcaaagcggaatggatggagggcatgtattccaccctggccgggtttgtggaaccgggcgaaagcctggaacaggccgtggcccgggaagttatggaagaagcgggcgtgaaaattacgaatattcgctaccactcgtcccaaccctggccgtttccgtcgtcgttgatgctcggtttttacgccgatgcgttgaacgaagattttcaccgcaatgatgacgagctggaagacctacaatggttcacccgtaaggaacttgccgatggcggtgcgggaattgccaaacgcccgcggtccgattccatcgcccggcgactgatcgacgaatggattcttcaggggtag

SEQ ID NO: 267784 - DNA, 394 bp, Unknown
  Bacterial polypeptide expressing nucleotide sequence isolated from the Sargasso Sea
tatgttagtaacccacccaacagccaagaaatgcctgcttggccgtaaccggagattcaaagggatgagattttcaacgctggccgggtttgtagagcctggagaaactttggaacaagctgttattagggaagtttttgaagaaacgggagttcttgtcagcaaagctaaatatcgcggttctcagccctggccctttccggcgtcaataatgcttgggtttagagcagaggcagattcagaagaaattaaatgcgatgacgatgaattaatagaagccaggtggtttactaaagaagaaacacttgccctttctaaactcgaggacggcttgccgccatcgaacttctcaatttctcgctggctaatagatgtttggctaaacgaaccataa

SEQ ID NO: 267785 - DNA, 354 bp, Unknown
  Bacterial polypeptide expressing nucleotide sequence isolated from the Sargasso Sea
ttccagaaaaaatgtacagcacattagccggatttgttgagcctggggaaacattggagcaagcagtttcaagagaggtatttgaagaggtaggggtaaaagttaaaaatattacttattttggttctcaaccatggcctttcccagcttctttaatgttaggtttttttgcagaggcagaagaaaagtcattacatattgattttaatgaaatagaagatgcgcaatggttttcaattaaaaatatacaggaattaaaccacccattgattaatggaggttttaaactcccaagagcagattctattgcaagaagattagttaaccaatgggtaaataattttaaaggttgat

SEQ ID NO: 267786 - DNA, 814 bp, Unknown
  Bacterial polypeptide expressing nucleotide sequence isolated from the Sargasso Sea
catgcattttaaaagattttttgacattaaggataaaaataacaatattttaattatttttaaaaacaataaaattatatatgaaccaaatttaaaaacattcttattagatgaaaactttttagatattaatgttaaagatcatctttatgttggaatcgctaataatggtaatgatatatttgcagtagatatatcaaattataaaaatgaaataaatattggttataaatctcttgttgaatttgacataagacatttattagcaatgtcagaaccagaagaaattgttttaatgggtagggctaatcaacttcttcattgggtaagaagtaataaatattctggttattcaggtgaattaaatcaatttaatgataaagaacaagcattttcttgtccttcaacatcgtcaatgatttatcctcaaatatcaccgtgtgtattagctatgattatcaaaggcaatcaaatattattagcgagaaataatttatttccagaaggcctttatagtgttttagcaggatttgttgaagtatcagaatcggcagaagaaactgtcgaaagagaggttatggaggaggttggcattaaagtaaaaaatattgaatatgttggaagtcaaccctggccatttccatcacaattaatgcttggatttaaatgcgaatacgattctggtgaaattgtaatagatgaaaatgaaattattgaagctggttggtatacagttgagaatttaccctatgtacctccgccatcaagcttatctggtaagctaatcaatctttttgtcgaggatcattcttag

SEQ ID NO: 267787 - DNA, 466 bp, Unknown
  Bacterial polypeptide expressing nucleotide sequence isolated from the Sargasso Sea
tgtggcagttctatgcatttggtgaactgggagctggcagcgctttgtcacaaatgtggccatcgctgttacccgcgtatcaatccttgtgtgttgatcgccgttgttaatgacaaaaatcagctgttgttagcgcgctcggcccgacataaatcaggtttcttttcgatacttgctggttttgtcgagtctgcagaaactctggagcaagccgcggtgcgggaagtaaaagaagaggtgggtattgatatctgcaacttacgttacatgggcagccagccctggccttttccccattcgttgatgacagcttttatcgcagactataagtcaggcgagctgatctgtcagccggacgaaattgaagaagcgcactggtttgatttggatcagctgccggaagtaccaacggtggcaactttatctggtcaggtgattcagtatattgcccgaggcggtcgctagt

SEQ ID NO: 267788 - DNA, 435 bp, Unknown
  Bacterial polypeptide expressing nucleotide sequence isolated from the Sargasso Sea
ataaaaaatgtctaaatattcattttccaagaactgaccctgcagtaataatgctcatttataatgatgataaaattttgcttggaagacaaaaggtttggccctctggaatgtattctacccttgctggttttgttgaaactggagaaacaatagaaaatgcagtaagacgtgaagtttttgaggaggctggaattaagataaaaaatattcaatatcattcatcacagccttggccttttccagcatctgtaatgctaggtttttatgcagaagcgtcttctacaaagattaaattagacgaaaatgaagttgaagatgtacaatggttttctagaaaagaagttattaatttcacccatcagaataaatttctgccaagaaaaatctcaatcgcccgaagacttattgatgattggattaataaagtatagc

SEQ ID NO: 267789 - DNA, 604 bp, Unknown
  Bacterial polypeptide expressing nucleotide sequence isolated from the Sargasso Sea
ttgagaaaatatggtcctattctagatgatatagaagcatcattcttagctctttctaacggaatgtttttttggcaaaatactcataaattttgtggttcatgcggttttcaaaacttttcaacagagggaggttttgtaatgaaatgttctagtgacaaatgtggtaaaagtcattttccaagaactgatcccgcgataattacgcttatttcttttcaagacaaagtactgttagggaggtcacccagatttcctgattctatgtatagtactcttgctggttttgtggagcctggtgaaagtcttgaacaagcacttgaaagagaggtttttgaagaggtggggataaaggtaaagaatattagatattttaattcacaaccttggccattccccgcttcacttatgctagggttttttgcagaagccgtaaacgatcaaatgacaattgattatgatgaaatcgaagatgctaactggttttcaattaatgagttaaaatccctggaacacccatccattagtggaggtttcaagctacctagagtagactcaatcgcacgtagattagttgacacttggatgaacagttttaactaaa

SEQ ID NO: 267790 - DNA, 766 bp, Unknown
  Bacterial polypeptide expressing nucleotide sequence isolated from the Sargasso Sea
ttgattatctttaataataataaaattctatatgaaccaaatataaaaacatttttattagaagaaaatcttttaaatattcaaattaaagatcatttgtatgttggtattgctaataatggtaaagacatttatgcagttgacatatcaaataatccaaaagatgtaaacatcggctatgaatctatagttgagtatgacttaaggcacttgttagcaatatcagatcctaatgatattgtgcttatgggaagagctaaccaattattacattggattagaagtaataaatactctggttacactggagaattgaataaatttaatacaaaagaagaagcattatattgcaatacaacatcgtcaatgatttatccatcaatatccccatgtgttttggctatggttactagaggtagtgagatattgttagctagaaataacctattcccagaaggcttatttagtgtgcttgctggttttgttgaggtatcagagtctgctgaagaaacagtagaaagagaagttatggaggaggtaggaataaaagtaaaaaacatcagctactttggaagtcagccttggccatttccttcgcagctaatgcttggatacaaatgtgagtatgactctggcgatttacttattgataacaatgaaatagttgaggccaattggtacaatgttgataacttaccttatgttcctccaacaaccagtctttcaggaaaactaattaactcgtttgtcgaggatcattcttagc

SEQ ID NO: 267791 - DNA, 484 bp, Unknown
  Bacterial polypeptide expressing nucleotide sequence isolated from the Sargasso Sea
tttggatgcggggcatcaaaaaaaatgtatgaacgaatcctgtggattttcccagttcccaagaaccgacccggccgtgatcatgctcgtcgaggacggcgaccgcgtggttctcgggagacaatcacgctggcctgcaggattgcattcgatcctggcaggttttgtcgaacccggagaaagcctggaagacgcagtggtccgtgaagtcagggaagaagccgggatcgaagttgaaaggccagagtaccagtcttcccaaccctggccgtttcctgcttccctgatgcttggattccgatgcagcgccctagctggtcagaccgttaaggtaaacaccgaagaacttgaatcggcacgttggttttccagggaggaattggagcaatccccagaagatcaaacgttccgcctgccccgcagggattcaatagcccgtcggctgttgaatgagtggctggaagaagacagtaaacctcaatag

SEQ ID NO: 267792 - DNA, 856 bp, Unknown
  Bacterial polypeptide expressing nucleotide sequence isolated from the Sargasso Sea
ttggacttcattgaacatcaggacattttaaacttatttgttatgtattttaaaagatttttagaaataaatgataaagaaaataataaatttattctttttaagaataataaaatattttacgaaactgaaataaaaacttttttactcgatagcaactatttagatattgatattgataattctattgtcattggaatagctgaatcagaaagtaaaatttatgctgttgatatttctaattgtgaaaatgatataaatattggttataaatcacttgttgaatatgatgttagacatcttttagcaatttctgaacctgaagatattgttttaatgggtagggcaaatcaattattacactggataagaagcaataaatattcaggctattctggtgaattaaataaatttgatacaaacgaagaatcattagtttgtccaacaacatctacaatgatatatccatcaatagcaccatgcgtattagctatggttactaggggtgacgaaatcttattagccagaaataatttatttccagaaggtttgtacagtgttttggcaggttttgtagaagtatcagaatccgcggaagaaacagtaaaacgagaagttttagaagaagtaaatattaaagttaaaaatcttaaatattatggtagtcaaccatggccatttccctctcaattgatgttaggattttcttgtgaatacgattctggtgaaataaaagttgacgaaactgagatcgttgaagctaattggtataaatacaatgatttgccttatgttccaccaacaacgagtttatctggtttgttaattaattcttttgtcgaggatcattcttagc

SEQ ID NO: 267793 - DNA, 814 bp, Unknown
  Bacterial polypeptide expressing nucleotide sequence isolated from the Sargasso Sea
atgcattttaaaagattttttgacattaagggcacaaataataatattttaattatttttaaaaataataaaattttgtatgagccaaatttaaaaacatttttactagaagaaagtctattagatattaatcttaaagatcatttatttgttggtattgctaatgatggtaaagacatttacgcagttgatgcttcaaattctacaaatgatttcaatataggttatgaatctcttattgaatatgacttaaggcatttattagcaatatctcaaccaaatgatattgtacttatgggaagagcaaatcaattacttcattgggtaagaagcaataaatattcaggattttcaggcaaattaaataaatttaatgaaaaagaacaagcaatgtattgtacagcaacctcgtcaatgatttatccacaaatagctccatgtgttttggcaatgattattaaaggggacgaaatcttattggctagaaataacttatttccagaaggtctttttagtgtattagctggatttgttgaggtttctgaatcagctgaggaaacagttgaaagagaggttatggaagaggttggtataaaggttaaaaatattgaatacgttggaagtcaaccttggccttttccatcacagttgatgcttggatacaagtgtgaatatgaatctggtgaaatagttattgatgagaatgaaattgtagaggcaaactggtataaagtggataatttaccctatgttcctccaacaacaagcttatccggtaagttaattaacttgtttgtcgaggatcattcttagc

SEQ ID NO: 267794 - DNA, 832 bp, Unknown
  Bacterial polypeptide expressing nucleotide sequence isolated from the Sargasso Sea
gatgattaatttatctggtactgaaatcagtaagcgcagagcaatatgggtaatctttagccgtggaaaaattgtggtgcgagagaacgatcctatattgccggaggcgcactttgaggagctttcgtttctcgcatcgtatcaagaagacgtgcatgaattgccccctcttaatgatgctgcggtaaccgaatcgcccatatacgtggttgacgttggctcagaacacattgaaagccctggctgggaacgggtttcactgcgtcagcttctatttacacaacaaaatatagcgttttctgtgctaggtcgagcttggcaatatatccattttttacgaacccacaagttttgcgggcagtgtggcgctgaaatggagcgtgtaaactgggagatggcaatgcaatgccatcgctgtaaacatcgcacctatccccgcatatctccctgcatcatcgttgccattcacaacaaagaaaagctgttattggccaaaggggtaaggcacaaagaagcaaatatgtactctacgctagctgggtttgtggaaagcggcgagagccttgaagaagccgttcacagagaagttttcgaagaagttggggtaaaagtaaaaaatctacgctacttcaacagtcagccgtggccattccctcattcattaatggttggatttatcgccgaatacgacggtggcgatatcgtgtgccaagaaaatgaaatagacgatgctcaatggtttgacgtggatgcgctacccaatataccgcctaaggtctcaattgctggacagcttattgcggaaacgttgtcgttaataagcgacaaataa

SEQ ID NO: 267795 - DNA, 781 bp, Unknown
  Bacterial polypeptide expressing nucleotide sequence isolated from the Sargasso Sea
atgccattaaccgaacaggcccgctggttcgtgctggggggcgatcacctcgtcctgctggatgaccaggggcgcattccacaaggcccccgtgcctgtctgcccagccacttgcagcatgccgcctttgagcgctttgacgagtgggacgggctgccctgcctgctgctggatctgggggaggcggccgacaccgaggccctgattcccctgcgccagctgatggtggccggggatgaaacgggctttcagctggccggccgagcctggcaactcgccacctttcgccgcacccaccgtttctgcggcgagtgcggtacccccatgagcccaaaggtgggggagtgggcgcaagggtgccgccatggccacgtcgtctatccgcgcatctccccctgcatcatcgtggcggtacgcaaggggcccgccatcttgctggcggcccaccgccgtcactatcaggccgaggatcccatgtataccgtgctggccggcttcgtggaggcaggggagaatctcgagcagtgcgtggcgcgggaggtgttcgaggagagtggcatccgggtgaccaatgtgcgttacgtggcgagccagccctggccgtttccccacagcctgatgatgggctttaccgccgattatgagagcggcgagatccgggtgcaggacgaggagctggtggccgccgatttctttgaggccgacgggctgccaaggctgccgccccacggcaccatagcgcggcggctcattgcgctctgcctcggcgaccaagcctgag

SEQ ID NO: 267796 - DNA, 409 bp, Unknown
  Bacterial polypeptide expressing nucleotide sequence isolated from the Sargasso Sea
ttactatccgcaatcgccccctgcattattgtcgctatccgccgcgatgattcctttttgcttgcccaacacgtacgccaccgtaacggcgtgcataccgtgctcgccgggttcgttgaggtgggcgaaaccctggaacaggcggtggcgcgtgaggtaatggaagagagcggtatcaaagtgaaaaacctgcgctatgtgacctcgcagccgtggcctttcccgatgtcgctgatgaccgcatttatggcggagtacgacagtggcgagatagtcatcgatccgaaagagctgctggaggctaactggtatcgttacgatgatttaccgctcctgccgccaccgggcaccgtcgcacggcgtctgatcgaagataccgtggcaatgtgtcgggctgagtatgaatgaa

SEQ ID NO: 267797 - DNA, 397 bp, Unknown
  Bacterial polypeptide expressing nucleotide sequence isolated from the Sargasso Sea
tatggatcgtataattgaaaaattagatcacggctggtggatcgtcagccatgagcaaaaattatggttgcctcatggcgaattgccacacggcgatgcggcaactttcgatcttgtcgggcagccagcgctgcaaatcggagagtgggaaggcgaacccgtctggctggtgcaacagcatcggcgtcacgagatgggatcggttcgtcaggtgatcgatcaggatgtggggctgtttcaactggcggggcgcggggtacagctggctgagttttatcgatcgcataaattctgtggctactgcgggcacctgatgcatccgagtaaaaccgagtgggcgatgctctgtacccactgccgtgaacgttactatccgcaaatcgccccctgcattatc

SEQ ID NO: 267798 - DNA, 451 bp, Unknown
  Bacterial polypeptide expressing nucleotide sequence isolated from the Sargasso Sea
atgaaggatgtttccaaagccattttgaaaatttgtctgcattattcggagatgcctgttccttctcgaggacacgcctcggatgcaggaatcgacttatccgcaatggcttatgaagtgaaggcagatcatgtttttttcatcgataccggggtttcagttcaactcagtcagggatattacctggaagtggttcctcgctccagcatcgttaaaaaagattttatcatggccaacagtgtgggcatcatcgatcctgactaccggggcaggatatttgttccccttcgttacctcggcgaaggttctggacaagaagcctgccggtggctgcttgagcaaaggatcgcacagatgatcataagacgattggaaccttgcgacattgaaatcgtagatgagttggatcaaaccgtccgtggtgaaggaggcttcggcagcacaggttgat

SEQ ID NO: 267799 - DNA, 232 bp, Unknown
  Bacterial polypeptide expressing nucleotide sequence isolated from the Sargasso Sea
ggtcgattacgattatcgcgggaacgtcggggtgatcctgttcaccacggggaggaagatttcgtcgtgcaaaagggggaccgcgtggcgcagctcattctcgaacgcatcgtcacgccggacgtcgtcgagtgcgaggatttggaagacaccgagcgcggggccggtgggttcgggagcacgggcgtgacgacgaaaggcggaccgaacgccgccgacgcttcggcgtgac

SEQ ID NO: 267800 - DNA, 439 bp, Unknown
  Bacterial polypeptide expressing nucleotide sequence isolated from the Sargasso Sea
tatgaaccttaatattaaaccattatcagatgatatttattccatgtacaataatcacagtcattttcatcaaggtgatgcaggcctagatttatttattacaaaagaccaggttattttacctggtacaactgctaggattcatcttggtatatcttgtgagaatatggactcaaaaccatatctacttatggccagatcaagcatctcaaaaacaccgttaagattatcaaactctgtaggcctaattgatgctagctatcgaggagagattatggcagcggtagacaatataaaagatttttcatttagtcttgaaaagggtcaaagattatttcagcttgtgtcaatgaatggtgatgcgattcattttgaattagtggacactttgtcaaaaacatcacgaggcgaaggtggatttggaagtactggggaataa

SEQ ID NO: 267801 - DNA, 575 bp, Unknown
  Bacterial polypeptide expressing nucleotide sequence isolated from the Sargasso Sea
tatggagaagaagcctgggaggaattacaaggtgttacagcttagtgttaaaattgaaaaaagtgagttagctaaacaactagaagaaaaatttggaattacatggaacctacaacaacaatatccttttgatgcaggctatgatttaagagcctgtgaagcagaagatatttggattgagccaaatgagcgagcaattgttgggacaggactatattttcaaattgacgagccatattgggaaatacaaattagacctagaagtggtttagcttttaaaaacggaattatgattgttaatagccctggcactgtagattttgcttacagaaacgaagttaaagtaattttatataactctggaaaagaaacttttatggtcgctcaaggcgatagaattgcccaagcttgtttcagacctgttcctttagtttcttttgaatatgtagacgcaatagaaactagcgtagttttatcacaaggaaatcgttgggttcaagaagaaaaaatgaaagaaagaggtatcactaaaaataaaaaagatactatttcactagataataattctacgggag

SEQ ID NO: 267802 - DNA, 214 bp, Unknown
  Bacterial polypeptide expressing nucleotide sequence isolated from the Sargasso Sea
ttgctaattctatttggtcttattgacggtggatacagaggtgaattaattggtatggttgataatatttatgataaagattttcatattaagagaggagaaagatattttcaattagttgctgttgatagttctcctattgattttgaattagttgaggagttgtctaaatctagccgaggagagggcggatttggtagtacaggcaaataat

SEQ ID NO: 267803 - DNA, 142 bp, Unknown
  Bacterial polypeptide expressing nucleotide sequence isolated from the Sargasso Sea
aagtgatgattttttaataaataataaagatagaattgcccaaatggttttaataccagttgtaaaaatggatcttgaggaaactgatgatcttccaaatacagtaagaggcaaaggtggttttggttcaactgggaaatga

SEQ ID NO: 267804 - DNA, 256 bp, Unknown
  Bacterial polypeptide expressing nucleotide sequence isolated from the Sargasso Sea
aatggcaaaagttcttatcaaaaagttagaccctgcggttgaattacctacttacaaaacagaaggtgcatctggcatggatttaatggcattagtaaaagaacccatcaatcttaaaccaaactcatcatgtttagttccaacagggcttgctgttgcattttcaagtgatttcgaaatccaaataaggccaagatctggtttagctgcaaaaaacagtataagtgttttaaatacacctggaactattgatagt

SEQ ID NO: 267805 - DNA, 388 bp, Unknown
  Bacterial polypeptide expressing nucleotide sequence isolated from the Sargasso Sea
ttatcaaacgataggcgcagcgggccttgatctatatgcagctaattctgaaaaaattaatttatcaactttggagagatatgcaatacctacgggcattagtttagctataccctctggatatgaaggacaaataaggccaagatcaggattatttttaaagcatggaataacgataaattttggaaccatagatagcgattataggggagaaatttttattttggttgtcaatctatcaaaatctaattttataatagaaagaggcatgagagttgctcaaatagtcttcaataagtttgaaagggttaatttaatatctaaattagagttagatcaaaccttaagaggctcaagtggacttggttcaactggaataaaggaataa

SEQ ID NO: 267806 - DNA, 478 bp, Unknown
  Bacterial polypeptide expressing nucleotide sequence isolated from the Sargasso Sea
aatgaagaggatccatgatagggccgtacctctcgtccgtgggacggagggctctgcaggattcgatctgagcatcacacaaaatgttaccattccgccgaagggaaaggcactccttcccactgggtgggagatggccattccggatggatggtatgggaaaattcacgctagatcaggggtctcgcatcagaaacataccgaagtagtagctggggtaatcgactcggactataggggggaagttaaggtcctgatgtttaatcactctaacaaaccggttgttttctgtacgggggacagagtaggacaaatgacttttcaggaaatgaatgtgcctgaggttattgaggtcagtaagctcggcgagacggatcgcggaaagaaggggttcggctcgactgacgtaaaaccggaacagtgttcggttggggggcctggggaacaacagggggttggcgatatgaaggctgccaca

SEQ ID NO: 267807 - DNA, 325 bp, Unknown
  Bacterial polypeptide expressing nucleotide sequence isolated from the Sargasso Sea
gtttctatacctgccggagcaacagtgcttgtttctactggcatctcaatagctgttcccaaagagcatgtagctttgatatgggatagatcttcaatgggagtcaaaggagttcataggcacgcaggcgttatagactctggttatagaggtgaagtaaaagtttgcctgcataatacaacaaaacatccgtatcatatagaaagaggcgacagaatcgcacaaatgttaatacaagaagccccaaattttattcaacatgtagttcgtgaattagactcaacagataggggcgatggagggtttggttctacaggtaagtagt

SEQ ID NO: 267808 - DNA, 702 bp, Unknown
  Bacterial polypeptide expressing nucleotide sequence isolated from the Sargasso Sea
tttgcccactcgagccacggtcggctcggctggcttggacctatatgcaccacagcacatagagtgcctaccgggaaagatcacacgtatcccgttgggtatccattttgctttaccacggggtgcatggggactgatcgcgtctcggtcatccttggccgctcggggattgtctgtaggtgggggcatcatcgacaatgactatcggggagaggtagttgtactcttgtacaatttttctgagaagtcgcattacttcttgcctggtgaacgttgcgcgcaactgattgtcatattttctccgtttgtgtactcaccgctttttgagcaagaagtggtagaagtgaacgagctggaatccactgagagagaagggggttttggtagtacggggaagagagcgacagagcaagcggtaagagagatcccatgtacaggcatcccgataggagagcagtgcatagggagtttggaagaggctagagggttgtcaatgtggcacgctacgaccgataaagaagctacagatgatcaactctctctgcttgcgaagcaggatttttcttttcgtacgcgtacggtgcatccctgggaggagaaatttctttcatctactttcgataatcataaggtggtaattagacagactatcttttccgatggtacttctgccgttgataaactcgttcgtgggaatgaaaa

SEQ ID NO: 267809 - DNA, 373 bp, Unknown
  Bacterial polypeptide expressing nucleotide sequence isolated from the Sargasso Sea
agacctagaagcggattagctcataaaaatggtataatgatagttaacagtcccggaacagttgattttgcttacagaaatgaagtaaaaattatactttataattcgggaaacaggacttttactatatctccaggagacagaatagcacaagcatgttttagaccagtgccccaagtatcttttgaatatgtagatgctatagaacagacagtgatactatctaatgcacacccgtgggtacaagaagaaaaagtaaaaaaacgaggtttagtaaaaaaaccaaaaagagaaactgtgtctcttagtgaaaatgatacagaagaattaattattaatagagggggatttggtagtagtggtactagataaa

SEQ ID NO: 267810 - DNA, 100 bp, Unknown
  Bacterial polypeptide expressing nucleotide sequence isolated from the Sargasso Sea
aatggtcctatctccagtaacaaaaattcaattagaagaaattagcgatttgcctgaaacaataagaggagagggtggatttggttcaacaggcaaatga

SEQ ID NO: 267811 - DNA, 169 bp, Unknown
  Bacterial polypeptide expressing nucleotide sequence isolated from the Sargasso Sea
aataaaagtaatcctttttaatcacggtaaaaatgatttcttgataaataataaggatagaatagcacaaatgattttaactcctgtaattaaaatggatcttgaggaaactgatgatctaccagaaacaattagaggagaaggtggttttggctctactggaaaatga

SEQ ID NO: 267812 - DNA, 121 bp, Unknown
  Bacterial polypeptide expressing nucleotide sequence isolated from the Sargasso Sea
aggattgcgcatcgcacaaatggtattatgtccagttatcaaagcaacattaaaagaagtgaaagtactagaaagcacagagcgtggttctggcggatttggatctacaggaattaaataa

SEQ ID NO: 267813 - DNA, 199 bp, Unknown
  Bacterial polypeptide expressing nucleotide sequence isolated from the Sargasso Sea
gatgttaaatgatgtgaagattaaaattctggataataagttaacaaagcttccagattatttaacaaaaggttctgccggtttagaccttagagcctcaattaatagaaccatagaagttaaaccaaatgaaacgaaattaatatcgacaggtatatctatttttattgaagacagtaagtatgctggcttaatatta

SEQ ID NO: 267814 - DNA, 289 bp, Unknown
  Bacterial polypeptide expressing nucleotide sequence isolated from the Sargasso Sea
atggtaagggtcttaattaaaaaattagacaaaaaagttaaactaccagaatataaaacgacaggttcatctggactagatttgactgcattcattgaaaagaaaatagtaattaaaccaggcgaaaacgctttagttccaacaggtatatcgattgcaatacctgaagataccgaggttcaaataagaccaagatcgggtttagcagccaaaaacaatataagtgttttaaatactcctggaactattgatagtgacaaaggaggagaaataaaagtaattttattta

SEQ ID NO: 267815 - DNA, 400 bp, Unknown
  Bacterial polypeptide expressing nucleotide sequence isolated from the Sargasso Sea
gatgcctgttccttcccgaggacacacctcggatgcaggaatcgacttaaccgcaatggcttatgaagcgaaggcagatcatgttttttttatcgataccggagtttcagttcaactcagtcagggatattacctggaagtggttcctcgctccagcatcgttaaaaaagattttatcatggccaacagtgtgggcatcatagatcctgactatcggggcaagatatttgttcccctccgttacctcggcgaaggttctggagaagaagcctgtcggaggctgcttgagcaaaggatcgcacagatgatcgtaagacgattggaaccttgcgacattgaaatcgtcgatgagctggatcaaaccgtccgtggtgaaggaggcttcggcagcacaggttga

SEQ ID NO: 267816 - DNA, 325 bp, Unknown
  Bacterial polypeptide expressing nucleotide sequence isolated from the Sargasso Sea
aaataataacttatgttcttacagattagcacaaagatcatctatttcaaaatatccattacaattagctaattgtgaaggtattattgattctggttacagaggtaatctaattgctgcttttcatcattatctaaaagatttaagtgtagatgattctggtacaattaaaataaatcaagaacaacttaattttaaagttgataaaggaatgagattagttcaaatagtaggtcctactatggatcctattaaagtaaaaatagttgatgaattacctgattcaactagaggagaaggaggatttggttccactggaaaataa

SEQ ID NO: 267817 - DNA, 277 bp, Unknown
  Bacterial polypeptide expressing nucleotide sequence isolated from the Sargasso Sea
tatgctaaaaattataatagaaaaagtatcacaatctgagaattttcagcttccaaaatatcattcagacaattcatcagggttagacatagttgcagatataaaaaatcccgtaagtttaaaacaaaatgagatatttttagtgccaactggaattaaacttaaaatacctcgaggctatgaaggtcaagtgagaccaaggtccggcttagctttaaatcacggtatcacaatattaaactccccaggaaacattgattcagattacagggggtga

SEQ ID NO: 267818 - DNA, 422 bp, Unknown
  Bacterial polypeptide expressing nucleotide sequence isolated from the Sargasso Sea
aatttgtctgcattatccggagatgcctgttccttcccgaggatacgcctcggatgcaggcatcgacttaaccgcaatgacttatgaagcgaaggcaggtcatgtttttttcatcgataccggagtttcagttcaactcagtcagggatattacctggaggtggttcctcgctccagtatcgttaaaaaagattttatcatggccaacagtgtgggcatcatagatcctgattatcggggcaggatatttgttccccttcgttacctcggcgaaggttctggagaagaagcctgccggaggctgcttgaacaaaggatcgcacagatgatcataagacgattggaaccttgcgacattgaaatcgtcgatgagctggatcaaaccgtccgtggtgaaggaggcttcggcagtacaggttgat

SEQ ID NO: 267819 - DNA, 403 bp, Unknown
  Bacterial polypeptide expressing nucleotide sequence isolated from the Sargasso Sea
tatgccaaaatatcaaacttctggttcagctggtatggatttaattgcttgcaatgaggaaaagcttctacttaaaccaaatgagtcaactgttatccagtctggtatttcaatttatatagaggatccagaatttgctggcataatcataccaagatcaggacttggggcaaaaaaaggattagtttgtggaaatctcacgggtttaattgattctgattaccaagggcctcttggaatttctttgtggaatagatctaatgaaaatattgagataactcctggggatcgtgtagctcagctagttgttataagagtcaatcaagtacaacttgagcaagttgaggaatttaatctttcagatcgaggtgataagggttttggtagtacaggtattagctag

SEQ ID NO: 267820 - DNA, 439 bp, Unknown
  Bacterial polypeptide expressing nucleotide sequence isolated from the Sargasso Sea
tatgcatcttaaaataaaaatcttatctaataatgcccgagatctgtatgagaatcatgggcattttcatcaaggggatgctggacttgatttatttattattgatgaattaactattgaacctggagaaactgctatgatcaaatctcatattgcatgtgaaaacaatgacgggttaccatatttactaatgccaagatcgagtatatcaaaaactccactcagacaatgtaactctgttggtttaattgatgctggatatagaggagaaattatttctgcagtagataatataaagaatactccatttactattaaacgaggccaaagactattccaattagtatcaatggatggaggaccaataagttttgaaatagtttccgaattaagtgatacggatagaggtgacgggggatttggtagtacaggaaaatga

SEQ ID NO: 267821 - DNA, 451 bp, Unknown
  Bacterial polypeptide expressing nucleotide sequence isolated from the Sargasso Sea
catgaaggatgtttccaaagccattttgaaaatttgtctgcattatccggagatgcctgttccttcccgaggacacgcctcggatgcaggaatcgacttaaccgcaatggcttatgaagcgaaggcagatcatgtttttttcatcgataccggagtttcagttcaactcagtcagggatattatctggaggtggttcctcgctccagcatcgttaaaaaagattttatcatggccaacagtgtgggcatcatcgatcctgattatcggggcaggatatttgttccccttcgttacctcggcgaaggttctggagaagaagcctgccggaggctgcttgaacaaaggatcgcacagatgatcattagacgattggaaccttgcgacattgaaatcgtcgatgagctggatcaaaccgtccgtggtgaaggaggcttcggcagcacaggctga

SEQ ID NO: 267822 - DNA, 178 bp, Unknown
  Bacterial polypeptide expressing nucleotide sequence isolated from the Sargasso Sea
cagaggagagttaaaaattatactttttaaccatagtaaaaaagaatttatcataaataataaagacagaattgcacaaatggttattttaccaattttaaagtttgatttcgaggaaactgataaattacaggatactattagaggttctggtggctttggttctactggaaaatga

SEQ ID NO: 267823 - DNA, 451 bp, Unknown
  Bacterial polypeptide expressing nucleotide sequence isolated from the Sargasso Sea
atgaaggatgtttccaaagccattttgaaaatttgtctgcattatccggagatgcctgttccttcccgaggacacgcctcggatgcaggaatcgacttaaccgcaatggcttatgaagcgaaggtagatcatgtttttttcatcgataccggggtttcagttcaactcagtcagggatactaccttgaggtggttcctcgctccagcatcgttaaaaaagattttatcatggccaacagtgtgggcatcatcgatcctgactaccgaggcaggatatttgttcccctccgttaccttggcgagggttctggagaagaagcctgtcggaggctgcttgagcaaaggatcgcacagataatcgtaagacgattggaaccttgcgacattgaaatcgtcgatgagctggatcaaaccgtccgtggtgaaggaggcttcggcagcacaggttgat

SEQ ID NO: 267824 - DNA, 439 bp, Unknown
  Bacterial polypeptide expressing nucleotide sequence isolated from the Sargasso Sea
tatgcatttgaaaattaaatctctgacccaaaaagctaaagatttttatgaaaatcatggacattttcatcagggggatgctggtcttgatttatttatcattgattcattgacaatacccccaggtgaaaccgctataattaaatcaaatattgcttgtgaaaataccgatgaaatgccttatttattgatgcctcgatctagtatatcaaaaaccccattaaggcaatgcaattctgtaggcttaatagatgctgggtatcgtggagagattatggccgcagtagataatataaaggatattccatatacggttgagccagggcaaagattgttccaattagtgtccatggatggtgctccaattacttttgaaatagtatctgagttatctcagacggatagaggagatggtggttttggaagtactggtaaataa

SEQ ID NO: 267825 - DNA, 299 bp, Unknown
  Bacterial polypeptide expressing nucleotide sequence isolated from the Sargasso Sea
ccacctgcagatagcctgcgaaacagatgatggacgtccttatcttcttatgccaagatctagtattgcaaaaacacctttaagattgtgtaattctattggacttattgatggtggatatcgaggtgaaataatggccgttgttgataatattaaaaaacaatcttatactgtcaaccctggacaaagactgtttcaattagtagctatggacggttcacctattcatttcaaactcgttgataagctttctgaaagcactagaggagagggcgggtttggaagtactggcgaataat

SEQ ID NO: 267826 - DNA, 898 bp, Unknown
  Bacterial polypeptide expressing nucleotide sequence isolated from the Sargasso Sea
tatgccattaccaacttacgcaaccccaatacaaagaacttattattatgcttatttatttttttgtggcgttgtattttttttcttagttgcaccactaatagcaattgtcccgatatcatttagtgtatcaccctttatggtttttacagagggtatgttagcatggccacctgatcctgaagcttggtcactaagatggtacagaaatatgattggagattgtagtgctgatgttgtttcttcaactgttccttgttcaaccaaatggatgaagggaacagtaaatagtttttatattggcattatagcaacagttatcgcaacggttcttggtacaatggctgcgttgggattaagtaggcctcatatgccttacaaagctctaataatgtcaatactaatttcacctatgatagtcccattaattataactgctgcgggaatgtttttcttttatgcaagaattaatcttgtttatacttttactggagtaatattagctcatgtagcattagccacaccttttgtcgtaattactgtaactgctactttagttggctttgacatgaatatggttaaagcagctcaaagtttaggcgcaaaaccaatgagaacattttttaaagttatcatgcctttaattttaccgggaattatttcaggagctttatttgcatttattacctcttttgatgaagttgtaatagtcatgtttatggcgagtattgatcagcttacaataccaaaacaaatgtgggccggtatacgtcaagaaatcagtccagtaattttatgtatggcaacatgtttagttatactttcaattgttctattaactaccgtagaattactaagaaggagagctgaaagactgcgcggtattaaagctagataa

SEQ ID NO: 267827 - DNA, 451 bp, Unknown
  Bacterial polypeptide expressing nucleotide sequence isolated from the Sargasso Sea
catgggagaatctccggttgtgaaggttgcaaagaccgatcacaatgccagaatgccgacgaaaggaagcgagtatgctgctggatgggacctgtactgcttggaagatactgtggtaaatttccgctctagcgtcaagctcagaacgggtttgagagtggccattccggagggtttcgaagggcaagtgagggctagatcatctcttggatccaaggggctcatcctccctcacagcatcgggacgatcgatgcagactacaggggcgagctgttcgtcctaatgacatggatcggggagggcgagtcatacgaagtgaaatctggagaaagaattgcccaattggtaattgccccgattccagatgttcagttcaccgaggtcgatgagggggatctaggagaaaccaagaggggagacgggggtttcggtagcaccggaagattctga

SEQ ID NO: 267828 - DNA, 439 bp, Unknown
  Bacterial polypeptide expressing nucleotide sequence isolated from the Sargasso Sea
atgcatcttaaaatcaaacctttttccgaagatatattttcaatgtataaacatcacagccatttccatcaaggagatgctggacttgacttattcatcattgaaaatcaaactattaaagcaggctctagcacaagaattcatttaggtatatcttgtgaaaaccttgattcaaggccatatctacttatggctagatctagcatatcgaaaacacctataagattatccaactctgtgggattaattgatgccggctacagaggtgagataatggctgccgtagataatataaaggattattcttataatattgaaaaaggacaaagattattccagcttgtttcaatgaacggtgaggcaatacattttgatcttgtagagactttatcagattcttcgcgaggtaaaggtggctttggtagtactggaaaataat

SEQ ID NO: 267829 - DNA, 439 bp, Unknown
  Bacterial polypeptide expressing nucleotide sequence isolated from the Sargasso Sea
aatgaaattaaggattaaagctttcaataaaagagctcaagagctctatgaaaatcattcacactttcacgcaggagatgcagggttagacttatttgttatcgaagatcaagtcatacctgcaaaaagtacacatcctattccattgcaaatagcgtgtgaaaacgttgataataaagcatactatttatttccaagatcaagtatttctaagactccattaaggttagctaattcaataggtttgattgatggcggatatagaggagaactggttggaatggttgataatatttatgatgaagattttcatattaaaagaggagaaagatattttcagctcgtagctgttgatagttctccaatagagtttgaactagttacagaattatcggaatcaagccgtggagagggtggattcggaagcactggcagataa

SEQ ID NO: 267830 - DNA, 412 bp, Unknown
  Bacterial polypeptide expressing nucleotide sequence isolated from the Sargasso Sea
aaccaaaaagcaaaacttccaagttataaaactgttgggtcctcaggtatggatttgatggcatgtatagatgaacctattacaatcaaaccaaatgagtcgaaattggtaccaacaggtattgcaattgcaattcctgaagatacagaggttcaaattagaccaagatcaggccttgctgcaaaatcaagtattagcgtgctaaatacaccaggcacaattgacagtgattatagaggagagctaaaaattattttatttaaccatggtaaagatgaattcattgtaaatgatgaagatagagttgctcaaatggttttaatgcctattttaaaagtagaaattgaagaaacaaatgaattaccagagacaattagagggtccggaggatttggatctactggtaaatagt

SEQ ID NO: 267831 - DNA, 265 bp, Unknown
  Bacterial polypeptide expressing nucleotide sequence isolated from the Sargasso Sea
tgctttagtgatacctagatctggattaggctcaaaacatgggatcgttatgggaaacttagttggcttgattgattctgactatcagggagagctaaaagtgcctctttggaatagatcgacaaaagattttttagtcagcagtggcgatagaattgctcaaatgattctcgtaccaatcaagcaggctaaattaagagttgtagaggatttctcagaaacaggtagagggactaaaggatttggtagttcgggagttgattaa

SEQ ID NO: 267832 - DNA, 262 bp, Unknown
  Bacterial polypeptide expressing nucleotide sequence isolated from the Sargasso Sea
ttgactataaatattgaaatagaatggctaaagggaaatgaagatataaagtcacttgctaaggcaactcctaaaagtgctggttttgatctccctgcagcgataaaaaaatcagtaaaaatattaccatcagattttcatcttatccctttaggttttaaattagctattcctgaaggttatgaaggtcaaattcgcccaagatctggtctagctgctaagtctgggatttctgttcttaatagtccaggaactatagatt

SEQ ID NO: 267833 - DNA, 238 bp, Unknown
  Bacterial polypeptide expressing nucleotide sequence isolated from the Sargasso Sea
gcttgcagcaaaaaataatatatcagttttaaataccccaggaacaattgatagtgactacagaggtgaaattaaaataatacttttcaatcatggaggtagtgaatttattataaataataatgatagaattgctcaaatgattttgatgcctgtaaataaaatggaactagaagaagtaaaaaatttgccaagcaccttacgaggtaaaggtggttttggttcaactggaaaataa

SEQ ID NO: 267834 - DNA, 400 bp, Unknown
  Bacterial polypeptide expressing nucleotide sequence isolated from the Sargasso Sea
atggtaaaagtattaattaaaaaattagatcctacagtagaaattcctacctacaaaactgaaggtgcatcaggtatggacttaatggcatttataaaaaaaccgattaaattagtcccgcaaagctcttgcttggtaccaactggactttctgttgcgttttcagatgagtacgaaatacaaataagacctagatcaggacttgctgcaaaaaataatatatctgttttaaatactcctggaacaattgatagtgattatagaggtgaaattaaaataatactttttaatcatggaaacaaagagtttattattaataataaggatagagtcgctcaaatgattttgatgccaatacataaaatggacttagaagaagtaaaagatttaccagatactt

SEQ ID NO: 267835 - DNA, 150 bp, Unknown
  Bacterial polypeptide expressing nucleotide sequence isolated from the Sargasso Sea
accacggtcaggaaacattcacagtcaaaccaggtgatagaattgcacaaatggtaattacaaggatcgagcgtgtgaatttagagaagagtgagttcataactaaaacaattcgcggcagtggcggttttggatctacagggatttgaa

SEQ ID NO: 267836 - DNA, 208 bp, Unknown
  Bacterial polypeptide expressing nucleotide sequence isolated from the Sargasso Sea
atacaccttggaactattgatagttgattacaggggagaaataaaagtaatcctttttaatcacggaaaaaatgattttttaataaataataaagatagaatagcacaaatgattttaactcctgtaattaaaatagattttgaggaaactgatgatctaccagaaacaattagaggagagggtggttttggttctactgggaaatga

SEQ ID NO: 267837 - DNA, 385 bp, Unknown
  Bacterial polypeptide expressing nucleotide sequence isolated from the Sargasso Sea
taaaactagtggatcttcgggtatggatctgatggcatgtatagctgaacctataacaatcaaaccaaatgagtcgaaattgataccaacaggtattgcaattgcaattcctgaagatacagagattcaaattagaccaagatctggtcttgccgcaaaatcaagtataagcgtactaaatacaccgggtacaattgatagtgattatagaggagagctaaaaattattttatttaaccacggtaaagatgaatttactgtcaatgatgaagatagagttgctcaaatggttttaatgcctattttaaaagtagaagttgaagaaacaaatgaattaccagagacaatcagagggtctggaggatttggatctactggtaaatag

SEQ ID NO: 267838 - DNA, 406 bp, Unknown
  Bacterial polypeptide expressing nucleotide sequence isolated from the Sargasso Sea
atggtaaaagttttatttaagagacttaaccaaaaagcaaaacttccaagttataaaactgttggatcctcaggaatggatttgatggcatgtgtagatgaacctcttacaatcaagccaaatgagtcaaaattggtaccaacaggtattgcaattgcaattccagaagatacagaggttcaaattagaccaagatcaggccttgcagcaaaatcaagtatcagcgtgctcaatacgccaggaacaattgacagtgattatagaggagagttaaaaattattttatttaaccacggtaaaaatgaatttattgtaaacgatgaagatagagttgcccaaatggttttaatgcctattttaaaagtagaaattgaagaaacaaatgaattacccagagacaattaga

SEQ ID NO: 267839 - DNA, 226 bp, Unknown
  Bacterial polypeptide expressing nucleotide sequence isolated from the Sargasso Sea
ggtattgtcttaggcaaccttgttggccttatagattcagattatcaaggtgaattaatggtaccggcttggaataggtctgaaaatgattttgagatccatccaggagacagaattgctcaaatgattatagtgcctgtaatgcaagcaaattttgaaatcgtagaagaatttacacagactgcaagaggaacaaagggttttgggagttcaggcttaaattgaa

SEQ ID NO: 267840 - DNA, 387 bp, Unknown
  Bacterial polypeptide expressing nucleotide sequence isolated from the Sargasso Sea
aatggtaaaggttttatttaaaagactaaaccaaaaagtaaaacttccaatttataaaactgctggatcctcaggcatggatctaatggcatgcttagataagcctataacaatcaaaccaaatgagtcaaaattaataccaacaggtattgcaattgcaattcctgaagatacagaggttcaaattagaccaagatcaggccttgctgcgaaatcaagtattagtgtgcttaacacaccgggtacgattgacagtgattatagaggagaactaaagattattttatttaaccatggtaaagatgaatttactgtaaatgatgaagatagagttgctcaaatggttttaatgcctatcttaaaagtagaagttgaagaaacaaatga

SEQ ID NO: 267841 - DNA, 219 bp, Unknown
  Bacterial polypeptide expressing nucleotide sequence isolated from the Sargasso Sea
aatgaaaaaagctattgatttgaaaattcttgacccacgtattggcactgaattccccttacccgcatatgccacccccggttcggcaggtttagacctgcgcgcctgcctggataacacgctggtgctggcgccgggccaaacagtgctgatcccaaccgggttatccatttttatcggtgacgctaacctgtgcgcgactattttgccccgttctgg

SEQ ID NO: 267842 - DNA, 430 bp, Unknown
  Bacterial polypeptide expressing nucleotide sequence isolated from the Sargasso Sea
atggcacctctaggagttaagaagctatcttacgatgctcgtctgcctactcgtggttctgatggtgctgtgggatatgatctttatagctccgaagatgcgactgtaccgtgtcaagcggggagagctttagttggaactggtattgcactgtccatccctgatggtgtgtatggacgtgtagctcctcgttctggtctggctgtaaagcattgtattaacgttggtgcaggtgttattgatcctgattataccggtgaagtcaaggtcgtcctattcaatcatggtacggaagactttgaaatcaagaagggtgatcgtattgctcagcttattttggagaggtgtgagacacctatgattaaggaaatcggtcttctcgaggagacactcaggggtgatggtggcttcggatctacaggtctctaaa

SEQ ID NO: 267843 - DNA, 322 bp, Unknown
  Bacterial polypeptide expressing nucleotide sequence isolated from the Sargasso Sea
accaaatgagtcgaaattgataccaacaggtattgcaattgcaattcctgaagatacagaggttcaaattagacctagatctggtcttgccgcaaaatcaagtattagcgtactaaatacaccgggtacaattgatagtgattatagaggagagctaaaaattattttatttaaccatggtaaagataaatttactgtcaatgatgaagatagagttgctcaaatggttttaatgcctattttaaaagtagaaattgaggaaacaaatgaattaccagagacaatcagagggtctggaggatttggatctactggtaaataa

SEQ ID NO: 267844 - DNA, 238 bp, Unknown
  Bacterial polypeptide expressing nucleotide sequence isolated from the Sargasso Sea
cttgcagcaaaatcgaatatttcagttttaaacactcctggaacaattgatagtgattatagaggtgaattaaaaattatattatttaaccatggaaaaaagtattttattgtaaataataatgatcgagtagcacagatggttttaatgccagttttaaaaatagattttgaagaagttaacgaacttccagaaacaataagaggttctggaggatttggatccactggaaaatgaa

SEQ ID NO: 267845 - DNA, 334 bp, Unknown
  Bacterial polypeptide expressing nucleotide sequence isolated from the Sargasso Sea
aatgataaaagttttgataaagaagcttgattcaaaagctaaattgccttcttacaaaactgatggttcttcgggtatggatttaatggcttttactaataacgtaattaaaattgctccaaatagttctgcattaataccaacaggactgtcactagcaataccaaaagattgtgagattcaaataagaccacgttcgggtcttgcaataaattcaaacattagtgttttaaatacccctggcactattgatagtgattatagaggtgagttaaaagtaatattatttaatcatggtaaaaaagaatttgttgtaaatcataatgatagaata

SEQ ID NO: 267846 - DNA, 439 bp, Unknown
  Bacterial polypeptide expressing nucleotide sequence isolated from the Sargasso Sea
aatggtaaaagttttatttaaaagacttaaccaaaaagcaaaacttccaagttataaaactgctggatcctcaggtatggatttgatggcatgtatagatggacctattacaatcaaaccaaatgagtcgaaattggtaccaaccggtattgcaattgcaattcctgaagatacagaggttcaaattagaccaagatcaggcctagctgcaaaatcaagtattagcgtgctaaatacaccgggcacaattgacagtgattatagaggagagctaaaaattattttatttaaccatggtaaagatgaattcattgtaaatgatgaagatagagttgctcaaatggttttaacgcctattttaaaagtagaaattgaagaaacaaatgaattaccagagacaattagagggtctggaggatttggatctactggtaaatag

SEQ ID NO: 267847 - DNA, 268 bp, Unknown
  Bacterial polypeptide expressing nucleotide sequence isolated from the Sargasso Sea
atgattaaagttttaatcaaaaaattaaattcttctgttaaattaccttcgtataaaaccaatggagcatctggtatggatttaatggcttggttagaaaaaccaatcaatttagaaccaggcaagtcttgtcttgttccaactggattatcagttgcatttccaaaagaatatgaaattcaaattagaccaagatctggtctagcagcaaaaaataatattagtattttgaatacacctggcactattgatagtgattatcgaggag

SEQ ID NO: 267848 - DNA, 376 bp, Unknown
  Bacterial polypeptide expressing nucleotide sequence isolated from the Sargasso Sea
aatggcaaaagttcttatcaaaaagttagcttcttcagttgaattaccagcttataaaacagatggcgcatcagggatggatttaatggctttcataaaagagccaataattctaaaacctaattcatcatgtttggttcccacaggtctttcagttgcattttctagtgattttgagatacaaataagaccaagatcaggattagctgcaagaaataatataagtgtcttaaatacacctggaactatcgatagtgactatagaggagaacttaaagtaattcttttcaaccatggaaataataattttttaatcaacaataaagatagaatagcacaaatgattttaactccagtagtaaaaatgagcccttga

SEQ ID NO: 267849 - DNA, 412 bp, Unknown
  Bacterial polypeptide expressing nucleotide sequence isolated from the Sargasso Sea
taaccaaaaagcaaaacttccaagttataaaactattggatcttcgggtatggatctgatggcatgtgtagatgaacctgtaacaatcaaaccaaatgagtcgaaattgatacccacaggtattgcaattgcaattcctgaagatacagaggttcaaattagaccaagatctggtcttgctgcaaaattaagtattagcgtactaaatacaccgggtacaattgatagtgattatagaggagagctaaaaattattttatttaaccatggtaaagatgaatttactgtcaatgatgaagatagagttgctcaaatggttttaatgcctattttaaaagtagaaattgaagaaacaaatgaattaccagagacaatcagagggtctggaggatttggatctactggtaaatag

SEQ ID NO: 267850 - DNA, 214 bp, Unknown
  Bacterial polypeptide expressing nucleotide sequence isolated from the Sargasso Sea
gtattaaatactcctggaactattgatagtgattatagaggtgaattaaaaataatattgtttaatcatggaaataaagattttattgtaaataacaatgatagggtagcgcaaatggtattattgccaatcctaaaaatggagcttgaagaagtagatcagttgcctgaatccataagaggatctggtggttttggatcaactggtaaatgaa

SEQ ID NO: 267851 - DNA, 439 bp, Unknown
  Bacterial polypeptide expressing nucleotide sequence isolated from the Sargasso Sea
atggttaaagttctagttaaaagacttgatccaaaagtaaatctaccaaaatataaaactattggttcatccgggatggatttaatggcatttattgaaaacccaattaaaatcaagcctggaacatcagctttaattccaacaggaatctcgatagcgtttccagaggaatttgaggctcaaataagaccaagatctggattagcagcaaaacaaagcattggtgttcttaatacacctggaacaattgatagtgattatcgaggtgagctaaaggttataatatttaatcatggagaaaatgaatttatagtaaattgtaatgatagagtagcacaaatggttctcacgccagttttaaaagtcgaatttaaagaagtaaatgaacttcctgaaactgttagaggaagtggaggttttggttctactggtaaatgag

SEQ ID NO: 267852 - DNA, 386 bp, Unknown
  Bacterial polypeptide expressing nucleotide sequence isolated from the Sargasso Sea
aatggtcagagtattaattaaaaaacttgatcctagagttgctcttccatcttacaagactaatggagcttcgggtatggacataatggcttttgtgaaggaaaaaatagtaattaaaccacaaacttcagctctaattccaacaggtttatctgtcgccttctcagaagattatgagatacaaataaggccacgttctggccttgcagctaaaaataacattagtgttttaaatactcctggaactattgacagtgattatagaggtgaattaaaaattattatatttaatcatagtaatcatgattttgtggtcagtagtaatgatagaatagcacaaatggttttaacccctattgcaaaaatggaattagaggaagcaaatg

SEQ ID NO: 267853 - DNA, 301 bp, Unknown
  Bacterial polypeptide expressing nucleotide sequence isolated from the Sargasso Sea
atggttaaagttttagtaaaaaagcttgatccgaatgttcaactaccatcatacaaaaccgatggctcatcaggtatggatctttttgcatttatcaaaaatccagtaaagataaaaccaggtacttctgaactaattccaactggaatatcagttgccataccgatcaattttgaaattcaaataagaccaagatcaggtctagcagcaaaatcaaatattagtgttttaaacactcctggcacagttgatagtgactatagaggtgaaaataaaataattttatttaacccatggtaaa

SEQ ID NO: 267854 - DNA, 268 bp, Unknown
  Bacterial polypeptide expressing nucleotide sequence isolated from the Sargasso Sea
aatggcaaaagttctaatcaaaaaattagcttcatctgttcaattacctacttataaaactagtggagcttcagggatggatttaatggcttttatttctgaaacaataattcttaaaccacaatcttcttgtttagtgccaactggtatttctgttgcattttccgaggaattcgaaatacaaataagaccaagatctggtttggcggctaaaaataatattagtgtattaaatactcctggcacgattgatagtgattataggggt

SEQ ID NO: 267855 - DNA, 340 bp, Unknown
  Bacterial polypeptide expressing nucleotide sequence isolated from the Sargasso Sea
agtccaataaaaattgcacctaactctctagaattaattccaacaggcttgtctattgctataccagaagatttagaaatacaaataagacctagatcagggcttgctgcaaaatctaatataggtgtattaaatactcctggaactattgatagtgattatagaggtgagttaaaaataatattgtttaaccatggaaataaagattttattgtaaataacaacgatagggtggctcaaatggtattaatgcccatactaaaaatggaacttgaagaagttgatcagttacctgagtctataagaggatcgggtggttttggatcaactggtaaatgaa

SEQ ID NO: 267856 - DNA, 205 bp, Unknown
  Bacterial polypeptide expressing nucleotide sequence isolated from the Sargasso Sea
tactcctggaaccattgatagtgattatagaggagaaattaaaataatattatttaatcacagtaaagaaaattttttggttaaaaatggagatagaattgctcagatgatacttatgcctgttcttaaaatagaatttgatgaggtaaatgaattgccagacactattaggggctcgggtggctttggatcaactgggaaatga

SEQ ID NO: 267857 - DNA, 451 bp, Unknown
  Bacterial polypeptide expressing nucleotide sequence isolated from the Sargasso Sea
atgggaagcgacgtggttgtgaggattgcgagggtggatccaggcgcaaggatgccctccaagggtagcgagcatgccgcaggatgggacctctactcgttggaggacactgtagtccctttccgatcgagtgtgaagcttaggactggtctgcacgtagccatacccgaaggatttgaggggcaggttagagcacgatcatccctcggatcgaagggattgattctaccgcatagcataggaacaatagactccgactacaggggggagctgtttgttctgatggcctggataggcgatggggactcttacatggtaaattccggggaaaggatagcgcagctagtaatcgcaccgattccagagattagtttcaccgaagttgatattgaagatctgggggcgaccgaacgaggagatggcggtttcggaagtaccggaagattctgaa

SEQ ID NO: 267858 - DNA, 387 bp, Unknown
  Bacterial polypeptide expressing nucleotide sequence isolated from the Sargasso Sea
ttattcctacaagaggatcacaacgatctgctggatgggatttatatagtttgcatgatttcgtaattccaggcaattcaaaacatgtagctaaaacagggattgctattagtattccagaccatcattatggtagagtagctcctagatctggattaactgttaaatatagtattaatattggagcaggtgtaattgattcagattatcgtggagagattggtgttgtaatgtttaatcatggaaataataattgtactattagtaaaggtgatcgtattgctcaattgattattgaaaagattaatacatctaacttagtagaagtagataatctagataatacacaaagaggatgtggaggatatggatctactggtacataat

SEQ ID NO: 267859 - DNA, 267 bp, Unknown
  Bacterial polypeptide expressing nucleotide sequence isolated from the Sargasso Sea
aatggtcaaaattaagataaagaaacttgaccctaaggtcaaaattccacaatataaaactgaaggatcatcaggcatggatctaatggcatttgtaaaagaaccttcgataataaagccaaacagttctgaattaataccaactggaatatctatagctattcctcaagatactgagatacaaattagacctcggtcaggtttagcagcaaaatctaagataagtgtactcaatacaccaggtacgattgatagtgactatagggg

SEQ ID NO: 267860 - DNA, 439 bp, Unknown
  Bacterial polypeptide expressing nucleotide sequence isolated from the Sargasso Sea
atggttaaagttttattaaaaaaacttgatccagaagttatactaccgtcctataaaacaaaaggttcctcaggtatggatctaatggcatttttaaaagaaccaattagaattcttccaaagacatcgtgtttaattcctacaggaatttctatagctattcctgaagatgttgaaatacaaataagacctagatcaggtctagcagcaaaatcaaatatttcagttttaaatactccaggaacaattgatagtgattatagaggtgaattaaaaattatattatttaaccatggaaaaaaagattttattgtaaataataatgatcgtgttgcacagatggttttaatgcctgttttaaaaatagactttgaagaagttaacgaacttccagattcaataagaggttctggtggatttggatcgactggaaaatgaa

SEQ ID NO: 267861 - DNA, 211 bp, Unknown
  Bacterial polypeptide expressing nucleotide sequence isolated from the Sargasso Sea
taaacacccctggaaaatagacagtgattatagaggtgaaattaaagttgtattaataaatttaagcaaagatgaatttaccattcatccaaaagatagaattgctcaaatggtcttcacaaatgctatacaagtaaagttcaaagaagttcaaaatcttgatcaaacaaaaaggggagatggaggatttggatctaccggaaaagattaa

SEQ ID NO: 267862 - DNA, 445 bp, Unknown
  Bacterial polypeptide expressing nucleotide sequence isolated from the Sargasso Sea
aatgattaatgttggttacaaaatccatgatcatgcaattgaccttccgaaaattgattatcaaacaataggcgcagcaggccttgatctatatgcagctaattctgaaaaaattaatttatcaactttagaaagatatgcgatacctacgggcattagtttagctataccctctggatatgaaggacaaataagaccgaggtcaggattatttttaaaacatggaataacgataaattttggaaccatagatagcgattacaggggagaaatttttattttagttgtcaatttatcaaaatctaattttataatagaaagaggcatgagagtcgctcaaatagttttcaataagtttgaaagggttaatttaatatctaaattaaaattagatccaaccttaagaggcgcaggtggatttggttcaactggaataaaggaataa

SEQ ID NO: 267863 - DNA, 439 bp, Unknown
  Bacterial polypeptide expressing nucleotide sequence isolated from the Sargasso Sea
atggtaaaagttttatttaagagacttaaccaaaaagcgaaacttccaagttataaaactgctggatcctcaggtatggatttgatggcatgtatagataaatctattacaatcaaaccaaaagagtcgaaattggtaccaaccggtattgcaattgcaattcctgaagatacagaagttcaaattagaccaagatcaggtcttgctgcaaaatcaagtattagcgtactaaatacaccaggcacaattgacagtgattatagaggagagctaaaaattattttatttaaccatggtaaagatgaattcattgtaaatgatgaggatagagttgctcaaatggttttaatgcctattttaaaagtagaaattgaagaaacaaatgaattaccagagacaattagagggtccggaggatttggatctactggtaaatagt

SEQ ID NO: 267864 - DNA, 323 bp, Unknown
  Bacterial polypeptide expressing nucleotide sequence isolated from the Sargasso Sea
aaaaacagaaatgataccaattggctttgctatgtatctcgaggataataatttatctgcgcttgttattcctcgatctggcttgggatcaaaatatggaatagttcttggtaatcttgttggtttaattgattcagactatcaaggtgaactaatggtaccagcttggaatagatctgatagtaaatttgaaataaaaccaggcgacagaatagctcaaatgataatagtcccaatattacaagcggaatttgagatagtcgacgaatttaaagtttcgtcaagaggggttaaagggttcgggagctctggaattaattgat

SEQ ID NO: 267865 - DNA, 391 bp, Unknown
  Bacterial polypeptide expressing nucleotide sequence isolated from the Sargasso Sea
tcaaacaaaaggatctgctggattagatctaattgcttgttgcgaaagctctattactttgagcccaaatgaatcaacaataattccatcaggcatatctatttatatcgaagattcagactttgctggaatagtgattccaagatcaggtttaggcgcaaaaaaaggtttggtatgtggcaatcttatgggattgattgattcagattatcaaggccctcttagcatttctctttggaatagatcttctgaaccaatagaaataaatcctggtgaaagagtcgcacaattagttgtaatcagagtggatcaagtagaactagatcttgttgaagaattcgaaaccaccgaaagaggttctgaaggatttggaagtactggagttagttaa

SEQ ID NO: 267866 - DNA, 337 bp, Unknown
  Bacterial polypeptide expressing nucleotide sequence isolated from the Sargasso Sea
aatggctagagttttaattaaaagattaaatacaaaagtagaattaccaaaatataaaactgaaggctcgtctggtcttgatttaatggcttttatagataaaccaattaatttgccttcaaaagagtctgtattagttcctacaggtatatctgttgctataagtaatgatcttgaaatacaaattagacctagatctggacttgcagcaaaatctaatatttctgtacttaacacacctggaactattgacagtgattatagaggggaaattaaagtaatcttatttaaccatggtaaaaaagaatttattataaataataaagataggatgctc

SEQ ID NO: 267867 - DNA, 386 bp, Unknown
  Bacterial polypeptide expressing nucleotide sequence isolated from the Sargasso Sea
attgtttcaagacactcttcaagtaagaagacttgatggttatagcgttactgatttaccagccttcaagtcagaattttcctcgggtatggatatttgcgctaattttttaaaaagaaataaaaaaaaagaaattataataccttcaagtggaagaaaaatgataagcactggcttagcaattgaattacctaataattgtgaaggtcaaataagatcaaggtcaggtttagcaattgattatggtttaatggttttaaattctcctgggactatcgatcaagattttcgtgggcatttaaaaataatattagcaaattttggaacagaagattatttagtcaaacaaggagacagaatcgctcagttagtaatttcaaatgtaa

SEQ ID NO: 267868 - DNA, 322 bp, Unknown
  Bacterial polypeptide expressing nucleotide sequence isolated from the Sargasso Sea
tatgctaaaaattataatagaaaaagtctcaagatctgagaattttcagcttccaaaatatcattcagaaaattcatcaggattagatatagttgcagatgtaaaagatccagtaaatttaaaccaaaatgagatatttttaataccaactggaattaaattaaaaatacctaaaggctatgaaggtcaagtgagaccaaggtccggcttggctttaaatcatgggattacgatattaaattccccaggtacaattgattcagattacagaggtgaagtcaaagtaattttaataaatcatttctcaaaatatttacaataa

SEQ ID NO: 267869 - DNA, 289 bp, Unknown
  Bacterial polypeptide expressing nucleotide sequence isolated from the Sargasso Sea
aatggttaaaattttagttaaaagatttgattctaaagttaaaatacctgaatacaaaactagtggttcatctggtatggatttgatggcgtttgttcaaagttcaataaaaattttacctaatactttggagttaatcccaacaggtttgtctattgcaataccagaaaatttagaaatacaaataagacctaggtcaggacttgctgcaaaatctagcgtaagtgtattaaatactcccggaactattgatagtgattacagaggtgaattaaaaataatattattt

SEQ ID NO: 267870 - DNA, 334 bp, Unknown
  Bacterial polypeptide expressing nucleotide sequence isolated from the Sargasso Sea
aatggctagagttttaattaaaagattaaatcctaaagtagaattaccaaaatataaaactgaaggctcgtctggtcttgatttaatggcttttatagataaaccaattaatttgccttcaaaagagtctgtattagttcctacaggtatatcagttgctataagtaatgatctagaaatacaaattagacctagatctggacttgcagcaaaatctaatatctctgtacttaacacaccaggaactattgacagtgattatagaggggaaattaaagtaatcttatttaaccatggtaaaaaagaatttattattaataataaagataggatt

SEQ ID NO: 267871 - DNA, 314 bp, Unknown
  Bacterial polypeptide expressing nucleotide sequence isolated from the Sargasso Sea
aatggtgaaggttttatttaagagactaaaccaaaaagcaaaacttccaagttataaaactagtggatcttcaggtatggatctgatggcatgtgtagatgaacctataacaatcaaaccaaatgagtcgaaattgataccaacaggtattgcaattgcgattcctgaagatacagaagttcaaattagaccaagatctggtcttgccgctaaatcaagtattagcgtactaaatacaccgggtacaattgatagtgattatagaggagagctaaaaattattttatttaaccatggtaaagatgaattcaccg

SEQ ID NO: 267872 - DNA, 172 bp, Unknown
  Bacterial polypeptide expressing nucleotide sequence isolated from the Sargasso Sea
agaaattaaagtaataatttataatcatggaaataatgattttcttatcaataacggagatagaatagctcaaatgatattaatgcctgttgttaaaatggaattagaagagaccaacgacttgcctgaaacaataaggggtgagggtggattcggctcaacgggtaaatga

SEQ ID NO: 267873 - DNA, 277 bp, Unknown
  Bacterial polypeptide expressing nucleotide sequence isolated from the Sargasso Sea
atggtaagagttttagttaaaaagcttaatccaagcgtacagcttcctaagtataaaactctagggtcttcgggcatggacttaatggcttttataagtgaaactattataatttcaccaaatagattacatataattccaacaggaatttctatagcgatagaagatggatatgaaattcaaataaggccaagatctggtttagcagcaaaatctaatattactgtattaaatactcctggaacaatcgacagcgattatagaggtgaattaaaag

SEQ ID NO: 267874 - DNA, 454 bp, Unknown
  Bacterial polypeptide expressing nucleotide sequence isolated from the Sargasso Sea
aatgaaacttaagtttagaattttagacaatcgtattggaagtatatttgaccttccaaaatatcaaactgagggttcagctggacttgatctgcttgcatgcatcgataatgatcttgtattgatgcctaatgaatcaacaataattgaatccggaatttcaatttatatcgacgataaaaattttgcgggcatgattattccaagatctggcttgggcgcaaaaaaaggattagtttgcggaaacttgatgggcctaattgattctgattatcaaggtccccttagcatttctttatggaatagatcaaaagaagaaattattattaagccaggcgatagagttgctcaactgatagttatcagcattaatcaagttgaattagttgaagttgatgagtttagtgaatcccaaaggggtgaaaagggctttggaagtactggaattaactag

SEQ ID NO: 267875 - DNA, 298 bp, Unknown
  Bacterial polypeptide expressing nucleotide sequence isolated from the Sargasso Sea
aatggttaaagttttagtaaaaagacttgatccaaaagtaaagttaccgaaatataagactagcggctcatctggaatggatttgatggcatttattgaaaacccaattacaatcaagcctcgaaaatcagctttaattccgaccggaatctcaatagcgtttcctgaggaatttgaaattcaaataagaccaagatctggattagcagccaaacaaagcattggtgttcttaatactcctggaactattgatagtgattatcgaggtgagctaaaagttatagtatttaatcatgga

SEQ ID NO: 267876 - DNA, 292 bp, Unknown
  Bacterial polypeptide expressing nucleotide sequence isolated from the Sargasso Sea
tgcaattcctcctggatttgaaggacaaatacgggcacggtcatctctaggagcaaagggaatgattctaccaaatggcgtaggtactattgatgctgattatcgaggcgagattcaaattctcgccacttggattggtgaaaatgaatcattcaaagtcgaagcaggagagagaattgctcaactcgtcattgctcctatcccatcagtagagttcatcgaagttgaaagcgcgaaattgggagacactaaacgaggcacgggtgggttcggtagtactggacgatactga

SEQ ID NO: 267877 - DNA, 436 bp, Unknown
  Bacterial polypeptide expressing nucleotide sequence isolated from the Sargasso Sea
atggtgaaagtcttaattaaaaaattagacaaaaaagttaaactgccagaatataaaacaacaggttcatctggactagatttgactgcattcattgaaaagaagatggttattaaaccaggcgaaaacgctttagtgccaacaggtatatctattgcaatacctgaggataccgaagttcagatcaggccgcgatcaggtttagcagctaaaaataatataagcgtattaaatactcctggaacaattgatagtgactatagaggagaaataaaagtaattttatttaatcatggagataaagactttacagtaaataacgatgatagaattgcgcaaatgatattagtgccaattctaaaagtagattttgaaactgtagaaacattgcctgacacaattagaggttcgggtggatttggatcaaccaggtaag

SEQ ID NO: 267878 - DNA, 439 bp, Unknown
  Bacterial polypeptide expressing nucleotide sequence isolated from the Sargasso Sea
aatggttaaagttttaataaaaaaattaaatccttctttaaaattgccttcatataaaactagaggtgcatcaggtatggatttgatggcttgtatagaaaagtcaattaatttagaaccaggaaaatcctgtctcgttccaaccggattgtcagtagcattttcagaaaactacgaaattcaaataaggccgagatctgggttggcagcaaaacataacatcagtgttttgaatacaccaggtacaatcgatagtgattataggggtgaactaaaaataattttatttaatcatggtgatcaaaactttataattaataataatgatagagttgctcagatggttttaactccaacattgaaaatggagcttgaagaaacaaatgaacttccagagtcgataagaggagaggaaggttttggttcgactggtaaatga

SEQ ID NO: 267879 - DNA, 319 bp, Unknown
  Bacterial polypeptide expressing nucleotide sequence isolated from the Sargasso Sea
aactgtcggatcatctggtatggatttgatggcgtttgttgagaattcaataaaaatcgcacctaatactcaagaattaataccaacgggtctatctatagcaataccagaagatttagaaatacaaataagacctcgatcaggtcttgctgcaaagtcaaatgtgagtgtattaaatactccagggactattgatagtgattacaggggagaattaaaaataatattatttaaccatggaaataaagattttattgtaaataataatgatagggttgcccaaatggttttaacaccgtgttataaaaatggagcttga

SEQ ID NO: 267880 - DNA, 364 bp, Unknown
  Bacterial polypeptide expressing nucleotide sequence isolated from the Sargasso Sea
atggttaaagttttaatcaaaaagttaaatccatcagtacaattaccatcatataaaacaagcggagcatctggaatggacctaatggcgtttattgaaaaaccaattgtaataaaacctggtaattcatgcctcgtgccaaccggattgtctgtagctttttctgaagaatttgaaatacaaattagacctagatctgggttagctgcaaaaaataaaattagtgttcttaatacacctggaacaatcgacagtgattatagaggagaattaaaaattattttatttaatcatagcagtgaaaattttacaattaataacaatgatagagttgctcaaatggttttgactcccagttgttaag

SEQ ID NO: 267881 - DNA, 223 bp, Unknown
  Bacterial polypeptide expressing nucleotide sequence isolated from the Sargasso Sea
tttgaccgtacttaattctcctggaacaatagactctgactatagaggtgaattaaagataatactcatcaatttaggaaatgacaattttgaagtgaaaaatggaatgcgagtagcacaaatggtagtatgtcctgtagaaattgctgaaattgaagaggtaaaaagtttagagggtacagatagaggcaaaggtgggtttggttctacaggtataaagtag

SEQ ID NO: 267882 - DNA, 208 bp, Unknown
  Bacterial polypeptide expressing nucleotide sequence isolated from the Sargasso Sea
atgaaaacaccgattgaattaaagatcctcgattcccgtattggctctgaattcccgctgcctgcctatgccacaccaggcagcgcaggcatggatcttcgcgccatgatagataccacaatgacgatagccccaggagaaactcagttaatcccaacgggtatcgccatccacgtagcagatccaggccttgcagcagtgatttacc

SEQ ID NO: 267883 - DNA, 271 bp, Unknown
  Bacterial polypeptide expressing nucleotide sequence isolated from the Sargasso Sea
aatggcaaaagttcttatcaaaaagttagaccctgcagttgaattacctgcttacaaaacagaaggcgcatcaggtatggatttaatggcattagtaaaagaacccatcaatcttaaaccaaactcatcatgtttagttccaacaggtcttgcaatagcattttctaatgatttcgaaatccaaataagaccaagatcaggtttagctgcaaaaaacagcattagtgttttaaacacacctggaactattgatagtgattacaggggagaa

SEQ ID NO: 267884 - DNA, 214 bp, Unknown
  Bacterial polypeptide expressing nucleotide sequence isolated from the Sargasso Sea
ttaaatgcaccaggcactattgacgctgactatcgcggtgaagttggagtaattttaatcaatctttccaatgaagcatttactgtatgccctggtgaccgaatagcccaactaattttgacaaaatacgagcaaatccaatgggtaattatcgatgatctcccaatttctgaaagagggactagagggtttgggagtactggaaaaaaataaa

SEQ ID NO: 267885 - DNA, 388 bp, Unknown
  Bacterial polypeptide expressing nucleotide sequence isolated from the Sargasso Sea
atggacgaaatcttatttaagactttggaaaatggtaaaggtctgtacaaactccagaaagccacattaggaagtgctggatttgatttagtagcagcaatccttgataaaaaatctataaaacctaatgaaacagaattaattccttgcggtttttcgttagaattaccaagtagctttgaagctcaagtaagaccaaggtcaggaatagctcttaaaaatcaggtaacagttttaaatactcccgggacaatcgactcagattacagaggggaggtaggggttatattgataaatcatggtaagaatatttttgatattgaaagaggtatgaggatcgcccagattgtctttcaaaagcttcctgaaatagaaatcatgaatcaca

SEQ ID NO: 267886 - DNA, 304 bp, Unknown
  Bacterial polypeptide expressing nucleotide sequence isolated from the Sargasso Sea
aatggcaaaagtccttatcaaaaagttagaccctgcagttgaattacctgcttacaaaacagaaggtgcatcaggtatggatttgatggcattagtaaaagaacctattaatcttaaaccaaactcatcgtgcttagtaccaacagggcttgctgttgcattttcaagtgatttcgaaatccaaataagaccaagatctggtttagctgcaaaaaacaacattagtgttttaaatacacctggaactattgatagtgattacaggggagaaataaaagtaatcctttttaatcacggaaaaagt

SEQ ID NO: 267887 - DNA, 412 bp, Unknown
  Bacterial polypeptide expressing nucleotide sequence isolated from the Sargasso Sea
gatgcctgaagttgccgttagttggacaaaagaggctgatcaagatttaggcctcccaaaatttgaaactgacggagcagctggcgcagacttgcgagccaatttgaatacagaatatcgttcaagtggtttatctttagctccgttgcagcgagaattgattcctactgggttgtgttttgaaataccaagcggtttcgaaggtcaattgagacctcgctcaggcttagctttaaagcatggtctgactttattaaactcacctggtacgattgatagtgattatagaggtccaattggcttgatcatgataaatatgggtgagtttgacttcaaaattacccatggtatgagaatcgcacagatagttttcgctgcaactttgaaagttcagttcaaagtttcaaaaaat

SEQ ID NO: 267888 - DNA, 436 bp, Unknown
  Bacterial polypeptide expressing nucleotide sequence isolated from the Sargasso Sea
gattctagaccctagaataggcgccgaatataaggcacctaaatatcaaacaaaaggatctgctggattagatctaattgcttgttgcgaaagctctattactttgagcccaaatgaatcaacaataattccatcaggcatatctatttatatcgaagatccagactttgctggaatagtgattccaagatcaggtttaggtgcaaaaaagggtttggtatgtggcaatcttatgggattgattgattcagattatcaaggtcctctcagtatctctctttggaatagatcttctgaaccaatagaaataaatcctggcgaaagagtcgcacaattagttgtaatcagagtggatcaagtagaactagatcttgttgaagaattcgaaaccaccgaaagaggttctgaaggatttggaagtacaggagttagttaa

SEQ ID NO: 267889 - DNA, 436 bp, Unknown
  Bacterial polypeptide expressing nucleotide sequence isolated from the Sargasso Sea
aatggttaaagttttagttcaaaaactaaattccagagttaaattacctgaatacaaaactagtggatcttcaggaatggatttaatggcgtttgttgaaagtccaataaaaattaaaccaaatactgtagaattgataccaacaggtttgtctattgcaataccagaagaattagaaatacaaataagacctagatcaggtcttgctgcaaaatctagcataagtgtattaaacactcctggtactattgatagtgattataggggtgaattaaagataatattatttaatcatgggaataaagattttattgtaaataaaaatgatagagtagctcaaatggtcttaacaccagttataaaaatggaacttgaagaagtagatcaattaccagagacaataagaggatctggcggctttggatcaactggtaaa

SEQ ID NO: 267890 - DNA, 439 bp, Unknown
  Bacterial polypeptide expressing nucleotide sequence isolated from the Sargasso Sea
aatggttaaagttttagtgaaaaggcttgatccaaaagtaaagttgccaaaatataaaactagcggctcatctgggatggatttaatggcatttattgaaaacccaattaaaatcaaacctggagcatcagctttaattccaactggaatctcaatagcttttcctgaagaatttgaagttcaaataagaccaagatctggattagcagctaaacaaagcattagtgttcttaacactccaggaactattgacagcgattatcgaggtgaacttaaagtaataatctttaatcatggtgaaagtcaatttgtggtaaattgcaatgatagaatagcacaaatgattctcacaccagtattaaaaatcgaatttgaagaagtaaatgaacttcctgaaacaattagaggaagtggaggttttggttctacgggtaaatga

SEQ ID NO: 267891 - DNA, 439 bp, Unknown
  Bacterial polypeptide expressing nucleotide sequence isolated from the Sargasso Sea
atggtaaaagttctcgttaaaaaacttaatccaaaaattaagctcccttcttacaaaactgaaggatcttcaggaatggacttgatggcttgtgttgatcaagctatatttattcctccaaaaagttctgccttgatacctactggattatctatagcaataccaaaagattgcgaagtacaaataagacctagatcaggattggcagctaaatttaatattagtgtcctcaataccccgggaacaattgatagtgactatcggggtgaattaaaaataattttatataatcacggtaataaaagttttgaagtaaaaaataatgatagagttgcacaaatggttcttatgccaattttaaaaattaatttagaagaagcagaagatcttccagatactgtaagaggttctggtggttttggatctactggtaaatgag

SEQ ID NO: 267892 - DNA, 258 bp, Unknown
  Bacterial polypeptide expressing nucleotide sequence isolated from the Sargasso Sea
aaataagaccaaggtctggattggcagccaaacaaagcattggtgttcttaacactccaggaactattgacagtgattatcgaggtgaacttaaagtaataatatttaatcatggtgaaagtgaatttgtggtaaattgcgatgatagaatagcccaaatgactcttgtaccagtattgaaaattgaatttgaagaagtaaatgagcttcctgaaacaattagagggagtggaggttttggatctactggtaaatgag

SEQ ID NO: 267893 - DNA, 454 bp, Unknown
  Bacterial polypeptide expressing nucleotide sequence isolated from the Sargasso Sea
catgaaactaaaatataagattcttgattcaagaataggcaatgaatatgatgtgcccaaatatcaaacgaaagggtctgccggattagatttaatagcttgctgtgatgattcttttaccctaagtccaaatgaagcaacaataataccttcaggcatttctatttatattgatgacccagggtatgctggaatagtcattccaagatcaggacttggtgcaaagaagggtttagtatgtggcaatcttatgggattaattgactcagattatcaaggacctcttagcatttctctttggaataggtcttctgaacccatagaaattaaccctggagaaagagttgctcagttagttgtaattaaggtgaatcaagtagaactagatttagttgaagaatttgaaactagcgaaagaggttctgaagggtttggaagtacaggagttaattaa

SEQ ID NO: 267894 - DNA, 307 bp, Unknown
  Bacterial polypeptide expressing nucleotide sequence isolated from the Sargasso Sea
attgatacccacaggtattgcaattgcaattcctgaagatacagaggttcaaattcgaccaagatctggtcttgccgcaaaatcaagtattagcgtactaaatacaccgggtacaattgatagtgattatagaggagagctaaaaattattttatttaaccatggtaaagatgactttactatcaatgatgaagatagagttgctcaaatggttttaatgcctattttaaaagtagaaattgaagaaacaaatgaattaccagagacaataagagggtctggaggatttggatctactggtaaatag

SEQ ID NO: 267895 - DNA, 454 bp, Unknown
  Bacterial polypeptide expressing nucleotide sequence isolated from the Sargasso Sea
catgaaactgaaatataagattctagaccctagaataggcaccgaatataaggcacctaaatatcaaacaaaaggatctgctggattagatctaattgcttgttgcgaaagctctattactttgagcccaaatgaatcaacaataattccatcaggcatatctatttatatcgaagatccagactttgctggaatagtgattccaagatcaggtttaggtgcaaaaaaaggtttggtatgtggcaatcttatgggattgattgattcagattatcaaggtcctcttagtatctctctttggaatagatcttctgaaccaatagaaataaatcctggtgaaagagtcgcacaattagttgtaatcagagtggatcaagtagaactagatcttgttgaagaattcgaaaccaccgaaagaggttctgaaggatttggaagtacaggagttagttaa

SEQ ID NO: 267896 - DNA, 341 bp, Unknown
  Bacterial polypeptide expressing nucleotide sequence isolated from the Sargasso Sea
taattcaataaaaattgcacctaatactttagaactagttccaacaggtttatctgttgcaataccagaagatttagaaatacaaataagacctagatcaggacttgctgcaaaatctagtataagcgtattaaatactcccgggactattgatagtgattatagaggtgaattaaaaataatattatttaaccatggaaataaagattttatagtaaataataatgatagaattgcccaaatagttttaacaccagttataaagatggagttagaagaagtagatcagttaccagaaactataagaggatctggtggttttggatcgactggtaaatgaa

SEQ ID NO: 267897 - DNA, 439 bp, Unknown
  Bacterial polypeptide expressing nucleotide sequence isolated from the Sargasso Sea
gatggttaaagttttagttaaaaaacttgattctaaagttaaattacctgaatacaaaactggtggatcgtcgggtatggatttgatggcgtttgttgaaagccctgtcaaaatttcaccaaatactttaaaattaattccaacaggtttgtctgttgcaataccagaagatttagaaatacaaatcagacctaggtcgggtcttgcagcaaaatcaaacataggtgtattaaatactcctgggacaattgatagtgattatagaggtgaattaaaaataattttatttaatcatggaaataaagattttattgtaaataataatgatagagttgctcaaatggttttaactccaattataaagatggagcttgaagaagtagatcaattaccagaaagcataagaggatctggtggttttggatcaactggtaaatga

SEQ ID NO: 267898 - DNA, 439 bp, Unknown
  Bacterial polypeptide expressing nucleotide sequence isolated from the Sargasso Sea
atggtgaaggttttatttaagagacttaaccaaaaagcaaaacttccaagttataaaactagtggatcttcgggtatggatctgatggcatgcgtagatgaacctataacaatcaaaccaaaagagtcgatgttgataccaacaggtattgcaattgcaattcctgaagatacagaggttcaaattagaccaagatctggtcttgccgcaaaatcaagtattagcgtactaaatacaccaggcacaattgatagtgattatagaggagagctaaaaattattttatttaaccatggtaaagacgaatttactatcaatgatgaagatagagttgctcaaatggttttaatgcctattttaaaagtagaaattgaagaaacaaatgaattaccagagacaatcagagggtctggaggatttggatctactggtaaatagt

SEQ ID NO: 267899 - DNA, 439 bp, Unknown
  Bacterial polypeptide expressing nucleotide sequence isolated from the Sargasso Sea
atggtaaaggttttatttaagagacttaaccaaaaagcaaaacttccaagttataaaactagtggatcttctggtatggatctgatggcatgtatagatgaacctataacaatcaaaccaaatgagtcgatgttgataccaacaggtattgcaattgcaattcctggagatacagaggttcaaattagaccaagatctggtcttgccgcaaaatcaagtattagcgtactaaatacaccgggtacaattgatagtgattatagaggagagctaaaaattattttatttaaccatggtaaagatgaatttactgtcaatgatgaagatagagttgctcaaatggttttaatgccaattttaaaagtagaaattgaagaaacaaatgaattaccagagacaatcagagggtctggaggatttggatctactggtaaatagt

SEQ ID NO: 267900 - DNA, 439 bp, Unknown
  Bacterial polypeptide expressing nucleotide sequence isolated from the Sargasso Sea
aatggtaaaggttttatttaagagacttaaccaaaaagcaaaacttccaagttataaaactagtggatcttcgggtatggatctgatggcatgtgtagataaacctgtaacaatcaaaccaaatgagtcgaggttgatacccacaggtattgcaattgcaattcctgaagatacagaggttcaaattagaccaagatctggtcttgccgcaaaatcaaatattactgtgttaaataccccaggcacaattgatagtgattatagaggagagctaaaaattattttatttaaccatggtaaagatgaatttactgtcaatgatgaagatagagttgctcaaatggttttaatgccaattttaaaaatagaaattgaagaaacgaatgaattaccagaaacaatcagagggtctggaggatttggatctactggtaaatag

SEQ ID NO: 267901 - DNA, 286 bp, Unknown
  Bacterial polypeptide expressing nucleotide sequence isolated from the Sargasso Sea
aatgcaatttcctgaagatacagaggttcaaattagacctagatctggtcttgccgcaaaatcaagtattagcgtgctaaatacaccgggtacaattgatagtgattatagaggagagctaaaaattattttatttaaccatggtaaagacgaatttactgtcaatgatgaagatagagttgctcaaatagttttaatgcctattttaaaagtagaaattgaagaaacaaatgaattaccagagacaatcagagggtctggaggatttggatctactggtaaatag

SEQ ID NO: 267902 - DNA, 406 bp, Unknown
  Bacterial polypeptide expressing nucleotide sequence isolated from the Sargasso Sea
aatgattaaagttttaatcaaaaaactaaattcaaaagctctacttccaaaatataaaactgatggatcttctggaatggatttgatggcattaattgaaaatcctataacaattaaaccacaaaactctgcattaattccaactggattatcaattgcaatacctgatgatacagaagttcaaattagaccaagatcaggactagctgcaaaatctagtataagtgttttaaatactcctggaacaattgatagtgattatagaggtgaaattaaaataattttatttaatcatggtaaagaagaatttactgtaaacaataatgatagaattgcacaaatgatattaatgccagtattgaaagttgaatttgaagaagttgaaaatttaccaacaacttttaag

SEQ ID NO: 267903 - DNA, 439 bp, Unknown
  Bacterial polypeptide expressing nucleotide sequence isolated from the Sargasso Sea
atggtaaaggttttatttaagagacttaaccaaaaaacaaaacttccaagttataaaactagtggatcttcgggtatggatttgatggcatgtgtagatgaacctattataatcaaaccaaatgagtcgaaattgataccaacaggtattgcaattgcaattcctgaagatacagaggttcaaattagaccaagatctggtcttgccgcaaaatcaagtattagcgtactaaatacaccaggtacaattgatagtgattatagaggagagctaaaaattattttatttaaccatggtaaggacgaatttactgtcaacgacgaagatagagttgctcaaatggttttaatgcctattttaaaagtagaaattgaagaaacaaatgaattaccagagacaatcagagggtctggaggatttggatctactggtaaatagt

SEQ ID NO: 267904 - DNA, 433 bp, Unknown
  Bacterial polypeptide expressing nucleotide sequence isolated from the Sargasso Sea
cctgccaaactcagctggattagacttaccccaaagagccacccttgaatccgcggggatggacctcttggcagcaatagatagttccatagtaatagatccaggaattcaccaagtcattccaacaggtatatcaatagagctgccagaaggttatgaagctcaagttagaccgcgctcaggacttgcagcaaaacatgggataactattttgaatagtcctggtaccatagatccagattacaggggagaaataggcgcaatcataataaacttgggaaactccccttttgaaatcacgagaggaatgagaatagcccaacttgtagtaagcaaatttgttaatttttattgggatgagatggaaaatctgggaacaacaaagagaggagggggtggctttggttctacagggacaggaaaaaatgaataa

SEQ ID NO: 267905 - DNA, 358 bp, Unknown
  Bacterial polypeptide expressing nucleotide sequence isolated from the Sargasso Sea
aatgattaaagttttagttaaaaaattaaaaccttctataaaattaccgtcatataaaactgatggtgcatctggtatggatctaatggcagatatagataaatcaattgaattaaaaccaggagaatcatgcctaataccaactggattatcagttgcatttcctaaagaatatgaaattcaaattagaccaaggtcaggattagcggcaaaaaataatataagtgttttaaatacacctggtactattgatagtgattatagaggagaaataaaagttattttatttaatcatggtaacaagagctttaatattaataacagtgatagaattgcacaaatgattttaactccagta

SEQ ID NO: 267906 - DNA, 439 bp, Unknown
  Bacterial polypeptide expressing nucleotide sequence isolated from the Sargasso Sea
gatgaagcttcctataaaacgtttagatcccgacttgcctttaccgaaatatgcgaaagcgggagatgccggttgtgacttactctcagccgaagatataaccattaaccctggtggaggaagggccttagtgcccacaggtcttgcgttggctataccggagggatatgcaggctttgttcaacccagaagtggtttagctgtaaaaaatggagttacggttctcaatacccctgggctcatagatagcggctacagaggtgagctgaagattttacttataaacactgacccaagtgaaccctttgatatcgtccgaggcgaacgtatagcccagctagttatccaaaaggtagagcaagtcgaatttgatgaggttgattctttgccttcaagtgaacggggagaagggggcttcggctctacgggcttgaattag

SEQ ID NO: 267907 - DNA, 171 bp, Unknown
  Bacterial polypeptide expressing nucleotide sequence isolated from the Sargasso Sea
aattaaaagttattttatttaaccatggtacagaaaaatttattgtaaataataacgatagaattgcacaaatggttttaactccaatattaaaagttaatttcgaggaggtagatgagcttcctgacacagtaagaggggctggaggctttggatctactggtaaatgaa

SEQ ID NO: 267908 - DNA, 421 bp, Unknown
  Bacterial polypeptide expressing nucleotide sequence isolated from the Sargasso Sea
gatgaagcttcttatcaaacgcctttcggaagattctattgtacctacacgcgcctcccctggatctgtggggtatgatctatatagtacctctaacatgttcatcccacctatggaacgtggaattgtaaacactggtattgccgctactattcccatgggtgtgtacggacgtatcgctcctcgttctggacttgctgttaagcatggaattcaaacaggggcgggtgttatcgatcccgattatacgggtgaattgaaggtcattctgtttaatcacggaagtgaaaagtttgaaattaaacagggtgatcgcattgctcaacttattttggaaaagtgtgaaacgcctcttattgaagaagttaatgctatcaaggatactgaacgcggaactcgtggttttggatcttctggataa

SEQ ID NO: 267909 - DNA, 445 bp, Unknown
  Bacterial polypeptide expressing nucleotide sequence isolated from the Sargasso Sea
aatgattaatgttggctacaaaatccatgaccatgcaattgacctaccgaaaattgattatcaaacgataggcgcagcaggccttgatctatatgcagctaattctgaaaaaattaatttatcaactttggaaagatatgcgatacctacaggtattagtttagctatacccactggatatgaaggacaaataagacctaggtcaggattgtttttaaagcatggaataacgataaattttggaaccattgatagcgattacaggggagaaatttttattttagttgtcaatttatcaaaatctaattttataatagaaagaggcatgagagtcgctcaaatagttttcaataagtttgaaagggttaatttaaaatctaaattagaattagatccaaccttaagaggcgcaagtggatttggttcaactggattaaaggaataa

SEQ ID NO: 267910 - DNA, 439 bp, Unknown
  Bacterial polypeptide expressing nucleotide sequence isolated from the Sargasso Sea
atggttaaagttttagttaaaagacttaattcgaaagttaaattacctgaatataaaaccagtggatcttcgggtatggatttgatggcttctattgatagtccaataaaaattgcacctaatactttagaattaattccaacaggattatctattgcaataccagatgatttagaaatacaaataagacccaggtcaggacttgctgcaaaatctaatataggtgtattaaatactcctggaactatcgatagtgattatagaggtgaattaaaaataatattgtttaatcatggaaataaagattttattgtaaataataatgatagggtagcgcaaatagtattaatgccaatcctaaaaatggagcttgaagaagtagatcagttgccagaatcaataagaggatctggtggttttggatcaactggtaaatgaa

SEQ ID NO: 267911 - DNA, 397 bp, Unknown
  Bacterial polypeptide expressing nucleotide sequence isolated from the Sargasso Sea
atgtacaatggccatgggcacttccatgaaggggatgctggaattgacctttttattattgaagaacagataatagaaccaggtgttacagctaggatccatttgggaattgcttgtgagaatcttgataacaagccatacctactaatgccacgatcaagtatatcaaaaacccctctacggcaatgcaactctattggcttaattgatgcaggttatagaggagaaataatggcagcagttgataatataaaacaggagtcatatcatctaaagccaggtcaaagattattccagcttgtggctatggatggaagtgcggtttcttttgaactaacagacacgttaacggaaactgaacgcggagagggtggttttgggtcgacaggaaaataat

SEQ ID NO: 267912 - DNA, 439 bp, Unknown
  Bacterial polypeptide expressing nucleotide sequence isolated from the Sargasso Sea
atggtcaaaattaagataaagaaacttgaccctaaggtcaaaattccacaatataaaaccgaaggatcatcaggtatggatctaatggcatttgtaaaagaatctttgaaaataaagccaaacagttctgaattaataccaactggaatatctatagctattcctcaatatacagagatacaaattagacctcggtcaggtttagcagcaaaatcacagataagcgtactcaatacacccggtacgattgatagtgactataggggagagttaaaagttatattatttaatcatgggctagatgactttatagttaataatggagatagaatagctcaaatagttttaatgccagttctgaaagcttcttttgatgaagtagatgagctgcccgatacagtcagaggatctggtggctttggatctacaggtaaatgaa

SEQ ID NO: 267913 - DNA, 439 bp, Unknown
  Bacterial polypeptide expressing nucleotide sequence isolated from the Sargasso Sea
atggtaaaagtcctaattaaaaaattagacaaaaaagttaaactaccagaatataaaacaacaggttcatctggactagatttgactgcattcattgaaaagaaaatagtaattaaaccaggcgaaaacgctttagtgccaacaggtatatctattgcgatacctgacgatactgaatttcaaatcaggccgcgatcaggtttagcagctaaaaataatataactgtattaaatactcctggaacaattgatagtgactatagaggagaaataaaagtaattttatttaatcatggagataaagactttacagtaaataatgatgataggattgcacaaatgatattattgccaattctaaaagtagattttgaaactgtagaaactttgcctgagacaattagaggttcgggtggatttggatcaacaggtaagtgaa

SEQ ID NO: 267914 - DNA, 439 bp, Unknown
  Bacterial polypeptide expressing nucleotide sequence isolated from the Sargasso Sea
atggtaaaagttttatttaaaagacttgatccaaaggctcaaattccaaaatataaaactaatggatcctccggtttagatttaatggcattaattgaagatccaattaaaatcaaagctcaagaatcagctttaataccaactggcatttcaattgctataccccaagatactgaaatacaaataagacctagatcagggttagcagctaaatctagtatcagtgttttaaatactcctggtacaattgatagcgattatagaggagaaatcaaaatcatactatttaatcatgggaaaaaagagttcacagtaaacaataatgatagaatcgctcaaatggttttaatgccaattttgaaaattgaatttgaggaagttgatgaattacctgaaaccttaagaggctcgggaggatttggatcaactggtaaatgaa

SEQ ID NO: 267915 - DNA, 457 bp, Unknown
  Bacterial polypeptide expressing nucleotide sequence isolated from the Sargasso Sea
ttgaaaaaggttaaagtcaaaatattaaatccacttataggcaatgaaatacctattcccaaatatgagacaaaaggttctgcaggtttagatcttagggcttgtattaaagataaattaatattgaaaccaggaaagactgagatgattccaatgggatttgccatgcatcttgaggataagagtttggctgctttggttatcccaagatcaggtcttggttcaaaacatgggatagtgcttggcaatttagttggattgatagattctgattaccaaggtgaattaatggttcctgcatggaataggtcagagcaggaatttgaaattaattctggtgatcgaattgctcaaatgataatagtgccaatagttcaagcagattttgaaatagttgaagattttgaggaatcagagaggggtgctaagggttttggaagttctggtttagattagc

SEQ ID NO: 267916 - DNA, 439 bp, Unknown
  Bacterial polypeptide expressing nucleotide sequence isolated from the Sargasso Sea
atgattaaagttttagtaaaaaaattaaacccctctgtaaaattaccattatataaaactgatggtgcatctggcatggatctaatggcatatatagataaatcaattgaattaaagccaggggaatcatgccttgtgccaactggattatcagttgcatttcctaaggaatatgaaattcaaataagaccaaggtcggggttagcggcaaaaagtaatattagtgttttaaatacacctggtacaattgatagtgattatagaggagaaataaaagttattttatttaatcatggtaacaaaagttttaagatcaataacaacgatagaattgctcaaatgattttaaccccagttatgaaaatggatctagaagaaacgaatgaacttccagactcaataagaggagcaggtggttttggttcaactggtaaatgat

SEQ ID NO: 267917 - DNA, 442 bp, Unknown
  Bacterial polypeptide expressing nucleotide sequence isolated from the Sargasso Sea
ttgcctgacatcattaaaactttcacaggtaaaaatcaaaaggaatctaatttaccgttaaatgtaaaatttaagattcttaatgaaaggttaggtaaagaatttccattgcccacctttcagactgctggttctgcaggcctagatttatgtgcatgcattgaagaagatattttcatcaatccaaacgactccgtattagtgcctaccggctttagtattcatatagataatcctgattatgctgctttcattcttccaagatctggtttaggtcataagcacggtatagttttaggtaacttgattggattaattgattcggattatcaaggagagatcatggtttctttatggaatagatctgatgaaacattcacagttgaacctggggcaaggattgctcaaatggttttcttgccggttatgaatcctaattttt

SEQ ID NO: 267918 - DNA, 424 bp, Unknown
  Bacterial polypeptide expressing nucleotide sequence isolated from the Sargasso Sea
attgattggagaaaaaattccagtgccaagatatgaaacaaaaggttcagctggcttggatcttagggcatgtctagaggaaaaattaattttaagaccaggttgtacagaaatgataccaatgggttttgcaatgtacctcgaagatgaagagctggctgcgcttgtgattccaagatctgggcttggttcaaaacatgggattgttcttggaaatcttgttggccttattgactcagactatcaaggagaattgatggtgcctgcatggaatagatcaaacgaagaatttgaaataagccctggagatcgaatagctcagatgattattgttcctattctgcaggctaattttgaaattgttgaggatttcgaaaaatcatcaagaggttctaagggttttgggagttcaggaataaattga

SEQ ID NO: 267919 - DNA, 439 bp, Unknown
  Bacterial polypeptide expressing nucleotide sequence isolated from the Sargasso Sea
aatggttaaagttttagtaaaaaggcttgatccaaaagtaaagttgccaaaatacaagactaacggctcatcagggatggatttaatggcatttattgaaaacccaattaaaataaagcctggtacatcagctttaattccaactggaatatcaatagcgtttcctgaagaatttgaggttcaaataagaccaagatctggattagcagctaaacaaagcattggtgttcttaatactccaggaactattgatagtgattatcgaggtgagctaaaggttataatatttaatcatggagaaaatgaatttatagtaaattgcaatgatagaatagcacaaatggtactctcaccagttttaaaaattgaatttgaagaggtaaatgatcttcctgaaactttaagaggaagcggaggttttggttctacaggtaaatga

SEQ ID NO: 267920 - DNA, 439 bp, Unknown
  Bacterial polypeptide expressing nucleotide sequence isolated from the Sargasso Sea
aatggtcaaagttttaattaaaaaacttaattcaaaagtccagctaccaaaatataaaactgatggatcttcaggaatggatttaatggcatttatagaaaactcaattaaaattaagccacaaaaatcagctctaatacctacgggaatatctattgcgatacccgaagatactgaagttcaaattagaccaagatcaggacttgcagctaaatctaacattagcgttttaaatactcctggaacaatcgatagtgactacagaggtgaaataaaaattattttattcaatcatggtaaagatgaattcattattaataataaagacagaattgcccaaatgatattaatgccaataattaaagctgagtttgaagaagtagaagatttgccaaaaactttaagaggctctggaggatttggatcaactggtaaatga

SEQ ID NO: 267921 - DNA, 439 bp, Unknown
  Bacterial polypeptide expressing nucleotide sequence isolated from the Sargasso Sea
aatgattaaagttttagtcaaaaaactaaatccaaaagccgaacttccaaaatacaaaactgaaggatcatctggaatggatttaatggcattaattgaaaatcctataacaataaaatctcaaaattcagcattaattccaactggtttgtctatagctattcccgaagatatggaagtacaaataagaccaagatcaggtctcgcggccaaatcaaatataagtgtattaaatacaccaggaacaattgatagtgactatagaggtgaaattaaaattatcctatttaatcatggaaaagaagaatttactgtaaataataatgataggattgcacaaatggtattgatgccagtattaaaagctgaatttaaagaagtcgaggagttaccaaaaactataagaggctctgggggttttggatcaactggtaaatga

SEQ ID NO: 267922 - DNA, 457 bp, Unknown
  Bacterial polypeptide expressing nucleotide sequence isolated from the Sargasso Sea
cttgtccaataaaaaaaattctatactcattaaaaaaatatctaatattaaaaattttaaattgcctgaatatcagtcagatgaagcttcaggagttgatttatatgcctcaataaaaagtgatattataattcagccatgggaaagagaaataattgcgtgtggaattgcaatttcaatgccaaaaggtatggaagctcaagtaagaccaagatctggcctagcttttaaatacggaatatctgtattaaatacaccaggtaccattgatagtgattacagaggagaaataaaagtaatattaataaacttaagtaaagcaatatttattgttcatcctctagaaagaattgctcagatggttttttcaaatgtggccagggtagagtttaaagaagttgacaatttagatgagactgatcgagggtcaagcggatttggatccactggtaaataa

SEQ ID NO: 267923 - DNA, 377 bp, Unknown
  Bacterial polypeptide expressing nucleotide sequence isolated from the Sargasso Sea
aatgccaaaaatccttgttaaaaaattagatccctcaatagagttacccacctacaaaacagaaggggcttcaggaatggatctcatggcatttataaaggaacctattgtacttaaatctaaaaattcttgtttagttccaactggaattgctgttgctttttcaaatgaatttgaaattcaaataagacctagatcaggtttagccgcaaaaaataatattagtgttttaaatacgccaggaacaatagatagcgattacaggggtgagataaaagtaatactttacaatcacggaaaagaagattttttaataaacaataaagacagaatagctcaaatggttcttacaccagtgataaaaatgaattttgaag

SEQ ID NO: 267924 - DNA, 451 bp, Unknown
  Bacterial polypeptide expressing nucleotide sequence isolated from the Sargasso Sea
aatgcttaaaagtattaaacttaaaatcttagacaaaaatctcagtaaacttccgagtttttctacattaggttcagctggtctagatttgagagcgtctctcacttctccattgattgtaaaaaagcaaactgcagaacttatccctacagggatagctattcatataaataataataattatgcaggcataatattacctaggtctggtttaggtcataagagcggcatagtacttggaaacctagtaggactgatagattcagactatcaaggtgaactgaaaatatcatgctggaatagaagtaatgaagactatgaaatcgagccgtatgatcgaattgcgcagttggtttttataaatataaatcaaccagactttgatgtcgtagaggattttgaaaacagtgaacgaggtgaaagtggttttggttcgtctgggaagaaatag

SEQ ID NO: 267925 - DNA, 373 bp, Unknown
  Bacterial polypeptide expressing nucleotide sequence isolated from the Sargasso Sea
gctggagttgacctaagtgcatctattgaaacttcaataaaaattcgtccatgggaaagagagattattccatgtggaatttcaattgcaatgccaaggggtttggaagctcagattcggccaagatccggtttagcatttaaacacggtattacaatattaaatactcctggaacaatagatagtgattataggggtgaaataaaagttatattgataaatttaagcaaagatgaatttatcattcgtccaaaagatagaattgctcaaatggtctttacaagtgctatacaggtaaagtttaaagaagttgaaaatctagatcaaacaagaaggggggatggcgggtttggatctactggaaaagattaat

SEQ ID NO: 267926 - DNA, 439 bp, Unknown
  Bacterial polypeptide expressing nucleotide sequence isolated from the Sargasso Sea
aatggtcaaagtactaataaaaaagttagatcctgaagttaaattaccagaatataaaactaatggggcctctggcatggacctcaaagcatttataaagaaacctataaatttaaaaccaaaaacatcctcactaattcctactggcttatcagtcgcgtttgttgaggattacgaaattcaaattagacctagatcaggtctagcagcaaaaaataatataactgttttaaacacccctggaactatagacagtgattatagaggggaaattaaagttattatttataaccatggagatgatagttttatagtaaataatggtgatcgtattgctcagatggtgctatctccagttatcaagattgaattagaggaagccaacgagttgccaaagacattaagggggaagggtggatttggttccacgggcaaatga

SEQ ID NO: 267927 - DNA, 218 bp, Unknown
  Bacterial polypeptide expressing nucleotide sequence isolated from the Sargasso Sea
ttcagttttaaatacaccaggtacaattgactcagattataggggtgaaataaaaattatcttaataaatttgagtcaaaaatcatttgtagtcaaatcaggtgataggattgcacaaatgattttatgtcctgtagcaaaaggtaaacttaaagaggttaaaaatcttccaaagacagtaaggggtggtgggggttttggatcaacaggaaaataaa

SEQ ID NO: 267928 - DNA, 439 bp, Unknown
  Bacterial polypeptide expressing nucleotide sequence isolated from the Sargasso Sea
tatgatcaaggttatgattaagaagcttgatcctaatgttgagatacctgaatataaaacttcaggatcttcaggtgttgatttaatggcaaatttaaatgagaaaattactctaaaatctggagagtcgtgcatagtacctactggattatctatttctatacctaaagactgtgaggtgcaaattaggccgagatcagggctagcagcaaagtctcaaataacagttttaaatacaccaggaacaattgatagcgattacagaggtgaacttaaaattattctttttaaccatggtaaaaatgaatttataataaataataaagataggattgcacaaatggtacttattccgatattaaaattcgactttcaagaagtagatgatttagataatagcgaaagaggatctggcggattcggttcaactgggaaatga

SEQ ID NO: 267929 - DNA, 304 bp, Unknown
  Bacterial polypeptide expressing nucleotide sequence isolated from the Sargasso Sea
atcccaacaggcttatctattgcaataccggaagatttagaaatacaaataagaccgaggtcgggacttgctgcaaagtctagtataagtgtactaaatactccaggaactatcgatagtgattatagaggagaaataaaaataatattatttaaccatggaaataaagattttattgtaaataataatgataggattgcccaaatggttttgatgccagttataaagatggagattgaggaggtagatcaattacccaaaaccataagaggatctggtggttttggatcgactggtaaatgaa

SEQ ID NO: 267930 - DNA, 439 bp, Unknown
  Bacterial polypeptide expressing nucleotide sequence isolated from the Sargasso Sea
atggttaaagtattaataaagaagttagatcctacagttcaattaccagaatataaaactaatggagcatctggtatggaccttaccgcgttcactgaaaaacctataaacgttaagccaaaaacatcttcattagttcctactggattatcagttgcatttcatgaaaattatgaaattcaaattagacctagatcaggtttagcagcaaaaagtaatataactgttttaaacacaccaggaactatagacagtgattatcgaggagaaattaaagttatcatctataatcatggggatactgattttgttataagtaatggtgatcgtatagctcagatggtattatctccagttattagaatggaattagaagaagtcaaagatctacctaaaacaataagaggagagggtggatttggttcaacaggtaaatgaa

SEQ ID NO: 267931 - DNA, 382 bp, Unknown
  Bacterial polypeptide expressing nucleotide sequence isolated from the Sargasso Sea
acttctggttcttcgggaatggatatagtggcatatactaaaaataaaataaaaattagccctggtaaaattgctattgttccaaccggtatagccgttgcaattccaaaaaattatgaaatacaaataagaccaagatctggcctcgctgcaaaaaataatatttctgttctaaatacaccaggaacaatagactcggattacagaggggagattaaaattatattaataaatttgggtaaaaaaacttttacagtaaaatcgggtgatagaattgcacaaatgattttgtgtccagtagcaaaaggcaaaattaaagagattaaaaatttacctaatacagttagaggtaaaggcggttttggatcgacaggtaaataat

SEQ ID NO: 267932 - DNA, 406 bp, Unknown
  Bacterial polypeptide expressing nucleotide sequence isolated from the Sargasso Sea
gcggttgaattacctgcttacaaaacagaaggtgcatctggcatggatttaatggcattagtaaaagaacccatcaatcttaaaccaaactcatcatgtttagttccaacagggcttgctgttgcattttcaactgatttcgaaatccaaataaggccaagatctggtttagctgcaaaaaacagtataagtgttttaaatacacctggaactattgatagtgattacaggggagaaataaaagtaatcctttttaatcacgggaaaaatgatttcttgataaataataaggatagaatagcacaaatgattttaactcctgtaattaaaatggatcttgaggaaactgatgatctaccagaaacaattagaggagaaggtggttttggctctactggaaaatgag

SEQ ID NO: 267933 - DNA, 439 bp, Unknown
  Bacterial polypeptide expressing nucleotide sequence isolated from the Sargasso Sea
aatggcaaaagttcttatcaaaaagttagaccctgcggttgaattacctgcttacaaaacagaaggtgcatctggcatggatttaatggcattagtaaaagaacccatcaatcttaaaccaaactcatcatgtttagttccaacagggcttgctgttgcattttcaagtgatttcgaaatccaaataaggccaagatctggtttagctgcaaaaaacagtataagtgttttaaatacacctggaactattgatagtgattacaggggagaaataaaagtaatcctttttaatcacggtaaaaatgatttcttgataaataataaggatagaatagcacaaatgattttaactcctgtaattaaaatggatcttgaggaaactgatgatctaccagaaacaattagaggagaaggtggttttggctctactggaaaatga

SEQ ID NO: 267934 - DNA, 436 bp, Unknown
  Bacterial polypeptide expressing nucleotide sequence isolated from the Sargasso Sea
aatgataaaaatattaattaaaagactatcaaaagaagtttctttacctaaatacgaaacaagtggttcttcaggcatggatttaggctcaaatatagttgctaatattagtccaggtaaaatagctataatccctacaggattagcattgtctataccaaaagggtttgaagctcaaataagaccaagatcagggctagcagccaaaaaaaagataagtgttttaaatactccaggtacgatcgactctgattatagaggagagatcaaagtaatactaataaatcttggagaagagatttttaaagttgaaaagggactgcgtattgctcaaatggttttttgtcctattgtgcaagctcagtttagagaagtagatgatttaaatgaaacagaacgcggaaaagggggatttgggtctactggaactaaataa

SEQ ID NO: 267935 - DNA, 370 bp, Unknown
  Bacterial polypeptide expressing nucleotide sequence isolated from the Sargasso Sea
ggtatggatttagccgcaaatataaataccgatattcttattgatccaggaaaaacagcaattattcctacaggcttagctttatcaatacctaaaggatttgaaattcaaatcagaccaagatctggtctggctgcaaaaaaaaaaataagtgttttaaatactccaggtactattgatgctgattatagaggtgaaatcaaagtaatattaattaatcttggtcaagagtcttttaaagtagaaaaaggacttcgtattgctcaaatggttgtatgcccagtaatacaagctcagcttaaagaggtagatgatttaactgaaactgaacgaggcaaaggtgggtttgggtcaacaggaactaaataat

SEQ ID NO: 267936 - DNA, 442 bp, Unknown
  Bacterial polypeptide expressing nucleotide sequence isolated from the Sargasso Sea
gatgacagaaattttaattaaaagattttctaaagatataaatttaccaaaatatgagaccgagggctcctctgggatggatcttgcagcccatatagaaaattctattctgattgaaccaggtaacactgtgatggtaccaactggaatagcagtttctattccaaaaaattttgaaatacagattagacctagatctggtttagctgctagaaacaaaatatcagttctaaacactcctggaactatagattcagactaccggggggaaattaaagttattttgataaatttaggtgaaaaaacttttactattgaaaaaggaacaagaattgctcagatggtattatgtcctatagttaaagctcgatttaaagaagtagaaagtttaggtgaaactcctcgcggcagtagcggttttggatccacaggaacgaattaa

SEQ ID NO: 267937 - DNA, 457 bp, Unknown
  Bacterial polypeptide expressing nucleotide sequence isolated from the Sargasso Sea
aatgaaaaaaattcaaatcaaactcattgataaacgattgggcaatgagtttcccatgcctcaatatgcaaccgaaggttcggccggtttagatttatgcgcatgtattgatagtgacctaattataaatccaggtgatacagctttgatatctgcaggttttgcaatatatattgctgataaatcttatgcggcaatgttattacctcgatcaggccttgggcataaacatggtattgttcttggtaatcttacaggcttagtcgattcagattatcagggtgagatttatatctcctgttggaataggggagctgtcaaatttacgataaccccaggagatagaatagctcaaatgataattgtgccgattgaaagacctgattttgaatttgttgattcgtttgatgaaacaataagaggtttaggcggtttcggccatactggtgtgtcttaa

SEQ ID NO: 267938 - DNA, 439 bp, Unknown
  Bacterial polypeptide expressing nucleotide sequence isolated from the Sargasso Sea
aatggtaaaagtattaattaaaaaaatagatccatcagtaaaaataccaacttacaaaacaaaaggagcttcgggtatggatttaatggcatttattaagcaacctattaaattagcccccaaaagttcatgtttggtgcctacaggtatttctgtagcgttttctgaagagtacgaaatacaaataagacctagatcaggactagcaataaaaaataatatatctgttttaaatacacctggaacaattgatagtgactatagaggtgaaataaaaataatactttttaatcacggtaacagcgaatttattattaataataaggatagagtggcccaaatgatattagtgccagtaaacaaaatggacttagaagtggtagaaagtttaccagacaccttaagaggaaaaggtggctttggttctactggaaaataa

SEQ ID NO: 267939 - DNA, 310 bp, Unknown
  Bacterial polypeptide expressing nucleotide sequence isolated from the Sargasso Sea
ttgtctgttccaacaggattatcagttgcattcccaaaagaatatgaaattcaaattagaccaagatctggtctagcggcaaaaaataacatcagtgttttaaatacacctggtacggttgatagtgactacagaggggaaattaaaattattttatttaatcatagtaatgaaaattttataatcaataataatgatagaattgctcaaatggtcttaaccccgataataaaaattgaattggaagaaacgaatgaattaccagaatcagtaaggggtagggaaggttttggttctactggtaaatgaa

SEQ ID NO: 267940 - DNA, 447 bp, Unknown
  Bacterial polypeptide expressing nucleotide sequence isolated from the Sargasso Sea
cttgtgcacgaaaaaaaattccatactcattaaaaaaatatctgatattgaaaactttgaattacctaagtatcagtcagaagaggcttcaggaattgatttatgtgcctcaataaaaaatgatattacaatagcaccatgggaaaaagaaataattgcatgtggaatttcagtttcaatgccgacaggtatggaagctcaggtaagaccaaggtctggccttgctttaaaacatggaataactgttttgaatacaccaggtaccattgatagtgattacagaggagaaataaaagtaatattaataaatttaagtaaagaaaaatttgttgttcgtcctctagaaagaattgctcagatgattttctcaaacgtcactaaagtagaatttaaagaagttgacagtttagatgacactaatcgaggtcaaggtggatttggatctac

SEQ ID NO: 267941 - DNA, 445 bp, Unknown
  Bacterial polypeptide expressing nucleotide sequence isolated from the Sargasso Sea
tatggttgatattaaagtaaaaaaaatatacgacagtgtcgatcttccagcttatgagacatcgtcaagcgctgggatggatattagagcattcctaccagatgggaatgttgatatcgcccctcaacaaacaaaactaattgggacagggttgatttttgaaatacctgatggtctagaggttcagatcagacctcgaagtggattagcgttaaaaaactcaattactgttttaaatagcccagggaccattgatgcagattatagaggtgaaattaaagtgattttaattaatcatggatcgaacaattttgaagttaccaataaaatgagaattgcacaaatggttgtgtcaaaatatgaaaagattaactttaaattagtaagcgatttaaatacaacaaagagaggaagtggtggttttggatcaacgggaacaaagtga

SEQ ID NO: 267942 - DNA, 442 bp, Unknown
  Bacterial polypeptide expressing nucleotide sequence isolated from the Sargasso Sea
atggtcaaaatattaattaaaaagactgataaagaggtaattactccaaaatataaaacagacggttcatcaggcgttgacttgtctgcttttttagaaaaaaaagttgtaatcaaacctaacagctcagagttaattccaacagggttgcaagttgcaatacctgaagaattggaaattcaaataagacctagatcaggtttggctgcaaaagaaagcataggtgtattaaattctcctggcactatagatagcgactatagaggtgagctaaaaattattttatttaatcatggtaaagaagatttcataattaataatggtgataggattgctcaaatggttttagttccaattgttaaaatggaattcgaggaagttgatagtttgcctaatactgttagaggtcaaggtggttttggatccacaggaaaaaaatgag

SEQ ID NO: 267943 - DNA, 364 bp, Unknown
  Bacterial polypeptide expressing nucleotide sequence isolated from the Sargasso Sea
aatggcaaaggttttaattaaaaaattaagttcaaaagtagaattgccaaagtataaaacggaaggttcatcaggactagatttaatggcctttattgaaaaatcaataaaattaaacccgaaagagtcagtattagttcccactggaatttctatcgcaatagaaaaagatttagagattcaaataagacctagatctggacttgcggctaaatctaatatttctgttcttaatacacctggaacaattgatagtgattatagaggtgaaataaaagtaatattattcaatcacggtaaaaatgaatttataataaacaataaagatagaattgcacaaatggttttagctccaatcattaaa

SEQ ID NO: 267944 - DNA, 439 bp, Unknown
  Bacterial polypeptide expressing nucleotide sequence isolated from the Sargasso Sea
aatggtaaaaatattagttaaaaagtttgataaaaatatcgaactaccttcctataaaacttctggggcatcagggatggatctggttgcttttataaaaaaaaaaataactattagtccatataataaagcgatgatcccaactggtatttctttagtaattccaaaaaattatgaaatacaaattagaccaagatctggtcttgcagcaaaaaaaggtgtctctgttttaaatactccaggtactattgattcagattatagaggtgaaataaaaattatcttaataaatttgagcaaaaaaccatttatcattaaatcgggagatagaattgcacaaatgattttatgtcctgtggcaaagattaaacttaaagaggttaaaaatcttcccaaaacatcaagggggaaagcaggtttcggctcaacaggaaagtaa

SEQ ID NO: 267945 - DNA, 322 bp, Unknown
  Bacterial polypeptide expressing nucleotide sequence isolated from the Sargasso Sea
accaggagaatcatgcctagtaccaactggattatcagttgcattccctgaagaatatgaaattcaaattagaccaagatcaggattagcggcaaaaaataatattagtgttttaaatacacctggtacaattgatagtgattatagaggagaaataaaggttattttatttaatcatggtaataaaaactttaaaattaataacaatgacagaattgcacaaatgattttaactccagttataaaaatagatttagaagaaacaaatgaacttccagagtcaataagaggagcaggaggttttggttcaactggtaaatga

SEQ ID NO: 267946 - DNA, 273 bp, Unknown
  Bacterial polypeptide expressing nucleotide sequence isolated from the Sargasso Sea
cgggactagcattgaagtatggtataacagtattaaattcgccaggtactatcgattcagattatagaggtgaggtctctgtccttttgatcaatttgggaaatgaaatcttctcttttaatagaggtgatagaatagctcagatagttttttcaaaagtggaacaagtacagttggaagaggtagaagaactggatgaaagcgatcgaggtacaggtgggtatggatcgacaggtatttcaaagaagtccaagacccgtgggataaaatgag

SEQ ID NO: 267947 - DNA, 256 bp, Unknown
  Bacterial polypeptide expressing nucleotide sequence isolated from the Sargasso Sea
aaaatatggtgtcacggttttaaactcgccgggtactatcgactctgactatagaggtgaagtttcggttcttctaatcaatcaaggaagtgaaacgtttttccttgaaagaggtgataggatagcgcaaatggttttcacaaaggtagagcaagtaaagtttcaggaagtggaagcactagatgaaagtggtcgtggtttagggggttatgggtcaaccgggatgtctaaaaatttagagggtagcatgtcgtaa

SEQ ID NO: 267948 - DNA, 439 bp, Unknown
  Bacterial polypeptide expressing nucleotide sequence isolated from the Sargasso Sea
atggtgaaagtcttaattaaaaaattagacaaaaaagttaaactgccagaatataaaacaacaggttcatctggactagatttgactgcattcattgaaaagaaaatagtaattaaaccaggtgaaaacgctttagtgccaacaggtatatctattgcaatacctgaagataccgaagttcagatcagaccgcgttcaggtttagcagccaaaaacaatataagtgttttaaatactcctggaactattgatagtgactatagaggagaaataaaagtaattttatttaatcatggagataaagactttacagtaaataaagatgataggattgcacaaatgatattaatgccaattctaaaagtagattttgaaacggtagaagctttgcctgagacaattagaggttcaggtggatttggatcaacaggtaagtgaa

SEQ ID NO: 267949 - DNA, 295 bp, Unknown
  Bacterial polypeptide expressing nucleotide sequence isolated from the Sargasso Sea
ggactatcaatagcaattccagacaatacagaagtacaaattagaccaagatcaggattggctgctaagaataatatttcagttttaaacacgcctggaacaattgatagcgactatcgtggagaactaaaagttattctttataatcatagtagtaaagagtttatagtaaataatgatgatagaattgctcaaatgatattagttcctataatcaaagctacttttgaagaggtagaaaacctgccagaaacaataagaggagagggtggttttggatctacaggaaaatgaa

SEQ ID NO: 267950 - DNA, 439 bp, Unknown
  Bacterial polypeptide expressing nucleotide sequence isolated from the Sargasso Sea
gatgattaacattaatatcattaatgagtcaactaatgctacaccagaattagccactgctggatcagctggtgttgacattagagcttatcttaatgaaaaagtaatccttaacccactagaaagaaaattaattcctacggggcttaaagttgaaattcctttgggttatgaaatacaaattagaccaagaagtggattagcttacaaatatggtattactgtgttaaatagccctggaaccattgattctgattatagaggtgaaattggtgttttgctaattaatctttctaatgaagcatttgaaataaaaaatggagagcgaatagctcaaatgattttagctaaacatgaagtgccaaattttattcaattaaaagaattaagttctagcgaaagaggagaaggtggctttggaagtacagggaaaagttaa

SEQ ID NO: 267951 - DNA, 439 bp, Unknown
  Bacterial polypeptide expressing nucleotide sequence isolated from the Sargasso Sea
aatggcaaaagttcttatcaaaaagttagaccctgcggttgaattacctgcttacaaaacagaaggtgcatcaggcatggatttaatggcattattaaatgaacccatcaatcttaaaccaaactcttcatgtttagttccaacaggacttgctgttgcattttctagtaatttcgaaatccaaataagaccaagatctggtttagctgcaaaaaaaagtataagtgtattaaatacacctggaactattgatagtgattacaggggagagataaaagtaatcctttttaatcacggaaaaagtgattttttaataaataataaagatagaatagcacaaatgattttaactcctgtaattaaaatggatcttgaggaaactgatgatctaccagaaacaattagaggagagggtgggtttggctcaacaggaaaatga

SEQ ID NO: 267952 - DNA, 439 bp, Unknown
  Bacterial polypeptide expressing nucleotide sequence isolated from the Sargasso Sea
aatggcaaaagttcttatcaaaaagttagatccttcagttaaattacctgcttataaaacaaaaggtgcatcagggatggatttaatggctttagttaaggaacccattactctaaaaccaaactcttcttgtttagtacctacaggtcttgcagttgcattttctagtaatttcgagatccaaataaggccaaggtctggattagctgcaaagaacagcataagtgttttaaatacacctggaactattgatagtgattaccgaggggagattaaagtaattctttttaatcatggaaaaagcgattttttaataagcaatcaagatagaatagcacaaatgattttaactcctgtaattaaaatagaatttgaagaagcagatgatcttccagaatctgttagaggagagggtggatttggctcaaccggaaaatga

SEQ ID NO: 267953 - DNA, 439 bp, Unknown
  Bacterial polypeptide expressing nucleotide sequence isolated from the Sargasso Sea
atggttaaagttttaatcaaaaaacttgatccagctgtcaaattacctgaatataaaaccaatggagcatcaggtgttgacttaacagcatttattaaagaaaccattgatctaaaaccaaaaaaatctgttttagttcccacaggattatctatggcattctctgaagatttcgaaattcaaataagaccaagatcaggcttagcagccaaaaataatataagtgttttaaatacacctggaacaattgacagcgattacaggggagaaataaaagtcattatttataatcatggtaatgaaaatttcttaataaataatggcgatagaattgctcaaatgatattaacacctgtattgaagatggaattagaagaagtaaataatttgcctgaatctataagaggaaaaggtgggtttggctcaacaggtaaatgag

SEQ ID NO: 267954 - DNA, 283 bp, Unknown
  Bacterial polypeptide expressing nucleotide sequence isolated from the Sargasso Sea
cgcattttcagtgatttcgaaatccaaataagaccaagatctggtttagctgcaaaaaatagtataagcgttttaaatactcctggtaccattgatagtgattaccgcggagagataaaagtaatcctttttaatcatggaaaaaatgattttttaataaacaataaagatagaatagcacaaatgattttaacacctgtaattaaaatggaatttgaaagagcagatgatcttccaaaaactgttagaggagagggtggttttggctcgacaggaaaatgag

SEQ ID NO: 267955 - DNA, 451 bp, Unknown
  Bacterial polypeptide expressing nucleotide sequence isolated from the Sargasso Sea
atgcttgatagtgttcaagtaaagattgtcaacaatattattaaagtattgccagattacgcaacagagggttcagcaggcttggacctacgtgcggctataaataaaaagatgcaactacactctaaggaaactgttttaataccaacagggttatctatttttattgaaaataaagattatgctgcaacactactgccgcggtccggcctaggtcataaaaaaggaatagtcttaggtaacttagttggtcttatagattctgattatcaaggtgaacttatgatatcttgttggaatagaagtaaagagaattacataattgagcctttagatagaattgcacaaatggtatttatcaaagttgaacatcctaagttgaaaattgtcgatgagttcaggacttcgaaaagaggtgaaaaaggttttgggtcatcaggaaaaaaatagt

SEQ ID NO: 267956 - DNA, 448 bp, Unknown
  Bacterial polypeptide expressing nucleotide sequence isolated from the Sargasso Sea
atgactgatatttttgttaaaatacttaagaatggtaaaaatctttataaaataaaacaggccactgagggaagcgctggttttgacataaatgcagctatagaaaaagatatcgtgcttgaaagttcgaaatctattcttattccatgtggtttttcaatagagttacctagaaattttgaggctcaagttaggccaaggtcaggtttagctctaaaaaatatgattacagttttaaattcaccaggtactatagattctgattacagaggagaaatttgtgttattttaattaatcatggaaaagattcgtttataatcgaaagagggatgagaatagcccaaattgtttttgctaaattaccaaattttaaattaatagaggtaaaagaattaagttccaccaagagaggtaaaggtggatttggctctacagggttaaaatagg

SEQ ID NO: 267957 - DNA, 226 bp, Unknown
  Bacterial polypeptide expressing nucleotide sequence isolated from the Sargasso Sea
cagatatcagttttaaatacgcctggaacaattgatgctgattacagaggtgaattaaaagtgatattaataaacttaagtaataagacttttgttgttgaaggtggtgcaagaatagctcaaatggttttatgtccaattgtaaaagctaaacttaaggaagtagataacttagatgatacaagtagaggtgctggtggctttggatctactggattgaaataat

SEQ ID NO: 267958 - DNA, 340 bp, Unknown
  Bacterial polypeptide expressing nucleotide sequence isolated from the Sargasso Sea
tatggtaaaaatattaattaaaaggtttgataaaaatatcaaactccctacatataaaacctcaggatcctcaggaatggatgtaactgcctatatcaaaaataaaataaatattttgcctggaaaggtagcattaatatctacgggtatagcggcggcaataccaaaaaattatgaaatacaaataagaccaagatccggattagcggctaaaaatggaatttctgttttaaatacacctggaactattgactcagattatagaggtgaaataaaaattatcttaaataatttgagtaaaaagaaatttgtagtaaaatcaggtgacagaattgctcaa

SEQ ID NO: 267959 - DNA, 439 bp, Unknown
  Bacterial polypeptide expressing nucleotide sequence isolated from the Sargasso Sea
aatggcgaaagttcttatcaaaaagttagaccctgcagttgaattacctgcttacaaaacagaaggtgcatctggcatggatttaatggcattagtaaaagaacccatcaatcttaaaccaaactcatcatgtttagttccaacagggcttgctgttgcattttcaagtgattttgaaatccaaataaggccaagatctggtttggctgcaaaaaacagtataagtgttttaaatacacctggaactattgatagtgattacaggggagaaataaaagtaattctatttaatcacgggaaaaatgatttcttgataaataataaggatagaatagctcaaatgattttaactcctgtaattaaaatggatctcgaggaaactgatgatctaccagaaacaattagaggagagggtgggtttggctcaacgggaaaatga

SEQ ID NO: 267960 - DNA, 451 bp, Unknown
  Bacterial polypeptide expressing nucleotide sequence isolated from the Sargasso Sea
aatggtttcggttgccgtcaaacgtttgcctcataatgcagatcttccactgccggaatatgagagcgtagcagcttccggcatggatttaccagcagcaattgagagtgatctgatcataaaacctggcgagcggcagcttgtgccaaccggtttggcgatagccttacccgagggctatgaagctcaaatccgtcctcggtcggggcttgctttaagaaatggtgtgaccatcttaaatacgccgggtacgatagattcggattatcgtggtgaagtaaaggtcattctcgtaaatttcagcaattgcaattttaaaatccaaaggggtatgcgtattgctcagatggtgatagcccccgtcttaaaggtttccctgatggacgtcgatgttttgcccgaaaccgcccgcggtgatgatggttttggatctaccgggacgtctacctaa

SEQ ID NO: 267961 - DNA, 310 bp, Unknown
  Bacterial polypeptide expressing nucleotide sequence isolated from the Sargasso Sea
aatggttaaaatccttattaaaaaattaaattctaaagttaaattaccaagttataaaactgatggatcttctggaatggatctcatggcattcatagataaacctataactatattgcctcaaaaatctgaattaataccaacaggattatctatagcaattcctaatgacactgaagtacaggtcagacctagatctggactagctgtaaaaaacaatatttcagttttaaatactccaggaacaattgatagtgactatcgaggagaaataaaagtaattctttataatcatggaaataaagaattt

SEQ ID NO: 267962 - DNA, 442 bp, Unknown
  Bacterial polypeptide expressing nucleotide sequence isolated from the Sargasso Sea
aatgacagaagttttaattaaaagattatctaaaaatgtggaattgcctaaatatgagactaatggttcatctgggatggatctttctgctaatatccctacagacataaaaatagaaccaggaaaaacatccataattcctacaggtatatctctctcaatacctaaaaattttgaaatacaaattagaccaagatcaggattagctgctaaaagccaagtatcagttttaaatactcctggaactatagatgctgattataggggggaagtaaaagtaattttaataaatttagggagcaacactttcacagtcagaaaaggtgcgaggatagctcaaatggttttgagtccagttattaaagtgaaatttaaggaagttgaaaaactggatgaaacagacagaggttctggtggatttggttctactggtatgaaataa

SEQ ID NO: 267963 - DNA, 257 bp, Unknown
  Bacterial polypeptide expressing nucleotide sequence isolated from the Sargasso Sea
aatacgtcctagatcaggattagcggccaaaaaatctataacaatattaaatacgccaggaactattgactctgactacaggggagaaattaaaattatcttgattaatctaggcaaggaagattttcagataacaaatggtttaagaatagcgcagatggttttatgtccgatatctaaagcagaattaacagaagttgatgatcttgataagacatccagaggccgcgggggttttggttcaactggaagttaaa

SEQ ID NO: 267964 - DNA, 371 bp, Unknown
  Bacterial polypeptide expressing nucleotide sequence isolated from the Sargasso Sea
atctggcatggatttaatggcattagtaaaagaacccatcaatcttaaaccaaactcatcatgtttagttccaacagggcttgctgttgcattttcaagtgatttcgaaatccaaataaggccaagatctggtttagctgcaaaaaacagtataagtgttttaaatacacctggaactattgatagtgattacaggggagaaataaaagtaatcctttttaatcacgggaaaaatgatttcttaataaataataaggatagaatagcacaaatgattttaactcctgtaattaaaatggatcttaaggaaactgatgatctaccagaaacaattagaggagaaggtggttttggctctactgggaaatgag

SEQ ID NO: 267965 - DNA, 383 bp, Unknown
  Bacterial polypeptide expressing nucleotide sequence isolated from the Sargasso Sea
aacatcaggcgcatcaggaatggatttgatggcttgtttaaaatctactatcaaaatagaacctaaatcctcttgtttaataccaacaggcctttcgatagctttttctgaagattatgaggtgcaaataagaccccggtccggtctcgcagcaaaaaataacataagtgtattaaatacaccgggtactatagacagtgactatagaggagaaattaaagtaataatttataatcatggaaatgatcattttctaataaacaatggtgatagaatagcacaaatggtattattacctattgtaaagatggaattggaagaaactagtgatttaccaaaatcaattcgaggagagggtggatttggttcaactggtaaatgaa

SEQ ID NO: 267966 - DNA, 439 bp, Unknown
  Bacterial polypeptide expressing nucleotide sequence isolated from the Sargasso Sea
atggtcaaaatactaataaaaaaattagatccttcagttaagctgccagaatataaaactaatggttcctctggaatggatattatagcttttacaaaggagcctataaatttaagacccaaaacatcctttgttgtacctactggactagccgtagccttttctgagaattatgaaatccaaataagaccacgatctggtttagctgcaaaaaataaaattagtgttttaaatacccctggaactatagacagtgattatagaggagaaattaaagttattatttttaatcatggaaatgatgattttattattaacaatggagatcgtattgcccaaatggtattatctccagttattaaaatggaattagaagaaactaatgatttaccaaaaacaataagaggtagtggtggatttggctcaactggtaaatgaa

SEQ ID NO: 267967 - DNA, 261 bp, Unknown
  Bacterial polypeptide expressing nucleotide sequence isolated from the Sargasso Sea
tgtttttacctcgatcaggccttgggcataaacatggtattgttcttggcaatcttacaggtttagtcgattcagattatcagggcgagatttatatctcctgttggaacagaggggctgttaaatttacgataactccaggggatagaatagcccaaatgataattgtaccgattgaaagacctgattttgaatttgttgattcgtttgatgaaacaataagaggtctaggtggtttcggtcatactggtgtgtcttaat

SEQ ID NO: 267968 - DNA, 304 bp, Unknown
  Bacterial polypeptide expressing nucleotide sequence isolated from the Sargasso Sea
aataccaacaggattatctatagcaattcctaataacactgaagtacaaattaggcctagatctggcttagccgtaaaaaataatatttcagttttaaatactccgggaacagttgatagtgactatcgaggagagataaaagttattctttataatcatggaaacaaagaatttattgtaaataatgacgacagaatagctcaaatggtattggtccctttaattaaagcttactttgaagaggttgaaaatctccctgaaacaattagaggtgaaggtggttttggctccactggaaaatga

SEQ ID NO: 267969 - DNA, 435 bp, Unknown
  Bacterial polypeptide expressing nucleotide sequence isolated from the Sargasso Sea
aatgacaaaaatattaattaaaagactgtccaaaaaagtttctttacccaaatacgaaacaagtggatcttcaggaatggatttagctgcaaatatagacgctaatattaatattgatccaggcaaaacagcaattattcctacaggtttagcattatccataccaaaaggttttgaagtacaaattagaccaagatcaggcctagctgctaaacaaaaaataagtgttttaaatacaccaggtacaattgatgcagattatagaggtgaaataaaagtaatattaatcaatcttggacaagtttcttttaaagtagagaaggggcttcgtatcgcacaaatggttgtttgtccaatagtgcaagctcaacttaaagaagtagatgatttaagtgaaacggatcgaggcaaaggtggatttggatctacaggatc

SEQ ID NO: 267970 - DNA, 355 bp, Unknown
  Bacterial polypeptide expressing nucleotide sequence isolated from the Sargasso Sea
atggtgaaagtcttaattaaaaaattagacaaaaaagttaaactgccagaatataaaacaacaggctcatctggactagatttgactgcattcattgaaaagaaaatagtaattaaaccaggcgaaaacgctttagtgccaacaggtataactattgcaatacctgaggataccgaagttcagatcaggccgcgatcaggtttagcagttaaaaataatataagtgtattaaatactcctggaacaattgatagtgattatagaggagaaataaaagtaattttatttaatcatggagataaagactttacagtaaataaagatgataggattgcacaaatgatattaatgccaa

SEQ ID NO: 267971 - DNA, 393 bp, Unknown
  Bacterial polypeptide expressing nucleotide sequence isolated from the Sargasso Sea
ttagtactgcaggatctgcagcattagacttgagaactaatatcaaagaaaagaaagttcttcagtccgatgagacttttcttttttctactggattttcaatacatattaaagactctaaatatgcagccttgattctcccaaggtcaggcttagggcataaacatggaatcgtcttgggaaacttggtgggccttattgattcagattatcaaggagaaatcatggtctctttatggaatagatcaaaagaatcattcgagattcttcctggagataggattgcccagatgatgttctttgctgttacttcaccaaactttaagttggtttctgaatttgatttctcagaaagaggctctaagggtttcggttcttcaggaactaaataaa

SEQ ID NO: 267972 - DNA, 465 bp, Unknown
  Bacterial polypeptide expressing nucleotide sequence isolated from the Sargasso Sea
tagcaatagaaagaattagagtggtttatataaaagtaaaaaaaacaaatgataacgttactcttccgacttatgagacatcatctagtgcaggaatggatataagagcattcttgccaaatggaaaagttaacatatcaccaaaagaaacaaaactaattggaactggattattttttgaaattccaaatggatttgaagttcaaataagacctcgaagtgggctagctgcaaaaaactttattactgttctaaacagcccgggaactatagatgcggactatcgaggggaagtaaaagtgattttaattaaccatggattagaaatgtttgaagttgaagataaaatgagaattgcacaaatggttgtgtcaaaatatgaaaaggtcaattttgaattagtaagtgatttaagtgaaagtgagagggggagtggtggttttggatcaacaggaactaagtgaa

SEQ ID NO: 267973 - DNA, 439 bp, Unknown
  Bacterial polypeptide expressing nucleotide sequence isolated from the Sargasso Sea
aatggcaaaagttttagttaaaaagctaaattctaaagtacagttgccgaaatataaaactaaaggatcttctggaatggatttaatggcttttatagacaacccaattgaaatttcaccaaatagttcaaaattaattccaaccggaatttctgtagcgatcgaagaagggtatgaaattcaaataagaccgaggtctggtttggccgctaaatcaaatataagtgttttgaatacacccggaacaatagatagtgattatagaggagaactaaaagttattttatttaatcatggtattataaaatatattgtaaataataatgatagaattgcacagatggttctaagtccaatattaaaagtaaattttgaggaagtagatgagctcccagaaactgtaaggggaacaggaggatttggatcaactggtaaatga

SEQ ID NO: 267974 - DNA, 265 bp, Unknown
  Bacterial polypeptide expressing nucleotide sequence isolated from the Sargasso Sea
gaagttcagattcgtccaagaagtggattggcacttaaacacggtataacggttcttaactctcctggaacaattgattctgattataggggagaaataggagtaatattaataaatctttcccatgaaaaatttattataaaatcaggagagaggattgcccaaatggtaatttccaaacatgaacaagtaaaatgggaagtaacagaatctttacctaaaagtaatagaggggaaaaaggctttgggagcactggtaaataga

SEQ ID NO: 267975 - DNA, 355 bp, Unknown
  Bacterial polypeptide expressing nucleotide sequence isolated from the Sargasso Sea
aatggcatttattttaaatgatataattataaaaccacatgagtctgtattgattcctacgggtatatctgtcgctatacctaaagatacagaaatacaaattagaccaagatctggccttgctgcaaaatccaatatcagtgttttaaatacaccaggaacgatagatagtgattacagaggagaaataaaaataattttatttaatcatggaaaaaatgaatttactgttaaaaataatgatagaattgctcagatggtattaatacctattttaaaagttgaatttgaagaggttaaagatttacccgaaaccttaagaggtactggaggttttggatcaactggtaaatga

SEQ ID NO: 267976 - DNA, 352 bp, Unknown
  Bacterial polypeptide expressing nucleotide sequence isolated from the Sargasso Sea
ggcatttattaaagagcctataaatttaaaaccttatacatcttgcatggttccaacaggcatttctttagcattctctggtgaatttgaaattcaaataagacctagatctggcttagctgctaaaagtagtattagtgttttaaacacaccgggcacaattgacagtgattataggggtgaaattaaagtaattttatataaccatgggagtaatgattttttaataaataataaagatagaattgcccaaatggttttaacaccggttgttaaaatagatcttgaggaaactgatgatcttcctaatacagtaagaggcaaaggtggttttggttcaacagggaaatga

SEQ ID NO: 267977 - DNA, 404 bp, Unknown
  Bacterial polypeptide expressing nucleotide sequence isolated from the Sargasso Sea
cggtagtgccggcattgaccttcctgctgctattgaaggttcggcctcaattgatcctggtgcgcgacttttaataccaaccggttttgccttctctattccgcgcacctacgagggacaggttcgaccacggtcagggctagcattaaaatatggcgttacggttttaaactcgccgggtactattgactctgactataggggtgaagtttcggttcttttaattaatcaaggaaataaaacgtttttctttgaaagaggtgataggatagctcaaatggttttcactaaggtagagcaagtaaaatttcaagaagtggaagcactagatacaagcgaccgtggtttaggaggttatgggtcaaccgggctatctaaaaattcagagagtagtatgttgtaat

SEQ ID NO: 267978 - DNA, 439 bp, Unknown
  Bacterial polypeptide expressing nucleotide sequence isolated from the Sargasso Sea
atgataaaaatattaattagaaaacttgatacaaaaataccgttacctaagtacgaaactgatgggtcatcaggaatggatttatcggcttatctaaaaaatgatttggtaatagcccctaatgaaaaaaagatgatacctaccggattaatggctgcagtgccaaaaggttatgaaattcaaattaggcctagatcaggtttagctgcaaaaaattccataacagttctaaatactcctggaacaatcgactctgattacagaggggaaattaaagttatactgttcaatcacggaaaagagaattttaaaattgaaaataatatgagaattgcgcaaatggtggtttgtcctgtgaccatggctgaagtttgtgaagtagataaacttgatgaaaccgaaagaggcaaaggtggttttggatctacaggtaaatgat

SEQ ID NO: 267979 - DNA, 352 bp, Unknown
  Bacterial polypeptide expressing nucleotide sequence isolated from the Sargasso Sea
ggcatgtgtagatgaacctgtaacaatcaaaccaaatgagtcgaaattgatacccacaggtattgcaattgcaattcctgaagatacagagattcaaattagaccaagatctggtcttgctgtaaaatcaagtattagcgtactaaatacaccgggtacaattgatagtgattatagaggagagctaaaaattattttatttaaccatggtaaagatgaatttactgtcaatgatgaagatagagttgctcaaatggttttaatgcctattttaaaagtagaaattgaagaaacaaatgaattaccagatacaatcagagggtctggaggatttggatctactggtaaatag

SEQ ID NO: 267980 - DNA, 439 bp, Unknown
  Bacterial polypeptide expressing nucleotide sequence isolated from the Sargasso Sea
atgattaaagttttagtaaaaaaattaaaacactctgtaaaattaccatcatataaaactaatggtgcatctggcatggacctaatggcatatatagataaatcaattgaattaaaggcaggagagtcgtgcctaataccaactggattatcagttgcatttcctaaagaatatgaaattcaaataagaccaaggtcaggattagcggcaaaaagcaatattagtgttttaaatacacctggtacaattgatagtgattatagaggagaaataaaagttattttatttaatcatggtaacaaaagttttaagatcaacaacaatgatagaattgctcaaatgattttaactccagttataaaaatggatctagaagaaacaaatgaacttccagagtcaataagaggagcaggtggttttggttcaactggtaaatgag

SEQ ID NO: 267981 - DNA, 463 bp, Unknown
  Bacterial polypeptide expressing nucleotide sequence isolated from the Sargasso Sea
ttgacaaaatcacatttaattaagatatcaattaaaaatctttcaaaacttgataattttaaaattccttcttatcaatcagatgaagcttctggtgtcgacctaagtgcttcaataaactctcaaatagaaattcatccttgggaaagagaaatcattccatgtgggatatcaatcgcaatgccaaaagggtttgaagctcagataagaccaagatctggtttagcgttcaagaatggtattacaatattaaatacccctggaaccatagacagtgattatcgaggagagattaaagtagttttaataaacctcagtaatacttcatttgcaattaatcctggggataggattgctcaaatgatatttgctaatacaatacacgtaaaatttgaggaagttgacgatctagaaaaaacaagaagaggcgatagtgggtttggttcaactggaaaaatttaat

SEQ ID NO: 267982 - DNA, 439 bp, Unknown
  Bacterial polypeptide expressing nucleotide sequence isolated from the Sargasso Sea
atggcaaaagttcttatcaaaaagttagaccctgcggttgaattaccggcttacaaaacagaaggtgcatctggcatggatttaatggcattagtaaaagaacccatcaatcttaaaccaaactcatcatgtttagttccaacagggcttgctgttgcattttcaactgatttcgaaatccaaataaggccaagatctggtttagctgcaaaaaacagtataagtgttttaaatacacctggaactattgatagtgattacaggggggaaataaaagtaatcctttttaatcatgggaaaaatgatttcttgataaataataaggatagaatagcacaaatgattttaactcctgtaattaaaatggatcttgaggaaactgatgatctaccagaaacaattagaggagaaggtgggtttggctcaacaggaaaatgag

SEQ ID NO: 267983 - DNA, 439 bp, Unknown
  Bacterial polypeptide expressing nucleotide sequence isolated from the Sargasso Sea
atggtaaaagtattaattaaaaaattagatccagcagttgaaataccaacttataaaaccgcaggtgcatcgggtatggacttaatggcttttataaaaaagcctataatattatttccaaacacttcgtgtttagtacctactggtctttctgtggcaatttcagatgaatatgaaatacaaataagacccagatcaggactagcggcaaaaaataatgtatctgttttaaatacacctggaacaatagatagtgattatagaggagaaattaaaataatactttttaatcacggaaaaaataatttcactattaataacaaggatagaattgcacaaatgattttaacaccagttcataaaatggatttagaagaagtagaaagtttaccaagtactttaagaggaaaaggtggctttggttcaactggaaaatgaa

SEQ ID NO: 267984 - DNA, 358 bp, Unknown
  Bacterial polypeptide expressing nucleotide sequence isolated from the Sargasso Sea
cgagctttcatttctaaagcaattgtattaaaaccgttagaaagacaattaattcctaccggaattaaaatagagttgcctattggctatgaagctcaaataagaccaaggagtggtttggcatataaaaacgggattacggtacttaattcgcctggaacaattgattcagactatagaggagaggtgggagtactattaataaatctttctaatgaaaacttcactgtaaacaatggagatagaattgctcaaatggtgattgctaagcacgagtttcctgtttttaatgattcctataaattaaaaaatagtgtaagaggagaaggtggatttggtagtacaggaaaaaaataac

SEQ ID NO: 267985 - DNA, 439 bp, Unknown
  Bacterial polypeptide expressing nucleotide sequence isolated from the Sargasso Sea
aatggtaaaagttttagtaaaaaagcttaatccaaaagtgaaattaccatcttacaaaactcaagggtcttcaggaatggatttaatggcttttattgataaaccaattataatcgatcctaataactcagcattaattcctactggattatcgttagcaatacctgaagattttgaaatacaaattagaccacgctctggacttgcatctaaatcacatattagtgttttaaatactcctggtacaatagacagtgactaccgaggagaattaaaaataattttatttaatcatggtaaaaaggaatttgttgtaaataataatgaaagaattgcccaaatggtgcttactccaattttaaaagtagattttgaagaagttgaaaatcttcctgatagtttcagaggatctgggggatttggatctacgggaaaatga

SEQ ID NO: 267986 - DNA, 366 bp, Unknown
  Bacterial polypeptide expressing nucleotide sequence isolated from the Sargasso Sea
tatgttaaagattccaataattaaccaaagtccatatgagcttccgtcctatgcaacagtttcatcagcgggtatggatttgaaagctgttttaacctctcaggttaccttaaaaccactagaaagaaaagtcgttggaacaggaataaagatcgctctccccgaaggatatgaggctcaagtgagaccaagaagtggattagctgcaaaaaagggaattacggttttaaattctcctggcacaattgatgctgactatagaggtgagattggggtgattttaattaatctttcctccaagaattatatgcttaaccctggagagagagtagctcaattagttatttcaaggtatgaaaaagtgtc

SEQ ID NO: 267987 - DNA, 436 bp, Unknown
  Bacterial polypeptide expressing nucleotide sequence isolated from the Sargasso Sea
atggttagaattttgattgtaaataaatcaagttttgatttgccttcttatgaatccaattttgcagcaggattagacttaagggcaaatttatctgaaaaaattacaatcgccccaatggatcgtaaattaattcctacgggtttatttattgctttgcccaaaggatacgaagctcaaatcagacctaggagtggcacagctattaaatacggaataacagtacttaattcacctgggacaattgactctgattataggggagaaataggcattatattaataaatctctcaaataagagatttgttgtaaattcaggagacaggatcgctcaaatggtaatttccaagtatgagcaaattaaatgggaactcacagaatcattaccgaaaagtaatagaggagaaaaaggttttggaagtactggtaagtagt

SEQ ID NO: 267988 - DNA, 439 bp, Unknown
  Bacterial polypeptide expressing nucleotide sequence isolated from the Sargasso Sea
aatggcaaaagttcttatcaaaaagttagtttcttcagttgaattacccacttataaaacagatggcgcatcagggatggatttaatggccttcataaaagaaccaataactcttaagcctaattcatcatgtttagtaccaacaggtatttcagttgcattttctaatgattttgaaatacaaataagaccaagatcaggtttagcggcaaaaaacaatataagcgtgttaaatacacctggaactatcgatagtgattatagaggagaaattaaagtgatactttttaaccatggtaatagtgattttttaattaacaacaaagatagaatagcacaaatgattttaactccagttatcaaaatggatcttgaggaaacagaaaatcttcctgaaacaattagaggagagggtggatttggctcaacaggaaaatga

SEQ ID NO: 267989 - DNA, 322 bp, Unknown
  Bacterial polypeptide expressing nucleotide sequence isolated from the Sargasso Sea
caaacaaacaaaactaattgggacaggtttgatttttgaaatacctgatggtctcgaagttcaaatcagacctcgaagtggattagcgttaaaaaactcaattactgttttaaatagtccaggtaccattgatgcagattatagaggcgagattaaagtaattttaattaatcacggatcaaaagtctttgaagttaaaaataaaatgagaattgcacaaatggttgtatcaaaatatgaaaaggttaattttaaattagtaagcgatttaaatactacaaagagaggaagtggtggttttgggtcaacaggaacaaactga

SEQ ID NO: 267990 - DNA, 291 bp, Unknown
  Bacterial polypeptide expressing nucleotide sequence isolated from the Sargasso Sea
tatctattgcaatacctgaggataccgaagttcaaatcaggccgcgatcaggtttagcagctaaaaataatataagtgtattaaatactcctggaacaattgatagtgactatagaggagaaataaaagtaattttatttaatcatggagataaagactttacagtaaataacgatgataggattgcgcaaatgatattaatgccaattctaaaagtagattttgaaacggtagaaactttgcctgaaacaattagaggttcgggtggatttggatcgacaggtaagtgaa

SEQ ID NO: 267991 - DNA, 437 bp, Unknown
  Bacterial polypeptide expressing nucleotide sequence isolated from the Sargasso Sea
cctgaagattctcgatgcgcgcatgcgcgatcaactcccggcgtacgccaccaccggcagcgcgggcctcgacctgcgtgcctgtctcgacgaaccgttgacgctgaagccgggcgaaacagcgctggtgcccacaggtctggcgattcacgtcggcgatccgggttacgcagcgttgattctgccgcgttcgggtctaggtcataagcatgggatcgtactgggcaatctggtcggcctgatcgattcggattaccagggtcaactgatgatctggacgtggaaccgcggcgagaccaagttcgtgctgaatccgatggagcgcctcgcgcaactcgtgatcgtgccggtggtccaggccgagttcaatatcgtcgacgatttcgaaagcagcgagcgtggtgcgggcgggttcggcagcacgggcaagcactagt

SEQ ID NO: 267992 - DNA, 457 bp, Unknown
  Bacterial polypeptide expressing nucleotide sequence isolated from the Sargasso Sea
ttgaagaatgtaaagctcaagatattaaattcactaataggtaaaaatatacctattccaaaatataaaacaaacggttctgcgggtcttgatcttagagcttgtattgataaaaaattaatattgagaccaagtaaaaccgaaatgattccaatgggttttgcaatgcatcttgaggacgaaggtcttgctgcacttgttgttccaagatctgggcttggatcaaagcatggaatagtattagggaatcttgttggccttatagattctgattatcaaggtgaattaatggttccagcttggaatagatctaacaagttatatgaaattaatccgggtgatagaattgctcaaatgataattgttcctattgttcaagcaagttttgaaatagttgaagattttgagatttcagaaagagggactaagggttttggaagctctggtataaattaat

SEQ ID NO: 267993 - DNA, 439 bp, Unknown
  Bacterial polypeptide expressing nucleotide sequence isolated from the Sargasso Sea
aatggtcaaagtactaattaaaaagttagatcctaaggtaaaattacctgaatacaaaacagctggggcttctggaatggacttgttggcttttattagaaagcccttaactgtcaaaccaaaaacatcatcactaataccaacaggattatcagttgcattttctgaggattatgagattcaaattcgacctagatcaggactagctgcaaagaataatataagtgtactaaatacgcctggcacaattgatagtgattatagaggagaaattaaggttattatttataatcatagtgataatgattttataattaataatggggataggattgcgcaaatgatcctaacacctgttattaaaatgaccctagaagaaacactagatttgcctgaaacgataagaggaaaaagtggttttggctcaacaggcaaatga

SEQ ID NO: 267994 - DNA, 439 bp, Unknown
  Bacterial polypeptide expressing nucleotide sequence isolated from the Sargasso Sea
atggttaaagttttaatcaaaaaattaaagtcttctgtacaattgccttcttataaaactagtggtgcatctggtatggatttaatggcgtttatagaagagccaattgaactaaaaccaggtaaatcatgtcttatacctactggattatcagtgtccttttctaaagaatatgagattcaaattagaccgagatcaggtctagcagcaaaaaataatattagtgttctaaatacacctggtacgatcgatagtgattacaggggagaattaaaagtcattttatataatcatggtagtgaaaattttatgattaaaaataatgatagagttgctcaaatggttttagctcctattattaagatggaactagaagaaataaatgaacttccagaaacaataagaggagaaggagggtttggttcaactggtaaatgag

SEQ ID NO: 267995 - DNA, 457 bp, Unknown
  Bacterial polypeptide expressing nucleotide sequence isolated from the Sargasso Sea
ttgataaacataaaattaaaaataattaattcccttattggaagtaagattcctttaccaaaatatgaaacaaaaggttcggctggactcgatcttcgcgcatgtttagacaagaaattagctttaaagcctggaacaacaaatatgattccaatggggtttgccatgcacctggatgatcaaaatttagctgcgctagttgttccaagatctggcttgggatcgaagcatggtattgttttgggtaaccttgttggccttatagattcagattatcaaggagaattaatggtgccggcctggaataggtctgaaattgattttgagattcatccaggagatagaattgctcaaatgatcatagtgcctgtaatgcaagcaaattttgaaatcgtagaagaatttacagagagtgttagaggaacaaaaggtttcgggagctctggcttaaattgaa

SEQ ID NO: 267996 - DNA, 432 bp, Unknown
  Bacterial polypeptide expressing nucleotide sequence isolated from the Sargasso Sea
aaatcctaataaaaaaacttagtactaaagttaaattacctaaatataaaactgatggttcttctggaatggatcttatggcatttatagataaaccaatatcaataataccacataaatctgagattatacccactggtttatcaatagcaattccagaaaacactgaaatccagattaggccaagatctggattagctgcaaaaaatagtatttcggttttaaatacacctggtacaattgatagcgactatcgtggagaacttcgagttattctttataatcatggaagtgaagaatttgtggtgaataatgaagatagaattgctcaaatggtattagttcctataatcaaagctacatttgaagaggtggaagacttaccagaaactataagaggtgaaggtggctttgggtctacaggtaaatgaa

SEQ ID NO: 267997 - DNA, 442 bp, Unknown
  Bacterial polypeptide expressing nucleotide sequence isolated from the Sargasso Sea
atgaccgaaattttaattaaaagactatcaaaaaacattatattaccaaagtatgaaacaagcgggtcatcaggtctagatctctcagctaatataaaaacttctgtcaagattaagcctgggaaaactacaataattccaactggaatttctgtttcgatacctaaaaattttgaaatacaaataagaccaaggtcaggtcttgcagcaaagaaccaaatttcagtattgaatactcctggaactatagatgcagattatagaggtgaaataaaagttatattaataaatttaagtaaagaaacattcattgtagaaaatggagcgaggatagctcaaatggtagtttgcccagtaataaaggctaaacttaaagaagttgatagtctagataatacttcaaggggttctgatggttttgggtcaaccggtatgaaataac

SEQ ID NO: 267998 - DNA, 439 bp, Unknown
  Bacterial polypeptide expressing nucleotide sequence isolated from the Sargasso Sea
aatgattaaagttttagtcaaaaaactaaatccaaaagctgaacttccaaaatacaaaactgaaggatcatctgggatggatttaatggcattaattgaaaaacctatcataattaaatctcaaaattcagctttaattccaactggtttgtctattgcaataccagaagatacagaagtgcaaataagaccaagatcggggcttgcgtcaaaatcaaatataagtgtattaaatactccaggaacaattgatagtgactatagaggtgaaattaaaatcattttatttaatcacggaaaagaagagtttactgtaagcaataatgatagaattgcacaaatgatattgacgccagtattaaaagctgagttcgaagaagtagaagaacttccaaaaactgtaagaggttctggaggttttggatcaactggcaaatga

SEQ ID NO: 267999 - DNA, 226 bp, Unknown
  Bacterial polypeptide expressing nucleotide sequence isolated from the Sargasso Sea
aaaaataagcgttttaaatacaccaggaacaattgattcagattatagaggtgagataaaagtaatattgatcaaccaaggccaagaaactttcaaggtagaaaaggggttacgtatagctcagatggttgtgtgtcctgtggtacaagctcaaattaaagaagtagaagacttaagtgaaacagaacgaggtaaaggtggatttggttcaaccggaagtaaataa

SEQ ID NO: 268000 - DNA, 439 bp, Unknown
  Bacterial polypeptide expressing nucleotide sequence isolated from the Sargasso Sea
atggcaaaagttcttatcaaaaagttagaccctgcggttgaattacctgcttataaaacagaaggtgcatcaggtatggatttaatggcattagtaaaagaacccatcaatcttaaaccaaactcatcatgtttagttccaacaggtcttgcagtagcattttctagtgatttcgaaatccaaataagaccaagatctggtttagctgcaaaaaacaacattagtgttttaaatacacctggaactattgatagtgattacaggggagaaataaaagtaatcctttttaatcacggaaaaagtgattttttaataaataataaagatagaatagcacaaatgattttaactcctgtaattaaaatggatcttgaggaaactgacgatctaccagaaacaattagaggagagggtggttttggctctactggaaaatgag

SEQ ID NO: 268001 - DNA, 439 bp, Unknown
  Bacterial polypeptide expressing nucleotide sequence isolated from the Sargasso Sea
aatggcaaaagttcttatcaaaaagttaaaccctagggttgaattacctgcttacaaaacagaaggtgcatcaggtgtggatttaatggcattagtaaaagaacccatcaatcttaaaccaaactcatcatgtttagttccaacagggcttgctgttgcattttcaagtgatttcgaaatccaaataaggccaagatctggtttagctgcaaaaaacagtataagtgttttaaatacacctggaactattgatagtgattacaggggagaaataaaagtaatcctttttaatcacgggaaaaatgatttcttgataaataataaggatagaatagcacaaatgattttaactcctgtaattaaaatggatcttgaggaaactgatgatctaccaaaaacaattagaggagaaggtggttttggctctactggaaaatga

SEQ ID NO: 268002 - DNA, 283 bp, Unknown
  Bacterial polypeptide expressing nucleotide sequence isolated from the Sargasso Sea
aatgccaaaaggtttggaagctcagattcggccaagatccggtttagcatttaaacatggtataacaattttgaatactcctggaacaatagacagtgattacagaggtgaaataaaagttgtattaataaatttaagcaaagatgaatttaccattcatccaaaagatagaattgctcaaatggtcttcacaaatgctatacaagtaaagtttaaagaagttcaaaatcttgatcaaacaaaaaggggagatggaggatttggatctaccggaaaagattaa

SEQ ID NO: 268003 - DNA, 343 bp, Unknown
  Bacterial polypeptide expressing nucleotide sequence isolated from the Sargasso Sea
aaaacaacccattaaattggcacctaaaagctcgtgtttagtacctacaggtctttcagtagctttttcagaagaatatgaaatacaaataagacctagatcaggactagcagcaaaaaacaatatatctgttttgaacacacctggaacaattgacagtgactatagaggtgaaattaaaataatactttttaatcatggagataacgagtttgttattaataataaagatagagttgctcaaatgattttaatgcctgtaaaaaaaatggaattagaagaagtagaaaatttgccaaacactttaagaggagagggcggttttggttctaccggaaaataa

SEQ ID NO: 268004 - DNA, 439 bp, Unknown
  Bacterial polypeptide expressing nucleotide sequence isolated from the Sargasso Sea
atggtaaaagttttatttaaaagacttgatccaaaagctaaagttccaaagtataaaactgatggatcctcaggtttagatttaatggcattaattaaaaaacctattataattaaaccacaacagtcagaattaattccaacaggtatttctgttgccatacctcaagatactgaaattcaaataagacctagatctggattagcagctaaagctaacattagtgtcttaaatacacctggtactattgatagtgactatagaggtgaaattaaaatcatattgtttaatcatggaaaagaagaatttatagtaaacaataatgatagaattgcccagatggttttaatgcctgttttgaaaattgaatttgatgaagttgatgatttaccagaaactataagaggttcaggaggatttggatctactggtaaatgaa

SEQ ID NO: 268005 - DNA, 314 bp, Unknown
  Bacterial polypeptide expressing nucleotide sequence isolated from the Sargasso Sea
tttggcatttattccaactggaattactgttgcaataccaaatgatcttgaaatacaaataagaccacgttctggacttgcagcaaaatcaaatattagtgttttaaatactcctggtacaattgatagtgactatagaggagaaataaaaataatactatttaatcatggaaataaaaaatttattgtgaaaaacaatgatagagtagctcaaatggtgcttacgccgattttaaaagttgattttgaggaagtagaaattttaccgaaaactttaagaggatctggaggatttggatctactggaaaatgaa

SEQ ID NO: 268006 - DNA, 303 bp, Unknown
  Bacterial polypeptide expressing nucleotide sequence isolated from the Sargasso Sea
ttccaactgggatctcaatagcatttcctgaggaatttgaagttcaaataagaccaagatctggattagcagccaagcaaagcattggtgttcttaatacaccaggaacaattgatagtgattatagaggtgagcttaaagtaatattatttaatcatggtgaaaatgaatttgttgtaaattgcgatgatagaatagcacaaatggttctaacaccagttttaaaaattgaatttgaagaggtaaatgatcttcctgaaactttaagaggaagcggaggttttggttctacaggtaaatgag

SEQ ID NO: 268007 - DNA, 439 bp, Unknown
  Bacterial polypeptide expressing nucleotide sequence isolated from the Sargasso Sea
aatggttaaaatcctttttaaaaaattaaattcaaaagttaagctaccaaaatataaaactgatggctcttctgggatggatctaatggcttttataaacaaacctatttcaataatgccgcaaaaatctgaactaataccaactggtatatctattgcaatcccagaaaatacagaagtccagattagaccaagatctggattagcggctaaaaattatatttctgttttaaatacccctggcacaattgatagtgactatcgtggagaattaaaagttattctctataattatggaactaaagaatttatagttaataatgaggatagaatagctcaaatggtgttagttccagtaatcaaagctacttttgaagaagttgaacaattaccagatacaattagaggtgatggtggttttggatctacaggaaaatga

SEQ ID NO: 268008 - DNA, 246 bp, Unknown
  Bacterial polypeptide expressing nucleotide sequence isolated from the Sargasso Sea
gttcaggtttagcagcaaaatctcagataggcgtactcaatacacccggtacgattgatagtgactataggggggagttaaaagttatattatttaatcatgggatggatgattttatagttaataatggagatagaatagcacaaatggttttaatgcccgttctgaaagcttcttttgaggaagtagatgagctacccgatacatttagaggatcaggtggctttggatctacaggtaaatgaa

SEQ ID NO: 268009 - DNA, 409 bp, Unknown
  Bacterial polypeptide expressing nucleotide sequence isolated from the Sargasso Sea
cttggcaagtaaacctgagtatgggtctggtgaagctgctggacttgacttaaaagcagcaataaacaataaagtaattataaaatctatggactatactactgtgccgactggattaataatagagatacccaatgggtttgaagggcagataagacctcggtctggattagcttctaaaaatggtatttccgtactaaatagtcccgggactattgatagtgattatagaggagaaataaaagtaatattaattaatttggggcaagataactttcaaattcttccaggaatgaaagttgctcaattaatcgtagctcctatatacaaagccaaaataaattatgtaaaaaaaatagatagtaaaactaaaagaggtaaaaaaggatttgggtcaacaggtctataa

SEQ ID NO: 268010 - DNA, 340 bp, Unknown
  Bacterial polypeptide expressing nucleotide sequence isolated from the Sargasso Sea
gagtcttttataataaagccaaataattctgaattaataccaactggaatatcgatagctattcctaaagaaacagagatacaaattagacctcgttcaggtttagcagcaaaatctcggataagtgtactcaatacacccggtacgattgatagtgactataggggagagttaaaagttatattatttaatcatggtgtggatgattttatagttaataatggagatagaatagcacaaatggttttaatgccagttctaaaagcttcttttgaggaagtagacgagctgcccgatacagtcagaggatctggtggctttggatctacaggtaaatgaa

SEQ ID NO: 268011 - DNA, 247 bp, Unknown
  Bacterial polypeptide expressing nucleotide sequence isolated from the Sargasso Sea
gtctggtttagctgctaaaaaaaaaataacagttttaaatacacctggaacaattgactcagattatagaggagagataaaagtaatattaatcaatcttggtctggagtcttttaaaatagagaaaggacttcgtattgcccagatggttgtttgcccagtagaacaagttcaaattgaagaagtagaagatctaagtgaaacagatcgaggtataggtggatttggttcaactggaagtaaataa

SEQ ID NO: 268012 - DNA, 316 bp, Unknown
  Bacterial polypeptide expressing nucleotide sequence isolated from the Sargasso Sea
ttttttagtacccacaggaattaaattaagaatacctagaggctatgaaggtcaagtgaggccaagatctggtttggctttaaataatgggataactgtattaaattctccaggtacaattgattcagattatagaggtgaagtcaaaataattttaataaatcactcctcaaaaatgtttacaataaaacctaacatgagaattggtcaaattgtttttgctccaatcgttaaaattcagctacaattgggagatataaatatttttgaaactaacagatcttctaaaggatttggttcaacgggattagagtaa

SEQ ID NO: 268013 - DNA, 277 bp, Unknown
  Bacterial polypeptide expressing nucleotide sequence isolated from the Sargasso Sea
tctgaaaaatatgaaattcaaattagaccaagatctggcttagcagcaaaaaataacattagtgttttgaacacacctggaacaattgatagtgattatagaggcgaaattaaaattattttatttaaccatagtaaagaaaattttacgatcaataacaatgacagaattgctcaaatggttctaacgccaattattaaagtaaaactagaagaaacaaatgaacttccagaatcaacaagaggcgagggtggttttggttcaactggtaaatgaa

SEQ ID NO: 268014 - DNA, 451 bp, Unknown
  Bacterial polypeptide expressing nucleotide sequence isolated from the Sargasso Sea
atgcttgatagtgttcaagtaaaaattgttaataatattgttaaagaattgccagattacgcaacagagggttcggcgggcttggacctccgtgcggctataaataaaaagatgaaactacactctaaggaaacaattttaataccaacagggttatctatttttattgaaaataaggattatgctgcaacactgctacctcggtctggtctaggtcataaaaaaggaatagtcttgggtaacttagttggtcttatagactctgattatcaaggtgagctcatgatatcttgctggaatagaagtaaagagaattacataattgagcctttagatagaattgcacaaatgatatttataaaggttgaacatcctaagctggagattgtcgacgagttcaggacttccaaaagaggtgagaaaggttttggttcatcaggaaaaaaatagc

SEQ ID NO: 268015 - DNA, 439 bp, Unknown
  Bacterial polypeptide expressing nucleotide sequence isolated from the Sargasso Sea
aatggcaaaagttcttatcaaaaagttagaccctgcagttgaattacctgcttacaaaacagaaggtgcatcaggtatggatttaatggcattagtaaaaaaacctatcaatcttaaaccaagctcatcatgtttggttccaacaggtcttgcagtagcattttctagtgatttcgaaatccaaataagaccaagatctggtttagctgcaaaaaacgaaattagtgttttaaatacacctggaactattgatagtgattacaggggggaaataaaagtaatcctttttaatcacggaaaaagcgattttttaataaataataaagatagaatagcacaaatgattttaactcctataattaaaatggatcttgaggaaactgatgatctaccagatactgttagaggagaagctggttttggctctacaggaaaatga

SEQ ID NO: 268016 - DNA, 439 bp, Unknown
  Bacterial polypeptide expressing nucleotide sequence isolated from the Sargasso Sea
aatggttaaaatactttttaaaagacttagttctaaagttaaattaccaaaatatgaaacggatggatcttcaggaatggatctgatggcatttttaaacaaaccagtccatttgatgcctcaaaaatctgaattaattcctactggcttgtctattgctataccaaatgatactgaggtacagataagaccaagatcgggtttagctgcgaaaaataacatatcagtcttaaacactcctggtacagttgatagcgactatcgtggtgaaataaaagtaatactttacaatcatggtgataaagaatttgtaattaataatgaagacagaatagcgcaaatggtaatagttcctataatcaaagctacttttgaagaggtacaagatcttccagagacaattagaggagagggtggttttggatcaactggaaaatga

SEQ ID NO: 268017 - DNA, 281 bp, Unknown
  Bacterial polypeptide expressing nucleotide sequence isolated from the Sargasso Sea
ccctaaaggatttgaggtacaaattcgacctaggtccggtctagctgctaaaaaaaaaataagcgttttaaatacaccaggaacaattgattcagattatagaggcgagataaaagtaatattgatcaaccagggccaagaaactttcaacgtagaaaaggggttacgtatagctcagatggttgtgtgtcctgtggcacaagctcaaattaaagaagtagaagacctaagtgaaacagaacgaggtaaaggtggatttggctcaaccggaagtaaataat

SEQ ID NO: 268018 - DNA, 397 bp, Unknown
  Bacterial polypeptide expressing nucleotide sequence isolated from the Sargasso Sea
aatgtctaatgaggtttctctcccaaaatacgaaacaaatgggtcttctggaatggatctagcggctaacattaatagtagtattaatattaatcctggaaaaatagaaataattcctacaggtttagctttatcaattccgaaaggatttgaagttcaaattagaccaagatcaggtttagctgctaagaataagataacagttttaaatacacctggaacaattgatgctgactataggggtgaaattaaagtaattttaattaatttaggtcaagagacttttaaagttgagaagggacttcgtatagctcaaatggttgtatgtccaatagtacaagtagagctgaaagaagtaaataatttaagccatactgagagaggtaaaggtggattt

SEQ ID NO: 268019 - DNA, 289 bp, Unknown
  Bacterial polypeptide expressing nucleotide sequence isolated from the Sargasso Sea
attgaaaaaaataaaactaaaaatattgaacccactcataggtaacaaaatacctgttcccaaatatgaaacgaaaggttctgctggtttagatcttagagcttgcgttaaagaaaaactaatattgaaaccaggtaagactgaaatgatcccaatgggatttgcaatgcatcttgaagatgagagcttggcagctttggtcgttccaagatcaggtcttggttcaaaacatggaatagtgcttggtaatctagttggattgatagattctgactatcaaggtgaacta

SEQ ID NO: 268020 - DNA, 253 bp, Unknown
  Bacterial polypeptide expressing nucleotide sequence isolated from the Sargasso Sea
aagaccacgttcaggtctagctgcaaaatttaatattagtgttttaaataccccgggtaccattgatagtgattatagaggagagataaaaattatattatttaaccacggcaatgaagaatttattgtaaataataaagatagagttgctcaaatgattcttttgcctattttaaaagtagattttgaagaagtagacaatttaccagatactctaaggggatcgggaggctttggatctactggaaaatga

SEQ ID NO: 268021 - DNA, 451 bp, Unknown
  Bacterial polypeptide expressing nucleotide sequence isolated from the Sargasso Sea
atgacccgcccggttatacgcatcatgcggttgccgcatggccaggacacgcccctgccagcctatgccaccgaaggcgccgccggcatggatatttgcgcagcggtggatgcagatctgacgttgtcgccaggggcccgtatcgcagtgccaaccggcctggccatggccatagaccacggctatgaggtgcagctgcgatctaggtccgggctggcacttaaaaacggtgtttcccttgccaatgcaccaggcacgattgatagcgattatcgcggcgaggtgaaggtgatactggttaatttcggtgacacggattttgttgtaagccgcggcatgcgcattgcgcagatggtcatcgcgccagtcacaagatgccacatcgaaaccgtgacggaactgacggacacatcgcgcggcgatgggggtttcggctccaccggtgtgtgat

SEQ ID NO: 268022 - DNA, 439 bp, Unknown
  Bacterial polypeptide expressing nucleotide sequence isolated from the Sargasso Sea
atggttaaagttttagttaaaaaactagatgctaaagttaagttgccagaatacaaaactattggttcatcaggtatggatttaatggcattcttagatagtccaataaaaattactcctaattctttagaattaatccctactggtttatcaattgcaataccagaggatttggaaatacaaataagacctagatcgggtcttgctgtaaaatctagcataagtatattaaatacacctggaactatcgatagtgattatagaggagagttaaaaataatattatttaatcatggaactgaagaatttactattaataacaatgatagagtagctcaaatggtcttaactccaattataaaaatggaacttgaagaagtggatcaattaccagattcaataagaggatctggtggtttcggatcaactggtaaatgaa

SEQ ID NO: 268023 - DNA, 457 bp, Unknown
  Bacterial polypeptide expressing nucleotide sequence isolated from the Sargasso Sea
tatgaaaaaagttaaattaaaaatattaaatccacttataggtaatgaaatacctattccaaaatacgagacaaaaggttctgcaggcttagatcttagagcatgtattaaagataaattaatattgaaaccaggaaaaactgagatgattccaatgggatttgcaatgcatcttgaggataagagtttggctgctttggttatcccaagatcaggtcttggttcaaaacatgggatagtgcttggcaatttagttggattgatagattctgattaccaaggtgaattaatggttcctgcatggaatagatcagagcaggaatttgaaattaattctggtgaccgaattgctcaaatgataatagtgccaatagttcaagcagattttgaaatagttgaagattttgaggaatcagagaggggtgctaagggttttggcagttctggtttagattaa

SEQ ID NO: 268024 - DNA, 478 bp, Unknown
  Bacterial polypeptide expressing nucleotide sequence isolated from the Sargasso Sea
atggcgagtaaaatccaaatactcactgaatctattcctggaaatgaagatattccactcccattctatggatcatctgcttcagctggggctgatttgcatgctgcaattaaagatgtgctgataatccagcctagagaaagacgaattataccaacaggtattaaattaatgatcccagacggttatgaaggtcaaattagacctcgctcagggatagctcttaaacatggggtaacggttctaaatagcccaggaactattgactcagactatcgtggcgagattggagtattgttaattaatcatggtagtaagccctataaaatatcacgtggagaacgtattgctcaacttataatcgcaccttatatccaacttgatttcacctctacaaaaatacaaacagatacggaaagaggagaaatgggtttcggttctactggagtaagttctaaaattattaaggataaataaa

SEQ ID NO: 268025 - DNA, 265 bp, Unknown
  Bacterial polypeptide expressing nucleotide sequence isolated from the Sargasso Sea
gaaattcagattagaccaagatctggtctagcggctaaaaataatatttcagtcttaaatacaccaggaacaatagatagcgactatcgaggcgagttgaaggttattctttataatcatggagatgaagaatttatagtaaataatggagatagaattgctcaaatggtattagttcctattattaaagcaaacttggaggaagtaaaagatttaccagaaacaattagaggagaaggtggttttggctctacgggtaaatgac

SEQ ID NO: 268026 - DNA, 457 bp, Unknown
  Bacterial polypeptide expressing nucleotide sequence isolated from the Sargasso Sea
attgaaaaaggttaaagtcaaaatattaaatacacttataggcaatgaaatacctattcccaaatacgagacaaaaggttctgcaggcttagatcttagagcatgtattaaagataaattaatattgaaaccaggaaaaactgagatgattccaatgggatttgcaatgcatcttgaggataagaaattggcagctctggttgttccaagatcaggtcttggttcaaaacatggaatagtgcttggcaatttagttggattgatagattctgattaccagggtgaattaatggttcctgcatggaataggtcagagcaggaatttgaaattaattctggtgaccgaattgctcaaatgataatagtgccaatagttcaagcagattttgaaatagttgaagattttgaggaatcagagaggggtgctaagggttttggaagttccggtttagattag

SEQ ID NO: 268027 - DNA, 448 bp, Unknown
  Bacterial polypeptide expressing nucleotide sequence isolated from the Sargasso Sea
ttgaaagttaaaattctcaacccacttataggcgattctattccattaccagaatactccacagaaggatcggcaggtttggatttaagagcatgtgttgaggaaagttttgttttaaaacctcaagagtgtcagttgatcccattaggcttttcgatttacatagaagatccaactctttctggtttagtgatacctagatctggattaggttcaaaacatgggatcgttatgggaaacttagttggcttgattgattctgactatcagggagagctgaaagtgcctctttggaatagatcgacagaagattttttagtcagcagcggtgatagaattgctcaaatgattctcgtaccaatcaagcaagctaaattaagagttgtagagtatttctcagaaacagatagagggactaaaggatttggtagttcgggagttgagtaag

SEQ ID NO: 268028 - DNA, 400 bp, Unknown
  Bacterial polypeptide expressing nucleotide sequence isolated from the Sargasso Sea
gccgcaaattgcaacagaaggttcagcgggaatggatatgcgtgcttgtattgactcagaattaacagtttctcctggagacactgttctggttccaaccggcatagccattcatatcgctgataataatcttgcagctgttctattgccaagatctggtcttggtcataaacatggacttgtgcttggtaatttaacgggtttaatcgattcggattatcagggacaaatatttatatcttgttggaacagaggagaaaaagcatacaagatcaatcctggagaccgtattgctcaaatggtttttattccggtagagcaagttaagtttgaagtagtggacgattttaaagagagtgacagaggggaaggagggtttggccactcaggcaaatcataa

SEQ ID NO: 268029 - DNA, 442 bp, Unknown
  Bacterial polypeptide expressing nucleotide sequence isolated from the Sargasso Sea
aatgacaaaaatattaattaagagactgtcaaaagaagttcctttgcctaaatacgaaacaagtggatcgtctggtatggatttagctgcaaatataaatgctaatatagatataaatcctggcaaaactgcaattattcctactggtttagctttatcaataccaaaaggatttgaagtgcaaatcagacctagatctggtctagctgctaatcaaaaaataagtgttttaaatactccaggtacaatcgatgctgattataggggagaaatcaaagtaatattaatcaatcttggtcgagagtctttcaaagtagaaaagggacttcgtattgctcaaatggttgtgtgtccagtaattcaagctcagcttaaagaggtagatgatttaaatgaaacagagcggggtaaaggcggatttggatcgacaggaactaaataa

SEQ ID NO: 268030 - DNA, 460 bp, Unknown
  Bacterial polypeptide expressing nucleotide sequence isolated from the Sargasso Sea
aatgaaaacaccgattgaattaaagatcctcgattcccgtattggctctgaattccccctgcccgcctatgccacacctggcagcgcgggaatggatcttcgcgccatgatagataccacaatgacgatagccccaggtgagactcagttaatccctacgggcatcgccatccacgtggcagacccaggccttgccgccgtgatcctgccccgttcaggccttggccataagcacggtatcgtactcggcaatctggttgggcttatcgattcagattatcaaggtcccttgatggtttcttgctggaaccgcagcgataccccattcactttagaaattggtgatcgtctcgcacaactcgtgtttgttcctgtagtacaagcacaattcaaactcgttgatgagttcgacagctcagatcgtggtgaaggtggatttggccattctggcactaaataa

SEQ ID NO: 268031 - DNA, 457 bp, Unknown
  Bacterial polypeptide expressing nucleotide sequence isolated from the Sargasso Sea
ttgaaaaaggtaaaattaaaaatattaaatacacttataggcaatgaaatacctattccgaaatatgagacaaaaggctctgcaggtctagatcttagagcttgcattaaagaaaaattaatattaaaaccaggaaaaactgagatgattccaatgggatttgcaatgcatctcgaggacgagagtttggcagctcttgttgttcctagatcgggtcttggttcaaaatatgggatagtgctcggtaatttagttgggttgatagactctgattatcaaggtgaattaatggttcctgcatggaatagatcagaacaggaatttgcgattaattctggtgatcgaattgctcaaatgataatagtcccgatagttcaagcaaattttgaaatagttgaagattttaagaaatcagaaaggggtgctaaaggttttggcagctctggtatagattagg

SEQ ID NO: 268032 - DNA, 448 bp, Unknown
  Bacterial polypeptide expressing nucleotide sequence isolated from the Sargasso Sea
atgaaactcgacctgaagattctcgacgcgcgcatgcgcgactacctgcccgcctacgcgaccaccggcagcgcgggcctcgacctgcgtgcgtgcctcgatgcaccggtcacgctgcagccgggcgaaacgacgctcgtgccgaccggcctcgcgatccatctcgccgatcccggctacgcggcgctgatcctgccgcgctccggcctcggccacaagcacggcatcgtgctcggcaacctcgtcggcctgatcgattccgactaccagggccaactcatggtctcgacgtggaaccgcggccagaccgagttcgtgctcaatccgttcgagcggctcgcccagctcgtgatcgtgccggtcgtgcaggcgcagttcaacatcgtcgacgacttcgccgaaagcgatcgcggcgagggcggcttcggcagcaccggccgtcactgaa

SEQ ID NO: 268033 - DNA, 358 bp, Unknown
  Bacterial polypeptide expressing nucleotide sequence isolated from the Sargasso Sea
gctgattggaagcaaaattcctttaccaaaatatgagacaaaaggttcagctggactcgatcttcgtgcatgtttagacaagaaattagttttaaagcccggaacaacaaatatgattcctatgggatttgccatgcacttggatgatgaaaatttagccgcgcttgttgttccaagatctgggttgggctcgaaacatggtattgtcttaggcaaccttgttggccttatagattcagattatcaaggtgaattaatggtaccggcttggaataggtctgaaattgattttgagatccatcaaggagacagaattgctcaaatgattatagtgcctgtaatgcaagcaaatttttga

SEQ ID NO: 268034 - DNA, 442 bp, Unknown
  Bacterial polypeptide expressing nucleotide sequence isolated from the Sargasso Sea
atgacagaagttttaattaaaagactatctaaaaatatcgaactacctaaatacgagacaaatggttcatcagggatggatctttcagcaaatattgaaaaacagattaaaatagagccagggaaaacttcaataattccaactggtatatctgtgtctattcccgaaaattttgaaatacaaattagatcgagatcaggattggctgctaaaagtcaggtagcagttcttaattcacctggaacgatagacgctgattatagaggtgaattaaaagtaatattaataaatttgagcaataaaacttttgttgttgagaaaggtgcacgcatcgctcaaatggtattgtgccctattgttaaagcaaaatttaaggaagtagataaattagaggatacaattagaggtgaaggtggttttggatctactggattgaaataat

SEQ ID NO: 268035 - DNA, 475 bp, Unknown
  Bacterial polypeptide expressing nucleotide sequence isolated from the Sargasso Sea
atgcaagatagtcctaatagaaaaattattgatctaaaggttctggacaaaagaatcggcgatacttttgatatgccagattaccaaacatcaggctccgctgggatagatttacttgcatgcttagatgaacccttgacgatccagcctggcgataccgagctcattccaagcggtattgcagtctatataagagatccgtctctggcagctgttttgctgccccgttctgggcttggccacaagaagggccttgttttaggaaatttagtcggcttgattgactctgactaccagggacaagtttttatttcatgctggaacagaggaaaagaaagttgtgtgattgagcctggtatgcgattggctcaaatggtttttctgccaattcaacaggtcaactttaatttggtggagtcctttgaagaatcagatcgcggagaaggcggatttggacataccggcgagggttgat

SEQ ID NO: 268036 - DNA, 460 bp, Unknown
  Bacterial polypeptide expressing nucleotide sequence isolated from the Sargasso Sea
atgacaacacaaattgaactgaagattctggatgcccgcatcggcaccgagtacccgctgcccgcctacgccacaccgggttccgccggcatggatctgcgcgccctgctggatgccccgctgaccctggccccgggtgataccacgctagtgccgaccgggctggccatccacattcaggatccgggcctgtgtgccaccatcctgccccgctccggcctcggtcataagcacggcatcgtgctgggcaacctggtcggcctcatcgattccgactaccagggccagctgatggtctcggtgtggaaccgtggcaatgacagcttcaccatgcagcccggcgagcgcatcgcccagctggtgatcatgccggtcgttcaggccagcttccaactggtcgatgagttcaatcagagcgaacggggtgaaggcggttttggttcttctggtcgccaataac

SEQ ID NO: 268037 - DNA, 439 bp, Unknown
  Bacterial polypeptide expressing nucleotide sequence isolated from the Sargasso Sea
aatgattaaagttttaatcaagaaattaaattcaaaagttcaacttccaaaatataaaactgtaggatcttctggaatggacttaatggcactaatagagaaacctataataattaagccacaaaaatctgcattaatcccaactggtttgtctattgcaatacctgaagatacagaagtccaaattagaccaagatctggactcgctgtaaaatctagtataagtgttttaaacactcccggaacaatagatagtgactatagaggtgaaataaaaattattttatttaaccatggtaaagatgaatttactgtaaataataatgacagaattgcacaaatgatagtggtgccagtattaaaagctgaatttgaacaagttgaagaattaccaatatccgtaagaggctctggaggttttggttcaaccggcaaatga

SEQ ID NO: 268038 - DNA, 1135 bp, Unknown
  Bacterial polypeptide expressing nucleotide sequence isolated from the Sargasso Sea
gcaaattttttcatatttaaaaaattattttgataaaagaaatatcgttaaagatagaaaccttaaagccttagtgactgcaggacctacacgagaatacattgacccgataagatatatttctaatgaatcaagcggtaaacaaggtcatgaaattgctgtagcacttaataaacttgggataaaaacagtgttaataacagggccctctaaattgacagctccaaaaggcattaaagtaaaaaaaataatatccgcagaagaaatgctaagtgaagttaaaaaatctttacctgtagatttagccgtatgtacagcagccgtgactgatttcaaacctgctaaaaaaagtaaaaataaaattaaaaaagatgagttaaatttcaaatcaataaattttattaagaatgatgatattttagattttttatcaaaaaataataaaaataggcctaaaatagttgctggtttttctgcagaaactaaaaatgtaattaaaaattcttcattaaaaatgaaaaataaaaattgtgatttgatttttgctaatgatgtttctaaaaaagatattggttttaattcagactttaataaagtttcagtaatagatcaaaaaggaaatattaaaataataccaaaaaataaaaaaagttttattgctaataaaatagctcacattttattagataaattacttgatgacagaaatttaattaagcgattatctgataatgtctcgttacctaaatatgaaacagagggatcatcgggtatggaccttgctgcaaatattaataaaaaaattgaaattaaaccaggcactacagttttagttccaactggcatatcagtatctattccaaaaaattttgaaattcaaatcaggccaagatcaggtttggccgcaaaaaaccaaataagtgtattaaatactcctggaacgattgatgctgactatagaggagaaataaaggtaatattgataaacttaggcactaaaagctttatgattgaaaacgggacgcgtatagcccaaatggttttatgccctattgctaaagcaaaattaaaagaagtaaagatactcgaaagcacaaaacgtggttctggtggatttggttcaactggaacttaa

SEQ ID NO: 268039 - DNA, 439 bp, Unknown; identical to SEQ ID NO: 267988
  Bacterial polypeptide expressing nucleotide sequence isolated from the Sargasso Sea

SEQ ID NO: 268040 - DNA, 439 bp, Unknown
  Bacterial polypeptide expressing nucleotide sequence isolated from the Sargasso Sea
aatgattaaagttttagttaaaaaattaaattcttctgctaaattaccgtcatataaaacaaatggtgcatccggcatggacctaatggcctgtataaatgaaccaattgatttaaaaccaggtgagtcttttcttgtaccaactggattatcagttgcgttccctgaagaatatgaaatccaaataagaccaagatcaggattagcagcaaaaaatagtatcagtattttgaatacgcctggtactattgatagtgattacagaggagaaattaaaattattttgttcaatcatggaaataaaaattttaaaattaacaaaaatgatagaattgctcaaatgatcttaactccggttattaaaatggacctagaagaaactaatgaacttccagtgtcaataagaggagaaagagggtttggttcaactggtaaatga

SEQ ID NO: 268041 - DNA, 238 bp, Unknown
  Bacterial polypeptide expressing nucleotide sequence isolated from the Sargasso Sea
ctagctgctaaaaataatatatctgttctaaacacaccaggtacaattgatagtgattacagaggtgaaattaaaataatactttataatcacggtagtgataattttgtcattaataatagggacagaattgcacaaatggttttgactcctatacaaaaaatggagttagaagaggtaaaagacttaccagaaagtataagaggaaaaggcggctttggttcaacgggcaaataat

SEQ ID NO: 268042 - DNA, 442 bp, Unknown
  Bacterial polypeptide expressing nucleotide sequence isolated from the Sargasso Sea
gatgacagaaatattaattaaaaggttgtcaaaagatgtagctttacctaaatacgagacagaaggttcgtctggtctagacctgacagctaatacagataagcagattaagattttgcccggaagatctgaagttattcctacaggattagctgttgcaataccaaaaaattttgagattcaaattaggcctagatcaggattagcagcaaaaagtcaaataagtgttttaaataccccaggtacaattgactctgattataggggtgagcttaaagtaatattaattaatttaagtgataaaatttttgttgttgaaaaaggattgcggattgcacaaatggtattatgcccggttgtaaaagcaacattaaaagaggtaacagagttagaaaacacaaaacgtggctctggtggtttcgggtctacgggaataaaataa

SEQ ID NO: 268043 - DNA, 457 bp, Unknown
  Bacterial polypeptide expressing nucleotide sequence isolated from the Sargasso Sea
tatgaaaaaagttaaactaaaaatattaaatccacttataggcaatgaaatacctattcccaaatatgagacaaaaggctctgcaggtttagatcttagggcttgtattaaagataaattaatattgaaaccaaggaagactgagatgattccaatgggatttgcaatgcatcttgaggatgagagtttggctgctttggttatcccaagatcaggtcttggttcgaaacatgggatagtgcttggcaatttagttggattgatagattctgattaccaaggtgaattaatggttcctgcatggaatagatcagagcaggaatttgaaattaattctggtgaccgaattgctcaaatgataatagtgccaatagttcaagcagattttgaaatagttgaagattttgaggaatcagagaggggtgctaagggttttggaagttccggtttagattag

SEQ ID NO: 268044 - DNA, 315 bp, Unknown
  Bacterial polypeptide expressing nucleotide sequence isolated from the Sargasso Sea
ataaacttatacttacagggatatatattaaaataccacgtggttatgaggctcaagttagaccaagaagtggtttagcattaaaaaaaggaataacagttttaaactctcctggcacaattgattctgattacagaggagagattggagtaatactaatcaatcattcaactgttgattatgaggttaaatctggagaaagaatagcacaattagtattttcaaaacatgaaaattttcattgggaaaatgtaaaacatattgactcttcatcacgcggggaagggggttttggaagtactggtacaaattaat

SEQ ID NO: 268045 - DNA, 439 bp, Unknown
  Bacterial polypeptide expressing nucleotide sequence isolated from the Sargasso Sea
aatggtaaaagttcttatcaaaaagttagatcctacagttgaattacctgcttacaaaacagaaggtgcatcaggcatggatttaatggcattattaaatgaacccatcaatcttaaaccaaattcttcatgtttagttccaacagggctttctgtagcattttctagtgatttcgaaatccaaataagaccaagatctggtttagctgcaaaaaacagtataagtgttttaaatacacctggaactattgatagtgattacaggggagaaataaaagtaatcctttttaatcacggaaaaagtgattttttaataaataataaagatagaatagcacaaatgattttaactcctgtaattaaaatggatcttgaggaaactgacgatctaccagaaacaattagaggagagggtggttttggctctactggaaaatga

SEQ ID NO: 268046 - DNA, 475 bp, Unknown
  Bacterial polypeptide expressing nucleotide sequence isolated from the Sargasso Sea
tatgcaagatagccctacaagaaaaattattgatttaaaggttctggacaaaagaatcggcgatacttttgaaatgccagattaccaaacctcagggtccgcagggatagatttacttgcatgcttggatgaacccatgacgatccagcctggcgataccgagctcattccaagtggtatcgcagtctatataagagacccctccttggcagcagttttactgccccgttctgggcttggtcacaagaagggccttgttttaggaaatttagttggtttgattgattctgactaccaaggacaagtctttatttcatgctggaatagaggaaaagaaaattgtgtgattgagcctggcatgcgattggctcaaatggtttttctgccaattcaacaggtcaactttaatctggttgagcactttgaagaatcagatcgcggagaaggtggatttggacatactggcgagggttga

SEQ ID NO: 268047 - DNA, 439 bp, Unknown
  Bacterial polypeptide expressing nucleotide sequence isolated from the Sargasso Sea
atggttaaagttctaatcaaaaaacttgacccagctgtacaattacccgaatataaaaccagtggcgcatcaggtgtagacttaatcgcatttataaaagaacccattaatctagaacccaaaacatctgttttaattcccacaggattatctgttgctttcccagaagattacgagattcaaataagaccaagatcaggtttagcagccaaaaataatattagtgtgttaaacactccaggaacaattgatagtgattatagaggagaaataaaggttatcatctataatcatggtaatgaaaatttttcaattaatgatggtgatagaattgctcaaatgatactagcacctgtggtcaagatggaattagaagaaaaaaatgatttacctaagtctatcagaggtaaaggtggatttggttcaacaggtaaatgaa

SEQ ID NO: 268048 - DNA, 439 bp, Unknown
  Bacterial polypeptide expressing nucleotide sequence isolated from the Sargasso Sea
gatgattaaagttttagtcaaaaaactaaatccaaaagttgaacttccaaaatacaaaactgaaggatcttctggaatggatttaaaggctttaattgaaaaacctgtaataattaaacctcaaaactcagttttaattccaactggattgtccattgcaatacccgaagatacagaagtacaaataagaccaagatcggggcttgctgcaaaatcaagtattagcgtattaaatactccaggaacaattgatagtgactatagaggtgaaataaaaattattttatttaatcatggaaaagaagaatttattgtaaacaatggtgatagaattgcacaaatgatattgatgccagtaataaaagctgagttcgaagaaatcaaagaattgccaaaaactgttagaggttctggaggttttggatcaactggtaaatga

SEQ ID NO: 268049 - DNA, 439 bp, Unknown
  Bacterial polypeptide expressing nucleotide sequence isolated from the Sargasso Sea
gatggttaaaatccttatcaaaaaacttaattctaaagttaaacttccaaaatataaaaccaaaggatcttctggaatggatcttatggcatttctagagaaatctgtaactatattacctcaaaaatcagaattaattccaacaggattatctatagcaattcctaaaaatactgaggtgcaaatcagacctagatctggtctagctgtaaaaaataatatttcagttttaaatactccaggaacgattgatagtgactatagaggagagataaaagtaattctttataatcatggtaataaaggatttattgtaaacaatgaagacagaatagctcaaatggtattagttcctataattaaagctaactttgaagaagttgaaaatctccctgaaacaattagaggtaaaggtggttttggctcaactggaaaatga

SEQ ID NO: 268050 - DNA, 460 bp, Unknown
  Bacterial polypeptide expressing nucleotide sequence isolated from the Sargasso Sea
atgaaaaaagccattgatttaaaaattctcgacccacgtatcggcactgaattcccattaccggcttatgccacaccgggcagcgctggtttagatttacgggcttgtctggatgcagaagtacaactggctccgggccaaacgaccttgatccctactggcttagctattcatattggtgacgcaaatttatgcgccactatactgccacgctctggtttaggtcataaacacggcatagtgttgggtaacttagtgggtttaatcgactcggattatcagggccagctgatggtgtctatgtggaaccgttcgcaggaagatttcactatccagccaggcgatcgtattgctcagttggtgtttatgccggtggtacaggcagaatttaatatagtttcagattttgacgcttcagaccggggcgaaggtggatttggtcactcaggccggcagtaat

SEQ ID NO: 268051 - DNA, 475 bp, Unknown
  Bacterial polypeptide expressing nucleotide sequence isolated from the Sargasso Sea
tatgcaagatagctccaaaagtaaaattattgatttaaagattcttgataagagaataggcgacacttttgagatgccagattatcaaaccattggatctgctgggatagatttacttgcatgcttggaggatacactgacgctccaaccaggcaataccgagctcattccgagcggtatcgcggtctacataagagacccttctttagcagcagttttattgcctcgctcggggctcggccataaaaaaggacttgttttgggaaatttggtaggtttaattgattcggattatcaaggacaggtttttatctcatgctggaataggggcaaggaagattgcgtcattgaacccgggatgcgcttagctcagatggtctttcttccaattgagcaggtcagttttaatgtggtggattcatttgatgaatcagaccgtggggaaggcggatttggtcataccggagaaggttaa

SEQ ID NO: 268052 - DNA, 313 bp, Unknown
  Bacterial polypeptide expressing nucleotide sequence isolated from the Sargasso Sea
taaacttatacctacagggatatatattaaaataccacgtggttatgaggctcaagttagaccaagaagtggcttggcattaaaaaaaggaataaccgttttaaactctccaggaacaattgattctgattacagaggagagattggagtaatactaatcaatcattcagctgttgattttgaggttaagtctggagaaagaatagcacaattagtattttcaaaacatgaaaattttcactgggaaaatgtaaaacatattgactcttcatcacgcggggaagggggttttggaagtactggtacaaattaa

SEQ ID NO: 268053 - DNA, 442 bp, Unknown
  Bacterial polypeptide expressing nucleotide sequence isolated from the Sargasso Sea
atgataaaaatattaattaagagactgtccaaagaagtttctttacccaaatatgaaacaagcggatcttcaggtatggacctagcggcaaatattaatagcaaagttaatattgatcctggtaaaactgcagttattcctacaggtttggcagtatctatcccaaaaggatacgaggtgcaaataagaccaagatctggattagcagctaaaaaaaagataactgttcttaatactccaggaacaattgatgcagattatagaggagaaattaaagtaatattaatcaatcttagcaaagactcttttgaagttgaaaaaggacttcgtattgctcagatggttgtgtgcccaatagttcaagctcagctgaaagaggtagatgatttgaaacaaacagagcgaggtgaaggcggatttggatcgactggtactaaataat

SEQ ID NO: 268054 - DNA, 397 bp, Unknown
  Bacterial polypeptide expressing nucleotide sequence isolated from the Sargasso Sea
ttgcctaagtatcagtcaaaagaggcttcaggagttgatttatgtgcctcaataaaaagcgatattacaattcccccatgggaaaaagaaataatcgcatgtggaatttcagtttcaatgccaacaggtatggaagctcaagtaagaccaaggtctggccttgcttttaaacacggaataactgtattgaatacaccaggaaccattgatagtgattacagaggagaaataaaagtaatattaataaatttaagtaaagaaaaatttattgttcgtcctctagaaagaattgctcaaatggttttctcaaatgtcactaaagtagaatttaaagaagttgacaatttagatgagactaatcgaggtcaaggtggatttggatctaccggtaaataag

SEQ ID NO: 268055 - DNA, 439 bp, Unknown
  Bacterial polypeptide expressing nucleotide sequence isolated from the Sargasso Sea
aatgattaaagttttagtaaaaaaaaaagatccttctgtaaaattaccatcatacaaaactaatggtgcttctggcatggatctgatggcatatatagataaatcaattgaattaaagccaggagagtcatgccttgtaccaactggattatcagttgcattccctgaagaatatgaaattcagattagaccaagatcaggattagcggcaaaaaataatatcagtgttttaaatacacctgggacaattgatagtgattatagaggagaaataaaagttattttatttaatcatggtaacaaaaactttaaaattgataataatgatagaattgctcaaatgattttaactccagtcgtaaaaatagatttagaagaaacaaatgaacttccagaatcagtaagaggagtgggaggttttggttcaactggtaaatga

SEQ ID NO: 268056 - DNA, 439 bp, Unknown
  Bacterial polypeptide expressing nucleotide sequence isolated from the Sargasso Sea
aatggtaaaagtcttaattaaaaaattagacgagaaagttaaactgcctgaatataaaacaacaggatcatctggactagatttgactgcatttattgaaaagaaaatagtaattaaaccgggcgaaaacgctttagtgccaacaggtatatcaattgcaatacctgaggattctgaagttcagatcaggccgcgatcaggtttggcagctaaaaataatataagtgtgttaaatactcctggaacaattgatagtgactatagaggagaaataaaagtaattttatttaatcatggagataaagactttacagtaaataacgatgatagaattgctcaaatgatactaatgccaattctaaaagtagattttgaaactgtagaaactttgcctgagacaattagaggttcgggtggatttggatcaacgggtaagtga

SEQ ID NO: 268057 - DNA, 427 bp, Unknown
  Bacterial polypeptide expressing nucleotide sequence isolated from the Sargasso Sea
aaaacttcaaaacttaaggattttgatattccttcttatcagactgatgaggccgctggagttgacttaagtgcgtctattgaaaattcaattaaaattcgaccatgggaaagagaaattattccatgtggaatttcaattgcaatgccaaaaggtttggaggcccagattcggccaagatccggtttagcatttaaacatggtataacaatattaaacactcctggaacaatagacagtgattatagaggtgaaattaaagttgtattaataaatttaagcaaatatgaatttaccattcatccaaaagatagaattgctcaaatggtcttcacaaatactatacaagtaaagtttaaagaagttgaaaatcttaatcaaacaaaaagaggagatggaggatttggatctactggaaaagattaat

SEQ ID NO: 268058 - DNA, 460 bp, Unknown
  Bacterial polypeptide expressing nucleotide sequence isolated from the Sargasso Sea
catgaacaaaatatcggttcctgtaataaagttgctgaatggtgcggacttgccgttgcccgattatgcgactgcggatagcgctggccttgatttaatggcggcaatcgacgcgcctaagtcgcttgccccgggcgagcgggcgctaattccaagcggcctcgccatcgcgttaccaggtggctatgaggcccaggtccggccacgttccggtttggcctataagaatggtatcacagtgctgaattcgccaggtacaatcgatgcagattaccgtggtgaggttggcattattctcatcaatcatggtgatgagaccttcgttatagagcgcggcatgcgtatcgcccaattagtaattaccgcagtttcgcagttgatttgggacgaggtcgaaaccttgccggagactacgcgcggcgaagagggcttcggttcaacgggcgtcaagagtggatga

SEQ ID NO: 268059 - DNA, 439 bp, Unknown
  Bacterial polypeptide expressing nucleotide sequence isolated from the Sargasso Sea
atggtaaaagttttaattaaaaaactaaatccagaagcaaaactacctaattataaaactaagggatcttcaggtatggatttaatggcatgcttggatagatcgataaaaattttccctggtaaatcagctatagttccaacaggtttatcaatagcaatccccgatgatacagaagttcaaataaggcctagatctggtttggcagcaaagtcaagtataagtgttcttaatactccaggaactatagatagtgattatagaggggaaataaaaataattttatttaatcatggtgatactgaatttgtagttaataataatgatagaatagctcaaatgatacttgtaccaattttaaaagttgagtttgaggaagtgaaagatcttccaaataccataagaggatctggaggctttggatccactggtaaatgaa

SEQ ID NO: 268060 - DNA, 439 bp, Unknown
  Bacterial polypeptide expressing nucleotide sequence isolated from the Sargasso Sea
aatgattaaagttttagtaaaaaaattaaaaccttctgtaaaattaccatcatataaaactgatggtgcatctggcatggatctaatggcatatatagataaatcaattgaattaaagccaggagaatcatgcctagtaccaactggattatcagttgcatttcctaaagaatatgaaattcaaataagaccaaggtcaggattagcggcaaaaagcaatattagtgttttaaatacacctggtacaattgatagtgattatagaggagaaataaaagttattttatttaatcatggtaacaaaagttttaagatcaataacaacgatagaattgctcaaatgattttaaccccagttataaaaatggatctagaagaaacaaatgaacttccagattcaataagaggagcaggtggttttggttcaactggtaaatga

SEQ ID NO: 268061 - DNA, 439 bp, Unknown
  Bacterial polypeptide expressing nucleotide sequence isolated from the Sargasso Sea
atggtaaaagtactaattaaaaaattagatcctgctgttaaaataccatcttataaaactagcggtgcatctggtatggacttaatggcttttattaaagaaccaataaaactgccagcaaaaaaatcttgtttagttccaactggtatttctattgcaatgtctgatgattatgaaatccagataaggcctagatcaggtctagctgcaaaaaaaaatatttcaatattaaatactcctggaacaattgatagtgattatagaggtgaaattaaaataatactttttaatcatggagataatgaattcattatacaaaataaggaccgtatagctcaaatggttttgatgccagtgcacaaaattaactttgaagaagttgaaaatttaccagatactgtgaggggaaaaggtggattcggctcaacaggtaaatgaa

SEQ ID NO: 268062 - DNA, 463 bp, Unknown
  Bacterial polypeptide expressing nucleotide sequence isolated from the Sargasso Sea
ttggctaatccacctttctcagaagtacatataaaaaaaatttcaaaacttaaggattttgatgttccttcttatcagactgatgaggctgctggagttgacttaagtgcatccattgaaaattcaattaaaattcgtccatgggaaagagaaattattccgtgtggaatttcaattgcaatgccaaaaggtttggaggctcagattcggccaagatccggtttagcatttaaacatggtataacaattttaaacactcctggaacaatagacagtgattatagaggtgaaataaaagttgtattaataaatttaagcaaagatgagtttaccattcatccaaaagatagaattgctcaaatggtcttcacaaaagctatacaagtaaagtttagagaagttcaaaatcttgatcaaacaaaaaggggagatggaggatttggatctacgggaaaagattaat

SEQ ID NO: 268063 - DNA, 439 bp, Unknown
  Bacterial polypeptide expressing nucleotide sequence isolated from the Sargasso Sea
aatggtaaaagttttagttaaaaagcttaatccaaaagttcaacttccatcatacaaaacagatggagcttctggaatggatttaatggcatttgtagaaaattctgtaaaaatagctcccaacaattctgcactaattcctactggaatatctgtagctatgcctaacgatgttgaaattcaaataaggcctagatcggggctagctgcaaaatcaaaaattagtgttttaaatacgcctggtacaattgacagtgattatagaggagaaataaaagtaatattatttaaccatggttcagacgaattcatagtaaacaataaggaccgagtagctcaaatgattttaacacctattttaaaaatagattttgaagaagtagatgatttaccaaaaactataagaggatctggtggttttggttctactggaaaatga

SEQ ID NO: 268064 - DNA, 364 bp, Unknown
  Bacterial polypeptide expressing nucleotide sequence isolated from the Sargasso Sea
atggacttatctgcttttatagagaatgatattttaattaaaccaaacgaaagagaactgattcccactggaatagctgtaagtttacctcaaaatattgaaggccaagtgagacctagatctggtctatcattaaaatatggaattacagtattaaattcacctggaactattgactccgattatcgtggagaaattaaagtaatactaattaatcatggaaatgaagattttataatcaaaaataatgatagaatagcacaattagtttttaatgaagttgtaaaagtttcttttaaagaagtgaaagatttagatcaaacttcaagaaatcaaaaaggttttggatctacaggaaaataat

SEQ ID NO: 268065 - DNA, 439 bp, Unknown
  Bacterial polypeptide expressing nucleotide sequence isolated from the Sargasso Sea
atggttaaaatccttgttaaaaaaataaattctaaagttaaattaccaagctataaaacagatggctcatcaggtatggacctaatggcttttctagataagccaatatctatattgccacaacaatcaagattgataccaacaggattatttatagctatacctgacaatactgaagtacagattagacctagatctggcctagctgtaaaaaataatatttctgttttaaataccccgggaacaattgatagtgactatcgtggagaattaaaagtaattctttataattatggaaatgaagaatttattgtaaaaaacgaagatagaatagctcaaatggtattaatgcctataattaaagctagctttgaagaagttgaaaatcttcctgaaacaatcagaggtgagggcggttttggttccacaggcaaatgat

SEQ ID NO: 268066 - DNA, 442 bp, Unknown
  Bacterial polypeptide expressing nucleotide sequence isolated from the Sargasso Sea
aatgattaaggttttaattaaaaagttaaaccaaaaagtaaaaattccctcctataaaacgacagggtcttctggagttgatcttgaagcatttttagaaaatccaattgaaatagggccaaataaatctgctttaattccaaccggacttgcaattgctattcctgaagacacggaggttcaaatacgtccaagatctggacttgcagctaagtctagtattggagtgcttaactcaccgggtacaattgacagtgattatcgtggagagataaaaattattctttttaatcatggtaatgaaaaatttttagttaataatggagatagaatagctcaaatggtattgatgcctgttttaaaatttgaatttgaagaaacgaaagatttaccagacaccttaagaggttctggcggatttggatctactggaaaaaaatga

SEQ ID NO: 268067 - DNA, 442 bp, Unknown
  Bacterial polypeptide expressing nucleotide sequence isolated from the Sargasso Sea
aatgattaaggtcttaataaaaaaattaaatcaaaaagtaaaaattccctcttataaaacgacagggtcctctggagttgatcttgaagcatttttggaaaatccaattgaaatagggccaaataaatctgctttgattccaaccggacttgctatcgctatacctgaagacaccgaagttcaaatacgtccaagatctggacttgcagctaagtctagtattggagtaattaactcgccgggtacaattgatagtgattatcgtggagagattaaaattattctttttaatcatggtaatgaaaaatttttagttaacaatggagatagaatagctcaaatggtattgatgcctgttttgaagtttgagtttgaagaaacaaaagatttaccagacactttgaggggttcaggtggatttggatctactggaaaaaaatga

SEQ ID NO: 268068 - DNA, 439 bp, Unknown
  Bacterial polypeptide expressing nucleotide sequence isolated from the Sargasso Sea
atgattaaggttcaaataaaaaaacttaattctaaagtaaaaattccaaagtataagacagaaggttcctctggagttgatttggaagcatttatagaaaaacccttgataatcaatccaaaatcatcgaaattgattccgacaggaatttctatatcgatgcctaaagattgtgaagtgcaaataagacctcgctcaggtcttgcagcaaaatcaaatatcagtgtattaaatacaccgggtacgattgatagcgattataggggagaaattaaaataattttatttaatcatgggaatgaaaaatttactgtaaataatggggatagaatcgctcaaatggtattaatgccagtattaaaatttcgatttaacgaagtagatgaattgacaaacacaaatagagggtctagcggttttggttcaacaggtaaatgaa

SEQ ID NO: 268069 - DNA, 392 bp, Unknown
  Bacterial polypeptide expressing nucleotide sequence isolated from the Sargasso Sea
tgagacgaaaggttctgcaggtttagatcttagagcttgcattaaagaaaaactaatattaaaaccaggtaagactgtaatgattccaatgggatttgcaatgcatctcgaagacgagagtttggctgctttggtcgttccaagatcaggtcttggttcaaaacatggaatagtgcttggtaatctaattggattgatagattctgactatcaaggtgagcttatggttccagcatggaatagatcagaacaggaatttgaaattaattctggtgatcgaattgcacaaatgataattgtgccaattgtccaagcagatttcgagatagttgaagattttgaaaaatcagagagaggtactaagggctttggaagttcaggtatagattagc

SEQ ID NO: 268070 - DNA, 451 bp, Unknown
  Bacterial polypeptide expressing nucleotide sequence isolated from the Sargasso Sea
atgctagataaagttcaaataaggatagtaaacaacttagttaaatcaataccaacatatgctaccaaaggttctgcgggtttagatcttcgtgctgcagtgatagataagattcatcttaggcctaatgaaacattacttattccaacaggtttatcaatttttattgaagataaaaactacgcagccactttacttcctcgctccggtctcggacataaaaatggtattgtacttggaaatctagttggactaatagattcagattatcaaggagaacttatgatatcttgctggaatagaggtaaagaaagctacttcatagaaccaatggaaagaatagcgcagatggtttttatcagagttgagcatcccgaatttgaaattgtcgaggagttccaaaacacagatagaggagataagggctttggatcatcaggaacaaaataat

SEQ ID NO: 268071 - DNA, 439 bp, Unknown
  Bacterial polypeptide expressing nucleotide sequence isolated from the Sargasso Sea
atgacaaaagttttaattaaaaaaatacattcaaaagctgaaattccatcatataaaacggtaggagcctctggtgttgatttaatcgcttttattgaaaaagaagtgcttattagtcctggaaggtcagatatgatacctacgggtatttcagttggtattccaaaaaaccatgaattgcaaataagaccccgctctggactagcagctaagtcacaaataagtgtgctcaatacacccggaactatagactctgattacagaggagaaataaaagtaattttatttaatcatggtaaatcagattttttagtaaaaaatggagatagaattgctcagatggtattagtcccaatattaaaaatagattttttagaggttgatgatttacctgaaaccataagaggtgatgggggttttggatcaactggtaaatgaa

SEQ ID NO: 268072 - DNA, 439 bp, Unknown
  Bacterial polypeptide expressing nucleotide sequence isolated from the Sargasso Sea
aatggttaaagttttaattaaaaaacttaattcaaaggttcagttacctaaatataaaactgatggttcttctggaatggatttaatggcattcttagaaaacccaattaatcttaaaccacagagatcagaaattattcccactggaatatcaattgcaatacctgaagatactgaggtccagatcagaccaagatcaggacttgcagctaaatcaaatataagtgttttaaatactcctgggacaattgatagtgattacagaggtgaaataaaaattatattatttaatcatggcaaagaggattttgttataaataataacgatagaattgctcaaatgataataatgccaattgtaaaagctgaatttgaagaggtagaaaatttaccaaagaccttaagaggctctggaggttttggatcaacaggtaaatga

SEQ ID NO: 268073 - DNA, 439 bp, Unknown
  Bacterial polypeptide expressing nucleotide sequence isolated from the Sargasso Sea
atggcaaaagttctaatcaaaaagttagcttcatctgttcaattacctacttataaaactagtggagcttcaggcatggatttgatggcttttatttctgaaccaataattcttaaacctcaattttcttgtttaataccaactggtatttctgttgcattttcagaggaattcgaaatacaaataagaccaagatctggtttggcagctaaaaataatattaatgtattaaatactcctggcacaattgatagtgattataggggtgaaataaaagttattctctttaaccatggaaataaagaatttataatcaataataatgatagaatagcacaaatgattttgacaccagttgttaaaatggaattagaagaaacaaaaactttgccagaaacaattcgaggagagggtggatttggctcaacaggaaaatgag

SEQ ID NO: 268074 - DNA, 424 bp, Unknown
  Bacterial polypeptide expressing nucleotide sequence isolated from the Sargasso Sea
ctgattggaagcaaaattcctttaccaaaatatgaaacaaaaggttcagctggactcgatcttcgcgcatgtttagacaagaaattagttttaaagcctggaacaacaaatatgattcctatgggatttgccatgcacttggatgataaaaatttagctgcgcttgttgttccaagatctgggttgggctcgaagcatggtattgtcttaggcaaccttgttggccttatagattcagattatcaaggtgaattaatggtaccggcgtggaataggtctgaaattgattttgagatccatccaggagacagaattgctcaaatgattatagtgcctgtaatgcaagcaaattttgaaatcgtagaagaatttacacagactgcaagaggaacaaagggttttgggagttcaggcttaaattgaa

SEQ ID NO: 268075 - DNA, 445 bp, Unknown
  Bacterial polypeptide expressing nucleotide sequence isolated from the Sargasso Sea
atgattgatattaaagtaaaaaaaatagatgactgtgtcgatcttccagcgtacgagacatcgtcaagcgctggaatggatattagagcattcctaccaaatggaaatattgatattgctcctcaacaaacaaaactaattgggacagggttgatttttgaaatacctgatggtctcgaggttcagatcagacctcgaagtggactagcgttaaaaaactcaattactgttttaaatagcccagggaccattgatgcagattatagaggtgaaattaaagtaattttaattaatcatggatcgaacaattttgaagttaccaataaaatgagaattgcacaaatggttgtgtcaaaatatgaaaagattaattttaaattagtaagcgatttaaatacaacaaagagaggaagtggtggttttggatcaacgggaacaaagtgat

SEQ ID NO: 268076 - DNA, 439 bp, Unknown
  Bacterial polypeptide expressing nucleotide sequence isolated from the Sargasso Sea
atggcaaaggttttaattaaaagattaagttcgaaagtagagttaccaaagtataaaacagaaggttcttctggactagatttaatggcctttattgaaaaatcaataaagttaaacccgaacgagtcagtattagttcccactggaatttctgtcgcaatagcagaagatttagagattcaaataagacctagatctggacttgcggctaaatctaatatttctgtccttaatacacctggaacaatcgatagtgattatagaggtgaaataaaagtaatattgttcaatcacagtaataatgaatttataataaataataaagatagaattgcacaaatggttttagctccaatcattaaagcagagtttgaagaggttgatgaattacctgatacaataagaggtgaaggtggctttggatctacaggtaaatgaa

SEQ ID NO: 268077 - DNA, 442 bp, Unknown
  Bacterial polypeptide expressing nucleotide sequence isolated from the Sargasso Sea
atgacaaaaatattaattaaacctttttctaaaaaagttttaatccctaaatatgaaacttcaggttcatctggtatggatatatctgcatttatagaaaaaaacatagaaattaatccaggagaaaaggctttaatatcaactggtttttctgtttctatcccaaaaggttttgagattcagattagacccagatcaggtcttgcagcaaaaaaaggtataagtgtcttaaatactcctggtacaattgatgcggactataggggggaaataaaagtaattttgatcaaccttggtaaagaaaaatttattgtggaaaatggattacgaatagcacaaatgattgtttctcctgtaattcaagcagaactagaagaggtaaatgagctctcagaaacagtaagaggaactggggggtttggttcgacaggcactaaatagt

SEQ ID NO: 268078 - DNA, 445 bp, Unknown
  Bacterial polypeptide expressing nucleotide sequence isolated from the Sargasso Sea
tatggctaaaattttatttaaagtattggaaaacggaaaaggactttataaccttaaaaaagcaacaaaagatagcgctggatttgatttagttgcggcagtatctgaagatcaaatactgaaaaaaaatcaaactgttttaataccctgtggattttctattgaaatgcctgagaactatgaggcacaagtaagaccaaggtcaggtattgctcttaaaaattcagtgactgtattaaattctcctggaacaattgatgctgattacagaggggaaattggagtaatattaatcaatcatggtacaaaagaatttataatatctcgaggaatgagaattgctcaaattatttttgcagaattgcctaaagttaagttggaggaggtaaaaaaactaaagtcaacaaaaagaaatacaggtggattcggttcaacaggaacctaa

SEQ ID NO: 268079 - DNA, 299 bp, Unknown
  Bacterial polypeptide expressing nucleotide sequence isolated from the Sargasso Sea
aatgcatgttgaaataattaataagtccaataacccaaatccagaatatcaaactgatcagtcagcgggtatggatttaagagcttatttagaaaaaaatgaaaacattgccccaggtgaatataaacttatacctacagggatatatattaaaataccacgtggttatgaggctcaagttagaccaagaagtggcttggcattaaaaaaaggaataaccgttttaaactctccaggaacaattgattctgattacagaggagagattggagtaatactaatcaatcattcagctgttg

SEQ ID NO: 268080 - DNA, 433 bp, Unknown
  Bacterial polypeptide expressing nucleotide sequence isolated from the Sargasso Sea
attgaacccacttataggtaataaaatacctgttcccaaatatgagacaaaaggttctgcaggtttagatcttagagcttgcattaaagaaaaactaatattaaaaccaggtaagactgtaatgattccaatgggatttgcaatgcatctcgaagacgagagtttggctgctttggtcgttccaagatcaggtcttggttcaaaacatggaatagtgcttggtaatctaattggattgatagattctgactatcaaggtgagcttatggttccagcatggaatagatcagaacaggaatttgaaattaattctggtgatcgaattgcacaaatgataattgtgccaattgtccaagcagatttcgagatagttgaagattttgaaaaatcagagagaggtactaagggctttggaagttcaggtatagattag

SEQ ID NO: 268081 - DNA, 439 bp, Unknown
  Bacterial polypeptide expressing nucleotide sequence isolated from the Sargasso Sea
atggcaaaagttcttattaaaaagttatcttcttcagttgaattacccaattataaaacagatggcgcatcagggatggatttaatggccttcataaaagaaccaataacccttaaacctaattcatcatgtttggtaccaacaggtatttcagttgcattttctagtgattttgaaatacaaataagaccaaggtcaggtttagcagcaaaaaataatataagcgtgttaaatacaccaggaactatcgatagtgattatagaggagaaattaaagtgatactttttaaccacggtaatagtgattttttaattaacaacaaagatagaatagcacaaatgattttaactccagttataaaaatggatcttgaggaaacagaaaatctccctgaaacaattagaggagagggtggatttggctcaacaggaaaatgag

SEQ ID NO: 268082 - DNA, 364 bp, Unknown
  Bacterial polypeptide expressing nucleotide sequence isolated from the Sargasso Sea
aatggatttaatggctttcataaaagaacctataactcttaaacccaattcatcatgtttagtacccactggtctttcagttgctttttctaaagattttgaaatacaaataagaccaagatcaggtttggcagcaaaaaatagtataagtgttttaaatactccaggaactattgatagtgattatagaggagaacttaaggtaattcttttcaatcatggcaataacgattttttaattaacaataaagatagaatagcacaaatgattttaactccagtagtcaaaatggatcttgaagagacagataatcttcctgaaacaattaggggagaaggtggatttggctcaacaggaaaatga

SEQ ID NO: 268083 - DNA, 439 bp, Unknown
  Bacterial polypeptide expressing nucleotide sequence isolated from the Sargasso Sea
atggcaaaagttctaatcaaaaaattagcttcatctgttaaattacctacttataaaactagtggagcttcaggaatggatttaatggcatttattactgaaccaataattcttaaacctcaatcttcttgtttagtaccaactggtatttctgttgcattttcagaggaatttgaaatacaaataagaccaagatctggtttggcagctaaaaataatattagtgtattaaatactcctggcacaattgatagtgattataggggtgaaataaaggttattctctttaaccatggaaataaagaatttataatcaataataatgatagaatagcacaaatgattttgacaccagttgttaaaatggagctagaagaaacagaaactttgccagaaacaattcgaggagagggtggatttggctcaacaggaaaatgag

SEQ ID NO: 268084 - DNA, 439 bp, Unknown
  Bacterial polypeptide expressing nucleotide sequence isolated from the Sargasso Sea
atggcaaaagtgcttataaaaaggttagatccagctgtaaaactacctgtgtataaaacaaatggtgcatctggaatggatcttatagcatttataaataaacctataaatataaaaccaaaaacatcatctttaattcctacaggactatctgtcgctttttcaaaagattatgaaattcaaataagacctcgatctggcttagctgcaaaaaataatattagtgttttaaatgcacctggaacgattgacagtgattatagaggagaaattaaagtaatactttacaatcatggaaataatgactttgccattaataatggagatagaattgcacaaatgattttagctcctgttgttaaaatagaattggaagaaacaaacaatttaccagaaacaattagaggaaagggtggttttggttcaacaggtaaatgag

SEQ ID NO: 268085 - DNA, 439 bp, Unknown
  Bacterial polypeptide expressing nucleotide sequence isolated from the Sargasso Sea
atggcaaaagttcttatcaaaaagttagaccctgcggttgaattacccgcttacaaaacagaaggtgcatcaggtatggatttgatggcattagtaaaagaacctattaatcttaaaccaaactcatcatgcttagtaccaacagggcttgctgttgcattttcaagtgatttcgaaatccaaataagaccaagatctggtttagctgcaaaaaacaacattagtgttttaaatacacctggaactattgatagtgattacaggggagaaataaaagtaatcctttttaatcacggaaaaagtgattttttaataaataataaggatagaatagcacaaatgattttaactcctgtaattaaaatggatcttgaggaaactgatgatctaccagaaacaattagaggagaaggtgggtttggctcaacaggaaaatgag

SEQ ID NO: 268086 - DNA, 451 bp, Unknown
  Bacterial polypeptide expressing nucleotide sequence isolated from the Sargasso Sea
atgctaagtgaaataaaaataatattaatagataaacatcttgaaaaaattccatcatattcaactccagggtcagctggtctagatttgagagcatctctagaatctgatcttgtgcttaatcctaatcaaaccgaattagttccgactggaatttcaatatatatagagaaccaatcacacgctgccttaatcctccctagatcaggactaggacataaacatggaatagtattgggcaatctagtggggttgatagactcagactatcaaggtcaattgtttgtatcatgttggaataggagttctgtaaagtataaaattgaaccatatgataggattgcgcagcttatttttataaatattgaacaacctaagtttaaagtagttgatagttttgaagaatccactagaggtaaaagtggatttggttcatcaggaaagaaataat

SEQ ID NO: 268087 - DNA, 433 bp, Unknown
  Bacterial polypeptide expressing nucleotide sequence isolated from the Sargasso Sea
attgaataaacttattggcaatgaaatacctatacccaaatacgagactaaaggttctgcaggcttagatcttagagcatgcataaaagataaattaatactgaaaccaggaaaaactgaaatgattccaatgggatttgcaatgcatcttgaggatgagaaattagcagctctggttgttccaagatcaggccttggttcaaaacacgggatagtgcttggtaatttagttggattgatagactctgattatcaaggtgaattaatggttcctgcatggaatagatcaaagaacgaatttgtaattaattctggcgatcgaattgctcaaatgataatagtgccaatagttcaagcaaattttgaaatagttgaagatttcgaaaaatcagaaaggggtactaaaggttttggcagttcaggtatagactaa

SEQ ID NO: 268088 - DNA, 460 bp, Unknown
  Bacterial polypeptide expressing nucleotide sequence isolated from the Sargasso Sea
atgaaaacaccgattgaattaaagatcctcgattcccgtattggctctgaattcccgctgcctgcctatgccacaccaggcagcgcaggcatggatcttcgcgccatgatagataccaccatgacgatagccccgggagaaactcagttaatcccaacgggtatcgccatccatgtagcagatccaggccttgcagcagtgattttaccgcgttcaggccttgggcataagcacggtatcgtccttggaaatctggttgggcttatcgattcggattatcaggggcccttaatggtctcttgttggaaccgcagcgataccccatttaccttagaaatcggtgatcgtctcgcacaactggtgtttgtccctgtggtacaagcacaattcaaactcgttgatgagttcgatagctcagaccgtggtgaaggtggatttggccattctggcactaaataac

SEQ ID NO: 268089 - DNA, 451 bp, Unknown
  Bacterial polypeptide expressing nucleotide sequence isolated from the Sargasso Sea
atgcttaaaagtattaaacttaaaatcttagacaaaaatctcagtaaacttcctagtttttctacattaggttcggctggtctagatttgagagcgtctcttacttctcccttgattgtaaaaaagcaaaccacagaacttatccctacagggatagctattcatataaataataataattatgcaggcataatactacctaggtctggtttaggtcataagagcggcatagtacttggcaacctagtaggactgatagattcagactatcaaggtgaactaaaaatatcatgctggaatagaagtaataaagactatgaaatagagccgtatgatcgaattgcgcagttggtttttataaatgtaaatcaaccagactttgatgtcatagaggattttgagaacagtgaacgaggtgaaagtggttttggttcatctgggaagaaatagg

SEQ ID NO: 268090 - DNA, 745 bp, Unknown
  Bacterial polypeptide expressing nucleotide sequence isolated from the Sargasso Sea
aggcccggggcaaatgccaccgggctttttttatttgtcatgattttgcgttactcttgcaggtcgttgagatacagggaacgcgttatgaaaaaaacgggctatagactactggccgttgtcgttattgttgcggcagccggttttggctactggaagctggccggaaacccggatgcgttgcgtaaaattgtccttgagcaatgtctgcccaatcagttgcagcatcaaaaccctgcgccatgcgccgaagtgaagcccggtgccggatacgtggtcttcaaagaccgcaatggcccgctgcaatatctgctgatgccgacttaccgcattaacggcaccgagagtccgctactggtggaacaatacacgccgaattttttttggctggcctggcaatctcgcgactttatgagcaagacgtatggtcaggatattccggacagcgtcgtgtcgctggcaatcaattcgcgcagtggacggacgcaaaatcatttccacatccatatctcctgcctgcgtcctgatgtcagagcgcaactggacgcgaatcaggcaaaaatcagcacccgctggttgccgctgccaggcggactgcgcgggcacgaatatcttgcccgtcgcgtgacggaaagcgaactggcgcagcgcagtccgtttatgatgctggcagaagaagtgccggaggcgcgcgagcggatggggagctatgcgctggcgttggcccgtcaaagcgatgacactt

SEQ ID NO: 268091 - DNA, 556 bp, Unknown
  Bacterial polypeptide expressing nucleotide sequence isolated from the Sargasso Sea
aatgacttttgatttttttgagattcttctgctttcaacaattcagggtatatcggaatttattcccgtaagttcctcggctcatttatttcttatttctgatttttataattttaaggttcaatcattacttacagatattggtttacatttaggttcactattagcgataattacttactttcactcagacttaagcaacatttttaaaaataaaaatttacttttacttataatatttggttcattaccagtcattatagtaggagtcataatttaccaaacgaatttaataacgtatttgagaaatattgaaataattgcttggacaacattagtttttgcaattttattatattttgcagataaagttaaagtaaacaaaaaattaaatgcaaaattaaatttaagcactatcattattattggttgctttcaaatattagctctagttccaggtgtaagccgatctggaattgtaattacagcaggtagatttctgaagtttaatagatatgactcgacaaaaatttcattttatctttctattccagca

SEQ ID NO: 268092 - DNA, 769 bp, Unknown
  Bacterial polypeptide expressing nucleotide sequence isolated from the Sargasso Sea
aatgatttcaaaatatatagaagcatcaatattagcattcatacaaggatttaccgaatttatccccgtaagttcatctgctcatctcattatcatttcaaaaatttctaattttaatattagctcacttcaactagatataagccttcatctagggtcgcttttagcaattattttttattttagaaaagatttaataaatattactaagaataaatctttattccttttgatagttttaggatcaattccattaattatttttggctactttttttattcatcaggtttaattgaaaatttaagaaatttaaaagtaatagcttggactactttaatatttggcatattattgtttattgcagacagatctacaataaaaaataaaatcagtaataacttaaatcttaaaaatattttactaataggtatttttcaagtattggctattatacctggagttagtagatccggaattataattactgcatcaagatttttaaattttgatagagtagactcttctaaaatatccttttacttgtccatacctgcattagctggagcaagtgtactaagtatgaaagatattattaatacaaatatagatatgaattttttgtttatatttgcagtcttattatcatttgttgtttcttatttaacaataaaatattttttgatttatgtaaggaattttaatttaaacctttttgtttattacagaacatttcttgcattaatactttttgtaattgcatattcttaa

SEQ ID NO: 268093 - DNA, 301 bp, Unknown
  Bacterial polypeptide expressing nucleotide sequence isolated from the Sargasso Sea
aatggaaaacttttttcagatttttgtcatatcaattattcaaggtattactgaatttttaccagtaagttcttcagcacacctaaatttaatttcaaatttttttgagcttcagaaagaatccctaatgctgaatgtaagtgcacatacgggttccctgttagctgttttattattttttaaaaaagagattgttgattttggaaaaaatcaaaaattattttttagaattatttttgcctcaataccattatttttattcggttatttgatagttaaatataacttagtatctgattaa

SEQ ID NO: 268094 - DNA, 726 bp, Unknown
  Bacterial polypeptide expressing nucleotide sequence isolated from the Sargasso Sea
caatctctagttctgctcatttattgttcccaacactaatatttggttcaaatgatttaggattatattttgatatttcagttcatgccggaacattgatagcagtagtttattattttagaaatcaaatctttctgatgagtaaatcacttcttgtaactaatagttttaatgaagataaaaacttagcaatacaattaataacagccactataccaatagttatcttaggatttatttttagagatttaattagccaaaggatatttagcattaatgatattgcaatttcaaacttaatctttgcatcaatattgctttttgcttatctaaataacaaaggtaaaaaaactctcattaatataactatcttaggcgcatgttttattggattatttcaatgttttgctttgatacctggcgcttcaagatctggagcagcaatcacggcaggtcttttgattggattaagtctaaaagatgcttcaaaatttgcatttttgcttgcaattccaactattcttggcgcattaactttacttatttttgatttaaataatggaaatgttagttttgacctacttaatataagcatcggtttttttacatcaatgatttttgcttttttcacaataaagttatttcttaagcttgttgaaaaaataggaatgattccttttgttgcatacagatttttgcttggcatacttttattgataatttaga

SEQ ID NO: 268095 - DNA, 653 bp, Unknown
  Bacterial polypeptide expressing nucleotide sequence isolated from the Sargasso Sea
cataccaagaaagatattgcttggcatcttaggtgtcgaaacatatttggaaagaattcagggaggctacaaagtcatggactctctttatacccttgctactggatatcctccaagagcaaaattcttcagaagcgagctgatcaatcttttttacctttgcagagaagaagatttttcgatacttgatataaagggctcatatgccggtgcaatgggcgcagctcaattcatttcttctagttatagaaactatgctgttgatgggaatgatgatggaaaaattgaccttttcaataactgggatgatattctgatgagcattggaaattacttaaaacaaaatggatgggatgcgtcaaaacagatatacagccgctatgccgcaaatgaaatgcaagtttcaaaactttcatcaaaaaccatcaaaccaacatcaacaattcaagatctcctaagtcatggtattgacattgatggctttaatgacgacgacatagcacaattaattcaattggatgatcaggatttagggagtgattcttatattggccatcataacttttatgttataaccacttataatcgaaatgtgatgtatgcattggttgtgattcaactgggagaggcaatcgaaagttatctgaattaat

SEQ ID NO: 268096 - DNA, 378 bp, Unknown
  Bacterial polypeptide expressing nucleotide sequence isolated from the Sargasso Sea
atttagatattaaagcagctttgataataggctttttgcatattttttctttgataccaggagtaagtcgatctggaatagccatgactgctgcaagatttcttaaatttgatagagtaaatgcagctagaatttcatttcttttatcaattccaacattactagcagtatcagtttttggaatttacaatatttataaaactgatagtttcgatttaattaaactcaattttagtagcataatattatccttcattttttcttacgtcacaatagtagtttttttgggttatattaagaaagcgagtcttgacgtttttgttttgtacagaatagttcttggtgttttaattcttatatttgcttatcaaggttaat

SEQ ID NO: 268097 - DNA, 412 bp, Unknown
  Bacterial polypeptide expressing nucleotide sequence isolated from the Sargasso Sea
aagtgataaatttaaattagaaaaaaatatcaatacaaattttgattataaggcagcattgataattggattttttcaaatgatttctctcataccgggagtaagtagatctggtattactataactgcagcgagactactcaaatttaaaaggtttgatgccgcaaaaatttcttttttactttcaattcctaccttagcagcagtatcattttatggattaagcaatatcattaaaacagaggatctaagcttttccttagcaaattttgtttctataattttttccttttttttttcacttttaacaattaagttttttttgaagtatattcaaaagtttaatctgagtttaattgttggttacagaatgctattgggtttacttcttcttttcctggcatatttataa

SEQ ID NO: 268098 - DNA, 769 bp, Unknown
  Bacterial polypeptide expressing nucleotide sequence isolated from the Sargasso Sea
aatgatttcaaaatatttagaagcatcaattttagcatttgtacaaggtttttcggaatttataccggtaagttcctctgcccaccttataataatatcaaaaatatcgaactttagtattagttcgcttcaacttgatatcagtctccacttaggttcccttttggcaattattttttattttagaaaggatttagtaaatattttaagaaataagtctttattattacttataattttagggtcttttccattagttgttgttggttattttatttatacctcaggactgattggaaatttaagaagtttaaaagttatagcatggacgactttaatatttggtattttattatttattgcagaccgatttagtattaaaaataaaattgataccaatttaagtttaaaaaatattttaatcattggtatttttcaaattttagctgttatacctggtgtaagcagatcaggtataataattacagcttcaaggtttttaaatttcgatagagtagattcttcaaaaatatctttttatttatcaatacctgcattagcgggagcaagtatacttagtttaaaagatgtgatgaatacaaatatagatttgaacatattatttttatattcaataatattttcatttatagtttcttatttaacaattaaatattttttaatttatgtaaaaaattttaatttaaatatttttgtttattacagaacttttcttgctttaattctttttgtaattgcttatagctaa

SEQ ID NO: 268099 - DNA, 217 bp, Unknown
  Bacterial polypeptide expressing nucleotide sequence isolated from the Sargasso Sea
tatgtatttttttccagttatcgcattagcaattattcaaggaattactgaatttttacctgtgagctcttccgctcacttggtaattgcctcagatttcattgaatttacttatgaaaacattgctcttgatgtcagtcttcatttagggactctgttggcagtaatagtttactttagatcagatattttattaatcataaatggggatcattga

SEQ ID NO: 268100 - DNA, 643 bp, Unknown
  Bacterial polypeptide expressing nucleotide sequence isolated from the Sargasso Sea
aatggaaaacatttttcatatacttttgatttcaataattcaaggaattacagagtttcttcctgtaagctcatctgcgcatgttaatttattatcaagaatatttggtcacgatgatattgaaataattataaacgtaagtgcacactttggttcattgattgccgtaatacttttctttaggaaagaaattttcgaatttactaaaaataaaaatctatttttaaatataattattgcttcgattccattaggtttggctggtttttttttaataaagcatgaaataattacaagcttaagaacttttgaagttattggttggtgtacgattatatttggtctgctcctgtatgtttccgataaatttgaacttaaacagaatataaagagtaattttggtcttaaaaatgctttaataatagggtttttccaaattttagctttgatcccaggagtaagtagatctggaattataataacaggttcacgttttttaaaatttaatagagttgactcagcaaaaatatcttttttgttgtctatacccgcattgggtgggtggagcctttacggtgtatacgacctaattagtagaggtgaccaattattaaatataggggcaattttaactgtaatgttt

SEQ ID NO: 268101 - DNA, 769 bp, Unknown
  Bacterial polypeptide expressing nucleotide sequence isolated from the Sargasso Sea
aatgatttcgcaatacattgaagttttaattttagcctctattcaaggtttttctgaatttattccggtaagctcgtctgctcacttaataatagtttctaaaatttataatttcaatgttggttctttacagctagatataagttttcacctaggctccttgtttgcaataatcttttattttagaaatgatttattaaacattacaaaaaataaaaaactattttcattaatattgttaggttcgttgccgttaatagttattggttatatattttttaaaacaggattaattgattattttagaaatttaaaaattatagcatggactactctaatatttggtttacttttatttattgcagatagatctcaaataaaacaaaaattgaatacaagacttagttataaaagtattctaatagttggtttatttcaagtgcttgctataatgccaggagttagtagatctggaatagttattaccgcttcaagatttttaaattttgatagagtagactccacaaaaattgctttttatttgtcaattcctgctttggcaggcgcaagttttttaggtcttaaagattcttttgaaacaggtgtagtgattaatttaatattaatttattcaattattttttcgtttgcaatatcctatttaacgataaaatattttttagtgtatgttaaaaatttcagtctaaatttttttgtttattatagaatatttttagcattaatactttttgtaatatcttataattaa

SEQ ID NO: 268102 - DNA, 344 bp, Unknown
  Bacterial polypeptide expressing nucleotide sequence isolated from the Sargasso Sea
attcgctcatcatttagccctcattcctggaacctccagatcgggaataaccatatcagctggacttttgttaggactagatagtaaaacagcttctaagtttagcttcttaatggctataccaaccattggtgccatagcctcatatcatcttctatcaactgacgtagagttcttaattcaatactttcaaattaatctaataggcttaattgtctcttttgtaattgcttatgcaactatagatttttttataaggtttattaatagaattggattcttacctttcattctttatcggattgctttgggtattttattgttttctttgatactctcgtgag

SEQ ID NO: 268103 - DNA, 439 bp, Unknown
  Bacterial polypeptide expressing nucleotide sequence isolated from the Sargasso Sea
aatgggtgcgcctcaattcatttcttccagttataggaactatgctgtcgatggtaatgctgatggcaaagttgatctattcaatagctgggatgatgtgctcatgagcatcggaaattatttaaaacaaaatggatggaatacctcaaaatcaatatacagtcgttacccaaccaatgaactcaaacatacaaatctggcatcaaaaacaattaagccaacatcaacaattcaagatctcctcgatgaaggaattagaattgatggttttgaaaaagacgacatagcacaattaattcgactggatggatttgacgaaagagatgatacttatattgggcatcataatttttatgttataaccacttataatcgaaatgtgatgtatgcattggttgtgattcaactgggagaggccatcgatagttatttggattaa

SEQ ID NO: 268104 - DNA, 353 bp, Unknown
  Bacterial polypeptide expressing nucleotide sequence isolated from the Sargasso Sea
ttttatcggatttttccaagttttgtctctaattcctggggttagtagatctggtataacaatatcggctgcgagactattaaaatttaaaagagtcgactcagctaaaatttcttttttattatctattcctacattaggtgctgtatctatattcggtcttaaaaatatagtaagttcaaatgatttagaattttcagttttaaatataatttctgtctttttatcatttgttttctcttttttaacaataaaattttttttgaaatatataaaaagttttagtcttaaaatttttgttatttatagattgatacttggtctatttatcttatttttttcttacctataga

SEQ ID NO: 268105 - DNA, 565 bp, Unknown
  Bacterial polypeptide expressing nucleotide sequence isolated from the Sargasso Sea
tttaataaattaaataaatctatctttataggtacaattccaattgtttttattggtggaattataaagctatttgttccaggattctctgattcatttttacgttcaaatctttcaatagctttagtatctatattgatgtctgtaataatgctttttgcagatatttcgactaataaatcaattaatttaaacaatcataaatatctaaacagtttatatataggtattgctcaagcccttgcaattttcccaggagtatctcgttcaggagccactatttctatggctcttttatctggatggaatacaaaagatgcagctaaattttcattccttcttgggattccttcaatctcattagcagcttttgttgagttttttagtgtagtaaatcaattctcagcatttccatttcttccactttctgttggattaattacaactttcttctcttctttactagctattgattttttaataaaatatttttcttctaatggacttaaaatatttgtttattatcggttggtattcggaatcttgattcttttcaatttatagt

SEQ ID NO: 268106 - DNA, 697 bp, Unknown
  Bacterial polypeptide expressing nucleotide sequence isolated from the Sargasso Sea
cttgtcactcttagaagcgctgatacttggagtcattcagggactcaccgaattcctaccagttagcagcagcggacatctagagcttgggaaattcttactgggcgacaacagtatgccccgcgaaagtatgatgtttactgttgttcttcacttcgcgaccgccctcagtaccctgcttgtatttagaaaagaagttgcatcgatactcatgggactgcttgaatttagaaacaatgagccctttcaattttcactgaaaattctgttaagcatgataccagccgggcttgtcggatttttctattctgaacagctagaaagattgtttgataagcaaatactactggttggtctcatgttgctggtaaccggtttactcttatttgtcgccgatcggtcccgtgacaccgataaagacgtgtctttttttcacgctttcgtgttgggcctcgcccaagcaatcgccattctccccggaatttctcgctcaggcgcaacgatatccacagccgtgctgttgggtatcgatcgaactaaagcagctagcttctccttcctgatggttatcccgctgattttagggaaaatcacaaaagatttactcgacggtgctctagcattgaaagacgaccagcttttaatattgattgggggggttcacggctgcttttcttacaggcatcgttgcctgtaa

SEQ ID NO: 268107 - DNA, 433 bp, Unknown
  Bacterial polypeptide expressing nucleotide sequence isolated from the Sargasso Sea
atggattatattcaagctatcattttagcaattattgaaggaataaccgaatttcttcctgtttcttctactggtcacatgattattgcctcttcattttttggcattgcacatgatgattttaccaaattatttacgattgtaattcaactaggaactattttatcagtagttgttttatatttcaaacgcttctttcaaaccttagatttctactttaaactatttgttgcgtttattccggcggtagtttttggattattgtttagtgataaaattgatgctttattagaaaacccaataaccgttgctgtttcattgattatcggaggagttatactgttaaaagttgatgaatggtttgcaccgaaagaagaattacaagcaaccgaaaacattagttatttaacagcctttaaaataggaatgtttc

SEQ ID NO: 268108 - DNA, 742 bp, Unknown
  Bacterial polypeptide expressing nucleotide sequence isolated from the Sargasso Sea
atgatttcaaaatatatagaagcatcaattttagcgtttgtacaaggtttttcagaatttattccagtaagttcctctgcccaccttataataatatcaaaaatatcgaactttagtattagttcgcttcaactggatatcagtcttcacttaggttctcttttggcaattattttttattttagaaaggatttagtaaatattttaagaaataagtctttattattacttataattttaggttcttttccattagtggttgttggttattttatttatacctcaggactgattgaaaatttaagaagtttaaaagttatagcatggacgactttaatatttggtattttattatttattgcagacagatctagtattaaaaataaaattgataccagtttaagtttaaaaaatattttaatcattggtatttttcaaattttagctgttatacctggtgtaagcagatcaggtataataattacagcttcaaggtttttaaatttcgatagattagattcttcaaaaatatctttttacttatcaatacctgcattagcgggagcaagtatacttagtttgaaagatgtgatgaatgcaaatatagatttaaacatattatttttatattcaataatattttcatttatagtttcttatttaacaatcaaatattttttaatttatgtaaaaaattttaatttaaatatttttgtttattacagaaacttttcttgcttta

SEQ ID NO: 268109 - DNA, 214 bp, Unknown
  Bacterial polypeptide expressing nucleotide sequence isolated from the Sargasso Sea
atggaaaatatttttgaagttttgattatatcaatagttcagggaataactgaatttcttccggtaagctcatctgcccatcttaacttactttcaaatttatttggttttcgagaggaagagttgttaataaatatcagtgcccacgtgggctctttatttgcagtaattttttttttcaaaaaaagaaattataagttttggaaaaaatcaa

SEQ ID NO: 268110 - DNA, 562 bp, Unknown
  Bacterial polypeptide expressing nucleotide sequence isolated from the Sargasso Sea
attatcattgctaccgcagtcactggtattttggccttgtcggctaaacatcttggagaaactgttggtcgacttcctttagttattggaattaatctaattttatttggtctttttatgttcggagctgacttcattgcttctcaaagagagcttaaaagtaaacatgaaaacgagagtcgaaaggaagatatttttcagcagattcgagttaaagagtcgatttttgtcgggctttttcaggcgatggccatatttcctggagtgagcagaagtgggtcgactttgtctataatgcgtatgatgagtatctctcgtagcgaagctgctagtttttctttcattttaagtttacctattatttttataggtgcttttttaaagataggagaacttcaaggatcaattaatatctatgagttatttttgggtgttggagtgagttttatcgtaggaattattaccattcacttttttcttcaaatgattaaaaaaattggacttggtatattttgtttttatcgaatcatactcgcgatcgctattttttattttttataaa

SEQ ID NO: 268111 - DNA, 948 bp, Unknown
  Bacterial polypeptide expressing nucleotide sequence isolated from the Sargasso Sea
aatttctcaaaacaaaacgacaatttatatttgtaaatacaagagcgcaatcagaaattttgtttcaagaaatttggaaaatcaacgaagagaatttcacgatagccttgcatcatggttctttatcaaaagagcaaagattaagagtagaaagtgaaatgtccaaaggacatttaaaggcagtaattgcaacatcatctcttgatttgggaattgattggaacagtgttgatcatgtaatcaaccttggcgcaccaaaaggtgtgaataggcttatacaacgcattggcagatcaggacatagttataatagagtgagtagagcttctctaattcctacaaataaatttgaattactcgagtgtcacgcagctgtaaatcttgtgaataaggaacacttagacaagatagattattcagatggtgctctagaagttttggctcaattcttggttggtttatctttatcagcgccattagacccaggcttaacatatagaatagtcaaaaaagcttttccttataaaaatttaacaaaaaaggaatttgacgaaactttggattttgtttctacgggaggctattcactgagtgaatatggaaaattccatcaaattgtaaaaggcattgatggcaaatataggcctgcaaacaaaattctcaagacattatggagaatgaacgttggtactattgttgaagcagtaaatataaaagtaaaactaaaaggaggaaaattacttggcaatgtagaagaatactttgctcaatctctttcaaaaggtgatacattcattttttctggaaggatgcttgaattttttaaattagaaaaaaattctcttatagtcatcccaagtaataaaagtgaaccaaaagtaccatcctttgttggaggaaggcttccaatttcaagcacccttgctgaagaagtcagaataatttaga

SEQ ID NO: 268112 - DNA, 583 bp, Unknown
  Bacterial polypeptide expressing nucleotide sequence isolated from the Sargasso Sea
atgattgttaattactcagaaatttttattttatctttaattcagggtatatcagaatttctaccggtcagttcgtctgctcacctattcttagtatcgcatttacataaatttgaaaatgaatcacttttaattgatataagttgtcattttggttctctaattgcaattttattttactttagaaaagagttcaaaaatattcaaaaacaaaaaaaaataatacaattggttgtaattggttcaataccactttttatagtaggtctagttttgcatcaatcaggccagataatattgtttagaaatttaaatgttatagcatggactactggaatatttgcgcttttacttttttttgccgacaaattagagagtagaagaagaattgaaaaagatattaacttaaaaaatattttaataataggtttttttcaaattctagctttagttccaggtgtaagtagatctggaataataattacagccggaagatttttaaaatttaataggcacgagtctaccaagatttctttttacttatcaataccagcgatagcaggcgcaagttttttaggtttca

SEQ ID NO: 268113 - DNA, 687 bp, Unknown
  Bacterial polypeptide expressing nucleotide sequence isolated from the Sargasso Sea
catgatttcaaaatatatagaagcatcaattttagcgtttatacaaggtttttcggaatttataccagtcagctcctctgcccacctaataattatatcaaaaatatcgaactttagtattagttcgcttcaacttgatatcagtcttcacttaggttcccttttggcaattattttttattttagaaaggatttagtaaatattttactaaataagtctttattattactaataattttaggttctttaccattagttattgttggttattttatttatgaatcggggctaattgaaaatttaagaaatttaaaagttatagcatggacaactttggtatttggtattttattatttattgcagatcgatctagtataaaaaataaatttgatactagtttaaatttaaaaaatattttacttattggtatttttcaaattttagctgttatacctggtgtaagcagatcaggtattataataacagcctcaaggtttttaaattttgatagagtagattcttcaaaaatatctttttacttatcaatacctgcattagcgggagcaagtatacttagtttaaaagatgtggtaaatgcaaacattgatttgaacatattatttttatattcaataatattttcatttatagtttcttatttaacaataaaatattttttaattta

SEQ ID NO: 268114 - DNA, 683 bp, Unknown
  Bacterial polypeptide expressing nucleotide sequence isolated from the Sargasso Sea
tatgactgatagtagtattttttatgttttttacggtttaattcaaggaattactgaatttatccccattagttccagcgggcaccttaatatcatagcaatcttctttcaaagcttagaaaccagaaattatttatatgagacatcagcgcactttgcctcattattagctttattgtcttatttattctcaaacaaacatttttcaaaatcaaatatcaaagcttattggaaattattaatttatgcgactgttccagcaatccttctaggttttataattagattttacgatataaattatattagtttaaaaataattggttacacttcaataactggtgcaatattactttatatttcagataaagggaaaaaatttaaattaaaaattaaacataaaagcaccaaatttattttagctggattttttcaatgccttgcttttttaccaggttttagcagagcaggaagttgtataattgcattcagactatttggagaagatagaaaatattcatctatttatagtttatatatgggtataccaataatttgtttgtcttttttttccaatattaatgactttgaaaattttattatagataaaaatctgtgtttaatatttattactacattttttgcagcatacattacaatatctgtattaatcaaaatgataa

SEQ ID NO: 268115 - DNA, 562 bp, Unknown
  Bacterial polypeptide expressing nucleotide sequence isolated from the Sargasso Sea
aaaaataaacctctactttctttaattattatagggtcaattcctttaatggtgattggatacattttttacactactggaattgtagaagatttgagaaatttaaaaataattgcatggacaactcttacttttggtattttgctatattttgctgatcaaaaagaaattaaaaattctataagtaacgatttaagtataaaaaatattttaataattggtttatttcaaattttagcaattatacctggtgtaagtaggtcgggcattacgatatcggcatcaagatttttaaattttgatagagttgactcatcaaaaatttctttttatttatctataccagctttagcaggagcaagtgctttaagtatcaaagatgttatcaattcaaatataaattttgatataatatttttatattcaataatattttctttttttgtttcttatataactattaagtattttttaatttatgtaaaaaattttaatttaaatatatttatttattatagaatattcttggcacttattctttttataatcgcctacggctaac

SEQ ID NO: 268116 - DNA, 388 bp, Unknown
  Bacterial polypeptide expressing nucleotide sequence isolated from the Sargasso Sea
tttttattttaaaagtgagaacaaaaaaaatacaatcataaaatcatgtttgattggaatttctcaggctattgcaattatacccgggatttcaagaagtggcataactataagctttgcattgtttttaggattagacgcaaggcaagctgctaaattttccttcttgctagcaataccagtcattagtggtgcgggaattttaatggcaacagacttaagggatggttttagtatagatatatataccgctgcgtcgggtttaattacttcattctttgttggaatggttgcattaaagtggttgcttgcttggcttgagggtggaaagtttcattacttcggcatttactgttttttaattggaatttttattgtcattgcataa

SEQ ID NO: 268117 - DNA, 757 bp, Unknown
  Bacterial polypeptide expressing nucleotide sequence isolated from the Sargasso Sea
tcaaaatacgtcgaaacatcaattttagcgtttattcaaggtttttcagagtttattccggttagttcgtcagcacatctattgattatatcaaacctaaatgaatttaattatagctctttacagctagatatttgtcttcatttaggttcactaatcgcaataattttttatttcagaaatgaacttacaaaaatttcagaaaataaagaaatactgttacttataattttaggatctatacctttagtaattgttggatatattttttataaatctggaataattaatgaatttagaaatttgaaaattgttgcctggacaactttaatattcggaattttattatattttgctgacaatgcaaaaataaagaaaaagataaataatgatttaaatataaaaaatattttaattattagtatttttcaaatactttcattaattccaggagtaagcagatcaggaattataattactgcttcaagatttttaaacttcgatagaattgattctactaggattgctttttatttatctattcctgccttagcaggtgcaagttttttaagcatgagagatgttgcaaaaactaatgtggaatttgattttatatttatttttgggacttttttttcttttttaatttcttatttgacaataaagtattttttaatctttttaaaaaaatttagcctaaaagtttttgttttttatagaataattctatcaataattttatttttaattatttata

SEQ ID NO: 268118 - DNA, 318 bp, Unknown
  Bacterial polypeptide expressing nucleotide sequence isolated from the Sargasso Sea
catgatttcagatttttttcttgcacttcttcttgccttgattcaaggcctaactgaatttttaccagtttctagttcagcacatttattattcccatcattactttttggaactaaagactttggtattgttttcgatatatcagttcatgcgggaaccttggctgcggttatctattattttaaaaaagaaattcaaggattgttctatgcctggaatccattgaccaaaactaggagtaaagaagatttctctctggggatacaccttatcgtttgcactttacctattatcttggcttgggtttattctatccg

SEQ ID NO: 268119 - DNA, 707 bp, Unknown
  Bacterial polypeptide expressing nucleotide sequence isolated from the Sargasso Sea
tcttccgataagttcttctgcacatttaattttagtttcaagcttatatgaatttaaatctagctcattactaattgatatcagccttcatctaggatctctttttgcaatagtttattactttaaagatgagttattaaacataaataaaaataaaagactaataagtttaattgttattggatctattccattaataatctttggatatgttttatatactacagggttaatttacagcttacgaaacattgaaactattgcatggacaactttaatatttgcaattgttttatatatttcagacaaaagtcgctttgataaaaaaatttctacaaatttaaatattcaatcaattctatttataggaataatgcaaattttatctttaataccaggggcaagcagagcaggtattacaataacggctgcaaggattttgaaatttaatagagtggattcgagtaaaatatcttttttactatctatcccggctttaactggtgcaagtgtacttagtttaaaagatattttcaatcaaccaacagaatttaattatttggtaataattgcaattatatcttcttttattttttcttttttaacagttaaatattttttaatatttataaataagttttctatgaatgcatttgtaatttatagaataataattgcattagtattgtttagtttaatttattaaa

SEQ ID NO: 268120 - DNA, 532 bp, Unknown
  Bacterial polypeptide expressing nucleotide sequence isolated from the Sargasso Sea
atgctttcatcagtagaaatcttaattctttcaataatacagggtatctcagaatttttgcctgtaagttctgcggcacatttagttttgatctctaattattatgagtttgtaaaccagagtttattaattgatatctgcttacatcttggttctttaatagcaataatattatattttagaaatgacttaattcattttattaaaaataggagttttttaataaaaattttaataggaactattccaattattccagcaggttacatactttatcaaacaggattaataaatagtttaagaaatcttgaagttataggttggatgagcttagtgtttggagttgttttatatttaagcgataaatcaggttttaataaaaaaatagattcagactttaacaataaatctgcaattataattggcttatttcaagttttggcattaatacctggtgtaagtagatcgggaataacaattagcgcaggaagatttttaggctttgacagatttgaatctgcaaaaggtttcc

SEQ ID NO: 268121 - DNA, 550 bp, Unknown
  Bacterial polypeptide expressing nucleotide sequence isolated from the Sargasso Sea
aatgtttttgaagcattttttccttggattaattcaaggtctaacagaatttctcccggtttcatctagcgggcacttagaaatttttaaaaaaatttttggtgacatatatacaccccaagaaagttttttacttactctttcccttcattttgctacagctataagtactataatagtatttagaaaagatattgctttaatactaagagaattatttcagtttaaaaaaaatgaaagtttatccttttcaatttgtattataatatcaatgctcccagctgcttttattggccttttctatgaagattttataaatgatttgtttaaaggtaatttaattttggttggaagcatgctgcttataacttctttgttgctatttcaaacagatcgtaaaaaaataaatggaaaaaacatttcatatatatcagcattattaattggtttagttcaagcaattgcaatcttacctgggctatcaagaagtggagcgacaattgcagtagctataattattggggttaatagagagaaagcaagtcgtttc

SEQ ID NO: 268122 - DNA, 655 bp, Unknown
  Bacterial polypeptide expressing nucleotide sequence isolated from the Sargasso Sea
atgaaaaatatagaaatttttatatattcaattattcaaggcataacagagtttctaccagtatctagctctgctcatttatactttatacaagacatttataactgggaagataatgcactagtacttgcaataggtgctcatttaggtacttttcttgctgtaatggtatttaacaggaaattatttattaattttaaagaaactcatttacttccgtttgcactagctgccagtctacctgtaatattgatcggaggattaataggattattgaaatatgacaattttaaatctaatctctatataattgctttcgcatgtataataggtggagttttactagaattatcagataataaaaagaaaaataaaaatgaaataatcttaaaggaaagtataattgtaggtttatttcaaatattagctttaattcccggcatgagtcgctctggaacagtcataactgctatgcgctttttaggaattaatagaaaattaagtattactttttcccttttaacaggtattcctatattattagcagtaagtgtttttggtatttataagattgcagacttatctaacttaaattttataaaactttcctttatagtaataatttcatttttttccgcaataataactatacatt

SEQ ID NO: 268123 - DNA, 712 bp, Unknown
  Bacterial polypeptide expressing nucleotide sequence isolated from the Sargasso Sea
tttttaccaataagctcatcagcacatttaatattagtttctagtttgtatgaatttaaatcaagctctttattgatagatattagtcttcatttaggatcattatttgcaataatttatttttttagaagagaattattagatattaaaaataatcagagaatcttaggtttaattactttaggatcagttccacttataatagttggatattttttatataacacaggtattatttatagtttaagaaatattaaagtaattgcttggacaactttaatatttggaattattttatacatcgctgataaaaatcgttttgataaaaaaatttcagctaatttaaattttcaatcaattctaattattggattatttcaaatattttcattaattcctggtgttagtagagcggggattacaatgacagcagcaaggattttgaaatttaatagagtagactcaagtaaaatttcattcttactttcaattcctgcgctaagtggtgcaagctttcttggattgaaagatttatttgatcaatcagtagagtttaattatctagttataatcgcaattgtatcatcgttcattttttcttttgttacagttaaattttttttagaatatattaataaattctcaatgaacgcttttgtaatttacagaattataatagctttatttctattctttataatttatttttaat

SEQ ID NO: 268124 - DNA, 579 bp, Unknown
  Bacterial polypeptide expressing nucleotide sequence isolated from the Sargasso Sea
aatgtttgcaaatttcattgaagttttcttgctgtctgtagttcaaggggtttccgaatttataccggttagttcttcagctcatttatttttaatatctgaaatttatcaatttaaatctcaggctttgatgctggatattagtttgcacttaggatcgttattagcaataattttttactttcataaagatttatcaaatattcttaatgataaaaaattatttctattaatagtacttggttccttacctttaatagtttgtgggtttgtagttcttaaaactggaataataaataattttagaaatattgaagtaatagcttggatgacttttatttttgctatactcttatatgtggcagataaagttaaagtaaaaaaaaaattagaaaataatataaatattaaatcaattattataattggattatttcaagtcttagctttaattcctggtgtaagcagatcaggaatagtaataacagctggaaggtttattaagtttgatcgatatgacgcaacaaaaatttctttttatttatctatacccgctatagctggtgcaagttttttagg

SEQ ID NO: 268125 - DNA, 533 bp, Unknown
  Bacterial polypeptide expressing nucleotide sequence isolated from the Sargasso Sea
tactgtcccaattgttttgtttggtgggagcataaaattatttacaccttatttttttgaaaagattcttcgttcaaatttatcaatagcattagtttcgttcataatggctatatttatgtacctagcggaaatatcgaaaaaaggttctataaatttaaaaaatcataactattcagatagctttttgattggtgtttctcaagcctttgctattctacctggcgtttcaagatctggcattactatttctaccgctttagtaacaggttgggaaagagttgatgctgctaaattctcctttattttaggcatacctgctatatctattgctgcaattgttgagttcatttcttcttttgatgaactttattcatttagttttttccctctacttttcggactttttacgacatttctatcttcattatttgctatcgatttcttattaaaatatttttcttcaaatggtttgaaattatttattatctatcgggttgtattcggtgttgtaattcttttgaatttataat

SEQ ID NO: 268126 - DNA, 300 bp, Unknown
  Bacterial polypeptide expressing nucleotide sequence isolated from the Sargasso Sea
gatgatagaggttctgattctttctctgatacaaggcatcacagagtttttgccaattagctcctcctctcaccttattttagtttctgatttaataaattttgaggaacaaagtctatcaatagatgtaagtcttcatattggttcatttattgctgtgtgcacttatttctacaaagatttggtaaatttcacaaaaaaaagaattttattgataaaaattttatacgcttctttaccaattttatttattggttatttattaactgaaattaatttaatagaaaaacttcgtaatat

SEQ ID NO: 268127 - DNA, 709 bp, Unknown
  Bacterial polypeptide expressing nucleotide sequence isolated from the Sargasso Sea
atggatatcttaaacattataattttatctataattcaaggagtaactgaattcctgcctatttctagcagttcacacttaatcttgcttcctatgtttactgaatttccagatcagggaattatgtttgatgttgctctacatacaggctccctctttgcgatattaatttattatagaaatgaaattaaaaatatcttccaatttactgataatggtaagagttatactcgtttaattattataggctctatacctcttcctattgctgggttacttttaattgatctaatttcgctaaacctaagaagtattgaagtaatttctgtaatgacaataacttttgctttattacttttatatgctgataaccataataaaccctctaagctgattactaatatctcaaccaaaattattttaattatcggactatttcaaatattggcactcgtcccaggggtatcaagatctggaattgtaattactgcagcattgttgctaaattataatagaaatgatgcaataaaaattgcattcctattatcaattccagcaatttttatggcaagctcttataacttattgcaattatcttcaatgggtagtgtatctatattaagtgatcatttactaggcatggccctctcgctaatagtttcatacctcacaatttacttttttattagaacgataaacagaataagtt

SEQ ID NO: 268128 - DNA, 334 bp, Unknown
  Bacterial polypeptide expressing nucleotide sequence isolated from the Sargasso Sea
aatctatcttcaaaaaaatttattcaatatcttttaaatgaaagattaattagatccattttaattggtactttaccaattgtttttcttggtgggagtatgaaattatttgccccttatttttttgataacgttcttcgctcgaatttatcaatagcaatggtctcattaataatggctttttttatgtacttggcagatagctcgaaaagaggttctattaatattaaaaaccatagttattttgatagttttttgataggtttctttcaggcatttgccatttttccaggtgtttcaagatctggtattactatttcctgcgctctaatat

SEQ ID NO: 268129 - DNA, 600 bp, Unknown
  Bacterial polypeptide expressing nucleotide sequence isolated from the Sargasso Sea
aatgtttgagctccaatattttataattggtataatccaaggttttactgaatatttgccaattagttcttctggccacttagttttagtatcagaattaaccagttgggaagaccaaggcttgtttacagatgtggctgttcactttggaacattgttagctgtaattatttatctaagaaattatattctctcattaattataaatttttttacatttagatttagtaataataaaaatttagtaaatattattattgctactcttcctgcagttattgttggatattttatatttaattttgttcaaatttattttagagatttaagagttatagctattacaagtattgtttttgctgctttattatttttagcagatcattttaagatcaaaatatctaaatgggaaaatatgagctatgttcaagcatttattataggtatatttcaaattttagcgtttattcctggagcaagcagagctggagttactataactgcagcaagaatactaggttttgatcggtcttcatcagctattttttctatgctactatcaattccaattattttggcgtcggttgttctaacaagtat

SEQ ID NO: 268130 - DNA, 532 bp, Unknown
  Bacterial polypeptide expressing nucleotide sequence isolated from the Sargasso Sea
aatgatttctaattattttgagacttttattttatcaattgttcaaggaatttcagaatttattccagttagttcttctgcgcacttaattttaatatctgagcttagtaatttttcttctagctccttagtaatagatgtgggtttacatcttggatcactattagcaataatagtttattttagaaaagatctattaaatttttttaataataaaagtttagcattgctaataataattggctcacttccaataattgtaattggacttctattatatactagtggtctaatatactatttgagaaatatagaagtaatagcttggtctaccctattttttggaatacttttatattttgcagataatttcaaaattacaaaaaaatttaatgaaaacttaagcattaaaaatatatttgttattgggttatttcaaattcttgcattaatacctggagttagtagatctggaatagtaattactgctgggagatttttaaattttaatagatatgacgcatcaaaaatt

SEQ ID NO: 268131 - DNA, 445 bp, Unknown
  Bacterial polypeptide expressing nucleotide sequence isolated from the Sargasso Sea
gatgagcttaatatttggaatttttttatatattagcgataaaacaaaaataacaaaaaaaattgactctaattttacaaataaatcagcaatcgcaattggtatttttcaggttcttgctctagtacctggcgtaagcagatcaggtattacaatttctgctggaagattattgggttacagtagatatgaagctgccaaaatctcatttttattgtcaattccaacgcttgctgcagctagttttctaggaatttataatatttataatgaaggtagtgctgaattaaattttctagcaattattgcggtaatattttctgctattttttcatatgtatcaattgctatttttttaaattttattaaaaaatttacttttaatatatttgtgatttatagaatagtaatatctttatttttattaggaatagtttatttataa

SEQ ID NO: 268132 - DNA, 445 bp, Unknown
  Bacterial polypeptide expressing nucleotide sequence isolated from the Sargasso Sea
gatgagtttaatatttggaatttttttgtatattagtgataaatcaaaaataacaaaaaaaatttcagatgaatttacttacaggtctgcacttttaattggattatttcaaatagcagccttgattccaggggtgagtagatctggcatcacaatcacatcaggtagaatgttaggatttaatagattcgactcagctaaaatttctttttttttatcaataccaacactgttagccgctagtagtctaggaatttataacttgtataaggaaggagatgtcggacttaattttttagccataatatctacttttttttcatttgtcttttcttatattacaatagcgctttttttgaactttataaaaaagtttagcttaaatgtatttgttgtttatagaattattctttctttattaatattgatgttagtttacctataa

SEQ ID NO: 268133 - DNA, 739 bp, Unknown
  Bacterial polypeptide expressing nucleotide sequence isolated from the Sargasso Sea
tttagcgtttgttcaaggtttttcagaatttataccagtaagttcctctgcacacctcataattatatcaaaaatatcgaactttagtattagttcgcttcaacttgatattagtcttcacttaggttcccttttggcaattattttttattttagaaaggatttagtaaatatttttggaaataagtctttattattacttataattttaggttctttaccattagttattgttggttattttatttatacatcggggctaattgaaaatttaagaaatttaaaagttatagcatggacaactttggtatttggtattctattattaattgcagatcgatctagtataaaaaataaatttgataccagtttaaatttaaaaaatattttacttattggtatttttcaaattttagctgttatacctggtgtaagcagatcaggtattataataacagcctcaaggtttttaaattttgatagagtagattcttcaaaaatatctttttacttatcaatacccgcattagcgggagcaagtatacttagtttaaaagatgtggtaaatgcaaacattgatttgaacataatatttttatattcaataatattttcatttatagtttcttatttaacaataaaatattttttaatttatgttaaagattttaatttaaatatttttgtttattacagaacttttcttgctttaattctttttgtaattgcttatagctaa

SEQ ID NO: 268134 - DNA, 635 bp, Unknown
  Bacterial polypeptide expressing nucleotide sequence isolated from the Sargasso Sea
tatgatcgcagatttttttcttgcattgtttctttcattaattcaaggcttgactgaatttttaccagtttcaagttcagcacatttattattaccatcactcatttttggaacaaaagattttgggatagtttttgatatttccgtgcatgccggcactcttgcagcagtaatatattattttaaaaaagaaattcaaggcttgattcaagcctggaaaccatggacaaatgatcgagatcaacaaaattatttgttagggttaaacctattggtggcgactcttccaatcataattgttggattatttttttctgattttacagaatctagatttgctaatacaaactcaattgcttggaccaatcttatatttgctgttttgttatatgttgtttttaggtcctctgctcaatcaaaatctttagcagagttaactttgaccgctgccttaataattggttgctttcaggctttggctatttttcctggagcttcaagatctggtatggccataacaggagcattgcttataggtttaaatctaaaagatacctcaaagtttgcatttttattaagcattccaaccattttgggagccttggtgttaatgttttttaagggggcctactcat

SEQ ID NO: 268135 - DNA, 217 bp, Unknown
  Bacterial polypeptide expressing nucleotide sequence isolated from the Sargasso Sea
atggaaaatatatttgaagttgttgttatctcgcttatccagggtattacagaattccttcctgttagctcttctgctcacttaaatttgttatctaaattatttggttttaaagaggaagaattacttatcaatatcagtgctcatattggatcttttttggcggtaatttttttctttaagaaagaaattttaaattttggaaaaaataaaaaac

SEQ ID NO: 268136 - DNA, 217 bp, Unknown
  Bacterial polypeptide expressing nucleotide sequence isolated from the Sargasso Sea
atgatttcaaaatatatagaaacatcaatattagcattcattcaaggagttgctgagtttatccccataagttcctctgctcatctcattataatttcaaaggtttctaattttaatgttagctcacttcaattagatataagcctccatttagggtcgcttttagcaattattttttattttagaaaagatttattaaatataaccaaaaaataaa

SEQ ID NO: 268137 - DNA, 391 bp, Unknown
  Bacterial polypeptide expressing nucleotide sequence isolated from the Sargasso Sea
taaaagttttttaattaaaattcttgtaggaacagttccaataattcctattggatacatactataccaaaccggattgattgatcagcttagaaatttagaagttattggttggatgagtctaatatttggaattcttttgtatgtaagcgatcgatcaaaagttataagaaaagtcgaaacagattttaccaataaatcggcacttattataggagtttttcaggtaatctctttaatacctggggtgagtagatcaggaattaccattacctcgggaagattattgggatttaacagatacgattcagcaaaaatttcattttttttatcaattccaactctcgctgctgctagtattattggaatttataacgtatctaaagaagga

SEQ ID NO: 268138 - DNA, 652 bp, Unknown
  Bacterial polypeptide expressing nucleotide sequence isolated from the Sargasso Sea
gcagtaagtttgtattatagtaagcgaattttttcattactaatttctttaaggcatttagtccgaccagatattgacaaaaatgcaactttgacaattcaactaataatagcaactgttccaatattgctatgcggattctttttttctaaatattttaattatgatgataaaaaactcttattaataataggaataacaagtattttttttggtattgttctctttatttttgaccgattttgtctcactgttaagggaaatcaagagatgggcttcttaacatctttgtatgtaggtatttttcaatgtctagcattaattcccggcgtaagtagatcaggttcaataattatttttcttcgtttttctggatataatagaaattttgcagtttttttttcaaaccttttaagtataccagtaattttagcagcaactatcttcataacttaccaaaatcgagagatttttttactaactaattatttaaatttttattcaattggaatttttatatttagtctgattttttctttaatttttttacaatttttggtctcttgggtaagaagttcctcttttttaatttttgcaatataccgaatattatttggaagcgttttaatttacttattttttggatattaag

SEQ ID NO: 268139 - DNA, 200 bp, Unknown
  Bacterial polypeptide expressing nucleotide sequence isolated from the Sargasso Sea
tatgtatttttttccagttatcctgttagctattattcagggaattaccgagtttttaccagtaagttcttctgctcacttgatcattgcttcagatttcatcgaatttaatcataaaaccctagctctggatgtaagtcttcacttaggaactcttttagcggtaattgtttacttcagatcagatattttattgatta

SEQ ID NO: 268140 - DNA, 655 bp, Unknown
  Bacterial polypeptide expressing nucleotide sequence isolated from the Sargasso Sea
attttagaggtagcaacacatttaggaactttattaagtataattgcagtctttaggattgatattatttctttgattaatggattaaaaaataaaaagagtcagtattatgttatttgtttaataattggaaccattccagcgattgtttttggcttatttgttaaaatttttatattggatttgatagaaaatatttttgttgtaagtatttcattgtttatcactggattacttctttttaaatcgaaaaaaataaaaatcagatctttacatataaacttcaaaatcgctattttaattggtttatctcaagcagttgcagtttttccaggcatttcaagatctggtattacaatagtaacagcgctttatttaggcttaagtaaagaggaggctactaaattttctttttttttagcaataccagcaatccttggagcaggaatattaactttttttgatcaaaaaagtcttatcctcttatctagtcagccatcattttttgccttggcttcaatttcttcttttgtaactggattaattttcttgagttttttattaaatatcattcgtaaaggtaattttcatttgtttagttattactgtttttttgcttcagcaatatcattagttatatttattataaagtaaa

SEQ ID NO: 268141 - DNA, 769 bp, Unknown
  Bacterial polypeptide expressing nucleotide sequence isolated from the Sargasso Sea
atgttttcaaactttttcgaattaactattttatctgcaattcagggaatttctgaatttttgccagtaagctcatctgcacatttaattttagctaatgatatttcaaatctagggattggctcaatttatcttgatactggaatgcacctaggttctctgctagctgtaatcttttatttcaggaatgatttaaaaaaaattactaaaaataaaaaattattgtacttaatgatatttggttctttgccaacaatttttttaggtgcaattttatatattacaggattaataaaccttttaagaagtatagaaataattgcatggacaacttttttatttgctatcctactatgggttgctgacaaatttaaagttgaaaaaaaaatagacagtgatctaaatataatatcaattttgcttattggcttattccaaatgttatcacttatcccaggcgtaagtagatcagggattgtaatcacagctagtcgttttttaaattttgacagatttgaatcctcgaaaatttcgttctatttatctatacctgcaattgcgggtgcaagttttttaactttaaaagatttaggctcatcaattgttgataataatataataattttacttggagtatgcttttcatttattttttcctatctaacgattaaatattttttagcttatataaaaaaatttactctgtttgcattcgtaatttatagagttattttatcttttatattattttatataatttatatctgag

SEQ ID NO: 268142 - DNA, 415 bp, Unknown
  Bacterial polypeptide expressing nucleotide sequence isolated from the Sargasso Sea
atggattggctgcaggtcgtcatcctggcaattgttcagggcattaccgaatttcttcccgtttccagttctgctcacctgattctggtgccggtactgaccgattggcccgatcagggcctggcctttgacgtggcgctgcatctgggcagcctgtcggcagtgctgatctattttcgtcaggacatcatcaacatgctgcagagctggacgcgctcgctgcatacccgccagctggacgccgatgccaaactggcctgggcggtgattctcggcaccatcccggtggggctggccggcctgctgctgaaagataccgtggagacagtgctgcgttccccggtttacctgtcggtcgggctgattggctttggcttgctgctggggtgggcggactggcgctttcgcggcagcc

SEQ ID NO: 268143 - DNA, 436 bp, Unknown
  Bacterial polypeptide expressing nucleotide sequence isolated from the Sargasso Sea
ctggtgttcggcattctgcttggcattgccgactggctacccaagcgccagcgcaccatggactccctgaactggaaagatgccgtcgtcgtcggcatcgcccaggccatggccctggtccccggcacctcacgctccggcgtcaccatcaccgccggcctgttcctcggcatgaccagggaaaccgcctcgcggttttcgttcctgctggcgattccgattatcgtgctggcgtctgcggtgaagctgctggaagtggcctcatccgatgtgatcgtagactggaatggcttcctgattggcggcgtaacgtcgttcctgatggccatcaccgccatccacttcttcctgaagtggctcaacaaagtgggcatgtggccgtatgttctctaccggattgttctggctggtgtgatttacgcggttctgatgtaag

SEQ ID NO: 268144 - DNA, 556 bp, Unknown
  Bacterial polypeptide expressing nucleotide sequence isolated from the Sargasso Sea
atgaccatttttcacgttttcattttgtctctaatacagggagctactgagtttttgccagtctcttcatctgctcacttggttctttacaacaaatttgtaattggtctaaacaacgatttaagcctagacattgcgatgcatattggcagcctgttagcagttattttgttggtttccaaacccctgaaggaacatatgaacactgttttgatgaaaattggagtgggtaaatcattttttttcttggctttagcaacttttccacttgtatttatggctttatcgttagaatatgctcgccttctcaatctatcaagacagttagaaataattgcgtttaccaatttgatatttgctctgttactttttgtatcagacagaaacccaagtcgacgcaaattttcggatattacggcaagagatgttttggtgataggcatttggcaatcttttgctgtctttcctggaacaagcagatctggtgcctctataactggtgcgcgttttttaaattatggcagaaaagaggcaattatcatttctgctatattaa

SEQ ID NO: 268145 - DNA, 715 bp, Unknown
  Bacterial polypeptide expressing nucleotide sequence isolated from the Sargasso Sea
aatgaatattgatttttttgagattcttttgctttcagcaattcaaggtatatcagaatttattccagtaagttcgtcagctcacttgtttcttatttctgatatttacaattttaaagttcaatcactgcttactgatataggtttacacttaggttcgctattagcgataattacatactttaattcagatctagctaatatttttaaaaacaaaaaattgcttttacttgtcacatttggttcagctcctgttatttttgttggagccatactttatcagacaaatttaatcttatatttaagaaatattgaaataatcgcttggactacattaatttttgcaatcttattgtattttgcagataaagttaaagtaaacaaaaagcttgataaaaatttaggtttaaaaacagttattataattggctgttttcaaatattatcacttattccaggtgtaagtagatctggaattgttataactgcaagcagatttcttcaatttgacagatatgactctactaaaatttcattttatctttctattccagtaattgctggagcgagttttcttggattaaaagacttatataaagaatctgtagaatttaactcaatgattatatttactgtatttttttcttattttttttcgtattttacaattaaatattttttaatatttgttaagaaatttgatcttaaacttttt

SEQ ID NO: 268146 - DNA, 709 bp, Unknown
  Bacterial polypeptide expressing nucleotide sequence isolated from the Sargasso Sea
ataccagtcagttcctctgcccaccttataattatatcaaaagtatcgaactttagtattagctcgcttcaacttgatattagtcttcacttaggttcccttttggcaattattttttattttaggaaggatttagtaaatattttaggaaataagtctttattattacttataattttaggttctttaccattagttattgttggttattttatttatacatcagggctaattgaaaatttaagaaatttaaaagttatagcatggacaactttaatatttggtattttattatttattgcagaccgatctaatattaaaaataaaattgataccagtttaagtttaaaaaatattttaatcattggtatttttcaaattttagctgttatacctggtgtaagcagatcaggtataataattacagcttcaaggtttttaaatttcgatagagtagattcttcaaaaatatctttttacttatcaatacctgcgttagcgggagcaagtatacttagtttaaaagatgtaatgaatgcaaatatagatttgaatatattatttttatattcaataattttttcatttatagtttcttatttaacaatcaaatattttttaatttatgtaaaaaattttaatttaaatatttttgtttattacagaacttttcttgctttaattctttttgtaattgcttatagctaat

SEQ ID NO: 268147 - DNA, 598 bp, Unknown
  Bacterial polypeptide expressing nucleotide sequence isolated from the Sargasso Sea
ttggtagagatatttgctgcgtggtgccccgggttaaaaaataatgagcaacgcttcaatgagggtcttatgctgatcgttgggaccttgcctattgttatcattggactttttttcagggattacttttctcttcgcccaagtcttgatgggattgcgtatgcaaatttaatttttgcaggacttcttttgggtgcatttttaattagttccaaaaataaatcttatgctgagataaccttgttatctgcattagtgattggtttatttcaaatttttgcactatttccaggagcctctcgctcagggatggcaatcaccggcgcactttttatgggtctttcacttaaatcaggttctaaatttgcatttttattaagtatcccaacaattctagcttcactaatattgcttctttttaatgagcttggctcaataagcattactgagatttatctaatgttgattggcatctctgtatcggcttttattgcattttttaccatcaaatatttcttaaaatttgtaaatcatattgggatggtgccgtttgttatatataggattgtcttgggtgctgctatcctgatgatatgaa

SEQ ID NO: 268148 - DNA, 269 bp, Unknown
  Bacterial polypeptide expressing nucleotide sequence isolated from the Sargasso Sea
gatgattgagattttaattctttctttagtacaaggtattactgaatttttaccaattagttcttcatctcatttaattatcatatctaaaataacaaattttaacaatcaaaacttaacaatagacgtgagtctacacattggttctttcctagcagttgttacttatttttataaagatatttataattttatagaaaataaaaaactttttgaaaaaatactaattgcatcgttaccagtgttaattgcaggatacataatgatag

SEQ ID NO: 268149 - DNA, 796 bp, Unknown
  Bacterial polypeptide expressing nucleotide sequence isolated from the Sargasso Sea
ttgtcactcttagaagcgctgatacttggggtcattcagggactcaccgaattcctaccagttagcagcagcggacacctagagcttgggaaattcttgctaggcgacaacagcatgccccgcgaaagtatgatgtttactgtggttcttcacttcgcgaccgccctcagtaccctgcttgtatttagaaaagaagttgcatcgatactcatgggactgcttgaatttagaaacaacgagccctttcaattttcactgaaaattctgttaagcatgataccagccggacttgtcgggtttttctattctgaagagctagaaagattgtttgataagcaaatactactggttggtctcatgttgctggtaaccggtttactcttatttgtcgccgatcggtcccgtgacaccgataaagacgtgtctttttttcacgctttcgtgttgggcctcgcccaagcaatcgccattctccccggaatttctcgctcgggcgcaacgatatccacagccgtgctgttgggtatcgatcgaactaaagcagctagcttctccttcctgatggttatcccgctgattttagggaaaatcaccaaagatttactcgacggtgctctagcattgaaagacgaccagcttttaatattgatgggggggttcacggctgcttttcttacaggcatcgttgcctgtaaatggatgatttcgctagttcagaaagcccaactaaaatacttcgcttattactgctttgtcgttggaactctggcgatctttgccgacttagcttcttgaa

SEQ ID NO: 268150 - DNA, 673 bp, Unknown
  Bacterial polypeptide expressing nucleotide sequence isolated from the Sargasso Sea
tttcaagatttctaattttaatgttagctcacttcaattagatataagcctccatttaggatcacttttggcaattattttttattttaaaaaagatttattaaacataaccaaaaataaatctttattccttttaatagttttaggatcaattccattgattattgttggctactttttttattcatcgggtctaattgaaaatttaagaaatttaaaagtgatagcttggactacattaatatttggaatattattgtttattgctgacagatctacaattaaaaatcaaattaataataatttaaatctgaaaaatattttactaatcggtatttttcaaatattggctattatacctggagttagtagatctggaattacaattactgcatcaagatttttaaattttgatagagtagattcttctaaaatatctttttacttatccatacctgcattagctggagcaagtgtactgagtatgagagatattattaaaacaaatatagatatgaattttttgtttatatttgcagttttattatcatttattttttcttatttaacaataaaatattttttgatttatgtaagaaattttaatttaaacctttttgtttattatagaacatttcttgcattaattctttttgtaattgcatattcttaa

SEQ ID NO: 268151 - DNA, 514 bp, Unknown
  Bacterial polypeptide expressing nucleotide sequence isolated from the Sargasso Sea
gatgattgaaatattgattctatcttttatacaaggctttacagaattcttacctgtcagttcttcttctcacttaatactgatatcaaagtttacaaattttcaatatcaaagtttatcgattgatgtaagtctgcacattggatcatttattgcagtcgtaacgtacttctatagagatatttttaattttataaaaaataaggatttattatataagataattgtttcatcatttccaataatggttattggctttattttattgcaaacaaatttaattgaggaaattagaagtattcgtgttataggctggacaacattaatctttggagtgttattatatataagtgacaagtttaattataatagaaatataaaaaaccactttacttttaagtttgcgattattattggaatttttcaaattttatctctgatacctggtgtaagtagatcagggatcacaattactgcttcaagattattaagttttaatagatatgactcagca

SEQ ID NO: 268152 - DNA, 693 bp, Unknown
  Bacterial polypeptide expressing nucleotide sequence isolated from the Sargasso Sea
ttggaaacgaattagttggtgaggagggcttgtttcttaccctagttcttcatttaggaactgcactcagcactacgatagtctttagaaaagaaatacaagaaattttcaatagccttttagaatttaagttgaatgaaaacacacttttttttctgaaaatcattatttcaatgattccagcttctttggtaggaatatttttacagaatcaaattgaaattttattttcaaagaatctgatcttagtgggcacaatgcttatgattactgcagtattactttttttagccgatcgtgcttcaaacactcataaacaagtcacattttcaaatgcatttgttttagggttggttcaagctattgctattcttccagggatttctcgaagtggttccaccatcgccattgctgttcttgtgggtattgatcgagaaaaagctgctaagttttcgtttttaatggtactcccgcttatttttggcagcatggtcaaaacatttatagatatggatgtaaattatgaaaatagtaattttttagccatattctttggctttattactgccttttttagtggaattatagcttgtaaatggatgatttctttagtaaaaaagagcaagctaaaattctttagtttttattgtatttccataggtttattaacaattctatatggatttctttaaa

SEQ ID NO: 268153 - DNA, 931 bp, Unknown
  Bacterial polypeptide expressing nucleotide sequence isolated from the Sargasso Sea
aaaaaaaatctttcagaaaatttaatgtttactgtagttgtacatatagcaacagcaattagcataatatatgtttttagaaaggatattaatgaaattgtaaaaggtcttacccaatttaaaaaagagcaggttgattttgttcttaaaatattgatatctagcgtgccagtaggagtggttggaatattatttgagaaggaggtcgagtctttttttacaggtaatattgttttagttggctctatgttactgattaccgctgctttattattttttacatacttcaaaaaggatgattccaaaaaaaatatttcctttaccgatgcaatggttataggcttagctcaggctctagccatacttccaggaatttcaaggtcaggatctacaatttccatggctttacttttaaatgtaaacaaagagaaagcaacaaagttttctttcctaatggtacttgttcctatttttggaattcttattttaaaatctattaagggttttacagaaatttcggaaacatcaaatttaattttatttgattcatcatatatcattggttttatctctgcattatttagtggtgtatttgcatgtaaggtgatgcttaaaatagttaaagaaagtaagttgatttacttttctgcttactgtttattagtaggatctattgggatttattttggatcaaataagtcagacgatacattttatattattccaattaaagatataagtgagcttagagaaatttcaaaaaattcaaatccaccaattctagacagtctagactcgcataaaaaactagtagacctcaaaaaactagacgatgagtttcaattagatataagatatgcatctacaaataattttatgagatcaaaattttataaaaatgagagagctttttttaatatgagtgctgcag

SEQ ID NO: 268154 - DNA, 672 bp, Unknown
  Bacterial polypeptide expressing nucleotide sequence isolated from the Sargasso Sea
aatgatttcaaaatatatagaagcatcaattttagcgtttgtacaaggtttttcagaatttataccagtaagttcctctgcccacctaataataatatcaaaaatatcaaactttggtattagttcgcttcaacttgatatcagtcttcacttaggttctcttttggcaattattttttattttagaaaggatttagtaaatattttaagaaataagtctttattattacttataattttaggttcttttccattagttgttgttggttattttatttatacttcaggacagattgaaaatttaagaagtttaaaagttatagcatggacgactttaatatttggtattttattatttattgcagaccgatctagtattaaaaataaaattgataccagtttaagtttaaaaaatattttaatcattggtatttttcaaattttagctgttatacctggtgtaagtagatcaggtataataattacagcttcaagatttttaaatttcgatagagtagattcttcaaaaatatctttttatttatcaatacctgcattagcgggagcaagtatacttagtttgaaagatgtgatgaatgcaaatatagatttgaacatattatttttatattcaataatattttcatttatagtttcttattttaacatcaa

SEQ ID NO: 268155 - DNA, 119 bp, Unknown
  Bacterial polypeptide expressing nucleotide sequence isolated from the Sargasso Sea
aagaacctttgttcgctttgtttctaaccatagttacgagatttttgcctggtaccgcattgcgtttggcctggtgattctggcgtcctggtattttggttgggttagctggtcttaat

SEQ ID NO: 268156 - DNA, 499 bp, Unknown
  Bacterial polypeptide expressing nucleotide sequence isolated from the Sargasso Sea
tggtaaattttttaacataaatttatttttgcaagatatgaaggtcgttgcatatgcaacaatctttttttcaattattttatatttgagcgacaaaactcctgttaaaaaaaagtttgatagaaatatctctaataaaaatgctttttatattggacttgcgcaagttctagctcttatccctgggacaagcagatctggtataacaattagttgtgcaagatatttaggcttttcaagattagactccgctaaatttagttttcttatatcgataccgactctttttgcagcaacagtttttggtataggtgaaactataataaacttcgacaaagattttattatttttttattgttaggattttttttatctctaattatatctttaatgactattaaagttttcttatcttttgtagaaagatactctttaaatatatttgtaatctttagactaattattggttttatattattattttatttagcaaactga

SEQ ID NO: 268157 - DNA, 900 bp, Unknown
  Bacterial polypeptide expressing nucleotide sequence isolated from the Sargasso Sea
aaaggtcatttaaaggcagtaattgcaacatcatctcttgatttgggaattgattggaacagtgttgatcatataatcaaccttggcgcaccaaaaggtgtgaataggcttatacaacgcattggcagatcaggacatagttataatagagtgagtagagcttctctaattcctacaaataaatttgaattactcgagtgtcacgcagctgtaaatcttgtgaataaggagcacttagacaagatagattattcagatggtgccctagaagttttggctcaattcttggttggtttatctttatcagcgccattagacccaggcttaacatatagaatagtcaaaaaagcttttccttataaaaatttaacaaaaaaggaatttgacgaaacgctggattttgtttctactggtggttactcactgagtgaatatggaaaattccatcaaattgtaaaaggcatcgatggcaaatatagaccgtcaaacaaaattctcaagacattatggagaatgaacgttggtactattgttgaagcagtaaatataaaagtaaaattaaaaggaggaaaattacttggcaatgtagaagaatactttgctcaatcactttcaagaggtgatacattcattttttctggaaggatgcttgaattttttaaattagaaaaaaattctcttatagtgaccccatgtaataaaagcgaaccaaaagtaccatcctttattggaggaaggcttccaatttcaagtacccttgccgaagaagtcagaataattttagaaaataaaaacagctggaatttgctaggttcagaaacatgtttttggcttaataaacaattgaatgaatcaatcatacctcaaaaggataaattattaatcgaaattttaaaagag

SEQ ID NO: 268158 - DNA, 649 bp, Unknown
  Bacterial polypeptide expressing nucleotide sequence isolated from the Sargasso Sea
gcttttaataatcaaaacttattaattgatatatgcttgcatctaggatctttattagcaatagtattttattttagaacggatctatttaactttataaaaaataaaatttttttaataaaagtattaattgcaactgttccaattatcccagttggttacattatttatcaagcggatttaagcaatcaaataagaagtttagaatttattggctggatgactctgatttttggaattcttttatacattagtgacaaatcaaaaataacaaaaaaaatagacaaagattttacaaataagtcagcaattgttattggcttttttcaagttctcgctttattacctggagtaagcagatctggtattacaattacagctggaagaatattgggttttgataggcttgattctgcaaaaatttcattttttctatctataccaactttaacagctgctagtatattaggaatatataacatttataaggaaggcagctcagaattaaattttttagcaattatagctgtaatattttcatttattttttcatattttacaattacgctattttttaaatttgttaggaaatttagtctaagtgtattcgttttatacagaattgttctttctttacttatactgggta

SEQ ID NO: 268159 - DNA, 529 bp, Unknown
  Bacterial polypeptide expressing nucleotide sequence isolated from the Sargasso Sea
cttgaaaatattaatcatttctaccttacctgcaattgttctcggtttaataattaaattttacgatgtaaaatatattagtttagagttaattgcatacacttcaattgctggagcattattactatatgtttcagataaaacaaaaaaatttaaattaaaaattaaaaataaaaataccaaatttattctagcaggactctttcaatgtctagcttttttaccaggtttcagtagagcaggaagttgtataattgcattcagactattaggagaagatagaaaacgctcatctatttatagtttatatatgggtatacctataatttttttgtcctttttctccaatattaaagaatttgataattttattgtagataaaaatttatcattaatttttattactacattttttgcagcttattttacaatatctctatttattaaagtgataaataaaattggttttacaccttttgtaatttatagaattttaataggtatcgtcttgttagctttaattaattaa

SEQ ID NO: 268160 - DNA, 286 bp, Unknown
  Bacterial polypeptide expressing nucleotide sequence isolated from the Sargasso Sea
tatgactagtgagactattttttacattttttatagtttaattcagggaatcactgaatttatccccattagttcaagtggacatctaaatattttagaaatttttttaaagagcatagaatcaaggaactttctctatgaaacatctgcccactttgcctctttattagctttattaatctatcttttgacacacgatcattttacaaaatcgaatatcaaagataattttaagagtattagtttatgcaacaatgccagccgtttttttggggctcatatttaa

SEQ ID NO: 268161 - DNA, 705 bp, Unknown
  Bacterial polypeptide expressing nucleotide sequence isolated from the Sargasso Sea
catgatttcagatttttttctcgcacttattcttgccttgattcaaggtctgactgaatttttgccagtttctagttcagcgcatttattgtttccatcatttctttttggagctaaagattttggcattgtatttgatatatcagttcatgctggaaccttgtcagcagtgatttattattttaaaaaagaaattcaaggactattccatgcttggatgccttggacagaaaccagaagtaaagaagacttctctctaggattgaatcttcttgttgcaactttaccaattgttctggtcgggttgcttgtatcagatttgactgagtctagatctgcaaatattaactcaattgcctgggcaaatcttatatttgctggcttgttgtatgccgcctttaagcgctcaacccagtcaaaatctttaacagaattaactttgtttgcagcccttataattggttgttttcaagcattggctgtttttccaggagcatctagatcaggtatggcaattaccggagcattaattattggattaaatatcaaagatacctcacggtttgcttttctattgagcataccaacgattttaggagcattgatattgatgcttgtaaagggcgcttatgcaatagcgctgagtgatatgttaattatgctaacaggatttcttggctcagctttcatagcattcattaccca

SEQ ID NO: 268162 - DNA, 562 bp, Unknown
  Bacterial polypeptide expressing nucleotide sequence isolated from the Sargasso Sea
catgattgagatattgctattatctatcatacaaggagtaacagaatttcttccaataagctcgtcctcacatttaatattaacctctaagtattttgagtttgaaaaccaaaatttatctatagatgtaagtttacatattgggtcctttttagcagtaatattttattttagatcagaagttattaattttatcaaaaataaagatctatttttaaaaatatttttatcttcggtccccgtaataattactggatattttctggtaaaatttgatttgatagaccaattaaggaatataaaaactataggatggatgaccataatatttgctatatttctttacttgagcgacaagtctaaaggtctaaaaaaaattggaagcaattttaactataaggctgcaatgtttattggtttattgcaggtattttcacttattcctggtgtcagcagatctggaatagcaataacagcggcgagactcctaaaatttaaaagggtagactcagctaaaatatcatttttactatctataccaacgttagcagcagttagtttt

SEQ ID NO: 268163 - DNA, 280 bp, Unknown
  Bacterial polypeptide expressing nucleotide sequence isolated from the Sargasso Sea
aatggattcaatagaggcaattattcttggtattattcaggggcttacagagtttctacctgtttcgtctagtggccacttggaaattggaaaggctttaatgggtgatgaaagtctgcctcaggaaagtttattatttactgttgttcttcattttgcaaccgccttaagtaccattttgatttttagaaaagagatttctgaaataattagaggcctatttaaatttaatccttcaaacaaggagtttaaattttcttttcaaataataatctcaatg

SEQ ID NO: 268164 - DNA, 704 bp, Unknown
  Bacterial polypeptide expressing nucleotide sequence isolated from the Sargasso Sea
agtaagctcatctgcccaccttataattatatcaaaaatatcgaactttattattagttcggttcaacttgatattagtcttcacttaggttcccttttggcaattattttttattttagaaatgatttactaaatattttagtaaataagtctttgttattacttataattttaggttctttaccattagttgttgttggttattttatttatatctcagggcaagttgaaaatttaagaaatttaaaagttatagcatggacaactttaatatttggtattttattatttattgcagaccgatctagtattaaaaataaaattgataacagtttaagtttaaaaaatattttaattattggtatttttcaaattttagctgttatacctggtgtaagcagatcaggtataataattacagcgtcaaggtttttaaattttgatagagtagactcttcaaaaatatctttctacttatcaatacctgcattagcgggagcaagtatacttagtttaaaagatgtgatgaatgcaaatatggatttgaacatattatttttatattcaataatattttcatttatagtttcttatttaacaattaaatattttttaatttatgtaaaaaattttaatttaaatatttttgtttattacagaacttttcttgctctaattctttttataattgcttatagctaat

SEQ ID NO: 268165 - DNA, 520 bp, Unknown
  Bacterial polypeptide expressing nucleotide sequence isolated from the Sargasso Sea
ctgggtctcgaggcacaaatggagagggtagccatggagatgagagacagcgctactggagggcttttctcatctttactttgggggatgtcaattgtgagcttgttcctagccgttgctactgtttgggcgggatgggacgatcctgttccagatgggaattctcagttccagcacttcctaggtcttgttgatgaggttctacaatggattgtcggttccgtgttctcgttcttactcgctctgggggttctgaggtggaaagagggttccttcacgggaaggagcgttctactaatcggtcttggagtagttttctacaccttcgtagccgcaacaatcgacgtagcactcgtgatttcgtccgggcaggaatatagtcccacattcaatcaattaggggacgattggggactaccgatcatgtccatggtaatgtactaccttctgagaaccatagtccaatcattctccgaagatgatgacttagtccaaggaagtcgtttctggggagtatgat

SEQ ID NO: 268166 - DNA, 769 bp, Unknown
  Bacterial polypeptide expressing nucleotide sequence isolated from the Sargasso Sea
aatgataacagattattttcaagcatcctttttagctatagttcaaggaatttctgaatttatacctgtcagctcatctgcccatctaattatcttatcacagttttttggtttttctaatcagtctataatattcgatgtaggccttcacttaggttctttaattgcaatagtattttattttagaaatgaactgctgaatttaagaaataacaaagaacttttaaaattaattattataggatcaacaccgctagtaataattggttatattcttttttactcaggtattattaatatatttagaaatgttgaagtaattgcctggacaacactaatttttggtttgcttttgtactatgcagataaatctaaagtctcaaaaaactttaaatatgatctaaacacaaaaaatattttaattataggtacaattcaaaccttgtctttaatacctggagtaagtaggtctggggtagtaattacgattggaagaatgcttaattttaacagagaagactcgctaaaaatttcattttttctatctataccagctctgctaggtgcaagtgtactgtctataaaagatataataaatgaaagtattcatattaattttttgttaatattttcaattattctttcttttctattttcttacctaactattaaatatttattaatttatgtgcaaaaatttactttaaaaatttttgttatatatagaataatattatcttttataatttttttaataattttaaattaa

SEQ ID NO: 268167 - DNA, 796 bp, Unknown
  Bacterial polypeptide expressing nucleotide sequence isolated from the Sargasso Sea
catgatcgcagatttttttctagccttacttctttcattaattcagggcttgactgaatttttaccagtctcaagttcagcacatttattattaccatcactcatttttggaacaaaagattttgggatagtttttgatatatcagtgcatgccggtactcttgcagcagtaatatattattttaaaaaagaaattcagggattggttcgagcgtggaaaccatggaaaaataaccgagatcaacagaattatttgttggggttaaacattttagtagcaaccttaccaatcatcattgtaggattagttttttctgatttcacagaatcaagatttgccaatacaaactcaattgcgtggacgaatcttatatttgctgttttgttatatttagtttttagggcctctgctcaaacaaaatctttaacagagttaacattgactgctgcattgatgattggttgctttcaagctttagctattttcccaggagcttcaagatccggtatggccataacaggcgcattacttgttggtttaaatctaaaggatacatcaaagtttgcatttttattgagcattccaacaattttgggagctttgatattaatgtttttaaagggagcctactcactagagttaaatgatttgttaataatcctaacgggtttttttggctcagcttttgtagcattttttactataaaaagttttcttaaatttgttgaaaaaattggcatgactccatttgttttgtatagagttgcattaggagctgttcttttgcttctatga

SEQ ID NO: 268168 - DNA, 772 bp, Unknown
  Bacterial polypeptide expressing nucleotide sequence isolated from the Sargasso Sea
aatggattttatacatatatttatattatcaattattcaaggtgtaaccgaatttcttcctatttctagtcaatctcatttgattcttacttcctatttattagggcttaaagatcagggcctaggatttgatattgcactgcattttggatctttgattgccattttaatctattatcgaaaagaaattagaagtttgctctcactgaatgatgagggagcgaattatcttaaactaataattattggctcaatccctttgccaattgtaggtttattatttattgatatcgtctctcagaatatgcgctccattttctcaatcgcatcaatgacaatattgttcgcagttattttatatttggctgatgtaaaaaagaaggaagtcgtaactaagtttgcgaatattagtatctataccattgtctttattggactgatgcagacattagctataatgccaggtgtttctagatcaggtatcgttattactgctgcattattagcaaactttagcagagaggactctattaagattgcctttctgttatcaatacctgcaatttttatggcgacagtctatcaatcaatgcaattatatgatgtagggaatatagaaatcttaaataaacatatgttaggaatgtttttatcctttatattctcatacattaccattcatttatttatatctactataaataaaatatcatttactccatacattatttatagattaattttaggtgtagttttaatcggatttatttaa

SEQ ID NO: 268169 - DNA, 572 bp, Unknown
  Bacterial polypeptide expressing nucleotide sequence isolated from the Sargasso Sea
tatgtttttaattttcatagaaacaataattttatcaattgttcaaggtattacagaatttctaccagtaagttcatcagctcacttaattattttttcaaaattaggaaattttcaagcaaattccttaactatagatattggggcacatttaggctccttaattgcaattttaattttttttaggaaagatctattaaaattttctcagaataaaagtctttataaattaatatttttaggatccataccattagtattgtttggtttttatttttatagctcaggaataatttatattttgagggatataaaagtaatagcttggacaactttaatttttggtattttacttttccttgcggatagaagtaaatctacaaatagatttgatcaaaatattaattacagaacaattttgataataggtttatttcaagtttttgctttaatcccaggcgtaagcagagctggtataacaatcacagcagcaaggtttttaaattttaatagatatgatgcaactaagatatcttttttattatctatcccagccacttttaggagccagt

SEQ ID NO: 268170 - DNA, 736 bp, Unknown
  Bacterial polypeptide expressing nucleotide sequence isolated from the Sargasso Sea
aatgatttcaaaatatatagaaacatcaatattagcattgattcaaggagttgctgagtttatccccgtaagttcctctgctcatctcattataatttcaaaggtttctaattttaatgttggctcacttcaattagatataagtctccatttagggtcgcttttagcaattattttttattttagaaaagatttattaaatataaccaaaaataaatctttattactcttgatagttttaggatcaattccattaattattattggctactttttttattcatcaggtctaattgaaaatttaagaaatttaaaagtaatagcttggacaacattaatttttggaatatttttatttattgctgacagatctacaattaaaaataaaattaataataatttaaatcttaaaaatattttactaataggtatttttcaaatattggctattatacctggagttagtagatctggaattataattactacatcaagatttttaaattttgatagagtagactcttctaaaatatccttttacttatccatacctgcattagccggagcaagtgtactaagtatgaaagatatagttaattcaaatatagatatgaattttttgtttatatttgcagtcttattatcatttgttttttcttatttaacaataaaatattttttgatttatgtaagaaattttaatttaaatctttttgtttattacagaaccatttct

SEQ ID NO: 268171 - DNA, 769 bp, Unknown
  Bacterial polypeptide expressing nucleotide sequence isolated from the Sargasso Sea
atgatctacaattttttggaaattactcttttaagcataattcaaggaatatcagaatttttacctgtaagttcatcagctcatttatatcttgtttcagaaatctatcaatttagatcacagtcattgatgactgacgttgcgcttcatttaggctccttaattgcaataatatttttttttagaaatgaattaataaatatttttgaaaataaaaatcttctatatcttttagttctaggatcggttccacttataattgttggtttattaattttttccacaggtctaataaacaatttaagaaatttagaagtagtagcatggacaactttaatatttgcaataattttatttattgctgacaaatttagagtaaggaaaaaattaaacacaaatttgaatattaaaagtattttgtttataggtttatttcaaattctatctataataccaggagtaagtagatctggtatagtaatcactgctggaagatttttaaattttgatagatttgactcaacaaaaatatcattttatctatcaatacctgcaatagctggggctagtatcctaactttaaaagatctaacttatgaaactattaattttaatattgttattctttttgcaataatttttgcttttatagtttcttatttagcaatcaaatattttttaatatttacgaaaaagttttcgatgacaatttttgttatttatagaattattttatctttaatattattctacattatatattattgat

SEQ ID NO: 268172 - DNA, 769 bp, Unknown
  Bacterial polypeptide expressing nucleotide sequence isolated from the Sargasso Sea
aatgatttcaaaatatatagaaacatcaatattagcattgattcaaggtgttgctgagtttatccccgtaagttcctctgctcatctcattataatttcaaaggtttctaattttaatgttagctcacttcaattagatataagcctccatttagggtcgcttttagcaattattttttattttagaaaagatttattaaatataaccaaaaacaaatctttattacttttgatagttttaggatcaattccattaattattattggctactttttttattcatcgggtctaattgaaaatttaagaaatttaaaagtgatagcttggacaacattaatttttggaatattattatttattgctgacagatctacaattaaaaataaaattagtaataatttaaatcttaaaaatattttactaataggtatttttcaaatattggctattatacctggagttagtagatctggaattataattactatatcaagatttttaaattttgatagagtagactcttctaaaatatccttttacttatccattccagcattagctggagcaagtgtactaagcatgaaagatattgttaatacaaatataaatatgaattttttgtttatatttgcagtctttttatcatttgttttttcttatttaacaataaaatattttttgatttatgtaagaaattttaatttaaacctttttgtttattacagaacatttcttgcattaatcctttttgtaattgcatattcttaa

SEQ ID NO: 268173 - DNA, 482 bp, Unknown
  Bacterial polypeptide expressing nucleotide sequence isolated from the Sargasso Sea
gatgagtgacatacttttaagtttgcttcttggtctaattcagggtctcacagaatttttaccagtctcaagttctgctcacttaattctccccggattaatttttagttctaatgatttagggctttcatttgatatcgctgttcatgctggaactcttatggcagtaatatatttttttagatcagaacttgctcttatgactaaatcggtttttataaatgagagtattaatgacaaatataagcaattatcttttaatttaattattgcaactttaccaatcatatttataggttttattttggctgatctcttagagcaaagggtattcagtgaaaaatttacaatagcggtttcaaatttactctttgctggagttctcttaatcgcatttatgaaaagaaaagcaaataaaaatttatttgaaataactatttttggcgctttattaattggactcttttcatgctttgctttaa

SEQ ID NO: 268174 - DNA, 592 bp, Unknown
  Bacterial polypeptide expressing nucleotide sequence isolated from the Sargasso Sea
atgttagagattctaatactttcattagtacaaggagttacggaatttctgcctattagctcttcgtctcacattatacttttctcaaagtttatgaatttcataagtgaggatttgattcttaatgttagcttacatataggatcttttattgcagttcttgttttttttagaaaagaaattttaagtttttttatatatagaaaaatattaatattaattatcatagcttcattgcctataattttaagcggttatctaatcgcacaatccggtataatcaatgatttaaggtcactaaaagttattggatggactacggtagtatttggtgttttgctatacttttcagataaaagtgagagtgaaaaaaatcttgaaattaattttgatattaaatcagctttaatcatagggttttttcatatattttcattaataccaggtgtaagccgatctgggatagctattaccactgctaggtttttaaaatttgatagagtaaatgctgctagaatttcatttcttttatcgatacccacgttgcttgctgtttctgtatttggaatttataaaatttatataccgaaag

SEQ ID NO: 268175 - DNA, 769 bp, Unknown
  Bacterial polypeptide expressing nucleotide sequence isolated from the Sargasso Sea
atgtttgcaaatttcattgaagttttcttgctgtctgtcgttcaaggtgtttccgaatttataccggttagttcttcagctcatttatttttaatatctgaaatttatcaatttaaatctcaggctttgatgctggatattagcttgcacttaggatcgttattagcaataattttttactttcataaagatttatcaaatattctaaatgataaaaaattatttcttttaatagtacttggttccttacctttaatagtttgtgggtttgtagttcttaaaactggaataataaataattttagaaatattgaagtaatagcttggatgacttttatttttgctatactcttatatgtagcagataaagttgaagtaaaaaaaaaattagaaaataatataaatattaaatcaattattataattggattatttcaagtcttagctttaattcctggtgtaagcagatcaggaatagtaataacagctggaaggtttattaagtttggtcgatatgacgcgacaaaaatttctttttatttatctatacccgctatagctggtgcaagttttttaggtttaaaaagtattacatacgaaaattttgattttaatattatgattttattttctatactattatcttttttattttcttttttaacaataaagtattttttaatatttgtaaaaaaatttactctaaatctatttatcatctacagaataattctgtcatttatactgttttatatagtatacgcttaat

SEQ ID NO: 268176 - DNA, 769 bp, Unknown
  Bacterial polypeptide expressing nucleotide sequence isolated from the Sargasso Sea
atgatttcaaaatatatagaagcatcaattttagcgtttgtacaaggtttttcggaatttataccggtaagttcctctgcccaccttataataatatcaaaaatatcgaactttagtattagttcgcttcaacttgatatcagtcttcacttaggttcccttttggcaattattttttattttagaaaggatttagtaaatattttaagaaataagtctttattattacttataattttagggtcttttccattagtttttgttggttattttatttatacctcaggactgattgaaaatttaagaagtttgaaagttatagcatggacgactttaatatttggtattttattatttattgcagaccgatttagtattaaaaataaaattgataccagtttaagtttaaaaaatattttaatcattggtatttttcaaattttagctgttatacctggtgtaagcagatcaggtataataattacaacttcaaggtttttaaatttcgatagagtagattcttcaaaaatatctttttatttatcaatacctgcattaggaggagcaagtatccttagcttgaaagatgtgatgaatgcaaatatagatttgaacatattatttttatattcaataatattttcatttatagtttcttatttaacaatcaaatattttttaatttatgtaaaaaattttaatttaaatatttttgtttattacagaacttttcttgctttaattctttttgtaattgcttatagctaat

SEQ ID NO: 268177 - DNA, 769 bp, Unknown
  Bacterial polypeptide expressing nucleotide sequence isolated from the Sargasso Sea
atgatttcttactattttcaagttgtaattcttgctttaatccaaggaatttctgaattcatcccagtaagttcatcagcacatttggtcctaatatcaaacttaactcagtttgattacaaatctattgaaattgatataagcctacatttaggatctttgattgcgattttaacttatttttggagggatttaataaatattcttgagaataaaaaaatacttagtctaattttttttggatcaattccaataactataattggttttattttatttaattttgaaatcatttacttgttgagagatctaagattgatagcatggaccactcttatattcggaatattaatgtattattctgatagaaaattaggacataagaacatagataataatttaaatattaaaaatatatttattataggtttatgccaggtactagcactaataccaggagttagcagatcaggtatagttataacgacatgtcgtttttttaaattcaatagagttgattcactaaaaatttctttctatttatctataccagccttagctggtgcaagtatattgagctttaaaaacttatcagaaaaatcatttgaactaaatttatttatatttatctcgattttcttgtcatttatattttcttttttaacaattaaatttttgctattttacttaaaaaaattttcactaaatttatttgtttattatagaatcattttatctatattattatttttagttgcttacagatgat

SEQ ID NO: 268178 - DNA, 760 bp, Unknown
  Bacterial polypeptide expressing nucleotide sequence isolated from the Sargasso Sea
aatgattgagatatttattctgtccatagtgcagggaattacagaatttttgcccgtgagttcttcatctcatttaattgtaatatctaaatactttaatttttctaatcaaagcctctcattagatgttagtcttcatattggatctttttttgcaattattttttattttagagaagaaatttttaacttttttcaaaataaagaattatttttaaaaatttttatttcttccattcctataatggttgctggttattttttagtcaaatttaatttaattgaacaactaagaaatatggaagtaattggttggacaactattatttttggtattttactttatataagtgataagtttgaaaatacaaaaaaaattaatgaaggctttggatttaaatctgctttatatataggtttattgcaggtattagcactaattccaggtgtaagtcgttctggaatagcaatcactgcggcaaggacgcttaaatttgaaagagttgaatcttcaaaaatttcatttttattatcaatacctactttagcagcagttagtatatatggtttacaaaatgttttagtgtctaaaaacgtaagtttttccttaataaatttattcgctatttttttatctttcataacttcatatctaactattaaatattttttgaaatatgtaaaaaaatttaatcttaatatttttgtaggatataggattctattaggggctcttattctatttgtcgcttatttataa

SEQ ID NO: 268179 - DNA, 766 bp, Unknown
  Bacterial polypeptide expressing nucleotide sequence isolated from the Sargasso Sea
aatggaaaatttttttcaaattttaatattatctgtaactcagggtgttgctgaatttcttccggtaagctcctcggctcacctaaatttaatatcaaaatattttgatattcaaaatgaattattaataaatgtttatgcgcacatgggttctttacttgcggtaatatttttctttaaagacgatatttttaattttggaaagaataaaaaattattttctaaaataattttagcatcaattccattatttggatttggatttttaattttaaagtacgacttgatagatacatttaggtctttagagcttataggttggatgactataatttttggtattgttctttttatttcagataaattaagccttgaaaatagcattaaagataaatttacgtttaaaaaggccattttaattgggttttttcaagtattagctcttatacctggtgtaagcagatctggaataataatgactggagctagatttttaaaatttaatagagaagatgctgccaagatttcatttttactttcaattccagcgcttgcaggtagctcgatatacggtctttataaaatgtttaatgaaggagacttaattgtaaatatcaactcaattatgacgataggtttatcattcattttctcttatctaacaatcaaatacttattaatctacttaaagaattttagctttaatatcattgttggatatagattaatacttggatcaattattctagctactgtttatttataa

SEQ ID NO: 268180 - DNA, 766 bp, Unknown
  Bacterial polypeptide expressing nucleotide sequence isolated from the Sargasso Sea
aatggaaaacttttttcaaattttaatcctatctattacacagggtgttactgaatttcttccggtaagctcctctgctcacctaaatttaatatcaaaatattttggtattcaaaatgaattattaataaatgtttatgcgcacatgggttctttacttgcggtaatatttttctttaaggaggatatttttaattttggaaggaataaaaaattattttctaaaataattttggcatcaattccattgtttggatttgggtttttaattttaaagtataacttgatagatacatttaggtctttagagcttataggttggatgactgtaatttttggtattgtactttttgtttcagataaattaagccttgaaaatagcattaaagataaatttacatttaaaaaggccattttaattgggttttttcaagtattagctcttatacctggtgtaagcagatctggaataataatgactggagctagatttttaaaatttaacagagaagatgctgccaagatttcatttttactttcaattccagcgcttgcaggtagctcgatatacggtgtttataagatgtttaatggaggggacttggttgtgaatattaactcaatcatgacgataggtttatctttcattttctcttatctaacaatcaaatacttattaatctacttaaagaattttagctttaatgtcattgttggatatagattaatacttggatcaattattctagctactgtttatctataa

SEQ ID NO: 268181 - DNA, 769 bp, Unknown
  Bacterial polypeptide expressing nucleotide sequence isolated from the Sargasso Sea
aatgacttttgatttttttgagatttttctgctttcagcaattcagggtatatctgaatttattccggtaagttcatcagctcacttgtttcttgtttctgatatttacaattttaaaattcaatctttactcacagacataggtttacatttgggatcgctattagctataattacatactttcactcagatttaagcaatatatttagaaacaaaaatttacttttacttatgatatttggttccacaccagtcattattgtgggagctatactttatcagacaaatttaatttcatatttaagaaatattgaaataatagcttggacaacattaatttttgcaattttattatattttgcggataaatttaaagtaaataaaaaattaaatgcaaaattagatttgaagactatttttgtaattggttgttttcaaatattagctcttattccaggtgtaagtagatctggaattgttataacagctggcagatttcttaagtttgatagatatgactctacaaaaatttctttttatctttctataccagtgatcgctggggctagttttcttggatttaaagatttatataaggaaactgcagatttcaactctatgattttattaacagtatttctttcatatttcttttcatattttactattaaatactttttaatttttgttaaaaggtttgatctaaaactttttgtaatttatagaattttattatcttttttattgtttggtattatttatttttga

SEQ ID NO: 268182 - DNA, 376 bp, Unknown
  Bacterial polypeptide expressing nucleotide sequence isolated from the Sargasso Sea
gattggacgattagacacgccctttatactaggattttggcagatgctcgcattaattcccggtacgtcaagatccggaataacaattacaggtgctcgctttttaaactataataggtcaagcgcgataaaaatatcgatgcttatgtcgataccgacaataattgcagccgctactctagaattttattctttaggttttgaaaacatttcaataaactggcttgagatagttttagcaataattatctccgcactggcggctttcggcgctctaagtttaatgatgcgattattaacgactattaattttactccttatgttttatacagaatattgctcggaagttttttaataatatgggctattatgtaa

SEQ ID NO: 268183 - DNA, 246 bp, Unknown
  Bacterial polypeptide expressing nucleotide sequence isolated from the Sargasso Sea
gatgatagaaattctgattctttcattcgtacaaggtatcacagagttcttaccaattagctcttcgtcacatttaatcttaacaaatgagtttttaaactttaaacactcgaatttagctattgatgtaagcatgcacattggatcattttttgcggttataacttatttttacaaagacatatttaattttattaaaaataaagagctttttttaaaagtttttattgcatcagtaccagttat

SEQ ID NO: 268184 - DNA, 769 bp, Unknown
  Bacterial polypeptide expressing nucleotide sequence isolated from the Sargasso Sea
atgttgtttgattactacgaaattttaattctttcattaattcaaggagtttcagaatttataccagtaagttcttctgcacatctttatataatttcagaattatttgattttaaaaatcaatcgctaatgattgatgtggggatgcatttagggtctcttttagcagttctattctatttcagacaagacttcataaatattcttaaaaataaacaaattttaaatttaatggtctttggatctattcctctaataatagctggctttataatttatacgacaggtttaatagatttcgtaagaaatctaaaattgcttgcttggttatcgttaatttttgcaatagtgctttatattgctgataaaattaaagtaacaaaaaaaatagataccgatttgaatttaaaaacaatattaattattggactgttccaaattgcttctctttttcctggagtaagtagatctggaatagtgataacagcaggaagatttttgaattttgatagatatgatgctactaaaatatctttttacttatctgtaccagcaatagctggtgcaagttttttaagtttgaaagatgtatttataaacgatgcaacttttaattcattaataatattatctacattcttatcttttattttttcttatatgacaattaaatattttttgatcttcataaaaaaatttaattttaatatatttataatttatagaattattttatctttatttattttttatattatttatagctaac

SEQ ID NO: 268185 - DNA, 769 bp, Unknown
  Bacterial polypeptide expressing nucleotide sequence isolated from the Sargasso Sea
aatgatttcaaaatatatagaagcatcaatattagcattcatacaaggatttaccgaatttatccctgtaagttcatctgctcatctcattatcatttcaaaaatttctaattttaatattagctcacttcaactagatataagccttcatctaggatcacttttagcaattattttttattttagaaaagatttaataaatattactaagaataaatctttattccttttgatagttttaggatcaattccattaattatttttggctactttttttattcatccggtttaattgaaaatttaagaaatttaaaagtaatagcttggactacattaatatttggaatattattgtttattgctgacagatctacaacaaaaaataaaattaataataatttaaatcttaaaaatattttaataataggtttttttcaaatgttagcgatcataccaggagttagtagatctggaattgtaattactgcatcaaggtttttaaattttgatagagtagattcttctaaaatatcattttacttatccatacctgcattagctggagcaagtgtactaagcatgaaagatattattaacactaatgttgatatgaattttttgtttatatttgcagtcttattatcatttattgtttcttatttgacaataaaatattttttgatttatgtcagaagttttaatttaaacctttttgtttattatagaacatttcttgcattaattctttttgtaattgcatattcttaa

SEQ ID NO: 268186 - DNA, 769 bp, Unknown
  Bacterial polypeptide expressing nucleotide sequence isolated from the Sargasso Sea
aatgatttcaaaatatgtagagacgctaattttatcaattattcaaggaatatctgagtttattccagttagctcgtctgcacatcttttaattatatcaagattgagtgacttcaatgttagcaacctacaattagatattagtctgcatttaggttctttgttagcaattattttattttttagaaaagagttaataaatatcattaataataaaaatatatttctactaataattcttgggtctataccattagttattgttggttatattttttactccacaaatttaattgatcaatttagaaacttaaaagttgtcgcttggacaactttgatttttggaattttattatacttttcagataagtttgaattgaaaaataaaatttcttcagaattaaatattaaaagtattattataatagggttatttcagattttagctattattccaggagtcagtagatcaggtatagtaattacagcttcaagatttttaaaatttgacagagttgaatcatcaaagatagctttttatttgtctattccagctttagcaggtgcaagtgttttgggatttaaagatgttattgatgatcaaataaattttgatgctatatttattttttctacttcagcttcatttttattttcttattttacaattaaatattttcttatttatgttaaaatgtttagtttgagtttttttgttatttatagaatagttttaagtattattcttttttcaattatttacttatga

SEQ ID NO: 268187 - DNA, 985 bp, Unknown
  Bacterial polypeptide expressing nucleotide sequence isolated from the Sargasso Sea
atgattcataaaataaaacacttcatcattctttctgtcattgccattaattttcattctgcgcaggcttcaacaaatcaagaagctgaaaagagtcttctcatagatgaattaattcaggaacatggatttgatgagcaatatgtactcaatatttttgaaaatatgaagtttttacctgagttaattgaatcaatttcaaggccagcagaaagaacgaaaacttggcctgaatatagaaagatttttgtgacaaataaaagaattgcggcaggagtcctttttgcaaaacagcatgaagaaatcatcaaccgtgctgcaagcgagatgggtataccgaagaagattttgctcggaatattaggcgtcgaaacttccttcggaagaattcagggaaattataaagttgtagattcgctctacacacttgcaactggatatcctccgagatcaaaattctttagaagtgaattgatcaaccttttttatctttgcagagaagaaggtttctcgattcttgatatcaagggttcctatgcgggtgcaatgggtgcgcctcaattcatttcttccagttataggaactatgctgtcgatggcaatgctgatggcaaagttgatctattcaatagctgggatgacgtactgatgagcatcggaaattatttaaaagaaaatggatgggaagcatcaggatcaatatacagtcgttatccggtaaatgaactcaaactttcaaagctgtcatcaaaaacaataaggccaacatcaacaattcaagatctcctcgatgaaggaattagaattgatggttttgaaaaagacgacatagcacaattaattcgactggatggatttgacgacagagatgattcttacattgggcatcacaatttttatgttataaccacttataatcgaaacgtgatgtacgcattggttgtgattcaactgggagaggcgatcgatagttatttggattaat

SEQ ID NO: 268188 - DNA, 769 bp, Unknown
  Bacterial polypeptide expressing nucleotide sequence isolated from the Sargasso Sea
aatgatttctcaatacattgaaacgttttttttagcaatcattcaaggagtatttgaatttatacctgtaagctcctcggctcatttaattttattttcaagaattaataattttaattttagctctttacagcttgatattagtctccacttggggtctttacttgcaattatattttactttagagaagatttatttaatttaacaaaaaataaaagtttagcaatcttaattattgcaggatctataccgttaataattgttggttatattttttattctactggtttaattgattattttagaaatttaaaaattattgcatggaccacattattttttggaattctactatatttttcagatagatcgaaaataagcaataagttggatacaaaactaagttataaaaatattattataattggtttacttcaagttttggcaatagttccgggtgtgagtagatcgggaatagtgataacagcatcaagatttttaaattttgacagaatagactcttcaaaaattgcattctatttgtctatacctgcaataagtggtgctagctttttgggtcttaaagatatttttgatactggagttgttttaaattttattttcttttattcaattattctatcatttgtaatttcttatctgacaattaaatattttttaatttatataaaaaattttaatttaaacttatttatatattatagaatacttttagccttaatactttttgtaatagtttataattaa

SEQ ID NO: 268189 - DNA, 1303 bp, Unknown
  Bacterial polypeptide expressing nucleotide sequence isolated from the Sargasso Sea
attgcttccaattagctctacttatgcagttgattggagtaaagaacttggagatcatagtggtgttgatttgaaggttcagtctattatggatccttacattgatgctgttaaagaaatttctccaacttttacttctgttactggcgcttcagttacagttgaaggttttggatatgatggtttgcatgaaaaacaaattgtagcatgttcacaaggagacagttcatacgatgtactttttgttgacggaatatggattggagaatttgtagaaggtgactgtatcgctccagttgaagatttatggactgaagaaggtacagatatgtcagttatagcatgggatgactatattagctcatttgctggtcaagcaatctgggatggtaaaaaacaatgtttaccttttggtggatattggcacatgcttcactacagaactgatctatttgaagctgaaggtttagaaccaccaaaaacatttgatgatgttttagctgcagctaaactatttaaagacaatccaaaatatcctgaacttgaaggtggatatgcaatgaatatggctcgtggaagtgctgctggtcagcaattttatgagtggatttattctgcaggtggtaaaccatgggaaagtaactaccctggttctcctgatgcatatgctgatcaaagaggattatataattcagcagaatctgttgcatttatagaatggatgcaagaaatgattaattatatgcctccaggtgttgagcaatatgcttgggatgaaagagctaaagcatttacacaaggtaaagttgctatgattaataactggtcagttagaactcctctgtttaatgatccagaaattagtaaagtaattggcaaatttgatgttgcattattcccacatgcagaaggtgcttcttcagtacctccagtaggtggttggattgcttgtgttaacaaacacagtaaaaacatcgatgctgcttgggattacctaaaatggtttgcaagtcctgaagttcacagagaatgggtgctaacaggagctcctcctagcagacattcagctatgaatgatcctcagattaatgctgaacaaccttggacaccagttctttatgagtcaagcttaagagcatggcaagaactaagaccaagacacgcattaacttttgaagtaatagaaacacttggaattgaagttaataaagcattaacaggtgaagcatctgctcaagaagctatggatgctgcaaacaaaaaaattgatagactcctaaaatctgaaggatatattgattaa

SEQ ID NO: 268190 - DNA, 769 bp, Unknown
  Bacterial polypeptide expressing nucleotide sequence isolated from the Sargasso Sea
aatgatttcaaaatatatagaaacatcaatattagcattcattcaaggatttgctgagtttatccctgtaagttcctctgctcatctcattataatttcaaagatttctaatttaaatgttagctcacttcaattagatataagcctccatttaggttcacttttagcaattattttttattttagaaaagatttattaaatataaccaaaaataaatctttattccttttaatagttttaggatcaattccattaattattgttggctactttttttattcattaggtctaattgaaaattttagaaatttgaaagtgatagcttggacaactttaatatttggaatattattgtttattgctgacagatctacaattaaaaataaaattaataataatttaaatcttaaaaatattttacttataggtatttttcaagtattggctattatacctggagttagtagatcgggaattataattactgcatcaagatttttaaattttgatagagtagattcttctaaaatatccttttacttgtccatacctgcattagctggagcaagtggactgagcatgaaagatattattaatacaaatttagatatgaattttttatttatatttgcagtcttattatcattttttgtttcttatttaacaataaaatattttttgatttatgtaaggaattttaatttaaacctttttgtttattacagaacatttcttgcattaattctttttgtaattgcatattcttaa

SEQ ID NO: 268191 - DNA, 584 bp, Unknown
  Bacterial polypeptide expressing nucleotide sequence isolated from the Sargasso Sea
agggtttagcaagcaacaatctaccgacagtaagcttgcttggtacgttattgtggcaactattccagcggttattattggctttttaatgaaaggctggatagaagaaaacgcacgtacggcgctggtaatagcgggtaccactattatttttggtttgctgctatggtacgccgatgccactgcaaaacgcgaacaagagctagaaggactgacacttaagcaagccatctatatcgggttagcccaagtattggcactcattcctggcacatctcgctcaggtattacgatgaccgcaggtttgatgttaggccttaagcgcgaagcgtgtgcacgcttttcctttttgctgtctattccagttattttaggcgcggggcttttggccactctcgacctgcttaatgccaacgaagcggtagactggtatgcgctgctttatggcgcggcgttttcattcgtaagcgcctacctttgtatctatttgttcctaagctggatatcgcgtatcggcatgctgccttttgttatctatcgcttggcgttgggcgtaatactactgtggtttgttttcgcttaag

SEQ ID NO: 268192 - DNA, 145 bp, Unknown
  Bacterial polypeptide expressing nucleotide sequence isolated from the Sargasso Sea
aatgatcacttattattttcaaattatttttttggctctaatccaaggtgtatctgagtttatacctgttagctcatctgctcacttattcctaatatcaaatatcggtaaatttagtattcaatcattagagatagacattagc

SEQ ID NO: 268193 - DNA, 985 bp, Unknown
  Bacterial polypeptide expressing nucleotide sequence isolated from the Sargasso Sea
aatgattcataaaataaaacacttcatcattctttctgccattgcctttaattttcattctgtgcaggcttcaaccgatcaagaagctaaaaagagtcttctgatagatgaattaattcaggaacatggatttgatgaacaatatgtactcaatatttttgaaaatatgaagtttttacctgagttgattgaatcgatttcacggccagcagagagaacgaaaacctggcctgaatacagaaagatctttgtgacaaataaaagaattgcggcaggagtcctttttgcaaaacaacatggagaagccattgaccgtgctgctagagaaatgggtgtgccaaaaaagattttgctgggaatattgggcgttgaaacttactttggaagaattcagggaaattataaagttgtagattcactctatacacttgcaactggatatcccccaagatcaaaattctttagaagtgaattgatcaaccttttttatctttgcagagaggaagggctctcaattctagacatcaagggttcatatgcgggtgcaatgggggcgcctcaatttatttcttccagctatagaaactatgccgtggatggaaatgctgatggcaaaattgatctcttcaatagctgggatgatgtgctcatgagcatcggaaattatttaaaaaaaaatggatgggataaatcaggattaatatacagtcgttatccaaggaatgatacaaaactctcaaatctcgcatcaaaaacaataaaaccaacatcaacaattcaagacctacttgatgaggggattaaaattgatggttttgaggaagacgacatagctcaactgattcaattagatggacttgacgacaaggatgattcttatattgggcatcacaatttttatgttataacaacttataatcgaaatgtgatgtacgcattggttgtgattcaactgggagaggcgattgatagttatttgtattaa

SEQ ID NO: 268194 - DNA, 985 bp, Unknown
  Bacterial polypeptide expressing nucleotide sequence isolated from the Sargasso Sea
aatgatttacaaaacaaaatatctagccatcaatttggctctcttgatcagcctatatccaacacttgcctcaacaaatcaagaaatagaaaagagtctgctaatagatgaattgattcaagagcatggctttgatgagcaatatgtaatgaatattttcgataatacaaagtttttgcctgagctgattgaatcaatatcaaaaccagccgaaagaacaaaaacttggccagaatatagagacatattcattacaaataaaaggatcgcggcaggagtcctttttgcaaaacaaaatgatgacatcattaatcgtgctgtggctgaaatgggcataccaagaaagatattgcttggcatattaggtgtcgaaacatattttggaagaattcagggaggctataaagtcatggattcgctttatacccttgctactggatacccaccaagagcaaaattcttcagaagtgaactgatcaatcttttttacctttgtagagaagaagatttttcgatacttgatataaaggggtcatatgccggtgcgatgggcgcagctcaattcatttcttccagttacagaaactatgctattgatggggatgctgatggaaaaattgaccttttcaatagttgggatgatgttctgatgagcattggaaattacttaaaacaaaatgggtgggatgcatcaaagcagatatacagccgctatcctgcaaatgaaatgcaagtttcaaaactgtcatcaaaaaccataaagccaacatcaacgattcaagaccttctaagtcatgatattgatattgacggcttcaataatgacgacatagcacaattcattcagttggatgcccaggatttacaggatgattcttatattggtcatcataacttttatgttataacaacttataatcgaaacgtgatgtatgcattggttgtgattcaactgggagaggcaatcgaaagctatctgaattaa

SEQ ID NO: 268195 - DNA, 453 bp, Unknown
  Bacterial polypeptide expressing nucleotide sequence isolated from the Sargasso Sea
aatgtttgagcttcaatattttattattggcattgtccaaggctttactgaatttttgccaattagttcatctggacatttagttcttgtatcacaattaacgagttggcaagatcaaggcctctttactgatgttgctgtacatgttggaacattattagcagttataatttatctaagaactcatataacatcattaattaagagttttttctcttttcagcttacacaaaatgataatttaattaaaattattattgcaacaataccggcagttatagttggtttttttatttttgattttgttcaattatattttcgagatatcaaagttgtagcagtgacaagtgttgtttttgctgctctattatttgtagcagatcatttcaaaatcaaaatatcttcatgggagaatatgagttatgttcaggcttttataaataggagtatttc

SEQ ID NO: 268196 - DNA, 283 bp, Unknown
  Bacterial polypeptide expressing nucleotide sequence isolated from the Sargasso Sea
gatgcttgaaattttaactggtgttttacagggactaacagaatttttaccgatatcatcaagtggtcacctcgtcattatttcatcattaagttctgaactcgacctaaacaccaatgacattgccttcttgcacattggtacattattctcaatagtatttttctacagaaagagaattttcgagatatttaaagatttagatacttttgtcttttatttcaaaattattcttgctggtattattccagcggtttctcattggtttactgacacctataca

SEQ ID NO: 268197 - DNA, 244 bp, Unknown
  Bacterial polypeptide expressing nucleotide sequence isolated from the Sargasso Sea
tatgttgcaagattttatagaaattttaattctttctgctgttcaaggaatttctgaatttttacccataagttcgtcagctcatttaatattggtatcaaatttttatgatttagaaacaagttctttattaatagacataagtctacatttgggctcattaattgcagtaattttttattttagaaaagagctatttgatcttagaaataataataggttattaagttttataattattggc

SEQ ID NO: 268198 - DNA, 226 bp, Unknown
  Bacterial polypeptide expressing nucleotide sequence isolated from the Sargasso Sea
aatgacttatttggagggcatagcacttgcagtcatacagggattaactgaatttttgcctatatccagttcagctcacttaatcctcttatctgagtttatgggctcaaaccagaaccttttctacgatgtctctttacatttgggaacattaatggctgtatgcatttatttccgcacagatttaattgaaattattaattcagttattaaatataagtcttta

SEQ ID NO: 268199 - DNA, 334 bp, Unknown
  Bacterial polypeptide expressing nucleotide sequence isolated from the Sargasso Sea
atgaatgatatattattgagttttattttaggcttagttcagggcttaactgaatttttgccaatttctagttctgctcatttgttgttcccaacactaatatttggttcaaatgatttaggattatattttgatatttcagttcatgccggaacgttgatagcagtagtttattattttaggaatgaaatctttctgatgtgtaaatcacttcttgtaactaataattttaatgaagataaaaacttagcaattcaattaataatcgctactataccaatagttatcttaggatttatttttaaagatttaattagtcaaaggatatttagca

SEQ ID NO: 268200 - DNA, 595 bp, Unknown
  Bacterial polypeptide expressing nucleotide sequence isolated from the Sargasso Sea
atgcatatttttcctgtaattattttagcaattattcaaggaattactgaattcctgccaatttcaagttcagctcacttgcttattactgcagaaatgatgaatataagagaaaatttatctctcgatataagccttcatttaggcactttgatggctgtattgatctattttagaactgaggcacttaacttctttaaattcataatgcctttcttttcgtcgaacaaaatatctaaaacaaagataaatcaaaatttgatcgttgcatcattacctataatttttattggtggcttagcttatatgtctggttttgctgaaatcttcagagatctacattttataggtctatcaactatagtctttggtttagcgctttattttgcggatatcagatctaatgaggaaagtcttaaagtggataatctatcttataagaaatctcttgttgttggtttttttcaaattttcgcgattattccaggtgcttcaagagcaggtgttgtttatacgggttcaagaatagttggtttaaatagagtcgaggctgcaaaattttcaatgctcttgtcaatacctgtaatactaatat

SEQ ID NO: 268201 - DNA, 278 bp, Unknown
  Bacterial polypeptide expressing nucleotide sequence isolated from the Sargasso Sea
tatgtttagagattttatagaaattttaattctttctgctattcaaggaatttctgaatttttacccataagctcatcagctcatttgatattggtatcaaatttctatgatttagaaacaagttctttattaatagacataagtttacatttaggctcattaattgcagtaattttttattttagaaaagagctatttgatccaaggaataataatagattattaggtttaataattattggctccttacctttaatattttttggatacattttat

SEQ ID NO: 268202 - DNA, 589 bp, Unknown
  Bacterial polypeptide expressing nucleotide sequence isolated from the Sargasso Sea
aagcctgaatgggcaggggctcacagagtcaggcaaattagcctggcttctactctatgcctcgctgccagcggctactgtgggtttcctggcagaggagttcattgcgggtacgcttcggtcaagtactgtcattgctacagcgacgctcgtgtttgcaggggtattgtggttcgccgacaaaatgggcgaatgcaaactaagtctgaaagagctgggtcacaggcgcgccttatggattgggttcgctcagtgtctggctctgattccgggtacttcacgctcgggaattacgataagcatggctctgttgtgtggtctgaatcgacaggcggcttcgaaattttcgtttctactgtctattccgatcatcgcgggtagcgggcttttgcaaggaattgcgttattcagcggcagcgcgctgcgggagttcgatctcgtgatgttgttcatgtcttcgaatgtggctctgcttactgcgctattgtgcatccatacgttcttgactctgattgacaagattgggttcctcccgttcatcatttaccgtttgattctcggggtttgcctgtatctatggctggtttga

SEQ ID NO: 268203 - DNA, 793 bp, Unknown
  Bacterial polypeptide expressing nucleotide sequence isolated from the Sargasso Sea
aatgaatgatattcttttaagtttagtgcttggattaattcagggattaactgaatttctgcctatttctagctcagcacatttgttattaccatccttaatttttggaactgtcgatttaggcttgtcttttgatatagcggttcatgcaggaacattggtggccgttatatatttttttaaatccgaaatcataaatatgtttaattcattttttaaaaatgactctgatcttgagggatataaaaacttagcaattttattaattgttgcaacattaccaattatattaatagggctagcatcctcagagctgatcgaacaaaggatttttaatactttcaccatagccttagcaaatttattttttgcactgcttttatttcttgcttttattaataaaaaaggcaataagaaaatatttgagctaactatatatggagccttaataattggaatagtccaatgttttgctctaattcctggtgcatcaaggtcgggtactgctataacagcagctttatttattggtttaagtctaaaagatgcatctaaattttcttttatgttgggtattccaacaattttaggtgctctgatatttctaatacttaaaataccaacggctgatactacttataatttcttaagtttgttcataggatttttcatttcaatgtttattgcatttttcacaatcaaatattttttaatttttattgaaaagatagggatgattccctttgttttatatagagtggcccttggagtctttttacttttattattttaa

SEQ ID NO: 268204 - DNA, 613 bp, Unknown
  Bacterial polypeptide expressing nucleotide sequence isolated from the Sargasso Sea
atggatgatttgagcctaattcagatattagtattaagcattctccaagcagtgacagaattcttaccaatatcaagttcagctcatttgctattaccctctcaaattcttggttggccagaccaaggattattttttgatatagccgttcattgtggcagcctcttagctgtaattatttatttacgtaaggagcttttatctttaagtttttttaaatcaaagtatttttttgtaattatttgtgcaacgctcccgatcattgctgttgcacctgttgttgcttcatacgatattagatggtccctaagtagtattgcagttgcgaacatcttttttgcaatattattgcttctatcaattaatctagggcaacaaaataggaaagttacagagattaacttcaaagatggcttcattattgggttttggcaaatatttagcttaatttctggagcatccaggtcaggaactgtgattacaggggcattgtttcaaggctttaatcgagaatctgctgctcgtttttccatcatgctttcgattcccactatagcaggagctttattttatataatttctaatgaagacattttaactacaaatgctgaca

SEQ ID NO: 268205 - DNA, 415 bp, Unknown
  Bacterial polypeptide expressing nucleotide sequence isolated from the Sargasso Sea
gatgtatgaaaatattatagaagttataattctttcagcaatacaaggtatatcagaattcttaccaataagctcttctgcgcatctaattctagtatcaagtctatatgaatttaaatctaactctttattaattgatatcagtctacacctaggatctttatttgctataatttatttttttcgcaaagatttattagatattaaacataataaaagacttttaagcttaattattttaggctcaattcctctgatggtctttggatatattctatattcaaccaatttaatttataacttaagaaatattaaagtaatcgcttggacaactttaatatttggaattattttatatatagctgaccaaagtcgtttcgataaaaaaatttctacaaacttaaattttcaaaca

SEQ ID NO: 268206 - DNA, 808 bp, Unknown
  Bacterial polypeptide expressing nucleotide sequence isolated from the Sargasso Sea
gatgggctttttatatttaagttttttggcaattattcaaggaattactgaatttcttcccgtgtcatcctccggtcacctgctcctgatcgcagagatgtccaagaataagcatcataacttgcaagtcgatatcgccgttcactttggaagtctactagctgtgattctatactatcggagagaaatgagtattttgatacgtggtttttacaaaaatattaggttggatttctcccatcaggactctaattttttccagttaatacttatagctacgattccagtcgtattattgggcttttttctaaagctttctggtctaatagactctattcgttcaccgaaagtagtggcgtttggaatgatctttttcggacttattttgtattttgctgaccgttttggagctataaatagaaaggaatctgaatggactgcaaaggacgcttttttcatgggtctatgccaagcgcttgcactaatacccggcacatcacgctcaggaaacactatcacaggcgctagaatgctcggtttttgtagacaaagtagcataaacttatcgatgataatgtctgtgccaacaatactggcttcaactgtaattctattctgggatgtgataggagctaacgcacctgtagacatgtcatacaacctaattagtgcagcatgtttatccttccttgctgcatatggatccataaagctattaatacttttcggtagatcaagaaattttactccttttgtaatctaccgcgttctcctaggggcgataatttttatcgtcttatatcaatag

SEQ ID NO: 268207 - DNA, 536 bp, Unknown
  Bacterial polypeptide expressing nucleotide sequence isolated from the Sargasso Sea
tatgagttttctgccaatttttattctaggtataattcaaggtattgctgaatttcttccaatttcttcctcagggcaccttttggtagctggaaaacttctagactttaaacagcaaagccttttaattgatgtaagtcttcatttaggtactctttttgcagtaatcttatatttccataaagaatctaaaattctcttaataaatacccatactattcttcaaaataaatcagacgagcaagctctattcactaaacatattatcactgcaacaattcctatagttataattggtggaattcttttttcatttggttttgccgatatattaagaaatcttcaagtaattgctttggcaacaattttttttggtatcctattatattttgctgatgtcaaatcaaatgatggcattaagggtcaagatttaacaacacaaaaatcattcttaataggaatgtttcaaattttatcatttatacctggcacaagtagagctggcattgttacacaggatcaagatttcttaattt

SEQ ID NO: 268208 - DNA, 709 bp, Unknown
  Bacterial polypeptide expressing nucleotide sequence isolated from the Sargasso Sea
atgagttttctgccaatttttattttaggcttaattcagggagttactgaatttctgccaatttcttcttcaggacatctatttgttgcgggtaattttttaaactttaaacaacaaagtctcttaattgacgtgagtcttcatttaggaacgcttggagcagtattattatattttagcaaggaatctaagattctcttactaaatagtcatactattttttcaagtaaatcagatgaaaatactttattcactaggcatgttctttttgcaacgatacccatcctaattgtaggaggactcctttttatttttgggattgctgacatagtaagaaatcttcaggtcattgcccttgctactatattatttggaattgtcttatatttcgctgacattaaatctggtggtaaattaacgataaaagatttaacagtacaaaaatcatttttgataggaatattccaactcttatcaataattcctggaacaagtcgtgcaggtattgtttatacgggatctaggtttcttaatttaagcagaattgaagcagcaaggttctcaatgattctttctatccctgtaattatcttgtcgtctgcaataccaattattcaattattgaaaacacctacgcaagaaaatttcattctcagcataataggctttattgtttcatttatagtcgcctatttctctattgatttac

SEQ ID NO: 268209 - DNA, 117 bp, Unknown
  Bacterial polypeptide expressing nucleotide sequence isolated from the Sargasso Sea
gatggactggatgcaggccctgtttttagggctggtacagggtttgaccgaatttctgccgatcagcagcactgcacacctgagggtggtgccccattggctggactggggagatcc

SEQ ID NO: 268210 - DNA, 601 bp, Unknown
  Bacterial polypeptide expressing nucleotide sequence isolated from the Sargasso Sea
aatgtttgaattacaatattttattattggtctagttcaaggtataacagaatttttacctattagttcttcaggacatttagtattaatttctgaagtttcgaattggaaagatcaaggtttatttacagatattgcagtgcatggaggtactttaattgcagttttaatttatttacgaaaagaaatatttaagattataaaaaatctttatcaatgccgcttatttcaaaatactttgttttttaaaatgattttagcaactcttccagcagtaatagttggattttttatttatgagtttgttggagattattttagaaatttacaagtagttgcttgggcaagtattatatttggaatcattttgtttttgtcagataaaaaacattctagcagttctacttgggaagaaatgaaagctaaagatgcttttattataggattttttcaaatttttgcatttattccaggagcaagtagggcaggtgttataataacaggagcacgatttttaggttttaatcgttcaaatgcagcaatattttctatgcttttatctattccaaattatatttgcttcattaattcttatccgcat

SEQ ID NO: 268211 - DNA, 784 bp, Unknown
  Bacterial polypeptide expressing nucleotide sequence isolated from the Sargasso Sea
aattttatattcttttactcaaggagtgacagaatttcttccaatatcttcttccgcacacttatttattttagaacatttattaaattggtctgtttcaggaagaagtatggctatcgccgctcatttaggaagcttgcttgcggtatgtatttatcttaaaaaagatcttttaaaaattttctgttcattttactttttaaaaaactttaaaaaagataataatattctacttgttagaaatctatttttaattacttttcctatattagtggtaggtttgcttatatttaaaaatttggataaagaactattatcttttaatttaattgctatagctagtataattggtgctggcttactctacattgtagataataataaaatagaaaaaagaaatatatattctctatctatattagattctttatttatagggttatttcaaatatttgctctgataccaggagcttctagggccggcacaataataactgctgctagaattttaaaactcactagaatagaatccacaaagttaggactatattcagggcttccaactatattaggggcggttatgttagaagcattatggcttataaataacttaagtaataaccaagaaataatatcgattatattaatacttttgctgtctttcttttttgcatatttatctattattttcctaatgaaatggcttaagaattatacttttctaccatttgtaatttatagaatttcattaggcatcatcatattgtgctttattaatatttag

SEQ ID NO: 268212 - DNA, 688 bp, Unknown
  Bacterial polypeptide expressing nucleotide sequence isolated from the Sargasso Sea
atgtatatttttcctgtaattattttagcaattattcaaggaattactgaattcctgccaatttcaagttcagctcacttgcttattactgcagaaatgatgaatataagagaaaatttatctctcgatattagccttcatttaggcactttgatggctgtattgatctattttagaactgaggcacttaacttctttcaatttatgatgccttttcttacttctaacaaaatatccaaaacaaagatgaatcaaaatttgatcgttgcatcattacctataatttttattggtggcttagcttatatgtctggttttgctgaaatcttcagagatctacattttataggtctatcaactatagtctttggtttagcgctttattttgcggatatcagatctaatgaggaaaatcttaaggtggacgatctatcttataagaaatctcttgttgttggtttttttcaaattttcgcgattattccaggtgcttcaagagcaggtgtcgtttatacgggttcaagaatagttggtttaaatagagtcgaggccgcaaagttttcaatgctattgtcaatacctgtaatactaatatcagcctcaatccctgttattgaaatagtgaatgacacgattgaaatgaattttttgtatttattttctggttttattatttctttcattactg

SEQ ID NO: 268213 - DNA, 649 bp, Unknown
  Bacterial polypeptide expressing nucleotide sequence isolated from the Sargasso Sea
tatagaaatcctaattctatccgcaattcaagggatatcagaatttttacctataagttcatctgcgcacttgattatagtttcgaacttatatgaattaaaatcaagttcattattaatagatataagcttacacttaggctctttattagcaataatatttttttttagaaaagatttatttaatctaagaaataatcaaaagttgttgagcctaattataattggttcaattccacttattatctttggatatatattgcactcaactgaattgattcttcttttgagaaacataaaagttatagcatggacgacattgtttttcggaattattttattttttgcagatcaaaggaaaattgatcaaaatatacaaacaaatctaaatatcaaatctataatatttattgggttgtttcaaattttagcattaatacctggtgttagtagggcaggtatcactattacagctgctagatttttaaaatttaacagagttgatgcaagtaaaatttcatttttattatctatacctgcattagcaggagcaagttttcttggtcttaaagatgcattaaatcaatctatacaagtaagtcatttaattataatcgctataattttgtcttttttattttcctatgtg

SEQ ID NO: 268214 - DNA, 526 bp, Unknown
  Bacterial polypeptide expressing nucleotide sequence isolated from the Sargasso Sea
atggaaaatatttttgaagttttgattatatcaatagttcagggaataactgaattccttccagtaagctcatctgcccatctcaacttactttcaaatttatttggttttcgagaggaagagttgttaataaatatcagtgcccacgtgggctctttatttgcagtaattttttttttcaaaaaggaaattataagttttggaaaaaatcaaaaattatttttaagaataattctggcatcattacctttgtttttatttggctatctaattgtaaattacaacttggttcctggtctaaggacttacaaaatcataggctggacaactttaatttttggtatcattctttatttagctgacaagtttaaagctaataaaaacattgaaaaaaattttactacaaaaaatgctgttattattggtttttttcagattcttgcactcatacctggtgtaagtagatctggaataataatgacgggagcaagggtattaaattttaagagagaggaagctgcgaaaa

SEQ ID NO: 268215 - DNA, 573 bp, Unknown
  Bacterial polypeptide expressing nucleotide sequence isolated from the Sargasso Sea
aatgaatgatattttattgagttttattttaggcatagttcaaggcttaactgaatttttaccaatttctagttctgctcatttgctgttcccaacactaatatttggttcaactgatttaggattatattttgatatttcagttcatgcgggaacgttgatagcagtagtatattattttagaaatgaaatctttctgattagtaaatcatttcttgcaactagtaatttcaatgaagataaaaacttagcactacaattaataatcgctactataccaataattattttaggatatatttttagagatttaattagtcaaaggatatttagcattaatgatattgcaatttcaaacttaatctttgcatcaatattgctttttgcttttctaaacaacaaaggtaaaaaaactcttattaatatcactatcttaggcgcatgttttataggactatttcaatgttttgctttgatacctggcgcttcaagatctggagcagcaattacagcaggacttttgattggattaagtctgaaagatgcttcaaaatttgcatttttgcttgcaat

SEQ ID NO: 268216 - DNA, 766 bp, Unknown
  Bacterial polypeptide expressing nucleotide sequence isolated from the Sargasso Sea
atcattggtattgtccaaggatttactgaatttttgccaattagttcttctggtcatttagttcttgtatcagaacttatgggttggcaagatcaaggtattttcactgatgtcgctgttcatattggaacattaatagcagttataatttatctaagatcacatataatagtattattttataattttctttcttttaaatttgctgcaaatgataatttaattaaaattattattgcaacaatacctgctgttatagttggtttttttatttttgatttagttcaattatattttcgagatatcaaagttgttgcagtatcaagtgttgtttttgctgctttattatttgtagcagatcattttaagatgaaaatatcatcttgggagaatatgagttatttgcaagcctttatcattggtttatttcaagttttagcatttatacctggggcaagtagagcaggtgttacaattactggagcacgttttttgggttttgatagatcatcatcagcaatattttctatgcttttatccattccaattattttagcatctttagtcttaacaagcttagatttagtaattagtgatgaaacaaatgttaatttatataaatctttatttgctggagttgtagcatgtattactgcactattatcaataaattttatgatgctaataatacaaagatcaacctataatatatttattatttatagagttattttaggttttatattattatacttctatgcttaag

SEQ ID NO: 268217 - DNA, 445 bp, Unknown
  Bacterial polypeptide expressing nucleotide sequence isolated from the Sargasso Sea
aatgtttcaaaatattatagaaattataatcctttcagctattcaaggaatatcagaatttctaccaattagctcctccgcacacttaattttagtttcaagtttatatgagtttaaatccaattctttattgatagatataagcctacatcttggatccttattagcaataatttatttttttagaaatgaattactggacacaaaaaataataaaagattattaggtctaattattcttggttctattccattaataattgttggatatattttgtattcaacaaattttatatacgcattgagagatgtaaaagttatagcatggacaactcttatatttggaatagttttatatatcgcagataaaaatagatttgataaaaaaatttctactaatttaaaccttcaatcaattttatttattggactttttcaaatatta

SEQ ID NO: 268218 - DNA, 793 bp, Unknown
  Bacterial polypeptide expressing nucleotide sequence isolated from the Sargasso Sea
tatgtatttttttccagttatccttttagcaattattcaaggaattacagagtttttaccagtaagctcttcagctcacttaataattgcctcagatttcatcgaatttacatatgaaaacattgctctcgatgtcagccttcatttagggactctgcttgcagttatagtttactttagatcagatattttattaataatgagtgggatcattgattctcagagtaagggaagaaatactgctattcaaatatttattgctactgttccaatcgtattctttggaggtctcgctttcatgacggggatagttgactatttcagaaatattcaagttattgcactttcaactattatttttggagttgttctctattacgctgatattcaaaatgataaaaaaactaaaactatttatgagcttaaaattgaagaaagttttatcattggactttttcaacttctagcaataattccaggaacatcaagatcaggaattgtttatagtggtggcaggttcttaaatatatcccgagttgaagccctaagatttgccatgctactttcaatacctactattttactatcttcattcattccaacctacaaatttatagaaagtccatcttctgagtttttaataataggcactgttggtcttattgtttcatttgcaactgcttatctttcaattagtctgcttatgagttgggttagaaacttttcgatggtaccatttgtagtttataggattattttaggaagtattcttttagtattttcgatcgtctaa

SEQ ID NO: 268219 - DNA, 757 bp, Unknown
  Bacterial polypeptide expressing nucleotide sequence isolated from the Sargasso Sea
atgtttcaaaatattatagaagttttaattctctctgcaattcaaggaatatctgaatttcttcctattagttcctctgctcatttaattttggtttctactttatatgaatttaaatctagttccttacttattgatatcagtctccatctaggttctctaatagcaataatttatttttttagggacgaactatttgatgctagaaaaaataaaagacttttaagtttaattatacttggatctattccgttaataattgttggatacatactttatagtacaaatttaatttatcagtttagaaacataaaaattatagcatggactactttaatattcgcaataattttatacatctcagacaaaaatcgatttgataaaaaaatttcttcaaatttaaatttttggtcaataatatttataggtattttccaaattttctctcttgtacctggagtaagtagggcaggaattactattacagctgcgagaattttaaaatttaatagagtagactcaagtaagatatcttttttactttcaatcccagcattggttggagcaagtgtcttaagcttaaaagatgttttggaacaatcaatacaatttaattacttagttgtcatcgcaattatatcttcttttattttttcttttctaacagtaaaattctttttaatttatataaataaattttcaaagaatgtgtttgtaatttatagaataataattgctttgattttatttagtttaa

SEQ ID NO: 268220 - DNA, 751 bp, Unknown
  Bacterial polypeptide expressing nucleotide sequence isolated from the Sargasso Sea
acagagtttttcccaatttcaagttccggacatttattatttgccgctgaaataatgagtattcccgaaagtctgatgttggatgtaagtctgcatttgggctctcttttggctgtcatcatctattttagaaatgatattaaagtattagtttttctgcttttaccattcagcatcaaattaagtaaggatgagaaaaatttagctttctgtctcattgttggaacattacctgttgtgattgttgggggcttactttttctaacaggttatgccgacattttaagaaatataaaaattgttggattatcaacaatagtttttggactgcttctctattattctgatagttacactaatgccaacactaagagcattgatagattaacaataaagaatgcacttatcgttggtcttttccaagtactagcaattatacctggggcaagtagagctggagttgtatattcaggttcaagaataattggtttaaatagaactgaagctgcaaagctttctattttgctgtcaatcccagtaattttaatttcttctgctataccatttctcaaactcatagagtcgccaacaagtgctaatatttcctctatcttttttggatttctgatctcattttttgtagcttatatatcaatcgactatttacttaaatggttgaaaaaaaatactatgaaaccatttgtaatctaccgaattattattggaacgcttatcttaatttatctataga

SEQ ID NO: 268221 - DNA, 604 bp, Unknown
  Bacterial polypeptide expressing nucleotide sequence isolated from the Sargasso Sea
aatgtctgatatttttttaagccttattcttgggcttattcaaggccttacagaatttcttcctatatcaagctcagctcatcttcttatcccttctcttgtatttggtgcaaatgatttagggttaggctttgatattgcagttcattcaggaactctgtgtgctgttatctatttctttaaaaatgatataaaagtttacgcattatctatatttaattcttccaacaggtatcaaaatgaaagaagggttgctattaatttattgattgcaacaataccgattgtatttgcaggaatattatttaatgatttaatttcacaaaggctagtaactaaagaacttattgcatggtcaaatattttctttgcatctctgcttctattgagtttttatttatctaaaaaaaataaggatatatttcatttatctatactaatgagcatttttataggctgtgttcaagtctttgcattaattccaggtgcctcaaggtcaggagtggtaataatggcttgtctatttctaggattaaatttaaaagattcctccaggtttgcatttcttttagccatcccaactattttgggagcattaatcttt

SEQ ID NO: 268222 - DNA, 231 bp, Unknown
  Bacterial polypeptide expressing nucleotide sequence isolated from the Sargasso Sea
tatggatttgattcaggcccttgtgctgggaatcgttcaaggactgaccgaatttctgcctataagcagtactgcacatttaagaataattcctcatttgctcgactggcaagacccagggacagaattttctgcagttattcaacttggaacattgctggccgttgtgctttatttctggaatgatgtagtctcactttcacgtgcggcattggtgagtttatggaaaca

SEQ ID NO: 268223 - DNA, 630 bp, Unknown
  Bacterial polypeptide expressing nucleotide sequence isolated from the Sargasso Sea
tatgttccaaaattttatagaaatcctaattctatctgctgttcaaggaatatcagaatttttaccaataagttcatctgcacatttaattatagtttctaacttatatgatttaaaatcaagttcattattaattgatataagtttacacctaggttcattattagcaataatttttttttttaggaaagatttattagatcttagaaataatcaaaagttattaagtttaattttaattggctcaatacctctaattatttttgggtatatattacattcaactgacttaattcatcttttgagaaatataaaagttgttgcatggatgacattactttttgggattattttattctttgctgatcaaagaaaaattgatcaagatattaataataatttaaacattaaaactataatatttattggattattccaaattcttgcattaatacctggtgttagcagggcagggataacaatgacagctgctagatttttaaaatttaatagagttgattcgggtaaaatttcttttttattatcaattcctgctttaattggagcgagttttcttggtcttaaagatgtatttaataaatcaatagaattaaattatttaattatagt

SEQ ID NO: 268224 - DNA, 637 bp, Unknown
  Bacterial polypeptide expressing nucleotide sequence isolated from the Sargasso Sea
tttggaaattattaaatctttcattctaggtgttgtacaaggcttaacagaatttttacctgtttcatcaagtggtcacattgagatttttaaagaaatattgggtttttcattcgaatcccaaaatggacttttttttacattaattctacaccttgcaactgcaattagtgcattactatatttttgggatgacgtaaaaaatattttaaaaagtacaattaagtttaaggatgatgaaaattttcactttactcttatgataataatatcaatgattccagcaggattagtaggtttttttcttgaagaaaaaataaatcaactttttaatggaaatttattgttggttggatctatgctaataattacatctcttctacttttaatttctgataaaatcaaatcaaaaaacagaaaactcagtgccaaaaattcatttttaataggtttagcacaagccctagcaatactcccgggtatttcaagaagtggttcaacaattgcaacttctatattcatgggaataaatagagaccttgcagcaaaattttcatttttaatggtaataccaataattgttggttcatcattaaaaatgatcttatttgataatcttgtttatgatgggtcaatg

SEQ ID NO: 268225 - DNA, 179 bp, Unknown
  Bacterial polypeptide expressing nucleotide sequence isolated from the Sargasso Sea
gatggactcgatgcaggccctgtttttagggctggtacagggtttgaccgaatttctgccgatcagcagcactgcacacctgagggtggtgccccattggctgggctgggaggatcctggtgccgaattttcagccgtgatccaattgggaaccctgttggcggtcctggtttattttt

SEQ ID NO: 268226 - DNA, 394 bp, Unknown
  Bacterial polypeptide expressing nucleotide sequence isolated from the Sargasso Sea
aatgtttgagtttcagtactttttaataggtataattcagggtgtcacagaatttttgccgattagttcatcgggtcacttagtattatttggaaaattatcaaactgggaagatcaaggtttatttaccgatattgcagtacattttggaacgttatttgctgtaattgtatatttaagaaaagaaatttattatttattcttaaacttatttcaatttagaatatttgaagatcaaattattttgaaaattattctatcaactcttccagcaataatattaggatactttatttatgattatgttagtatttattttagaagtattcaactgattgccatttcaagtattatatttgctattattttatactttgctgataaaattagcatg

SEQ ID NO: 268227 - DNA, 109 bp, Unknown
  Bacterial polypeptide expressing nucleotide sequence isolated from the Sargasso Sea
atgacggttttacacgttgtcgtgctagcagtcatacaaggggtaaccgagttcctgcccattagctcatctggacatctagtcctcgtaccatcaataactggctggc

SEQ ID NO: 268228 - DNA, 115 bp, Unknown
  Bacterial polypeptide expressing nucleotide sequence isolated from the Sargasso Sea
tatggatctaatacagacattaatattagcaattatccagggactaactgaatttttgcccatttcaagttctgcccacttgatactgatatcaaagatagttggttggaacgat

SEQ ID NO: 268229 - DNA, 298 bp, Unknown
  Bacterial polypeptide expressing nucleotide sequence isolated from the Sargasso Sea
atgcccgttttccaagcaatagtcctagggattacgcaaggtctgactgaattcttgccaatttcatcaagtggccaccttgaaattgttccatggctatttagctggaacgaatttgttggggactcgagagcggagaataccttcgatgtagcgctgcacttcggaacgctcatcggcgccgctatctacttacgcaaagacatttgtttctactctaaagctggcctgagcgctctagtcggccggcggccttggaacgccgaggcgaaaatagggtggctattgcttctatccg

SEQ ID NO: 268230 - DNA, 550 bp, Unknown
  Bacterial polypeptide expressing nucleotide sequence isolated from the Sargasso Sea
tatgattcaagatttaatagaaatactaattctttcagtagtccaaggaatttctgaatttttacctattagctcttccgcccatctgatcttaatatcaaatttttatgattttagctcgagctctttattcattgatattggcctgcacttgggttctttatttgcaataatctattactttaaaaaagatttactaaatttaagaaacaatcaaaaactattggttttgattttagttggctcgatacctcttataatttttggatatataatatattcgatcggaataattaatctcttaagaaatacagaaattattgcatggacaactttattttttggtttagtcctatttttatcagataaaagagatactgatcaaaatatatcaaccaacttaaatataaaaacaatattattcataggtttatttcaaattttagcactcgtacctggtgtgagtagagcaggaataactttaactgcagctcgatttctaaaatttaatagagttgactcaagtaaaattgcctttttattatctata

SEQ ID NO: 268231 - DNA, 648 bp, Unknown
  Bacterial polypeptide expressing nucleotide sequence isolated from the Sargasso Sea
aatgtttcaaaatattatagaagttttaattctctctacaattcaaggaatttctgaatttctacctataagctcctctgctcatttaattttggtttccacattatatgaatttaagtccagttctcttttaattgatataagccttcatttaggatctctaatggcaataatttatttttttagagatgaactatttgatgctagaaaaaataaaagacttttaagtttaattatacttggatctattcctttaataattgttggctatatactttataatacaggtttaatttatcagttaagaaacatagaaattatagcatggactacattaatatttgctattattttatacatctcagataaaaatcgatttgataaaaaaatttcttcaaatttaaattttcagtcaataatatttataggtattttccaaattttatctcttgtacctggtgtgagtagggctggaattacgataacagctgcgagaattttaaaatttaatagagtagattcaagtaagatatcttttttactttcaatcccagcattggctggagctagtgtcttaagcttgaaagatatttttgaacaatcaattcagtttaattacttagttgttatcgcaattatatcttcttt

SEQ ID NO: 268232 - DNA, 766 bp, Unknown
  Bacterial polypeptide expressing nucleotide sequence isolated from the Sargasso Sea
tatgtttcaaggttttatagaaatcctaattctttctgcagttcaaggaatatcagaatttttacctattagttcttccgcacatttaatattagtttcaaaaatctatgatttaaaaacaagttctttattaatagatattagccttcatttaggttctttgtttgcaataatcttttactttagaaaagacttgtttgatttaaaacataatcgaaaacttttatgtctaataatatttggttcattaccacttattatttttggatatatacttcattcctctgaacttatttatcttctcagaaatataaaagttattgcatggacaactttattttttggaataattcttttttttgctgataaatgcaaaattgatcaaaacatatcatcgcaccttaatataaaatctataatatttattggtatatttcaaattcttgcattaataccaggtgttagtagagcaggtatcactattacagcagctagatttttaaaatttaatagagtcgatgcaagtaaaatttcttttttattatctattccagctttagcaggagctagttttctcggacttaaagatgcatttaatcattcaattgaaataaactatttattaataattgcaataattttatcttttttattttcttatataactataaaattttttttaacttatattaacaaattttctttaaatatttttgtaatttatagaatatttgttgctttagttttatttctaataatatatttt

SEQ ID NO: 268233 - DNA, 218 bp, Unknown
  Bacterial polypeptide expressing nucleotide sequence isolated from the Sargasso Sea
catgttagaaaatttccttgaaatcctaattttatcaactgttcaaggtatttcagaatttttaccaataagctcctctgcacacttaatattagtttcaagtttttatgatttcaaatcagcctctttaataatcgatattagtctacatttaggatctttgttagctattctgctttattttagaaaagaactatttgacattagaaataacaaaa

SEQ ID NO: 268234 - DNA, 475 bp, Unknown
  Bacterial polypeptide expressing nucleotide sequence isolated from the Sargasso Sea
tatgacctttttaccaatattacttttaggaattatacagggtattactgagtttttacctatttctagttctgggcatttattaatttctgctgaaataatgaatattcctgaaagtctaatgttggatgtaagcctgcatcttggttctctcttggctgtcatcatctattttagaaaagatattaaagtattaatttttatacttttaccattcagcattaaattagataaagatgagaaaaatttagctttctgtctaattgttggaacattgcctgttgtgattgttggggggttactttttcttacaggttatgcagacatactcagaaatgtaaaagttgttggattagcgacaatagtttttggacttcttctctattattctgatagttattcaattgccaatactaaaagtaatgagagattatcaataaaaaatgcactgatcattggtctttttcaatactag

SEQ ID NO: 268235 - DNA, 260 bp, Unknown
  Bacterial polypeptide expressing nucleotide sequence isolated from the Sargasso Sea
aatgtttgagttacaatatttttttataggcattattcaggggattacagaatttttgcctattagttcttctggtcatttagtactatttgcaaaattaactgactgggaagatcaaggtttatttactgacatcgcagtacattttggaactttgtttgccgttatcgcatatttaagaaaagagattatttatttattatcaaatatttttcaatttaaaatctttgaagatcaaattatttttaaaattattctaa

SEQ ID NO: 268236 - DNA, 142 bp, Unknown
  Bacterial polypeptide expressing nucleotide sequence isolated from the Sargasso Sea
atgtttgaacttcaatattttattattggtattgtacaaggctttactgaatttttgccaatcagctcttctggacatttagttcttttatcagaattaaccaattggcaagatcaaggtctctttactgatgtcgctgtac

SEQ ID NO: 268237 - DNA, 769 bp, Unknown
  Bacterial polypeptide expressing nucleotide sequence isolated from the Sargasso Sea
tatgttccaagattttatagaaattctcattctatctgcgattcaagggatatctgaatttttaccgattagttcatcggctcatttaattatagtttctagcctttatgatctaaaagcaagttcactattaatagacgtcagtttacatttgggttctttattagcaataatatttttttttaaaaaagatttatttgattttaaacataatcaaaaattatttaaactaattataattggatctataccacttattatttttggatacatactacattcaactgaattaatttatcttttgagaaatattaaagttatagcatggacaacactattctttggaattattctatactttgccgatcaaagaaaaattgatcgaaatatttcttcaaacctcaatttaagatctattatgtttataggattatttcaaatgcttgcattaatacctggagttagtagagcgggaattactataacagctgcaagatttttgaaatttaatagaactgactcgggtaaaatttcatttttactttctatccctgctttagcaggagcaagttttcttggattaaaagatatacccaatgaatctttagaaataaacatatcaataattatcgctacgactttatcttttctattttcttatacaacagtaaaattttttttaatttaccttaatagattttctttaaatatttttgtaatttatagaataataattgcttttattttgctcttaataatttatttttaa

SEQ ID NO: 268238 - DNA, 148 bp, Unknown
  Bacterial polypeptide expressing nucleotide sequence isolated from the Sargasso Sea
catgggagagcaaatagattggctgcagatcatacttctgagtttcttgcagggcttaactgagtttttacctatctcgagctctgctcatctgattatcccctctcaaatcggcatctggaacgatcagggtcttgctttcgatgtc

SEQ ID NO: 268239 - DNA, 426 bp, Unknown
  Bacterial polypeptide expressing nucleotide sequence isolated from the Sargasso Sea
aatgcccctcctacaaatatttatattagccgcaatccaagggatcactgaatttattcctatatcttcatctggccatctaattttattaccagaattttttgattggaatgaccaaggcctacttgttgacgttgccgttcatgtcggaacactttttgctgtgattatttacttttggagagacatttttaaaattctgagttctgtctatcataaaactttgctgggcagaaaaagcacaaaaactgataaaaatttcagactctttttaaatttaggtattgcaacactcccaattatacctgccggttatatcatcaactattattctggtgatattcttcggtcaatggaggtaataggatgggcaaccattgtttttgctatatttctgctattagcagataaagtatgcatgacgtt

SEQ ID NO: 268240 - DNA, 729 bp, Unknown
  Bacterial polypeptide expressing nucleotide sequence isolated from the Sargasso Sea
caattcaaggaatatctgaatttctacctataagctcttctgctcatttaattttggtttccacattatatgaatttaagtctggttctcttttaattgatataagccttcatttaggatctctaatggcaataatttatttttttagagatgaactatttgatgctagaaaaaataaaagacttttaagtttaattatacttggatctattcctttaatgattgttggatatattctttataatacaggtttaatttatcagttaagaaacgtagaaattatagcatggactacattaatatttgcaattattttatacatctcagataaaaatcgatttgataaaaaactttcttcaaatttaaattttcaatcaataatatttataggtatttgccaaattttctctcttatacccggagtgagtagggcgggaattactataacagctgcgagagttttgaaatttaatagagttgattcaagtaagatatcttttttactttcaataccagcattggttggagcaagtgtcttaagcttaaaagatgtttttgaacgatcgattgaatttaactacttaataattattgcaattatatcttcttttattttttctttcttaacagtaaaattttttttaatttatattaataaattttcaatgaacgcttttgtgatttatagaattataattgccttaattttattttatttaatttattaaa

SEQ ID NO: 268241 - DNA, 196 bp, Unknown
  Bacterial polypeptide expressing nucleotide sequence isolated from the Sargasso Sea
atgaatgatattgttttaagtctagtgcttggattaattcagggattaactgaatttctgcctatttcaagctcagcacatttattattaccatctttaatttttggtactactgatttaggtttatcgtttgatatagctgttcatgctggaacattagtggctgttatatatttttttaaatctgagattgtaa

SEQ ID NO: 268242 - DNA, 475 bp, Unknown
  Bacterial polypeptide expressing nucleotide sequence isolated from the Sargasso Sea
aatgtctgatatttttttgagttttatcctaggggttattcaaggctttacagaatttcttccaatatcaagctcagctcatcttcttattccttctcttttatttggtgcaaatgatttaggattagagtttgatattgcagttcatgcaggaactctgtgtgccgttatttatttctttaaaaatgatctcaaagtttatgtattatcgatatttaattcttccagtagctatcaaaatgacagaagagttgctatcaatttattgattgcaacactgccaattgtctttgcaggaatatttttaaatgatttaatttcacaaagattggtaactaaagagcttattgcatggacaaatattttctttgcttgcctgcttctattaagtttttatttatctaaaaaaaataaggatatatttcatttatctttattaatgagcttttttataggctgtattcaaattttgcat

SEQ ID NO: 268243 - DNA, 565 bp, Unknown
  Bacterial polypeptide expressing nucleotide sequence isolated from the Sargasso Sea
gcgacgatttacactcaatatatttcttgcgtttctgccggctgtggtaattggtgcattgtcctatgatctgataaagagcgttttgttttcaccttgggtggtgagcacaatgcttattgttggtggcatcgcgataattattatcgagaaattgcaacgacaagagcactaccatttgccagaagaaattcctccgattaaggcacttgcgataggcttatttcaatgcacggcgatgatccctggcgtctcacgatcgggagcaacaatcatgggcgccttactagtcggtgttgagaggcgtgcagcagcagaattttcgtttcttctagcaatcccaaccattctggcggcaacagcttatgatttatatagaaattatgaaagcttgacgacagatagcattatgttgatcgctgtgggttttataacagctttcattgtagcaatgctggtagtgcgcggggttttagtttttatatctcggcatggctatgttccgttcgccatttaccgcattattgttggcactattatgttagcgatactttttctacgataa

SEQ ID NO: 268244 - DNA, 774 bp, Unknown
  Bacterial polypeptide expressing nucleotide sequence isolated from the Sargasso Sea
tacttagtattttgcttggcataattcaggggcttacagagtttttaccaatttctagttcagcacatctactttttcctaatttaatttttggcacaaatgatcttggtttatcttttgatattgcagtgcattttggaacacttatagctgtgattttttacttcaaagaagatatatttctcatgcttcaatctcttgcaacgagaaattcaacgtttccaagagaaaaaaaactatttggcttgttagttgttgcaactattccaattgttttagttggatttggagtttcagatattcttgaacaaaggttatttaatacctttactatcgcattgtcgaatatagtatttgcaattttattgttgctagtttttttacaaagaaaagaaaatttaagattagttgatttaacttttaaggcagctttgatcattggaatatttcaatgttttgctctgattccaggtgcttcaagatcaggtacagcaattactggagcaatacttattggattaacactgaaagattctgcaaaatttgcatttcttctgagcataccaactatattgggagcactagtgtttcttatttctgatattaatgaaataagcttaaattattcaactatgatcataggattttttacttctatgctcttcgctttttttactattaaatattttttagcttttgtagataaaattgggatgataccttttgtagtttatagactaattcttggtgttgttcttctagcgcttttgtaaa

SEQ ID NO: 268245 - DNA, 212 bp, Unknown
  Bacterial polypeptide expressing nucleotide sequence isolated from the Sargasso Sea
tatggatctaatacagacattaatattagcaattatccagggactaactgaatttttgcccatttcgagttctgcccacttgatactgatatcaaaaatagttggttggaacgatcaaggattattgtttgatattgctttgcattttggaacacttttggcggtccttatatatttcaaagatgatctttgcaggatgattgaagacccta

SEQ ID NO: 268246 - DNA, 724 bp, Unknown
  Bacterial polypeptide expressing nucleotide sequence isolated from the Sargasso Sea
actgaatttctaccgataagttcctcttctcatattattcttttttcaaaatttatggatttcataagtgaggacttaatacttaatgtaagtttacatataggctcgtttttagctgtaattgttttttttagaaaagaaatattaagctttttaatttataggaaagtttttatgttaataattttagcttctttaccgatagttctatgcggttatcttattgcacagtcaggtattatcaatgatttaaggtcgcttaaaataataggttggacaaccgtgttatttggtattttactttacttctcggataaaatggaaaatgaaaaaagtcttgaaattaatttagatattaaagcagctttaataataggttttttgcatattttttctttgataccaggagtaagtcgatctggaatagccattactgcagcaagatttctaaaatttgatagagtcaatgcagctagaatttcatttcttctatcgattccaacattactagcagtatcagtttttggaatttacaatatttatattactggtagtttcgatttgattaaacttaattttactagcataatattatccttcattttttcttatattacaatggcagcttttttgggttatataaagaaagcaagtcttgatgtttttgttttatacagaatagttcttggtattttaattcttatatttgcttaccaaggttaat

SEQ ID NO: 268247 - DNA, 344 bp, Unknown
  Bacterial polypeptide expressing nucleotide sequence isolated from the Sargasso Sea
tttgcctctaactcatttaaccatattggcgttaatccaaggcttaaccgaatttttaccaatttcttcttcgggacacctcataattttccctaaattactagactggcaagatcaaggaattacaatcgatgttgccgtccatgctggctccctgctagctgttctgatctttctgtggcgagatattgggcgaattttactagaactgacccatctagcgaggcctgggggatctagcacccctcccctcctctacttattattgattgcctccatgcctttaatagtagttggatttttagtttcaactgtaatgcaggaccttacaagaaacatcgaag

SEQ ID NO: 268248 - DNA, 619 bp, Unknown
  Bacterial polypeptide expressing nucleotide sequence isolated from the Sargasso Sea
tatgtttaaggattttatagaaattctaattttatcagctattcaaggtatatctgaatttttaccaataagttcatcagcacacttaattatagtatcaagtttatataatctaaaagcgagttcgctgttaattgatataagtctacacttaggatctttgttagcaataatattttttttcagaaaagatctatttgacattaaaaataatcaaaaattattaagacttatcataattggctcaatcccacttattatttttggatacattttgcattctacagaattaattcatcttttaagaaatattaaagtaatagcctggactacattaatttttggaatttttctttatttttcagatcaaaaaaaaatttataaaaatatttcatcaaacttaaatataaaatcaattgtatttattggaatgtttcaaatacttgcattgataccaggcgtaagtagagcaggtattactataacagctgcaagattattgagttttaatagagtggactcaggaaaaatttcttttttactttcaattcctgctttagcaggggcaagttttctaggtttgaaagatataccaaatgagtcaattgaaataaattta

SEQ ID NO: 268249 - DNA, 640 bp, Unknown
  Bacterial polypeptide expressing nucleotide sequence isolated from the Sargasso Sea
aatgagtgattcttttcttagtattttgcttggcataatacaggggctgactgagttcttaccaatttctagttcagcgcatttactttttccaaatttaatttttggcacaaatgatcttggtttatcttttgatattgctgtgcattttggaacactcatagccgtcattttttacttcagagaagatatatctctcatgcttcaatctcttgcaacgagaaattcaacgtttccaaaagaaaaaaaactatttggcttgttagttgttgcaactattccaattgttttagttggatttggagtttcagatattcttcaagaaagattatttaatacctttactatcgcattgtcgaatatagtatttgcgattttattgttgctaatttttttacaaagaaaagaaaatttaaaattagttaatttaacttttaaggcagctttgatcattggaatatttcaatgttttgctctgattccaggtgcctcaagatcaggtacagcaattaccggagcaatacttattggattaacactgaaagattctgcaaaattttcatttcttctaagcataccaactatattgggagcacttgtgtttcttatttctgatattaatgaaataagcttaaattat

SEQ ID NO: 268250 - DNA, 559 bp, Unknown
  Bacterial polypeptide expressing nucleotide sequence isolated from the Sargasso Sea
aatgtttgagcttcaatattttattattggattaattcagggttttactgaatttttaccaattagttcatctggtcacttagtcttagtatctgaattaacaagttggaacgatcaaggtcaatttactgatgtagctgtacatgtaggcactttaattgcagttcttatttatcttcgatcacatattttatctttgatgattaattttttaacctttcgttttaaaaataatgaaaatttaataaaaattataatagcaacacttccagcaattatagtcggctactttatgatagattttattcaaacttattttcgtaatattcgaattgtggcaatatcaagtataatttttgctgcaatattatttgtttcagatcattataagattaaaatttctgaatggaaaaatatgaattatttccatgcttttataattggattgtttcaaattttagcttttatcccaggagcaagtagagcaggagtaaccattacaggagctagatttttaggctttaatcgttcatcagccgccatattttcaatgttatta

SEQ ID NO: 268251 - DNA, 754 bp, Unknown
  Bacterial polypeptide expressing nucleotide sequence isolated from the Sargasso Sea
atgactgatagtagtattttttatgttttttatggtttaattcaaggaattactgaatttatccccataagttccagtgggcacattaatatattagaaatctactttaaaagtttagaatctagaaattatttgtatgaaacatcagcacactttgcatctttatttgctttattattatatttatttgcaaacaaacatttttcaaaatcaaatatcaaagcttactggaaactattagtctatgggaccttacctgcaattatccttggatttataatcaaattttacaatgttaattatattagtttaaagttgattggatacacttcgattactggagcaatattactctatgtttcagataaaacaaaaaaatttaagttagaaattaaaaataaaagtaccaaatttattctggctggattttttcaatgtctagcttttttaccaggttttagtagagcaggaagttgtataattgcattcagaatatttggagaagatagaaaatattcatctatttatagtttgtatatgggtatacctataatttgtttgtcttttttttccaatgttaaagaatttgaaaattttattatagataaaaatttatctataatttttattattacatttttttcagcatattttacaatatctgtatttattaaagtgataaataaaattggctttacaccttttgtaatttatagaattttattaggtttaattttattaatttatttaactt

SEQ ID NO: 268252 - DNA, 391 bp, Unknown
  Bacterial polypeptide expressing nucleotide sequence isolated from the Sargasso Sea
atgacgtttttaccaatactcctattaggaattatacaaggtattactgagtttttgcctatttcaagttctgggcatttactaattgccgctgaaataatgcatattcctgaaagtctgatgctggatgtaagcctgcacctaggctctcttatggctgttatcatctattttagaaaagatattaaagtattagtttttctgcttttaccattcagcatcaaattaaataagagtgagaaaaatttagctttctgtctcattattggaacattacctgttgtgattgttggaggcttactttttcttacaggttatgcagacattctaaggaatataaaaattgttggattagcgacaatagtttttggacttcttctctattattctg

SEQ ID NO: 268253 - DNA, 740 bp, Unknown
  Bacterial polypeptide expressing nucleotide sequence isolated from the Sargasso Sea
gatggaattgctcaacatcgtttttttatcgttgattcaaggtattacagaattcttaccagtatcttcgagtgctcatcttattttatttccaacttttagtggaaatgaagaccaaggacttctaattgatatttctgtccaccttgggagcctgatagccgtaacaacatttttctggactgatgtaaaagccatcatagcaagcgcttctaagttcttttctggaaatttaaatggtctagatagcaatttagtagtctgtttagttgtcgcaacgattcccgcagtagttttgggcgcgacattaaaatacacaggcatataccagtatattagagaaagcacccttataattggcatagctatggtagggtttggtattttgctttggttctccgataggaaagagcaagtcagtgtggggatatcagattggacgattagacacgccttaatattaggattttggcaaatgctcgcattaattcctggcacgtcaagatccggaataacaattacaggagcccgctttttaaactatgatcgatcaagcgcgataaaaatatcgatgcttatgtcgatacccataatacttgcggccgcaactctagaattctactatttaggttttgaaaaaatttcaataaaccagcttgagatagttttagctataactatttcggcgttagcggctttcggtgctcttagtttaatgatgcggttattaacgactgtta

SEQ ID NO: 268254 - DNA, 656 bp, Unknown
  Bacterial polypeptide expressing nucleotide sequence isolated from the Sargasso Sea
catgtttcgagattttatagaaatcctaattctgtctgcggtgcaagggatatcggaattcttacccataagttcatcagcacatttaattgtagtgtctaacttatatgatttaaaatcaagctctttattaatagatataagtttacatttgggttcattattagcaataatattcttttttaggagagatttaatagatctaaaaaataataaaaaattattgagtctaattatatttggttcaatacctctaattgtttttggatatttattatactcaacagaattaattaatcttttaagaaacataaaaattatagcttggacaacattattttttggaattattttattttttgcagatcaaagaaaaattgatcaaaatatacacacaaacttgaatatcaaaagtataatatttataggattgttccaaattcttgcattaatacctggagttagtagggcaggtattacgatgacagctgctaggtttttaaaatttaatagagttgactcaagtaaaatttcgtttttactatcaatcccagctttaactggagcgagttttctaggtcttaaagatgcttttaatcagtcaattgaaaataattatttaattataagtgcaataattttatcttttttatttt

SEQ ID NO: 268255 - DNA, 259 bp, Unknown
  Bacterial polypeptide expressing nucleotide sequence isolated from the Sargasso Sea
aatgcttacaaatattatagaaattataattttgtctcttatacaaggtgtttctgaatttctacctattagctcatctgcacatttaatcgtcgtatctacattgtatgaatttaaatccagctcgttattaatagatgttagtttgcattttggatctttattagcaattttatttttttttaaaaaagaattatttgatttaaaaaataataaaaaattattatttttaaattattattgggttctattccattaa

SEQ ID NO: 268256 - DNA, 437 bp, Unknown
  Bacterial polypeptide expressing nucleotide sequence isolated from the Sargasso Sea
catgtctttggaacatttaatccttcttgcgctcattcagggcattaccgagtttctccccatcagttcgtctggtcatctgagcctcgttcatgagctcacaggctgggcagatcagggcgtactcgtcgatgttgccgtccatgcaggaacccttggggcggttctgctctattttcggcaagatgtctgggcaatggccctgggcgggctctgccttttgcggggtaaactcaccgatgacggacgtatggcgctctatatcgttggggctaccatccctgtggtcattgtgggatatttccttctctccacgggctatgtcgacattctgcgggcagccgcgattgtggcctgggccaatctctttttcgctggtgtactctggatcactgaccgcgcgggggcagtgacacggcgtcttgagcagatgaact

SEQ ID NO: 268257 - DNA, 628 bp, Unknown
  Bacterial polypeptide expressing nucleotide sequence isolated from the Sargasso Sea
ggtcttcatttaggatctctagcagcaattatattatattttaagaaagatttaattgagataaaaaaaaataaaaacttaatatcattgttattttttggttccttaccattgttattttttggttttattttatataacagtggaataataaatttttttagaaatattgaaattatagcatggtcaactcttttatttggaatatttttatatattgcagataaatctaatataaataaaagaattgataataatttaaacattaaaaatatatttataattggcatgtttcagtgtctagctttaattcctggtgtaagcaggtcaggaataactataacaagtgcaagattaatagaattcaatagagtagatgcatcaaaaatatcattttatttatctatacctgcattaatgggtgcaagttttcttgggttaaaagaagtatttaataaaaatttagattttaacttagtaattttgttctcatttatattatcatttatattttcgtatattacaattaaatattttttaatttatgttaaaaattattctttaaatatttttgtttattatagaatatttttagctttagtactttttgtatttatttatggataga

SEQ ID NO: 268258 - DNA, 726 bp, Unknown
  Bacterial polypeptide expressing nucleotide sequence isolated from the Sargasso Sea
tatgagtgatattttatttgggatcatacaaggagtcactgaatttttaccaatttcttcaagtggacatctcgtagttttgtcagagttgtttaaagacaacagttttaacacatatgagatagcatttttacacttaggaacatttttttcaattttaatatattacttcaaagacattttttcaatcataaaaaaccgtaactcattgattcaaacttttaaacttatagttataggtgtattaccggctgcagtttttggattatttttaccaataagtaatttaattgatgaaagtagctcaattttagtaataacctcagtagcttatatttttattgcaagtgtgctatattttgctgacaaactggaagagggcgataaaagtatattcgacctttctttaaaagaatctctaacaataggattagcacaagccatcgcattattccctggagtatcaaggtcaggtatcaccttaagtacagctttgtatctgaaattaaaaaaaactgaagcaatattcttttcacttcttcttggcttgccgacaatttttggagcttggctgctaacatttatgcaggcaacagaaccttttgatgactctttatggattccttgcattgctgcatttctatctgggctagttgcaatcagagttcttattaattttacaattagttctaaattgaatgtgtttttcatttattgttttttaat

SEQ ID NO: 268259 - DNA, 769 bp, Unknown
  Bacterial polypeptide expressing nucleotide sequence isolated from the Sargasso Sea
atgtatgaaaatattatagaagttataattctttcagcaatacaaggtatatcagaattcttacctataagctcttctgcacatttaattttagtatcaagtctatatgaatttaaatctaactctttattaattgatatcagtctccacctaggatctttatttgctataatttatttttttcgcaaagatttattagatatcagaaataataaaagacttttaatcttaatcattctaggttcaattcctctgatggtatttggatatattctatattcaactgatttaatttataacttaagaaatattaaagtaatcgcttggacaactttaatatttggaattattttatatatagctgaccaaagtcgtttcgataaaaaaatttctacaaacttaaattttcaaacaattttttttataagtttttttcaaatactttctctaataccaggtgtaagtagagcgggaattacaattactgcagcaagaattttaaaatttaatagagtagactcaagcaaaatatcatttttactttctatacctgcgctttctggtgcaagcttccttggattaaaagatgtatttaaagaatctattgagttcaattatttaatctttattgctataatttcttcttttattttttcttttataacagttaaattttttttaaattatattaataaattttctatgaatgcatttgtaatttatagaattattatagcattaattatatttttaattatttataattagt

SEQ ID NO: 268260 - DNA, 538 bp, Unknown
  Bacterial polypeptide expressing nucleotide sequence isolated from the Sargasso Sea
tatgtttcatgattttatagaaatcttaattctatcagctgttcaaggaatatcagaatttttacctataagctcatctgcacacttaattatagtttctaacttatataatttaaaagcaagctcattattaatagatatcagcttacatttggggtctttattagcaataatatttttttttaggaaagatttatttgatttaaaaaataatcaaaaattattgagtttaattataattggctcaataccccttattatttttggttatgtattacatactactgaattaattcatcttttaagaaatacaaaagtaatagcttggactacattattttttggaattattttattttttgctgatcaaagtaaaaacgatcaaaatatatctacagacttaaatattaaatcaataatatttattggtttgttccaaatacttgctttaatacctggtgtaagtagagcgggtattacaatgacggctgctagatttttaaactttaatagagttgactcaggaaaaatttccttt

SEQ ID NO: 268261 - DNA, 314 bp, Unknown
  Bacterial polypeptide expressing nucleotide sequence isolated from the Sargasso Sea
gatggatatttttcaggccactttttacggaattattcaaggacttaccgagtttttgcctattagtagcagcgggcatttagctttgttaccccagtttcttgaaatccgagatccaggcgttgcgtttgatttgactatgcacgtaggaactgctttggccgttatcctttattttagaaaagagctcagggttcttattagagatactgtttggactttaatggggaagaaagagaagttaacatcgaggtctttacttcccctttatatgattgcgtctactgttacgacacttgttctcgttgttggat

SEQ ID NO: 268262 - DNA, 769 bp, Unknown
  Bacterial polypeptide expressing nucleotide sequence isolated from the Sargasso Sea
tatgttccaagattttatagaaattctcattctgtcggccattcaaggtatttctgaatttttaccaattagctcatcagctcatttaattattgtttctagtctgtataatctaaaagcaaattcactgttaatagacataagtttacatttaggttctttgttagcaataatatttttttttagaaaagatttatttgaccttaaacataatcaaaaattattaaaattaattataataggctcaataccacttatcatttttggatacatattacattcaactgaattaattggtcttttaagaaatattaaagttatagcatggactacgttattttttggtatcattttatactttgctgatcagagaaaaattgatcaaaatatttcctcaaaccttaatataaggtctattatgtttattggattatttcaaatacttgcgttaatacctggtgttagtagggcaggtattactataactgctgcgagatttttaaattttaatagagtcgactcaggtaaaatttcatttttactctctatcccagccttagcaggagcaagtttccttggattaaaagatattcagaatgaatctttagaaataaatatactaataattattgctataattttgtcttttctattttcttatataacagtaaaattttttctgaaatatttaaataaattttcattaaatatttttgttatttatagattaataattgctttaattttattatctataatttatttttaa

SEQ ID NO: 268263 - DNA, 738 bp, Unknown
  Bacterial polypeptide expressing nucleotide sequence isolated from the Sargasso Sea
ttcccgctattcaaggaatatcagaatttttaccaataagttcatccgcacatttaattatagtctctattttatataatttaaaaacgagttctttgttaatagatataagcttacatttaggctctttattagcaataatattcttttttaaaaaagatttatttgatttgagaaataatcaaaaattattgagcctaattataattggctctataccgcttattatttttggctacatattgcatacaactgaattaatatatctcttaagaaatataaaaattatagcttggacaacattgttttttggaattattctatattttgctgatcaaagaaaaattaatcagaatatatctacaaacttaaatataaaatcaattttatttattggattatttcaaattcttgctttaattcctggtgtgagtagagcaggaattacgatgacagctgctagatttttgaaatttaatagggttgactctggtaaaatttcatttttactatctatacctgcattattaggtgcaagttttcttggtattaaagacgcattaaatcaatcaattgaaataaattatttaattataacagcagtatttttatcttttctattttcctatattactgttaagttttttttaatttatattaacaaattttctttaaatatttttataatttatagaattattatttcgctaataatattcatggtaatatatctttagg

SEQ ID NO: 268264 - DNA, 317 bp, Unknown
  Bacterial polypeptide expressing nucleotide sequence isolated from the Sargasso Sea
aatgtttcaaaatattatagaagttttaattctatcagcaatccaaggcatatcagaatttctaccaataagctcatcggcacatttaatattagtttctagcttatatgagtttaaatcaagctctttattaattgatattagtcttcatttaggttctttatttgcaataatttatttttttcgaaaagaattactagatattaaaaataatcagaaaatcttggttttaattactttgggatcagttcctcttataattgttggatattttttatacacaacaggtatcatttatagtttaaggaatattgaag

SEQ ID NO: 268265 - DNA, 667 bp, Unknown
  Bacterial polypeptide expressing nucleotide sequence isolated from the Sargasso Sea
aatgcttcaagattttatagaaatcctaattctttctgcagtccaaggaatttctgaatttttacctattagctcttcagctcatctaattttaatatcaaatttttatgactttagctcaagttctttattcattgatataggtctgcatttgggctctttgtttgcaataatttattactttaaaaaagatttattaaatttaagaaacaatcaaaaattattggttttgattttatttggctcaatacctcttataatttttggatatataatatattcgactgaaataattaatcttttaagaaatatagaaataattgcatggacaactctattttttggtttagtcctatttttatcagataaaagagatgttgatcaaaatatatcgaataacttaaatataaaaacaatgttatttataggcttatttcaaattttagcactcgtacctggtgtaagtagagcaggaataaccttaacagcagctcgatttctaaaatttaatagagttgactcaagtaaaattgcctttttattatctatacctgcgttagctggtgcaagttttttaggtcttaaagatgctgtacaacaatctgctgaattcaattatttattattaattgcgattaccctttctttttttcttctcatttataac

SEQ ID NO: 268266 - DNA, 467 bp, Unknown
  Bacterial polypeptide expressing nucleotide sequence isolated from the Sargasso Sea
gcgtcatccactcgttattgcagcggcgacgatcgggtttgcggttttgctctggtgggccgatcggtatcgatcagaggccagggcactgagtgatttgggattccggggtgctgtgttgattggcgtgtttcaggcgctggctttgatcccggggacatcacgctccggcattacgatcacggcggggttgatgctcggattatctcgtgaggcggcggcgcggttttcctttctcatggcgattcccattattgccgcggcaggctgttttaaagcggtctccctgatgcaatctgaagatgccgtcctttggaatctttttgctttgggggtggccgttgcttttttgagcgcgtgggccgtgatcgcactttttctgagatttatcagccgtgtgggcatgacgccctttgtgctttaccggattgcgctgggcagcatactgctgatcctgttctggtaac

SEQ ID NO: 268267 - DNA, 179 bp, Unknown
  Bacterial polypeptide expressing nucleotide sequence isolated from the Sargasso Sea
tatgtctttaaatttaattcttattttatctttaattcaaggtataacagaatttctacctatttcatctagcggtcatcttgtcataataccatttttcatggaattaccatatcaaggcaagttatttgatataagcgtccattttggaagcttgtttgcagttatcttttatctaa

SEQ ID NO: 268268 - DNA, 184 bp, Unknown
  Bacterial polypeptide expressing nucleotide sequence isolated from the Sargasso Sea
atgtttgagttacaatactttttaatcggtatgattcagggtgttacagaatttttacctattagttcatctggtcatttagtattatttgctcagttaactaattggggagatcaaggattatttacagatattgctgttcatttgggaactttagtagcagtgataatttatttaagacaag

SEQ ID NO: 268269 - DNA, 772 bp, Unknown
  Bacterial polypeptide expressing nucleotide sequence isolated from the Sargasso Sea
atgacaatcattgatggcattatacttggaattattcagggtatcactgaatttttgccaattagcagttctggtcatcttgtaattgcacaagagttacttggaattgaacaaccaggtaatcaatttgaaattctagtgcatttgggtacactagctagtatcacagtgatattttttgacgatattagatctttattcttatcaataaataaaagaagaacgcaaagatttatatcttatattataataggcactatccctgcagtttgtttaggccttggtttaaaagatacgctagaatcattatttgaaaacatttattatgtgggatgtgctcttatttttactggagtaattcttttttcttccaaaaatttcacacgaagggatgaaggtaatgcatattataaatcattacttattggaattgcccaagcattggctattataccaggaatctctagaagtggtatgacaataagttgcgctctctttttaggcctaagtgcaaaagaatctgctaaatactcttttttacttgcgatacctgttatatttggtgcagggttactcatggcattagacattgatgatggtctgcaaattgagatatcagtcgcgatagctggattaatcagttcatttattgtgggtgttatttctcttaaatggttactgcaattgatacaaaaaggaaagttccactattttggagtatattgttttttcgtcggtataatcagtttttttataaatggaccttattagt

SEQ ID NO: 268270 - DNA, 495 bp, Unknown
  Bacterial polypeptide expressing nucleotide sequence isolated from the Sargasso Sea
ttaaagatatcataaaaacggatgcacgcgagctttggctgatcggtgctgcattgataattctggcaattggtttatatgctgctgaaaaactatcaaagcaaaatagacaaattgatcaattgaaatttctacaaattcaacttattggacttacacaggcacttgcccttattccaggttgttctcgttcagggtctactataatgggtggtttgatagttggtctaaaaagagaagaagccgctcgtttttcttttttacttggaatacctgctatactaggtagtggtatttttgagttcgtagaaatgtttgaggaaggaatcattagcagtgattaccagaacctagttattggagtttttgcatcatttgttgttggatacctttcaatcgaatttttgcttcgtttccttagaatacatggtaccctcgtatttgttatttatcgtatagttttaggcacaggagttttagtttttttggcataaa

SEQ ID NO: 268271 - DNA, 382 bp, Unknown
  Bacterial polypeptide expressing nucleotide sequence isolated from the Sargasso Sea
gaatgtatcttggtctctaaaaaactcttttaaaatcggctgctggcaagcattagcattaattcctggcacatcacgatcaggcataactatctcagctgcaaggcttcttggatacagccgtgaagaagcagttaacatttctatgttactatccatacctgtaataattgcagcaaccgctgtgtcaataatggacaattacttgaatgctactgaaattgattttcaagttatcttgatagctctaatattttcctttagcgcggcatatttggccattgcagtgatgctaaaatttttaaaaactttgggatttttaccatatatcatttacaggatcgtacttggtattgccctaattttttggaccgtaatatag

SEQ ID NO: 268272 - DNA, 595 bp, Unknown
  Bacterial polypeptide expressing nucleotide sequence isolated from the Sargasso Sea
aatgtttcaaaatattatagaagttttaattctctctgcaattcaaggaatatctgaatttcttcctattagttcttctgctcatttaattttggtttctactttatatgaatttaaatctagttctttgcttattgatattagcctccatctaggttcactaatagctataatttatttttttaaagatgaattgtttgatatcagaaaaaataaaagaattttaaatttaattgtattaggatctattccattaataattgttggatacatactttatagcacaaatttaatttatcagttaagaaatttagaagtcattgcttggactactttaatatttgcaattattttatacatctcagataaaaatcgatttgataaaaaaatttcttcaaatttaaattttcagtcaataatatttataggtattttccaaattttctctcttgtacccggagtgagtagggcaggaattactataacagctgcaagaattttaaaatttaatagagtagattcaagtaagatatcttttttactttcaatcccagcattagctggagctagtgtcttaattttaaaagatgttttt

SEQ ID NO: 268273 - DNA, 772 bp, Unknown
  Bacterial polypeptide expressing nucleotide sequence isolated from the Sargasso Sea
atgagctacattgaatctttaattttaggagttttacaaggtgttacagaatttctaccaattagtagctctggtcatcttgtaatagtgcaacattttttaggtgttgttaatgaaggtttattttttgaagttattctgcatttaggtacattaatatcaattttaatttattattatcaggatttacaaaaaataattattaattatttcaaaggaaactatggtgctaaaaattatgttcattgtttgattatagcaactttaccagcagctataattggttttttatttcaaagtgtaattgagaatgcttttgttttttcattagtgaaatggatgtttggtataacagggctttttataggattaacttattttattataaataaaacgaataaaaaaatgatttggtcgatagcaattatgattggcattgctcaggtttttgctcttttgcctggaatttctagatcaggaattactatttcttgtgcattatttatgggcattaagcatgagcaagctgcaaaattttcattttatatggcaatcccaatattgattggagctacatttttacaattgatttctttagaaaattataaagtttttttttcaatgcctttatttgttgcttttatttcatcagctgtatcaggttatttagttattaattttttattaaatgtaataactaaaggaaaattttatcttttctcagtttattgttttattttatcatttatattatttttttttaatttatgaa

SEQ ID NO: 268274 - DNA, 613 bp, Unknown
  Bacterial polypeptide expressing nucleotide sequence isolated from the Sargasso Sea
tatgctccaagattttatagaaatcttaattctttctgcggtccaaggaatttctgaatttttaccaattagttcttcggctcatctaatcttgatatcaaaattttatgattttaactcaagctctttatttattgatataggtctacatttaggatctttgtttgctataatctactattttaaaaaagatttgttaaatttaaaaaacaaccaaaaactattagttctaatcttagttggttcaataccccttataatttttggatatatactatattcaacagagataattaatcttttaagaaacatagaaatcattgcatggacaactttactttttggtttagttctatttttttcagacaaaagagataccaatcaaaatatatcaactaatttagacctaaaaacaatattatttatagggctatttcaaattttagcactcgtacctggtgtaagtagggcgggaataactttaacagcagctcgatttctaaaatttaatagagtcgactcaagtaaaattgcttttttattatctatacctgcattaactggtgcaagttttttagcctttaaagatgcggtacaacaatctgttgaataa

SEQ ID NO: 268275 - DNA, 369 bp, Unknown
  Bacterial polypeptide expressing nucleotide sequence isolated from the Sargasso Sea
tatgtttcagaatattatagaagttttaatcctttcagcaattcaaggtatctcagaatttcttccaataagttcttctgcacatttaattttagtttctagtttatatgaatttaaatctagctcattgctaattgatattagtcttcatttaggatctcttgttgcaatagtttattatttcaaagaagaggtattaaacataaataaaaataagagattaataagtttgataattattggatctattccattaattatctttggatatattttatatactacagggttaatttacagcttacgaaacattgaaactattgcatggacaactttaatatttgcaattgttttatatatttcagacaa

SEQ ID NO: 268276 - DNA, 583 bp, Unknown
  Bacterial polypeptide expressing nucleotide sequence isolated from the Sargasso Sea
atggaattgctaaacgtcgtttttttatcgttgattcaaggtattacagaatttttaccagtatcttcgagtgctcatcttattttatttccaacgtttagtggaaataaagaccaaggacttctaattgatatttctgttcaccttggaagcctgatagccgtaacaacatttttctggactgatgtaaaagccattacagcaagcgcttttaagttcttttctggaaatttaaatgatctcaatagcaatctggcagtctgcttagttgttgcaacgattcccgcagtggttttgggcgcgacattaaaatattcaggcttataccagtatattagagaaagcacccttataattggcatagctatggtggggtttggtattttgctttggttctctgacaggaaggagcaagtcaatgtgagaatatcagattggacaattagacacgccttaatattaggattttggcaaatgctcgcattaattcctggcacgtcaagatccggaataacaattacaggagcccgctttttaagctataaaaggtcaagcgcggtaaaaatgtcgatgcttatgtcga

SEQ ID NO: 268277 - DNA, 265 bp, Unknown
  Bacterial polypeptide expressing nucleotide sequence isolated from the Sargasso Sea
tatggatctaatacagacattaatattagcaattattcagggactaactgaattcttgcccatttcgagttctgcccacttgatactgatatcaaagatagctggttggaacgatcaaggattattgtttgatattgctttgcattttggaacacttttggcagtccttatatatttcaaagatgatctttgcaggatgatccaagaccctattaaaaatctagggaagaatatcgtccactcggatttaatgattttagttatg

SEQ ID NO: 268278 - DNA, 519 bp, Unknown
  Bacterial polypeptide expressing nucleotide sequence isolated from the Sargasso Sea
catgtcaataatagaggccattatattgggtattatacagggattgaccgaatttttacctgtaagtagcagtggtcatttagaaataggcaaagcatttatgaatgtacctgctgaaagcctgaactttacgattgctgtgcacggaggcactgtactaagtacaattgtcattttcagaaaagatattttacaacttatcaaagggtgcttttcttttacatggaatgaagaaacacagtacgttgctaaaattgcagtatctatggtacctgtagcaattatcggacttttttttaaagacgagttaaaatccctttttagtggaggaaaccttgtatttgttggcagcatgttaattgctacagcagccttacttgctttcacttattttgcaaaagaaaaagagaaaaaaacgacctttcttgatgctttcatcataggtatctctcaagccatagcagtattgcctggtatttcacggtctggatccaccattgctaccggcctattactcgg

SEQ ID NO: 268279 - DNA, 690 bp, Unknown
  Bacterial polypeptide expressing nucleotide sequence isolated from the Sargasso Sea
aatgtttcaaaatattatagaagttttaattctgtctgcaattcaaggaatatctgaatttctacctataagctcctctgctcatttaattttggtttccacgttatatgaatttaaatccagttctctgttaattgatataagcctccatttagggtctctaatggcaataatctatttttttagggatgaactatttgatgctagaaaaaataaaagacttttaagtttaattatacttggatctattccattaataattgttggctatatactttttaatacaggtttaatttatcagttaagagacatagaaattatagcatggactacactaatatttgcaattattttatatatctcagacaaaaatagatttgataaaaaaatttctacaaatttaaattttcagtcaataatatttataggtattttccaaattttctctcttgtacctggagtgagtagggcgggaattactataacagctgcaagaattttaaaatttaatagagtagattcaagtaagatatcttttttactttccataccagcattggctggagctagtgtcttaagcttaaaagatgttttcgaacaatcaattgaatttaactacttaatagttattgcaattatatcttcttttattttttctttcttaacagtaaaattctttttaatttatat

SEQ ID NO: 268280 - DNA, 697 bp, Unknown
  Bacterial polypeptide expressing nucleotide sequence isolated from the Sargasso Sea
atggaattatgggaaataattttatattcttttactcaaggagtgacagaatttcttccaatatcttcttctgcacacttatttattttagaacatttattaaattggcctgtttcaggaagaagtatggctatcgctgctcatttaggtagcttacttgcggtatgtatttatcttaaagaagaccttttaaaaattttctattcattttactatttaaaaaactttaagaaagataataatattctacttgttagaaatttatttttaattacttttcctgtattagtggtaggattacttatttttaaaaatttagataaagaactattatctttaaatctaattgctatagctagtataattggtgctggcttactctatatagtagataataataagacagaaaaaagaagtatttattctctatctatattagattctttatttataggggtatttcaaatatttgctctgataccaggtgcttctagggctggcacaataataaccgctgctagaattttaaaactctctcgaatagaatccacaaagttaggactctattccggtctcccgactatattaggggcagtcatgctagaaacattatggcttataaataacacaaataataaccaagaaataatctcgattatattaatacttttactatctttcttttttgcctatttat

SEQ ID NO: 268281 - DNA, 611 bp, Unknown
  Bacterial polypeptide expressing nucleotide sequence isolated from the Sargasso Sea
tatgtttcagaatattatagaagttttaatcctttcagcaattcaagggatctccgaatttcttccaataagttcttctgcacatttaattttagtttctagtttatatgaatttaaatctagctcattgctaattgatattagtcttcatttaggatctcttgttgcaatagtttattatttcaaagaagagctattaaacataaataaaaataagagattaataagtttaataattattggatctattccattaataatctttggatatattttgtatactacagggttaatatatagcttacgaaacattgaaactattgcatggactactttaatatttgcaattgttttatatatttcagacaaaagtcgctttgacaaaaaaatttctactaatttaaatattcaatcaattctatttatcggaataatgcaaattttatctttaatacctggggtaagcagagcaggtattacaataacagctgcaaggattttaaaatttaacagagtggattcgagcaaaatatcttttttgttatctatcccagctctagctggtgcaagtatacttagtttaaaagatattttttaccaaacaacagaat

SEQ ID NO: 268282 - DNA, 298 bp, Unknown
  Bacterial polypeptide expressing nucleotide sequence isolated from the Sargasso Sea
atggatctaatacagacattaatattagcaattatccagggactaactgaattcttgcccatttcgagttctgcccacttgatactgatatcaaagatagctggttggaacgatcaaggattattgtttgatatttctttgcattttggaacacttttggcagtccttatatatttcaaagatgatctttgcaggatgatcgaagaccctattaaaaatcgaggaaagaatatcgtccactcggatttaatgattttagttattgcaacaataccagttgtcatagctggtggacttt

SEQ ID NO: 268283 - DNA, 655 bp, Unknown
  Bacterial polypeptide expressing nucleotide sequence isolated from the Sargasso Sea
atgtctttaattgattccatattttttggagcacttcagggtgcaacagaatttcttcccataagtagttctgggcatttaattttattagcaaacttctttcaggtcgaccttcctaccattgtatttgaagtagttgttcatcttggaacactcattagtatcctttttatttttagatcagacatcatcagcattataaataaggccaaaataaaaggagattttcaagaaattattttgatttcttcagctacaattccaatagcaatgacaggattaatttttaaatcaaatattgaaaccgcatttaggagtgttgctattgttggggtttgtatggttataaccgggataattttgggtagcactctatttacatcctttattagaaaaaaaaatatatctttagtttcagcattaattataggaattatgcaagcttttgctttattgcctggtatatctagatcaggtataacaatctcgaccgcattgtggataggaatatctaaagaagaagctggacgattttcattcctaattgcaatacccgcaattattggatctctaattttaactttgcctgacataattaatgttattagcgttgaaggatctttattaatcttaattgcaactctagtatcagcat

SEQ ID NO: 268284 - DNA, 286 bp, Unknown
  Bacterial polypeptide expressing nucleotide sequence isolated from the Sargasso Sea
atggattggattcaggcccttgtgttgggaatcgttcagggactgaccgaatttctgcccattagtagcactgcacatttaagaatcattccttctctacttgactggcaagaccctgggacagaattttctgcagtgatccaacttggcacattgatggctgtaatactctatttcaagaatgatgtagtatcactttcgcgggcagcaatagtaagtttatgtaacaggaaattatttgaaactacagattccaaattggcctggagcattgctgccggaacaa

SEQ ID NO: 268285 - DNA, 592 bp, Unknown
  Bacterial polypeptide expressing nucleotide sequence isolated from the Sargasso Sea
atggaaaatattgttcaagttgtcgtaatatcaatagtacaaggcttaacggaatttctgcctgtcagctcttctgcccatttaaacttgctgtcaaacttatttaattttaaggaagatgaattattaataaacattagtgcacatattggctctctattcgcagtaatgctcttctttaaaaaagagataataagttttggaaaaaaccagcaattatttttcagagtaattttaggttcagtaccactattcttttttggatatctggttgtttattataacttggtccctggtttgagaacttataaagttattgggtggacgactataatttttggattattactttattttgctgataaatttaaaacgaaattaaagattcaaaaaaatttttctacaaaaaatgctgtcattattggcttttttcagattttggcattaatgccaggagtaagcaggtcgggaatagtcatcactgcagcaagaatattaaagtttaaaagagaagatgcagccaaaattgcttttttaatgtctattccggctttagcgggaactggtgtttttggtttttatgctcttatgt

SEQ ID NO: 268286 - DNA, 738 bp, Unknown
  Bacterial polypeptide expressing nucleotide sequence isolated from the Sargasso Sea
tatctataatacagggtattactgaatttcttccagttagctcttcggctcacctaaatttaatatcaaaatattttggtattcaaaatgaattattaataaatgtttatgctcacatgggttctttacttgcggtaatatttttctttaaagaggatatttttaattttggaaagaataaaaaattattttataaaataattttggcatcaattccattgtttggatttggatttttaattttaaagtataacttgattgatacatttaggtctttagagcttataggttggatgactataatttttggtattgtactttttattacagataaattaagccttgaaaacagcattaaagataaatttacgtttaaaaaggccattttaattgggttttttcaagtattagctctaatacctggtgtaagcagatctggaatagtaatgactggagctagatttttaaaatttaacagagaggatactgccaagatttcatttttactttcaatcccagcgcttgcaggtagctcgatatacggtctttataagatgtttaatggagggggcttggttgtgaatattaactcaatcatgacgataggtttatctttcattttctcttatctaacaatcaaatacttattaatctacttaaagaattttagctttaatatcattgttggatatagattaatacttggatcaattattctagctactgtttatttataaa

SEQ ID NO: 268287 - DNA, 712 bp, Unknown
  Bacterial polypeptide expressing nucleotide sequence isolated from the Sargasso Sea
aatggaaaatttttttcaaattcttgttatatcaataattcagggtgtcacagagtttttgccgataagctcttctgcccatttaaatttgctttcaacttattttcatattgaggacaaactaataataaatgttagcgctcatacgggttctttaatagctgtagtttttttctttaagaaagaaattattgattttggtaaaaataaaacattatttctaaaaatagttttagcttcagttccattatttttgataggttatattattattaggtttaatttagttgaaaatttaagaagctatgaagtaataggctggacaactttactttttggtattttgttttattttgcagataaatttgagctaaaacaaaatataaaaaataatttttcaacaaaaaaagcattatttattggtttttttcaagtcttagctcttgttccgggcgtaagtagatcgggaatagtaatgactggagcgagatttttgaaatttaatagagaagatgccgcaaaaatttctttcttaatggctatccccgccttactagcaagtacaacttatggaatttttagtttgattaataaagacagtcttttattaaatataaattctattttaacaattggcctatcatttgtattttcttattttactatcaagtatttattaatctatctaaaaaaatttattttaatattatta

SEQ ID NO: 268288 - DNA, 509 bp, Unknown
  Bacterial polypeptide expressing nucleotide sequence isolated from the Sargasso Sea
gttgtctttaaaaaaccaccgttttaatctaattttcaatgtgttcgaaataattattttatctctcattcaaggaataacggaattcttaccaatcagttcttcttcacatttaattttattttccaattacattaactttgaaaatcaaagtttatcaatagatgtaagtttacacataggatcatttttcgctgttctagcatttttttataaagatctaattaattttgttgaaaataagttgctcttacttaaaataataacctcatctctaccgacaatatttacaggttatatattagttaaatttaatttcattgaagaaataagaaatattgaaacaattgcatttgctacaattttttttgcatttttactttattttagcgacaaatgtaagttagaaaaaaatgttaataaagattatagttttaaatcagcacttataattggattgctacagattttatctttaattccaggtgtgagtagatcaggtattacta

SEQ ID NO: 268289 - DNA, 538 bp, Unknown
  Bacterial polypeptide expressing nucleotide sequence isolated from the Sargasso Sea
aatgtttgagttacaatattttattataggttttgttcaaggaataacagagtttttgccgataagttcttctggccacttaattttaatttccaaaattaccaattgggaagatcaaggactgttcacagatgtagcagttcatggcggaactttaattgcagttttaatttatttaagaaaggaaattaacagaataataaagaatttttttcaatttcagtctttttataatactaaagtttataaacttgttttagccacattaccggctttgataacaggtttttttatttataactttattgaaaactattttcgcaattttcaaattgttgcttggaccagtattatatttggtatacttttattttttgctgacaaaaagcaatcttctagtaaatcatgggaggcaatgaatttcaagaatgcttttattattggtttgtttcaaattcttgcatttattccgggagcaagtagagcaggagtgactataactggtgcaagatttttaggttttaatagatctaattca

SEQ ID NO: 268290 - DNA, 548 bp, Unknown
  Bacterial polypeptide expressing nucleotide sequence isolated from the Sargasso Sea
aatgtttcaaaatattatagaagttttaattctctctgcaattcaaggaatatctgaatttcttcctattagttcttctgctcatttaattttggtttctactttatatcaatttaaatctagttctttgcttattgatatcagcctccatctaggttcactaatagctataatttatttttttaaagatgaattgtttgatatcagaaaaaataaaagaattttaaatttaattgtattaggatctattccattaataattgttggatacatactttatagtacaaatttaatttatcagttaagaaatttagaagtcattgcttggactactttaatattcgcaattattttatacatctcagacaaaaatcgatttgataaaaaaatttcttcaaatttaaattttcagtcaataatatttataggtgttttccaaattttctcacttgtacccggagtgagtagggcaggaattactataacagctgcaagaattttaaaatttaatagagtagattcaagtaagatatcttttttactttcaa

SEQ ID NO: 268291 - DNA, 766 bp, Unknown
  Bacterial polypeptide expressing nucleotide sequence isolated from the Sargasso Sea
aatggattttcttaacattataattttatctataatccaagggataactgaatttcttcctatttctagtagttcacatttgatcttgcttccaatgctcactgaatttcccgatcaagggattatgtttgatattgctttacacacaggctctctgattgcggtattaatatactttaggaaagaaattaaaaatatcttgcagtttactgataatggcaagaattatattaaattaattattattggttcaataccgcttccaattgcaggtttattattaattgatcttattgcattaaatttgagaagtattgaagttattgctgtaatgacaataacttttgcattattacttttgtatgctgataatcataacaagccttataaagagatcactaaactttcaactaaaattattataattattggactatttcaaacattggcacttgtaccgggtgtgtcacggtcaggaatagtgattacagccgctttattgttaaattataatagaaatgatgcaattaaaattgcattcctgttatctatacctgcaatatttatggcaagttcatataacttattacaattatcttcaatgggtgatgtagcaatactgagtgatcatttcctcggcatggttctatcgctactagtttcatatcttacaatttatttctttattacaactataaacaaaataagcttctcgccttatattatctacaggatgatattaggaactttacttttgatggtctaa

SEQ ID NO: 268292 - DNA, 461 bp, Unknown
  Bacterial polypeptide expressing nucleotide sequence isolated from the Sargasso Sea
gatggatgatctttcactaatacaaataataattttgagcataattcaggcaattactgaatttcttcctatttctagctctgcacacttattgttgccaagcaaattgttaggttggccagatcaagggataatatttgatataacagtccattttgccagtcttttagcggttattgtctattttcgagaccaatttttaaaatttagcttctatttatcaaaaacattcattttcttaattattgcaactcttccaattgtgctaatagtactatttatagatggtgtaggggattatagatggactcttgaaagtatcgcaataagcaatatagtttttgcggcactactctttttaactgataaattttgcaacggaaatcttaaaaattctgaaatgaagtggtggcaagctgtaataattggtttttctcaaacattcagtcttgtatctggag

SEQ ID NO: 268293 - DNA, 322 bp, Unknown
  Bacterial polypeptide expressing nucleotide sequence isolated from the Sargasso Sea
atgtttgagcttcaatattttttaattgggctcattcaaggagttacagaatttttacccataagttcatcgggacaccttgtattatttgctgaattagcaaaatgggaagaccagggtctttttacagatattgctgtgcattttggtaccctctttgctgttctcatttacatgagaaaagaaataaagcttttaatatcaaatattcttgcaatgcaaatattagaagacaaaattgtatttaaaattatagttgcaacaaatccagcaattattgttggtttttttatttatgatttagtaaatttatattttagaa

SEQ ID NO: 268294 - DNA, 271 bp, Unknown
  Bacterial polypeptide expressing nucleotide sequence isolated from the Sargasso Sea
aatgtttcaaaatattatagaagttttaattctctccgcaattcaaggaatatctgaatttcttcctattagttcttctgctcatttaattttggtttctactttatatgaatttaaatctagttctttgcttattgatatcagcctccatctaggttcactaatagctataatttatttttttaaagaagaattgtttgatatcagaaaaaataaaagaattttaaatttaattgtattaggatctatcccattaataattgttggatac

SEQ ID NO: 268295 - DNA, 359 bp, Unknown
  Bacterial polypeptide expressing nucleotide sequence isolated from the Sargasso Sea
aatggaaataataaatataattatattatcctttattcagggtgtgacagagtttttaccaatatcaagtagcgcacatctagtcttattatctgaacttagtaattttcctgatcaagggctaggatttgatattgcattacatactggatctttattagcgatattaatctatttcaaggatgaaataagaaagatctttgttatgactgatgatggaagacaatatttgaagctgatgatatttgcctcaatacctttaccaattattggaataatattcatcgattatatttccctctacatgagaaatgttcagcctattgcaataatgactattatattcgctctacttctat

SEQ ID NO: 268296 - DNA, 240 bp, Unknown
  Bacterial polypeptide expressing nucleotide sequence isolated from the Sargasso Sea
tatgtttcaagattttatagaaatacttgttctttcagctgttcagggaatatcagaatttttaccgattagttcatcagctcatttgattattgtgtctagcttatatgatcttaaagcaagctccttattaatagatataagtttgcatttaggttctttgttggcaataatattttttttcagaaaagatttattcaaccttaaaaataatcacaaactattaaaattaatcataat

SEQ ID NO: 268297 - DNA, 814 bp, Unknown
  Bacterial polypeptide expressing nucleotide sequence isolated from the Sargasso Sea
ccttacagagtttttaccagtatcaagttctggtcatctggtgctgttgccgcaactgctagattggactgatcaaggtatcggtattgacgtagcggctcatttaggaagtttactcgctgttctaattttttttgctcgcaattccaaggacgaaaacaactccgaatttactttaaaacctgtaaagttaattgcaaactttggttctttcgcgagggttcttacttctatgttcaaaagccaaaaggcttactatttttccgtctgcattttgagcttggtaattgctactttccctgtagcggtactaggttttttatttagagactttgttgcatccgatatgagaactatcaagatagttgcctattccacaatattttttggactgattttaggctttgccgataggtttaggggggggaaaactttgaatgatctttctttaggttgtctgattattattggaattgcgcaaagtttagctctgattccaggtgtatctcgatcaggaattacgattacagcggctctattacttgggttctcccgtaaatcagcagtttcaatatcggctattttagcagtgcctgttattggtctttctgcaggtttcgagttaagttattttctccaaattgctgaccgcaggatggtttttgatttggttttagtgttgggcatgtcctgtttagccgcttatatttcgctactttttctttttaaacttgtagataaagtgggtatgaccccatttgtaatctaccgaatttttttgggtggggttcttcttctattattcgtcgactga

SEQ ID NO: 268298 - DNA, 766 bp, Unknown
  Bacterial polypeptide expressing nucleotide sequence isolated from the Sargasso Sea
aatgtttcaaaatattatagaaattttaattctctctgcaattcaaggaatatctgaatttcttccaattagttcctctgctcatttaattttggtttctactttatatgaatttaaatctagttctttgcttattgatattagcctccatctaggttcactaatagctataatttatttttttaaagatgaattgtttgatatcagaaaaaataaaagaattttaaatttaattgtattaggatctattccattaataattgttggatacatactttatagtacaaatttaatttatcagttaagaaatttagaagtcattgcttggactactttaatttttgcaattatattatatatttctgacaaaagtcgatttgataaaaaaatttcttcaaatttaaattttcagtcaataatatttataggtgttttccaaattttctctcttgtacctggagtgagtagggcaggaattactataacagctgcgagaattttaaaatttaatagagtagattcaagtaagatatcttttttactttcaatcccggcgttggctggagctagtgtcttaagcttgaaagatgtttttgaacaatcaattcagtttaactatttagttgttatcgcaattatatcttcttttattttttcttttttaacagttaaattctttttaatttatataaataaattttcaatgaatgcgtttgtaatttatagaataataattgctttaattttatttagtttaatttattaa

SEQ ID NO: 268299 - DNA, 151 bp, Unknown
  Bacterial polypeptide expressing nucleotide sequence isolated from the Sargasso Sea
aatgacacttttcgaaatcattattttagcgattattcagggcgtaactgaattccttcctatcagtagctctggacacttgttgttacccgcagaactttttgggtgggtaagtcaaggcttggcctttgacgttgccgttcatgtagga

SEQ ID NO: 268300 - DNA, 353 bp, Unknown
  Bacterial polypeptide expressing nucleotide sequence isolated from the Sargasso Sea
tatggatctaatacagacattaatattagcaattatccagggactaactgaatttttgcccatttcaagttctgcccacttgatactgatatcaaagatagttggttggaacgatcaaggattattgtttgatattgctttgcattttggaacacttttggcggtccttatatatttcaaagatgatctttgcaggatgattgaagaccctattaaaaatcgagggaagaatatcgtccactcggatttaatgattttagttattgcaacaataccagttgtcatagctggcggattttttaatgattggattgaggccaatctgagatcatcgaacgtgatagcttcgacca

SEQ ID NO: 268301 - DNA, 622 bp, Unknown
  Bacterial polypeptide expressing nucleotide sequence isolated from the Sargasso Sea
aatgtttcaaaatattatagaagttttaattctctctgcaattcaaggaatatctgaatttcttcctattagttcttctgctcatttaattttggtttctactttatatgaatttaaatctagttctttacttattgatattagcctccatctaggttcactaatagctataatttatttttttaaagatgaattgtttgatatcagaaaaaacaaaagaattttaaatttaattgtattaggatctattccattaataattgttggatacatactttatagtacaaatttaatttatcagttaagaaatttagaagtcattgcttggactactttaatattcgcaattattttatacatctcagacaaaaatcgatttgataaaaaaatttcttcaaatttaaattttcagtcaataatatttataggtgttttccaaattttctctcttgtacccggagtgagtagggcaggaattactataacagctgcgagaattttaaaatttaatagagtagattcaagtaagatatcttttttacttttcatccctgcattagctggagctagtgtcttaagcttgaaagatgtttttgaacaatcaattcagtttaattactaa

SEQ ID NO: 268302 - DNA, 181 bp, Unknown
  Bacterial polypeptide expressing nucleotide sequence isolated from the Sargasso Sea
gatgtttcaaaatattatagaagtattaatcctttcagcaatccaaggtatatccgaatttttacctattagctcatctgctcacctaatattggtttctagtttatatgaatttaaatccaattctttgttaattgatattagtctccatttaggatcattattagcaattatttatttt

SEQ ID NO: 268303 - DNA, 379 bp, Unknown
  Bacterial polypeptide expressing nucleotide sequence isolated from the Sargasso Sea
atggatgatctttcactaatacaaataataattttgagcataattcaggcaattactgaatttcttcctatttctagttctgcacacttattgttgccaagcaaattactaggttggccagatcaagggataatatttgatataacagtccattttgccagtcttttagcggttattgtctattttcgagaccaatttttaaaatttagcttctatttatcaaaaacattcattttcttaattattgcaactcttccaattgtgctaatagtactatttatagatggtgtaggggattatagatggactcttgaaagtatcgcaataagcaatatagtttttgcggcactactctttttaactgataaatttgcaacgg

SEQ ID NO: 268304 - DNA, 693 bp, Unknown
  Bacterial polypeptide expressing nucleotide sequence isolated from the Sargasso Sea
atgatccaggatcatctttgtctgcggttattcaacttggcagtatttttgctttgatttggtattttaaaaatgatttatttaaatttagaggtcaatactcaaaaaaattattcaaatatttgtttcacgaaaggttattaagatcaatcttgattggcactatcccaattgttttatttggtggaactataaaattacttataccttatttttttgaaacgatatttcgttcaaatttgtcaatagcattagtttctttcctaatggctatatttatgtacatagctgataaatctaagaaaggttccataactttaagaaatcataattattcaaatagttttttaataggtttttctcaagcctttgctattttcccaggtgtctcaagatctggcatcactatttctactgcttttatatcgggttgggaaaaaggtgatgccgcaaaattttcctttcttttaggtattcctgcgatctctcttgccgctattgtggagttcatttcttcatttaatcaatttttctcatttaatttaccccctctaattgttgggctaatcacgacatttttatcttctctattagctatcaatttcttagtaaaatatttgccttcaaatggtttgaaattatttatcatctaccgagttgtatttggtgttgttattcttctgaatttataat

SEQ ID NO: 268305 - DNA, 568 bp, Unknown
  Bacterial polypeptide expressing nucleotide sequence isolated from the Sargasso Sea
aatgaatgatatattattgagttttattttaggcttagttcagggcttaactgaatttttgccaatctctagttctgctcatttgttgttaccaacactaatatttggttcaaatgatttaggattatattttgatatttcagtacatgccggaacattgatagcagtagtttattactttagaaatgaaatctttctgatgagtaaatcactacttgtaactaataatcttaatgaagataaaaacttaataatacaattaatagtcgctactataccaatagttatcttaggatttatttttagagatttaattagccaaaggatatttagtattaatgatattgcaatttcaaacttaatttttgcatcaatattgctttttgcttttctaaataataaaggtaaaaaaactctcattaatataactattttaggtgcaggttttattggattatttcaatgttttgctttgatacctggcgcttcaagatctggagcagcaattacagcaggtcttttgattggattaagtctaaaagatgcttcaaaatttgcatttttgctt

SEQ ID NO: 268306 - DNA, 565 bp, Unknown
  Bacterial polypeptide expressing nucleotide sequence isolated from the Sargasso Sea
atggttcgagattttatagaaattttaattctttctacagttcaaggaatttcagaatttttacctataagctcatcagcacatttaattttagtatcaaatttttatgatttagaggcaagttctttaatgatagatataagtttgcacttaggatcattagttgcagtaattttttattttagaaaagatctgtttaatttaaggaataatggaaaattattaagtttaataattattggttctctgcctctaatatcatttggatatattttatatacaactgaatttattcatcttttaagaaacacaaaagtaattgcctcaacaactttattttttgggtttatacttttttttgctgatcagagaaaaatagaaaagaatattgtcacagatctaaattttaaatcaattttgataataggtctgtttcaaatattagctctgataccaggagttagtagagcaggaataacaattacggcagcaagatttttaaattttaatagaatagattctagtaaaatttcctttttattatctatacctgcgttagcaggag

SEQ ID NO: 268307 - DNA, 469 bp, Unknown
  Bacterial polypeptide expressing nucleotide sequence isolated from the Sargasso Sea
ttcgatcgcagtcgtctccattgtcatggcactgctcctggccctggctgaacggatcggtccacgccgcaaacagctgggtgaggtctctggtcgcgatggactggtggtgggtctggcacaggtgctggccctgattcccggggtgtcccgctctggcagcaccctcaccgcctcgctcttcgatggctggcaacgttccgatgccgcccgcttctcgtttctgctgggggttccggcgatcacgatcgccggtcttgtggagctcaaggatgccttcgccgcgacgggagaggccggccctctgccgctgctgctcggcatcgtctccgccacgatcgtgtcctggctggcgattgactggctgctgaagtttctccagcgacacagcacctggatcttcgtggcttaccggcttgtgttcggcgttgtgctgctggtctggtggtccatttacggcgcacactga

SEQ ID NO: 268308 - DNA, 655 bp, Unknown
  Bacterial polypeptide expressing nucleotide sequence isolated from the Sargasso Sea
gatgtctgatcttttcttaagccttatcttagcaattattcaaggcttaacagagtttttaccaatatcaagttcagcacatttacttttaccatcattattatttggattaaaagatttaggtctatcttatgacatagcagttcatacaggaactttagttgcagtaatatatttttttaaatcagaaattatgctgatgactaaatccttatatgttaataataatgatctgaataaatataaaactctagctatgtgtctaatagctgcgaccattccaattgtattggtaggattttcgatttcagatcttgtaaatcaaagaatttttggcattcaaagtatcgctttagttaatgtaatttttgcaggaatacttctgtttgcttttttaaagagagaagagaaaaaagatttgtatcaattgagtctttatggagctcttttcattggaattttccaatgttttgctcttattccaggggcgtctcgatctggaactgcaatcacagcagcattattaataggaatgaacataaaagatgcaacaaaattctcttttatgctcggtatcccaacaatcctcggtgctcttgttttacttcttattgatattcaaaagcttgatatagcatttaatatgacacattta

SEQ ID NO: 268309 - DNA, 514 bp, Unknown
  Bacterial polypeptide expressing nucleotide sequence isolated from the Sargasso Sea
atgattgaagttctgattctttctttaattcaaggtataactgagttcttaccaataagttcatcatctcatttaattttaatttcagaattaggtaatttaaataatcacaatttatcaatagatgtgagtttacatattgggtctttttttgcagttttgacttatttttacaaagatataattaattttgttaaaaataaggaactttttttaaagatttttatatcctctttaccattaattataattggcttttttcttacgcaaactaatttaattaatgaaataagaaatataaaaataattagttggacaacaattatttttggaatttttctttatttaagtgataagtgtaaattagataaaaatatcgaaaataactttaattttaaaactgcgttaataattggattatttcaggttctgtcattgatgccaggcgttagtagatcaggaattggaataactattgctcgattccttaattacaaaagagaggatgctgcta

SEQ ID NO: 268310 - DNA, 325 bp, Unknown
  Bacterial polypeptide expressing nucleotide sequence isolated from the Sargasso Sea
atgccagactggcttcaagtcatcctgctcggcctcattgaaggcatcacggaattcctgcccatctcctctaccggccacctcttgctcgcagaacaatggcttgggaaacgctccgaacatttcacggtctttatccaaagcggcgccgtgctggccgtgttggccgttttcaaggatcgcgtgcgtgaattggccaccgaatggaaacagccgaacacgagcgattacctcgtaaaaatgggggtttccttcgtgatcaccgcgatcggaggtctttcacttaaggaagtcggatgggaattgcccgataatgcaacaccca

SEQ ID NO: 268311 - DNA, 799 bp, Unknown
  Bacterial polypeptide expressing nucleotide sequence isolated from the Sargasso Sea
tttgcctctaactcatttaaccatattggcgctaatccaaggcttaaccgaatttttgccaatttcttcttcgggacacctcataattttccctaaattactagactggcaagatcaaggaattacaattgatgttgccgtccatgctggttccctactagctgttctgatctttctgtggcgagatattgggcgaattttactagaactgagtcatctagcgaggtctgggcgatctagcgcccctcctctcctttacttattattgattgcctccgtccccttgctagtagttggattcttagtttcaactgtaatgcaagaccttaccaggagcatcgaagtaataggttgggcaactcttctattcggtgttttactcgggttttccgatagaatgggtatgacgctgaatagatttcaacatatgaagtatttcgacgcctttttaattggccttgctcaaatacttgcattagtccctggagctagtcgagctggagtgacaattacagcggctcgttttttagggtatgaaagagcttcggcggcacgcttttcattattattagcaatcccagctattttgggtgctagcgttttaaaaggcctcgatatattcttttccgataacgtcaatctcggaattgatttcttgattgcggctggcatttcattttgtgccgcacttgcgtcaatttcaatcatgatgaagtggctaaatagagctggatttatgccttttgtagtataccggataattatgggagctttattgcttgcatgggtatatctatga

SEQ ID NO: 268312 - DNA, 826 bp, Unknown
  Bacterial polypeptide expressing nucleotide sequence isolated from the Sargasso Sea
actggttttatggaaggcgatagttctgggagtaacagaggggctaacagaatttcttccgattagttcaactggtcaccttctagcggcgaaagaattgatgcaccttgatagcagtgagatttctgaacaagccatagatagttacattatttctattcaaattggggcgatcttggcgattgttgttctctacaaaaacagaattcgccaaatgtacgaaggtttgcgtgggcaaagcgaggttggaaagattgtcttgaggaatttggttgtggcgtttgttccgacagctattatcgggctcttgctagccgattacgtaaaggatcagctgtatgagtcacagctcgtagcttatgcgtggattgttggaggtgtctgtattcttttagcccatgagaagaaattcttgaaacgagatgggtcgagcatggagagtctaagccttcagggcgctgttgtggttgggcttgtgcaagcgctggccctgtggcctggtgtcagtcgaagcttggtcaccatttttgcattagttgcacttggattatctttggcagcagctgttgaatttagtttcctcttaggcctagtgaccttagctgcagcgactttctacgagctttctcaagatggggggaggataatagacctttttggatactggactccactggtcggtttagttgcagcatttctctctgctgtggcttcggtaaaatggatggtcagttggcttgaaaataaaagcttctcagtttttggtttctaccgtgttgcaataggcattctagctatctctttattatctactggcgttctttag

SEQ ID NO: 268313 - DNA, 766 bp, Unknown
  Bacterial polypeptide expressing nucleotide sequence isolated from the Sargasso Sea
gatggatgatctttcactaatacaaataataattttgagcataattcaggcaattactgaatttcttcctatttctagttctgcacacttattgctgccaagcaaattactaggttggccagatcaagggataatatttgatataacagtccattttgccagccttttagcggttattgcctattttcgagaccaatttttaaaatttagcttctatttatcaaaaacattcattttcttaattattgcaactcttccaattgtgttaatagtcctatttatagatggtgtaggggattatagatggactcttgaaagtatcgcaataagcaatataatttttgcggcattactctttttaactgacaaattttgcaacggaaatcttaaaaattctgaaatgaagtggtggcaagctataataattggcttttctcaaacattcagtcttatatctggagcttctagatctggaacagcaattacaggagcattatttcttggtttttcaaaggaagaagcagcaagattctcattaatgttatcaattccgaccataacaggagcactactttttagctttttagaaataaacacgttagatacaaatataaacattttagcaacttttataggctttttaacaacatttatcgtatcttatttttcaatttatttctttcttaaactaataaaaagcatagggtacacgccttttgttgtttatagagtgcttttaggagtcatgattctttgtctgatataa

SEQ ID NO: 268314 - DNA, 766 bp, Unknown
  Bacterial polypeptide expressing nucleotide sequence isolated from the Sargasso Sea
tatgtatcagaatattattgaagttttaatcctttcagcaattcaagggatctcagaatttcttccaataagttcttctgcacatttaattttagtttcaagtttatatgaatttaaatctagctcattactaattgatattagtcttcatttaggatctcttgttgcaatagtttattatttcaaagaagagctatttaacatcaataaaaataagagattaataagtttaattattattggatctattccattaataatctttggatatattttatatgcctcaggattaatttatagcttacgaaacattgaaactattgcatggacaactttaatatttgcaattgttttatatatttcagataaaagtcgctttgataaaaaaatttcttcaaatttaaatattcaatcaattctatttataggagtaatgcaaattttatctttaataccaggggtaagcagagcaggtgttacaataacagctgcgaggattttgaaatttaatagagtggattcgagcaaaatatcttttttactatctatcccagcattagctggtgcaagtgtacttagtttaaaagatatttttaatcaaccaacggaatttaattatttggtaataattgcaattatatcttcttttattttttcttttttaacagttaaatattttttaatttttataaataagttttctatgaatgcatttgtaatttatagaataataattgctttaatattgtttagtttaatttattaa

SEQ ID NO: 268315 - DNA, 740 bp, Unknown
  Bacterial polypeptide expressing nucleotide sequence isolated from the Sargasso Sea
tatggattttgtacaaattttgattttatcaattatacaaggaattacagaatttctaccaatatctagtcagtcacatttgattctcacttcaaaattattaggaatgagtgaccagggtttaagttttgatattgcacttcatgcaggatcactgctagcaatactcatttattatcgtaaagaagttacaaaaataatgtcaatatcagatgagggaattcagtatcttaagttaattataatcggttctatacctttacctattattggattactttttgttgatattgtatctgaaaacctcagaactataaataccattgcatttatgacaatagtgtttgcattgcttttatacttcgccgaaagaagaaatcatgagaataagaatagttttgcaacactaagtttttttacaattatttttataggctttatgcaaacattggcaataatgcctggcgtatcacgttcaggtatagtaataaccgccgcattattattaaattatagtagagaggactctattaagattgcctttctattatcaataccagctatttttatggcaactgtttatcagtctatgcagttatacggagtaggagatatacagattctaaacgaatatctattgggcatgattttatcctttatattctcatacattactattcatctctttatatcaacgataaataaaatatcttttactccatatattatttatagattat

SEQ ID NO: 268316 - DNA, 640 bp, Unknown
  Bacterial polypeptide expressing nucleotide sequence isolated from the Sargasso Sea
atggatttaatacaattaatttttatatctttagttcagggcgtaacagaatttttacctatttcaagctctgcgcatttagtgcttttgccacaattaatggattggaacgatcaaggtcttagcatagatgtagctgcacacttgggtagcttatttgcagtcttattttatttcagaaatgattttagaaaaatggtagttaacggttttggcccaactcttggggtcgattatgacagagagtattataaattattttggttagtaatcattgctagtattccattacttatagttgcctttctaatacgagatgaaattgcactttatttccgtgatccattgattattgcatctgctaccattttttttggtattttactttggttatcggacttaattggaaaacaatatagaacaatgaatgtaattactaaaaaggatgcatttattattggattatcacaaatactagctcttattcctggaacttcacgttccggcgtcactatgacaacaggtcttttactaggatttaatcgtcatacagctgtaaaattttctttttttatgtcagtaccaattatatcattagcagctttgtatgaagcttcaaatttaattcaatatgataatg

SEQ ID NO: 268317 - DNA, 790 bp, Unknown
  Bacterial polypeptide expressing nucleotide sequence isolated from the Sargasso Sea
atgtctgatatttttttaagcctcattcttggtcttattcaaggccttacagaatttcttcctatatcaagctcagctcatcttcttatcccttctcttgtatttggtgcaaatgatttaggattagagtttgatattgcggttcatgcaggaactctctgtgctgttatctatttctttaaaaatgatctaaaagtttatgcattatcgatatttaattcttccaacaggtatcaaaatgaaagaagggttgctattaatttattgattgcaactatgccgatagtctttgcaggaatattatttaatgacttaatttcacaaagattagtaactaaagaacttattgcatggtcaaatattttcttcgcttctttgcttttattgagtttttatttatctaaaaaaaataaggatatatttcatttatctatactaatgagcctttttataggatttgttcaagtctttgcattaattccaggtgcctcaaggtcaggagtggtaataatggcttgtttatttttaggattaaatttaaaagattcctccagatttgcatttcttttagccatcccaactattttaggagcgctaatctttttggttggtgattcaattgctgctaatttggatattttcaatgcacaacttttcattggatttataacctctgcattggttgctttttttactattaagtattttcttcaatttgttgagcggattggcatgacgcctttttttgtatatagaatctttttaggcctactattgataattttgtgaa

SEQ ID NO: 268318 - DNA, 790 bp, Unknown
  Bacterial polypeptide expressing nucleotide sequence isolated from the Sargasso Sea
atgtctgatatttttttaagccttattcttgggcttattcaaggccttacagaatttcttcctatatcaagctcagctcatcttcttatcccttctcttgtatttggtgcaaatgatttaggattaggctttgatattgcggttcatgcaggaactctgtgtgctgttatctatttctttaaaaatgatctaaaagtttatgcattatcgatatttaattcttccaacaggtatcaaaatgaaagaagagttgctattaatttattgattgcaacaataccgattgtctttgcaggaatattatttaatgacttaatttcacaaagattagtaactaaagaacttattgcatggtcaaatattttctttgcttctctgcttctattgagtttttatttatctaaaaaaaataaggatatatttcatttatctatactaatgagcctttttataggctttgttcaagtctttgcattaattccaggtgcctcaaggtcaggagtggtaataatggcttgtttatttttaggattaaatttaaaagattcctccagatttgcatttcttttagctatcccaaccattttgggagcattaatctttttggttggtgattcaattgctgctaatttggatattttcaatgcacaacttttcgttggatttataacctctgcattggttgctttctttactattaagtattttcttcaatttgttgagcggattggcatgacacctttttttatatatagaatctttttaggcctactattgataattttgtgaa

SEQ ID NO: 268319 - DNA, 787 bp, Unknown
  Bacterial polypeptide expressing nucleotide sequence isolated from the Sargasso Sea
aatgtttgaacttcaatattttatccttggtattgttcagggttttacagaatttttacctattagttcttctggacatttagttctggtatcagaattaactgattggcaagatcaaggtttatttaccgatgttgctgtacatgtgggcacattgttagctgtaataatttatttaagaaatcatattttctctttgtttaggaatatacttacatttaaaataagtaataatgaaaattttataaatattattattgctactcttcctgcagttatagtgggatattttatttttgattttgttcaaaattattttagagatttaaaagttgtagcaattacgagtattatttttgcagctttactgttttttgctgatcattttaaaatcaaaatatctaaatgggaaaacatgacttatattcaagcatttataattggcttatttcaaattttagcttttattcctggggcaagtagagcaggtgtaacaattactggtgcaaggtttttaggttttgatcgttcttcagcagcaatattttcaatgctattatcaattcctattattttggcttctcttattctaacaagcattgatataataagcaattcagaggcaaatattaatttatatcaatctatttttgcggcatttattgcatgtgtgacagcactattatctattaatcttatgatgcatttcattcaaagatctacatttaatatatttattatttatagagttatcttgggttttatcttattatatttttatgcataa

SEQ ID NO: 268320 - DNA, 787 bp, Unknown
  Bacterial polypeptide expressing nucleotide sequence isolated from the Sargasso Sea
atgtttgagcttcaatattttatcattggcattgtccaaggctttactgaatttttgccaattagttcttctgggcatttagttcttttatcagaattaacgagttggcaagatcaaggtctttttactgatgttgctgttcatgttggaacattattagcagttataatttatttaagatctcatataacatcattaattaagagttttttctctttccaccttactcaaaatgataatttaattaaaattattattgcaacaatacctgcagttatagtgggattttttatttttgattttgttcaattatattttagagatatcaaagtcgtagcagtgacaagtgttgtttttgctgctctattatttgtagcagatcattttaagatgaaattatcttcctgggagaatatgagttatgtgcaggcctttataataggtatgtttcaagttttagcttttatacctggggcaagtagagcaggtgttacaattactggagcgcgttttttaggatttgatagatcatctgcagcaattttttctatgcttttatctattcccattattttagcgtctttagttttaacaagtttagactttataagtagtcctgagattaatattaatttataccaatctttatttgcagcaatcgttgcatgtattactgctctagtatcaattaacatcatgatgcgaataatacaaagttcaacctttaatatttatattatttatagagttttattaggatttatcttattgtatttttatgcataaa

SEQ ID NO: 268321 - DNA, 249 bp, Unknown
  Bacterial polypeptide expressing nucleotide sequence isolated from the Sargasso Sea
aatgagtttcgaacatattattttaattgctttcattcaaggtattaccgaatttcttcctatttcttcttcaggacacttagttttaattccaaatttaaccaagctccctgatcaaggaagagtctttgatgtagcggttcatttcggctcattttgtgctgtagtaatatatttatggcgtgacttgactaatattctaatagggttttttacatttggcgctaaatccgaaaatggatttaaact

SEQ ID NO: 268322 - DNA, 496 bp, Unknown
  Bacterial polypeptide expressing nucleotide sequence isolated from the Sargasso Sea
ataaaattagatttaatagaccaacttagaaacataaagataattggatgggctacaattttatttgctatcctacttttttttagtgacaaatttaaaaaaacaaagataattgataacaatttaagcttaaaatcagttttgtttataggagtttttcaaatactttctttaattccaggtgtaagtagatctggtataacaattacagcaggcagatttttagagtttaaaagagtagaagcagctaaaatttctttttttctttcaattccaactttggctgccgtaagctttttcggtattaataacttgttagaaactgaaagtttaagattttcattaactaatttattgtcaatttttctttcgttcatattttctttgataactataaaatattttttaaaatatattagcaaattcagtttgagtgtatttgtaatttacagaattgtattaggaataattattttaatcttttcttatttataaa

SEQ ID NO: 268323 - DNA, 766 bp, Unknown
  Bacterial polypeptide expressing nucleotide sequence isolated from the Sargasso Sea
aatggaaataataaatatatttatattatcctttattcagggtgtgacagagtttttaccaatatcaagtagcgcacatctagtattattatctgaacttagtaattttcctgatcaaggactaggctttgatattgcattgcatactgggtctttactggcgatattgatctatttcaaggatgaaataaaaaagatttttgctatgactgatgatggtagacactatttgaagttgatgatatttgcctcaatacctttaccaattattggaataatattcattgattatgtttctctctatatgagaaatattcaaccgattgcaattatgaccataacattcgcactagccttatattttacagataaaaatcgaaaagagagcaaaaaaataattaactgctcatacagtctcatgttttttattggtctaatgcaggcccttgcaataatgcctggtgtatctagagcaggagttgttatcaccgcagcattgctagttggtttcacaagaaaagattctattagaatatcttttcttttgtcaatacctgctatttttatggcatcaacctaccaaactgtacagtttctgagtgcagatgaggttatcataattaaagattacatcttagggtttttactttcgtttgtattctcctatttaactattagactatttatttcaacaattaataaagtgactttttctccatatataatatatagaattgtcttaggaactatcttactgattatctaa

SEQ ID NO: 268324 - DNA, 769 bp, Unknown
  Bacterial polypeptide expressing nucleotide sequence isolated from the Sargasso Sea
atggctttttattacttagaaataatagttttatctttcatacagggattttccgaatttattccagtaagttcatctgcgcatttaataatagctacaaatttagcaaattttgaagttggttcattagaacttgatataggtcttcacttaggttctttgctagcaataattttttattttagaaaagatttagtgaatatttttcataataaagatttagcatacttaatttttattggatcaattccactaataatatttggatattttttatattttacaggattaattaatcatcttagaaatattgaaattattgcatggacaactttaatttttagctttttactttactattcagataaatttaaagttgaaaaaaagtttgaaaaagatttaaaaatcaaaaatattataataataggtttatttcaagttctagctttagtacctggagtaagcagatcaggtataacaataactagtggtagatttttaaattttagcagattcgattcaacaaaaatttctttttatctttctataccagcgttagcgggtgctagctgcctaggtttaaaagatatatggaatgcagaaattgaattgaataatttaatattattctcaatatttttttcctttattttctcatactttacaataaaattttttttattatatgtaaaaaatttttctctaaattacttcgtgtactataggatctttttagctttaattttatttacaattatttatagttaac

SEQ ID NO: 268325 - DNA, 766 bp, Unknown
  Bacterial polypeptide expressing nucleotide sequence isolated from the Sargasso Sea
tatgtttcagaatattatagaagttttaatcctttcggctattcaagggatctcagaatttcttccaataagttcttctgcacatttaattttagtttcaagtttgtatgaatttaaatctagctcattactaattgatattagcctacatctaggatctcttgttgcaatagtttattactttaaagaagagttgttagacataaataaaaataaaagactaataagtttaattataattggatctattccattaataatctttggatatattttatataccacagggctaatttatagtttacgaaacattgaaactattgcatggacaactttaatatttgcggttgttttatatatctctgacaaaagtcgttttgatagaaaaatttctacgaatttaaatattcaatcaattctatttataggaataatgcaaattttatcattgatacctggtgtaagcagagcaggtatcacaataacagcggcaaggattttaaaatttaatagagtggattcaagtaaaatatcttttttgttatctatcccagctctaactggtgcaagtgtacttagtttaaaagatatttttaatcaaccaacggaatttaattacttggtaataattgcaattatattttcttttattttttcttttttaacagttaaatattttttaatttttataaataagttttctatgaatgtatttgtaatttatagaataataattgctttagtattgtttagtttaatttattaa

SEQ ID NO: 268326 - DNA, 766 bp, Unknown
  Bacterial polypeptide expressing nucleotide sequence isolated from the Sargasso Sea
aatgtctgatatttttttaagtcttattcttgggattattcaaggccttacagaatttcttcctatatcaagctcagctcatcttcttatgccttctcttgtatttggtgcaaatgatttgggattaggctttgatattgcagttcatgcaggaactctgtgtgctgttatctatttctttaaaaatgatctaaaggtttatgcattatcgatatttaatacttccaacagttatcaaaatgaaagaaggattgctattaatctattgattgcaacaataccgattgtctttgcaggaatattatttaatgacttaatttcacaaagattagtaactaaagaacttattgcatggtcaaatattttctttgcttctctgcttctattgagtttttatttatctaaaaaaaatagggatatatttcatttatctatactaatgagcctttttataggttgtgttcaagtctttgcattaattccaggtgcctcaaggtcaggagtggtaataatggcttgtctatttttaggattaaatttaaaagattcctccaggtttgcatttcttttagccatcccaactattttaggagcattaatctttttgattactgattcaattgctactaatttggatattctcaatgcacaacttttcgttggatttattacctctgcattggtagctttttttactattaagtattttctcccatttgttgagctgattggcatgatacctttttttgtatatagaatcttttta

SEQ ID NO: 268327 - DNA, 628 bp, Unknown
  Bacterial polypeptide expressing nucleotide sequence isolated from the Sargasso Sea
aatgaatgatattgttttaagtttagtgcttggattaattcaaggattaactgaatttcttcctatttcaagctcagcacatttattattaccatctttaatttttggaactaatgacttaggcttatcatttgatatagctgtccatgccggaacattggtagccgttatatatttctttaaatctgaaattgcaaacatggttacttcatttgttgcatataagacaagccttgaagaatataaaaaattagcaatcttattaattattgccaccttgccaattatattaattggtgttttatcttcggatttgattgagcaaagaatttttaatacttccaccatagccctagcaaatttattttttgcattagttttattgtttgcttttatcattaataggggaaataagaaactatatgaaatgactatatatggagctttgataattggagtagtgcagtgttttgccttaattccaggggcatcaagatcaggtatggctataacggctgccttatttataggtttaagcttaaaagatgcatccaaattttcatttatgttaagcatcccaacaattctaggcgctctagtatttcttttgcttgaaatacagactgcc

SEQ ID NO: 268328 - DNA, 793 bp, Unknown
  Bacterial polypeptide expressing nucleotide sequence isolated from the Sargasso Sea
atgaatgatattgttttaagtctagtacttggattaatacaggggttaactgaatttcttcctatttcaagctcagcacatttattattaccatctttaattttcggtactactgatttaggtttatcctttgatatagctgttcatgctggaacattagtggctgttatatatttttttaaatctgagattgtaaatatggttaactcctttgttgcatatgaacctaatcttgcagagtataaaaagttagcaagcttattaattgttgccaccctgccaatcgtattagcaggccttttatcttcagagatgatcgagcaaagaatttttaatacttcaactatagctctagcaaatttattttttgcattacttttgttacttgcctttgtttatacaaaaggaaacaaaacaatatatgaaataactatatatggagctttgataattggactagtgcaatgttttgctttaattccaggcgcatcaagatcaggcactgctataaccgcagctctatttataggtttaaatttaaaagatgcatccaagttttcatttatgttgggcatacctacaattttaggtgctctggtatttcttttacttgaaatacaaacggttgatatttcttataactttttaaacctaataataggatttttagtctcaatgtttatagctttttttactataaaatattttttaattttcattgagaaaattggaatgattccatttatagcataccgagtagtgcttggaatcgtattactattattattttaaa

SEQ ID NO: 268329 - DNA, 598 bp, Unknown
  Bacterial polypeptide expressing nucleotide sequence isolated from the Sargasso Sea
atgtttcaaaatttaatagaaatctttattctttcagcaattcaaggaatatctgaatttttaccaataagttcttctgctcacttaatactagtttcaaacgtatacgattttaaaacaagttcgctattaatagatataagcctgcacctaggatctttgtttgcaataatattttattttagaaaagacttatttgatcttaaacaaaatcaaaaacttttaattttaataataattggttcaatacctctaattatttttggatatattctgcattctacagaacttattcatcttcttagaaatataaaagtaatagcatggacaactctattttttggaataattcttttttttgctgatcaaagaaaaattgatcaacaaatatcaactaatttaaatataaaatctatattatttataggtatatttcaaatccttgcacttatacctggagttagtagaactggtatttctttaactgctgctagatttttaaaatttaatagggttgactcaagtaaaattgcttttttattatctattccagctttatcaggtgcaagttttctcggtctcaaagatgctattaagc

SEQ ID NO: 268330 - DNA, 617 bp, Unknown
  Bacterial polypeptide expressing nucleotide sequence isolated from the Sargasso Sea
gatggatgatctttcactaatacaaataataattttgagcataattcaggcaattactgaatttctccctatttctagttctgcacacttattgttgccgagcaaattgctaggttggccagatcaaggaataatatttgatataacagtccattttgccagccttttagcggttattgtctattttcgagatcaatttttaaaatttagcttttatttatcaaaaacattcattttcttaattattgcaactcttccaattgtgctaatagtcctatttatagatggtataggggattatagatggactcttgaaagtatcgcaataagcaatatagtttttgcggcactactctttttaactgataaattttgcaacggaaatcttaaaaattcagaaatgaagtggtggcaagctgtagtaattggtttttcccaaacattcagtcttatatctggagcttctagatctggaacagcaattacaggggctttatttcttggtttttcaagggaagaagcagcaagattctcattaatgttatcaatcccgaccataacaggagcactgctttttagctttttagaaataaacacgttagatacaaatataaaca

SEQ ID NO: 268331 - DNA, 766 bp, Unknown
  Bacterial polypeptide expressing nucleotide sequence isolated from the Sargasso Sea
atggatgatctttcagtaatacaaataataattttgagcataattcaggcaattactgaatttcttcctatttctagttctgcacacttattactaccaagtaaattgttgggatggccagatcaaggcataatatttgatataacagtccattttgccagtcttttagcggttattgcctattttcgagaccaatttttaaaatttagcttctatttatcaaaaacattcattttcttaattattgcaactcttccaattgtgctaatagtactatttatagatggtataggggattatagatggactcttgaaagtatcgcaataagcaatataatttttgcggcattactctttttaactgacaaattttgcaacggaaatcttaaaaattctgaaatgaagtggtggcaagctgtaataattggcttttctcaaacattcagccttatatctggagcttctagatctggaacagcaattacaggagcattatttcttggtttttcaagggaagaagcagcaagattctcattaatgttatcaattccgaccataacaggagcactactttttagctttttagaaataaacacgttagatacaaatataaacattttagcaacttttataggatttttaacaacatttgtcgtatcttatttctcaatttatttctttcttaaactaataaaaagtatagggtacatgccttttgttgtttatagagtgcttttaggagtcatgattctttgtctgatataaa

SEQ ID NO: 268332 - DNA, 769 bp, Unknown
  Bacterial polypeptide expressing nucleotide sequence isolated from the Sargasso Sea
aatgatctcaaattttcttgaaatattaatactttcgatagtacagggtatatctgagtttttacctataagttcttctgcacatttatttttagtttcagaaatttataaatttaaatcccaatctttactagtagatgtaggtttacacttaggttcattattggcaataatattttattttagaaatgaacttaaagaaatagtcaataataaaaatttactttttcttatgattcttggttcgttgcctgtgataattttaggagcaataatttataaaactggattaataaattattttagaaatatagaagttatagcatggacaactttaatatttgcattgctcttgtatattgccgataaatttgaaaataaaaaaaaaattgaaacagatttagaattaaaatctattttaataattggagtatttcaaatattagctttaatacctggcgtgagtagatcaggcattgtaattacggctggaagatttttaaattttagtaggtacgattcaactaaaatatctttttatttgtctataccagctattgcaggtgctagttttttgagtttaaaaagtttagttgataaaaatatagatttaaatcttattgtattagtttcgattttattgtcttttatcttttcttatttaacaatcaaatattttttaatatttgttaaaaaatttactttaaatacatttgttatttacagaataattctgtctgtaatactatttttgacaatatatacttaa

SEQ ID NO: 268333 - DNA, 757 bp, Unknown
  Bacterial polypeptide expressing nucleotide sequence isolated from the Sargasso Sea
atgactgatatttttttaggaattattcaaggtataactgagtttttaccaatttcgtcaagtggccacctagtaattttcgataaacttttacctgtaataaatttaaatacaaatgatattgcatttcttcatataggaactttgttttcaattattattttttatagggctagaattttacaaatttttagcaacttaataatttttaagttttacctgaaaatcataatttttggaattcttccagctgttattgtggggttattaacaccaatacaagaggcaatcgataacagttctcaaatattaatttacactggtattgcttattttttcctttctgtattgttaatattctctgaaagaattgcttctaaaaatattttaagtatcgaagaaattactattaaccaagcattcatgattggaattgctcaagcttttgctttaatgcctggaatctcaagatcaggggtaactctcttggctgcaatgtacttagggttaaaaaaggctgatgcaatattttattcaatgcttataggtataccaacaatttttggggcatggagcttgactttcataaatcagtcttttgaagttaatacaagtattttaattccaacaattgtggctttcttaactggaatcttagcaatcaagctactagttaaatttaccactgaatcaaagttacaattttttggattttactgtttaattctctccattgtaagttttggacttaattaat

SEQ ID NO: 268334 - DNA, 442 bp, Unknown
  Bacterial polypeptide expressing nucleotide sequence isolated from the Sargasso Sea
aatgcattatatcgacactcttattctaggtattcttcagggtttaacagaattccttcctattagcagttctggacatttagttcttgggcaatattttttaaatatctatatgccagggaatgcttttgaagtagtgctacatattggaactttaatgagtgtaattaccgtttttagaaaggaaattaagtcaattatatgtgacctcagtaattcttcaaataaattctatctttatgcgttggtttgtggaactattcctgctgtaatagtaggaatagttttaaaagatatgatatcattaatttttgatgatattagatttgtttctttagcattgattattactggaattattttaattagttcaagatttatcattataagaaatctaaaattaactatgttagtagcgtttattataggattggcgcaggca

SEQ ID NO: 268335 - DNA, 317 bp, Unknown
  Bacterial polypeptide expressing nucleotide sequence isolated from the Sargasso Sea
aatgacttattttgagggcatattactggcagtcattcagggattaacagaatttttgcctatatccagctcagctcacttaattctcttatctgaatttatgggttcaaaccagaaccttttctatgacgtctctttacacttgggaactctaatggctgtttgcatttattttcgtagtgatttaattgatatggttaattcaattattagacataaatctctgttcaataacctattattgagacaactttttatttcatgtattccaactctgtttctaggattcattttagttgatttgatagatggttatc

SEQ ID NO: 268336 - DNA, 748 bp, Unknown
  Bacterial polypeptide expressing nucleotide sequence isolated from the Sargasso Sea
tttgattatatcaatagttcagggaattactgaatttcttccggtaagctcatctgcccatcttaacttactttcaaatttatttggttttcgagaggaagagttgttaataaatatcagtgcccacgtgggctctttatttgcagtaattttttttttcaaaaaagaaattataagttttggaaaaaatcaaaaattatttttaagaataattctggcatcattacctttgtttttatttggctatctaattataaattacaacttggttcctggtctaaggacttacaaaatcataggctggacaactttaatttttggtatcattctttatttagctgacaagtttaaagctaataaaaacattgaaaaaaattttactacaaaaaatgctgttattattggtttttttcagattcttgcacttatacctggtgtaagtagatctggaataataatgacgggagcaagggtattaaattttaagagagaggaagctgcgaaaatttcatttctgatgtcgataccagctttagcaggaactggtgtttttggtctatatgctctaataattcaagatagtccaatacttaatatcaactcaataataacggttatttcatcatttgtattttcttacttatccatcaaatattttttaatttatctaaaaaattttaattttaatctaattgttggttacaggacagttctaggtttggctatattgtgctttgcctacctataa

SEQ ID NO: 268337 - DNA, 661 bp, Unknown
  Bacterial polypeptide expressing nucleotide sequence isolated from the Sargasso Sea
atggccactgttatttttgatctggacggaactttggtggacagtgctgaggttctgcgcgatgtcggcaatatggttctagccgaattgggtttagtgctgatggatacgaacgaggcccgaggttacatcggcaatggtgcacaagtatttgtagagaagatgctcgcggctcgcgatgcgcttgatgtggcaacttttgatgatatattcgagcggtattctgatcgatacgccgcgatgcccggcgacgctaatattccgtttccacatgttgacgagactttacaacatctggcatcgcaaggatttcggcttgggctttgtactaataagccgacagctccaacggacgcccttttggcggcgcataattgggcaggcatcttcggctcggtggtttgtggcgatacgctggcgcaacgcaaaccgcatccggaaccattgcgcgaggtggcccgtcaattggcgtcacctccggtgatctatgttggggatagcgaagtcgacgcgcaggctgctgctgccgctgagttttcatttttcctttacactgaggggtttcgtctagaacccgtgaattctctcgtatttgcagagtcttttcaggatttccaagaattacccgctaaggtcgaaacattttttgcggctttgtaag

SEQ ID NO: 268338 - DNA, 790 bp, Unknown
  Bacterial polypeptide expressing nucleotide sequence isolated from the Sargasso Sea
atgtctgatatttttttaagccttattcttgggcttattcaaggccttacagaatttcttcctatatcaagctcagctcatcttcttatcccttctcttgtatttggtacaaatgatttaggattaggctttgatattgcggttcatgcaggaactctgtgtgctgttatctatttctttaaaaatgatctaaaagtttatgcattttcgataataaattcttccaacaggcatcaaaatgaaagaagggttgctattaatttattgattgcaacaataccgattgtttttgcaggaatattatttaatgacttaatttcacaaagatcagtaactaaagaacttattgcatggtctaatattttatttgcttctctgcttctattgagtttttatttatctaaaaaaaataaagatatatttcatttatctatattaatgagcctttttataggttgcgttcaagtctttgcattaattcctggtgcttcaaggtcaggagtggtaataatggcttgtctatttttaggattaaatttaaaagattcctccaggtttgcatttcttttagctattccaactattttgggtgcattaatctttttggttggtgattcaattactgctaatttggatattttcaatgcacaacttttcgttggatttataacctctgcattagttgctttttttactattaagtattttcttcaatttgttgagcggattggcatgacgcctttttttgtatatagaatctttttaggcctactattgataattttgtgaa

SEQ ID NO: 268339 - DNA, 438 bp, Unknown
  Bacterial polypeptide expressing nucleotide sequence isolated from the Sargasso Sea
aatgacttattttgagggcatattactggcagtaattcagggattaacagaatttttgcctatatccagctcagctcacttaattctcttatctgaatttatgggttcaaaccagaaccttttctatgatgtctctttacacttgggaactttaatggctgtatgcatttattttcgtgctgatttaattgaaatgattaattcagttcttgatcataagtctctatttaaaaacctattattaagacaactttttatttcgtgcattccaactctatcatttggattcattttagttgatttgatagatggctatctccgaacgagtatagtaatagctacctctacaatcttttttggattgattttatttctagcaacgtacagtaagtctcataagacacgtattgaggaaaatactttgatagatgcttttat

SEQ ID NO: 268340 - DNA, 787 bp, Unknown
  Bacterial polypeptide expressing nucleotide sequence isolated from the Sargasso Sea
aatgaatgatatattattgagtttcattttaggcttagttcagggtttaactgaatttttgccaatctctagttctgcacatttgttgttaccaacactaatatttggttcaaatgatttaggattatattttgatatttcagtacatgctggaacattgatagcagtagtttattactttagaaatgaaatttttctgatgagtaaatcacttcttgtaactaataatcttaatgaagataaaaacttaataatacaattaataatcgccactataccaatagttatcttaggatttatttttagagatttaattagccaaaggatatttagcattaatgatattgcaatttcaaacttaatttttgcatcaatattgctttttgcttttctaaacaacaaaggtaaaaaaactcttattaatttaactatcataggtgcaggttttattggattatttcaatgttttgctttgatacctggcgcttcaagatctggagcagcaattacagcaggtcttttgattggattaagtctaaaagatgcttcaaaatttgcatttttgcttgcaattccgactattcttggcgcattaactttactcatttttgatttaaataatgaaaatgctagttttgatctactaaatatgagcatcggtttttttacatcaatgatttttgctttttttacaataaagttatttcttaagcttgttgaaaaaataggaatgattccttttgttgcatacagatttttgcttggcatactttcattaataatttag

SEQ ID NO: 268341 - DNA, 766 bp, Unknown
  Bacterial polypeptide expressing nucleotide sequence isolated from the Sargasso Sea
atgtttcaaaatattatagaagttttaattctctctgcaattcaaggaatatctgaatttctgcctataagctcctctgctcatttaattttggtttccacattatatgaatttaagtccagttctcttttaattgatataagccttcatttaggatctctaatggcaataatttatttttttagaaatgagctattggattctagaaaaaataaaagacttataagtttaattatactcggatctattcctttaataattgttggctatttactttataatacaggtttaatttatcagttaagaaacatagaaattatagcatggactacattaatatttgcaattattttatacatttcagacaaaaatcgatttgataaaaaaatttcttcaaatttaaattttcaatcaataatatttgtaggtattttccaaattttctctcttgtacctggggtgagtagagcgggaattactataacagctgcgagaattttaaaatttaatagagtagattcaagtaagatatcttttttactttcaatcccggcattggctggggctagtgtcttaagtttaaaagatgttttcgaacaatcaattgaatttaactacttgatcgttattgcgattgtatcttcctttattttttctttcttaacagtaaaattttttttaatttatattaataaattttcaatgaacgcttttgtaatttatagaattgttattgccttaattttatttaatttaatttattaaa

SEQ ID NO: 268342 - DNA, 787 bp, Unknown
  Bacterial polypeptide expressing nucleotide sequence isolated from the Sargasso Sea
aatgaatgatatattattgagtttcattttaggcttagttcagggtttaactgaatttttgccaatctctagttctgcacatttgttgttaccaacacaaatatttggttcaaatgatttaggattatattttgatatttcagtacatgcgggaacattgatagcagtagtttattactttagaaatgaaatttttctgatgagtaaatcacttcttgtaactaataatcttaatgaagataaaaacttaataatacaattaatagtcgccactataccaatagttatcttaggatttatttttagagatttaattagccaaaggatatttagcattaatgatattgcaatttcaaacttaatctttgcatcaatattgctttttgcttttctaaacaacaaaggtaaaaaaactcttattaatatcaatatcttaggcgcatgttttataggcctatttcaatgttttgctttgatacctggcgcttcaagatctggagcagcaattacagcaggacttttgattggattaagtctaaaagatgcttcaaaatttgcatttttgcttgcaattccaactattcttggcgcattaactttactcatttttgatttaaataatgaaaattctagttttgatctacttaatatgagcatcggtttttttacatcaatgatttttgctttttttacaataaagttatttcttaagcttgttgaaaaaataggaatgattccttttgttgcatacaggtttttgcttggcatacttttattaataatttag

SEQ ID NO: 268343 - DNA, 610 bp, Unknown
  Bacterial polypeptide expressing nucleotide sequence isolated from the Sargasso Sea
atgtctgatatttttttaagccttattcttgggcttattcaaggccttacagaatttcttcctatatcaagctcagctcatcttcttatcccttctcttatatttggtgcaaatgatttagggttaggctttgatattgcagttcattcaggaactctgtgtgctgttatctatttctttaaaaatgatataaaagtttacgcattatctatatttaattctaccaacaggtatcaaaatgaaagaagggttgctattaatttattgattgcaacaataccgattgtctttgcaggaatattatttaatgatttaatttcacaaagactagtaactaaagaacttattgcatggtcaaatattttctttgcatctctgcttctattgagtttttatttatctaaaaaaaataaggatatatttcatttatctatactaatgagcatttttataggctgtgttcaagtctttgcattaattccaggtgcctcaaggtcaggagtggtaataatggcttgtctatttctaggattaaatttaaaagattcctccaggtttgcatttcttttagccatcccaactattttgggagcattaatctttttggttg

SEQ ID NO: 268344 - DNA, 790 bp, Unknown
  Bacterial polypeptide expressing nucleotide sequence isolated from the Sargasso Sea
aatgagtgattttttacttagttttattcttggcttaattcaggggttaactgaatttcttccgatatcgagctctgcacatctgcttttaccatcattattatttggcacaaacgacttaggtttatattttgatatatctgtccatgctggtactttagcagcagtagtatattattttaaatcagatatttttttaatgactcaatcagttttaactaaaaatatcgaattacagaaatataaaaatttaacattccagttattaatagcaacgattccagtagtgcttgtaggatatatttttaaagagttaattgaacaaagaatttttagtatagagagtatagctatatctaatttaatttttgcagctattttacttttggcttttttaagaaataaatctggtaaaggaatatatgaaattactttattcacggcattatttattggcgcattccaatgttttgctcttataccaggcgcatcaagatcaggaacagcaattacagcagcactactaattgggttaaatttaaaagatgcttccaaatttgcatttatgttaggtattccaaccatactcggtgcattggtattgcttgttatagatatgcaaaataatgatattcaatttgattttttaatattgataactggatttttaacttcaatgatatttgctttctttacaatcaagcttttcttaagttttgtagaaaaaattggaatggttccatttgttctttatagagttttgctaggagttattttattattaatgtaa

SEQ ID NO: 268345 - DNA, 769 bp, Unknown
  Bacterial polypeptide expressing nucleotide sequence isolated from the Sargasso Sea
tatgttgcaagattttatagaaattttaattctttctgctgttcaaggaatttctgaatttttacccataagttcgtcagctcatttaatattagtatcaaatttttatgatttagaaataagttctttattaatagacataagtctacatttgggctcattaattgcagtaattttttattttagaaaagagctatttgatctaagaaataataataggttattaagtttaataattattggctccttgcctttaatattttttggatacattctatattccactgaatttattcatcttttaagaaatacaaaagtaattgcatcaacaacactattttttgcatttatacttttctttgctgatcaaagaaaaattaatcgaaatatttctacagatttaaatattaaatcagttttattaattggtttatttcaaatattagcgttgataccaggagttagtagggctggaataacgattacggtagcgcgatttttgaatttcaatagaacagacgctagtaaaatttcttttttactatctatacctgcattagcaggagcaagcttcctaggtttaagagaggcttttgaacaatcaatagaaataaattttttattattaattgctacttttttatcatttatgttttctttttttacaattaagtattttcttaaattaataagtaaaatttcttttaatgtgtttgtaatttatcggataattcttggcttaattttattttatataatatatatttaa

SEQ ID NO: 268346 - DNA, 796 bp, Unknown
  Bacterial polypeptide expressing nucleotide sequence isolated from the Sargasso Sea
attggaaattattaaatctttcatacttggtatagttcagggattaacagaatttttacctgtatcgtctagcggtcatatcgaaatttttaaagaaattttaaatttttcttttgattctaataatggtctattctttacacttatactgcatttggcaaccgctatgagcaccataatttatttttgggatgatgtaaaaaagatattaagtagtttgttaaaatttaaaaaagatgaaaatttcaacttttctttaatgataattatttcaatgataccagcaggtttagttgggtttttctatgaagacaaaataaaccaattatttaacggtaacttaattttagttggatcaatgctaattgtcacatcatttttattatttatatctgacaaaatgaatgatttgaataaaaaaattagtacaaagaatgccattataattggtatcgcacaggcttttgcaatattacctggaatatctagaagtggatcaacaattgcaacatcattatttttaggtgttaatagagatttggctgcaaagttttcttttttaatggtcataccaattatagttggttcttcaatgaaaatgattatttatgataatctaatttttgaggagacaattctaataaactacattgtcggattcatatctgcactaatttctggatattacgcatgtaaatggatgatatttttggtaaaaaaaagtaagcttatttacttttcaatttattgtcttctagtggggataatttcaatttcatattcattaatacaatga

SEQ ID NO: 268347 - DNA, 505 bp, Unknown
  Bacterial polypeptide expressing nucleotide sequence isolated from the Sargasso Sea
aatggaaaactttattcaaattttaatcctatctataacacagggtattactgaatttcttccagttagctcttcggctcacctaaatttaatatcaaaatattttggtattcaaaatgaattattagtaaatgtttatgctcacatgggatctttacttgcggtaatatttttctttaaagaggatatttttaatttcggaaagaataaaaaattattttataaaataattttggcatcaattccattgtttggatttggatttttaattttaaagtataacttgattgatacatttaggtctttagaacttataggttggatgactataatttttggtattgtgctttttatttcagataaattaagccttgaaaatagcattaaagataaatttacgtttaaaaaggccattttaattgggttttttcaagtattagctctaatacctggtgtaagcagatctggaataataatgactggggctagatttttaaaatttaac

SEQ ID NO: 268348 - DNA, 370 bp, Unknown
  Bacterial polypeptide expressing nucleotide sequence isolated from the Sargasso Sea
atgattgacacttatcaacttttaattctttctatggtgcaaggtattacagaatttttacctatttcaagctctgcacatttaattattattcctgaaatattgagttggcaactacaaccaatgtattttgatgttttcatgcactttggatctttgctagctattttagtttatattttctctaataaggaaattaaaaaaatagaatcttttgaaattaataattttgaaaatataaaaaaaattattgttgccgttattccagttttactaattggatactcattccatgaaataattgaaagttatttaaggaatttgaacgtcattatagcttcaacaattataattgcagttttgataatag

SEQ ID NO: 268349 - DNA, 334 bp, Unknown
  Bacterial polypeptide expressing nucleotide sequence isolated from the Sargasso Sea
atgaatacatttcaaatcattgttctcggaatcatccaaggtttaactgagttcctccctatatcaagttctgggcacttgatcctcgtgccaaaaatatttggttacacagatcaaggaattgtgtttgatattgctgtccacctggggtcactgtttgcagtggcgctctatttcagaggcgatctttgtacaatgctttcttctgtattcagttttcagaaaaataatagtaatagagatttaaagttatttttatatcttataattgcaactattccagcagtttttgtaggttatttcctgtcagatttgattgatggccaactcagaa

SEQ ID NO: 268350 - DNA, 802 bp, Unknown
  Bacterial polypeptide expressing nucleotide sequence isolated from the Sargasso Sea
atgaatgacattgttctagccttctttttagctgtcattcaaggtattacagagtttttaccaatatcgagttcggcacatctactccttccatctcttttattaggcacaaaagatttaggtttagagtttgatattgctgtgcatgctgggactttgtgcgcagttatatattttttttggggagatttgaaacaatatgctgtttcggtactaaatgtttctgaaaaggataatcccaataaaaaagtagctataaatttaattattgccacaatacccattgtcctaattggaggttttttcaatgatcttatttcacaaagattaataaccaaagaaataattgctttttcaaatataatttttgccagtttacttttagggagcttttatttttctaaatcaactacaaaaaaacatcaaaacatatttcaattgacaatgttaatgagtttcttaattggatgtattcaaatttttgcattgattccaggggcttcgaggtctggtgttgtcataatggccggcttatttttgggtttaaatttgagggatgcctcaaagttttcttttttactagctatacctactattttaggagcattagtttttttgattggagattcaattgcatcaaatcttagtctgtttagattcgagctggttttgggttttgtaatttcgggattagtagccttctttacaattaaatattttttaaaatttgttgaaattgttggtctgattccattttttatatatcgaatgcttctaggagttctgctgatattgttgtgat

SEQ ID NO: 268351 - DNA, 769 bp, Unknown
  Bacterial polypeptide expressing nucleotide sequence isolated from the Sargasso Sea
ttgattcagggaataactgaatttttaccaatcagctcttctggtcatttaattctaatttcagcatttacagaatggaatgatcaaggaatatttactgatatagctgtacatgtaggaacattaggagctgtagtgatgtatcttcgtaaatacattaaaaatattattattgattttttttcttttaaaaaaaattattttacgacaaatcatttatggggaattaaaattattatcgctacttttcctgcacttatagttggttttattgtttatgaatatttaatggattacttaaggaatgttatagttatagcctggtctagtataatttttggtattattttgtattttgctgatagaaaaaaaaattcaactaaaaaatgggaagatttaaattttttggaagtaattattattggtttttttcaggttttagcttttatacctggagctagcagagcaggtgttaccataacaggagcaagaatattaaatataaaaagagaatcagcagcaattttttctatgttgttatccattcctattattattgcttctttagctctaagtgtaatagatatttatacatcaaataacagtgaacttaatttgataggtccactagtggcaacaatcatttcttttattacagctttaatatctattcattttatgatgagaatattacattatacgaactttaatatttttataatctatagaattatactcggtattactctattatcaatttatgcataaa

SEQ ID NO: 268352 - DNA, 664 bp, Unknown
  Bacterial polypeptide expressing nucleotide sequence isolated from the Sargasso Sea
gatgaatgagataattattggcataatacagggaatcactgaatttcttcccatttcatcaagtggacatctagttatatttgatacactctcagattcaataaatttaaatacaaatgatatagcttttctacatattggtactttattttcaataattgtgttttataaagacagattatctcaaacctttaatagtaaaaataaccttaatcacactatgaagacaattttaattgcaataattcctgcggtagtaatcggtctattttctcctatacaggaggtgattgataatagtgataacctactaacaattactggtattgcttatttaggatttgcttctctattgctgacctatgaatttaataaaaaaaataaagaagatgggagtgtcttatttgaaaatataaattcaaaacaagctttttacataggcctggcccaggctgtagctttagttccaggagtctcaaggtctggcattacattaatagttgctctctacttaggtataaaaaagtctgaggcaatatatttctctcttcttctagggcttccaactatatttggtgcttggctgcttacgtttgtgcaatcctcttttgcttttaatcctgaaatgattattcctgctattgtttcatttgctgccgggctt

SEQ ID NO: 268353 - DNA, 799 bp, Unknown
  Bacterial polypeptide expressing nucleotide sequence isolated from the Sargasso Sea
atggacacgcttcaagttatttttttggctttaattcaaggattaactgagtttttacctatttctagctcggcacatttaattttaccgtcacaacttttgggctggtcagatcaagggctttcatttgacgttgcggttaacactggttcactgtttgcggtggtgatttactttcgacatgacatactgaccttaacaaaatcttggtttggcagtctaggtggcacacaaagccaagaaagtaagctagcttggtggattattcttgcaaccattcctgcagtgattgtcggttttactgccaaagattttattgaaacccactttagaaacacattggtgattgccatcacaaccatagtgtttggtttattactgtgggtggctgatcgtatgtcaaaagcacagttaaatgagtttcaaatgggctggaaaaaagcgttgttaattggtttcgctcaagcgctggcattaattcctggtacttcacgctctggtgcgacaatgactgcggccctaatgctcggtttaacccgtgaggcagcggcacggttttcgtttttaatgtcgatccctgtcagttttggtgctgcaatattagtcacaaaagatttgcttgaaagccctgccgcaattgattatcaggctcttggattaggcatagtggtatcatttattgctgcgtatgtatgtattcattactttttaaagtttattagccaaatcggcatgaccccctttgtgatttaccgtctattattaggtggcgtgttactggctatgctttatctttaag

SEQ ID NO: 268354 - DNA, 578 bp, Unknown
  Bacterial polypeptide expressing nucleotide sequence isolated from the Sargasso Sea
aatggaggagattaaattattgattttgggggtaattcaaggattaacagaatttcttcccatttcctctagtggacacattgaattagctaagaccatgtttaatatggattttttctatgatggcggacttgttgtaactctagttttacatattgcgaccgcccttagcactttatgggtgtttagaaaagatatattacttttattcaaaaatttttttaaaaaaaatgttaatgattctcatatttttttgttaaaaattttgatttcaattatacctgcgtctttggctggatttttttttgaaaaacaaataaaaatattatttaattcaaacatatttttaactggaagcatgttaataataactggtttgatactttacctctctgataaattaaagtttgataaaaaaaaagttgggtataaacatgcttttttaattgggttagctcaagcttttgctattcttcctggaatttctagaagtggttcaactattgtaatggctcttttccttgggattagtaaaaaagaatcatctaagttttctttcttgatggtgattccattga

SEQ ID NO: 268355 - DNA, 601 bp, Unknown
  Bacterial polypeptide expressing nucleotide sequence isolated from the Sargasso Sea
atggatacgtttcaggtaattattttagcgttaattcaaggattaacagagttcctccccatttctagttcggcgcaccttatcctacccgcacagcttttaggctgggaagaccaaggcttatccttcgacgttgccgtgaacacgggctcattatttgccgtagtgatttattttcgcaatgaactctgggccatgttcaaggcctggattgccagcatggtaaaaggtcagcattccgatgacagtaagttagcctggtggatcattcttgctactttacccgcagtgttttttggctttatggccaaagattttatcgaaacccacctgcgcagcgctggtgttatcgccgtgacgactgttgtctttggtttactgctctggtgggcggataagatgtcacgccgtgacttaacggtttatcaaacgggttggcgcaaggcgctattaattggttttgctcaggcgctggcgttaatccctggtacttcacgctcgggcgcgacgatgacggctgcgctgatgttaggccttagccgcgatgccgctgcgcgtttctcgttcttgatgtctgtgcctgtcagcttaggcgcggcta

SEQ ID NO: 268356 - DNA, 607 bp, Unknown
  Bacterial polypeptide expressing nucleotide sequence isolated from the Sargasso Sea
aatggctttagaaataattgttattttatcagtaattcaaggaattacagaatttttaccgatctcatctagtgcccatttaataattattcctgaattatttttaaatatagattctagcagaggatttgacgtctctcttcattttgggtctttattagctgtaatatactatttaaaaaaagatttaataaaaataatttcagatacaatttattttaaaaaagataacaaaggctttattattttaaaaaatctaataattagcactatacccgttattattgtagggtttttggttcatataaataatttagacataattagaggtttagaagtcattggatggaccaccctattatttggaatattattaggtatagcagacagaaatcttaaagttataaaatattttaaaagtttgaatttaaaggatgcacttgtaatcggcattgctcagacactagcaattattcctggaaccagtagatcaggtattgttataactgctggtttgtatatgggtttcagccgttttgacgcatctaaatattctcttttattatcaatcccagttataatagccgcaactacgttggaaagcata

SEQ ID NO: 268357 - DNA, 544 bp, Unknown
  Bacterial polypeptide expressing nucleotide sequence isolated from the Sargasso Sea
atggatctaatacagacattaatattagcaattatccagggactaactgaattcttgcccatttcgagttctgcccacttgatactgatatcaaagatagctggttggaacgatcaaggattattgtttgatatttctttgcattttggaacacttttggcagtccttatatatttcaaagatgatctttgcaggatgatcgaagaccctattaaaaatcgaggaaagaatatcgtccactcggatttaatgattttagttattgcaacaataccagttgtcatagctggtggactttttaatgattggattgaggccaatctgagatcatctaacgtgatagcttcgaccagtatcattttcggatttcttttgcttgcatcagataaagttagctctggagggaggaatttaactctccaaattggactgcttattgggctggctcaaattcttgctcttattccgggcgtgtcgagatcaggtataaccattaccatgggtttatttatgggtcttggaagagtcgaatctgcccagattt

SEQ ID NO: 268358 - DNA, 622 bp, Unknown
  Bacterial polypeptide expressing nucleotide sequence isolated from the Sargasso Sea
atggactggatgcaggccctgtttttagggctggtacagggtttgaccgaatttctgccgatcagcagcactgcacacctgagggtggtgccccattggctgggctgggaggatccgggtgccgaattttcagccgtgatccagttgggaaccttgttggcggtactggtttatttctggaaagacgttcagcaactggtggttgccgttctggtgggattgaaaaaccggaagccctttgaaaccgctgaagcccaacttgcctggtcgattgccgcaggaacactgccgatcggaatcctgggattgggattcaaggactggatcaaaacagaagcccgtgcaatttggatcatcggaactgctctgattgtgcttgccgtgttactttggctggcagagaggttttcgaccgcaaaccgaagtgtagcccagcttggatttttcaggattcagtggatcggactttgtcaggctctggctttgatcccaggatgttcgcgttccggttccacgatcatgggcggattgatgatggggttgaagagggatgaagccgccaggttttccttcttgttggggttgcctgcgattttggccagcggtttttatgaactctatg

SEQ ID NO: 268359 - DNA, 432 bp, Unknown
  Bacterial polypeptide expressing nucleotide sequence isolated from the Sargasso Sea
tctttgctgttgtcttgtattttagcactaagtttgagagtaaatattcgcagcttgaatctataagcccaattcaatcattaataattggcctggctcaatgttttgcactaattcccggaacttctagatctggcattactatctctgcagctttagcgttaggtatagatactaaaacagcttcgaaattcagcttcttactagctgttcctaccataggtgcaatagcttgttaccagcttttaggcgttgattttgaatcctttgtaagtgaatttgagaataatctgttaggtatggttgtttcttttatcattgcttatctaactatcgatttctttataaaatttatagacaggataggctttatgccctttattatttatagaattgttcttggggctttgattttatttttcttaatttaat

SEQ ID NO: 268360 - DNA, 784 bp, Unknown
  Bacterial polypeptide expressing nucleotide sequence isolated from the Sargasso Sea
aatgattgatattttattaattttttttcttgcatttgttcaaggtattacagaattcttacctatatcgagttcagcacacttacttttaccatctttattattcaacgttactgaccagggcttagcatttgatattgcagttcatgctggaactttgatggctgttattttttatttcaaaaatgatttaaaaaaaataactttaagcttcatatctaaaaatcatgataatgataaaaaatttggaattctacttatcattgcaactattccaattgtcattgtgggtctttttatgtcaggttttttagagtctagagtttttggtataaaaactattgcctatgcaaatatttcctttgcaattttattatttttatcttttaggttcgcaaaacaaaataaatctctagcgaatctcacaatactaggagctttatttattggacttattcaaacttttgctcttataccaggagcttcgcgatcaggaactgcaataactgctgctttaatttttggattaagtctaaaagaggcatcaaaattttcatttatgcttgcaatacctacaatttttggtgctttaacattgatgttattaagtttgtattcttctgaagtaactatttcagttacgcctctattaattggtttttttacttctataatatttgctttttacaccataaagtattttcttatatttgtagaaaaagttggcatgtatcctttcgtaatttatcggatatttcttgggattatgttattagcattatga

SEQ ID NO: 268361 - DNA, 617 bp, Unknown
  Bacterial polypeptide expressing nucleotide sequence isolated from the Sargasso Sea
aatggaccttttgcaaatattattactatcttttatacaagggttaactgagtttttgcctatatctagttctgcgcatttgatcttattctcaagtttctttaattcaaatattcagagtttaaactttgatgtgtcggttcatttaggaacgctttttgcagctttagtctattttaaagaagaaattttaaaaattatcagctccttctcaagacctaatcaagaaggtagaaagcttctaacaaacctgaccgtggcaacgttgccaatactggttttaggttactttgtaagagatttggttgatatatttttaagatctccagaagtaattgcttatgcaacaataatttttgcttttattttatatcttagtaccaaagtcaaaagtaaatattcaaacttagaatctataacacctaagcaatcattaataattggaattgctcagtgttttgctttgattcctggcacgtctaggtcgggaattactatctctgctgcgttagcattaggtttaaccagcaagttagcttcaaaatttagttttttgcttgctatacctactataggtgcaatcgcttggtaccaacttctgagtcttgaatttgatg

SEQ ID NO: 268362 - DNA, 475 bp, Unknown
  Bacterial polypeptide expressing nucleotide sequence isolated from the Sargasso Sea
atgtccgacccgatttccgctctgctgcttggcatcctcgaaggcctcaccgaattcctccccgtttccagtaccggccacctgctgatcgccgagcgctggctgggcgcccgctcggacttcttcaacatcgtcatccaggccggcgccatcctctccgtcgccctggtgttccggcagcggctgtggtcgctggccaccggcctgggcgaccccggcaaccgcgattacgtgctgaagctggccaccgcgttcctggtgaccgcgctggtcggcctgccggtacggctggccggctggcagttgccggagaccgtcaccccggtggcctgggcgctggtgttcggcggcgtgtggatgctgctggccgaaggcttcgccgcgcgcctgcccgaccgcgacagcgtcacctggaaggtcgccgtcggcgtcggcctggcgcaggtggtggccggtgtattccccggcacctcgc

SEQ ID NO: 268363 - DNA, 778 bp, Unknown
  Bacterial polypeptide expressing nucleotide sequence isolated from the Sargasso Sea
atgaaattacttgaatcatttattttaggagtactgcaaggtatagctgaatttcttcctattagtagttcaggccatttattaattgctcaagaattaatgaacgttaattatcaaggcaatgctcttgaagtagctacacacttaggaaccttgttaagcataattgttgtcttcaggaatgagattatttctttggttactggaataaaaaataaaaaaaatcaagattacattatttatgtaataattggaactattccagcgatagcttttggtttgtttgttaaaatttttatatttgatattatagaaaatatttttgttgtagctatttcattgttgataactggattgcttcttatgaagacaaaaaaaataaaaatcagatttttacccataagcctcaaaatcgctattctaattggtttgtctcaagcaattgcagtttttccaggaatttctagatctgggattacaatagtaacagcgctttatttaggcctatgcaaggaggaggctactaaattctctttttttttggcaataccagcaatccttggagcgggaattttaactttttttgatcaaaaaagtcttattcttatagctaatcaaccatcattttttgctttggcatcaacttcttcatttgtctctggattaattttcttgagttttttattaaaagttattcgtaaagataatttttatttgtttagttattactgtttttttgcttcagcactatcattagctatatttattataaaataaa

SEQ ID NO: 268364 - DNA, 556 bp, Unknown
  Bacterial polypeptide expressing nucleotide sequence isolated from the Sargasso Sea
atggactggatgcaggccatgtttttagggctggtacaaggtttaaccgaatttctgccgatcagcagcactgcacacctgagggtggtgccccattggctgggctgggaagatcctggtgcagaattttcagccgtgatccagttgggaaccctgttggccgttctggtttatttctggaaagacgttcagcaactggtggttgccgttctggtaggattgaaaaaccggaagccctttgaaaccgctgaagcccaacttgcctggtcgatagccgcaggaacactgccgatcggaatcctgggattgggattcaaggagtggatcaaaacagaagcccgtgcgctgtggatcataggaacagccctgatcgtgcttgccgtgttactttggcttgcagagaggttttccaccgcaaaccgaagggtggcccagcttggatttttcaggattcagtggatcggactttgtcaggcgcttgctttgatccctggatgttcacgttccggttccacgatcatgggcgggttgatgatggggttgaagagggatgaag

SEQ ID NO: 268365 - DNA, 580 bp, Unknown
  Bacterial polypeptide expressing nucleotide sequence isolated from the Sargasso Sea
atgcaatatactgatacactttttttagcaatcctacaaggtttgactgagtttctcccgattagtagttcggggcacttagttatagggcaagagttattaaatattagcttaccaggtaatgcttttgaagttgtgttgcatattggtacgctgatgagcgtattaactgtttttagaaaagaaataaagtcattagtcgttaatattaatgaatcttcaaaccaacactatatttatgctttaatatttggaactatcccagcttttttagttggtttatttttgaaagattatatttcattattatttgataatattagatttgtttcattatcattggtatttacaggaatcatgttaattacatcaaaattcattaataaacgaaatgtagaattaacgctgttcattggattcgttatagggttagctcaagctattgcaattataccaggaatttcgagatctggcgcaacaatttgcatggctattttaatgggtttatctgcacctgcagcagctagattttcttttctattatcaatacctgttataattggcgccaggtattttaacg

SEQ ID NO: 268366 - DNA, 354 bp, Unknown
  Bacterial polypeptide expressing nucleotide sequence isolated from the Sargasso Sea
aatgacttatttggaaggcatattactggcaatcatacagggattaactgaatttttgcctatatcaagttcagctcacttaatactcttatctgagtttatgggctcaaatcagaaccttttctatgatgtctctttacacttgggaactttaatagctgtatgcgtttattttcgtactgatttaattgaaatgtttaattcagttataaaatataagtctttattcaataatctattattgaggcaactttttatttcgtgtattccaactctattgctaggattcattttagtagatttgatagatggttatctccgaactagcaccgtgatagccacaactactatctt

SEQ ID NO: 268367 - DNA, 752 bp, Unknown
  Bacterial polypeptide expressing nucleotide sequence isolated from the Sargasso Sea
gatgcttgaaattttaactggtgttttacagggactaacagaatttttaccgatatcatcaagtggtcacctcgtcattatttcatcattaagttctgaactcgacctaaacaccaatgacattgccttcttgcacattggtacattattctcaatagtatttttctatagaaagagaattttcgagatatttgaagatttagatacttttatcttttatttcaaaataattcttgctggtattattccagcggttctcattggtttactgacacctatacaaaatatcatcgatgagagtcccaaccttattcttatcacaggagcttcttacttgattttttcattactcctaattttttcaggaaaaataaataacagtgaggcatttggcatcagagatataaccgtcagccaagcatttgttattgggatcgctcaatctgttgcattattacctggagtttcacgatctggtgtaactttattgacagctatttatctcggggtaaaaaaagctgatgcaatttattattcactcttgctaggtatcccaacaatatttggagcatggagcctaacctttatcaatgattcctttcaagtaaacacaaatattgttctcccaacaattgttgctatgtttaccggactacttgcgataagagttttaattaattttacaaccagttcaaaactgcaatattttggttattactgtctattactttccgtgttctgttttatagcta

SEQ ID NO: 268368 - DNA, 646 bp, Unknown
  Bacterial polypeptide expressing nucleotide sequence isolated from the Sargasso Sea
aatggacattgtgcaagttttatttctatctttcatacagggattaactgaatttctgccaatttctagttcagctcatttgatattattttctgatttctttagctctaatattcaaagtttaaattttgatgtatcagttcatttaggtactcttatagcagcttgtgtttattttagagacgaaattttaaaaattcttaaatcgtttactagttcagataaagaaagcacagggaaaaaattattagttaacttaataatcgccgcattgccaattttaattattggattctttataagggatttggtagaaatcttcttaagatctccagaaataatagcttatgcaaccatatcttttgcagttatcctatacctaagcacaaaggttaagacacggtattctcaattagattctatttctcctattcaatcattaataatagggctcgctcaatgtttggctctgataccaggaacttctaggtctggtgttaccatctctgcgggtttagctttaggagtggaaagtaaagttgcatcaagatttagtttcttgctcgctattcctacgataggtgcgattgcttgctatcagattataagcgttgattttgcttctttcgcttcagagtatataagc

SEQ ID NO: 268369 - DNA, 744 bp, Unknown
  Bacterial polypeptide expressing nucleotide sequence isolated from the Sargasso Sea
tatggattggattcaggcccttgtgctggggatcgttcagggactgaccgagtttctacccataagcagcacagcacatttaagaatcataccttatctgcttgactggcaagaccccgggacagaattttctgcagttatccaacttggcacattgatggccgttattatttatttctggaatgatgttatctcactttcgcgtgcggcaatagttagtttatggcacaggaaattatttgaaacttcagattctaaattggcttggagcattgctgctgggacaatccctgttgttattgcggggttattatttaaagatttcattaaaacagatgcccgccagctctgggtgatcggtgctgcacttataattatggcaattggtttatacgctgcggaaaggctatcaaagcttaatcgacaaattggtcaattgaaatttctacaaattcagcttattggtcttacacaggcacttgcccttattcctggttgttcgcgatcagggtctactataataggtggtttgatcgttggtctaaaacgagaagaagccgctcgattttcatttttacttggaatacctgctatactaggtagtggtatttttgagttcttagaaatgtttgagcaaggaatcattatcagtgaataccagaacctagttatcggagtttttgcttcatttgttgtagggtacctttccatcgaatttttgcttcgtttccttagaatgtacgg

SEQ ID NO: 268370 - DNA, 291 bp, Unknown
  Bacterial polypeptide expressing nucleotide sequence isolated from the Sargasso Sea
aatgtttgaattacaatttttagttctcggtcttgtccagggcattacagagtttttgcctattagttcttcagctcatcttattttgatatctgaattaacagaatggaaagatcaaggtatttttactgatattgctgttcatgttggaacattaggggccgtaattctatatttattaaaagaaataaaaaaaattatttttgatttttttcaatttaagaacaattcaaattttttttttataaaaattattatagcaactcttccagctttaataattggctttat

SEQ ID NO: 268371 - DNA, 784 bp, Unknown
  Bacterial polypeptide expressing nucleotide sequence isolated from the Sargasso Sea
atggattggattcaggcccttgtgttgggaatcgttcaaggactgaccgaatttctgcccataagtagtactgcacatctaagaatcattccttccctactcgaatggcaagaccctgggacagaattttccgcagtgatccaacttggcacattgatggctgtaatgatttatttcaggaatgatgtaatatcactttcgcgggcagcaatagtaagtttatggaacagggaattatttgaaaccacagattccaaattggcctggagcattgctgcaggaacaatccctgttacggtatttggcctgctatttaaagatatcataaaaacggatgcacgcgaactttggctggtcggtgctgcattgattattctggcaattggcttatattctgctgaacatatatctagaaaaaatagacatattgatcagttgaattttttaaaaattcaattgattggacttacacaggcacttgctcttattccaggttgttcacgatcaggttcaactataatgggtggtttgatcgttggtctcaaaagagaagaagccgcacgattttcgtttttacttggcatacctgctatattaggtagtggtatttatgagttattagatatgtttgaggaaggaatcattagcagtaattaccagaacctagttattggagttttggcttcattttttgttgggtacctttcaatcgaatttttacttcgtttcctgaaaatatacggtaccctcgtatttgttatttatcgtatagtttgggcacagg

SEQ ID NO: 268372 - DNA, 706 bp, Unknown
  Bacterial polypeptide expressing nucleotide sequence isolated from the Sargasso Sea
gcttggcttcgacggccccaaggctgccaccttcgaagtggtgatccagatgggctccatcctggcggtggtcgccgtgttctggcgccgcctgtttggcctgatcggcatccacttcggccagaaaccggcgcagggacacgccaccctctcgctggtgcacatcatcctcggcatgctgcccgccgtgatcatcggcctcgccatccacagctggatcaaggctaatctgttcggcccacagaccgtgatgtacgccctggtggccggcggcatcctgctgatcatcgccgagaagttccgcccggcggtgcgttccgaaaccctggacgacatcagctacaagcaggcgctcggcatcggtctgttccagtgcctggcgctctggcccggtttctcccgctccggtgccaccatcagcggcggcatgctgatggggatcagccgtcaggcggcggccgagttctccttcatcctggcggtgcccatgatggtggcggccagcgggctggatctctacaagagccgggatctgctctccatggccgacttccccatgttcgcggtgggcttcatcaccgccttcgtggtggccatgatcgccatcaagaccttcctggcgttgatccgtcgcctcgacttcatcccgttcgccatctaccgcttcgtggtggccttcgccgtctatctggtgttcgtcgcctga

SEQ ID NO: 268373 - DNA, 547 bp, Unknown
  Bacterial polypeptide expressing nucleotide sequence isolated from the Sargasso Sea
cctgcccgctgccgtcgttggcttgttgtttattaaatacatcaaactttacctgtttaaccctatcacagtagcgactatgctggtgctgggtggcctggtgattttgtatgcggaacgccgtactcatgctgttaaaattcatgatgtggaccaaatcagctggaaagatgcattaaaagtgggttgtgcgcagattatttcgatgatcccaggaacctcacgttctggcgctaccattattggcggcctgttttttggttttgatcgtaaagttgctgcggagttctcgtttttccttgccgttccaaccatgtttgccgccactttttatgacatattcaaacacagggatgtattaaattttgagcaaatgcctatgtttgtcgtaggttttgttgccgcttttgttagtgctcttattgcagtaagaacctttgtccgttttgtgtccaaccatagttatgaagtattcgcttggtatcgaattgcctttggtttgtttattctggcgacctggtactttggttgggtgagctggtcttaa

SEQ ID NO: 268374 - DNA, 650 bp, Unknown
  Bacterial polypeptide expressing nucleotide sequence isolated from the Sargasso Sea
aatgctttcttcaatagaaattttaattttatcactagtacaaggtattactgaatttttaccaataagttcagctgcacatttagttttgattacaaaatactactccttcattaatcaagatttattaattgatatatgtctacatcttggatcattaatggcaataatattttattttagaaatgatttaataaattttataaataatagaaattttttaattaaaatacttataggaactattccaattatccccgtgggttatgttctatatgaaacgggtttgattcagcagctgagaaatttagaagtagttggttggatgagtttactttttggaattttattatatttaagcgataaaaggaaaataaaaagtacgattgaaaataactttaccaataaatcagctattatctttggattgtttcaagttttatctttaatacctggtgtaagtaggtctggaataactattaccgcaggaagagcattaggatttaatagatatgactctgcaaaaatttctttttttttagcaatacccgctctagctgcagcaagctttttaggaatatataatatttacaaagaaggtagtgtcgaacttaattttttagccattatttctgtgatattttcttttg

SEQ ID NO: 268375 - DNA, 521 bp, Unknown
  Bacterial polypeptide expressing nucleotide sequence isolated from the Sargasso Sea
aatggattttgtacaagttttatttctatctttcatacagggattaactgaatttttaccaatttctagttcagcacatttaatcttattttctgatttctttagctctaatattcaaagtttaaattttgacgtatcagttcatttaggcacccttatagcagcttgtgtttattttaaagacgaaattttacaaattcttaattcgtttaccgattcagataaagaaagcacagggaaaaaattattagttaacttaataatcgccgcatcgcctattttaattattggattctttgtacgggatttggtagaaatcttcttaagaactccagaaataatagcttatgcaaccatactttttgcagttatcctgttcctgagcacaaaggttaagactcggcattctcaattagattctatttctcctattcagtcactaataataggactctctcagtgcttagctctgatacccggaacttctcgatctggtattaccatctcagcaggcctagctt

SEQ ID NO: 268376 - DNA, 700 bp, Unknown
  Bacterial polypeptide expressing nucleotide sequence isolated from the Sargasso Sea
catggatttaattcagatagtcgttttatcaatagtacaaggaataaccgaatttcttcctataagtagttcagctcatttaatcctaatttcaaagttgtttggctggcaggatcaaggaatactctttgacatatatgttcatggcggtagcctttttgcgataatttacgcctttagaaaggaagtcagcgtattaattcaaagagtattttccccttacaatcaaaatctattattgtgtttaatagtagcaaccttacctgttgcattagttggtttcctaggaggggattttattgaacagaattttcgttctttggaatttctaattctcaccacttttttatttgcaatttttttatacattgcagataaatacggtagaaaaacgaattcaatcgaatccattgatctcaaggattcttttatcgttggcatgtttcaaatatttgctctcatgccaggggtctcaagatcggccatcactatgatcggagctttaatattaagttatagcagggaagatgcagctagattctcttttcttttatcaatacctacattgtcggcagtcttattgggaagctcaatagaagcaattcaatcagaagagactattgactggtctattttaattcttggcggattaatttcctttgctatatcgcttttatgcattaatttatttttatctttc

SEQ ID NO: 268377 - DNA, 677 bp, Unknown
  Bacterial polypeptide expressing nucleotide sequence isolated from the Sargasso Sea
gctgggcgcgattctggcggtgatgtgggagttccgtgcgaaggtcgtcggtgtcctcgtcggcttgcccagcgatccgaaagccaggcgtttcagcttcaacctgtttctcgcgttcattccggcggtgatcttcgggctggccttcgcggacctgatcgaacactggctgttcaaccccatcacagtggccacggcgctcatcctgggtggcatcgtcatgctctgggcggagcgccgagagcacccgatccaggcggagtcggtggacgacatgacctggcagctcgcgctcaaggtcggattcgcgcagtgcctggcgctgatcccggggacgtcccgttccggggccacgatcatcggtggcctggtctgcggcctgtcgcgcaaggccgcgaccgagttttccttcttcctggccatgccgaccatggtggcggccacggcctattccctggtcaagtaccgcgacatcctgcagacgagtgatctgccgatcttcgccattggcttcgtcagcaccttcatcgtcgccatgatcaccgtgcgtgcgctcctcaggttcatcaccaaccacagctatgcggtgttcgcctggtaccggatcgcctttggcctgctcattctcgcgacctggcaactgcacctgatcgactggagcacggcgcaaccgtgag

SEQ ID NO: 268378 - DNA, 781 bp, Unknown
  Bacterial polypeptide expressing nucleotide sequence isolated from the Sargasso Sea
tatggatctaatacagacattaatattagcaattattcagggactaactgaattcttgcccatttctagttctgcccacttgatactgatatcaaagatagttggttggaacgatcaaggattattgtttgatattgctttacattttggaacactgttggcagtccttatatatttcaaagatgatctttgcaggatgatccaagaccctattaaaaatcaaggaaagaatatcatccactcggatttaatgattttagttattgcaacaataccaattgcgatagctggtggactttttaatgattggattgaggccaatctgagatcattgaatgtgatagcttcggccagtatcgttttcggatttcttttgcttgcatcagataaagttagctctggagggaagaatttaactcttcaaatcggattaattattggtcttgctcaaatatttgctcttattccgggcgtttctagatcaggtataaccattaccatgggcttatttatgggtcttggaagagtggaatctgccagattttcttttttattggcaatcccagtcatctttgctgcaaccatatttcaaacatatgatctgtatacattcggtattttagatattaattacattgatctgctaacaggtttaaccgtctcctttttaattgcatactatacaattcatttatttttggcttttgtcatgaaaatcgggatgctccctttcgttctttacagagtagttttgggttcagctatcttcatgttcttgtaa

SEQ ID NO: 268379 - DNA, 793 bp, Unknown
  Bacterial polypeptide expressing nucleotide sequence isolated from the Sargasso Sea
aatgaatgaagttcttctaagctttcttttaggtttaattcaagggttaacagaattcttaccaatttcaagctcggcacatttattatttccaactttattatttggaacagatgatcttggattggcatttgatatagctgttcatgcagggacactgcttgctgtaatatattttttcagaactgagattaaacttatgattaagtctttaatttctaaaaataataattttaatgacagcagaaaagttgcatatttattaataattgcaacttttccaattgtcatggcaggcctgcttggaacagattttatagaatcaaatagaaatagtattgctagtattgcatacatgaatcttttatttgctggctttttgctttttgcatataaatatagctcatcatctaaaagcttaattgagctaacaattgctggagctatttttataggtgtttttcaggtttttgctttatttccaggagcatcaagatcaggggcggcgatgacagctgcattattaattggattaaatttaaaagactcatcaaaatttgcttttttattggcaataccaactatttttggcgcactagtttttttaattggggatttggttctatatgaaactcagattaatattatctctttagttgttggttttttaacctcaagtattgtcgcttttctgactataaaatattttctaatttttgttgaaaaaattggcatgtatccatttgtaatttataggcttttattaggagttctgttactagttttaatatga

SEQ ID NO: 268380 - DNA, 653 bp, Unknown
  Bacterial polypeptide expressing nucleotide sequence isolated from the Sargasso Sea
catggggtggctcgaagcggccgtccttggggttgttcaggggctcaccgagttcctgccgatatcgagctccggccacgttctcatcgtgtctcggctgttcggctggggtgatcccggggccgccttcaccgccgtcacccaaatcggtaccgagattgcggtattgatctatttccgtcgagacttggcgcgcattctgtcgacgtggttcgtgagccttcgtcggcccgaggtgcaggggagtatcgacgcacggatgggctggtacgtgattatcggaacactgccgatagccatcctcggatttaccttcgcgcccgtgatcgaaacggccgcccgaaacctgtggctcgtggcaacggtgttgatcgttttcggcatcgtcctcggtctcgtcgaccgctggggcgccaaaaccaaggcactggaggcactcaatgccaaagacggattgctattcgggttcggtcaggccctggcgctgatcccgggggtgtcacgctcgggtgccacgatttcggttggcctggcgatggggtattcgcgatccgccgccacgcgctacgcgttcttgctggctattcccgctgtcctcgcgtccggcttctacgaggcgacgaagatcggctccgacgtcaacgcgcaatggg

SEQ ID NO: 268381 - DNA, 802 bp, Unknown
  Bacterial polypeptide expressing nucleotide sequence isolated from the Sargasso Sea
catggatacgtttcaggtaattattttagcgttaattcaaggattaacagagttcctccccatttcaagttcggcgcaccttatcctacctgcacagcttttaggctgggaagatcaagggttatccttcgatgttgccgtgaatacaggttcattgtttgccgtagtgatttattttaggcatgaactttgggctatgtttaaggcgtggattgccagcatggttaaaggtcagcattctgacgatagcaaactggcatggtggattattcttgctactttacctgctgtattttttggttttatggccaaagactttatcgaaacccatttacgcaatgccggcgttattgcagtgacaacagtggtctttggtttgctgctttggtgggcggataagatgtcacgccgtgatttgacggtttatcaaacggggtggcgcaaggcattattaattggttttgctcaggcgctggcgttaatcccggggacatctcgctcaggtgcgacgatgaccgccgcgctgatgttaggtcttagccgcgatgctgctgcgcgtttctcgtttttgatgtctgtacctgtcagcttaggcgcggctattttagtgggtaaagatttggctgaaagcccgcttcccattgactatcaagcgcttacactaggcactgtgatttctttcgctgcggcttatctgtgtatacattatttcttgaaaatcattagccgcatgggtatgacgcctttcgttatttatcgtcttgcccttggtgctgtgttgtgtggatttatcttcttataa

SEQ ID NO: 268382 - DNA, 727 bp, Unknown
  Bacterial polypeptide expressing nucleotide sequence isolated from the Sargasso Sea
catggattttttaattttactcaaggccttaatactggggatagtcgaaggtttgaccgagttcctgccggtttcaagcacaggacatttgattgttgtgggagatttaattaacttttacaacgaaggcaaagtttttgaagtcgcgatccaacttggtgctattctggccgtcgtttttgaataccggaagcggtttatcagcgtagcgaccggcattactcatgataaaaaagcacagaattttgttctgaatttgtttgtcgccttcctgcctgcagccattgttggtttactatttattaaatacatcaaactttatctgtttaaccccattacagtggccactatgctggtgttgggtggtctggtgattttgtatgcagagcgccgcactcatgcggtgaagatccatgatgtagatgaaatcagctggaaagatgcgttaaaagttggctgtgctcagattatcgcgatgatacccggcacatcgcgctctggcgctactattatcggcggtctgttttttggttttgatcgtaaagttgccgccgagttttcatttttcctggctgtacctaccatgtttgccgccactttttacgacattttcaaacaccgcgacgtactgagtttcgaacaaatgccgatgtttatcgtgggatttgtcgcggcttttgtcagcgctttaattgcagtaagaacctttgttcgctttgtttctaac

SEQ ID NO: 268383 - DNA, 793 bp, Unknown
  Bacterial polypeptide expressing nucleotide sequence isolated from the Sargasso Sea
atggctttagaaataataattattttatcattaattcaaggaattacagaatttttacctatttcatctagtgcccatctaatcataatacctgaatttttttttaatatagattccagcagaggatttgacgtctctcttcactttgggtctttattggctgtaatatattatttaaaaaaagatttaatgaaaataatttcagatacaatgtattttaaaatagataacgaaggctttattattttaaaaaatctaataattagcactatacccgttatcattgtaggatttttggttcatataaataattttgatataattagaagtttagaagtcattggatggaccaccttaatatttggaatattattaggtatagctgacagaaatcttaaagttataaaatattttaaaagtttgaatttaaaggacgcactcgtaattggcattgctcagacactagcaattattcctggaaccagtagatctggaattgttataactgctggattatatatgggtttcagccgttttgatgcgtctaaatattctcttttattatcaatcccagttataatagccgcaactactttggaaagcataaacttgttcatcgaaaagggtttcttttttaataatgaaatgattatgggtattattttaagtttttgcgtcgccttaattgcaattaggttgtttatgaactggattaataaagcttcacttaaaattttcgttgcatatagaattatgcttgggattctgatcttggtatacgcttacatttaaa

SEQ ID NO: 268384 - DNA, 574 bp, Unknown
  Bacterial polypeptide expressing nucleotide sequence isolated from the Sargasso Sea
tttgattcaatttacattgctagccctaattcaagggattacagaatttttaccgatctctagttctgcgcacttacttataccaggaattctttttggttggccagatcaagggttggagtatgatatcgcagtgcactttgggacactactagcggtaattgcctattttcggcaggatctaattcgcatgtcatgtcgaatgttgtctatgagtgataatacttcaagagacgaatctagggagcttatattcaatcttgttgtggcaacaattccattagtaatagcgggattcttattttctaactttattgaagagtatcttagggatgcaggggttattgcaatatcatcgcttatttttggtctgattctgggttgggtatggttgaggagagacgtatctagaagaaaaaaaataacagtaggagatgctgtattcataggttttgcacaatgcttagcgattattcctggagtgtctcgatctgggattacaattacagcgggtttgtatttaggtcttaatatagctagtgctgttaaattttcttttctcttggcaattcca

SEQ ID NO: 268385 - DNA, 832 bp, Unknown
  Bacterial polypeptide expressing nucleotide sequence isolated from the Sargasso Sea
gatggactggatcctgatctgcaaggctttgatcctcggcgtcgtcgaggggctgacggaattcctgccggtatcgagcaccggtcacctgatcgtcgcgggcagcttcctgaatttcaacgattcgcatgcgaagacgttcgacgtcgtgatccagttcggcgcgatcctcgcggtctgctgggaataccggcaacggatcgcgtccatcgtatccgggctgccgagccggcccgacgcgcggcgcttcacgctgaacgtcgtgatcgcgacgattcccgccattgcgctcggcctcctgttcgagaagaagatcaaggccgtgctgttctcgccggtccccgtcgcgttcgcgctcgtcgtgggcggcgcgatcatcttgtgggccgaggcgcgacagcgcgagcgcagcgagccgccgcgcgtggtgtcggtcgacgcgctgacgccgctcgatgcgctgaaggtcggcatcgcacagtgttttgcgctgattcccggcatgtcgcgctcgggctcgacgatcatcggcgggatgctgttcggcctcgaccggcgcgtggccaccgaattctcgttcttcctcgcgatcccgatcatcttcggcgcgacgctctatgaaaccgtcaaggactggcaggcgttcaccgtcgattcgctcggcctgttcgtgctgggcgcggtcgcggcattcgtcagcgcgttcgtgtgcgtgcgctggctgctgcgctatgtcgcgtcgcacgatttcacggtgttcgcgtggtaccggatcgcgttcgggctgttcgtgctgctggtcgggtacagcggctggctgaactgggcgtga

SEQ ID NO: 268386 - DNA, 757 bp, Unknown
  Bacterial polypeptide expressing nucleotide sequence isolated from the Sargasso Sea
gatgcttgaaattttaactggtgttttacagggactaacagaatttttaccgatatcatcaagtggtcacctcgtcattatttcatcattaagttctgaactcgacctaaacaccaatgacattgccttcttgcacattggtacattattctcaatagtatttttctacagaaagagaattttcgagatatttgaagatttagatacttttgtcttttatttcaaaattattcttgctggtattattccagcggttctcattggtttactgacacctatacaaaatatcatcgatgagagtcccaaccttattcttatcacaggagcttcatacctaattttttcattactcctaattttttcaggaaaaataaataatagtgaggcattaagtatcagagatataaccgtcagccaagcatttgttattgggatagctcaatctattgcattacttccaggagtttcacgatctggtgtaactttattgacagctatttatctcggggtaaaaaaagctgatgcaatttattattcactcttgctaggtattccaacaatatttggagcatggagcctaacctttatcaatgattcctttcaagtaaacacaaatattgttctcccaacaattgttgctatgtttactggactacttgcgataagagttttaattaattttacaaccagttcaaaactgcaatattttggttattactgtctattgctttccgtgttctgttttataactaattaa

SEQ ID NO: 268387 - DNA, 778 bp, Unknown
  Bacterial polypeptide expressing nucleotide sequence isolated from the Sargasso Sea
atggaatctattttgactatatttgaagctatcattctaggtgttattcaaggcgttactgaatttctcccaataagcagttcagggcacttggttattgctcaagaaatattagacatgaaccctccaggtaatttaatcgaagtagctacgcacttaggaactttgataagcgtaattactatatataaaaatgacatctttaatgttttatccgattttatcttttcaaaaaatagaaaatttgtgttctttttacttattgctaccattccatcaattttatttggtttaggtggaaggtcaattattttatccttatttgaatcgacaaaaatggtttcggtatgcttaataattaccggactgattcttctatcatcaaatagaatatataaatcagaatctacttttaatctaagaaatagtttcttaattggtatatcacaagcttttgcaattttacctgggatctcccgttcgggaatgactataacaattggaatgatgttaggtatttcatctaaggaagctgcaaggttttcatttttgttagctattcctgcaatttgtggggctggtattttgacagcaattgagccaattccagaatcagctaaattaaaatttgaaactttactcattgcctttttaacttcttttttagtcggattcttctgcctaaaatggcttttaaaaatattggctaaaggcaagttccatttatttggctattattgtatcattattgggatattaacaataataatattttaat

SEQ ID NO: 268388 - DNA, 838 bp, Unknown
  Bacterial polypeptide expressing nucleotide sequence isolated from the Sargasso Sea
atggactggctaatggcttgcaaggcgctgattctgggcgtcgtcgaggggttgacggaatttttgccggtgtcgagcacgggccatctgatcgtcgcgggcagtctgctcaatttcacggatgaccacgcgaaaaccttcgatgtcgtgatccagctcggcgccattctggccgtgtgctgggagtttcgccgccgcatcggcagcgtggtggccggtttgcccagccggcccgacgccaggcgcttcacgctgaacgtgatcatcgcgacgattccggcggtcgtgctcggcttgctgttcgagaagagcatcaaggctgcgctgttttcgccggtgccggtcgcgttcgcgctggtggcgggcggggtggtgatcctgtgggcggaagcgcgccagcgcgcgcgaggccaaacagcggcgcgcgttcagcacgtcgacgatttgagcccgctcgatgcgttgaaagtcggcctcgcccaatgttttgcgttgattccgggcatgtcgcgttcggggtcgacgatcatcggcggaatgctgtttggtctcgaacggcgcgtcgccaccgagttttccttcttcctcgcgattccgatcatcttcggcgcgacggcttacgaactctataaagactggcatctgctgtccgtcgacgccttgggcagtttcgcgctgggcttcgtggcggcctttatcagcgccttcgcctgcgtgcgctggctgctgcgctatatctccgcgcacgacttcaccgtgttcgcgtggtaccggatcggctttggtctgctgatcctgctggtcggctacagcggtgcattgagctgggcggattgag

SEQ ID NO: 268389 - DNA, 808 bp, Unknown
  Bacterial polypeptide expressing nucleotide sequence isolated from the Sargasso Sea
tatgaccacactggaaattattgttctggctttactgcaaggctttaccgagtttttacctatctcaagttcagcacatctgatcttaccttcacaattactgggctggactgatcagggactggcttttgatgttgccgtccatctgggtactctggctgctgtattgcattattttcgccgcgatgtaggcctgattagttgcagctggtttggcagtttcaaaggccaacacgaccagcatagccgcatgggttggctaattattctcgcgactatacctgcagccctgtttggtttgttgatcaaagattttattgaaatctatgcccgttctgccttagtgatcgcaagcacaaccattatttttggcttgttgctgtggtacgccgatgtgaaagcaaaacaaattaaacaaacagatcagttaactgtaaaagatgtgattattattggcctggctcaggccatcgcactgatccccggcacttcccgttcaggcatcaccatgacagctggcctgatgcttggattaacccgtcaggcagctgcccgtttttcgtttttaatctctattcctatcattctgctggcaggtggctatcaaagcctgaaactgctgcaaagcgaacaagctgtcgactggacagccttaggcttaggtactgtactgagttttatctcggcctatgtctgtattcattttttcctcaaagtgatagaaaaaatgggcatgctgccttttgttatttaccgcttagctttaggtatgtttctgctcgcttttgtgttttattttagtcactga

SEQ ID NO: 268390 - DNA, 781 bp, Unknown
  Bacterial polypeptide expressing nucleotide sequence isolated from the Sargasso Sea
atggatctaatacagacattaatattagcaattatccagggactaactgaatttttgcccatttcgagttctgcccacttgatactgatatcaaagatagctggttggaacgatcaaggattattgtttgatattgctttgcattttggaacactgttggcagtccttatatatttcaaagatgatctttgcaggatgattgaagaccctattaaaaatcaagggaagaatatcgtccactcggatttaatgattttagttattgcaacaataccagttgtcatagctggtggactttttaatgattggattgaggtcaatctgagatcatcgaatgtgatagcttcgaccagtatcattttcggatttcttttgcttgtatcagataaagttagctctgcagggaagaatttaactcttcaaattgggctggttattgggctcgctcaaactctcgctcttattccgggtgtgtcgagatcaggcataaccattaccatgggcttatttatgggtcttggaagagtcgaatctgctagattttcttttttattggcaatcccagtcatccttgccgcatccatacttcaaacatatgatctgtattcattcggttttttagatattgattatattcatctactaacaggtttaaccgcctcctttgtaattgcatactatacaattcatttatttttggcttttgtcatgaaaatcggcatgctccctttcgttctttaccgagtagttttgggtttagctatcttcatgttcttgtaaa

SEQ ID NO: 268391 - DNA, 763 bp, Unknown
  Bacterial polypeptide expressing nucleotide sequence isolated from the Sargasso Sea
gatgaatgagataattattggaataatacagggaatcactgaatttcttcccatttcatcaagtggacatctagttatatttgatacactctcagattcaataaatttaaatacaaatgatatagcttttctacatattggtactttattttcaatagttgtgttttataaagacagattatctcagacctttaataataaaaataaccttaatcacactatgaagacaattttaattgcaatagtgcctgcggtagtaattggtctattttctcctatacaagaggtgattgataatagtgataacttactaacaattactggtattgcttatttaggatttgcttctctattgctgacctatgaatttaataaaaaaaataaagaagatgggagtgtcttgtttgaaaatataaattcaaaacaagctttctacattggcctagcccaggctgtagctttagttccaggagtgtcaaggtctggcattacattaatagttgctctctacctaggcataaaaaaatctgaagcaatatatttctctctccttctagggctaccaactatatttggtgcttggctacttacttttgtacaatcctcttttgcttttaatcctgaaatgattattcctgctattgtttcatttgctgctgggcttttagcaatcaatatattggtaaattttactttgaatgcaaaattaaaatattttggtttttattgtttagctttgtcagctctttgtctcgtaaattaa

SEQ ID NO: 268392 - DNA, 802 bp, Unknown
  Bacterial polypeptide expressing nucleotide sequence isolated from the Sargasso Sea
catggatacgtttcaggtaattattttagcgttaattcaagggttaacagagttcctccccatttctagttcggcgcaccttatcctacccgcacagcttttaggctgggaagaccaaggcttatccttcgacgttgccgtcaacactggctcattattcgccgtggtgatttattttcgcaatgaactctgggccatgttcaaggcttggattgccagtatggtaaaaggtcagcattccgatgacagtaagttagcttggtggatcattcttgctactttacccgcagtgttttttggctttatcgccaaagactttatcgaaacccatttgcgcagtgccggcgtgatcgccgtgacgactgtggtctttggtttactgctttggtgggcagataagatgtcacgccgtgacttaacggtttatcaaacgggttggcgcaaggcgttattaattggttttgctcaggcgctggcgttaatccctggtacttcacgctcgggcgcgacgatgacggccgcgctgatgttaggtcttagccgcgatgccgctgcgcgtttctcgttcttgatgtctgtgcctgtcagtttgggcgcggcgattttagtgggtaaagatttggcagagagcccgcttcccattgattatcaagcactgacactcggcactgtgatttcatttgtggccgcctatctgtgtattcactatttcttaaaaatcatcagccgtatgggtatgacgccatttgtgatttatcgcctcatcctcggtgctgtgttatgtggatttatcttcctataa

SEQ ID NO: 268393 - DNA, 757 bp, Unknown
  Bacterial polypeptide expressing nucleotide sequence isolated from the Sargasso Sea
atgcttgaattttttactggcgtattacagggaataacagaattcttaccaatctcttcaagcggtcacttagtaatattgtcgtctttaagccaagatatagatttaaatacaaatgatattgcttttctacatattggaacactattttcaattttgatattttatagaaaaagaataagaaaaatatttgaaagtactgaaacttttttattttttctaaaagtggtagttgttggcgtgataccagcatctctagttggtttctttactccgatccagaacaccatagatgagagtccccagattcttttagtaacaggaatctcatacgtcctattctcaatacttttaatattctcagaaaaaattaataataaagaatcgttttcaattacagagttgactacaaataatgcatttctaattggattagctcaatcatttgctttactaccaggagtatcccgttcaggggtcacattaattactgcgatgtatctcgggatgaagaaagcagatgcgatttacttttctttacttcttggcattccaacaatttttggtgcttggggcctaacgtttgtgactcagtcttatgaacttagttcaggaattatttttccaacaatggttgcaatgataactggactagttgcaataaaactccttgtggatttcacaacaaactctaaacttcaatattttggatactactgtcttttactcggaattatttgtttagtaattaattaat

SEQ ID NO: 268394 - DNA, 571 bp, Unknown
  Bacterial polypeptide expressing nucleotide sequence isolated from the Sargasso Sea
atgaattacttagaagcattttatctcgctctcatacaaggattaaccgaatttttacctatatccagttctgcccatttaatccttctatcagagtatttggggtcaaaccaaaatcttttctatgatatttctctacatctaggaactttatttgctgtttgtatttattttaagaatgacttaaaacaaatggtctattcttttgcaaaagatagatccccagcgaataatcaactctcagtgcaattagttatatcttcgctacctacgttgattctgggatttattctcgtagatttaatagattctcatctaaggactagctcgattattgcaataacaacaattttatttggtgtggttttattcgtggctactttcaagaaacccgagaaatcaaatatgaatgagataaccttgcaagaagcattcattatagggttagctcaatccttatctttaattccaggcacttcaagatctggaattacaatttcaactggactatttttaggcttagataataaaacagcttcaaagtttagttttttaatggccatacctacca

SEQ ID NO: 268395 - DNA, 817 bp, Unknown
  Bacterial polypeptide expressing nucleotide sequence isolated from the Sargasso Sea
gatggactggatgcaggccctgcttttagggctggtacagggtttaaccgaatttctgccgatcagcagcactgctcatctgagggtggtgccccattggctgggttgggaggatcctggtgccgaattttcagccgtgatccagttgggaacccttttggcggtcctggtttatttctggaaagacgttcagcaactggtggttgccgttctggtagggttgaaaaatcggaagccctttgaaaccgctgaagcccaacttgcctggtcgattgccgcaggaacactgccgatcggaatcctgggattgggatacaaggactggatcaaaacagaagcccgtgcgctttggatcatcggaactgccctgattgtgctcgccgtgttactttggctggctgagaggtttcctaccgcaaaccgaagtgtggcccagcttggatttttcaggattcagtggatcgggctttgtcaggcgctggctttgatccctggatgttcacgttccggttcaacgatcatgggcggattgatgatggggttgaagagggatgaagccgccaggttttccttcttgttggggttgcctgcgattttggccagcggtttttttgaactctatgaactttggcagtcggacattcctgcagacgaataccggaacctgttcctgggaattctctcgtctttcatctttggttacctctcgatagagtttttgctcagattccttcgcacccatggaaccttggtgtttgtggtctatcgaatcgcccttggttcagcggtgctctttttctggtgggaccttaagtga

SEQ ID NO: 268396 - DNA, 781 bp, Unknown
  Bacterial polypeptide expressing nucleotide sequence isolated from the Sargasso Sea
catggatctgatacaggcattaattttagcaattatccaaggactgactgaattcttgcccgtctctagttctgctcacctaatattgatatccaaaatagttggatgggatgatcaaggtctattatttgatattgccttgcatttcggaacacttttggccgtccttatatacttcaaagacgaactttatcaaatgattgaggatccgattagaaatcgaggaaagaacatcatgcaatccgatctaatgatcttgatcattgctactgtgccagttgtgatagccggcgggatttttaatgattggattgagtctaacctgagatcatctaatgtcatagcattgaccagtatcatatttggttttcttttacttgcgtcagataagtttagctctggaggaaagaatttaactcttcaaattggattgcttattggcctcgcccaaattcttgctctgatcccaggtgtatctcgatcaggtataaccataaccatgggcttatttatgggactcggaagagttgaatcttcaaagttttctttcttattagcaatcccagtcatttttgctgcatcagtgctgcaaatatatgacttatattcaattggtttttcagatgtcaattatgctcatctgctcactggcttaaccctctcttttgtgatcgcatactatacgattcattggtttttggcttttgtaatgagaataggtatgcttccttttgttctctatagggtggccctcgggtcagcaatctttatgcttctgtaa

SEQ ID NO: 268397 - DNA, 784 bp, Unknown
  Bacterial polypeptide expressing nucleotide sequence isolated from the Sargasso Sea
atggattttttgcaaatattattactatcctttatacaaggattaactgagtttttacctatatctagttctgcgcacttaatcttattctcgagtttcttcaattcaaatattcagagtttaaactttgatgtgtcggttcatttaggaacgctttttgcagctttagtctattttaaagaagaaatcttaaaaattatcaactctctctcaagacccaatcaagaaggcagaaagcttctaataaatctgactatagcaacattcccaatactagttttaggttactttgtaagagatttggttgatatattcttaagatctccagaagtaattgcttacgcaactataatttttgcttttattctatatctaagcaccaaagttaaaagtcaatattcaaacttagaatctataacgcctaagcaatcgttaataattggaattgctcagtgttttgctttgattcctggcacgtctaggtcgggaatcactatctctgctgccttggcattaggtttaactagcaaagtagcttcaaaatttagttttttgcttgctatacctaccattggtgcaatcgcttgttaccaacttctgagtcttgaatttgatacctttattgatgaatacagaacaaatcttatcggcattattatctcttttgttgttgcttattcaactatagatttttttatgaaattcatagagcgaataggctttatgccatttatcatttataggctaatattaggaagtctaattttgatagcttttatttaat

SEQ ID NO: 268398 - DNA, 781 bp, Unknown
  Bacterial polypeptide expressing nucleotide sequence isolated from the Sargasso Sea
atggatctaatacagacattaatattagcaattattcagggactaactgaattcttgcccatttcgagttctgcccacttgatactgatatcaaagatagctggttggaacgatcaaggattattgtttgatattgctttgcattttggaacacttttggcggtccttatatatttcaaagatgatctttgcaggatgattcaagaccctattaaaaatcgagggaagaatatcgtccactcggatttaatgattttagttattgcaacaataccagttgtcatagctggaggactttttaatgattggattgaggccaatctaagatcatcgaacgtgatagcttcgaccagtatcattttcggatttcttttgcttgcatcagataaagttagctctggagggaagaatttaactcttcaaattggactggttattgggctggctcaaatgcttgctcttattccgggcgtgtcgagatcaggtataaccattaccatgggtttatttatgggtcttggaagagtcgaatctgccagattttcttttttgttggcaatcccagtcatccttgctgcatccatacttcaggcatatgatctgtattcagtcggttttttagatattaattacattcatctgctaacaggtttaaccgtctcctttgtaattgcatactatacaattcatttatttttggcttttgtcatgaaaatcggcatgctccctttcgttctttacagagtagttttgggttcagctatcttcatgttcttgtaaa

SEQ ID NO: 268399 - DNA, 337 bp, Unknown
  Bacterial polypeptide expressing nucleotide sequence isolated from the Sargasso Sea
atgagtgacaccctgagccgcctggccgaggtgctggagtcgcgcaagggcgcagcggccgacagttcctacgtcgccagcctgtatcacaagggcctgaacaagattctggaaaaggtcggcgaggaatcggtggaaaccatcctcgccgccaaggacgccgccgccagcggtgactgcaaggacctgatctacgaaaccgccgatctgtggttccatagcctggtcatgctcgccgccctcggccagcatccccaggctgtactggatgaactggatcgccgtttcggcctctccggccacgcggaaaaagccgcgcgaccgcaatccgaataaa

SEQ ID NO: 268400 - DNA, 337 bp, Unknown
  Bacterial polypeptide expressing nucleotide sequence isolated from the Sargasso Sea
catgagtgacaccctgagccgcctggccgaggtgctggagtcgcgcaagggcgcagcggccgacagctcctacgtcgccagcctgtatcacaagggtctgaacaagattctggaaaaggtcggcgaggaatcggtggaaaccatcctcgccgccaaggacgccgccgccagcggtgactgcaaggacctgatctacgaaaccgccgatctgtggttccatagcctggtcatgctcgccgccctcggccagcatccccaggctgtgctggatgaactggatcgccgtttcggcctctccggccacgcggaaaaagccgcgcgaccgcaatccgaataa

SEQ ID NO: 268401 - DNA, 334 bp, Unknown
  Bacterial polypeptide expressing nucleotide sequence isolated from the Sargasso Sea
catgagcgataccctgaaccgtgtggcccaggtgctggaagaccgcaaaggcgcggatgccgacagctcctacgtcgccagcctgtaccacaagggtctgaacaagattctggaaaaactcggcgaagaatccgtcgagaccatcattgcggccaaggacgcgcaaatcagcggtgattacagcgatgtaatctatgagaccgcagacttgtggttccatagcctggtgatgctcgcccaactggggcagcacccacaggccgtgctggatgaactggaccgtcgcttcggcttgtccgggcacgccgagaaggcctcgcgcccgtccgcctga

SEQ ID NO: 268402 - DNA, 562 bp, Unknown
  Bacterial polypeptide expressing nucleotide sequence isolated from the Sargasso Sea
gttgcttggagactggggttcaggttcgatcgagcagaaaaatattgccgaaaaaagtgcagtcacctgcgatcaactgggctgtgatctggtcttgatgatgggtgacaatttcatccagcatggagtcgaaaatcttgacgatcctcagtttcaggaaaaatttgagaaggtctatacccagaaaattcccttctatcccgtcctgggaaatcatgacctgcaggggaactggcgggcacaagtggaatacaccaaccacagtgaccgctggacgatgcctgacagtagctatgatttcctgggaggcccggtccagttcatgggcatcaacacttcctgcacggtctgctccctctggaaactactaagcccaagaaccaccccatggagagtggtcttcggtcatcggccgattcaatcccagggcagacaccgcgggatgaactggctggaaaaacactttctgcgctcgtcctccgcccagctttattgctgtggacacaaccatattctggaacactacaacatgggaaacatggatcagatcacttcgggagga

SEQ ID NO: 268403 - DNA, 562 bp, Unknown
  Bacterial polypeptide expressing nucleotide sequence isolated from the Sargasso Sea
aatgcctagctatgtcattggtgatgtccagggatgtttcgatgagttaatgcttcttctggacaaaataaattttgatccaaaaaatgatgaattaatttttgcaggcgatcttataaatagaggccccaaatctctggaggtgcttgaattctgccttgaaaacaaaaagtcaattgaggttgtgcttggaaatcatgatatctatcttctttatcttattcatcaaaataaaaaaaactatcagctagcccctatccttgaatctaagaataaaaagaagttttttagctggctaatcgaaaaacctctaatgcttgaaagaaaaaataataaaaatgagaaatttattatttcacatgctgggattcctcatatttgggatttaggggatgctcgaagacttaatgaggaatatttaaaagcgatgaaaaagaatcctggtggtgtttttagaaatatgtggggagatcatcctgatatatggtcagaaagcttgagaggttttagcagaattagagtaataattaattacttcacaagaatgcggctaataactcaa

SEQ ID NO: 268404 - DNA, 208 bp, Unknown
  Bacterial polypeptide expressing nucleotide sequence isolated from the Sargasso Sea
ctgccggatttcaacccctggtatacccacaagcgtcttgaccaagtcaaagttttctttgggcattgggcagcaatagacggagaaacaggaatcggttgggcaaccgcacttgatactggctgcgtatggggtcggaagctctctgcatataatctcgataaaaattgcttcataaacgttaaagcaagatcggagaaaaaatgaa

SEQ ID NO: 268405 - DNA, 259 bp, Unknown
  Bacterial polypeptide expressing nucleotide sequence isolated from the Sargasso Sea
ttgttacttggagactggggttcaggttcgatcgagcagaaaaatattgccgaaaaaagtgcagtcacctgcgatcaactgggctgtgatctggtcttgatgatgggggacaatttcatccagcatggagttgaaaatcttaaggatccgcagtttcaggaaaaatttgagaagatctatacccagaaagttcctttctatcccgtcctgggaaatcatgacctgcaggggaactggcgggcacaagtggaatacacca

SEQ ID NO: 268406 - DNA, 415 bp, Unknown
  Bacterial polypeptide expressing nucleotide sequence isolated from the Sargasso Sea
ttgcttggagactggggttcaggttcgatcgagcagaaaaatattgccgaaaaaagtgcagtcacctgcgatcagttgggctgtgatctggtcttgatgatgggggataatttcatccagcatggagtcgaaaatcttgacgatcctcagtttcaggaaaaatttgagaaggtctatacccagaaagttcccttctaccccgtcctgggaaatcatgacctgcaggggagctggcgggcacaagtggaatacaccaaccacagttaccgctggacgatgcctgacagcagctatgatttcctgggaggcccggtccagttcatgggcatcaatacttcttgcacggtctgctccctctggaaactactgagccccagaaccaccccgtggagggtggtcttcggccatcggccga

SEQ ID NO: 268407 - DNA, 416 bp, Unknown
  Bacterial polypeptide expressing nucleotide sequence isolated from the Sargasso Sea
tatgagcacctacgttgtcggggacatacagggttgttttgagccgttccagtgcttgctggagcgagtgaaattcaatcctgataaggaccgcctatggagcgtgggtgacttgatcaaccggggccccgacaacattgaagtgctgcgttggttctatgcccaccgcgacaacgtcaccatggtactgggcaatcacgacctgcacttaatggctgtctcctgtggtgcccgaaaaccgagccgcaaagacaacctcgatgacatccttgatgcgcccgatcgcgagcagctgatcgaatggttgcactttcagccgctcgcctactgtgagaatggcatcacaatggtccacgcggggatccccaccatctggaccgtgcaggacacgctgaagcgcgcctgggaggtcgaaa

SEQ ID NO: 268408 - DNA, 670 bp, Unknown
  Bacterial polypeptide expressing nucleotide sequence isolated from the Sargasso Sea
aatgcctagctatgtcattggtgatgtccaaggatgtttcgatgagttaatgcttcttctggacaaaataaattttgatccaaaaaatgatgaattaatttttgcaggtgatctaataaatagaggccccaaatctcttgaggtacttgaattctgccttgaaaataaaaagtcaattgaggttgtgcttggaaaccatgatatttatcttctttatcttattcatcaaaataaaaaaaactatcagctagcccctattcttgaatctaagaataaaaagaagttttttagttggctaattgaaaaacctctaatgcttgaaagaaaaaataataaaaatgagaaatttattatttcacatgctgggattcctcatatttgggatttaggggatgctcgaagacttaatgaggaatatttaaaagcgatgaaaaagaatcctggtggtgtttttagaaatatgtggggagatcatcctgatatatggtcagaaagcttgagaggttttagcagaataagagtaataattaattacttcacaagaatgcggctaataactcaaaaaggtcagcttgatcttaaaactaaggtctcttcaagaaatagtaagtataaagcttggttcaaatttacaaaaaatgaaaaagatagctatcaattatttggtcat

SEQ ID NO: 268409 - DNA, 148 bp, Unknown
  Bacterial polypeptide expressing nucleotide sequence isolated from the Sargasso Sea
atggcgcattatgttattggtgacgttcaaggttgttacgatgagttaaaattactttgtaagaaaattaatttcaatccaaataaagatttactaatatttgcaggagatcttgtaaatagaggcccgaaatcacttgaggtgctaa

SEQ ID NO: 268410 - DNA, 469 bp, Unknown
  Bacterial polypeptide expressing nucleotide sequence isolated from the Sargasso Sea
tatgtctcatgctggtttgcctccacactggagcttgaaaaaggcttctctaatttcagaagaactttcattgaatctcaaggaaaatacagagttttacttgagtaatatttatggaaaccttccttctggtgataatgaagctatttcagaagaggataaattaaaggttaatacaaattacctaacccgcatgaggttttgtaatgataaagcagagttaaacttacaagagaaaggtggactggataccaaaataaaaggctttaagccttggttttgttataaaaggaagtttgaagaaaaaaacacgcaaataatttttggtcactgggcatctttaagaggcgaaacaggcaatcaaaaatttattgcgacagataccggttgtgtttggggatatgagctaacagccatagaattagaaactggaaagagatttgcagtaagaaaaaaagaaaatgagtga

SEQ ID NO: 268411 - DNA, 722 bp, Unknown
  Bacterial polypeptide expressing nucleotide sequence isolated from the Sargasso Sea
gttgcttggagattgggggtcaggttcaatcgagcagaaaaatattgccgaaaaaagtgcagtcacctgcgatcaactgggctgtgatctggtcttgatgatgggggacaatttcatccagcatggagtcgaaaatcttgacgatccgcagtttcaggaaaaatttgagaaggtctatacccagaaagttcctttctatcccgtcttaggaaatcatgacctgcaggggaactggcgggcacaagtggaatactccaaccacagtgaacgctggacgatgcctgacagcagctatgatttcctgggaggcccggtccagttcatgggtatcaacacttcctgcacggtctgctccctctggaaactactgagtcctagaaccagcccgtggagggtggttttcggtcatcggccgattcaatcccagggcagacaccgcggaatgaactggctggaaaaacagtttctgcgctcggcctccgcccagctttattgctgtggacacaaccatattctggaacactacaacatgggaaacatggaccagatcacttcgggaggaggaggaagtccgctggaaaatgaaaaagttaaaagcagtccagaagccgaattcctccatcccaaccatgggtatgtttgggtccatttcaatcaagaaaagctgtcagccagattctttgaccaaaacgggggagaaatctatcaattctttagaaatc

SEQ ID NO: 268412 - DNA, 486 bp, Unknown
  Bacterial polypeptide expressing nucleotide sequence isolated from the Sargasso Sea
tgcttgaaagaaaaaataataaaaatgagaaatttattatttcacatgctgggattcctcatatttgggatttaggggatgctcgaagacttaatgaggaatatttaaaagcgatgaaaaagaatcctggtggtgtttttagaaatatgtggggagatcatcctgatatatggtcagaaagcttgagaggttttagcagaataagagtaataattaattacttcacaagaatgcggctaataactcaagaaggtcaggttgatcttaaaactaaggtctcttcaagaaatagtaaatataaagcttggttcaaatttataaaaaatgaaaaagatagctatcagctatttggtcattgggcagctttgaaaggcaagacaaataaaagaaatgtaatcggtcttgatgccggttgtgtttggggtggacatttaaaagcgataaggattaatgacagaaaaatctttaaaataaagtcattatgaa

SEQ ID NO: 268413 - DNA, 440 bp, Unknown
  Bacterial polypeptide expressing nucleotide sequence isolated from the Sargasso Sea
tatgaccaattatgccattggggatgtgcaggggtgtttcgatactctcagaacgttgttggataccattggttatcgcaagagccaggaccgacttattttcgtgggcgacttggtgaatcgcggcgcccattccttgcgaatggcaaagtgggtgctggcgcaaggtagcagcgccgtggctgttttgggaaatcacgatttgcattaccttgctcgattcgaaggtggaagcaacgagggggcagaagaaacgttggatgaactcttgcagtcgtcagtggcggagccctttcgcgattggcttttggcgcaatgtttagttcgacgacaattcggatgggtgtttgtgcatgcgggtgttttccctaagtggcgttgcgaggacgcgctggataaaagtgacgagttaatgactgtgttgcgaagtgagcagaggg

SEQ ID NO: 268414 - DNA, 661 bp, Unknown
  Bacterial polypeptide expressing nucleotide sequence isolated from the Sargasso Sea
atgagtgaatcacaaactctccttatcggggatattcagggctgcttcggtggcctgatggcccttttagaaaaagccggttttgatgagcaaagagatacacttcttgcggtgggtgatgtgctcgcgcggggagaagactcccatgccacggtaaaatatctgatggatctgggcgaccgcttctgcacggtgctgggtaatcacgacctgcacttcctggccgtatctcagggcattaaaaaggccaaaaaaagcgatcgtattgacccgctgttaaaaagcaaaaaactgggcgactatgttgactggtttcgtcagttccccctggccatggctgtcagcgaaaacaccacgatggttcacgcggggctttatcccggctggtctcccgcacaattactcgcttacagtgatgaaatcagtacggttctcaaaggaagcggctggaaaaccttgctggaaaatatgtacggcaatggtcctttcgaatggaaagacacactgaaaggtgtacagagacagcgttttattatcaacgcctgtacccgcatgcgatttatacaggatcagaaatatctcgattttgcctgtaagcatcacccggatgatgctccggccaacctcacgccctggttttctatccccaaccctgcacttg

SEQ ID NO: 268415 - DNA, 667 bp, Unknown
  Bacterial polypeptide expressing nucleotide sequence isolated from the Sargasso Sea
gttgcttggagactggggttcaggttcgatcgagcagaaaaatattgctgaaaaaagtgcaatcacctgcgatcaattgggctgtgatctggtcttgatgatgggggacaatttcatccagcatggagttgcaaatcttgacgatccgcagtttcaggaaaaatttgagaaggtctatacccagaaagttcctttctatcccgtcttgggaaatcatgacctgcaggggaactggcgggcacaagtggaatacaccaaccacagtgaccgctggacgatgcctgacagcagctatgatttcctaggaggcccggtccagttcatgggcatcaacacttcctgcacggtctgctccctctggaaactactgaaacccagaaccaccccgtggagggtggtcttcggccatcggccgattcaatcacaaggcagacaccgcggaatgaactggctggaaaaaaagtttctgcgctcgtcctccgcccagctttattgctgtggacacaatcatattctggaacactacaacatgggaaacatggaccagatcacttcgggaggaggaggaagcccgctggaaaatgaaaaagtgaaaagcagtccagaagccgaattcctacattccaaccatggttatgtttgggtccacttcaatcaagaaaaactg

SEQ ID NO: 268416 - DNA, 513 bp, Unknown
  Bacterial polypeptide expressing nucleotide sequence isolated from the Sargasso Sea
ttagctggctaatcgaaaaacccctaatgcttgaaagaaaaaataataaaaatgagaaatttattatttcacatgctgggattcctcatatttgggatttaggggatgctcgaagacttaatgaggaatatttaaaagcgataaaaaagaatcctggtggtgttttcagaaatatgtggggagatcatcctgatatatggtcagaaagcttgagaggttttagcagaataagagtaataattaattacttcacaagaatgcggctaataactcaagaaggtaaggttgatcttaaaactaaggtctcttcaagaaatagtaaatataaagcttggttcaaatttataaaaaaagaaaaagatagctatcagctatttggtcattgggcagctctgaaaggcaagacaaataaaagaaatgttatcggtcttgatgcaggttgtgtctggggcggacatttgaaagcggtaaggattaatgatcgaaaaatctttaaaataaagtcattatgaa

SEQ ID NO: 268417 - DNA, 466 bp, Unknown
  Bacterial polypeptide expressing nucleotide sequence isolated from the Sargasso Sea
aatggcaacttacgcaattggtgatatacaaggttgttttgacgaattgttggttttgttggatgaaatcaagtttcaagctgatagggacaagttatggatatgtggagacatgattaacagaggacctaagtctcttgagagtttagatttcatctactctatccgtgaaaattgcaatgttactcttgggaatcatgatctacatttcttagctgttgcagaaggcgcaaaagatatatctgattcagatacgtttcaaaacttacttaataataagaatcttgatgtttatgttaattggatcaaagaattgcccttccatcatatagaggatattaaaagcgatggtgcagttaaaacttacgtaatgactcatgcaggcgttcctccacattggagcaaaaaagaccttgaaacttattcatccgaattgaatgagactttaaatggacctagatcgata

SEQ ID NO: 268418 - DNA, 457 bp, Unknown
  Bacterial polypeptide expressing nucleotide sequence isolated from the Sargasso Sea
tcttattgctcatgccggcattcctgaaatttggtcgcctgaaaaaactaaggaacttgcctctgaagtgacttcattgcttcaaaagaaccctttgaaagttctgcagtcaatgtggggagataatcccaatcaatggaatgaagaattggtttatgatgaaagatgcagaattattattaattatctaacaagaatgagatttgtagataaaaattgcaagttagatttaaaaaataatactgttaaagcttctgccggcttcaaaccatggttcaaatatagctctaaagttcatgaagagaagaaacaatattatgtatttggtcattgggcagcattaaatggccaaacagatgatcctcatttcattggactcgatactggttgtgtctggaaaggcaaacttaccgctctaaggttaaacgacctagaaaaaatatcggtggacttctaa

SEQ ID NO: 268419 - DNA, 316 bp, Unknown
  Bacterial polypeptide expressing nucleotide sequence isolated from the Sargasso Sea
tggtcagaaagcttgagaggttttagcagaataagagtaataattaattacttcacaagaatgcggctaataactcaaaaaggtcagcttgaccttaaaaccaaggtctctgcaagaaatagtaaatataaagcttggttcaaatttataaaaaatgaaaaaggtagctatcagctatttggtcattgggcagctcttaaaggcaagacaaatagaagaaatgtgattggccttgacgccggttgtgtttggggcgggcatttaaaagcgataaggattaatgaccgaaaaatctttaaaataaagtcattatgaa

SEQ ID NO: 268420 - DNA, 740 bp, Unknown
  Bacterial polypeptide expressing nucleotide sequence isolated from the Sargasso Sea
tttggttcgctggggtcttgtcatagaggcccgaagtcacttcaaacacttctgctttataaaatctctcggggctagtgcaaaaattgttcttggcaatcacgatttacacctgatcgctgcttctaaaaatattcgtccaatatcaaataaagatacaataaaagaaattttgactgctgacgatgcagatgaattgattaactggttaaaatcccgccccttattattaactgatacagatttaggtttcactatggttcatgcgggcatagcaccgcaatggacactagatgctgcaaaaaattttgcaaaagaatgtgaatccattttacaaaatgaaaaaatagatgattttttaatgcacatgtatggtgatacaccgaatatatggtcagattcaatagaaggatatgcaaggcagcgttttattattaactgcttcacgcgcattcgtttttgtacaattaatggcacgcttgatcttgatgtaaaggtggcacctggaagtcagaaaaaatctttaatcccttggtatgcgctaccaaatcgaaaaaccatagataacaaaattatttttggtcattggtcaacaatacatcttggagccgaaaataattttaaaaaatataatgtctatcctatagataccggttgtttatggggcggacaactaactgcaatgagactagatgatgaaaaaatatttagtgttacatcaaagcaatcaaagctttgac

SEQ ID NO: 268421 - DNA, 303 bp, Unknown
  Bacterial polypeptide expressing nucleotide sequence isolated from the Sargasso Sea
gttgcttggagactgggggtcaggttcgatcgagcagaaaaatattgccgaaaaaagtgcaatcacctgcgatcaactgggctgtgatctggtcttgatgatgggggacaatttcatccagcatggagtcgaaaatcttgatgatccgcagtttcaggaaaaatttgagaaggtctacacccagaaagttcccttctatcccgtcctgggcaatcatgacctgcaggggaactggcgggcacaagtggaatacaccaaccacagtgaacgctggacaatgcctgacagcagctatgatttcct

SEQ ID NO: 268422 - DNA, 250 bp, Unknown
  Bacterial polypeptide expressing nucleotide sequence isolated from the Sargasso Sea
aatgcctagctatgtaattggtgatgtccaaggatgtttcgatgagttaatgctccttttagaaaaaataaattttaattcaaaaaacgatgaattgatttttgcaggtgatctcataaataggggtcctaaatccctagaagttcttgaattctgccttaaaaataagaaatctatcgaagttgtgcttgggaatcatgacatttatcttctttatcttattcatcaaaataaaaaaattttcagctag

SEQ ID NO: 268423 - DNA, 615 bp, Unknown
  Bacterial polypeptide expressing nucleotide sequence isolated from the Sargasso Sea
gcttggggaatcatgacatttatcttctttatcttattcatcaaaataaaaaaaattttcagctagctccaatactgaaatccaaaaacaaaaagaagttctttaattggctcattgagaaacctttaatgattgaaagaaaaaataataaaaatgaaaaatttgttatttctcatgctgggatcccacatatttgggatatcgaagatgctcggaggcttaatgaagaatacctgaaagcaataaaaaataatcctggtggcgtctttagaaatatgtggggagatcaccctgatttatggtcagaaaatctaaaaggatttagcagaataagggtaataattaattacttcacaagaatgagattaataactcaaaaaggtaaggtcgatcttaaaacaaaaatctcctcaagaagtagtaaatataaaccttggtttgaatttgtaaaaaatgagaaagataaatatcagctatttggtcattgggcagcactcaaaggcaagacaaagaaaaaaaatataattggtcttgatgctggttgtgtttggggaggacacttgaaagcgataaggattaatgaccgaaaaatctttaaaataaagtcattatgaa

SEQ ID NO: 268424 - DNA, 520 bp, Unknown
  Bacterial polypeptide expressing nucleotide sequence isolated from the Sargasso Sea
gaagttttttagctggctaatcgaaaaacctctaatgcttgaaagaaaaaataataaaaatgaaaaatttattatttcacatgctgggattcctcatatttgggatttaggggatgctcgaagacttaatgaggaatatttaaaagcgatgaaaaagaatcctggtggtgtttttagaaatatgtggggagatcatcctgatatatggtcagaaagcttgagaggttttagcagaataagagtaataattaattacttcacaagaatgcggctaataactcaagaaggtcaggttgatcttaaaactaaggtctcttcaagaaatagtaaatataaagcttggttcaaatttataaaaaatgaaaaagatagctatcagctatttggtcattgggcagctttgaaaggcaagacaaataaaagaaatgtaatcggtcttgatgccggttgtgtttggggtggacatttaaaagcgataaggattaatgacagaaaaatctttaaaataaagtcattatga

SEQ ID NO: 268425 - DNA, 163 bp, Unknown
  Bacterial polypeptide expressing nucleotide sequence isolated from the Sargasso Sea
aaatgaaaaagatagctatcagctatttggtcattgggcagctttgaaaggcaagacaaataaaagaaatgtaatcggtcttgatgctggctgtgtttggggtggacatttaaaagcgataaggattaatgacagaaaaatctttaaaataaagtcattatga

SEQ ID NO: 268426 - DNA, 724 bp, Unknown
  Bacterial polypeptide expressing nucleotide sequence isolated from the Sargasso Sea
ttcatttaatccttcaaaagattcaattgtttttactggagatttggtcaaccgtggcaatcaatctcttgaagttttagagttttgcatgaaggaaaaatcaattgatactgtacttggaaatcatgatgtttttttgataaaaagcttattagggaaaaaatctcccgaacgtttaaagaatatttgcgtacataaaaataaaaaaaaatttttacaatggcttgttaagaagccttttctgatttcaaaaaaactgaatggtaaagaattcattattgttcatgctggaattccaccttcttggtcaatcaaagatactaaagtttttgctaaaagacttagcaaaaacctaaaaaataatcctgagcaattcgtacaacatgcttggggaaataaacccaatacttggaatgacaaacttaatgatgaggagcttgatagagttacattaaactacctcacaagaatgaggttttgtaatgcttctggcaagatggatttaaaatcaaatggtctttttagtaaaatgaaattcaagaaatggtttcagcattgggatcttgatgaaaataaaagagttatctttggtcattgggctgcattgaatggtaagactctaaacaggcaattcatcggtctcgatactgcatgtgtttggggcggaaagctaacagcttttaggctagacgatgaaacattcttccaagtaaaaaaaatatga

SEQ ID NO: 268427 - DNA, 799 bp, Unknown
  Bacterial polypeptide expressing nucleotide sequence isolated from the Sargasso Sea
atgcctagctacgtcattggtgatgtccagggatgtttcgatgagttaatgcttcttctggacaaaataaattttgatccaaaaaatgatgaattaatttttgcaggcgatcttataaatagaggccccaaatctctggaggtgcttgaattctgccttgaaaacaaaaagtcaattgaggttgtgcttggaaatcatgatatctatcttctttatcttattcatcaaaataaaaaaaactatcagctagcccctatccttgaatctaagaataaaaagaagttttttagctggctaatcgaaaaacccctaatgcttgaaagaaaaaataataaaaatgagaaatttattatttcacatgctgggattcctcatatttgggatttaggggatgctcgaagacttaatgaggaatatttaaaagcgataaaaaagaatcctggtggtgttttcagaaatatgtggggagatcatcctgatatatggtcagaaagcttgagaggttttagcagaataagagtaataattaattacttcacaagaatgcggctaataactcaagaaggtcaggttgatcttaaaactaaggtctcttcaagaaatagtaaatataaagcttggttcaaatttataaaaaatgaaaaagatagctatcagctatttggtcattgggcagctttgaaaggcaagacaaataaaagaaatgtaatcggtcttgatgccggttgtgtttggggcggacatttaaaagcgataaggattaatgacagaaaaatctttaaaataaagtcattatgaa

SEQ ID NO: 268428 - DNA, 615 bp, Unknown
  Bacterial polypeptide expressing nucleotide sequence isolated from the Sargasso Sea
ttggtaatcatgatttttatctcttatatctcatagaacacaaaaagaataatagatcattaaaaacaattctaaacgctgacaatatttctaaaattcacaaatggctaaaaaaactaccactattactaaaagttaaaattaatggtcataatttttggatttctcatgctggaataccacatatatggaattttaaaacagctaaaaaactatcaatagaagtacaggttgctctaaaagaagactcctataatttacttaaaaatatgtggggggatactccaagcaaatggaacagtaaactagttaaatacaagcgctatagggtaataatcaattactttactagaatgagatttttagataataaaggtgctctaaagttaaagaaaaaaaatctaaaatcagaaaagaatcatattccttggtttaagcaaaccactcataacttaaaagaagatgagtctattatatttggtcattgggcagcacttgaaggaaaaacaaatttagataatataatcggcttagatactggctgtgtttggggtaataaactaacagcaataagattagaagataaaaaactatatcaagtaagaagaaaatgaa

SEQ ID NO: 268429 - DNA, 799 bp, Unknown
  Bacterial polypeptide expressing nucleotide sequence isolated from the Sargasso Sea
atgcctagctatgtcattggtgatgtgcagggatgtttcgatgagttaatgcttcttctggacaaaataaattttgatccaagaaatgatgaattaatttttgcaggcgatcttataaatagaggcccaaaatctctggaggtgcttgaattctgcctggaaaacaaaaagtcaattgaggttgtgcttggaaatcatgatatttatcttctttatcttattcatcaaaataaaaaaaattatcagctagcccctatccttgaatctaagaataaaaagaagttttttagctggctaatcgaaaaacctctaatgcttgaaagaagaaataataaaaatgagaaatttattatttcacatgctggaattcctcatatttgggatttaggggatgctcgaagacttaatgaggaatatttaaaagcgatgaaaaagaatcctggtggtgtttttagaaatatgtggggagatcatcctgatatatggtcagaaagcttgagaggttttagcagaattagagtaataattaattacttcacaagaatgcggcttataactcaagaaggtcaggttgatcttaaaactaaggtctcttcaagaaatagtaaatataaagcttggttcaaatttataaaaaatgaaaaagatagctatcagctatttggccattgggcagctttgaaaggcaagacaaataaaagaaatgtaatcggtcttgatgctggttgtgtttggggtggacatttaaaagcgataaggattaatgacagaaaaatctttaaaataaagtcattatgaa

SEQ ID NO: 268430 - DNA, 322 bp, Unknown
  Bacterial polypeptide expressing nucleotide sequence isolated from the Sargasso Sea
cgtcgcattcaacgcattcacgcgcgtgcgcttctgcacgcccgacggcgtgatggaattcaaggcgaacggcggcccagacagcgcgccgcccggctacctgccgtggttcgacgtgccggggcgccgcacggaggacgtgacggtcgtgttcgggcactgggccgcactcggcctgatggtgcgagacaacgtcgtcgcgctcgattcgggatgtgtgtgggggaaccagctgtcggccgtgcggctcacggccgatccggcccggcgcacggtcacgcaggtgcagtgcgaagcgtgccgcacgccgggcggcgagtga

SEQ ID NO: 268431 - DNA, 183 bp, Unknown
  Bacterial polypeptide expressing nucleotide sequence isolated from the Sargasso Sea
tcaaacaaaccgcaaataatctaaaaaataatgagattatagtttttggtcattgggcagcacttaatggtaaaacaaaaataaataatataattggtttggatactggttgtgtttggggaaataaacttacagcaataagattagaagatagaaaattgtttcaggttaagaagaaatgaa

SEQ ID NO: 268432 - DNA, 366 bp, Unknown
  Bacterial polypeptide expressing nucleotide sequence isolated from the Sargasso Sea
ccggcacattttttactcacatgtacggcaatacccccgccggctgggacgagaagctgagtgccccagaccgctggcgggtgatcaccaaccacttcacccgcatgcgttttgtagatcaggccgcagagctggacctgactagcaaaggtgagcccgacttgccccccgccgggttcattccctggttccagcaccccggccgaatcgtcaccgatactcgcatcctgttcggccactgggctgccctgcaaggccacagtggcgtcgacaaggtcgacgcactagacaccgggtgcgtgtggggagggtccttaactgcactacggctagacgacttggttcgcattcagtgccactgctagg

SEQ ID NO: 268433 - DNA, 724 bp, Unknown
  Bacterial polypeptide expressing nucleotide sequence isolated from the Sargasso Sea
attgatctttttaggagaccttattagccgaggtcctaaatctttggaggtactggaatttctatattcaatggatcactgtgtattgaatactctcggcaatcatgatttacatttactcgcccttgcaattggcaaccgaccttatcgtcaaaaagattattcaattaagccgatactagactcaaaaaataagatcaatctcattgagtggcttagattccagccaataatgcatgaagaaccatcctttaattcaatcatggttcatgcagggatccatccttcttggagtatacctcaagccagatcaatggcgagagaaattgaatcactcatacaaagcaataatgcatcaaaagtattatcagaaatgtattcggacgactcttggtctgatgatttgaaagggacaaaaaaaataaactcaatcattaactgttttacaagattgcggtttatagatcaaaatggcgtctgtaattttgcggagaaaaattctcccaaaaatacagatgccgcattcatgccatggttcatgagcccagaaatgaagattagagatatgaatattttatttgggcactggtcgactttgggagactttcaatatgaaaatatatcctgcttagatgctggctgtgtctggggcggcaaaatggttgcaattgaccttaatcagcctcagaaaagaattaaggttcaaagctctatatcgagatag

SEQ ID NO: 268434 - DNA, 196 bp, Unknown
  Bacterial polypeptide expressing nucleotide sequence isolated from the Sargasso Sea
gccccctgtttcagccatccacagcgcaagatgcgcggcgagaagatcatcttcggccactgggccgcactggaaggcaactgccgggaacccggcctgcatgccctcgacaccggctgcgtgtggggcggtgcgatgaccctgctcgacgtcgacagcggcgaactccatcgctgcacctgccccaaggcatgag

SEQ ID NO: 268435 - DNA, 661 bp, Unknown
  Bacterial polypeptide expressing nucleotide sequence isolated from the Sargasso Sea
tttgaattactgcatggcagataagaatgttacctctgtattgggcaatcatgatctttatttactttacttgatgaatattaatcaaggtaaaggtgagttaaaaaccgtggttgaggcagaaaataatatgcaaatttttgaatggctcatcacacgccctctactcattgaaatttctgatcaatctaatcaaaataaatttattattacgcatgcaggtattccggaaatttggtctatagaaaaagcacaggaactggcagaagaagtttcatctgcactgattgaaaatgcatctaaaatactccaagcaatgtggggggatgacccaaatatctggaatgaatcattggaaggcaatgataggtatcgaattgttattaactacttaactagaatgagatttctaggcaatgctgcaagcctagacttaaaaaatacaagcacaaaagctacagagggtttcaaaccctggtttgactatgattctgaagcctatcaaaaaatgaatcaatattatgtatttggtcattgggcatctttaaatggtcaaaccaataatcctcactttattggtttagatactggttgcgtttggaaaggtaatcttacagccctgagagttgatgatttagaaaaaatttcggtaaagtattag

SEQ ID NO: 268436 - DNA, 259 bp, Unknown
  Bacterial polypeptide expressing nucleotide sequence isolated from the Sargasso Sea
atgagtcattatgtaattggtgatattcaaggatgttacgatgaacttgttgctctgtgtactaaagttaaatttgaccctcacaaagataaattaatttttgctggggatctggttaacagaggtcctaaatctctggaagtgctaaatttttgtattgaaaatagaaagtctgtcaaagctgttttgggcaatcacgatttttatcttttatatttaattgagcatcaaaaaaggaataagtcactaaaacaaattc

SEQ ID NO: 268437 - DNA, 201 bp, Unknown
  Bacterial polypeptide expressing nucleotide sequence isolated from the Sargasso Sea
gaatgaagccttggtttgaatggaatttaaagattttgcaagatcctattcatttactcttcggccattgggctgccttggaaggtgttacagggaaaaagaacattactgcacttgatacaggttgtgtttggggtaaaaaattaagcgctttaagattagaagataatcgaatcttttcttgtaataagataaattagc

SEQ ID NO: 268438 - DNA, 829 bp, Unknown
  Bacterial polypeptide expressing nucleotide sequence isolated from the Sargasso Sea
atgtcgcaaggtaacacgtacgtcattggtgatatacaaggctgttacgatggtcttcgtcgcgcgttagataaagtaaaattcgacgaagaaaacgatacgctactcgcagtaggtgatttagttgctcgaggagaagattctttgagcacattgcgctttttaaagtctctaggcagccagtttagcagtgttttaggaaaccacgaccttcacttacttgccgttgtaaacggcatccgcaaagcaaaaaaatccgacaaattagagcctctacttaatgcttcagacttgaccgaacttattgactggttgcgtcagttcccgttggcaatgaagttagatgagcaatcagtaatggtgcatgctggactctatcctaaatggtctatcgatgagtgcgtttcacttagtgacgaagttagcaacatcctaaaatccgacaattacgctgcttttctttcagaaatgtatggtaataaacccaacaactggtcagataaacttaagggtgatgagcgactgcgttttattgtgaatgcgtgtacgcgcatgcgttttgttcataccgatggcacactcgattttgataacaaatctcatcccagcgcagtatcccacagcactagtagcacgttaaaaccatggtttgaagtagagaataaaaagctcggtgacgatcaacgagtggtatttgggcattgggcagctctgtcgggccaaacaaacagtcatcaatttatcggcttagatacaggctatgtttgggggcaaagcatgactttgctaaacctgaactccgcttcgcttgtgagtgtttctgcctaaa

SEQ ID NO: 268439 - DNA, 587 bp, Unknown
  Bacterial polypeptide expressing nucleotide sequence isolated from the Sargasso Sea
gctcaagaagaaggacaagctgcaagagctgatggaggcaccggaccgggacgaactgctggagtggctgcgccaccgtccgctactggcggagcaccccgacctgcccatcatgatggtgcatgccggcatctccccggcgtgggacgcccgcaccgcccgcaactgcgcccgcgaggtggagagcctgctgcgcggcgatcagtaccagtggctgctgcacaacatgtatggcgatcagccggatggctggcaggacgatctggtcgggatcgagcgctaccgctacatcatcaacaccttcacccggatgcgtttctgctatttcgacggccggctcgacttcaaatgcaagaagggccccaaggagtcaacccctggcctgcgcccttggttcgagcagcgcgagcaccatgtggatgaccccatcctggtgttcggccactgggcggccctgatgggcaacaccggcaagcaggacatcaaggcgctcgacaccggctgtgtctggggcaacagcctcaccctgtggcgctatgaagatgacgccctgatcgccaccccctgtcccacttacgccaagtgac

SEQ ID NO: 268440 - DNA, 255 bp, Unknown
  Bacterial polypeptide expressing nucleotide sequence isolated from the Sargasso Sea
ttttagataaaaaaggtgttttaaagttaaagaaaaaaaatctaaaatcagaaaaaaatcatattccttggtttaagcaaaccactcataacttaaaaaaagatgagtctattatatttgggcattgggcagcacttgaaggaaaaacaaatttagataatataatcggcttagatactggctgtgtttggggtaataagctaacagcaataagattagaagataaaaaactatatcaagttagaagaaaatgaa

SEQ ID NO: 268441 - DNA, 482 bp, Unknown
  Bacterial polypeptide expressing nucleotide sequence isolated from the Sargasso Sea
aataaagattaatggtcacaatttttggatttctcatgctggaataccatatatatgggattttaaaacagccaaaaaactagcaaaagaagttcaggttgctcttaaagaagattcctataatttacttaaaaatatttggggtgatactccaagcaaatggaacactaagctagttaaatacaagcgctatagggtaataatcaattactttactagaatgagatttttagataataaaggtgctctaaagttaaagaaaaaaaatctaaaatcggaaaaaaatcatattccttggtttaagcaaaccactcataacttaaaagaagatgagtctattgtatttgggcattgggcagcacttgaaggaaaaacaaatttagataatataatcggcttagataccggctgtgtttggggtaataaactaacagcaataagattagaagataaaaaactatatcaagtaagaagaaaatgaa

SEQ ID NO: 268442 - DNA, 313 bp, Unknown
  Bacterial polypeptide expressing nucleotide sequence isolated from the Sargasso Sea
tatgaaagacaaacttaccttttttattaacgcagtaacaagaataagaatttgcgacaaagaagggaaaattatgtttgctttcaaaaaaggtttaaaagatcttccttataactttattccttggtttaaattaaaaataagcgctttaacacgggacgatcgactgatatttggccactgggctgcattgaatggcaaaacaaataaacaaaatataataggtctggatactggatgtgtttgggggaataaacttacttttgtaagactcgaggatagcaagaaatattttattaaaaagattaaatga

SEQ ID NO: 268443 - DNA, 361 bp, Unknown
  Bacterial polypeptide expressing nucleotide sequence isolated from the Sargasso Sea
gacggcatgtacggcaacgaaccggccaaatggaacaaggaactgcacggcgtcacccgcctgcgggtgatcaccaactatttcacccgcatgcgcttctgcacggcagatggcatgctggatctgaagagcaaggaaggcgtcggcagcgcaccgccaggcttcgccccctggttcagccacccgcagcgaaagatgcgcggcgagaagatcatcttcggtcactgggccgcgctggaaggcaactgcacggagcccggcctctacgcgctggataccggctgcgtctggggcggtgcgatgaccctgctcgacgtcgacagtggagcactgcaccgctgcacctgccccaaggaataat

SEQ ID NO: 268444 - DNA, 322 bp, Unknown
  Bacterial polypeptide expressing nucleotide sequence isolated from the Sargasso Sea
atggcgcattatgttattggggatgtacagggctgttatgatgagctgatttctctttgcaaaaaaattaaattcaataaaaaaaaagataagttaatttttgctggagaccttgttaatagaggcccaaaatcactagaggttataaatttttgcttagagaatagaaaatctataaaggcagttttaggaaatcatgatttttatcttttatatttaattgagcataaaaaaagaaataaatcacttaaaagaatcttgcatgctgataatctaaatacaattcataaatggttaaaaaaagcatccggttattattaaa

SEQ ID NO: 268445 - DNA, 808 bp, Unknown
  Bacterial polypeptide expressing nucleotide sequence isolated from the Sargasso Sea
aatggcaaattatgtagttggagatgttcaaggttgctttaaagaactcatgctgcttttaaaaaaaataaaatttaacaaagctaaggataaattaatatttgctggtgatttagttaatagaggcaatgaatctttagaagttttgaatttctgccttaaaaacaaaaaatgcgtaagagctgttcttggaaaccatgatttttatttgctttatttaattgagtttaataaaaaagataaatctcttgaaaaagtgctctcatctaaaaaaattaataaaattaattcgtggttaaaaagcttacctttgcttattaaaattaatattaaagaaactaatgaaactttctgggtatcacatgctggtataccattcttctgggattttaaaactgctaagaaactttctgaagaagttaccagcagcttaaaaaatgatgctaccaagttattaaaaaatatgtggggagacaagccatcgatttgggaaagtaaattgaaaggttataaaagattaagggtgattattaattattttacaagaatgagattcttatctaaaaacggagctcttaaacttaagactaaagacgcaaaaaagaaaaagggtcatgtgccatggtttaatgaaacatataaaagattaaaagataatgaattcattgtttttggccattgggctgcacttgaaggtaaaactaatttgaataatataataggagttgatacaggttgtgtttgggggaaaaaattaacagctgtaagattggaagataaaaagaaatttcatgttaagaaaaaatga

SEQ ID NO: 268446 - DNA, 808 bp, Unknown
  Bacterial polypeptide expressing nucleotide sequence isolated from the Sargasso Sea
atgtctaagtatgtcattggtgacgttcagggttgttacgatgaattaactcttcttttacaaaagataaagtttaacccagtaaacgactccctttattttcttggggatcttattaaccgaggtcctaaatcattagaggtcctaaacttttgtttacagcatagagaatctgtgacaaccattttaggtaatcatgatatttacttgctctatttaatctcaaataggaaacaaaattatgatttacaagatgttctagatgctcctaatcttgatgctatctatcaatggttaattacaaaaccgttgttattaaaagtctcatgcgatcaaggcaaaaatttttacctgacacatgcgggtgtcccccatatctggtctttagaggatgccatgcattacaatgctgagtttatgatggcagcaacgcatgatgctgagaaaatgtttcgcaatatgtggggggatctaccctccaagtggaaccccaagttaaagggttatagtcgtttgcgcaccatcatcaattattttactcgaatgcgcctagtggatgatgaaggaaatatggacctaaaaacaaaaacatttaacccagaatcatcgtataagccgtggtttaccttcaacagtcagattttacaaaattctgatactaaaatactgttcggtcattgggctgctttaaagggagcaacaaaccttcagaatattattgggttagataccgggtgtgtttggggcggtacattaagcgctatgcgtcttgaagatcacaaaatatttcaggtcgagtctctatgaa

SEQ ID NO: 268447 - DNA, 823 bp, Unknown
  Bacterial polypeptide expressing nucleotide sequence isolated from the Sargasso Sea
catgagcacttatgtagtaggcgatattcaaggttgctacaagcccctaaaaaagttgttgaaaaaaattaactttttaaagagtaaagaccaactttggtgtgtgggcgatctgataaacagaggacctgactctcttgatacacttagatttttacaagacatggatcaatctgtgcgaattgtactaggaaatcatgatcttcattttttagcaattcatgaagggtgtgcaccacctcggacaaaggacaccttaagcaaattattaaaagcaaaagattgtgatctgcttagtgattggttgagaaaaaaatctctggcacattatgaatctcttgaaaccaaaaacggagtggaaaatttcctaatggtccacgccggagttgctccgatgtggtctttgcaaaaaacactaagcctggctgcagaagttgagctatccttacaaagtgaaacctataaaatttttttgaaaaacatgtatggagaccggcctattaggtggcatgacaagcttcaaggatatgaaaggcttcggactatcaccaactatttgactcggataagattttgcgacgatgctggcagtttaagactagatgtaaaagagggcttaaacgctgcaccagagggttgtaagccttggtacgagtttgagaacatttcaaaagttgcaactatactctttggacattgggctgcactcgatggagaaactggcaaaccaaaggtacacgccctcgatactggttatgtttggggtagaaagatgacattgatgtgcttagaagattatcaacgctattcaatcaccaactaa

SEQ ID NO: 268448 - DNA, 835 bp, Unknown
  Bacterial polypeptide expressing nucleotide sequence isolated from the Sargasso Sea
atgtcgaattatgctatcggagatttacaaggatgttatgaggagctacagcagcttttaactcaaatcgatttcgataagaaaaaagatgtgctgtggttttgtggagacttggttaaccgaggctctaactctctcaattgcctcctttaccttcattcgattaaagataattgtagaattgtattaggaaatcatgacctacatctaattgcagtatcagattcaattagagaaataaacgaaaaagacacatttcaagatgtcttagaaagccctaaaagaaaaatattaatagaatggttaaagtctcaacctcttcatagcatagaaaaaattaatactaataaaggggaaaaggagtatgttatgacgcatgccggaatacctcctcattggtccaaagatgatctgataaggaattcaaataaattaggtcaatctttacagaatgaaaattctagttactttttaaattatgtatttggaaacgaaccaaatcatcctgataagtgtgtgaccacagaagaaaagatgagattaaatctaaattatctcactcgaatgagattttataattcagatggttcaattgatctaaaatataaaggaaagatagaaactgcacccagtaacttaaaaccttggtttgaatataaattaaaaatactgaacgaaaatactcatctactatttggacattgggcagcattggatggttttactggtaaagaaaatattacggctttggatactggctgtgcgtggggaaacaaacttacagcaatgaggctagaagatctttcaatgttctcatgtgataagctgaattgat

SEQ ID NO: 268449 - DNA, 784 bp, Unknown
  Bacterial polypeptide expressing nucleotide sequence isolated from the Sargasso Sea
gatgtacatggctgttttgaacagtttgttagcttattagataaaattaattacaacagccaagaagataaaattatcctaacgggagatttggtgaacagaggcccagaatctcttgctgttttgaattactgcatggcagataggaatattacctctgtattgggtaatcatgatctttatttactttacttaatgaatattaatcaaggtaaaggtgatttaaaaacagtagttgaagcagagaataatatgcaaattttcgaatggctcatcacacgccctctgctcattgaaattcctgatcagtctaatcaaaataaatttattattacgcatgcaggcgttccagaaatttggtctatagaaaaagcacgggagctggcagaggaagtttcaaaggcactaattaaaaatgcatctaaagtactcaaatcaatgtggggggatgacccaaatatttggaatgagtcattggaaggcaatgataggtatcgaattattattaactacttaactagaatgagatttctaggcaatgcttcaagtctagacttaaaaaatacaagcacaaaagctgcacagggttttaaaccctggtttgactatgattcagaatcctaccaaaaaatgaaccaatattatgtatttggtcattgggcatctttaaatggtcaaactaataaccctcactttattggtttagatactggttgcgtttgggaaggtaatcttacagcgctgagggttgatgatttagaaaaaatttcggtacagtattaac

SEQ ID NO: 268450 - DNA, 619 bp, Unknown
  Bacterial polypeptide expressing nucleotide sequence isolated from the Sargasso Sea
aatggcaacttacgcaattggagatatacaaggttgttttgacgaattggtggttttgttagatgaaatcaagtttcaagctgataaggacaagttatggatatgtggagacatgattaacagaggacctaagtctcttgagagtttagatttcatatattctatccgtgaaaattgcaatattactctcggaaatcatgatctacatttcttggctgttgcagaaggcgcaaaagacatatctgattcagatacgtttcaaaacttacttaataataagaatcttgatgtttatgttaattggatcaaagaattgcccttccatcatatagaggatattaaaagcgatggtgcagttaaaacttacgtaatgactcatgcaggcgttcctccacattggagcaaaaaagaccttgaaacttattcatccgaattgaatgagaatttaaatgggcctagatcgataaatcttctaaaaaatatgtatggaaatatgccgaatcacccttcgatgtgtacttctgagacagagaaattacgtttaaatataaattatctaactcgtatgagattctgttccagtgatagctctttggatttagaaaataaaggaaaagct

SEQ ID NO: 268451 - DNA, 310 bp, Unknown
  Bacterial polypeptide expressing nucleotide sequence isolated from the Sargasso Sea
atgaacaacaaatctaaatttgtaataggtgacattcaaggttgttacaaagaatttaaaaatttactaaaacttatagacccaaataaggaaaataaattcttctgtgtaggtgatcttgtgaatagaggtccagaatctgaaaaggttgttgattatgttttagagaataaagtaaaaagtgtacttggcaaccatgatctacatctaatggcgattctagcaggagtgcgtaaacataatgataaaaaagatgctatgacaaaaattataagcaagaataaatctgttgaaattttagattattttt

SEQ ID NO: 268452 - DNA, 385 bp, Unknown
  Bacterial polypeptide expressing nucleotide sequence isolated from the Sargasso Sea
tttaagagcagatcctgagaaatttcttttaacaatgtatggcaatagaaggaaggctatatctaaatcaactaataagaagaatcgaagaagatatttagtaaatgtttttaccagaatgagatttataaccagtaaaaataaacttgatttacaaaccaaggttaaaaaaacttctaaagaacaatatcagccatggtttgcatataaacataaatctttaaaagaacttgataatatagtttttgggcactgggcggccctaaatggagtaacgaatcataataaaattaaaggtgttgatttgggttgtgtctggggcggctctttagcagcaattaatgtaaatgataagtctataatcacggttgattcaagcaaatga

SEQ ID NO: 268453 - DNA, 811 bp, Unknown
  Bacterial polypeptide expressing nucleotide sequence isolated from the Sargasso Sea
atgacatcttattatgtgggcgaccttcacgggtgttttaaacaatttaagaacttaattagaataataaagtttaatcctaaaactgaccatctgtatttaactggagatcttgttaataaaggaacacagtctctagagttaatgaattatttgtacagtattgataaaaatgttacgacagtacttggcaaccatgattttaatttgctagctgcatattttgacgtgaatccatggtcaaaaatacctcacacaatgcaaaaattgcttaatgataaaaacattgaaaaatatattacatggataagaaaaaaatcactccttcatattaattattcggaaaaaattattcttacacattcaggaatgtatcctggatggactttgaaagacgccataaagatgtcagatcaagtttcaaagaaattgaaatcaaatcaaatcaaaaattttattaaaactctatggtctaatgaaccaagttcatggaaagaaaattttacacctaaagaaaaaatgatatttgctgtaaatgctttcacaagaatgcgatttttaaataaaaatttatctttaaatttagatgtctcttctgatgcattccacaacgatgatataaagccttggtttaaatataacagtagatttaaaaataattttaagattatctttggacattgggcagcccttggattttacaaaaataaaaattatatttgccttgactcaggatgtgcttggggtaataaacttacagctataaaagtgaataagcattatttaacaaaatatcaagttaagtgttaag

SEQ ID NO: 268454 - DNA, 466 bp, Unknown
  Bacterial polypeptide expressing nucleotide sequence isolated from the Sargasso Sea
aatgactcatgctggcatcccgcctcactggactatagaagatctaaataaatattctttagaattacataaagccttacagggtccagaggcattaaatcttctaagaaatatgtacggcaatgaaccaaatcatccttccaggtgtgttactgaaatggaaagacttcgtttgaatataaattaccttactcgtatgagattctgttcaagagatggttccttggatctaaaacacaaaggaaaggcaacagacgcgccttcaggaatgaagccttggtttgaatggaatttaaagattttgcaagatcctattcatttactcttcggccattgggctgccttggaaggtgttacagggaaacagaacattactgcacttgatacaggttgtgtttggggtaaaaaattaagcgctttaagattagaagataatcgaatcttttcttgtaataagataaattag

SEQ ID NO: 268455 - DNA, 419 bp, Unknown
  Bacterial polypeptide expressing nucleotide sequence isolated from the Sargasso Sea
catggccgattatgcaataggtgatttacaagggtgcttcaaagagttcagcaccttgttacaaagggttgattttaacccaagtaaagatcacctatatttagtgggtgatattgttgcccgtggccctgactcacttgcctgccttgatttcatctatcaacatcaagacagcatgacaatcacactgggtaatcatgatttgcacatgattgcttgttattttttaaataagccgactaacccaaaagataaattagctcctatttttaaaagcagcttactcaagcgttatatctcttttttacaaacccaaccactcgctttatatttaaaaacacataattgctttatctctcatgcaggcttaaaccctgattggtcaattgaagatgcattgcaacacgcaaaatttgctc

SEQ ID NO: 268456 - DNA, 817 bp, Unknown
  Bacterial polypeptide expressing nucleotide sequence isolated from the Sargasso Sea
atgtcacattacgtaattggtgatgttcaaggttgttttgatgaattaattgcattatgtaaaaaaattaaattcaatccaaataaagatctattgatcttcgccggagatcttgtaaatagaggtccaaaatctttagatgtaattgatttctgtttaaaaaataaaaaatctgtaaaaagtgtaatggggaatcatgatttttatttactatatttgcttgaacataaaaaaaataataaatctcttaaagatattctcaatgctaaaaataacaaaaatatttataaatggctaaaaaagcttccactcttactcaaagttaaaattcaaaaaactaaagagacatattggataagccatgcaggaatacctttcatatggagcctcaaaaaagcaaaaaaactttcagatgaaatgagaattgctatcaaaaatgattcatcaaatattttaatgaatatgtggggagataagccaggtatttggaaagatgagttaaagggttactcaagatatagaataattattaattattttactagaatgcgttatttagataaaaggggggcattaaaactcaaaaaaaaagatttaaaattagagaaaaatcatattccatggttcaaacaaacacataaaaatcttaaagaaaatgaaaatattatatttggccactgggctgcactagagggtaaaactaaattaaataatataattggtttagatactgggtgtgtatggggtaagaaattaacggccataagattagaagataaaaaaatatttcaagttaaaaaaaatgaaaatttataaa

SEQ ID NO: 268457 - DNA, 472 bp, Unknown
  Bacterial polypeptide expressing nucleotide sequence isolated from the Sargasso Sea
atgagtacatacgttattggggatatacatggttgttttgatcaatttgtagatttgttaaataagataaattacaaaaaaaatgaagataaaatcatcctagtgggcgacttagtaaatagaggccctgactctctatcggtcttaaactattgcatggctgattccaacattatcacagtcttgggaaatcatgatctatatttgctgtatcttttgagcattgataaggcaagaggaagcttgaaagaagtggtcgaggctgacaataaaaaacaaatttttaaatggctccttaaaatgcctcttatgatggaaattgatgacgaattaagtggaaattccttcctcatctcgcatgccggcattcctgaaatatggtcgccaaaaaaaactaaagaacttgcctctgaagtgacttcattgcttcaaaagaaccccttaaaagttcttcaatctatgtggggtgata

SEQ ID NO: 268458 - DNA, 796 bp, Unknown
  Bacterial polypeptide expressing nucleotide sequence isolated from the Sargasso Sea
catgagcacatatgttattggagacgctcatggttgttatgatgaacttcaaatgcttatcaaaaaaattaaattcaataagaataaagactcgttgatttttttaggtgacttagtcaatagaggaagagattctctcaaggttttaaatttttgtatcaataatagtgattgtgttaccactgtacttggaaatcatgacttatatctattgcgtttaatggtgaatggatcaaaacatttatctatgaatcaagtattaaatgacgacaaaaaagaggtcttttttaattggcttataaaaaaacctcttatattaaaaaaaataatcaaaaataggacctacttcattgttcatgctggaattttgcctgagtggagtctcaaagaagcaatgaaatatgcaaaggaaattgagatgtatcttaaaaaagatccaaagcatacattgaatgcaatgtggggaaataagccctcaaaatggaaaaaaggtatgaatgaagatgaatttcttcgatttgttattaattgttttacaagaatgaggtggtgtcattataacggctctgtaaattttcaaaataaacaattagagcaaaacgataattatcatccatggtttaaaaaacgtgaacttccagataatcataagattatttttggacattgggccgcaatcagaggcaaaactcataagacaaatatttttggtttggatacaggttgtgtttggggaggaaaattgacagcattaagactcgaagacgaaaaatacttcagagtagataaacaataa

SEQ ID NO: 268459 - DNA, 817 bp, Unknown
  Bacterial polypeptide expressing nucleotide sequence isolated from the Sargasso Sea
atgacaacctatgcttttggagatctacaagggtgttatgaggaactaagactgctgcttgatcatatcgaatttgatccttctttagataagttatgcttcacaggagatctagtaaaccgaggtcctgactcattaaaggttctggaatatttatattcaatcaatgaatcagttgtgaatgtgctcggcaatcatgactttcatcttattgctctcgctctaactgatagaaagctaagatcaaaggacaattccttaagcccaatattatcgtcatcgaataaaatcaatcttatagaatggctgagacaccagccactatttcatatggaaaaagaatcggatactctaattgttcacgctggagtccacccatcttggactttagagatggttaaaaaatactcagaagaaatccaatccgtcattaggggagatgatgccagtgtcttctttaaggctatgtattctgatgattcatggtcaactgacttaattggcaaaaaacgatttaacgccatcgtaaattcttttacgaggatgcgatatttgaatgaactaggtgaatgtaactttgaagaaaaagactcgccagaaaaagtcactaatgagcttattccttggtacttataccctaatagaaaagtgaagaatgaccttatagtctttggtcattggtcatctttagggtatttcaatgaccataatgtggtctgccttgatggcggctgcgtgtggggaggagagcttgtcgcagtagatgtaagcaaacctgatgtacctattagaataaatagtcttaaatcgaaatagg

SEQ ID NO: 268460 - DNA, 715 bp, Unknown
  Bacterial polypeptide expressing nucleotide sequence isolated from the Sargasso Sea
ttgttcctggcgggagacctggtcaaccggggcccggattccctgggcaccctgcgccgggtttatgagctacgcgataatgtgcatacggtactgggcaaccacgacctgcacctgctggcggtggcccagggcagcaccgacagccggcgcaaggacaccctgacggatatcctcgaggcaccggaccgcgacgccctgctgggctggctgcaggactgcccgttgctggtggatatccccgaacatcaagcggtgatgacccatgccggcatcccgccattatggacactggccgaagcccgggaacgggcccgggaagtggaacaggtgctgcgcagcccgcaggtgggcgagtattttgccaatatgtacggcaaccagccggcaggctgggacgacgcccagcaaggcccggaacgctggcgtgtcatcaccaaccatttcacccgcatgcggtttgtgaacctggccggtgagctggatctggccagcaagggcgaagccgatgcaccacccgaagggttcatcccctggtttcagcacccccaccgccaggccaccgatacccgcatcctgttcggtcactgggcggcgctggaaggccacacggatgtggccaaggtagacgccctggataccggctgcgtctggggcggcagccttaccgccctgcgcctggacgacctgacccggattgcctgccactgctgac

SEQ ID NO: 268461 - DNA, 802 bp, Unknown
  Bacterial polypeptide expressing nucleotide sequence isolated from the Sargasso Sea
atgtctcactatgtgattggagatgtgcagggttgttatgatgaacttattaatttatgttcaaaaataaaatttaatccaaaaaaagatacattaatttttgcaggagatcttgttaatagaggtccaaagtcgcttgaagtcttgaatttctgtcttgaaaataaaaaatctattaaagctgttcttggtaatcatgatttttatctcttatatctcatagaacacaaaaagaataatagatcattaaaaacaattctaaacgctgacaatatttctaaaattcacaaatggctaaaaaaactaccactattactaaaagttaaaattaatggtcataatttttggatttctcatgctggaataccacatatatggaattttaaaacagctaaaaaactatcaatagaagtacaggttgctctaaaagaagactcctataatttacttaaaaatatgtggggggatactccaagcaaatggaacagtaaactagttaaatacaagcgctatagggtaataatcaattactttactagaatgagatttttagataataaaggtgctctaaagttaaagaaaaaaaatctaaaatcagaaaagaatcatattccttggtttaagcaaaccactcataacttaaaagaagatgagtctattatatttggtcattgggcagcacttgaaggaaaaacaaatttagataatataatcggcttagatactggctgtgtttggggtaataaactaacagcaataagattagaagataaaaaactatatcaagtaagaagaaaatgaa

SEQ ID NO: 268462 - DNA, 802 bp, Unknown
  Bacterial polypeptide expressing nucleotide sequence isolated from the Sargasso Sea
atgtctcactatgtgattggagatgtgcagggttgttatgatgaacttattaatttatgttcaaaaataaaatttaatccaaaagaggatacattaatctttgcaggagatcttgttaatagaggccctaagtcgcttgaagtcttgaatttctgtcttgaaaataaaaaatctattaaagctgttcttggtaatcatgatttttatctcttatatcttatagaacacaaaaagaataatagatcattaaaaacaattctaaaggctgacaatatttctaaaatacacaaatggctaaaaaaactacctctattactaaaagttaaaattaatggtcataatttttggatttctcatgctggaataccatatatgtgggattttaaaacagccaaaaaactatcaaaagaagttcaggttgctcttaaagatgattcctataatttacttaaaaatatgtggggcgatactccaagcaaatggaacagtaaactggttaaatacaagcgcttaagggtaataatcaattactttaccagaatgagatttttagataaaaaaggtgttttaaagttaaagaaaaaaaatctaaaatcagaaaaaaatcatattccttggtttaagcaaaccactcataacttaaaaaaagatgagtctattatatttgggcattgggcagcacttgaaggaaaaacaaatttagataatataatcggcttagatactggctgtgtttggggtaataagctaacagcaataagattagaagataaaaaactatatcaagttagaagaaaatgaa

SEQ ID NO: 268463 - DNA, 796 bp, Unknown
  Bacterial polypeptide expressing nucleotide sequence isolated from the Sargasso Sea
atgtctcactatgtgattggagatgtgcagggttgttatgatgaacttattaatttatgttcaaaaataaaatttaatccaaaaaaagatacattaatctttgcaggagatcttgttaatagaggtccaaagtcgcttgaagtcttgaatttctgtcttgaaaataaaaaatctattaaagctgttcttggtaatcatgatttttatctcttatatctcatagaacacaaaaagaataatagatcattaaaaacaattctaaacgctgacaatatttctaaaattcacaaatggctaaaaaaactaccactattactaaaagttaaaattaatggtcataatttttggatttctcatgctggaataccacatatatggaattttaaaacagctaaaaaactatcaaaagaagtacaggttgctcttaaagaagactcctataatttacttaaaaatatgtggggcgatactccaagcaaatggaacagtaaactagttaaatacaagcgctatagggtaataatcaattactttactagaatgagatttttagataataaaggtgctctaaagttaaagaaaaaaaatctaaaatcagaaaaaaatcatattccttggtttaagcaaaccactcataacttaaaaaaagatgagtctattatatttgggcattgggcagcacttgaaggaaaaacaaatttagataatataatcggcttagatactggctgtgtttggggtaataaactaacagcaataagattagaagataaaaaactatatcaagtaagaagaa

SEQ ID NO: 268464 - DNA, 784 bp, Unknown
  Bacterial polypeptide expressing nucleotide sequence isolated from the Sargasso Sea
tggagatgtaagggttgttatgatgaacttattaatttatgttcaaaaataaaatttaatccaaaaaaagatacattaatctttgcaggagatcttgtaaatagaggtcctaagtcgcttgaagtcttgaatttctgtcttgaaaatagaaaatctattaaggctgttcttggtaatcatgatttttatctcttatatctcatagaacacaaaaagaataatagatcattaaaaacaattctaaacgctgacaatatttctaaaattcacaaatggctaaaaaaactaccactattactaaaagttaaaattaatggtcatgatttttggatttctcatgctggaataccacatatgtggaatcttaaaacagctaaaaaactatcaaaagaagtacaggttgctcttaaagaagattcctataatttacttaaaaacatgtggggcgatactccaagcaaatggaacagtaaactagttaaatataagcgttatagggtaataatcaattactttactagaatgagatttttagataataaaggtgctctaaagttaaagaaaaaaaatctaaaatcagaaaaaaatcatattccttggtttaagcaaaccactcataacttaaaaaaagatgagtctattatatttgggcattgggcagcacttgaaggaaaaacaaatttagataatataatcggcttagatactggctgtgtttggggtaataaactaacagcaataagattagaagataaaaaactatatcaagtaagaagaaaatgaa

SEQ ID NO: 268465 - DNA, 701 bp, Unknown
  Bacterial polypeptide expressing nucleotide sequence isolated from the Sargasso Sea
tgcaggagatcttgttaatagaggtccaaagtctcttgaggtcttgaatttctgtcttgaaaataaaaaatcaattaaagctgttcttggtaatcatgatttttatctcttatatctcatagaacacaaaaagaataatagatcattaaaaacaattctaaatgctaacaatatttctaaaatacacaaatggctgaaaaaactaccactattactgaaagttaaaattaatggtcataatttttggatttctcatgctggaataccatatatatgggattttaaaactgccaaaaaactatcaaaagaagttgaggttgctcttaaagaagattcctataatttacttaaaaatatgtggggcgatactccaagcaaatggaacagtaaactagttaaatacaagcgctatagggtaataatcaattactttactagaatgagatttttagataataaaggtgctctaaagttaaagaaaaaaaatctaaaatcagaaaaaaatcatattccttggtttaagaaaaccactcataacttaaaagaagatgagtctattatatttgggcattgggcagcacttgaaggaaaaacaaatttagataatataatcggcttagacacaggctgtgtttggggtaataagctaacggcaataagattagaagataaaaaactatatcaagtaagaagaaaatgaa

SEQ ID NO: 268466 - DNA, 799 bp, Unknown
  Bacterial polypeptide expressing nucleotide sequence isolated from the Sargasso Sea
atgccaagctacgtgataggtgatgtccagggctgctttaaacagctgcaatccttgttaaaaaaaattcagtttgatccaaaccaggatcaactgtggttttgtggtgatttagtcgcaagaggcccggattcattggcgacgctaaggtttattcgctctttgggcaataaggccaaagtggtgctgggaaatcatgacctgcattttttggcctgcgtgtttggttttgcgaaagtagataccaaagatcaactcagcgaactactcaatgctcccgacttagctgagctgacccattggctacagcaacaacctctaatgcattttgaaacggaacgacaactgctgatggttcatgcgggtctggcgcccgattggcccctaagtaccgccttaaatgctgcagcggaagttagtgctgtacttaaagagactccggaaaaactattcgctgccatgtacggaaatactcctgctctgtggtcagaagtacagtctgaggaagacagatggcgttttaccattaacagttgtaccagaatgcgattttgtctggcaaatggcgcacttgaactcaaagaaaagcgccatccggataaagtcagtaatctgaccccgtggtatcaattttggcaacaaaaagctcacccgcagatattttttggacactgggcagcattgatgggctatagcccggttgcaggcatacatgcactggataccggagctgtatggggaaattatttaacggcctattgtattgagacggcacagcgttatagtgtttctgactaaa

SEQ ID NO: 268467 - DNA, 748 bp, Unknown
  Bacterial polypeptide expressing nucleotide sequence isolated from the Sargasso Sea
gatgtctcactatgtgattggagatgtgcagggttgttatgatgaacttattaatttatgttcaaaaataaaatttaatccaaaaaaagatacattaatttttgcaggagatcttgttaatagaggtccaaagtcgcttgaagtcttgaatttctgtcttgaaaataaaaaatctattaaagctgttcttggtaatcatgatttttatctcttatatctcatagaacacaaaaagaataatagatcattaaaaacaattctaaacgctgacaatatttctaaaattcacaaatggctaaaaaaactaccactattactaaaagttaaaattaatggtcataatttttggatttctcatgctggaataccacatatatggaattttaaaacagctaaaaaactatcaatagaagtacaggttgctctaaaagaagactcctatagtttacttaaaaatatgtggggggatactccaagcaaatggaacagtaaactagttaaatacaagcgctatagggtaataatcaattactttactagaatgagatttttagataataaaggtgctctaaagttaaagaaaaaaaatctaaaatcagaaaaaaatcatattccttggtttaagcaaaccactcataacttaaaaaaagatgagtctattatatttgggcattgggcagcacttgaaggaaaaacaaatttagataatataatcggcttagatactggctgtgtttggggtaataaa

SEQ ID NO: 268468 - DNA, 910 bp, Unknown
  Bacterial polypeptide expressing nucleotide sequence isolated from the Sargasso Sea
gatgacatcctcctccgcttccaccgcctccacttcttccaccgccgcttccgccgccaccgccagcgccgccccgctgccgctcgctttcggcgacctgcaaggctgccgcacgccgttccagcagttgctggccaaagccgcgccgcccgcggacacgccgctatggttcgccggcgacctgatcaaccggggctccgagtcgctcgccacgctgcgcgacatcatcgcgctgggagagcgcgcagtgccggtgctgggcaaccacgacctgcatctcctgtcggtgtcggcgggaatccgcaagtcgaagaaaggcgacacgatcaacgacattctttccgcaccggatgccgccgatctgctcgaatgggtccgccaccgtccgctcgcgcatttcgataacggcatgctgatggtccatgcaggtgtcctgccgcaatgggacgccgcgctgaccatggagctggccgacgaattgcagcgggcgctgcgcgcgccgaactggaaggaaacgctcgcgggactctacggcaatgagccgaatcgctggacacccggcctcaagggcatcgagcgactgcgcctcacgtgcagcgcgctgacgcgcattcgcttctgcaatgccgaaggcgaaatggatttcagcagcagcggcggcctgaattccgccccgccgggcagcatgccgtggttcgacgtgccgtcgcgcaagaccgcggacgtgacgatggtgttcggccattgggccgcgctcggtttgaccttgcgcgacaatctgatcgggctggattccggctgcgtatggggcgaaaagctctccgccgtgcgcctcgcgcaaaatcccgcggagcgcacgctgacccaggtcgactgcgagagctgccgcgcgccggccggcggcaactaa

SEQ ID NO: 268469 - DNA, 841 bp, Unknown
  Bacterial polypeptide expressing nucleotide sequence isolated from the Sargasso Sea
atgaccctcccccccatcgccatcggcgacatccaaggctgccattcagctttccagtctttgctcgacaagctttcagcccccgccgacacgcccctctggatcgccggcgacgtcgtcaaccgcggcccgggctccctcgctgcgctgcgcgcggtcgtcgacctcggcccgcgcgcgaccgtcgtgctcggcaaccacgacctgcacctgctcgcggtctccgccggcctgcgcaccgagcgcccgggcgacaccatcggcgagatcctcgacgcgcccgacgccgacgcgctgctcgactgggtccgccatcgcccgttcgtgcatgtcgaagacggaaagctgctcgtgcacgccggcgtgttgccgcaatgggatgccacgctcgcgctcgaactcgcggacgaactgcagcgcgcgttgcgcgcccccgactggcgcgacacgctgcaaggcctgtacggcaacgagccgaaccaatggagtccgaacctgaaaaagcgcgaccggatgcgcgtcgcattcaacgcattcacgcgcgtgcgcttctgcacgcccgacggcgtgatggaattcaaggcgaacggcggcccagacagcgcgccgcccggctacctgccgtggttcgacgtgccggggcgccgcacggaggacgtgacggtcgtgttcgggcactgggccgcactcggcctgatggtgcgagacaacgtcgtcgcgctcgattcgggatgtgtgtgggggaaccagctgtcggccgtgcggctcacggccgatccggcccggcgcacggtcacgcaggtgcagtgcgaagcgtgccgcacgccgggcggcgagtgac

SEQ ID NO: 268470 - DNA, 727 bp, Unknown
  Bacterial polypeptide expressing nucleotide sequence isolated from the Sargasso Sea
gaccctcacaaagataaattaatttttgctggggatctcgttaacagaggtccaaaatctctagaagtgctaaatttttgtattaaaaatagaaagtctgtcaaagctgttttggggaatcatgatttttatcttttatatttaattgagcatcaaaaaaggaataagtcactgaaacaaattcttgaggctgataatctagacgaaattaataaatggcttaagggattgccattgttattaaaggttaaaattaaaactaaaatttactggatagctcatgcgggcataccttttttatgggattttaaaattgcacaacagctatcaaaagaaattcaatctgctatcaaaaatgatgcttataatctttttacatatatgtggggagatactccaagcttatggaatccagaactagaaaaatataaaaggcaaagacttattatcaactactttactagaatgcgattcataaataaaaagggtgcattaaaattaaagaagaaggatttaacgcctgaaaaaaatcatatgccttggtttgaacaaacaaaaaataatcttaaagataatgaaaaaattatttttggccattgggctgcactcaatggtaaaactaacttagataacataattggtttagatacaggttgtgtttggggaaataagctaacagctataagattagaagatgaaaaactatttcatgttaataaaaaatgaa

SEQ ID NO: 268471 - DNA, 820 bp, Unknown
  Bacterial polypeptide expressing nucleotide sequence isolated from the Sargasso Sea
tatgaagaccaaatctaaatttgtaataggtgatattcagggctgttataaagagtttaagaatcttttaaagcttattgatccgaataaggaaaataaattcttttgtgttggtgatctagtgaatagaggtccagaatcagaaaaagtaatcgaatatgtattagaaaataaaataaaaagtgtattgggcaatcatgatttacatctaatggctattttaatgggagttagagaacacaatgataaaaaagatactatgcagaagattattaacaaaaatagatcaattgagataattgagcacttcttgacattcccttttgctaagattctctctcatcaaaataaaaaaacattagttgtacacgcaggcatacttccaagctggtcaattaatgatgtattagcagcaaatgaagaattagtatcttctttaagatcagatcctgagaaatttcttttaacaatgtacggcaatagaaggaaggccatatctaaatcaactaataaaaagaatagaagaagatatttagtaaatgtttttaccagaatgagatttataaccaacaaaaataagcttgaccttcagaccaaggttaaaaaaacttctaaagaacaatatcagccatggtttacatacaaacataaatctttaaaagagcttgataatatagtttttgggcactgggcagccttaaatggagtaacaaatcataataaaattaaaggtgttgatttaggctgtgtctggggcggctctttagcagcaattaatataaatgataagtctataatcacggttaattcaaacaaatga

SEQ ID NO: 268472 - DNA, 838 bp, Unknown
  Bacterial polypeptide expressing nucleotide sequence isolated from the Sargasso Sea
tttgaaatacttagtagatatgaagagcaaatctaaatttgtaataggtgatattcagggttgttataaagagcttaagagccttttaaaacttattgatccaaataaggaaaataaattcttttgtgttggggatctagttaatagaggcccagaatcagagaaagtaattgaatacgtgctagaaaataaaataaagagcgtattgggtaatcatgatttacatttgatggccatattaataggtgtgaaagaacataatgataaaaaagatacaatgcataaaatcctcaataagaataaatcaattgagataattgagcatctattaacgtttccttttgctaaagtcctttctcatcaaaataaaaaatcattagtggtacatgctggaatacttccaacctggtcacttaacgatgtcttagcagcaaatgatgagttaataacctctttaaaagcagatcctgaaaagtttctttccacaatgtatggaaatagaaggaaagcaatatctaaatcaacgaataaaaaaaatagaagaagatacttagtgaatgtttttaccagaatgagatttataaccagtcgaaataaattagatttacaaacaaaaattaaaaaaacctctaaagaacaatatcagccttggttttcatataaacataaatcattaaaagagctcgataatatagtttttggacactgggcagccttaaatggagtaactaatcataataaaattaaaggtgttgatttaggttgtgtctggggcggctcattagcagcaattaacattaatgataaatccataatcacggttgattcagtcaaatga

SEQ ID NO: 268473 - DNA, 808 bp, Unknown
  Bacterial polypeptide expressing nucleotide sequence isolated from the Sargasso Sea
aatgtctcactatgtaataggcgatgttcaaggctgttttgatgaacttgaattgctgtgtaaaaagattaaatttaatcctaacaaagataaattaatatttgcaggggactatgttaatagaggtcctaaatctttagaggtattaaatttttgcttaaaaaataaaaaatctattaaaggtgtccttggtaatcatgatttctatttgttatatcttatagaatataaaaaaagaaataagtctttaaatgcaattcttgatgctaaaaatataaatgcgatttataaatggttaaaaaaacaacctcttctgcaaaaaataaaaattaaagaaacaaaagaaactttttggatatcgcatgcaggcattccttatatctggagttttaaaactgcaaaacaactttctgatgaattaaataaagtctttaagaaagattcatataaaattttaggaaatatgtggggagacaagccttcaaagtggaaagcagatttaagtggttataaaagatatagaacaataattaattacttcacaagaatgagatacttagatcataaaggatctcttttacttaaaaagaaggatttaaaacctaagaaaaaccatattccatggttcaaacaaactacttcaaacttaaagcctaacgaatatataattttcggtcattgggctgcccttgatggcaagactaaattagataatataattggtctggatactggttgtgtatggggtaacaaacttactgctatgagattagaagataaaaaattttttcaggtaaagaaaaaatga

SEQ ID NO: 268474 - DNA, 820 bp, Unknown
  Bacterial polypeptide expressing nucleotide sequence isolated from the Sargasso Sea
tatgaaaaataagcctacctttgtaattggtgacattcagggttgttactccgaattcaggagactactaaaaatcatagatcctatgaaaaaaaataaaatcttctgtgtgggagatctagttaatagaggtccatattcagaaagggttgtggattatgttttgaacaacaagattaaaagtgttttaggaaatcatgatctacatatgatggcaatgattcttggagtacataaaaagaatgacaataaacacacactgcaaaaaatcttagggaaaaataagtctattaagatatttgagtattttctaaaattcccttttgcaaaactaatagtttcaaatgaatcaaaatcactaattactcatgctggtgttttgccatcatggtcattaaataatgtactgtcagctaatgaagagcttactgaagctttaaaatcagatccagaaaaatttctctcaaatatgtatagtgatagaaggaaagatatttcaaaatcaacaaataaaagaaaccgcgcaagatttctagttaatgtttttacaagaatgcgatttattaccaaagataataaattagatttgcaaacgaaagtaaaaacttcatccagggaaaaatataaaccatggttcgtttatgagcaccgttgtttggatgatgttgataatattgtctttggacattgggctgctctaaatggcgttacaaatcataattttattagaggagtagacttgggctgtgtttggggaggatcgcttgcagcaatcaatttaaaagataagtcgattattacagttgaatcagaattatga

SEQ ID NO: 268475 - DNA, 820 bp, Unknown
  Bacterial polypeptide expressing nucleotide sequence isolated from the Sargasso Sea
atgaacaacaaatctaaatttgtaataggtgatattcaaggttgttacaaagaatttaaaaatttactaaaacttatagatccaaataaggaaaataaattcttctgtgtaggtgatcttgtgaatagaggtccagaatctgaaaaggtagttgattatgttttagagaataaagtaaaaagtgtacttggtaaccatgatttgcatctaatggcgattctagcaggagtgcgtaaacataatgataaaaaagatactatgacaaaaattataagcaagaataaatctgttgaaattttagattattttttaaatttcccttttgccaaagtgctctcaaatgagacaaaaaaaacacttgttgtacatgcaggtgttcttcccacctggtctattgaggatgtaaaagctgcaaatgaagaattaacctcttccttaaaatctaaccctgaaaaatttcttgatcaaatgtatggcgacagaaggaaggcaatctctaaatcaactaataagaaaaatagaagaagataccttgttaatgttttcaccagaatgagattcataactaaagaaaataaactagacttaaatactaaaattaagaagtcaccaaaacaaaaatatcagccatggttcaattacaaacacaaggctctaaaagaagttgatagtattgtgtttggccattgggccgcactaaaaggtgttacaaataataataaaataaaaggtgttgaccttgggtgtgtctggggtggttctttagccgcaatcaatattaacgacagatcaataattacagtagattcgcaaaaatgaa

SEQ ID NO: 268476 - DNA, 802 bp, Unknown
  Bacterial polypeptide expressing nucleotide sequence isolated from the Sargasso Sea
atgagtcattacgtaattggtgatgttcaaggatgttacgatgaacttgcagctctttgtgctaaagttaaatttaaccctcaaaaagacaaattaatttttgctggggatctcgttaacagaggtcccaaatctctggaagtgctaaatttctgtattgaaaataggaagtctgtcaaatctgttttggggaatcacgatttttatcttttatatttaattgagcatcaaaaaaggaataagtcactgaaagaaattcttgaggctgataatttagacgaaattaataaatggcttaagggattgccattgttattaaagattaaaattaaaactaatgtttactggatagctcatgcaggcataccctttttatgggattttaaaattgcacaacagctttcaaaagaaattcaatctgctatcaaaaaagatgcttataatctttttaaatatatgtggggagatactccaagcttatggaatccagaactagaaaaatataaaaagcaaaggcttattatcaactacttcacaagaatgagattcacaaataaaaaaggtgcactaaaattaaaaaagaaagacctaacgcctgaaaaaaatcacataccttggtttgaacaaactaaaaacaatcttaaagacaatgaaaagattatttttgggcattgggccgcacttaatggcaaaactaacttagataacataattggcttagatacaggttgtgtttggggaaataagcttacagctataagattagaagatgaaaaactatttcatgttagtaaaaaatgaa

SEQ ID NO: 268477 - DNA, 808 bp, Unknown
  Bacterial polypeptide expressing nucleotide sequence isolated from the Sargasso Sea
aatgtcccattacgtaataggcgatgtccaaggttgtttcgatgaactccaattactttgtaaaaagatcaaatttaatcctaacaaagataaattaatatttgctggcgattatgttaatagaggtccaaaatctttagaggtattagatttttgcttaaaaaataaaaaatctattaaaggcgtccttggtaatcacgacttctatttgctatatcttattgaatataaaaaaagaaataagtctttaaatgctattcttgatgctaaaaatgtaaatgcaatttataaatggctaaaaaaacaacctcttcttgaaaaagtaaaaattaaagaaacaaaagaaactttttggatagcgcatgcaggcattccttatatctggagttttaaaactgcaaaacaactttctgatgaatttaaaaaagtctttaagaaagattcatataagattttaggcaatatgtggggagacaaaccttctaagtggaaagaagatttaagtggctataaaagatatagaacaataattaactacttcacaagaatgagatacttggataaaaaaggttctcttttacttaaaaagaaggatctaaaacctcagaaaaaccatattccatggttcaaacaaactatttcaaacttaaagcctaacgaatatataatttttggtcattgggctgctcttgatggcaagacaaaattagataatataattggtttagatactggatgtgtgtggggtaaaaaacttactgctatgagattagaagataaaaaattatttcaggtaaagaaaaaatga

SEQ ID NO: 268478 - DNA, 802 bp, Unknown
  Bacterial polypeptide expressing nucleotide sequence isolated from the Sargasso Sea
atgtctcactatgtgattggagatgtgcagggttgttatgatgaacttattaatttatgttcaaaaataaaatttaatccaaaaaaagatacattaatcttcgcaggagatcttgttaatagaggtcctaagtcgcttgaagtcttgaatttctgtcttgaaaataaaaaatctattaaggctgttcttggtaaccatgatttttatctcttatatctcatagaacataaaaagaataataaatcattaaaaacaattctaaacgctaacaatatttctaaaatacacaaatggctaaaaaaactaccactattactaaaaattaaaattaatgatcataatttttggatttctcatgctggaataccgtgtatatgggatttgaaaacagccaaaaaactatcaaaagaagttcaggttgctcttaaagaagattcctacaatttactgaaaaatatgtggggcgatactccaagcaaatggaacagtaaactagttaaatacaagcgctatagggtgataatcaattactttactagaatgagatttttagataacaaaggtgctctaaagttaaagaaaaaaaatctaaaatcagaaaaaaatcatattccttggtttaagcaaaccactcataacttaaaaaaagatgagtctattatatttgggcattgggcagcacttgaaggaaaaacaaatttagataatataatcggcttagatactggctgtgtttggggtaataagctaacagcaataagattagaagataaaaaactatatcaagtaagtagaaaatgaa

SEQ ID NO: 268479 - DNA, 802 bp, Unknown
  Bacterial polypeptide expressing nucleotide sequence isolated from the Sargasso Sea
atgagtcattatgtaattggtgatgttcaaggatgttacgatgaactagtagctctgtgtactaaagttaaatttgaacctcaaaaagataaattaatttttgctggagatcttgttaacaggggtcctaaatcactggaagtactaaatttttgtattgaaaatagagagtctgtcaaagctgttttggggaatcatgatttttacctcttatatttgattgaacaccaaaaaaggaataagtcactaaaacaaattcttaaggctgataatctagacgaaattaataaatggcttaaaaggctgccattgttattaaagattaaaattaaagataatatttactggatagctcatgcaggcataccttttttatgggattttaaaattgcacaacagctatcaaaggaaattcaatctgctatcaaaaatgatgcttataatctttttgaatatatgtggggagatactccaagcttatggaatccagaattagaaaaatataaaaggcaaaggcttattatcaactacttcactagaatgagattcacaaataaaaaaggtgcactaaaattaaagaagaaagatctaacgcctgaaaaaaatcatataccttggtttgaacaaacaaaaaataatcttaaagacaatgaaaaaattatttttggccattgggctgcactcaatgggaaaactaacttagatagcataattggcttagacacaggttgtgtttggggaaataagctaacagctataagattagaagatgaaaaactatttcatgttagtaaaaaatgaa

SEQ ID NO: 268480 - DNA, 835 bp, Unknown
  Bacterial polypeptide expressing nucleotide sequence isolated from the Sargasso Sea
atggcaacttacgcaattggtgatattcagggatgttatgacgagttaagaattttactggataaaattaaatttaaatcagaacaagatcaattattgatatgtggagatataatcaatagaggtcctaagtcgcttgaaactatagaattcctttattctattaaaaaaaattgtcatattactttgggaaatcatgatcttcatttcttagccgttgcagaaggagtaaaagaaatatcagattctgatacgttccagaccattcttgaagatgtaaatcttgatatttatgttagttggatcagggcattaccttttcatcatataagttccttaaaaattgcaggagaaatgaagccttacataatgactcatgcaggaattcctccacattggactagagaggagctagaaaaatattctctagaattaactgaaatcttaaagggtccagactctaaagttctcttagaaaatatgtatggcaatgagccaaatcattcatctaaatgtgattcagaaatagaaaggttacgtttgaacataaattatttcacacgcatgagattctgtaaaaatgacggaacactagacttggtaaacaaaggaaaaccaaatgaaaacccatatcaaatgaagccttggtttgattggagtttgaaaattctcaaagaaccatttcatatcctttttggtcactgggctgccttggaaggtaaaactggtaaaaataatatatcagcattagatactggttgtgtatggggtaaaaaattaagtgcactaaggttagaagataatcgaatcttttcttgtaataagataaattaga

SEQ ID NO: 268481 - DNA, 811 bp, Unknown
  Bacterial polypeptide expressing nucleotide sequence isolated from the Sargasso Sea
tatgagtcattatgtaattggtgatgttcagggttgttacgatgagttaatgctcttatgtaaaaaaattaaatttaacccaaagaaagataaacttatttttgcaggtgatttagttaatagaggtcctaaatctcttgaggtattaaatttttgtctcgaaaacaaaaaatctataaaagctgtgctcgggaatcatgatttttatctcttatatttaattgagcacaaaaaaagaaataagtctcttaaaaaaattttaagtgctgataacatttcaaaaattcaaaaatggttaaaaaaactgccacttttattaaaactgaaaattaaaaatgatgttttttggatttctcatgcaggcatcccttttgtatgggagttaaaaaaagcaaaaaaactttcaaaagaaatacaagttgctctaaaaaatgattcttttgatttactcaaaaatatgtggggtgataccccaagcaagtggaataacaaactgaaaggatatagtcgttatagaataatcataaactattttacaagaatgagatttttagataatgacggcgtattgaagcttaaaaaaaagaacctaaaacctgaaaagaatcatgttccttggtttgaacaaaccacccataatttaaaaaataatgaaacagtaatctttggtcactgggcagcacttgaaggaaaaacaaatttagataatattatcggcttagatacaggctgtgtttggggaaataaactcacagcaattagattagaggacaaaaaactatttcaagttaaaaaaaatgaaaatatataa

SEQ ID NO: 268482 - DNA, 808 bp, Unknown
  Bacterial polypeptide expressing nucleotide sequence isolated from the Sargasso Sea
aatgtcacactatgtagttggagatgttcaaggttgctttgatgagctaatttctttgtgtaaaaaaataaaatttaatccaaataaagataagttaatatttgcaggagattttgttaatagaggtccaaaatctctcgaagttttagaattttgtttgcaaaacaaaaggtctgtttctggtgttcttggtaatcatgatttttatttgttatatctgattgagcacaaaaaaagaaataaatcattaaaacctattcttgaatctaaaaatgtaaatagaatttttaagtggttacgcaagcaaccccttgttcaaaagattaaaattaataaatctaaagaggtcttttatattgttcatgctggcattccatttatttggagtctaaagactgcaaagaaactttcaaatgagttgcagggagtattaaaaaaagactcctataatattttaaaaaaaatgtggggtgattcaccctcgagatggaaagcaagcttagaaggttataaaagatatagaactataattaattatttcactcgaatgcgatatcttgatgtcaatggggatctaaagttaaagaaaaaagatctaaaaaaggaaaaaaatcatataccctggtttcaacaaactataattaatttgaaaccaaaagaatttatagtttttggtcattgggcagctttaaatggtaagacaaaatttaaaaatataattggtttagatactggttgtgtatggggtaaaaaactaacagcaattagattagaggataagaagatatttcaagttaataaattatga

SEQ ID NO: 268483 - DNA, 808 bp, Unknown
  Bacterial polypeptide expressing nucleotide sequence isolated from the Sargasso Sea
atgtctcactatgtaataggcgatgttcaaggctgttttgatgaacttcaattactgtgtaaaaagattaaatttaatcctaacaaagataaattaatatttgcaggcgattatgttaatagaggtcctaaatctttagaggtattaaatttttgcttaaaaaataaaaaatctgttaaaggcgtccttggtaatcatgatttctatttgttatatcttatagaatataaaaaaagaaataagtctttaaatgcaattcttgatgctaaaaatgtaaatgcaatttataaatggttgaaaaaacaacctcttctgcaaaaaataaaaattaaagaaacaaaagagactttttggatatcgcatgcaggcattccttatatctggagttttaaaactgcaaaacaactttctgatgaattaaataaagtctttaagaaagattcatataagatcttaggtaatatgtggggagacaagccttcaaagtggaaagcagatttaaatggctataaaagatatagaacaataattaattacttcacaagaatgagatacttagatcaaaaaggctctcttttacttaaaaagaaggatttaaaacgtcagaaaaaccatattccatggttcaaacaaactatttcaaacttaaagcctaacgaatatataattttcggtcattgggctgcccttgatggcaagactaaattagataatataattggtctagatactggatgtgtatggggtaacaaacttactgctatgagattagaagataaaaaattatttcaggtaaagagaaaatgaa

SEQ ID NO: 268484 - DNA, 838 bp, Unknown
  Bacterial polypeptide expressing nucleotide sequence isolated from the Sargasso Sea
attggcaacttacgcggtaggtgacgtccagggctgtctatctgagttggaagctttgctaaaacatatagatttttcctcttccgacaggattatttttttaggtgatctgatcaatagaggtcctgactcgttaggcaccttgaggttgataaaaagtttgggggaccaagcaattactgttttgggtaatcatgatcttcactttttggcaatactatttggaggccaccaagaaacgaagtccgacactttgactgaactcatcgaagcgaaggatgctgaggacctcggtcactggcttagaacccagcctctaatccattatgaagactctttagacgccttgatggcgcatgcgggggttcctttcttctggtctactcagaaggccttgtctttggccggagaggtgcacaggattacatccagcactgaagagaaagacggcttagattataggattttttttaaacaaatgtatggcaacaatccaaattattgggcagagggcttgaccgggatggatcgttatagggctattactaattattttactagaatgaggttccttgattttgaggggaaaatggatttcagttttaagggggctaaggagagtgctccggactcattgacgccttggtattcctttggtcaagaaggacaccaaacgaggaaagtgctttttgggcattgggcttccctgaatggtgttactggtagagaagaaattattgcgttagatactgggtgtgtttggggtagatgcttaactgcttattgtatggagacaaaagaatttctttcggtaaagtctttaaaatccaacaagtaa

SEQ ID NO: 268485 - DNA, 725 bp, Unknown
  Bacterial polypeptide expressing nucleotide sequence isolated from the Sargasso Sea
cccaacgacttgcaaaatgcgacgcatgtgcgcgcgctggcgaccgccggcatgcgcctgttgactgctgcacagcaggcgccaatctgggcaagcatcgaggcggcgatcgtggagtcgccatttgcatacgttgctggcgactcgcagacgatcagtggcgggtacgagggcgccttcctgcagatcgccatgatggccattctgcacgcgagtggcaccagccctaacgacgcacaccacggcacgttggacctgggtggcggctcgacgcagatcaccttcccgccggcggacggggtgatcctcaacgacgtgctccgcatcatgcacaacaatacagacctgcgcgtctacgctcactcgttcatgcgcgggggggtcgaacaagcgaagctgcgctacgcacagcgcatttccgatgcagacggcacgaaggcggcctacgctgtgctcggcagcccgtgcgacaatgtggggctcgatacgaattacaccgtggcgtgtggcagcgcgagtggcacatgcctccgcctgctcaagggcacgggcgacttcgccgcgtgcgaagtcgtcgcgacggcgctcctcaaccgcgccaacgagtgccttctcccaccttgcagcgccaatggcatctaccagccgtctccggcgggcgtgactttccatgcagtctcggcgtacttttacacggcgtacggcgtcggcctgctcggctggtc

SEQ ID NO: 268486 - DNA, 343 bp, Unknown
  Bacterial polypeptide expressing nucleotide sequence isolated from the Sargasso Sea
aataaagctaaagcaaaatattctttctggcggccaaaaacgtaagttttttttagctttagctttattaagtgaacctaaagttttattgcttgatgaaccatttgctgcattagatgtactcactataaaaatgcttcaagaaataattgtaaatttgcaacaagaaaaccgtataactgtaattatatgtgaccatcaggctcgagatcttcttgcctgcgtagatactgcgatgattttaagcaacggtaaaatagttgctcaaaactcccctgccaatatagtaaatgatattaatgccaagaatgcatattttggagacgaatttaaaattaactaa

SEQ ID NO: 268487 - DNA, 703 bp, Unknown
  Bacterial polypeptide expressing nucleotide sequence isolated from the Sargasso Sea
atgatcttaaaggcacatgaaatttctaaatcatataaaggtaaaaaagttgtaaataaagtttctgtaaaggttagtcaaggagagattgttggtcttcttggacctaatggtgcaggaaaaacaacatccttttacatgatagtaggaattattaaaccagaggaaggcgaaatatatttagataatgaaaaaatttctacatatccaatgtataaaagagctcaaagtggcataggatatttagctcaagaagcatctgttttcagaaaactttcagtagaagaaaatatactaagcatccttgaattttctaatctttcaaaaagtaagcaaaaagagaggactgagtctcttatggaagaattcggattgactcacataagacatagtagaggagatcttttatctggaggagaaagaagaagaactgaaattgcaagagctcttgcaacagacccaaagtttcttcttctagatgagccgtttgcaggagttgatccaattgcagtagaagatatccaatccattatttcaattctaaagaaaaaaaatattggtatattaatcactgatcataatgtacaggaaacacttgctataactgataaaacatatctaatgtttgagggaaaaatcttacaagaaggtattccagaaaaattagctgaagatgaaatggtcagaaaggtttacctaggaa

SEQ ID NO: 268488 - DNA, 443 bp, Unknown
  Bacterial polypeptide expressing nucleotide sequence isolated from the Sargasso Sea
aatctatggaagacttaatggtgtaaaaaatttatctttaagggtaaatgaattagcagaagatttaaatttaaaagattttttaaataaaaaaactggtgaattatcctctggtcaaaaaaatagagtttcacttgcaaaatcattaataaataaacctgaaattcttcttttagatgagccaacagcaagtcttgatccagatattggtgattatgttagatcttatgtacaatcatataaatctaaaaataaagtaacaatacttttagcttctcataatatggcagaggtagaaagactgtgtgacagtgtgataatgatgaaaaatggtaaaatcattgatcaaggtactagtaaggaaataataagtagacatggtcgtgcaaatctagaagaaacatttcttaaaatagtaaggagcaaagatgagatggcataaa

SEQ ID NO: 268489 - DNA, 453 bp, Unknown
  Bacterial polypeptide expressing nucleotide sequence isolated from the Sargasso Sea
aaaatctaattgtttatggcaaattatacaatgttataaatataaaaaatagaattgaatatttagttgaaaaacttagattatcagatttattaaatagggttacgggggaactttcatcaggacagaaaaatagagcaagtttagcaaaagctcttataaacaatccaagtgttttacttttagacgaaccgacagcctctttagatccagaaattggagactttgtaagaacttttttggaaaattacaaaaaagaagaaaaaatatcaattttattagcttcacataacatgaatgaagttacaaggttatgtaaatcaatattgatgatgaaagatggaattattatagataaaggcaaccctgaagaattaataaaaaaacacggtagacaaaatttagaagaagtatttttaaagctttcgaggaataaaaatgagcttaactaga

SEQ ID NO: 268490 - DNA, 637 bp, Unknown
  Bacterial polypeptide expressing nucleotide sequence isolated from the Sargasso Sea
aatgcttaatgtgattaatggattttataagcccacaagtggaacaattaattttgctggaacagacagaagtgaaatggaacctgaacttgccgcaaaaagtggcatagctaggacatttcagaacatagcattgtttaaaggaatgagtacattagacaatcttatgactggaagattgttaaaacaaaagaaaaattttttaatgcaggcactttattttggtccagtagcaaaagaagaagaagaacaccgtgaaaaagttgagagagtaatagattttttagaccttcaatcaataagacggacacctgttggatcacttccatatggtctacaaaaaagagtagaacttggtcgtgcattagcaatggaaccagaaatacttctactagacgagcctatggctggtatgaatgtagaagaaaaacaagatatgagtaggtttgttctcacagtgaataatgaattaaagacgacaattgtgttaatagaacacgatatgggtgttgtcatggatatttcagatagaatagttgtattggactatggcaaaaaaattggatctggattgccaaaagaaattagaaacgataaagctgttattgatgcatatcttggtgtgtctgatgattag

SEQ ID NO: 268491 - DNA, 908 bp, Unknown
  Bacterial polypeptide expressing nucleotide sequence isolated from the Sargasso Sea
gttccccgatttgatatgataccgggagagcggctaattccaataagggaaatcgagcctgctacaggacacttactaaccccagatcaggctaataatagttcaaatgaattaggtggtgctattttatgtgtcaaaaatataagtaagcaatttaatgttagaaataaaggcatgtttggcgggggcacctcaataattagggctgttgatgatgtgagttttgaaattgagagaggtaaaacattaggtttagttggggaaagtgggtgcggtaagaccactcttagtcgtataattatgcgtgcactagctgctgatagtggtgagattatatttaacgatgaagggtcagaagtaaatttagaaaaattacgtggcaaagatcttagtccttataggacaaaatatcagtatatctttcaggatccttttggagccttaaacccccgaatgacagtctttgatattgtaagtgagccgctgattattcataatattggagataataattaccgccgagagatggtaacggaattgatggaattggttggcttagatccgagatttctcaaccgttatcctcatagtttttccggtggtcagcgtcagcgaatcagtattgctcgttcactagctctaaagcctaggttgctattatgtgatgaacctgtatctgctttagatgtatccgttcaagcacaaatattaaacctgctaaaggatttacagtggaagctagggcttagctatttatttatttctcataacttagcagtagttgattatatatctgatgatattgcagtaatgtgtgcgggtaggatagtggagagggcttctaaaaaagaaatatttagtaatccagttcatccctatactcagaatttattaaatgcagtcccctc

SEQ ID NO: 268492 - DNA, 688 bp, Unknown
  Bacterial polypeptide expressing nucleotide sequence isolated from the Sargasso Sea
aatgagcgtcagcaatctttttgctggttacggagaaacagaaattcttcatggaattaatctgaatgtaaatgatggagaaatagtttgcgtgataggacctaatggcgctggcaaatcaacagttttgaaagcaattctaggccagataaatattagggatggatcaattaatttagctgatcaagatatagtaaacacacccacgacagacatcataaaaaaaggaataagctatgttccccaaactaataatgttttcgttagtttaacggtcgaagagaacttggaaatgggcgcctgggtaaatccagaatatactcaaaaaaaactgacagaaatgtacgaactttttccagatttaagcgaaaaaagaaagcaaccggctggagctctctctgggggtcaaagacagatggttgcaatggcaaaagcattaatggtcaatgcaaaaatcctattactagatgagcccacagctggcttgtcacctaaatatcgctcggaaatattttcaactattaaaactattaataataatggtgtgcccatacttatggttgaacaaaatgctaaacaggctttaggcgtctcagacagaggttatattctagtcgacggcgcaaataggcacgcaggttctggaatagatcttatcaacgataaagaggttgctagaatgtttctt

SEQ ID NO: 268493 - DNA, 517 bp, Unknown
  Bacterial polypeptide expressing nucleotide sequence isolated from the Sargasso Sea
ttgggcggcttggattggccgacggccggagccattctgtttgggggcgaaccgcttcgcgtccaaacgccggcacagtcagcggaatttcgagggagccacgtgggctttgtgtttcaggcgtatcatctgttaccggacttggatgcgctggaaaatgtccagctgccggcacaagtgctgcggcggccgcaggccgagtcagaacagcgggcgcgcgagttgcttgacatcgtggggctcagtgaccgaatggatcaccggccatcggaattatccggcggcgaacaacagcgggtcgcgatcgcccgggcactgatgaataaaccggagatcgtgctggccgatgagccaaccggtaatctggataccggcacggagtcggaaatcattgacctccttaagcgaatgcatgccgagcgacagttgacacttttggtggcgacacacgacgaaacggtggcccgagccgcccagcgcgtggtgcatttgaaggatggccgggtgtgtgaatagt

SEQ ID NO: 268494 - DNA, 817 bp, Unknown
  Bacterial polypeptide expressing nucleotide sequence isolated from the Sargasso Sea
tgagcctacttctggaaaaatattaataaacaatcaagatgtaatgcaatttgataaagacaatttacaagaattaagaaataaaaaaataggaatggtatttcagaattttgctttaatgcctcatagatcagttttagataatattgcaatgcctttagaaataagaggtgtgagtaaaaatgatagattagatgctgcgaacaatattttaaacatagtagagcttcaaggttggggaaataaatatgcacatgaactatctggaggtatgcagcaaagagtaggtttagctagagcattagcagctgatccagaatttttattaatggatgaaccctttagtgcattagatcctttgataagaagacaacttcaaacagaatttataaaactttcaaaacaaatgaaaaaaacaacagtttttattactcatgatttagatgaagctgtaagagtaggacatagaatagctataatgagagatggagcagtagttcaaatcggaacaccagaagaaattgtagttaatccagctgatgaatatgttgctgattttgttaaaggaatttcaagattaaaagttgttcaagcaaaaacaatcatgaaatctataaaagattttgaaaataaatttggatcattggataatgataacgaaatagttaacgaaaatgaggttttaagtaaactaatagaaacctcaatttcaaaagataaaccaattgttgtaacggataaaaataatcaaaaaataggagttataaatcaatctgatctcttaaaatctgttgttgaaggaaatgaagatgattaa

SEQ ID NO: 268495 - DNA, 718 bp, Unknown
  Bacterial polypeptide expressing nucleotide sequence isolated from the Sargasso Sea
gatgattaaaccgattattgaagtaaacggacttgcatcggggtacgtaaaaggcttaaacatacttcaaggagttgatcttgtattaaaagaaaaagaagtagtttcaattattggaccaaatggagcgggaaagtccacattgcttaaagcaataatgggactcatacctatttttggtggaaaaattttttttaacggaaacgaattgaaagaaataaaaagttttgaattaatacaaaaaggcattgcctatgtcccgcaagtatctaatgttttcccaagtctaacaattgaagaaaatttggaaatgggtctttggactactaaagataagcaaaataagttttttgaagaaatttactcaatgtttgaaatactttttcaaaaaagaaaagaaagagccggtaatttatcaggtggacaaagacaacttttagcattaggaagagctttaatttcaaaaccagaggttttattattagatgagccctctgctgggttgtctccaaaagcaatagatgaagtttttggatacattgaaaatattaatcaaagtggggtatcaatccttttagtagaacaaaatgcaaagagagcattacgcttctgtaacaggggatatgtattggatcaaggtagaaatgcatataccggtttaggtaaagatctattaaatgatgaaaaagttatagatttatacttaggtaaattgtaa

SEQ ID NO: 268496 - DNA, 694 bp, Unknown
  Bacterial polypeptide expressing nucleotide sequence isolated from the Sargasso Sea
aatcataaaaaaatgactgaaaaattaatttctataaataatttatctaaagaatttttagttaataaaaacaaaacctgtattttaaaaaatatcaattttagtattttaaaaggtgatattatttctatatctggtccttctggatcaggtaaatctacatttctaaatatattaggtttattagattctgtatttgatgggacttatgattttttagattttaatgttaatattctaaaaaataatgaaaaaaatattattagaaataaatctattggttttgttcatcaatttttttatttaattcctgaattaactgttttggaaaatgtatctttacctaatttaatacttaataatcagatgagaaagtctaatgatttggctaaagaaataattgtaaattgtggattagaaaatcgaatgtattctaagccaacctatttatccggaggggaacagcaaagagttgcaatcgcaagagctctaataaataatccagaactaataattgctgatgaaatgacaggaaacttagatgaaaaaacagctgatagtgtatttgaattttttttagataaaatatcttcaaataatcaaacacttatctatgttactcataatcaaaagtatgctaaaaaagctaatacagcctttgaaatatcaaataatcaaattcataaaatttaat

SEQ ID NO: 268497 - DNA, 985 bp, Unknown
  Bacterial polypeptide expressing nucleotide sequence isolated from the Sargasso Sea
gctgcacggcctcggtttcagcgacgagcagctgagttcaccggtacgcagtttctccggtggctggcgcatgcgcctgaacctggcccaggcgctgctctgccgctccgatctgctgctgctcgatgaaccgaccaaccacctggatctcgacgccgtcatctggctggagaagtggctcaaggcctatcagggcacgctggtgctgatctcccatgaccgcgacttcctcgattcggtcatcagccgcatcatccacatcgagaacggcaagctcaacgaatacaccggcggctactccgatttcgaactgcagcgcgccgaacacctggcccagcagcaatccatgtacgaaaagcagcagcgcgagatgtcccacatgcaggcgtatgtggatcgcttccgctacaaggcctccaaggcccgccaggcccagagccggctcaaagcgatggagcggatggagaagatcctgcccgcccacgccgactccgagttcagcttcgagtttcgcgagccgtcggccctgccgaccccgctgattgccatggagaacctcagcgccggttatggcgacaaggtgatcctggagaagatcaaactcaacctggtgccgggttcgcgcatcggcctgctcggtcgcaacggcgccggcaaatccaccttcatcaagatgctgtcgggctccaacccgccgctctccggcaagctcgaggtgagcgccggggtcagcatcggctacttcgcccagcatcagctggagaccctgcgtctggacgactcgcccctcgatcacctggtgcgccttgcgccggacaagaccgagcaggagctgcgcaactatctgggcagctttggctttcacggtgacaaggcgctcgacaaggtggcccccttctccggcggcgagaaggcgcggctggtgctggccctcatcacctggcaaaagcccaacctgctgctgctggatgaaccgaccaaccac

SEQ ID NO: 268498 - DNA, 829 bp, Unknown
  Bacterial polypeptide expressing nucleotide sequence isolated from the Sargasso Sea
catccgctgggtatggctgtagtccgggcagcccagcacagggggatcatgatacccgcagtcagtgatttcaatgctccgtcggggaaaggtgtttcaggcgatgttgaaggtcaacgggttgttattggtaatgaactggctatgcaggaaaacagtatcgttattgataatcaaaaggccgttgcggatacgttgcggatggaaggcgctaccgttatctatgtggccacagatgggtaccttgcaggcctgatagctatctcggatcccgtgaaagcaaccacgccggatgcgcttaaagctttgcgtcaggcggggatccgcattgttatgctcaccggggataaccagcttactgctgaagcagtcgcacggaaactgggaatagatgaggttgaagccggggttctgcctgacggcaaaaaagcagtgataacccgactgaaagcgtctggtcatgtggttgcgatggcgggggacggtgtaaatgatgccccggcgctggcagcggctgacgtgggcatagctatgggaacgggtacagatgtggcaattgaaagtgccggagtcacccttctcaaaggcgacttgatgatactgaacagggcccgtcatctgtcagagatcaccatgaaaaatatccgacagaatctgttttttgcatttatctacaacgcacttggcgtgcctgtggctgcaggtctgctttatcctgtgtatggaatactgctgtcgccagttattgcggcggcggccatggctctttcctccgtcagcgtcattgtgaatgcgttgcgtctgaaaagtgtcaggctcgggaaataac

SEQ ID NO: 268499 - DNA, 586 bp, Unknown
  Bacterial polypeptide expressing nucleotide sequence isolated from the Sargasso Sea
gttgaaccagcccagaagaccaccaaagcaacccatgcccctgttagacgtatccaacctgcgcgtgcgcctgcagacccaccgaggcccggccgatgcggtgcgcggcgtgagctttgcgctggaatgcggcgaaaccctgggcctgattggcgaatcgggctgcggcaagtcgctcaccgccatggcgctcatgggcctgctgcctgaaagcgcagaagtctccggcagcatccgctttgacgggcaggaactggtaggtgccagcgacgcccagatgtgccggctgcgcggccaccgcatcggcatggtgtttcaggaacccatgacggccctcaaccccgtgcacaccattggccgccaggtggcagagccgctgcggctgcacctgggactggacaaggccaccgcgcggcagcgcgccattgcactgctggaccgcgtcggcattcctcaggcagcgcagcgctttgatgcctacccccaccagttctccggcgggcaacgccagcgcatcaccatcgccatggcactggcctgcgggcctgacctgttgattgccgacgaacccaccacggcgctggat

SEQ ID NO: 268500 - DNA, 466 bp, Unknown
  Bacterial polypeptide expressing nucleotide sequence isolated from the Sargasso Sea
aaaccaaaaattggggaattattattcatacctcaaaaaccgtatatgttgcttggtactttaagggaacaattatgttatcccacagaagttaagaaatttagtgatgaacatcttacttctgtactacatgaagtaaatttaaaaactttagtggatcggtatcctaatcttgatataaaacaagattggccacgaattctttccctaggcgagcaacaaagattggcttttgcaagactattactaaattctccaagatttgcagtactcgatgaagcaacaagtgctttggacattaacactgaaaaaaaattatatagtttactaaaggaacgagaactttctcttattagtgttggacatagaccaagcttaaaagattttcacgaaaatattttagaattaaatggacaaggagattggaaattattgacttctgataagtataattttaaggattaat

SEQ ID NO: 268501 - DNA, 283 bp, Unknown
  Bacterial polypeptide expressing nucleotide sequence isolated from the Sargasso Sea
atgaataactcatttatacaaatcaataatatttcaaaacattttgctgatgtaaaagccgtagatgatgtttcgtttgaaattaaagaaggtgaatttttttcacttctaggaccgtctggttgcggtaaaacaactttattgagactcttggcaggttttgaatatccaacttctggtaatttattaattgatgggattgatattactgaattgtcaccagataaaagacctacaaatatggtttttcaaaactatgctatttttcctcatctcaatgttg

SEQ ID NO: 268502 - DNA, 842 bp, Unknown
  Bacterial polypeptide expressing nucleotide sequence isolated from the Sargasso Sea
tgtttaccgtgaaatccgccgtgctcttaccgatttagaaaacatgctgggcttactcaataaaaaaccacaagtcactaatgctccaaatgcaaatacccttaatgttaaaaatggggaaattgcctttaataatgtgagttttagctacaacgctaaccgccctattctaaataatattagctttaaagtgaaagcgggtagcaaggtagctattgtgggcgcaagtggtgctggaaaaagttcactagcgcgcctgctctatcgtttttatgatgtaacatcgggcagcattactattgataaccaagctattaactcggtcacgcttgatagccttcgtaaagctattgctattgttcctcaagataccgttttatttaacacaacaattcgtgaaaacattgcctatggtcgcccttcggcaagcgatagtgatattgataaagccattgaaatggcgcatttaaaagatttcattaatacgttagctgatggcgataaaacgcgagtgggtgaacgaggtctaaaagtatctggcggcgaaaaacagcgtattgcaatagcacgcgctattttaaaacaatccccaattttaatatttgacgaggcaacgtcggcactcgactctcaggctgagcaagcaatattaaaggcaatgcatgaagtagccagcgagcacaccagtattgtgattgcgcataggttatcaaccattactgatgcccacactattattgtgcttaagtcgggccaaattgttgaacaagggcaacataacgaattgctgaccttgggtggtgaatacgcacatatgtgggcattacaacaacaagattaac

SEQ ID NO: 268503 - DNA, 687 bp, Unknown
  Bacterial polypeptide expressing nucleotide sequence isolated from the Sargasso Sea
atggcaacaagcaagtagttagaaatataaatatttctattaaaagaagagaggttgtaggtttgttgggtccaaatggagcaggaaagactacaacttttcatataattgtgggtttggtaaaacctgattcaggtagtataattttagataaattagatatttctaatctacccatatatttaagaggtaagtatggcattagttatcttccacaagagccatcaatttttagaggaatgagtgttgaagataatttattatctattgttgaaattaatgaaaaagataaaaataaacaaaatattattttgcaaaaccttcttaatgaatttgatattaatcatgtaagaaaatcaaaatcagttgtattatcaggtggtgagagaagaagattggaaattgcaagaactttagcaactaatccaaaatatttactacttgatgaacctttaacaggaattgatccagtatctatagaagagatcaaaaccattataaaaaaattaaaagatagaaatattggcattttaattacagatcataatgtaagagaaacactcaaaatcgtagataaagtgtatattgtaaatgaaggggcaatattttatgaaggagatcctgaatcagcagtaaatgatgaaaaaataaaaaaattttatttaggttctaatttcaaactttaat

SEQ ID NO: 268504 - DNA, 916 bp, Unknown
  Bacterial polypeptide expressing nucleotide sequence isolated from the Sargasso Sea
tatgtctgagactgtaataaaatgcgagtcggtttataaaatttttggacaaaatgccaaaaagatgcttgaagaatctaatggcaatgtagatgcaaaaacctttcaggaaagaggatgtatagttggagtaaataatgcttcttttgaagttgcaaaaggagaaatgttagtagtaatgggtttatctggttctggtaaatcaacacttcttagatgtatttcaagattaactgatgctaccggtggaaaaatttttattgaaggtcaagacttattagaattaaataataaagagcttattgagcttagaagaaataaaatgggaatggtatttcaaagctttgctttgttacctcataaaacagttgttgaaaatattgcttttccgcttcaaataaaaggcactaatactgaagagagtattagtagagcaatggaaatggtaaaactagttggcctagatggaagagagaattattttccaagagaactttcgggtggacaacaacaaagagtaggaatcgcaaggtcattagcagtagagcctgatatatggtttttagacgaacctttttctgcattagatccattgattaggaaagaaatgcaagatgagtttttaagacttcaggaaaaattacagaagaccatcatgttcatcactcatgattttgatgaggcattaaagttagctgatcgaatagcaattatgaaagatggtataattgaacaattagacacaccggccaatattgtactaaatccagcaactgaatatgtaagaaagtttactgaagaagtaccgagagaaaaggttttgattattgaggatgtaatggatgcttcaagtaaagataatttaggagatttaaaagtatcaaaagatgaaattatagaaaatgtgcagaaaaaa

SEQ ID NO: 268505 - DNA, 649 bp, Unknown
  Bacterial polypeptide expressing nucleotide sequence isolated from the Sargasso Sea
atggcatactttgaaggagcaaaaatgacagcaggttatggggatggacctgatattattagttcatgttccataactgccaataggggagagatagtagctattctaggtcccaatggtgctggcaaatcaacagccatgaaagcgatgctcggattattaaaattaaaatcaggctctgtaattttgaatggtgaagatatttcaaaaattaatcctcaagatcgagtaaaaaagggtatttcatttgttccacaaacaagaaatgtatttgcagaattaactgttagagaaaatttagagattggtggctttttgacagaagggagtttagaaaacaaaattgagagtatttatagtttatttccaattttaagtgaaaaaaaatcccaagtcgttggtcaattatctggtggacaacgtcagcaagtcgcgcttggaagagctttaatgagtgatccatcagttctcatgttagatgagcccaccgctggagtttctccaattgtaatggatgaattgtttgaacatataataaaagttaaaaaaacaaatgttgccgttataatggttgagcaaaacgcaaagcaagcattaagtatttcagatcgaggctatgtattggtaactggtcaaaataaattgaggg

SEQ ID NO: 268506 - DNA, 157 bp, Unknown
  Bacterial polypeptide expressing nucleotide sequence isolated from the Sargasso Sea
tgaacaagcagcaaggatggttgcaatggaaaatgctacatctaactccgaagaaatgataaaagatttaactttaaaattcaataaagcacgccaagcagcaatcacaactgagatgcttgaaattgttggtggcgccgaagctttgaaaggataa

SEQ ID NO: 268507 - DNA, 133 bp, Unknown
  Bacterial polypeptide expressing nucleotide sequence isolated from the Sargasso Sea
atggtatctatacgccctgatgaaatcagttcaatcctaaaacaacaaataactgattatgaccaatctgtaagtgttagcaatgtaggaactgttctgcaaatcggtgatggcattgcaagaatatatggct

SEQ ID NO: 268508 - DNA, 1045 bp, Unknown
  Bacterial polypeptide expressing nucleotide sequence isolated from the Sargasso Sea
ccacgatctgggcgttgtcgccaatgtcgccgacgaggtggtggtgatgtatcacggccgggtgctggaacacggcacgctggaccatattttccgcgacccgcagcacgattacctcaaagccctactgcgcgccgtgccccggttccacatggaagacggcgaacggctggtgccgttgcgggaaatcgaccacaccaccggccatctacttgccgaacgggaagaagaaccggtcaagctggatgaaccgctgctggacgtccgcgggttgactaaaacctatgccctgcgcaaaggcggcatttttagcggcagcgaaacccagaggattctcgcggttgacgatgtcagctttttcgtacgccagggcgaatgtctgggactggtcggcgaatccggctgcggcaagaccacgctgtctaagatgatcatgcgggcgctgacaccggattcaggcgaagttctctacaacgaccggggccataaggtggacctgaccgggttaagtgagcgggaactgctgccctatcgccgcaagattcagttcatgttccaggatccgttttcatctctgaatccgcgaatgacggtgttcgatattatctccgaaccgctggccatccacgaaatcggcgatgccgcttatcgcgccgaaatggtacaggaactgatggcgcttgtggggctcgatccgcgctttcttaaccgttatccccattcgttttccggcggccagcgccagcgcatcggcattgcccgtgcgcttgccctaaaacccggtctgctgctgtgcgacgaaccggtgtcggcgctggacgtttcagtgcaggcgcagattctgaatttactgaaagacctacagcaggaattgggcctgacctatctgttcatttcccacaatctggcggtggtcgattacattgccgaccgcatcgcggtgatgtgcgccggacgcctagtggaaaccgcgccccgggacgtgcttttccgatcgcctatccatccctacacccgcgcattgctgtccgcagtgccggaaccg

SEQ ID NO: 268509 - DNA, 862 bp, Unknown
  Bacterial polypeptide expressing nucleotide sequence isolated from the Sargasso Sea
acttttcaagaagctggttgtattgtaggcgtaaataacgcctcttttggagttaacaaaggtgaaatgatggtagtcatgggattatcaggctcaggcaaatcaaccttacttcgatgcatatcaagacttacagatgccactgctggaaaaatatttattgatggtgaagatttgctgtcaatgaatagtaaacaattaattgaattaagaagaaataaaatgggtatggtatttcaaagttttgctcttctacctcacaaaaccgttattgaaaacattgcttttcctcttcaagtcaagggtactaatacaaaagaaagtatggcaaaagctttagagatggttgagttagtaggactaaaaggtagagaaaattattttccaagagaactttctggcgggcaacaacaaagagtaggaattgcacgttcactagccgtagaacctgatatttggtttttagacgaaccgttttcggctcttgatcctcttattagaaaagaaatgcaggatgaatttttaagattacaagcagttttaaataaaacaattatgtttgttacacatgattttgatgaagctcttcgcttagcagatcgtattgcaatcatgaaagatggaataattgaacaactagatacccctgataatattgtattgaacccagctactgaatatgtaaaaaaatttactgaagatgtgcctagagaaaaagttcttaaaatagaatctattatggatgcttatgattcaaataattcaagttctactaaagtatctaaagatgcaattattgaaacattagctgagtcaattcttaacagcaaagaaatactaactgtagttgatagtaataatg

SEQ ID NO: 268510 - DNA, 913 bp, Unknown
  Bacterial polypeptide expressing nucleotide sequence isolated from the Sargasso Sea
tctacagcgaagatttagtagtttttttgcagcaatattaatgcttattgatccaataagccatgtaagtacaaattttaatgactataaacaggcagaagcctcaataaaaaggttgaaaaacataaatcaagaacctgtcgaagatgataaagagaatttacgaaggatatccaattgtgaaggcaagataagtttcaagaaagtaaatttcgcttacaaaaaagataatcaagtacttaaaaatatcaatttagaaattaaaagaggggaagtcacagcatttgttggggcttctggagctggtaaaagtacaatgttggctttgattttaaagtttattactccaaataatggagacatttttatagatgataaaaatctcaaaatattaaatacaaaagatattagaaaaaacattgcattagtacaacaacagccttttttgttttcaggaacaattattgatgttataagaatgggcagaaatttcaccaaagaagaagttatagaatcagcaagaaaagcaaacgctcacaactttattcaaaagcttcctgagaaatatgaaactgagataactgagagaggatcaaatttctcaggtggtcagatccagagaatagcaattgcaagagcaatactcgggaacccctcaattcttcttttagatgaggccacaagtgcgttagatgcagaatcagaatctgaagtgcaaaaaggtcttaatagagcgatgaaagatagaacagttattgtaattgctcacagattagccactactcaagaggccaataaaatagttgttttcgataaaggtgaaattattgaagttgggaaacacattgatttaataaataaacctggaatttataaagaattatgtgaaaaacaattgattaaaaaaacatag

SEQ ID NO: 268511 - DNA, 588 bp, Unknown
  Bacterial polypeptide expressing nucleotide sequence isolated from the Sargasso Sea
gatgaccgaagccgttctggaactgaaggatgtgtgtttccgctggcccaaccaggaccgggcaaccatcgatcttcccgaactgaagattgatcagggagaacgcatcttccttcagggaccgagcggcagcggtaaatcgaccctgctctccctggtgggagggattttggtcgccgaatccggcagtctcagggtgctcggggaggaactgaaaagcctctcacgtgcccgcagggatgccttccgcgtcactcacctcgggtttatcttccaactatttaatctgcttccttatctttcacttgaagaaaacgtcctgctcccactccgtttttccaaaaaacgtgctcaaagagcaggccgcaaccaggcggaacggcttaaagaagcccaaaggctgctaacggcattagggctgtccgaaccgctcaaggagggacgtccggtggtggaattgagtgtcggccagcagcagcgagtggctgccgccagggccctcatcggccggcctgagttagtgattgcggatgaacccacttcagccctcgacgcggatctcagagaggtgttcctcaatctgctgtt

SEQ ID NO: 268512 - DNA, 454 bp, Unknown
  Bacterial polypeptide expressing nucleotide sequence isolated from the Sargasso Sea
atgccaataaacgaacaattcgtcagatttgataaagtagataaaagctatgatggcaaagtacttgttgttaaagatttaaatttagatattgcagaaggtgaatttattacaatgcttgggccatctggttcaggtaaaacaacttgtttaatgatgttagcaggatttgaaactccaactaatggagaaatatatttagacaaaaatcctatatcaaacattcctcctcataaaagaggtatcggaatggtttttcaaaattatgcattgtttccacatatgacagtttatgaaaatttagcttttcctttaagagttagaaaagtttctaaagaagatacagataaaaaaattgataaagctctatccatggtatctttaacaggatttgaaaatagaatgccaggccagttgtcaggtgacaacaacaaagggttgccgtgcaagagca

SEQ ID NO: 268513 - DNA, 599 bp, Unknown
  Bacterial polypeptide expressing nucleotide sequence isolated from the Sargasso Sea
tctgagtaaacacgtagatcaaccagttgtaatagaagctggaaatgttgaaaaaatttacaaatcttcgtctgtaactgttcacgctcttaaaggagtagatatctctataagtaaaggtgaaatggtagctattatgggccctagtggatgtgggaaaaccactttattaaattgcctttcaggattggattctattgatggaggtgatattacaattcagggtaagaaattacaggatctgtctgatgataaattaagtgaatttagagcttctaacatgggttttgtttttcaattatataatttgcttcctgttttaacatctgttgaaaatgttgaattgcctcttttagtttctgggtattctgctaaagaagctaggaaaaggtctgaagaaaagcttgatgatgtgggattacttgaatggaaacatcacttgcctggagaattatctggaggacagagacagagagttacacttgctagatctctagttaatgaacctgcgatagtttgggctgatgaaccaacaggaaatttagatagcactaatgaaattgaaatcatagatttgttatgtgatttaaataaaaaga

SEQ ID NO: 268514 - DNA, 682 bp, Unknown
  Bacterial polypeptide expressing nucleotide sequence isolated from the Sargasso Sea
ggaacaaaagaagctgtaaaaaatataagttttgaaattaaagaaaatgagattattggattacttggtccaaatggatctggaaaaactacaactattggcatgatattaggtttattaaaacctaccagcggtgaagtattaattaacggattaaaaatagaaaaaaatccaattgaaattttacaaaaaataaattttatttctccttatatagaattaccaaaaaaattaactgtcaaacaaaatttaattgtatatggcaaactttactcggttaaaaatttaaacaaaaagatagactatttggttaataaattaagattagaaaatttactcagcagagttactggagaattatcatctgggcaaaaaaatagaataagtttagcaaaagcaataattaatgatccttgcgtgttactacttgatgagcctacagcatctttagatcctgagataggagattttgttagaacatttttagaaaattataaaaaagaaaaaaaagtatcaattttattggcttctcataacatggatgaagtcaccagattgtgctcctcaataatgatgatgaaaaatggcttaataatagatcaaggtagaccaaatgatttaattacaaaacatggaagaaaaaatttggaggaagtttttttaaaacttgtaagaaattaaa

SEQ ID NO: 268515 - DNA, 363 bp, Unknown
  Bacterial polypeptide expressing nucleotide sequence isolated from the Sargasso Sea
aactcccaaaaaaatttaacactatcgtaggcgaatctggcattaaactatctggtggccaaaaacaaagaatctcaatagcaagagcttttttaaaaaatgccccaattatattattagacgaagcaacttccgcattagattctgaatctgagaaaaaaattcaacaagcattggataaacttataaaaggaaaaacaacaatcatcgttgcccatcgtctttcaacaattgttgaggcagaccagataataacaatccatgagggtaagattattgaaaaaggaacacatgattcccttattaataaaggaggtatgtattcgaaactttataatgaaaatataattaagaatacataaa

SEQ ID NO: 268516 - DNA, 808 bp, Unknown
  Bacterial polypeptide expressing nucleotide sequence isolated from the Sargasso Sea
gcaacccaaccggtcatcgccgcgccggctgagccgcggagaatacctgaaccgtcgcgtggtgaggtggtattctccaacgttacctttcgttatccagctcaggatgcgctatccgcgttgaccgggttcgacctttctgtctcctcgggagaacgtgtcgcgctcgtcggcccgtcaggtgccggtaaaactacggtatttcagctgctgctgcggttctacgatccgagttcaggccgggtcttgctcgacggtgttgatctccgcaaaaccgatcccgtcggtgtccgccgtcacattgggctggtatcgcaggaacccacgatcttttccgcgagtgcgatggagaacatccgttacggtcgcatagaagccagcgacgcagaaatacgcgcggcggccgaagccgcagcggcaacggcttttatcgaacgtttgccagaaggcttcgatacgcatctgggcgagaaaggtgtcaggctgtctggcggcgaaaggcagcgtatcgcgattgcacgggcgatcctccgcgatcccgcggttcttctgttggacgaggcgacaagtgcgctcgattccgaatcggagcatctggttcaggcggcgctggagaaggtcatggcagagcggaccagtgtcgtcatagcgcaccgtttgtcgacgatcagaagcgcggatcgcattatcgtactcgacggtggtgcgattgtcgcgcagggaacgcatgatgcgctgatcgcggaagggggcctttacgcccgtctcgcggaacgccagttcaatctcagcgctgatccagcctgag

SEQ ID NO: 268517 - DNA, 205 bp, Unknown
  Bacterial polypeptide expressing nucleotide sequence isolated from the Sargasso Sea
aggcatttaaatattcaaatttggaaatatcttcttgaatcatatgctagcgaacaggctgctagaatgtttgcaatggataatgcaacaacaaatgcgggagatatgattaaaaatttaactttagaattcaataaagctcgtcaagccgccatcacaaccgagatgcttgaaattgtcagtggtgctgaagctttgaaataaa

SEQ ID NO: 268518 - DNA, 945 bp, Unknown
  Bacterial polypeptide expressing nucleotide sequence isolated from the Sargasso Sea
aacaatgcctatattcaagaaggtaatataaatttaattgataaaaaaaataatcaagtaaatattttaaaacttactgatgataaacataacttgataagaggaaatgatatttcaatggttttccaagaaccaatgacatgtcttaatccaactatgactattggtgatcaaatagttgaggttattttaaatcacaaaaaaatctctaaaaccaaagcagttaaagaaatgattgatttattgggtctagttgaaatacctgatccaactcaaagagctagggagtatccacatcaactctctggtggaatgagacaaagagtaatgatttcaattgctctagcatgtactcctaaactcataattgctgatgagcctacatctgcattagatgtcaccattcaagctcagttattacaattattaatgaagttaaaaaattcaattgtatctaaaactagtattttatttattacacatgaccttggtattgttcgggaattagctgatagagttattgttatgtatcatggtgaaattgtggaagagggtcaagttaaagaagtatttgataatcctaaacattcgtacactagaaatcttattcaatcattacccgaatttaaattggaagaacgcaaattaaataaaaaagatgataataaaccaactaaagttgatgataatgaaataatactaaaaatagaaaatttatttaaagagttccctgtagaaaaaggtttttttaaagaatcaaatgaaactgtaaaagctgttcagaatatttcattgaatgtaaagaaaaatgaagttttaggtttagttggagaatcaggttcaggtaaatcaactttaggtaaatctataattaaattattacaaccttctagaggtcaaatttattttaataatgaaaatatttcagaatattcaaataaacaa

SEQ ID NO: 268519 - DNA, 308 bp, Unknown
  Bacterial polypeptide expressing nucleotide sequence isolated from the Sargasso Sea
cctgctcgaactcgatgacctctgcctcgcctacgacacgccgcacggccgccgcaccgtggtcgacgggctgagcctcgcgctgccgcgcggcgacatcggctgcctgctcggcgcatccggctgcggcaagaccaccgtgctgcgcgcgatcgccggcttcgagccggtgcggatggggcgcatcgtgctggacggcgtgcccgtcgcggcgccgtcgctcgacgtgccgcccgagcggcggcgcatcggcatgatgttccaggactacgcgctgttcccgcacctgagcgcggcggacaacgtcg

SEQ ID NO: 268520 - DNA, 730 bp, Unknown
  Bacterial polypeptide expressing nucleotide sequence isolated from the Sargasso Sea
tatgtctgaaccagtaattaaatgtgaagctgtttataaaatttttggagaaaatgctaaaaaaatgcttcaagattcaaatggcaatgtagacgcaaaaacttttcaagaaaatggatgcatagtgggtgttaacaatgcttcatttgaagtttcaaagggagaaatgttagttgtaatggggttgtctggatcaggtaaatcaactttgctaagatgtatttctagattaactgatgcaacaggaggaaaaatttttatagaaggtcaagatttacttcaattgaacaataaagaattgatagagcttagaagaaataaaatgggaatggtttttcagagttttgctctacttccacacaaaacagttgtagaaaatattgctttcccacttcaaattaagggaattaaaactgaagacagtataagtaaagcgatggatatggttaaacttgttggtcttgatggaagagaaaattattttccaagagaactatctggaggtcaacaacaaagagttggtattgcgagatcattagcagtagagccagatatttggtttttggatgaacctttttctgcattagatccattaattagaaaagaaatgcaggatgagtttttaagacttcaagataaattacaaaaaacaattatgtttattacacatgattttgatgaggctctaaaacttgctgatcgtattgccattatgaaagatggaataatt

SEQ ID NO: 268521 - DNA, 292 bp, Unknown
  Bacterial polypeptide expressing nucleotide sequence isolated from the Sargasso Sea
atgaaatccagttcgttaaatatatctataaaagacgtaaccaagacttatggaaatttttatgcacttaagaatattaatcttgaggtaacgtcgggggagttcttaacgttgcttggaccatctggttccggaaaaacaactttattgatggttcttgcggggttcactagcccagattacggcagtgtaaagtttggtgaagaggaagtagtactaaaaccgccccacttacgagatattggcatggttttccagaattatgcccttttcccacatatgaatgtagaac

SEQ ID NO: 268522 - DNA, 714 bp, Unknown
  Bacterial polypeptide expressing nucleotide sequence isolated from the Sargasso Sea
gatgagccccccgcgcctcgccatcgacaatctgtccgtgcgcatcggtgacaccaacgccgttcgtgacgtcagcctgtcgatcgcgccggggcaaatcttcggtgtcgctggtgaatctggctccggcaagtcgatgacggcgcttgcggtgatgggactgcttccggacggcgcgcttcgtggcggcgcggcgcggcttgacggcgaggatctgttcgcgctggacgaggcggcgatgtgcggcattcgtgggcggcgcatcgggatgatttttcaggagccgatgacggcgctgaacccggttcgcacgatcggcgcacaggtcgccgaaacgctggtggtccacgccaggacgagcctttccgaagcgcgcgagatcgccgctgccaagctcgaccgcgtcggtcttcccgccgcacgatacgggctggaccgctatccgcatgaattgtccggcggccagcgccagcgggtgatgatcgcgcatgccatcgcgctgcaaccggcgctgctgatcgccgacgagccaacgacagcgctggatgtgacgacacaggcaagcatcctcgatctgatgggcgggctggtcgaggacggcgacatgtcgctgatgctgatcacgcatgatctggcggtgctggccgagctcagcagccggatcgcggtgatgcagcaggggcttgtcgttgagacggccgataccgagaccct

SEQ ID NO: 268523 - DNA, 788 bp, Unknown
  Bacterial polypeptide expressing nucleotide sequence isolated from the Sargasso Sea
taaaattctatcaggagtcatcattcctgaagaaggaaaaatttatttaaatgaaaataatctaaagcttaattccccattagatgcaaaaaaaaacgatattggaatggtatttcagcattttaaccttttcgaaactttgtctgtatttgaaaacttaataatagactcagatgaaaaaagagaaggtttaagagaaaaaatagatacaattatgaaaaaatacaatttttcaattgatcttgatattcctgttctaaatttatcagcaggccaaaaacagaaagtagaaatcataagatgtctgataaggaacccaaaagttttaattatggatgaaccaacatctgtattaacagaacaagaaacaagtgaattgttcttatctttgaaacaattttctgaagaaggaattttaattatttatataacccataaattgaaggaagttatgcggctttgtgatgaagttgctgttatgagaagaggaaaattagtttctataagccaagtcaaggatgaaaatatagagtcactcgctaacaaaatggtaggtcaaaatttaaaaactataaagaaaataaaagaaaaaacttcatcagaacaactcataaaaattacaaatcttaactttataagcgaggatccttttgaaacaaatttaagtgatattaatttttctgttaatcggggtgaatgtttgggaattgctggaatatcgggaaatggtcaaagcgaattatttcaggtattagcggtgaaattatatctgataagaattctataga

SEQ ID NO: 268524 - DNA, 901 bp, Unknown
  Bacterial polypeptide expressing nucleotide sequence isolated from the Sargasso Sea
caatcttgaaggggaaccttcaaaaattattactgtagctggagaaagtggaagtggaaaaacaaccttagcatcgataatgcttggccttattcaaccttccacaggtagtgtaaggtatatgggaatggacatccaaaatctcaactcgagtgagtacaaggaattccgtaaaaatgtccaggcagtttttcaagatccttttgcggtgttcaatcccttttacccggttgaccatctccttgaagtaccgatcagaaaattcaacaagagattaacaaaaaccaagcgcaaaagtatgatggaggaagctttggaagctgtggggctgcaaccacgtgaaatccttggtagataccctcatcaactcagtggaggacaacgccaacgaataaatgtagcaagagccatagtgattaaaccccagattttaattgctgatgagcctgtttcaatggtcgatgcttccttgcgggcaaatatacttgaagcacttgtttcattgaaagtcaattacaaggtcaacatcctttacattactcatgacctaacgactgcatatcatgtttcagattcaatcattgtgctttaccgaggaagcgtgatggaggctggatcgatcattccagtaattgagactccacaacatccttacacacaacttcttattaactccatcccatggcctgatttaagcagaaaatgggacaacaaaacttatgagaatccaaatattgaggaaattggagaaaagggttgctctttttatagcaggtgccccgagaggattgactcctgcctcaaagccccaaagttgatatctctgaaacagggacatttagctagctgccatttatatcaaaacaagggttcggaaagtcatctcacaaaccatatttag

SEQ ID NO: 268525 - DNA, 304 bp, Unknown
  Bacterial polypeptide expressing nucleotide sequence isolated from the Sargasso Sea
gatgtcaaagaataaagagttcgttaaatttgaaaaagtagataaaagttacgatggaaaagttttagtagtcaaagacttaaatttagatatctcagaaggtgaatttattactatgcttggtccatccggctccggtaaaactacatgtctcatgatgttggctggatttgaaacgccaactaacggtgaaatctatttagacaaaaaccctatatcaaatattcctccacacaaaagaggaataggtatggtgtttcaaaactatgcattatttccacatatgacagtttatgaaaatttg

SEQ ID NO: 268526 - DNA, 865 bp, Unknown
  Bacterial polypeptide expressing nucleotide sequence isolated from the Sargasso Sea
ttcctgtttggaaagaatgtagcgatggtgtatcagcaatttataaattatccgcatttaaatgtcagagataacgtcgctttcccactaaaacaaaggaaaatggatgaaaatctaattgaaaaagaagttcaagaagcaatggaaaaagttggtttaatcggttttgagtcaagaaaaattcaagaactatctggtggacaacaacaaagagtagctctcgcaaggtctttagcaaaaaaagctaaaatacttttattagacgaacctctcgtgaaccttgattacaaattgagagaaggccttagagaggaatttaaaaaactttttaatgtatctgacgagtcaaactcaattttaatctatgctagcacagatcctttggaggctatgcaactcaacggcgatattattgtaattgatgaaggtaaaattcttcagacaggtacagctaaagatgtatttgaaaatcctgcaactgctaaagttgctgaaattactaatgaccctgcaatgaatatcaataattgtcttatacaagataattctttgattatgaatgatagcgttcaaatccaaatccctgatgaactcaagtctgtacctaacggaaagtatttagtaggcattagagccacagatatatatcttgatgatcaaggttttgcttttgatgtagaaatttctgaaatatcaggttcagagacttttcttcacttacgtaataaaaatttaaaatgtgttgccacaattgaagaagtaaaaacatataacacaaatgaggttgtaaaaattaattttgataaatcaaaaatttatttgtttgaggagtcaggggatctccgacactctccctatcaataat

SEQ ID NO: 268527 - DNA, 676 bp, Unknown
  Bacterial polypeptide expressing nucleotide sequence isolated from the Sargasso Sea
gatgaataaatttcaattattagatgatggtttagtaataaataaaatttctaaatcttatggtaataaaaaagttgtaagagatattagtttaacaattaacagaggtgagatcgttggactgcttggtccaaacggtgcaggaaaaactacaacattttatatgattgttggtttggtaaagccagacacaggatcaattttgctagacaaaattgaaatttctaaattgcctatttatacacggggattgcaaggaattagttatttgccacaagagccatctgtttttaggggtatgaatgttgaagataacttgctttctataattgaaatagtggaaaaagataaaaataaacacgacataattttacaaagcttattgaatgagtttgatataagtcatgttaggaaatctaaatcaatagtcctttctggaggagaaagaagaagactagaaattgcaagaaccttagcttctagccctaagtatcttctacttgatgaaccattgactggaattgatccagtttcaattgaagagatcaaaataattatcagaaaactaaagcaaaaaaatataggtgttttaattacagatcataatgtaagggagacactcaaaattgttgacagagtatatattgtaaatgaaggaatgatttattttagtgga

SEQ ID NO: 268528 - DNA, 186 bp, Unknown
  Bacterial polypeptide expressing nucleotide sequence isolated from the Sargasso Sea
tttggaaatatcttttagagtcatatgcaagtgagcaggctgccagaatgttggcaatggaaaatgccacaacaaatgctggagatatgataaaaaatttaacactagaatttaacaaagctcgtcaagctgcaattacaactgagatgcttgaaattgttagtggtgctgaggctttgaaataaa

SEQ ID NO: 268529 - DNA, 541 bp, Unknown
  Bacterial polypeptide expressing nucleotide sequence isolated from the Sargasso Sea
aatgaacctaaatatttataatgtatccctttcaattaaaggaagattaatcgtagatgatgtttccataactgttaatccaggggaagttgtaggtttgatgggacctaatggtgctgggaaaactacaacttttaatcttgcagttgggaatataaaaccagataaaggtaaaattttaatgaatgggaaaaatattacaaatcttcctctaccaattagatcaagacttgggttagggtacttaactcaggaagcgagtatatttagagaccttactgttaaggataatatagatttggctttacaaaattcatcttatagtagcgcagctataagaaatagaagagaacaattaattaatgaatttaatttgaataattttgtagataattatggttatcaactttcaggaggagagaggaggaggtgtgaaatagctagggctctcactgtaggcagaaaaggacctaaatatttattattagacgaaccttttgctgggattgatcctctagctgttaatgatctaaagaaacta

SEQ ID NO: 268530 - DNA, 790 bp, Unknown
  Bacterial polypeptide expressing nucleotide sequence isolated from the Sargasso Sea
atggagaacagtttaaatgaaaaaccattaaatgctcctcataatttactagttgatatacgtgaaaaaaaatatgaaaataagaataattctagtcacaatagtgctataaaaggtatgcaatttgatgttccacaaggacaattctgttgtttagttggaccatctggctgtggaaaaaccactttattaaatttattatctggtcttgatgagaatttaaatggatcaattaaatatcaagataattcaattcctaaggattggcctattggatatatgtttcaagaaccaagattgatgccttggcttacagtaagacaaaatgtaacaattgtaactcaacaaactcctgaagaaaataaattaagtgaatctcttattaatgaaatggggcttaataaatatatgaattcattcccttctgaattatctggaggaatgcaaagaagggttgctatagctagagcatttgtaaataaacctaaaattcttcttctagatgaaccttttatttctttggatgaaacagtaggaaacttactcagacaaatgctattaaaactatgggaaaatcaaaaaactacagtaatatttgtaacccacgatttaagagaagcaatttatatgagtgaccgaatacttttcctgtcaaagggaccatcaaaagtaattcatgattttaaaataaatgttagtaggcctagagaattaagcgataaaaaattagatatcttaagaaccgaattaattagtaaccacccagatatattgtctggcaagatataaa

SEQ ID NO: 268531 - DNA, 289 bp, Unknown
  Bacterial polypeptide expressing nucleotide sequence isolated from the Sargasso Sea
tgcaatagcagagcattatgcatgggagcccaaaataatgctgtttgatgaaccaacatcagcacttgatccagaaatgatcaaagaagttttggatgctatggttaatttagcaaaggcaggaatgacaatgattgtagttactcatgagatgggatttgctaaagaggttgcggatgaggttatttttatggatgaaggaatgatagttgaaagggcagaaactaaagagttttttgctaacccaaagagcgatagaacaaagctctttttaagtcaaatcctataa

SEQ ID NO: 268532 - DNA, 364 bp, Unknown
  Bacterial polypeptide expressing nucleotide sequence isolated from the Sargasso Sea
tatggcatcaaaaaaagatttcgtaaaatttgataaagtcgataaaagctacgatggtaaagtcttagttgttaaagaccttcaattagatattgctgaaggagagtttataacaatgttgggaccttctggttctggtaaaacaacttgcttgatgatgttagcaggttttgaaactcctactaacggtgaaatttatttagatggtaaagcaatatccagtataccccctcacaaaagaggaattggaatggtgtttcaaaattatgcattattcccacacatgaccgtttatgaaaatttagcttttcctttaagagtgagaaaaattccaaaagatgaagctgataaaaaaatgacaaag

SEQ ID NO: 268533 - DNA, 468 bp, Unknown
  Bacterial polypeptide expressing nucleotide sequence isolated from the Sargasso Sea
ttgaattaccaaagaaacttacagttaagcagaatctaattgtttatggaaaactgtattctgtcaaaaacttaaatagtagaatagattatttggtagaggaactgagattacaaaatttgcttgatagagcgactggagaattgtcttcagggcaaaaaaatagaataagcttagctaaagcaattatcaataatccatctgtcttattgctcgatgaacctacggcttcacttgatccagaaacgggagattttgtaagaacctttttagaaaattataaaaaagaaaaaaaggtatctatattattagcatcccacaacatggatgaagtaactagattgtgttcatcaataatgatgatgaaaaatggtttaataatagatcaaggtaaaccaaatgatttagttaaaaaacatggaagacaaaatctagaggaagtttttttaaaacttgtaaggaattaat

SEQ ID NO: 268534 - DNA, 650 bp, Unknown
  Bacterial polypeptide expressing nucleotide sequence isolated from the Sargasso Sea
aaggggtgaagtcactgcatttgttggagcttctggagctggtaaaagtacaatgttggctttgatattaaagtttataaatccaaataatggagacatttttatagatgataaaaatctcaaaatattaaatacaaaagatattagaaaaaacattgcattagtacaacaacagccttttttgttttcaggaacaattattgatgtaataaaaatgggcagaaatttcaccaatgaagaagtaatcgaatcagcaagaaaagcaaacgctcacaacttcattcaaaagcttcctgataaatatgaaactgagataactgagagaggatcaaatttctcaggtggtcagatccagaggatagcaattgcaagagcaatactcgggaacccctcaattcttcttttagatgaggctacaagtgcgttagatgcagaatcagaatctgaagtgcaaaaaggacttaatagagctatgaaagatagaacagttattgtaattgctcatagattagccactactcaagaggccaataaaatagttgttttcgataaaggtgaaattattgaagttgggaaacacattgatttaataaataaacctggaatttataaagaattatgtgaaaaacaattgattaaaatattatagt

SEQ ID NO: 268535 - DNA, 537 bp, Unknown
  Bacterial polypeptide expressing nucleotide sequence isolated from the Sargasso Sea
aatgcataattctataaaagtaattaatctaaaaaaaacttacggaacaaaagaagctgtaaaaaatataagctttgaaattaaggaaaatgagattattggtttacttggtccaaatggatctggaaaaactacaacaatcggaatgatattaggcttattaaaaccaacaagtggtgatgtattaattaatggattaaaaatagaggaaaaccaaatcaaaattcttcaaaagataaattttatctctccgtatatagaattaccaaaaaaattaactgtaaaacaaaatttaattgtatatggcaaactttactctgtaaaaaatttaaatgaaaaaatagattatttagttagcaaattaagattagagaatttacttagcagggttactggagaattgtcatcgggacaaaagaacagaataagtttagcaaaagcaataattaatgaccctaacgtattgctgcttgacgaacctacggcatctttagatccagaaataggagattttgtaagaacatttttagaaaatta

SEQ ID NO: 268536 - DNA, 672 bp, Unknown
  Bacterial polypeptide expressing nucleotide sequence isolated from the Sargasso Sea
tatgattgctgttgaagttaaagatcttactcattcgattaataataaaaaaattttaaataatattaattttaatctcaataaagatagtatctcttgtattttgggaccgtcaggtagtggaaaaactactttattaaagctcatagcaggtcttgaaaaagtacagtcaggtaaaattattattaatggtgaagaagtaagtagtactgcaaaacacttacctacagaaaaaagaaaaattggttttttatttcaagattacgctttattcccacatttgacagtaaaagaaaatttgagatttccaactaatgctaagaattcaactaataatgttgatgaaattattgaattaataaaattacctaattcactagataaatacccacacgagttaagtggtggtgaacaacaaagagttgcacttgcacgatctataatttcacaacccgatttacttttattagatgagcctttttcaagtttagatttaagccttcgagaagaggtgagagatgatacgctgcatctattacaaaaatcaaatgtgtctgtaattatagtcactcatgatcctttcgaagcaatgtttatctcaaatcatataaatatttttgataaatcaggttcgattgtacagtcaggaactccgaatgatctctataacaa

SEQ ID NO: 268537 - DNA, 931 bp, Unknown
  Bacterial polypeptide expressing nucleotide sequence isolated from the Sargasso Sea
ttctttaacaggtatattgactgttaaaagtttcaatagagaaggcagggagactgaaagaataactaagtcatctgaagaagttaaggcagcaaactaccatgcaataaaactttctgctgcatttattccaataattagaattgctattttatttggatttacagcaaccttgttaataggaggatttatggctttagatggtcaaataaaagtagctatgtattcagttctcctctttataactcaaagattactttggccattaacggaacttggtgatacttttgatttatatcaacgagctatggcatcatttaaaagaattactacgctaaaagataccaggccaacaataactaatggcaacagtgaattaaagaattttgaaaattctatagtattcaatgatgtaaatttttcttacgttgaggggttttctgttttaaataatgtttcagtagaaattaataaaggccaaacagtagcgattgttggaagcacaggttccggcaaatcgacaatgattaagcttattttaagactttatgatgtgactgaaggagatataaaatttgacaatataaacataaaagatttagaccttacaagcctaagaagcaatattgcgttggttagccaggatatatttctttttgaaggatctgtatttgaaaatattgcatatggaaatctagatgcatctgaagatgaaatctgggaagctgcaaggctatccgagtctgatgattttataaatcaacttccaaataaagaacatacaattgttggagaaagaggacaaaaactttcaggaggtcaacgacaaaggatatctattgcaagagccattttaaagaatcctgaaatattaattttagatgaagctacctcagcagttgataagaaacagaagctgcaatccagcgtt

SEQ ID NO: 268538 - DNA, 417 bp, Unknown
  Bacterial polypeptide expressing nucleotide sequence isolated from the Sargasso Sea
aatggctactttagtcgctgaaaatttaacctttgcatacgcaaaaaaaagtaagccagttttgaataaggtatcggttgagattaaacctggaactctaacagcgttagttggcccaaatggcgcaggtaaatcaactcttttgagaattttgcaaggacaaaatactccagataaaggcgaaataaaaattgatggtgaaaatttatatagatctagagctcttgtggcacttatgcctcaaagaagttctatgaattggaagttccccattacagttgaaaaattggtatctcttggtcaaataaagtattcaaaatcaagaagtaataacccatttcaaattaagactcttctagcatatcctaattcttggattaataaatgttgtgaattagaggcgacaatgcagagagt

SEQ ID NO: 268539 - DNA, 496 bp, Unknown
  Bacterial polypeptide expressing nucleotide sequence isolated from the Sargasso Sea
atggcaactttagaattaaaacaagtaagaaaaaattatggaaacttggaagtaattcacggcattgatttatttattaataatggagagttttgtgtattagtaggaccatcagggtgtggcaaatctacattattaagaatgattgctggattagaacagattacaaagggtgatattttaatcgatgaacaagtagtaaataatatttctgcagcaaaaagaggtttagcaatggtttttcaatcctatgctttgtatcctcatatgagtgttagacaaaatttagcttttggactggaaaacttaaaaatggaagtagatgaaattgataaacgtattttagaagctgcaagactacttagaatggaagaatatttacagagaaaaccaggccaattatctggtggccaaaaacaacgagttgcaattggcagagcaattgtaagagaaccatcaatatacttatttgatgaaccactttctaatttagatg

SEQ ID NO: 268540 - DNA, 224 bp, Unknown
  Bacterial polypeptide expressing nucleotide sequence isolated from the Sargasso Sea
aatggctactttagttgctgaaaatttaacctttgcatacacaaaaaaaagtaagccagctttgaataaggtatcggttgagattaaacctggaactctaacagcattagttggcccaaacggcgctggtaaatcaactcttttgagaatattgcaaggacaaaatactccagataaaggcgaaataaaaattgacggtgaaaatttatatagatctagagctc

SEQ ID NO: 268541 - DNA, 430 bp, Unknown
  Bacterial polypeptide expressing nucleotide sequence isolated from the Sargasso Sea
tatggcttttttaaaatttgaagatattgataaatcctttggtgaaaacaatgtaattagtaaatttaacttagaggttgaaaaagggaaatttatagtattgttaggtccatctggttgcggaaaatctacactactcagaatgatagctgggttagaaaaaatagataatggaaaaatacttttagaagacaatctcttaaatgatttactaccctcaaaaagacaaattgcgatggttttccaatcttacgcactatatcctcacatgagtgtttatgaaaatatttcttttggtcttaaatcagaaaaagtttcaaaaagtgagattaaagataaagtaattgaagctgcaaagatcttaaaaattgaagagcttttggacaaaaaaccaaaggaactttcagggggtcaaagacaaagagtgcaa

SEQ ID NO: 268542 - DNA, 860 bp, Unknown
  Bacterial polypeptide expressing nucleotide sequence isolated from the Sargasso Sea
gttgcaggagtggttggcgcgcaccctgccgtttgtgcactccgcccgggagcaacgcatcgccgaacgggtgcagcaggtggccaccatgctggatctggcccacctcctggaccgcttgcccaaggagctctccggcggtcagaagcagcgtgttgcccttggtcgtgccattgcccgcgagccagcggtgttcctgatggatgaaccgctcagcaaccttgacgccaagttgcgcggtgataccaggcgtcagatcgtcgaactgcagcgccagctggggatcaccaccctctatgtcacccacgatcaggtggaggcgatgaccatggggcaccgcatcgccgttctcaatgagggacggctgcagcagctgggcaccccgatggagctgtatgcccaccccgccaacctgttcgtggcgcaattcatcggctccccaccgatgaatctgttgcctgttgaggtggtctccgccgagcaggtgctgctggcgggcaagcgtgttgtggcggatgccgccttggctcctgtgctgcagggatacatcggcgagcagctcaccctggggctgcggcctgagcgtttgcggttggcgccggccaccaaccgcaatttgcccgctgaggtggtgcaggtggaagccctcggccatgaactgctggtcagctgccgtttgcaggacctcgaccaactggtgcagctgcgcggcggcgcagatctttcactgcagccctaccagcgctgccatctcgagcttgaaccgcaaggctggaccctgtttggcgccgatggggaggccctcaagccggctgagcccgcccaggcggcgccccatctgcccgtcctgccggcctgat

SEQ ID NO: 268543 - DNA, 684 bp, Unknown
  Bacterial polypeptide expressing nucleotide sequence isolated from the Sargasso Sea
acctgcaaaagggcgcacgccatgcgctcatcggccccaacggcgcgggcaagaccacgctgatcaacctgctgaccggtgtgctggagcccaccgaaggctccatcacgctcgaaggccaggacatcacgcgcctggcgccgcaccagcgcgtgcagcgcggcatggtgcgcaccttccagatcaaccagctgttcgacacgctcaccccgctcgaaaccttggcgctcaccgtgtcgcagcaccagggcctgggcggcaagtggtggcagccgctgggtgcgcgcaaagcggtcaatgagcgctgtgaacaactgctggagcagttccacctcacgtccgtgatggccgaggaaacgcgcgtgctggcctatggcaagcgccgcctgctggagatcgcgattgcgctggcctgcgagccgcgcgtgctgctgctcgacgaacccgtggccggtgtgcctgccggcgagcgtgaggaactgctgcagaccgtggcggccctgcccgccgatgtctcggtgctgttgatcgaacacgatatggacctggttttcagctttgccaaccgcatgacggtgctggtcaacggcaccgtgctcaccgagggcgaccccgacaccattgccaacgacccgcaggtgaaggcggtgtatctgggccatggggaggacgcccatgtctaag

SEQ ID NO: 268544 - DNA, 882 bp, Unknown
  Bacterial polypeptide expressing nucleotide sequence isolated from the Sargasso Sea
aaaaaaaatgaattaattaatgtgaaagacaatgtaaaaaaaacagatcctcctattttagaagtagaaaatttaaccacaagattttatatcaaatcaggattcgggtttaaaaaaggtaaagtgcatgcggttgagggagtaggtttgtcacttcaagaaggcgaaaccttgggcatagtaggtgaaagtgggtgtggaaaatcgacacttggaaaatctatagtccgattagtagagcctacttctggaaaaataaaaattagaggaaaagaaattatttcactatctaaaaatgaaatgttttcaattagaaaagatgttcaaatagtttttcaagacccctattcatcactcaatccaaggttaactgcaggtaaaatagtttctgaaggaatgcgcttacacaaagtttgtaaagaggaagaattacaagaaaggttaattaaaatttttgagagagttggtttaagtgaatttcaaataaataattatcctcacgaattttctggaggacaaagacagagaataggaatagcaagagcattatctttgagtccaaaaataattattgctgacgaagctgtttcagcattagacgtgtctatacaggcacaagttgtcaaccttatgatggaacttcaagaagagtatggtctttcttacttatttattagccatgatatggctgtgattgagagagtttgccatcgagttgctgttatgtatttaggagaaattgttgaacttggatcaagaggccaggtttttgaaaaccctcagcatccttatactaaaaaattaatgaaggctgtgccagtagctgatccaaatttaaggaaaagagaacttaatataatgactgatgaaattccaagtgca

SEQ ID NO: 268545 - DNA, 406 bp, Unknown
  Bacterial polypeptide expressing nucleotide sequence isolated from the Sargasso Sea
atgtttgctagtagaaaaggagaaattaaagaaagggcggaaaacctacttgaatttgtaggcctatattcaaagcgaaatcttatttcaggcgatctttctttcggacaacaaaaactacttgaatttgcgatggcattaatgaatgatcctaaagttttgcttcttgatgaacctactgctggaattaatccaacattaattaatggacttattgatagattgagaaaagccaatgaggaattaggcattaccctgtgtgttatagaacataacatgagagtaatcatgaacttagcttctcatatttattgtttagcaaatggtaaagttcttgccaatggctcacccagtgaacttcaaaaagatcaacgggttattgatgcttatttgggagggcattaga

SEQ ID NO: 268546 - DNA, 482 bp, Unknown
  Bacterial polypeptide expressing nucleotide sequence isolated from the Sargasso Sea
tatggccgtcggaaaagaaatacgtaaccagatcggaagcatcaagagcacgcagaagatcacgtctgccatggaaatggtagccgcgagcaagatgcgtaaggctcaggagcgtatgcaggcaacccgcccgtacgctgaaaagatgcgccaggtaatcggacacattgcgaagtccaacaaggattaccgccatccgttcatgcaggagcgcgaggtcaagcgggtaggctacattgtggtctcctctgatcgcggtctttgcggtggtctgaacaccaacgcgttcaagctgctcgtcagagaaatgcgtgaatggaaacaacaaggtattgagaccgatatctgcgctattggccagaagggtgcctccttcttccgcaactacggcgggaacgtggtggcagccgtgacgcacctgggcgatagcccgagtgcagatcagctgatcggtagcgtcaaggtgatgctggattcgttcg

SEQ ID NO: 268547 - DNA, 604 bp, Unknown
  Bacterial polypeptide expressing nucleotide sequence isolated from the Sargasso Sea
agaaatcttaaaatttttttatttgatgaacctttatcgaatttagatgctgccttaagatctgaaatgagagttgagatttcaaagttacataatcaaattaaaacaaatatgatttatgtcacacatgatcaagtagaggcaatgacacttgctgataggattgtgatattaaatcttggtaacattgaacaagttggaacaccagatgaaatatataacaatcctgctaatatatttgttgctcaatttataggaacaccaaaaatgaatattttacccttaaacaatgaaaatattgtttcagataataaaattaattttttaggtaatgaaataatttttgaaaaaattaaatttgataaaaaaaaatatttttttggaataagacctgagcattttaatttatcaaatagatcgcaatttaaaattaagcctaaaattgatttagttgagaatttaggaaatgagaagattgtttatatgagcaatgataatctagaactaagtgcaaaaatttcgagccaagaagattttcaaaatgaaataaattttgactcgaaagatatttttatatttgatgaagatggaaatagaatttagt

SEQ ID NO: 268548 - DNA, 609 bp, Unknown
  Bacterial polypeptide expressing nucleotide sequence isolated from the Sargasso Sea
catggaagcagctatacaaattcaaaatgtctggaaaatatttggtaatacatcacaagacgcattggatgcaatccaaaataaaaaaatttcaaaacaagaagcgctagagaaatataattctgtaattggtgtttcggatgtttcatttgatgtcaagaagggtgaaatattttgtgtaatgggtttgtctggaagtggaaaatcaacacttgttagacatataaatagattattagagcctacatctggaaaaatattaataaataatcaagatgtaatgcaatttgataaggacaaccttcaagaattaagaaacaaaaaaattggtatggtttttcaaaattttgcattaatgcctcacagatcagttttagataatatagctatgcctttagaaattagaggtgttagcaaaaatgataggttagatgctgcaaataacattttaaatattgtcgaattacaaggatggggaaataaatatgctcatgaattatccggaggtatgcagcaaagagtaggtttagctagagcattagcagcagatccagaatttcttttaatggatgaacctttcagtgctttagaccctttaattagacgaca

SEQ ID NO: 268549 - DNA, 692 bp, Unknown
  Bacterial polypeptide expressing nucleotide sequence isolated from the Sargasso Sea
tatgtcacaaattaaaatagttaatttacaaaaatcatttggtgattttactgcagtaaaaaattcaaacctaattattaatgataaagaattttttgttttactaggtccatctggttgtggaaaaacaacaacgttaagaatgattgctggattagaattaccaacttctggagaaatatatttaggagaagaagaagttggaatgttacgagcatcagagagagatatagcctttgtttttcaactatttgctctttatccacatatgaatgtaaggaacaatttgtcttttcctttaaaaatgcaaggctataaaaagagtgatatcaaaacaagagttgaagaggctgcaaaacttttaagaattgatcatattttaaactctaatatttcctctctttctggaggagacaggcagagggtagctttgggtagagcactagttagaagaccaaaagcttttttaatggatgaaccattaggtactttagatgcagagtttagagagcttatgtgtctagaactaaagaaactgcacatagatattggagcgactacagtttatgtgacacatgaccaattagaggcaatgtctctagcagatcgtattgcagtgatggataatggtcaaattttgcaagctgatgaacctgatgtaatatacaataagcccaaaactaagtttgtag

SEQ ID NO: 268550 - DNA, 584 bp, Unknown
  Bacterial polypeptide expressing nucleotide sequence isolated from the Sargasso Sea
tcttatattaagactgtatgacgcgacttctggtgcaatttgcctagatggtgttgatataagagagtttgatcccgttgagctgagaaatctcttcgcacttgtttctcaacagcctgcaatttttactggaaatgtctctgaaaacattcgctatggaaaccctcatgcatgcgagcaatcggtgaaaaaagcggctatttcggcttttgcagataattttattgaagaattaccagaaaagtacgaaacctttctaggagagtcaggagtcaggctatctggaggtcagaaacaacgtatagcgatatctcgagcagtattaaaagaccctaagatattacttttagatgaagcgaccagtgcactagacgctgaaagtgaaagacaagtgcagatagctttggatgagttgatgaaaaatcgaactgctctgataattgcccaccgtttagcgacagttaaaaatgttgatcgaataattgtgatggataaagggactgtggtagcgcaaggaacccatgatcaactaataaaatctaaccaactttattcgaatttggctagattacaattttcttaat

SEQ ID NO: 268551 - DNA, 520 bp, Unknown
  Bacterial polypeptide expressing nucleotide sequence isolated from the Sargasso Sea
aatgaaatcgttacttgagatcaaaaatctaagtattacctttgagtttaatgaccagacggttaatgccgtacgagacagtagttttaaaattaacaaaggtgaatgtctagctattgtaggtgaaagtggatctggaaaatcagttaccgctttatcaataatgagattaataaggtcaaactcgcaacttaaaatcaccggaagtgcaacctatgaaaaaaaaaaccttttaaattcagatgagttaaatttacaaaatataagagggaaaaaaatctcaatgatttttcaagaacctatgacgtctctaaatcctcttcataatattgaaaaacaaattacagagtgctttgaattaaaccagaagtcaaataaatcaaagtgtatagaattacttaaagaagttggtatagaaaaccctgagcaaagactcactcacttcccacatcaattatcaggcggacaaagacaaagaattatgattgcaatggcaatagctaacaatcctgattgctaa

SEQ ID NO: 268552 - DNA, 724 bp, Unknown
  Bacterial polypeptide expressing nucleotide sequence isolated from the Sargasso Sea
aatgcaaaattctataaaagtcatcaatctaaaaaagtcttatggaacaaaagaagctgtaaaaaatataagctttgagattaaagaaaatgaaattataggcttactgggtccaaatggatcaggaaaaactacaaccatcggtatgatattgggtttattaaaacccacaagtggcgaagtattaattaatgggataaaaatagaaaaaaatccaatagaaattttacaaaatataaattttatctctccatacattgaattgccaaaaaaattaaccgtaaaacaaaatttagttgtatatggtaagctttactcagtaaaaaatttaaatgaaaaaatagattatttggttagcaaattaagattggaaaatttgcttaatagagttactggggagttgtcatctggacaaaaaaataggataagtttagcaaaagcaataattaatgaccctagcgtcttgttgcttgatgagcccacagcatctttagatccagagataggagattttgttagaacatttttggagaattataaaaaagaaaaaaaagtatcaattttattagcttctcataacatggatgaggttactagattatgctcatcaataatgatgatgaaaaatggtttaataattgaccaaggtaaaccagatgatttaattaaaaaacatggaagaaaaaatttagaggaagtttttttaaaacttgtaaggagttaa

SEQ ID NO: 268553 - DNA, 379 bp, Unknown
  Bacterial polypeptide expressing nucleotide sequence isolated from the Sargasso Sea
ttgcagccacaaagccgattcattggggttaccggtccatcaggtgcgggaaaaagcagcttgtttcgcgccctagctggcgtagaaaaaagcgcagatgtgcaaacgccgtggacctctcaaaaggtcggcatcgtttttcagcagcccatgctatttccccataccgatgtgcgcggtaatttagcccttgcgcagcgtcacacaagccctaatgcaatgtctatcgatgtgtgtttgcgcggctgttattgcgaacatttaatcgataagccagttcaagcgctttctggcggagaagcgcagcgggtcgcgattgcacgggcgttggtcaatgggccagatgtgttattgctagatgaatcgttaagcgcaattg

SEQ ID NO: 268554 - DNA, 420 bp, Unknown
  Bacterial polypeptide expressing nucleotide sequence isolated from the Sargasso Sea
gatgatctcaattaagaacctatctaaaaccttcaacaaaaatattcacgctgtccaaaacgttgatctggagatagctgaaggtgaagtggtcgtgattgttggccccagcggttcaggcaaatcaacagttcttaggtgtattaacaggcttgaaatcccaactgaaggatcaatagctatcgatggagtcgaattgacggacccagaatgtgatattgacacaattagagctgaagtgggcatggtatttcaacaattcaacttattccctcatttaacggtgatggaaaatatctgtttagctcaacgaaaagtaagaggacgtagcaaaagtgaagctaatgaaatgaccatgaaacaactcctaagagtagggattcccgataaggcggattcatatccgcgtcaactatcagg

SEQ ID NO: 268555 - DNA, 550 bp, Unknown
  Bacterial polypeptide expressing nucleotide sequence isolated from the Sargasso Sea
tatgaaaaacttattggaaatcaaatcattgaatacatattatggcgaaagtcatattctcagggatgtagatttaaatgttcaatcaggagaaatggtttgtttgattggaagaaatggagttggcaaaacaacattattgagatcaattattggtttgttaaggcaaaaaaaaggcgatatttatttgattggcgaaaatattaatagaaaagcacctcatcagagggcgaggaaaggaatggcttatgttcctcaagggagagaaattattccatacctatcagttgaagagaatcttatgttaggaatggagtcgctgccaggtggattatcgaagaacaagaaaatagatccatatatttatgatctcttcccaatcctaaaagattttctacaaaggaaagggggagatctcagtggaggacaacaacagcaactagctattgcaagagcattgctaggaaagcctaaattactattacttgacgaacctacggaaggtattcagccaaaatatagttttagccatagaaaatgcaatcaatca

SEQ ID NO: 268556 - DNA, 933 bp, Unknown
  Bacterial polypeptide expressing nucleotide sequence isolated from the Sargasso Sea
gaagctcgccctcgcgcgtgccatcttgatgaaggctgacatcctcttgctcgatgagccgacgaaccacttggacgtcaagaatgtcgcctggttggaagaatacctctgctcccaaacgcaagtgtcttccatgattgtgtcccacgattccggtttcttggatcgcgtctgtacgcacatcattcactacgaaaaccgcaagttggtgacgtacagaggtaacctcaccgagttcatcaagcagtgcccggcggccaagaagtacaccgaactctctaacgatgaactcaagttcattttcccggtcccgggtttcctcgaaggtgtcaagaacaaggacaaggccatcgtcaaggctacccgctgctggttcaagtacccgaacacgacgcgtcaaatcatccaagacgccaccattcagctctctttgagctctcgcgtcgcgtgcctcggccctaacggtgccggtaagtctacgttcatcaagcttctcaccggtgaagccgaaccggaccaaggtaccgtctggcgtcacccgaacatgcgttatgcgtacgttgcccagcacgccttccaccacgtcgagcagcacttggacaagacgccgaacgagtacatccgctggcgtttctccacgggcgaagacaaggaaaacttgaccaaggtgaccgcccaatacactgaagaggaagagcgcttgatgaaggaaaagattccggtcccgcaagaggatggctccatcttgaagctcgtcgtcgagaagattatctctcgtcgccaaaagaagtccaagtatgagtacgaaatccaatggaagggactctccatggactccaactcttggatggaacgcgagaaactcgaaaagttcggtttcaccaagtacctcaaccgtgtcgatgagcgcgaagccgctcgtgccggtctcta

SEQ ID NO: 268557 - DNA, 721 bp, Unknown
  Bacterial polypeptide expressing nucleotide sequence isolated from the Sargasso Sea
atgcttgaagtagagggtctcgcaacttcttatgggttgataaaagcgctccgaaatgtttctcttcaggcagaaaaaggcaagcttacttgtatattgggacccaacggtgccggtaaaagtacactcttatttacaattgcaggaattttgaagagtgataaaggtacaattaaatttctgaacaaagaaatttcaaaaatcaagacttcagaaatagttaaagaaggattagttttggttcctgaaaataggcttgtatttcctcatctttcggtaagtgagaacttgcttgcaggtgcctatagtagatttggtaaaaaaaatgaagttgaggaagatttggaggctatgtataaaagatttcctatccttaaagagagatatttacaagaagctggaactctatcaggaggagaacaacaaatgctcgcggtagcaagagcgcttatggcaaggcccaaactacttcttatggatgagccgtcggtaggccttgctcctaaaattgtcaacactatttttgaaataatcaagacacttagtgaagaaggtatatcaatagttttagttgaacaaaatgcggttaaggcatctgcaatagccgatcacatctatctacttgatcagggtgaaataactttttctggaacgcgtgaccagattgaagataatgatattataaaacgagcttacctaggagatatttcagaaagttagt

SEQ ID NO: 268558 - DNA, 405 bp, Unknown
  Bacterial polypeptide expressing nucleotide sequence isolated from the Sargasso Sea
gatggataataattttcttgtaattgaaaatatttctaaatcctttggagataacaaagttttagaaaatattaatttaaatatttcaaaatctgaattttttggtctcttaggatcttcgggttcaggcaaaactaccttactaagaatactaggtggatttgagaagccagatacaggacgtgtaatactcgacggaacggacataacaaatcttgagccttttgaaagaccattaaattatatgtttcaatcgtatgctctatttcctcacttaaacgtatttaataatttagcttttggaataaaagaaaattttactcgaaaagaaattgaaataaccgtaagaaatattgccgaacttttatctattgaacatttattaaatagaagaattaagcaatt

SEQ ID NO: 268559 - DNA, 636 bp, Unknown
  Bacterial polypeptide expressing nucleotide sequence isolated from the Sargasso Sea
ttcgagatcccgcagtgtttatccttgatgaagtgatgagtcatttggatgcccatttgaaatttcagatgctttttgaattaaaaaaaatacatcagactttgaaaaaaaccatgatctatgtgactcatgatcagatggaagctcttgctttatcagaccgggtcgcagtcatggcaaatgccgttttgcaacaatttggtgacaggaatgatctttaccatagaccgaagaatttatttgtagcagattttattggtgaaccggcaaccaattttatgaaagcacagtattctcaaaactctacaatgaatatttcaggagatcttcaattctctctgacaaatgagatttcaagtgaaatggaaagaaagcaaatgagtgaggcggttttaggaataaggcctcaaaacttaagtttggatcctatagaaggtgaagattacatccaaggagagttggtgatcaatgagtttttgggggaaagaagtattttggaaattaagtccggagaaacctcatttaaggtgctgacagatccacagaaaaatattaaaaagggagactcccttaagatttattataaaaaagagaatgtaatgatttttcatcctgagacggaggatattatttaaa

SEQ ID NO: 268560 - DNA, 634 bp, Unknown
  Bacterial polypeptide expressing nucleotide sequence isolated from the Sargasso Sea
catgctgcttgggccaaatggcgcaggcaaaagtaccttatttgcgcttattacgggccttcaaaaactcacgcaaggcagcattacctttgatggtgctacactgtctcaatctcgcacaagtattatggcgaaaatgggcgtggtatttcagcaaagtaccttagatatcgacctgtcggtaaaacaaaatttgtcctactttgcttcgctccacggcataactaccacttgcgcgctatctcatattcatggcctgctcgacgagctcgatcttacgagtaagctcaacacaaaaattcgcaacttaaatggcgggcacagacgtcgggtcgagttagctcggtgccttattcacaagccatccttgctgctactagacgagcctaccgttggcttagatatagaatcccgtcaccttattttgcgggtagtacaagcactcgctcattcccaaaacgtaagtgtactgtgggccacgcatttattcgaagaagtgaagcacaacaacaacttgatagtcttatcaaaagggcgagtgttagcccacgaccaatgtgaagcgttgttagccaagtataatcaacaagatattgagcacctttggcagcatttgatgcaggaagactcctga

SEQ ID NO: 268561 - DNA, 1083 bp, Unknown
  Bacterial polypeptide expressing nucleotide sequence isolated from the Sargasso Sea
taagcaagatttgttatctttaagaggcaatataatttcaatggtttttcaagagccaatgacttcattaaatccttatcacaaggttggcaatcaaattacagagtcagtgttgcttcattctaaagtctccaaaaaagaggctaaagatgaggcattaaacttaatgaagcttgttgaaattgacgatgttgaaagaagatttaattcatatcctcacgagctttctggcggtcaaagacaaagaattatgatagccatggccttagtcaataagccaaagcttctaattgcagatgagccaacaactgctcttgatgtaaccattcaggcgcaaatacttgacctcatgtcaaagcttaaagaagaacttggaatgtctattttgtttataacgcatgatcttggccttgtaagagagttttctgatcaagtatgcgtcatgcaaaatggacatattgttgaaaagggaaatactgatgatgtatttaaaaatcctgaacattcatacactcaaaaacttcttaatgctgagcctcagccaaaattagatattaatactgaagaaattcctttaataaagattgaaaatgtagatgtcttttatgatatgccaagcataaatttttttaataagaatcgtttccatgctgttaaaaatgcatctttaaatatatacaaaaatactacaattggtgtggtgggggagtctggctctggcaaatcaaccctaggtaaggcaatagcaaatcttattaaatatgagggcgatattctttatgatggtaagaatatcaggcattcctcaaaagaaataaaaaagcatatacaaattgtttttcaggatccatatggctctttgtcacccagaatgactgttggagaaattgttggagagggactgggggtccactttaatttgactaaattagagacacaaaaaagaattgataaggttttagatgatgtaggaatagaaatagatgcaaaaaacaaatatccacatgaattttcaggaggtcaacgtcaaagaattgcaattgcaagatcattaataatgaatcctgcatttatgattctaga

SEQ ID NO: 268562 - DNA, 721 bp, Unknown
  Bacterial polypeptide expressing nucleotide sequence isolated from the Sargasso Sea
aatgaatttaattgggaaaaatataacttacaaaccagatgaccaatttcacttaaatgatgtatcttttaatttcaaaaaaggaaacttgtatacaatcttaggaagaactttatcaggaaaaactacatttttaaaaacaattgctggtttacttaatcctgatagtgggaatttatcttttgaggataaagattttagcaaaataccagtttgggaaagaaatgtagctatggtttaccagcaatttataaattatccacatcttaatgtttatgagaacatagttttcccgcttaaacaaaggaaactaagtgaggagaaaattaagaccgatgcagatgaagctattaagactgtagggttagttggctttgaaaaccgtaaaattcaagaactatctggaggtcaacaacaaagagtggccctggcaaggtctttagccaagaatgcaaagatactattacttgatgaaccattggttaatttagattacaagcttcgagagcaattaagggaagaatttaaaagaatttttactaaaggattttcacaagaaacaatattaatctattcaactacagatccacaagaggttatggagcttaacggagaagtaattgtcttagatgaaggaaaagttttacaaaaaggccctgcaaaagaaatatttgaaaatcccagaaatttaaaagttgccgaaatttcaaatgaccctcca

SEQ ID NO: 268563 - DNA, 521 bp, Unknown
  Bacterial polypeptide expressing nucleotide sequence isolated from the Sargasso Sea
aatgtcaaatcgattttttgaaattaaaggtggctattttgttgcgagtgaaaaaaacaaagttaacaatgtaaaccttaaaatagaaaaaaaaggagaaattgtttctttgttaggtccctcaggtgttggcaaaacaacgctactaagaactattgctggattacaaaaacttagtgcaggtgaaatttatttaaaagataaactaatatcttccgatgaggttcatgttgaaccagagaatagaaatatagccttatcgtttcaagacaattcattatttccaaattataaagtaattgacaatattaattttggaaaaaaaagatctaatggtaacggtttttcttatgaagccgaagatcttataaaattacttcatattgaaccaattttagaaaaatttccccatcaaataagtgctggtgaagctcaacgagtatctttagcaagatcattaatgtctaaaccagatctattattattggatgaacctttttcaaatatcgatcaaaatttaa

SEQ ID NO: 268564 - DNA, 873 bp, Unknown
  Bacterial polypeptide expressing nucleotide sequence isolated from the Sargasso Sea
tacttgcatattttttgcacagtcaggaggtcttgggtcatctataacgctgctaggtgttttagctcttacttcacagcgtttattaccattggtgaaccaatcatacttctcgtacaccagtataagaggagagcaagtttcattggaggacgttatcgacttattatcacaacctcaaattatttttgaaaaggtcaatgatagtttcaaatttgaaaagaatataattttagaaaatattaatttttgttatgattcaaaaaaaaatgttctaagcaacataaatcttgaaattactaaggggactaaagtcggtataattgggaccagtgcgagtggcaaaagtaccttagctgatattattgcatgcttattaatgcctgattctggatctatcaaaattgataataaattattagataaaggcagttataatcaatggcaaaataaagtaagttatgtatcacaatcaatttttctcaatgataatacaattgctgaaaatattgcatttggtgagataaaatcagatataaatatagaaagagtaaagatgtgtgctcaaaaaagtcaactagcgacgacaatagataagctaccagataaatacaatacagtcatcggtgagaaagggacaaaactctctggcggacaaaagcagcgattagctattgctagagcactttatagagaatcttcttttcttattttggatgaagctactagtgctctggaccatgaaactgaaaagcttgtaatggactcaataatgggactagaaaaagatataacaatgttaattatagcacatcgcactacaacacttgcaggttgtgatactatagcagagttaaaaaatggagagattac

SEQ ID NO: 268565 - DNA, 703 bp, Unknown
  Bacterial polypeptide expressing nucleotide sequence isolated from the Sargasso Sea
ttggatgacatgctcgccctagtgaaactcgaaggcttagccaagcgttatccccatgagtgttccggcgggcagcagcagcgggtgtcgattgcccgcgcgcttgcgtatgagccgcaattactgttactcgatgagcctttttcgaatatcgatgcccaagtgcgccacagcatgatggcggagatccgcagcattctcaaacagcgtaatgtcagtgcggtatttgtaacccacagtaaggacgaggccttcgtctttgccgataccttggccatttttaaccaaggtgtgatagtacagcatggccgcgccgaagacttatatgccgcgcccaatagccgttatgtggctgattttctgggcagtggcaactatctacccgccgaagtgatcgatggtcatagtgttgccaccccgattggtgagctgcgcagcctgacgcccttgtcacaatcccatgctttcaatggccaagtgtttttgcggccacagcaattggcgctcagcgccgatgatgctggcgtaggcactattactgagcggcgcttcctcggggcattttgccattactgggtgaaagtcgaggcggcgtcccacgcccattatgtcgaagtacgcagccaaatcatgcagttgaatgtcggccagcgggtgggattaagcactgagccgcattccttagtgctatttgaatcttaag

SEQ ID NO: 268566 - DNA, 580 bp, Unknown
  Bacterial polypeptide expressing nucleotide sequence isolated from the Sargasso Sea
tatgagtgagataattcaaaaagttaaaaatctttcaattggatttaaaagcaaaaaaggtgatgaaatatcaattcttagaagcgtatcaaccaatataaaaaaaggtgaaaccgtcggtatagttggagaatctggatctggaaaaagtacattagctctagcaatgatgggatatgttaagcaaggcctatatactataaaaggccaatgcctatttgattcctcaaatcttctagagatgaaaaatagagatttagaaaaaatcaggggaagaaaaatagcaatgataccgcaaaacgctgggcagtcattaactccaaatttaaaaattggttaccaaatagatgaggcgctaaaattacataccaatttaaataaaattgaaagagacaataaaatttcagaattacttaataaagttagacttccttctccagaaactatggcttttagatatccccacgaactttctggcggccaacagcaaagagtggcagttgcaatggctcttgcaggaaaacccgatttattattgttagatgaaccgacaactggtttagatgttacaacgcaagcc

SEQ ID NO: 268567 - DNA, 676 bp, Unknown
  Bacterial polypeptide expressing nucleotide sequence isolated from the Sargasso Sea
aatgaaaaattactacttagagttgcaaggactctacaaatcttactttgacggctctggggatcaccatattttaaaaggtgctgatcttaagctggaaaaaggtgaaacagttgccatattaggaagcagcggttccgggaaatcgaccttgctcaacctgattgctggtatcgatctgcctgatcaaggtgaagttcgtatcgatggaaaaagtcttggaaaaatgtccgaaaaggacaggactttgttgagacgcagaactatgggatttatttttcaatccttcaatttgattccaacactaaacgttcatgaaaacttaatgcttcctctagaattgaaccagatatcaaaaaactcggggatcatttcacaaatgcttgaaactttgggtcttaaagggcgtgaagaaagtcatccggataggctttccggaggagaacagcaacgtgttgctattgcacgagctttgatgcatcaaccgtcgctcctccttgccgatgaaccaactggcaatttggatgcggagaccagccaacaaacgcttaaactcatcaatcatttagtccatcgttcaagaacgaccatgatcatggcaactcatagtcaggaggttattaaatgggtggaccgcgttttgggcattgaggatgggaaattgcttgaaacttaa

SEQ ID NO: 268568 - DNA, 613 bp, Unknown
  Bacterial polypeptide expressing nucleotide sequence isolated from the Sargasso Sea
atgacaaatgaaaaaccaataatttctgtagatatgttatcaaaatcttttgacgcgccggacagtgacaaaaaaactgaaatatttggtaaagtttgctttgatatatatccaggtgagtttgttactctaattggacattcaggttgtggtaaaacaaccctattaaatattctggcagggttaagcactccatctgcaggaggtgttttggttaacaatcaagaaataaacggtacctcgctagatcgagcagttatttttcaaagtcacgcattactaccatggatgactgtaatgcaaaatattgatttcgcagtgaaatctagatggcctgaaatgacatctgaaaaaagaaaaagtcactgtaatgaatttataaaactagtttcattagaaggttctgaaaacaaacaacctagtcagttatcaggtggtatgaaacagcgagttggtatcgcaagggcattagcaattgagccaaaaataatgttgatggacgaacctttctcggcattggacgcacttactcgtggttcattacaacaagagttattaacaatttgtgcaaaaagtaaacaaactagttttatgattactcatgaatattgat

SEQ ID NO: 268569 - DNA, 426 bp, Unknown
  Bacterial polypeptide expressing nucleotide sequence isolated from the Sargasso Sea
gatgagtaaaaaaattatagagcttaaaaacgtaaataaatggtttgataagtttcaagctttaaaagatgtaaatcttgaagtcaatcaacaagaaaaaattgtaatttgcggcccttcaggatctggaaaatctactttaattagatgtattaatagacttgaagaacatcaagacggtcaaatagtcgttgatggaaaagaaatatcagaaaatacaaaagacattgaaaaaataagagcagaagtgggaatggttttccaacaatttaatttatttccccatctatctattttagataactgcactttagcccctatatgggttaagaaaatgccaaaaaaacaagccgaagaagttgctatgaaaaatttagaaagagttcaaattgcagatcaagccaaaaaatttcctggtcaattatc

SEQ ID NO: 268570 - DNA, 598 bp, Unknown
  Bacterial polypeptide expressing nucleotide sequence isolated from the Sargasso Sea
atgttagctgttgaagttcaagatttaaattattcaattaataataaaaaaattttaaataatattaattttaatttaaaaaaagatactatctcatgcatcctaggaccttctggaagtggaaagacttctttattaaaacttattgcaggattagaaaaagtacactctggaaaaattataattaatggtgaagaggtcagcagcgcgaaaaaacatttaccaactgaaaaaagaaaaattggttttttattccaagactatgctttatttccccatttaactgttaaaaaaaatttagagtatccaattaactataaaaattcagattataaaattgaagatattattaatttaatcaaattaccaaattcattaaataaatttcctcatgaattaagtggcggtgaacaacaaagagtagcgttggccagatcaattatttctcaaccagatttacttttgttagatgagcctttttctagtctcgatttaaatttgcgagaagaaattagagatgaaacattacatttattacaaaagtcaaacatttcagttattattgttacacatgatccttttgaagcttatgtttatt

SEQ ID NO: 268571 - DNA, 714 bp, Unknown
  Bacterial polypeptide expressing nucleotide sequence isolated from the Sargasso Sea
agcaggataatggttttttttcaggcgaaaacatgacaggcggttatggaggagcggatataattagttcatgcactatcagagttaatagaggagaaatagttgcaattctaggacctaatggtgcagggaaatctaccgcaatgaaagcaatgttgggtttattaaacctcaagtcaggaaaagttactattgatggaaaagatatatccaaattatctccccaagacagagttaaagaaggaatttcatttgttcctcaaaccagaaatgtttttgctggattaagtgttaaggaaaatttagaaatgggagcctatttaagagaagagcgtatcgaagaaatcataaatgaaatttatgaattatttccagttttaaaagaaaaaaaatctcagatagttggagaattgtcgggtgggcagagacaacaggttgctttaggtagagctttaatgactaaaccttcagtattgatgcttgatgaacctacagcaggggtttcaccaatagtcatggatgaattatttgatcatatattaaaagttaaaaaaacaaatgtagcgattgtaatggttgaacaaaatgcaaaacaagccttaagcattgcagatagaggttatgttttagttactggagaaaataaattttctggaactggaaaagaattattgaatgatcctgaggttagaagatcatttttaggtggttgat

SEQ ID NO: 268572 - DNA, 892 bp, Unknown
  Bacterial polypeptide expressing nucleotide sequence isolated from the Sargasso Sea
aataaacccagataatggtgaggtttttttaaatgaaaaaaatttaaaattaagctctccactcgatgccaaaaaaaataaaattggaatggtttttcagcatttcaatttatttgaaactttatcagtatttgaaaacttaagtatagatgcaactgaagataacaaaagtttaagggtaagaataaacgaaatatttaaaaaatataactttagtattgaccttgatgttcctgtattaaatttatcagcaggacaaaagcaaaaagttgagattataagatgtcttttaagaaacccaaaagttctaatcatggacgagcctacatctgttttaactgagcaggaaacagaggaattatttatttctttaaaaaaattctgtgatgaaggaatattaattatttacattactcacaaactaaaagaagttttgtctttatgcgatgaagttgcagtaatgcgaaaaggtaaggtcgtatcggttagccaaacacaaaatgaaaaagttgaaactctcgcaaataagatggttggtcaaaaactagcgaaaattaagaaaaaaattaatatttccaaaaataaagatgagatatttaaagtaaaacatttaaatttttatagcgatgatccttttgaaacaaatttagttaatcttaatttttctgtaaagaaaggagaatgtttaggtatagcaggtatttctggcaatggtcaaaacgaactctttcaaattttgagtggagaaataattacacctaatacatcaatcattttccgaaataaggaaattgctaaactaaatccaaagcaacgacgagagtatttaatggctttttctcctgaagatagaatatctcaagcagctgtacctgaaataaaaatatatgaa

SEQ ID NO: 268573 - DNA, 237 bp, Unknown
  Bacterial polypeptide expressing nucleotide sequence isolated from the Sargasso Sea
aatgaccaacctatctacaacctacttatcagtaaacgatctttgcaaacattttggagcatttcaggcattaaaaaatatatcgattgaaattaatgaaggagaatttgcctgttttttaggtccttcaggttgtggtaaaacaacacttcttcgttgtatcgcaggattagaaactcaatcttcgggatccatttctcaaaaaagaatagagatttcatctcttccaccttcagc

SEQ ID NO: 268574 - DNA, 761 bp, Unknown
  Bacterial polypeptide expressing nucleotide sequence isolated from the Sargasso Sea
tatgaacatcatagaagtaaaagacttaaaaaaagcctatctgttaccaggagataaatcgaaaacattcaatgcagtcgatcacatctctcttggaatcaagaaaggagaggtttatggaatactcggacccaatggagcagggaagaccacgactctagagatgttagaggggcttaaggaaattgatgatggctttgcaatcatcgatggcattgatgtgagcaaagatccttatgcggtcaagaaggtgatcggtgtgcaacttcaaagcaatgagtattttgataaattggacctcagtgagcttcttaccttattttctaaactttattcaacaagcattgatcattcgaagttactgcatcaagtgaatttattggataaagccaatgcaaaaacccaacacttgtcaggtggtcaaagacaacgattttcaattgcatgcgcgctggttaataaccccaaaatactctttttggatgagccaacaacaggcctcgatccccaagcaaagaggaatttatggaatttggtaaaggatctcaattcttctggtatgacaatcgtattgaccacgcacaatatggaagaagcagagtatctgtgtgaccgaattgccatcatggacaagggcaaattgattgcagaggatacaccaaaagcattaattgaaaaatatgcacctgagccttctgatatcccattaactggaaacattgaagatgtcttcctcaatctaacaggacactctttgagag

SEQ ID NO: 268575 - DNA, 876 bp, Unknown
  Bacterial polypeptide expressing nucleotide sequence isolated from the Sargasso Sea
aaacaatttggaaacatttatgctgtaaacaatcaaaatttaatagtaaataaaggagagtttctaatattactaggtccttcgggttgtggaaaaactacaactctgaattgtatagcaggactagaaatgcctagttcaggcaaaatattatttaatgacattgatgtaacttatagccctccacattcaagaaatatagctatggttttccaatctgcattattgtatcctcatttaaattgtaagcaaaatattttaatgagcttgcaaaaagctaatatagaagagaatgaaaaagaaaaaagaattttagatgctgtagaaatattaaatattaaagatctgctaaataaaaaacctcatgaattatcaggtggtgagagacaacgagttgcaacagcaaaagctattgttagacaaccagatgcatttttactagatgaacctatggctgcactagatgcagctttaagacaaactttaagatcagaattagttaatttgcaaaagaaattaaatacaactacaatttttgtaactcatgatcaggttgaagcaatgactatgggggatagaatagcggtaatgaataatggtaaagttgaacaaattggaactccaatagaaatttacaacaatcctaaaacacaatttgttgcaggatttgttggttcacctcctatgaattttcttaaaggtaatttaataaatgaaaatggtaaatctttttttaatttggataaacttgattttaaaattaaactttcaactactttattaaaagaaaatgtaaaaaatttagcttttagacctcagcatatttatgttactaatgataatgattgtgatttagaattaaaagtatttggtatt

SEQ ID NO: 268576 - DNA, 745 bp, Unknown
  Bacterial polypeptide expressing nucleotide sequence isolated from the Sargasso Sea
aatgaacaaaatcattcaagtcagggatgtaaataaatcttttggaggtgtaattgccaacaggaatatttccattgatgtagaggaaggtcaaatcacaggtcttatcgggccaaatggttcaggaaaaaccactctattcaactccatagtcgggtatcatcctattgattcaggaacaattcattttgaaaatcatgaaatttcaaagctccgagttcagaaaatagcaagactgggagttttacggacttttcagcaaacaagaatctactcaaaaatgaactgtgtaaaaaacatgctgatttctgctgcacatcacaataccaaatggatagatatgttttcgtattatccaaaagaattaactgaacgagcagaaaaattgttagaatttgttgggctttacggaaagcgctatttaatttcgggagacctttcatttggtcagcaaaagctgcttgaatttgctatggcccttatgaatgagccgaaagtactcttgttagatgagccgactgctggaattaatcccactttaataaacgggcttattgatagattaaagagggcaaaccatgaattcggcattactctttttgttatcgaacacaacatgagagttgtcatgaatctagctgacagcatttactgtctggcacatggagagatgcttgcacatggaactcctacaggtataaaacaggatcaaaaagtaattgatgcatatcttggagcacattga

SEQ ID NO: 268577 - DNA, 912 bp, Unknown
  Bacterial polypeptide expressing nucleotide sequence isolated from the Sargasso Sea
ttattaaaatttatgtctgaaccagtaattaaatgtgaagctgtttataaaatttttggagaaaatgccaaaaaaatgcttaaagattcaaatggcaatgtagacgcaaaaacttttcaagaaaatggatgcatagtaggtgttaacaatgcttcatttgaagtttcaaagggagaaatgttagttgtaatgggtttatctggatcaggtaaatcaactttgctaagatgtatttctagattaactgatgcaacaggtggaaaaatttttatagaaggtcaagatttacttcaattaaataataaagaactaatagagcttagaagaaataaaatgggaatggtttttcagagttttgctctacttcctcataaaacagttgtagaaaatattgctttcccactccaaattaagggaattaaaactgaagatagtattagtaaagcaatggatatggttaaacttgttggtcttgatggaagagaaaactattttccaagagaactttctggaggtcaacaacaacgagtaggtattgcgagatcattggctgtagagccagatatttggtttttggatgaacctttttctgcattagatccattaattagaaaagaaatgcaggatgaatttttaagacttcaagataaattacaaaaaacaattatgtttattacacatgattttgacgaggctctaaaacttgctgatcgtattgccattatgaaagatggaataattgaacagctagacacacctgcaaatattgttctaaatccagcaactgaatatgtaaggaaatttacagaagaagtacctagagaaaaagttctattaattaaagatgtaatggacccatctaccactgataatttgggtgatttgaaggttttaaaagatgaaattattgaa

SEQ ID NO: 268578 - DNA, 500 bp, Unknown
  Bacterial polypeptide expressing nucleotide sequence isolated from the Sargasso Sea
tctattactaatggatgagcccaccaaccatctggatatggatatgcgacaagctttaacagttgctcttcaaggattcggaggtgcaatacttttaatttctcacgatagacatctattggcgaataccgtagatgagtttcttattataagtaatggtattttggataattttaagggagatctggaagattacagaaaatcagtcttgaaaaattcttcgcctaaaaacgaaaagaagcataaaaaagaaaaaggactacctcaaatagatcgaaaacaaataaagaatgaaataattgctgtagaaaaaatattgaaacgcctcaataggaaattaaaagaagttgagaaaagtcttaatgatccgaaatcttatgaaaaagatgaagacttagattttcatgcactattgagggatcaagtcagtttaacaaatgagatagaactgtccgaggagcagtggcttgatttaaatcaaaaattagaagaaggttaga

SEQ ID NO: 268579 - DNA, 355 bp, Unknown
  Bacterial polypeptide expressing nucleotide sequence isolated from the Sargasso Sea
cgcgccgacgagctttccggcggcgagcgtcagcgcgtcggcgtggttcgtgcattgatgcaggaccccgaaatattgctggcggacgaacccaccgcatcgctcgaccccaagacgtccgagcagatcatggggctgctgcgcgacctggcgggtgagctgaaactgccggtactcatcaacatccacaacgtcaccgaagccaagatttacaccgaccggatcgtcggcatgcgctatggccggatcatctttgacgacacgcccgacaagctggatcaggaggcgatggaccagatctattccggcagcccccatgccgaccgcagcgaagacctgaaggaagcgtcatgag

SEQ ID NO: 268580 - DNA, 646 bp, Unknown
  Bacterial polypeptide expressing nucleotide sequence isolated from the Sargasso Sea
ttcctgcagtataaaagttaataaaggtgaaatcgttgcaatattaggtcctaacggagctggcaagtctacagctatgaaagcaatgcttggattattgaaactaaagtctggtaatatttcaattgatggtgaagatatctcaagtttatctcctcaggaaagagtaaaaaagggaatttcatttgtaccccaaactagaaatgtttttgcggaacttaccgttagagaaaatttagaaataggcgcttttttgagaaccgatgatatttataaagtaattgatgaaatttatgatctttttccaatactaaaagaaaaaaaagatcaaatagttgggcaactatctggagggcaaagacaacaggtagctttaggaagagccttaatgataaaaccttctgttctaatgttagatgagcctacagctggggtttcgccaatagtaatggatgaattatttgaacatattttaagagttaaagagactaaagtaggaattataatggttgagcaaaatgcaaaacaagcgcttagtatttctgatagaggttacgtattagtgactggtgaaaataaatttgaaggttctggaaatgaattgttaaatgatccagaagtacgacggtcttttttaggggcataa

SEQ ID NO: 268581 - DNA, 787 bp, Unknown
  Bacterial polypeptide expressing nucleotide sequence isolated from the Sargasso Sea
atgaccgatgcagtaatcaagtgtgaatctgtatataaaatttttggagcaaatgccaaaaagttgctccaagaagcaaatggaaatgtagacgcaaaagcattccagaaaatgggatgtattgtaggtgtgaacaatgcttcttttgaagtttcaaaaggagaaatgttagttgtaatgggattatctggttcaggaaaatctacattattaagatgtatctctagattaacagatgctacagatggaaaaatttatattgaaggtcaagatttactctcattaaaaaataaagaactaattgaacttagaagaaataaaatgggaatggtctttcaaagttttgctttgcttccacataaaacagttttagaaaatattgctttcccacttcaaattaaaggaattaaaactgaagatagtattaataaagctgtagacatggttaaactcgttggtcttgagggaagagaaaattattttccaagagaactttctggcggacaacagcaaagagtaggtatcgctcgatcattggctgttgaacccgatatttggtttctagacgaacctttttctgcactagacccattgattagaaaagaaatgcaagatgaatttttaaggcttcaagaaaaattaaaaaaaacaatcatgtttattacacatgattttgatgaagcacttaagcttgctgatcgtatcgcaattatgaaagatggaataattgaacagttagatactccagctaaaattgttttaaatccagcaacagagtatgtaaaaa

SEQ ID NO: 268582 - DNA, 937 bp, Unknown
  Bacterial polypeptide expressing nucleotide sequence isolated from the Sargasso Sea
tccatgcgccctaggactagccacgccaacggtaataactgttgcctctggggaagctgcaaaacgaggatggttgtttaagggcggtgatgtaatagaaatggcatcaaaaattaatcaaattatttttgataaaacagggacactaacaattggaagacccttagttgttgggttctgggaatacaaagatacagagagaaatgtcatgctcaaattagcggcaagcattgaaaaagatagtcgtcatccgcttgcccaagcaattattcaagaagcacataaaaaagaaattaagttagaaaaagtttcaacatcaactacacatgcaggtaaaggcttagctggcaaaattaataatttagaaggacttataagagtcggaactcccgaatggataaaaagtgagggaattgaatggaatgaagttattgaatataatttcaagatttcaaaaacaaaagctcaatcaatagttgcagttgctctggataacaaattattaggttttttcttgatagatgaccaagtaagaaaagatgctttcctttcaattaataaattacgctcaaaaggtttttcattaagtttatttagtggcgatagagattccgcagttttatctttaggagaaaaattaggatttaatacaaagcaaattgaatgtcaaatgttaccttcagacaagctaaataagttgaacttattaaaaaataatggtttagttgcgatgataggtgatggaattaatgatgccccagctcttgcagcttcagacttgggcgtagcaataggaacaggaactcaaatcgctcaagattctgctgatctagttctacttggagaaaacttggaagcccttccaaatgctttagagctttcaaagcatgcaatgctaaaaataaaacaaaaccttgcgtgggcatttggatacaac

SEQ ID NO: 268583 - DNA, 581 bp, Unknown
  Bacterial polypeptide expressing nucleotide sequence isolated from the Sargasso Sea
taagctttctgaaggtgaaataattatagataataaaaatttagaatcttttaagagagatgaaatattaactagaataaatttttgctctccatacattgaactgcccaaaaaactaacagtaaggcaaaatttagaagtgtatggaagattgtacggagttaaaaacttgaataaacgaatattagaaatatcggaagatttagacattaaaaatttttttaaaagaaaaactggtgagttatcatctggacaaaaaaacagagtatcattagctaaatctctaattaataaaccagaaattttacttttggatgaaccgacagcaagtctagatcctgatataggtgactttgtaagaagttatattcaagaatacagatcaaaaaatcaagtcactgtacttcttgcttcccataatatgaatgaggttgaaagactttgtgacagtataataatgatgaagaaaggaaaaattatagatagaggaacttgtaaagaaataataaaaaaacatggaaggaataatcttgaagaaacttttctcaaactagctaggagcagagatgaacttcagtaag

SEQ ID NO: 268584 - DNA, 619 bp, Unknown
  Bacterial polypeptide expressing nucleotide sequence isolated from the Sargasso Sea
tttgaagataaataatctgagttctttttataaaaaaaagaaaattctgaatgatataagtattaatgttaaggagggcgagattgttggtcttttaggacctaatggagctggtaaaacaacctgttttcagtgcattgctggactacaaaatataagtcatggaaatataaaacttaatgattttaacataaccaacttacctatctacaaaagagcaaaacttggattaaattacctcccacaagaaacatcaatctttcgcgggctatcagttgaacaaaatattttgtcaataatacaattaaacaactcaaataatgataaacaaaataatgaatttttaaatgaattactgaatgaattttctttggaccatataaggaatgcatctgctttaactttatcaggtggagaaagaagaagagttgaaattgcaagagctttggcatctaaaccaaaatttttacttttggatgaaccacttgctggaattgaccctattgccctaattgaaataaagaatattatttttaaacttaaagaaaaaaatattggtatattaataactgaccacaatgtaagggaaactttaaatacagttaatagaagctacata

SEQ ID NO: 268585 - DNA, 775 bp, Unknown
  Bacterial polypeptide expressing nucleotide sequence isolated from the Sargasso Sea
tatggcaataattaaaaaatttagaattaaatcatttaaaaaagtacatccagctgtgaaaattgaaaaaatatctttatcatatggaaaaagacagattttagatgatataagttttaacattaatcagggagaaattttaggactcttgggtcctaacggtgcaggaaaatcaacaatttttaatttaattacgggattaataaaaccagattatggaaaaattatatttgagaaaactgatgctacaaattttccaatttatacaagaacagaaaaattcaaaattgggtatgttccacaacatggaggctacttccatgatttaaccttattagaaaatttaagtgctattggagaaatattgataaaagatgcaaattcaagaaatagtaaaattagtgatttaatttcaaggtttgagttagaaagtttaactaatgtaaaagctagatttttatctggcggacaaaaaaaaaaattaattatagctcttgctcttttaggaaatccaaaattattattgttagatgaaccttttgctgctttagatattttaactattaagactctacagcaaataatagttgatctgcaaactgaaaataatattgcaatagtcttgtgcgatcatcaggctagagatttattatcatgtgtagatgttgcgatagttctttcaaattgcaaaattgttgccaaaggttctccaagtaacttagtgaaagatgccgatgctaaaagtgcatattttggtgataaattcaattattaa

SEQ ID NO: 268586 - DNA, 658 bp, Unknown
  Bacterial polypeptide expressing nucleotide sequence isolated from the Sargasso Sea
atgcaactacttccttatccaattgcatttcacagcaaagatagctccataaactttcaaggtatagaacttataaatcttcccaaaaaagaacttgagaatatcagaggtaaaagaatatcaatgatattccaagagccaatgacttcattgaatccctttataaaggtcggtaagcaaattatggagtctattcaagtccataataagagttccaacaaagaggcaaaagaaaaagccatagatctattaaggaaagttgaaatgccaaacccagaacaaaaattttcttcatttcctcatcagctctctggaggacaaagacaaagagtgatgatcgcaatggcattgtcaaacaatcctgagatattgattgcagacgaaccaacaacagccttggatgtgactgtcgaaaaagaactattaattcttttaaataaattaaaagaagaggaaaacctcagcataatttttatcacgcatgatttaaatgttgtcaaaagattcgcagataaggttctggtgatgaatcagggtaatgtgatcgaaagaggaactactgcagaaattttttctaatccaaaggattcttatacaaaaaggttaatagagtccattcctgaacctaaagagattaataatgtttcagattccaaaa

SEQ ID NO: 268587 - DNA, 826 bp, Unknown
  Bacterial polypeptide expressing nucleotide sequence isolated from the Sargasso Sea
aacatatgctcttaatccgttttcaatgacttgggaaaatggcaagcggtatgcaattttgggaccttctgggtgtggaaaaaccacaatgttaaacattgtttctggattagtgagaccatccaaaggtgaaatattattcgatgaaacacctgtgactgatttaaaaacagaagatagaaatattgcccaggttttccagttcccagtaatttacaatacaatgactgtttatgataatttagcgtttccactaagatgcagggaatttacaaaagaaaaaattgaagaaagagtaaaagcagtttcagatactttaaatttatcttcatttttaaactcaccagcaagaaaattaacggctgatcaaaaacaacttatctctttaggtagagggttggttcgagaagacgttgcagctgttttaatggacgaacctcttacagttatagacccagatttaaaatttagacttcgaagaaacttaaaagaaatcaatgaacaatataaaacaacattggtttatgtaactcatgatcaaaacgaagctatgacttttgcagaaaatataattgttatggatcaaggtgaaatcgtacaagttggattgccaaaagatttatttgaaaaacctaaaacaacttttgtcggttattttattggctctcctgcgatgaatatttttcattcaactgtatcttctgatcatgaagtaaaaattaatgataccacaataaaaacaaattcaaatttaggaaatttaaaagataaaaatgttaaactcggaattagatccgagttcatagaattggctgaaaaagaaaaa

SEQ ID NO: 268588 - DNA, 584 bp, Unknown
  Bacterial polypeptide expressing nucleotide sequence isolated from the Sargasso Sea
gatggaaattaaaaattttagcaaaaccaaactagtcaaagacaacaattatttaagagtaaacaatctaagctctttttataaaaaaaagaaaacccttaatgatattagtattaatgtaaaggaaggtgaagttgttggtctcttaggacctaatggggctggcaaaacaacctgttttcagtgtattgcaggactgcaaaatgtaagtcatggtaatattacacttaatgatttaaatataacaaacttgcccatatataaaagagcaaagcttggattaaattacctcccacaagaaacatcaatctttcgcgggttatcagttgaacaaaatattttgtcaataatgcaattaaataaatcaaaaaatgatttacaaaatagtgaatttttaaatgaattacttaatgagttttcactggatcatataaggaatgcatctgctttaactttgtcgggtggtgaaagaaggagggttgaaatagctagagctttggcatctaaaccaaaatttttacttttagatgagccacttgctggtattgaccctatagctttgattgaaattaagaatataattt

SEQ ID NO: 268589 - DNA, 760 bp, Unknown
  Bacterial polypeptide expressing nucleotide sequence isolated from the Sargasso Sea
taatttatcatacaaaccagatgatcaatatcatttaaacgaagtatcatttaattttaaagaaggaaatctgtatacaattctaggaagaacgttatcaggaaaaacaactctactaaaaacaatagctggtcttttaacaccagatagtggtgaaattgaatttgatggtaaaaattttttaaaaattcctgtctgggaaagaaatgtagcaatggtttatcagcaatttataaattatcctcatttaaatgtttttgaaaacatagcctttcctttgaaacaaagaaaaatggatcaaagtattattaatgaaaaagtaatggatgctttaaagtctgtaggcttgttaggttatgaaaatagaaagattcaagaactttctggaggacagcaacagagggtttcgcttgcaagatctctagtaaaaaacgctaagatattattgctagatgagcccctagtaaacttagactacaaattgagagagcaacttagagaagaatttaaaaacttattttctaaagggttagcagatgaaacaatattaatttattcaactactgatcctagggaaactatggaattaaatggtgaggttattgtgttagacgaaggcaaggtcttacaagttggtccagctaaagaaatatttgaaaaccctaactctttaaaagttgcagaaatttctaatgatcccccaatgaatattattgaagctaaaatttcagataataatattcaatttgaaggaatagat

SEQ ID NO: 268590 - DNA, 706 bp, Unknown
  Bacterial polypeptide expressing nucleotide sequence isolated from the Sargasso Sea
gcattttttgaaggaaataaaatgaccggtggttatggagatggtcctgacataatcaattcatgtactattaatgttaacaaaggtgaaattgtagcaatcttaggacctaatggtgcagggaaatcaactgcaatgaaagctatgcttggattacttaatcttaaatctggaaatgttttaattgaaggagaagatatttcaaaactatctccacaagaaagagtcaagaaaggaatttcatttgttcctcaaacaaaaaatgtttttgcagaattaactgtaagggaaaatttagaagttggagcttttttaagagaagacgatgtattaaaagttatagaagaaatatacgatttatttccaatattaagagataaaaaagatcaaatagttggacaattatctggaggacaaagacaacaagttgcactagggagagctttaatgattagaccatcagttttaatgttagacgagccaacagctggagtttcaccaatagtaatggatgaactttttgaacacataattaaagttaaaaaaacagatgttgcaataattatggttgaacaaaatgctaaacaagcactcagtatttctgatcgtgggtacgtcttagtaacaggagaaaataaatttgaaggatcaggcaaagaattattaaatgatcctgaagtaagaaggtcatttttaggagcctaaa

SEQ ID NO: 268591 - DNA, 615 bp, Unknown
  Bacterial polypeptide expressing nucleotide sequence isolated from the Sargasso Sea
tatgaccgatacagtaattaaatgtgattctgtttataagatttttggaacaaatgccaaaaagatgctggaagaagcaaatggaaatgtagatgcaaaacaattccaagaaaatggatgtatagttggtgtgaacaatgcttcttttgaagtttcaaaaggagagatgttagttgtaatgggtttatcaggctcaggtaaatccacattattaagatgtatttctagattaactgacgcaactgatgggaaaatttttatagagggccaggatttactgtcattaaataataaagaactaattgaactaagaagaaataaaatgggaatggtttttcaaagttttgctttactaccacataaaactgttttggagaatattgcttttccacttcaaattaagggagttaaaactcaagatagtattaataaagctatggacatggttaaacttgttggtcttgatggacgagaaaattattttccacgagaactttcaggcggacaacaacagagggtaggtattgctagatcattagctgttgaacctgatatttggtttttagacgaacctttttctgcgctagatccattaattagaaaagaaatgcaaga

SEQ ID NO: 268592 - DNA, 705 bp, Unknown
  Bacterial polypeptide expressing nucleotide sequence isolated from the Sargasso Sea
aatttaattttaggaatagatgaagctatgtcttattcaaatctagaaaaaaaattagaaaatattagttctcaatacaatcttccgttagatttagatgctccaattacttcattatcagcaggagaaaaacaacgagttgagattgtaaggattttacttcaggatcctcaaatattaattatggatgaaccaacctcagtcttaactccacaagaggttgagagtttgtttgtaactctaaatgctttagtcaaagaaggaagaacaatattatacattactcataaattagaagaagtaatttctatttgtgacactgttacaataatgcgtaatggcgaagttattgatacctcttcaacatctaatttcactgcaaaaactttagcaactaaaatgttaggtcaaaaacttgatgatttaaaaacaaattatgatcatattaaagaagaatataattttgaagttaataatatatcttgtgaatttaatgatccatttcttacagatttaaaaaatatttcctttaaagttagagttggggaaatatatggaatcgctggagttgctggaaatggtcaatcagaattaatggatgttttgactggagaaaatattaaaatttcttcaggtgaaattatttttaacaaaaacaaaattcaaagtttaggccctcaaaaaagaagagatttatctattgct

SEQ ID NO: 268593 - DNA, 883 bp, Unknown
  Bacterial polypeptide expressing nucleotide sequence isolated from the Sargasso Sea
tgatatgaaaattcacgctttcttgcctaacagaattgatgcccaaataacgcttcagcccgcaagccgtttcattggcgttaccggcccttccggggcgggtaaaagtagcctttttcgggctttagccggcgtagaaaaacgcgccaaagtggctaaatcatggtcttttgaaaagataggtatcgtgtttcagcagcccatgttgtttccgcatactaacgtgcggggtaatttagccttggcgcagcgtcatgctagccccaacgccttatcagtagaggcgtctgtaaaagggtgttactgcgagcaccttttagaaaagcctattgattcactatcagggggggaggcacagcgtgtggcgatagcgcgggctttggtgaatggcccttccgttttattgctagatgagtcactaagcgccatcgatatttttacccggcgcaaaatttatcagttcttaaatactctgtgtgtgtctggccagcttacttgctttgttatctctcatgatttagatgatttagcactctttagtgatgaactggtttatgtagagcaaggtaaggtatcgctctgcggtgcgacaacagatgtgctttctcaagtattcgaaaaagaaggggttgcaataccttcagccgtattagaggggcagaagtgctctgaaagcgttacgcaagttgaaaatatgcacggcatagcccgagttatggttgcaggtcatgaggtatttgttacagaagaagcaatatcatacacggaaaatattaagagcgcttacagggcacacagcattacagaggtgagtaacccagagcaggataacgggcctgcgccagtacgttttgcggtaaaagcctgcgatgtgagcgtagat

SEQ ID NO: 268594 - DNA, 198 bp, Unknown
  Bacterial polypeptide expressing nucleotide sequence isolated from the Sargasso Sea
tattagttgggtcaggtgaagacaaggttcacttatgcattgttttaacatcagacagaggtttatgtggaggttttaatagcaatattattaaaaaggcaaaattattttttcaaaagattttaaatgagaataaaacattaaaaattattactgttggattgaaaggttatgatcaattaaagagtagggtataaa

SEQ ID NO: 268595 - DNA, 536 bp, Unknown
  Bacterial polypeptide expressing nucleotide sequence isolated from the Sargasso Sea
aatggacttagttgcaaataatttatcatacaaaccagatgatcaatatcatttaaatgaagtatcctttaattttaaagaagggaatctatatacaattttaggaagaacattatccggaaagacaactttattaaaaacaatagctggtcttttaacaccagacagcggtgaaatcgaatttgagggtaaaaattttttaaaaattcctgtctgggaaagaaatgtagcaatggtttatcagcaatttataaactatccccatttaaatgtttttgaaaacatagcctttcctttgaaacaaagaaaaatagatcaaagtattattaatgaaaaagtaatggacgctttaaagtccgtaggcttgctaggttatgaaaatagaaagatccaagagctttctggagggcagcaacaaagagtttcgcttgcaagatctttggtcaaaaacgctaaaatattattattagatgagcccctagtaaacttagactacaaattgagagagcaacttagagaagagtttaaaaaccttt

SEQ ID NO: 268596 - DNA, 754 bp, Unknown
  Bacterial polypeptide expressing nucleotide sequence isolated from the Sargasso Sea
ttcgagggccaggacctgacccagcttgattcttctgagctctcaccgctgaggcagaaaatccaggtgattttccaggatccatacagttctctcaatccaaggttgaagattggagacaccatcagtgagccgatgaaggttcacaacatccaacccgatccgaagttacggaataaaagagttgccgaactcctgaacatctgcggactcccttcggtgatggcagaccgttacccccacgaaatgagcggaggccagaggcagcgtgtcggaatcgcccgggctctctccctgaaccccgaattcatcatctgtgatgaagcagtttcggccctggatgtttcgatccaggctcaggttataaacttgttggaagacctgagggaagaattcaacctgacttatttgttcattgcccacgatttgagtgtggttcgccacctctgccaaaaagtggcggtgatgtatctgggcaaaattgtggaaatggcggattgtgatgaactttatgacaatccccaacatccctacaccaaagcattactgaatgcggttccggttccggatcctgaagttgaaaaaaatagggaacacaacatcatgacaggggaagttccaagtccgatcaatccaccttcgggctgtgtctttcatccgcgttgttccctggcagtggaatcctgtacatcggatatccctgttttggaagataaacatgcaggccattttgtcgcctgcacccaggtctgac

SEQ ID NO: 268597 - DNA, 747 bp, Unknown
  Bacterial polypeptide expressing nucleotide sequence isolated from the Sargasso Sea
tttcaagaaaatggatgtattgtaggagttaacaatgcttcttttgaggtatctaaaggtgaaatgttagttgtaatgggtttatcaggatcaggtaagtcaacattattaaggtgtatatctagattaacagacgcaactggtggaaaaatttttattgaaggtcaagacttgcttaatttaaataacaaggaacttattgatttaagaagaaataaaatgggaatggtttttcaaagttttgcgctacttccacataaaacagttttagaaaatattgcttttcctctgcaaattaagggtattaaaactgaagatagtattaataaagcaatggatatggtcaaacttgttggtctagatggaagagaaaattattttccaagagagttatctggagggcaacagcaaagggttggaattgcgagatcattggcagttgagccagatatatggttcttagacgaacctttctctgcattagatccacttataaggaaagaaatgcaagatgaatttttaagacttcaagaaaaattacaaaaaactataatgtttattactcatgattttgatgaagccttaaaactagctgatcgaattgcaattatgaaagatggaataattgagcaattagatacacctgcgaacattgttttaaatccagctactgaatatgtaagaaaatttacagaagaagtaccgagagaaaaagttttattaattaaagatgtaatggatgaaata

SEQ ID NO: 268598 - DNA, 772 bp, Unknown
  Bacterial polypeptide expressing nucleotide sequence isolated from the Sargasso Sea
gccggatgaggggcaaattttctggcaaggccagccagtgcatatctctgggcctttgcaagcacgccagctcggcattggcatggtgttccaacatttctcacttttcgaatcattgagcgttgcagaaaatatccagcttgccttgccagcgggtgagaatttggctgcattatctgaccaaattcgatccatgtcggatgcatatgggttggctgttgacccagacgcctatatccacaatttgtctgttggacagcaacaacgtgttgaggtgatgcgatgtttactgcaaaatccgtctttgctgattatggatgaaccaacatcagtgctgacaccgcaagaaacagagcagttgttttcggtgttgcggcaatttgccgacaacggtatggcagtgttatttatatcgcataaattagacgaaatccgcgccttgacgagccgcgcaacagttttgcggaggggctacaatgttggtacggtagatacaaagcaaaatagtaaccgcaaactggccgaattaatggttggtcacaaagtttttgatgttaaacggcagtccgcgccagatctaaccaaagctgtgtgcgtaatcaaaaatttacaaaagccaaagccaacagccttcgcagtgaaactacaagacatctcaattacggccaacgctggtgagattcttgccattgcaggcattgctggtaatggacaagatgaaatcatggctgcgctctcgggtgaatggcggcccgcgtcagctgatgtaatt

SEQ ID NO: 268599 - DNA, 436 bp, Unknown
  Bacterial polypeptide expressing nucleotide sequence isolated from the Sargasso Sea
ctcgcaggctttgtggattgggaaagccgagcaagaggaattcttaaatagagaaaaagtagagcatataattgattttttagaaatccaacaaataagaaaaaccgcagtaggtcgcttgccatacggtttgcaaaaaagagtagagctaggtagagctcttgcagctgaaccaaagctgctgttactggatgagccaatggcaggcatgaacgtagaagaaaaggaagacatgtctcgttttattctagacgttaacgaagagtttgggacaactgtagttttgattgaacatgatatgggtgttgtcatggatatagcagacagggtagttgtaatggattatgggaagaaaattggtgatggtagcccggatgaagtcaggagtagtcaggttgtaattgatgcgtacttaggtgttagtcatgatacctaa

SEQ ID NO: 268600 - DNA, 643 bp, Unknown
  Bacterial polypeptide expressing nucleotide sequence isolated from the Sargasso Sea
tatgccaagtttaaaagatattaaaactcaaataaactcagtaggttcaactaaaaaaattacctctgcaatgaagatggttgctgcgagtaagcttcgtagatctcaagaaaaggcagaagccgcaagaccttattcttcaagattagaagaaatgttatcttctctggctacttctgcatcttcaggagaagggattataaaacttttaactggcactggagaagatcaaaattatattgttgtacctgttagcgcagatcgaggtttatgtggtggttttaatagtagtataaatagagaaacatttaagctagttaagaaattagaatctgaaaacaaaaaagttcaactgttacctattggtaaaaaaagtagagatttttttcttcgtactttgaaagaaaatataacagacagctttgttgatacgaatgtatctagtgcaggttacaacatagcattagaaatttctgcaaagttacaatctttatattttgaaggaaaatttgataaatgtattcttgtatataataaatttaaatctgcaatttctcaagaagtaacacaacaacaattaatacctcttgatatatctaacaaaaacaaagaagataaatccaatgaaactgaaagttcaaat

SEQ ID NO: 268601 - DNA, 685 bp, Unknown
  Bacterial polypeptide expressing nucleotide sequence isolated from the Sargasso Sea
aatggaagatttactaaaagtatcaaatttaaatactgaattcaaatcagactatggttcaaaaccagctttaaataatatttcgtttaatattaaagaaggtgaagttttagctttggttggtgagtctggctcaggtaaaactgtaacaagcctttctataatgggtcttttaccaaacaatgcttcagtagaaaatggtgagatcacattacttagtaaaaaaaataaagaaattaatattttaaacttatctgatgaaaaacataatgaaataagaggtaatgatatttcaatggtatttcaagaaccgatgacttgtttgaaccctacaatgactgttggtgaacaaattttggaagtaattataaggcataaaaagatatctaaaataaatgcaaaaaaagaaatgattggtttattagaattagttgaaattccagacccaattcaaagatcaattgaatatcctcatcaattatcaggtgggatgaggcaaagaattatgattgcaatagctttggcatgtagtccaaaactaattattgctgacgaacctacttcagctttagatgtaacaatacaagcgcaacttttagaattattaaaaaaactcaaaagctccattgttaccaaaactagtattttatttataactcatgaccttggaattgtaaagaattag

SEQ ID NO: 268602 - DNA, 546 bp, Unknown
  Bacterial polypeptide expressing nucleotide sequence isolated from the Sargasso Sea
ttgatgctgccttaaaagatatgttgcgttgggatatccgtaacgcattaaaagaagctggcgtaccggcaatttgggtaacgcacgatcaagaagaagcgctttcggtgggcgatcgtgtgggtgttttaaaaggcggtaaaatacaacaaattgacaccccagagcagtgttttagtaccccaaacaaccgctttgttgcgcgctttttaggtgaagccagctttataaaaggaaccctaaataacggccaagcgcttactgatattggtaatgtacctgcaaacggcgttgattgtgacactggtgaggtagaagttctacttcgtccagatgatgtattattagtacaaagcagtattggtaataatggtgaagtaatttgggtacgctttgaaggcggtagccgtttatgcgcggttaaacttgcatgcgaaaccgtggtaactagccgagtaagccatgaggtggttgtacacccaggtgacaaggtacatgtttcgctcagtacatctcacccattggcggcatttaaaagcgtgtagc

SEQ ID NO: 268603 - DNA, 754 bp, Unknown
  Bacterial polypeptide expressing nucleotide sequence isolated from the Sargasso Sea
aatcaaaaatatatctcttagttttggaggcgttaaagcaatacaaaattttagttttgatattaagcaaggggaaataagagctatcataggccccaatggagctggaaaatcctcaatgttaaatgtaattaatggtttttatcacccgcaagaaggtgaaatatggtataatggtaaactcagaaaatctttaaaaccttatcaaattgcctatcaaggaatagctagaacttttcaaaatatcgcattatttaaagggatgaccactttagataatatcatgacgggaagaataactcatatgaaaactggtttacttagtcaagccatatggtggggcatggccgagaaagaagaaattgaaaatagagaaattgttgaaaaaattatcgatttcttagagattcaagccatcagaaaaacccccgttggtaggcttccgtatggattacaaaagagagttgaactaggcagggcattggctgctcaacctaccttactattattagatgaacccatggcaggtatgaatgtcgaagagaaagaagatatgtctagatttgtactggatgtaaatgatgagtttggaactacaatagcacttattgaacatgatatgagtgttgtaatggatttagccgatagaattgtagtgatggattatggaaaaaaaattggtgacggcactcctaaagaaattaggggcaatcaaaaagtgattgatgcttatttgggagtttctcatgactga

SEQ ID NO: 268604 - DNA, 571 bp, Unknown
  Bacterial polypeptide expressing nucleotide sequence isolated from the Sargasso Sea
ttggaagaaaaaaaatatataaaaccaaaattagttcaagtttcaaattgtttagcaattgaaaacctaagcaaatttataaaaagtaaaaaaattcttcaagatgtaaaccttaatgttaaaccgggagaaatagttggtcttttaggacctaatggggctggaaaaactacttgttttcaggccatagctggtttaatcactcctgatcacggaaaaattatattaaaccacagtgaaattactttctacccaatccataaaagagcaagattaggattaaattacttacctcaagaaacttcaatttttagaggtttaacagtagaacaaaatattagagcaataattcaaacttcaaatgttaattcgatgaaccatgatcaatatttaaatgaattacttactgaatttggattagaacacattcgaagagcttcttcattaactttatctggaggagaaagaagaagagtagaaattgccagatgtattgcttctaaacctaaatttcttttattagatgaacctcttgcaggaatagatcctatagctttaaatgaaatcaaag

SEQ ID NO: 268605 - DNA, 815 bp, Unknown
  Bacterial polypeptide expressing nucleotide sequence isolated from the Sargasso Sea
agttctttgttttcttggaccatcaggatgtggaaaaacaacaactcttacaatgattgctggattagaattacctacatcaggagaaatttacttgggagatgaagaagtgggaatgcttagagcatccgagagagatattgcttttgttttccaattatttgcactttatccgcatatgaatgttaaaaataatttgtcatttcctctaaaaatgcagggatatagcagagacgaaataaaaactagagttcaggaagctgcaaaacttttaagaattgatcatattttaaattcaaatatttcatcgttatcaggaggagacagacaaagggtagctcttggtagagctttagttaggaggccaaaagcatttttaatggatgagcctttgggtacattagatgccgaatttagagaattaatgtgtttagagcttaagaaactgcacctagatattggtgctaccacagtttatgtaactcatgatcaattagaagcaatgtcattggctgatcgtattgcagtgatggacggtggtgaaattttacaagctgatgagccagcagtaatttacaataaacctacaacaaagtttgtagcttcttttattggttctcctggaatgaattttataaatattgatcaaggtatctctaacgaacaatcaactttaaacatagagggaactaattttaacataccaaaacaacacgaaatatcgaaaggcaaaaaaattcttttggtattcgtccagaaatctttctctaacaatgaaggaggtcttaaaggctcagtgtttggtgtagaatatt

SEQ ID NO: 268606 - DNA, 787 bp, Unknown
  Bacterial polypeptide expressing nucleotide sequence isolated from the Sargasso Sea
aaaatcaaagacaaaaccaatgcaccagagctgcagttgcagcaaggtcgtattgagtttaagcaagtacattttagttatcagccgggccgccctattctgaatggcttaagttttgtggtagagcctgggcagaaactggcgattgttggtgcttcgggtgcaggtaaaagtaccatagccagactgttgtatcgtttttacgatatccaaagcggcagtatatgcattgatggtcaggatttacgtgatgtgactcaaagctcattacgccaaagcatcgccatagtgccgcaggacacagtgttgtttaacaccagtatcagagaaaacattcgttacggtaaccctgaagccagcgaggcagaagtggatcaggtgatcaagttggcccatctggacagctttatccaaagtttgcctcaaggcgaccaaactttagtcggtgaacgtggtttaaaagtatcaggtggagaaaaacaacgtattgccatagccagggtattgttaaaaggctcccctattctgatttttgatgaggccacctcagccttggattcacactcagaagccgctattttaaaagccttgcgtgaactggcgaaacaccatacttcagtggtgatagcgcaccggttgtcgactattaccgacgcggacaagatattagtgctgcaacaaggcgaagtggctgaagctggcacccaccagcaattgcttgcccaacaagggctttatgcacagttgtgggccaaacagcaagaggctaaacccaaagctgagtaaa

SEQ ID NO: 268607 - DNA, 691 bp, Unknown
  Bacterial polypeptide expressing nucleotide sequence isolated from the Sargasso Sea
tatgctgagaacagaaaacataacttcattttatggagaaattcaagccttaaatggactgacccttgaggcgcagaaaggagaagtaacttgtgtactaggtccaaacggagcaggaaaaacaacaaccatgttcacaattgctgggattttaaaatcacgaactggttcaatatttcttgaagatgaagaacttactcgtgagtcagcccagtcaatcgttaaaaaaggtgtagctcttgtgccagaaaaccgactggtttttcctcagatgtctgttgaggaaaacctatatgctggtacctttacacgatcatccaatgatccctcgatagaaaacgacatcctgaaaatgtatcagcgattcccacctctagaaggtcgacgagatcaacttgcaggaacactttctggaggggaacaacaaatgcttgctattgcccgcgcaatgatggcaaaaccaaaaatccttcttatggatgaaccgtctctgggtcttgctcctttagttgtaaaagagatatttaatattattaggcaacttaacgaagaaggggttacaatacttcttgtagagcaaaatgcaaggatggcacttaaaattgcacacaaggtttacctactcgaaaaaggtaaggttagttttagtggcagtccagaaggaattcaccaagacgaagtaatcaagcgt

SEQ ID NO: 268608 - DNA, 647 bp, Unknown
  Bacterial polypeptide expressing nucleotide sequence isolated from the Sargasso Sea
aatgaaaaattctattgaagtaatcaacctttcaaaaaaatataaagataaagaagcagtagctaatattaattttaaaattaatgaaaatgaaatggttggtttattaggacctaatggatgtggaaaaactacaactattggaatgattttaggattattaaaaccaagtagtggtgaggttttaatcaacggagaaaatattgaaaaaaacaaaatctcacttcttcacaaaatgaattttatttcaccatatattgaattacctaaaaaacttaaagttaaacaaaatttaattgtttatggaaaattatataatattcaaaatttaaatgaccgaatagatcaccttgcaaataaacttagattaaaagaccttttaaacaaaattacaggagaactttcttctggacaaaaaaacagagtaagtcttgctaaagctttaataaatgatccaacggtacttttgttggatgaacccactgcttcattagatcctgaaactggtgattttgtaagatcgtttttagaagaatacaaaaaggaaaaaaaaatatcagttttgcttgcctctcataatatggaagaagtaaaaagattatgtagttctgttttaatgatgaaagatggtttaatagtggatagag

SEQ ID NO: 268609 - DNA, 415 bp, Unknown
  Bacterial polypeptide expressing nucleotide sequence isolated from the Sargasso Sea
atggctaaatcggcaaaaaaatccaagattgttataagaatcgaggatatgcacaaatggtatgggcaatttcatgcgctcaaagccattgaccttgaggttacgcagggagagcgcattgttatttgtggcccctccggctctggcaagtcgacattgatacgctgtatcaaccggttggaagttcatcaaacaggtacaatcagcataaacggcaccgaattatccggggatttgaagaatttggaaacgattcgctccgatgtgggtatggtatttcagtccttcaatttattcccacatcttaccgtgctagagaattgtacattagccccgatatgggttcgtaaattgccaaagaaagaggctgaagaactggcggttgagtacctgacacgtgtcaaaataccagagc

SEQ ID NO: 268610 - DNA, 664 bp, Unknown
  Bacterial polypeptide expressing nucleotide sequence isolated from the Sargasso Sea
aatggttagaaatcctgttggatttttaatggatgagccactttcaaatcttgatgctgctttaagagttcatatgagatctgaactatctgaactacataaagcattaggttcaacatttgtatatgttacacatgatcaagcagaagctctaactatgtcaaatcgtttagctgttatgatggacggtaatatactacaattagggaaaccaagagaaatttatgaaaaaccatcggatattagagttgctgagtttattggatctcccaaaattaatattttttcttgtaatgtaataaaatctaatcaggtagagatctgtggatttaaaattcaaggaaattttcaacatttcatggataaaaaaatatctattggtattagaccagagcacttatcactaacaaatgacagaaattgcattaaaggaataatcaagcatagagagaatttaggctctgatttttttatgcatgtagaatctccaaatattgaaaaaagaataatattaagagtatcacctgaagaagcattaaatttacaagtagatgccaaagtcaacttcaatttttcacaaaaatacgctctattttttaattcagcaggtaagcgagttgaagtctttgatccaaataatattaccaacaagaaaatagcatga

SEQ ID NO: 268611 - DNA, 448 bp, Unknown
  Bacterial polypeptide expressing nucleotide sequence isolated from the Sargasso Sea
atgccaaatcttaaggatctaaaagttagaattaatagcgttcagtcgacgcaaaagatcacgtctgctatgaagatggtagcggcggccaaacttcgtcgagctcaagagcaagcagaggaggccagaccatattcgcagcgaatggaccgcatgattgcggcattggcagggaaaatgagtaatgttggtgggccagcattgttagccggaaccggctcagaagagaagtttttgctcgtggtcatgactgcagatagaggtctttgtggaggttttaactcaagtattgtaagagcaacgcgcaagcgcatagcggaactccaagagaatggaaagtcagtaaagctactatgcgttggaaagaaaggggcagatcagttgcggcgagatgctagcgacttaataactgatgctttggaaggcatctcgaaaggcgcaatagagt

SEQ ID NO: 268612 - DNA, 304 bp, Unknown
  Bacterial polypeptide expressing nucleotide sequence isolated from the Sargasso Sea
atcaagtggtgaacaacaaagggttgcattggcaagagctatggcgccaaatccaaaaattttgttaatggatgaaccttttggagctttggataaggaattaaaagtaagattgagatctgaaacaaataaaattcttcgtgataacctcactacaactatcattgtttctcacgatactgaggacgcgctagcaatgtctgatagagttttaatcatgaaagatggtaattttattcaaaacggcaaacctgaagatgtcatctctataagttcaaccgcatctcaaaaaaaccttatttaa

SEQ ID NO: 268613 - DNA, 730 bp, Unknown
  Bacterial polypeptide expressing nucleotide sequence isolated from the Sargasso Sea
aatgaaaaattcaattgaagtaataaatctctctaaaaaatataaatcaaaaaatgctgtaagtaatattaattttaaaattggtgaaaatgaaattgttggtttattgggtcctaatggatgtggaaagacaacaacgattggaatgatattgggtttattaaaacctactgaaggtgaagttttaattaatggaaaaaatatcgagataaataaaatacctattttacataaaatgaattttatatcaccttatatagaacttcctaaaaaattaaaagttaaacaaaatttaattgtttatggaaaattatataacgttcacgatttagaaaatcgaataaattatctctcggataaacttagactaactgatcttttagataaaataacaggtgaactttcatcaggacaaaaaaatagagtaagtttggcaaaagctctaataaatgatcctacggttctactactagatgagccaacagcctcattggatcctgaaacaggagattttgtgagaacatttttagaaaattataaaaaagaaaaaaaaatttcagttttacttgcttcacataatatggatgaagttaaaagattgtgtggttctgtcttaatgatgaaagatggaattattgtagatagaggaacacctaaagatttaatattgaaacatggtagaaaaaatttagaagaggtgtttttggaaatagcgagaaataaaagatga

SEQ ID NO: 268614 - DNA, 940 bp, Unknown
  Bacterial polypeptide expressing nucleotide sequence isolated from the Sargasso Sea
agaatatacagtctacctgaaatgagcgaagaagagagtcttaaggtttcagatttagaaatagagttttcagagcttggagggtatacctcggaagcagatgctaataaattattaattggattaggtatccctattgagtcacatgataagctaatgagttctttagagcctggtttaaaactaaaagtacttttagctcagacattatttggtaatcctgatatattattgcttgacgaaccaacaaataacctggacttgaattctatcaaatggcttgaagaaattcttaaaaaaagtaatagtacaatgattataatttctcatgacagacagtttcttaataatatatgctctaatattgcagatttagactatggagaaatccgtttatatccaggtaattatgatgatttcatgtttgcttctacacaagctaggcagcaattaattaatgaaaataaaaagaaaacagaaaagatagaggagttgaaagcatttgcaaggcgattttcagcaaatgcttcaaaagcaaagcaagcaacatctagattgaatcaaatagataagataaagctggtagatatagcaaagtctagtagagtgtatccttttataaggtttgaacagaatacaaagctttacagtaatgttttagatgttaaaaatttatctaagaagtatgatgacttagaagtgcttaaaaagataaacttttctgtagaagttggtgaccgaattgcaatactaggagcaaatggtatagggaagagtacattgttaaattgtttgatggatgatacttttaaagattcaggagatacaaattgggcaataaatgcagaaattggatacttcgctcaagattcagatgaaaaagtagattcagagctatctcttattgaatggatgaaaacatatgctgaccctgtaatgg

SEQ ID NO: 268615 - DNA, 526 bp, Unknown
  Bacterial polypeptide expressing nucleotide sequence isolated from the Sargasso Sea
aatagaataaatcttctaaaaaaaatgaattttatttctccttatattgagttaccaaaaaaacttactgtcaaagaaaatctaatggtttatggtaaattatattctgtatatggtataaataatcgtattgattatcttactgaaacattaaggttgagtgaattcataaataaaaaaactggtgaactttcttcaggccaaaaaaatagagtcagtcttgcaaaagcattagttaatgatccagatattttattattagatgagccgacagcttcattagatccagaaacaggagattttgttagaactttcatagaaaaaatttcatcagaaaaaaaaatgtcaatcttgcttgcttcccataatatgaatgaagtaaaaaggctttgcaaaagtattttaatgatgaaagacggaaaaattatagatagaggcacgccgtcagaaattattaataaacacggtaaaaaaaacttagaagaagtttttttaaaacttaatagaactaaaaatgagttataat

SEQ ID NO: 268616 - DNA, 517 bp, Unknown
  Bacterial polypeptide expressing nucleotide sequence isolated from the Sargasso Sea
aatgagcagtattatcgaagtaaaaaatgtttcaaaatccttcggcggcgtaaaagctaatgtggatattactttgaatgtaaaaaaaggttcgataactgggataataggacctaatggttgcggcaaaactactctttttaactcaatagtgggatctcatcctatagacagtggttccattagattcgatgataaagaaatctctcatttactagtgggtgatatagctcgattaggtatgttgcgaacctttcagcaaacaagaatttatcagaaaatgaactgtgttgataacatgcaaatatcagtatcgcatcgcaaagattcaaaaaatggtatatttgcaagtcgaaaaggcgaaattcaagatagagctgatgacttgctagaatttgtaggcttgtactcaaaaagaaatctgatttcaggagatttatcttttggacaacagaagctattagagtttgcaatggccttaataaaagatcctaaggttttacttcttgatgagcca

SEQ ID NO: 268617 - DNA, 586 bp, Unknown
  Bacterial polypeptide expressing nucleotide sequence isolated from the Sargasso Sea
atgaataaatttaaagttctagacgatggtttagtaattaataaaatttccaaatcttttggaaataagcaagtagttagagatgttagtattaatattaacaaaggagaaatagttgggttattaggtcctaatggtgcaggcaaaacaacaacgttttacattattgttggattgttaaaaccggatgcaggttcaattattttagataaaagtgatgtttctaatttgccaatttacttaagaggtcaaaaaggtattagctacttaccccaagaaccatcaattttcagaggtatgaatgttgaagataatttaatgtcaatcattgaaataatagaaaaagataaatcaagacatcaaattatattagaaaatttattaaatgagtttgacattaatcatgtaagaaaatcaaaatccattgtcttgtcaggaggagaaagaagaagacttgaaattgcaagaacccttgcatcaaaaccaaattatttactcttagatgaaccattaacaggtattgatcctgtatcgattgaagaaataaaattaatcataaaaaaactaaaaaacaaaaatatagggg

SEQ ID NO: 268618 - DNA, 317 bp, Unknown
  Bacterial polypeptide expressing nucleotide sequence isolated from the Sargasso Sea
cagagtttcattagcaaaatctcttataaataaaccagaaattttacttttagatgaacctacagcaagtttagatccagatattggagattttataagaagctatatccaagaatataaattaagaaataaaattacaattttattagcttctcacaatatgaatgaggtggaaagactttgtgacaatgtaattatgatgaaaagaggtaaaattatagaccatggtacttgtaaggaattaataaataaacatggcaggaataatttagaagaaacatttttaaaacttgcgaggagtaaagatgaattttaac

SEQ ID NO: 268619 - DNA, 560 bp, Unknown
  Bacterial polypeptide expressing nucleotide sequence isolated from the Sargasso Sea
tttatcaggcccgtctggttctggtaaaacaactttcctcaatgtctttggtctcattgaagacattcaaggtggagatattgagtttgaggggaagaggtttagaaacctcagtgaagaagataaaaactatataagaagaaatcaagtaggttttatctttcagcatttcaacctctttcctgttttaagtgcggaggaaaatattgagtttttccttgttagacagggtgtagaaaagaaagagagaaaagagcttgttcataaagcgctaaaagatgttggcctatgggaccatagggataaaagacctcttgaaatgagtggaggtcaaagacaaagggtggcggtagcaagggccctgactaaaaggcctcttgtgatcattggagatgagcctactgcgagtctcgatcaaaaaacaggcaaagaaattgtcaatcttcttaaaaatttaagcgatgaatatggtgcctcaatcattttatctagccacgatacaatggttcatgagtttgctgaggaacttgtcatccttaaggatgggaggttaacctgat

SEQ ID NO: 268620 - DNA, 748 bp, Unknown
  Bacterial polypeptide expressing nucleotide sequence isolated from the Sargasso Sea
tatgaatattgaaattgaaaatctctcattaactattagaaattctaacattttgagtggaataaatgctttggttccttccggttcggttactgcggttttaggagctaatgggtctggaaagtcgtcatttttaaagtgtttggcaggtttaattgcgtacgatggtgaaatcaaaacacggttcgagaaatttggtaagatatcttatgttccgcaacgcccagcagtccccgttggaatgacattagctgaatttgttttattgggtaggtctgaatataccaaatggtacgtttctgaaacgtcctcagatcgagaaaaatgtaaagatgcaatttctagtctttcactatctcaattagcagaccggttcgttgaaactttgtccggtggagaactgcagagagcggtcctcgctagggctgtagcacaagaagcaactttattaatacttgatgaaccaacaagtgcgctagatattgttaaccaggttgaagtgatgtcttaccttgtcactttacagaaaaaacataaactaactataatagtagcccttcatgatttaaatttggccctaaattactctgatagaactttattattaaaagatgggggtatgattggatttggaaagactaaaagtgttatgagtgcacaaaaattgtcggaggtttataaaagtccaattgaaattagatctcatgaggatggaaatcagacaatatttgtaaagtacagtctataa

SEQ ID NO: 268621 - DNA, 617 bp, Unknown
  Bacterial polypeptide expressing nucleotide sequence isolated from the Sargasso Sea
gcaaaactacatcaataggaatgatgcttggattaataaagccaactacaggcgatatattatacaagataaaaatataaatacatttcagagaaatacacttttaagcattatgaattttgcatcaccctacgtagaattgcccaaaaaacttagtgtaaaacaaaatctccaaatttatggaaggctttatggggtaaaagatttatcccttagaatagatgaattggctgaagacttaaatttaaaagattttttaaataaaaaaactggtgagttatcatcaggacaaaaaaatagagtgtcgcttgctaagtcactaattaataaacctgaaattcttctattagatgaaccgactgcaagtcttgatccagatattggtgattatgttagatcttatgtgcagtcatataagtccaaaaataaagtaactatacttttagcttcacataatatggctgaagtagaaagactttgtgacagtgttataatgatgaaaaaaggcaaaattattgatcaaggaactagtaaagagataattaatagacatggtcgaacaaatctagaagaaacatttttaaaaatagtaaggagcaaagatgaggtggcataaa

SEQ ID NO: 268622 - DNA, 328 bp, Unknown
  Bacterial polypeptide expressing nucleotide sequence isolated from the Sargasso Sea
tatgaatgacacatctcaaagtttcgttaaatttgaaaagattgataaaagttatgatggtgaagtactagtagtaaaaaacttgaacttggacattgctaagggtgagtttgtaacaatgttgggtccatcgggatcaggtaaaacaacaactttgatgatgttagctggttttgaaacacctacaaacggtgaaatatttttagatactaaaccaataagtaaaatacctccttatgaaagagaaattggaatggtatttcaaaactatgctttatttccccatatgactgttgcggaaaatttatcattccctctagaagtgaga

SEQ ID NO: 268623 - DNA, 628 bp, Unknown
  Bacterial polypeptide expressing nucleotide sequence isolated from the Sargasso Sea
tatgtctgaaccagtaattaaatgccaatctgtttataaaatctttggagcaaatgctgaaagaatgcttaaagaagcaaatggtaatgttgatgcaaaaacatttcaagaaaatggatgtattgtaggagttaacaatgcttcttttgaggtatctaaaggtgaaatgttagttgtaatgggtttatcaggatcaggtaagtcaacactattaaggtgtatatctagattaacagacgcaactggtggaaaaatttttattgaaggtcaagacttgcttaatttaaataacaaggaacttattgaattaagaagaaataaaatgggaatggtttttcaaagttttgcgctacttccacataaaacagttttagaaaatattgcttttcctcttcaaattaagggtattaaaactgaaaatagtattaataaagcaatggatatggtcaaacttgttggtctagatggaagagaaaattattttccaagagagttatctggaggacagcaacaaagggtaggaattgcaagatcattggcggtcgagccagatatatggtttctagacgaacctttttctgcattagatcctctaataaggaaagaaatgcaagatgagtttttaaga

SEQ ID NO: 268624 - DNA, 664 bp, Unknown
  Bacterial polypeptide expressing nucleotide sequence isolated from the Sargasso Sea
agaaaaaggaagaccttattcagataagatgaacaacattatacttaatctttcaaatagtattacggataaagaaaatgcaccgaaacttctagttggatcaagcgaaaataaaactcatttatgtattgttatgacatccgacagaggattatgtggagggtttaatacaaatataattaaaaaagctaaatcatattttcaaaaaatattagatcaaggaaaaaccttaaagattatcactgttggatcaaaaggttatgatcaattaaaaagagcttataaagataatataattgaaaaaatttcttttaaagaatctaaacatgttaattattttgatgctgacaaagtaggaaaaatcattattgataaatttgaaaaaaaagaatttgatgtatgcacaattttttataatcaatttaaaaatgtaataactcaaataccacaagaacaacaaattattccattaaaaacctcccattcagaaggatcttcatctgaagataattatgaatttgagcctgaagaagatgaaattttaagtaatttattacctaaaaacatatctactcagatttttaaagctatgttggagaattcagctagtgagcaaggttcaagaatgagcgcaatggataatgcaaccagaaatgcaggagaa

SEQ ID NO: 268625 - DNA, 700 bp, Unknown
  Bacterial polypeptide expressing nucleotide sequence isolated from the Sargasso Sea
tgggaaaatggaaatcgatatgcgatcttaggtccttccggatgtggaaaaactacaatgctcaatattgtgtctggcttagtgagaccttctgctggaagaatactatttgatgataaagacgttacagatttaaaaacagaagatagaaatattgctcaggtttttcaatttccagttatttataacactatgactgtttatgaaaatttagcattcccgcttaaatgcagagatttttctaaaagtaaaactgatgaaagagttaattcagttgctgaaactttaaatttgaaatcttttttaaattcccctgcaagaaaattaacagcagatcaaaagcaattaatatctttaggaagaggtcttgtgagagaggatgtggctgctgttttaatggatgaacctttaacagttatcgatccagacttaaaattcagattaagaagaaatcttaaagaaattaatgagcaatataaaacaacattagtttatgtaacgcacgatcaaaacgaagcgatgacttttgcagataacataatagtaatgagtgaaggagaggtggttcaaaccggttcccctaaagaactttttgaaagaccaaatactacatttgttggatactttattggatcaccagccatgaacttatttgaaagtgaagcttcaaaaaacgacagtgtaaaaataaacaatactt

SEQ ID NO: 268626 - DNA, 839 bp, Unknown
  Bacterial polypeptide expressing nucleotide sequence isolated from the Sargasso Sea
gctctctctggtggctggaagatgaagctcgccctcgcgcgcgccatcctcatgaaggcggacatcctcctcctcgatgagcccaccaaccacctcgacgtgaagaacgtcgcgtggctcgaggattacctcatctcccagaccaccgtctcgtccatgattgtgtcccacgattccggtttcctcgaccgcgtgtgcactcacatcatccactacgagacccgcaagctggtgacctacaagggtaacctcaccgagttcatccgccagtgccccgcggcgaagaagtacaccgagctctccaacgacgagctcaagttcatcttccccgtccccggtttcctcgagggtgtcaagaacaaggacaaggctatcgtcaaggcgaacaactgccacttcacctaccccaacaccgaccgccagatcatctcgggcgcctccatccagctctctctctcctcccgcgtcgcgtgcctcggccccaacggtgccggtaagtccaccttcattaagctcctcaccggcgaggctgagcccgacatcggtaccgtctggcgtcaccccaacatgcgttacgcctacgtcgcgcagcacgccttccaccacgtcgagcagcacctcgagaagactcccaacgagtacatccgctggcgcttccagactggcgaggacaaggagaacctcaccaaggtgaccgcccagtacaccgaggaggaggagcgcctcatgaaggagaagatccccgtcccccaggaggatggttccatcctcaagctcgtcgtcgagaagattctctcccgccgccagaagaagtccaagtacgagtacgaggtgcagtg

SEQ ID NO: 268627 - DNA, 354 bp, Unknown
  Bacterial polypeptide expressing nucleotide sequence isolated from the Sargasso Sea
acaaatatgaaactaagattactgaaagaggatcaaatttctcaggcgggcaggtccaaaggatagcgattgcaagagcaatactagggaacccgtcaattcttcttctagatgaggccacaagtgctttagatgcagaatcagaatcagaagttcaagaaggtctaaatagagctatgaaaaatagaaccgttattgtaattgctcatagattagccactactcaagaggcagataaaatagttgtcttcgataaaggtgagattatagatgttggaaaacatattgatttaattaataaaaaaggggtatataaagaattatgtgaaaaccaattaattaagaaattataat

SEQ ID NO: 268628 - DNA, 662 bp, Unknown
  Bacterial polypeptide expressing nucleotide sequence isolated from the Sargasso Sea
gacagccattttaggtccgagtggatgtggaaaaactacactactaaaagttattgcagggttaattaaacctagtgaaggtttagtaaaagttaaaggaaaagaaattgctggtcctgggacagatagagcacttgtatttcaagattttgcattacttccttgggctaacgtgttgcagaacgttggatttggtttacgcgctaggggtataccaaaaaaagaaagagaagaaactgctttgcattatataaaagaagtaggtctattgggatttgaagataagtatcctcatcagttgtctggaggtatgcggcaaagaactggtctagctagggccttaactgttaattcagacatacttttaatggatgaaccattttccgcagtagacgaacaaatgcgaagaaaactacaagaagatttgttaacccttttgaaaattgaaagaaaaactgtcatatttgtaacacattcaattgaagaagcagtatatttagcggatcaggttgttatattatctggtagaccaggttctatagcagatatagtacatcctgaaattgatcgtctaggagaaattgaattgataagacgtcagcctcggtatatggagcttgttgatgaaatttggagtagtttaaaacgttatgttgagtagg

SEQ ID NO: 268629 - DNA, 715 bp, Unknown
  Bacterial polypeptide expressing nucleotide sequence isolated from the Sargasso Sea
attggctgcgaaaagtatatcaaaatcttttgataaaagagttattttaagaaaaatcgacattcatttaaataagggtgaaatgttgggattgcttggaagtaatggagctggaaaaagcacttttatgaatatagtgttgggccttttaaaatgtgattttggtgatatttttttgggtaatacaaaattaactaacttagccattcacgaaagatcaaaattgggtattgcatatttaccccaacaaacttcaatttttagagggcttaccgtttatgaaaacttattaggtatagcgcaaattgtaaaaaagaagacttctgatcagcgtgatatagtagaaaaacttatggctgaattttcgataacccacttaagagatgttaaagctactgctctttctggtggtgaaagacgtagaacggaaatagcaagatgtttaataaataaccccaaagttctcttattggacgaaccatttgctggtgttgatcttcttagcatacaggatataaaaggacttcttatgaagcttcagtcgcgtggatgcgccgtactggtaacagaccacaatgcttcacaacttctaagcgttgtagatcgtgcctacgtaatagccaatggaacaatagtagctaacggaaccccaagacaaattgtaaatacatctgaagcaaaaaaattatattttggtgaagattttacattttag

SEQ ID NO: 268630 - DNA, 826 bp, Unknown
  Bacterial polypeptide expressing nucleotide sequence isolated from the Sargasso Sea
ttgctttctaaaccaagccttcttttgcttgatgagccaaccacagctcttgatgttacagttgaagctggaatcattaatcttgttaaaaatcttagtaaagaaattggtacttctatgctctttgtctcccataatttaggtttgattttagaaacttgtaatagaatcactgttatgtattctggcgaaactgttgaaacaggtgaaataacggaagtttttagaaatatgagacatccttatacacaagggcttcttcgatctatcccccttccaggaaaaaataaatatgacgctccacttgaagccataactggacaacttcctctgcctcatgaaagacctaatggctgtaatttcggtccaagatgcccacattttgaagaaaatatatgctcatcaaatatgatacaaatggagcttattaataacaataatgatcattatagtcgctgtgccaaaattaataaaataaattggaatatcaaaaataaatcttctaaaaaatctcctgttggctcttctggaggcacgcttttgaaaattcaaaatttaagcaaagattatgacgttgctgctaatgttgttttcggaggaaaaaagaaaggtaccataaaggcgaatgtagatttaaactttgacgctaaagttgctgaaacattggcgatagttggggaatcaggttgtggtaaatctacttttgctaaagttctattaggccttgaagaagcttctagtggtaaagttgagtttgaaaacattgatatttctaatacgacagttgagcaaagagaaaatctacagtttcatcaattcaaatgat

SEQ ID NO: 268631 - DNA, 550 bp, Unknown
  Bacterial polypeptide expressing nucleotide sequence isolated from the Sargasso Sea
atgactacattaatatctacatcatctatttcttacgatctaacatcatgccgcttatttgatgggctttcttttaccattaaaaagggtgaccgcattggcctaattggcagcaatgggtgtggaaaaagcaccttactacgtctattaaacaaagacttaccagactacgttggtagtgtctcattcgcctcttatgccgaagtcgcgcttattgagcagcatctccctaaacgattgctgactatgtcgatgctcgattccgttgtcgataacctgccgacagagatacaactctctgagcaatggcgtgctcaaatcatcttgtctaatttaggctttgacgaaagctattgggagcagccgattggcaccttaagtggcggtcaatacgcacgagtgctggtggcaagagccctgattgtcgaacccgacgttctactactggatgaaccgagcaaccacttagatttgccaaccttgctttggttagagcagtttctgatggattggaagggcacttttgtgatggtgtcacatgaccaaaggt

SEQ ID NO: 268632 - DNA, 364 bp, Unknown
  Bacterial polypeptide expressing nucleotide sequence isolated from the Sargasso Sea
tatttagaagggttagtctgtacttacagagagctaacggggtctcgttttccgtttgatgaagaaaagtttagagaaaaagcacaagaaggaatagatcatgggcataatccttttccaggtcacggagctgctgttagttctagccctcatcgtaaagatcgattaaaagatatcaatttacctactttagtaattcatggaacagaagatgccattcttccttttgaccatggccaagcactagcagatggtattcctaattctgaactaatgactttggaaggagtagggcatgaaatccctgaacagctgaacgatgagatcgtaactaaattgatagagcactttaataaagcttaat

SEQ ID NO: 268633 - DNA, 640 bp, Unknown
  Bacterial polypeptide expressing nucleotide sequence isolated from the Sargasso Sea
aatcttagaaattaaagacttgaatcattcttatgggaagtctgacttaacaataaaagatcttaatttaaatatttcaatcggagaaagagtttcaatattaggtccttcgggatgtggaaaaagtactttgttgagacttattgctggtttggaaaaaccaaataatggtgagattattaagaaagccgaagttatgaccagtgacaaaatatttattcctcctgagaaacgaaatgttgggctagttgtgcaagagaaagctctttttcctcatttgtctgtttatgaaaatatttgctttggtattcagaaaaacaaagataaaaacaaaactgtatcggatcttctagagctcttaaaaatagattctcttcagaataagtaccctcatgaaatatctggaggcgaacaacaaagagttgcacttgctcgatctcttgctcctaatccagatttactaatgttagatgaaccttttagcgcactagatgaagagcttagaaaaagtttatatgaggaagtatcgaatgttttttctgataggaattcaagtattcttttagtaactcatgatgcttatgaagctgaggtcatgactgataaacagttaagaatggaaaaaggtaatttaatttag

SEQ ID NO: 268634 - DNA, 227 bp, Unknown
  Bacterial polypeptide expressing nucleotide sequence isolated from the Sargasso Sea
gcaacagagagttgcgattgcacgggcacttgcggtgcgcccaaagttacttctagcggatgagccaactggcaacctcgacgaaagcactgcgtctgcagttctaactgctatgctggacttagttgggcgcactggcgcagcacttatggtcgtgacgcattctgctgctttggccggcaaaatggatcggcgagtacgattgaagggtggagttcttctgtgaa

SEQ ID NO: 268635 - DNA, 643 bp, Unknown
  Bacterial polypeptide expressing nucleotide sequence isolated from the Sargasso Sea
tttagttatgacaaatctagtaaacaatcactacaaaatataaattttagtatttcacatggcagtaaaattggtttaataggatccacgggaactgggaaaagcactttagttgatcttattttaggtttattagagccaacatcgggagaaatatctgttgatgatgtaaacattaaaaaaaacattaagggttggcaaggaaatattggatatgtgccacaatcaatctttcttatagatgataccatattgaataacattgcttttggtattcaagaaaaagatattgatcttaatagatttgataaatctatcaaagacgcaaagttatacgattttgtttattccctacctgaagggtttaatactaaagttggtgaaagaggtgtgagattatcaggtggccaactgcaaagaattggaattgcaagggcattatataataatcccaagtttctggtattagacgaagcaactagtgctcttgatgttaatactgagaaagaaataatggatgcgatttataaaaatataaaagacaaaacaatatttataataactcatagattatctactttaaatcagtgtgatttcatatataagataattaatggaaaattagtttctgaaaaaatataaa

SEQ ID NO: 268636 - DNA, 231 bp, Unknown
  Bacterial polypeptide expressing nucleotide sequence isolated from the Sargasso Sea
gagtccagcaacgggtagcatttactagggcctggatattgaagccgaaagtcctattgcttgatgaaccttttgctaatatggactttgaatcgcgtgaaaaggcatgtgattcattaaaacacatgaaatctgatggtatgtcaatagttataacaagtcatcataacaatattatagatggtctgatcgacagtcatttttttctttcaaatggcaaactatgttaaa

SEQ ID NO: 268637 - DNA, 709 bp, Unknown
  Bacterial polypeptide expressing nucleotide sequence isolated from the Sargasso Sea
atgaaaaaatactatttagagttgcaaggtctctacaaatcctactttgacggatccggggatcaccatattttaaagggtgctgatcttaaaatacaaagaggtgagacagttgccattctaggaagcagtggttctgggaaatcgactttgctcaacctgattgctggtatcgatctgcctgatcaaggtgaagttcgtattgatggaaaaagtcttggacaaatgtccgaaaagaacagaactttgttgagacgcagaactatgggatttgtttttcagtccttcaatttgatcccaacactgaacgtttatgaaaacttaatgcttcctctcgaactgaaccaaatatcaaaaaattcggggattatttcacaaatgctagaagccttgggtcttgaaggacgtgaagaaagttatccggataggctatccgggggagaacagcaacgtgttgccattgcacgagctttgatgcatcaaccgtcgctcctacttgccgatgaaccaacaggcaatttggatgcggagaccagccaagaaacgcttaaactcatcaataatttagtccatcgttcaagaacgaccatgatcatggcaactcatagtcaggaggttattgagtgggtggaccgagttttgggcattgaggatgggaaattgatcgaacttaaaacttctgaagcgatccaaaaactcgcctcatgag

SEQ ID NO: 268638 - DNA, 262 bp, Unknown
  Bacterial polypeptide expressing nucleotide sequence isolated from the Sargasso Sea
agagctttataccacgatccacaaatactaattcttgatgaagcaacgagtgcactggacaattttactgaaaaagccgtaatggatgcggttgacaatttaagtaaaaaaataaccattattatggttgctcatcgtttaaatactgtaaaaaaatgtgataaaatttttttgctagaaaatggcaaactaaaaaatcaaggaacttttgaagagctgatcaaaattgatgacaatttcagagtaactgctaatagttaaa

SEQ ID NO: 268639 - DNA, 621 bp, Unknown
  Bacterial polypeptide expressing nucleotide sequence isolated from the Sargasso Sea
gctgtggaaaaacaactactattggtatgttgctcggtttagttactcctacttcaggagaaattacaattgaaaaaaaaaatattaatttatttaaaagagatgatatcttaaaaagatttaattttgcttcaccttatgttgagcttcctaaaaaattaacagtgaaacaaaatcttgaaatttatggaagattatatggaataaaaaatttaaatgatagaattaatgaaatttcaaacgatttagatattaaaaatttttttgaaagaaaaactggagagctttcatccggtcaaaaaaatagagtttcgttagcaaaatctttaataaataatccagagattcttcttttagatgagccaacagcaagtttagatccggatattggagatttcgtaagaagttatattcaagattataagtcaaaaaataaggtaacaattttactagcatctcataatatggctgaagtggaaagattgtgtgatggcgttgttatgatgagaaaaggtagagttgtagataatggaacttgtaaagaattaatcacaaaacatggaagaaataatttagaagaaacatttttaaagttagctaggagtaaagatgaattttaat

SEQ ID NO: 268640 - DNA, 625 bp, Unknown
  Bacterial polypeptide expressing nucleotide sequence isolated from the Sargasso Sea
ttcgccgtgcgcggcggcgagtgcctggtgctgcacggccagtccggcgccggtaaatcgaccctgctgcgcacgctgtacggcaactacctggccgccggcggcagtattcgcatccgtcaccagggctcgccagtggagctggtcggcgcagagccgcgccaggtgctcgcagtgcgccgacaaagcctgggttacgtcagccagttcctgcgggtgatcccgcgcgtgtcgaccttggacgtggtgatggaaccggcactgtcacgcggctgggcgcgcggcgacgccgaggcgcgggccaaggcgctgctaggccggctgaatattcccgaggctctgtggcaattggcgccgggcaccttctccggtggcgagcagcagcgcgtcaatatcgcccgcggcttcatggtcgagtggccggtgctgctgctcgacgaacccaccgcctcgctggacgacgccaaccgccaggtggtgctggagctgatcctcgaagccaaggcggccggcagcgcgctgatcggcatcttccatgaccgcatcgcccgcgaggcggtggccgaccgttacctcgacatgagcgccgccgcggcgcaaccggagtacgtctatgtcgtctgaa

SEQ ID NO: 268641 - DNA, 826 bp, Unknown
  Bacterial polypeptide expressing nucleotide sequence isolated from the Sargasso Sea
ttaccctcatcttaatgtttatgagaacataatttttccgcttaaacaaagaaaactaagcgaagagcaaattaaaatggatgtagaagatgcacttaagactgtaggattagttggttttgaaaatcgtaaaattcaagaattatcaggtggtcaacagcaaagagtagccttagccaggtctcttgcaaagaaggcaaagatacttcttctcgatgaaccattggttaatcttgattataagctaagagagcaattaagagaggaatttaaaagaatattctctgcaggcctgtctcaagatacaattttaatatactcaacaactgatcctcaggaagtaatggaattaaatggtgaagtaatagtattacacgagggtaaagttttacaaaaaggagatgctaaagaaatatttgaaaatccaaagaaccttagagtagcagagatctcaaacgacccgccaatgaatattttaacaggtattaaaagttcagataagttaaccttcgaaaatatttcaataaatctgccagcatatttaaaagatttaaagagtcaaaattattatttcggaattagagcttcagaaataaaacttgataaggaaggagaagagtttgaaatagaacttgcagaaataagtggttcagaaactttacttcatttaaaaaaaggaaactcaaaagttatagctttaattgaagaagttatgaatttcaaaattcacgagaaagtaaaagtgaaattcaatgaaaataaattctatgtattcaataataatgaagaattagtttcttcaccctatggagttaataatggctaa

SEQ ID NO: 268642 - DNA, 493 bp, Unknown
  Bacterial polypeptide expressing nucleotide sequence isolated from the Sargasso Sea
tttagtaaatgagtttttaattgaagaagaaatggaaaattggcattctaaagttttttttactcctcaggatatttatttaatagacgatactttagaaaataatattgcattaggtcaagaagacaaaaatatagatttatcaaaacttaaaaattcaattaagtttgctgaattaggttctctcatagaaggtagagaagaaaattatagaatgcatattggagataaaggtttaaaaatttcaggaggtcaaaaacaaagaatagcaatagcaagattattttattttgactcagaatttgttattttagatgaagcaactagtgctttagatgaagaaactgaaaaattaatttataaaaaaatctttgactttttatctaacaaaactgcaattattattagtcataatgaaaataatttaaaaaattgctcaaaaatttatgagcttaaaaatggtaagcttgtaattgaaaaacatgatagttaa

SEQ ID NO: 268643 - DNA, 842 bp, Unknown
  Bacterial polypeptide expressing nucleotide sequence isolated from the Sargasso Sea
cgttcgtctcactctagcaagaaccttgatgcagccatcagatttattgttgcttgatgaaccaaccaatcacttggatttagatgcaatagtttggttagcagattggatcaaatcatttaaaggagccctgatacttatttcgcatgacagagagtttctagatgaatgtgtcaataccatcgcacatatctatcgtcagtcaattgagctttatacaggcaactattcacaattcgaggaggttaaagctttgcgattggccgagcaggccgctacatttaagaagcaacaaagagagatagctcacatgcaagattttgtgaggcgttttaaagccaaggctaccaaagcccgacaagcacagagtagggtgaaggctctagagcgaatggaagtaattgcacctgctcatgtggattcaccttttcatttcaacattcctcagtcagataagatatcagatccattacttacactagatggagctactctaggctattcatcagctgttctggagaacatcaatctcagtttacatcctggcgatagaataggtctgctgggacctaatggggcaggtaaatcaacgctaatgaaaagtttggttgccagcattcctctgcttgatggacataggtttgaaggcggtaatttaaagctaggttatttttctcagcatcaagtagatgatttagatttatccaaaacagcctatcaatgtatacaacaacttgatcctgaaaaaacagagcagcaagtcagaacttatttgggcggctatgattttaagaatgataaagtcaaagatccaataaaattattttcaggcggtgaaaagg

SEQ ID NO: 268644 - DNA, 895 bp, Unknown
  Bacterial polypeptide expressing nucleotide sequence isolated from the Sargasso Sea
gatacttatataggattgatttttaaaaagttagggtacattgatgaaaatgaattatttcgatatataagtcttcaaatgaaaattccatttattaatttaagatactatgaaatagatacatcagtaattgatctgatacctgaaaaaatagcgcgtaatcataaaattttacccctatttagattaaaaaactccttaaatattgccattatagatcctcttgactcgacttctattaatgcagctagagacaccacaggtttagatattgaatcagttattgctcttgaaagcgaggtcgaaaatgcaattgatcttcattatggtatctcaaattatgtaaatgagaactcagcagatggtaactcaacagatattgcagaattatttgacgaaactcgcattgttgagctagtggatagtatcatttctcaaagtcatcgatatcaatcttcagatgtacatattgagccaagagagaatgacattcgaattcgtttcaggattgatggtcggttacaagattttcaagtcttacccaaagatatacagactgcttttttatctcgattaaaaattatgtcaaatatggatattgcggaaactagaagacctcaggatggaagaatcttatttaaatctgagtcaggtaggcttgatttaagaatttcaacttatcctactctatatggtgaaaaagcggttttgcgcttattaaatttagcggaagctctgttttctttaaatgatttaggctttgagaaagacattgcaaggaaatttaataatatgctcattggaggtgagggtattatcttggtttcaggtccaacaggaagtggcaaaacgactactctatattctacattaaatagattagaaaaaccctgat

SEQ ID NO: 268645 - DNA, 289 bp, Unknown
  Bacterial polypeptide expressing nucleotide sequence isolated from the Sargasso Sea
aatgataaaaaaacagagcgttctatcttgtaaaaacttatctaaatcgtttaattctacattagcagttaacgatgtatctttggatctatttgaaggagaaactttgggggtactaggttcaagtggatgtggaaaaacaacacttttaagactaatagctggccttgaaacacctgatcaaggagaaataaaaatttccaattctatagtacaaaatccacaaactaatatccctactcataaaagaaatcttggaatggtctttcaagattacgcattatttcct

SEQ ID NO: 268646 - DNA, 232 bp, Unknown
  Bacterial polypeptide expressing nucleotide sequence isolated from the Sargasso Sea
ttgaatgatgttattgaccttcaagaagctgtagtaacgctggggcagttccccgccttgactggtgtgacattaaaagtagctaaaggtgaaatagttaccataaagggtccaaacggtgcaggaaaatcaacactgttaaggctttgcgccggcttattgccagttcgcgaagggtcagcgtatgtacttggagagaacctaaacgcaaataggcgtgcaataaggcaag

SEQ ID NO: 268647 - DNA, 928 bp, Unknown
  Bacterial polypeptide expressing nucleotide sequence isolated from the Sargasso Sea
ggtgagtgtataacaacacatgcatacattccaaacgcagatcttaaggataaagttatcgctttattgaaagatgtaaaacttgatgatccagagagacgcattaatcattatccacatcaattatcaggtggccaacgtcaaagagtgatgattgcaatggcgctttcaaataaaccaaagcttctaattgcagatgagcctactactgctttagatgtaactatccaaaaagagatccttgatttgttacactccttaagagcctcctataatctttcaatattatttataacgcacaatttaaagattgttaaaaatttggctgatcgtttatatattatgaaagaaggggaaataattgaaagtggtaaaaccgaagatgtttttaaaaaaccaactcacgcatacacaaaagacttaatcgagcctaagattaaaattataaaatcaagattaaacacttcaaagattttattatcagctgaaaacttgtcagttaagtataaaggccctagaagcttatttagaagctcgtctaaagacttttgtgccttaaataaagtttttttaaatattaaattgggcgagacacttggagttgtaggcgaaagcggtagtggtaaaacaagcttagctctatcaatacttaagttggtagattatcaaggagttataaaattgcatcttcctgaacctcgtctcagaaaaaaggaaagacttaaaaattacagacgtaatgttcaaattgttttccaagaccctttttcttcactctcaccaagactttcaattcgtgatataatcggtgaaggtattatttcacatcgtatattttctaaagaacaggtagaagaaaaaatactattagctctgagtagagtagaccttgacaaagatactctaggaaagtatccccatgagtttt

SEQ ID NO: 268648 - DNA, 655 bp, Unknown
  Bacterial polypeptide expressing nucleotide sequence isolated from the Sargasso Sea
tcttgtgagagaccaagaatatttttatttgatgaacctttatctaatttagatgcaaaattaagagttgagatgagacgagaaataaaaaaacttcatcaacaacttaaaacaacagtagtttatgtaacgcacgatcaaacagaggcaatgagtttaggtacaaatattgcaattatgaatcatggtgtaattcaacaaaatgatactccagaaaatatttataataaacctagtaatacctttgttgcagattttattggatctccttcaatgaatttgattaaaggcaatcttaaagaaagttctaacaaaatttcatttattgcaaatggatctaatatcgaaattccaataaatggatataacttcaatgaaaaatctaatttgaataataaagaagttttttttggaattagaccagagcatattttctttaaaaaatctaatgaaagtgattttgagatccctttaaaagctgatttaagtgagtatataggtcatgagcagataatgacatttgactatgaaaatcaagaagtattagctaaatttccctcaacaataaaaattgagctctcaaaaaatacaaatttattttttgatttaacgcaaatttccttatttgatgctaaaacagaagagaggatataaa

SEQ ID NO: 268649 - DNA, 784 bp, Unknown
  Bacterial polypeptide expressing nucleotide sequence isolated from the Sargasso Sea
atgaaaaaaaatgtcattgaagttaaaaatcttgaaaaatattttgaagtaaattcaggatttttaaatagaaataaatcaattgttaaagcagttgataatatatcatttgatatacctttgggtgaaagtttaggtttagtagggcagagtggatgtggtaaaactacaacagctcgctccctttgtttattggatccaaaaacaaatggagaggttaagttttataatactgaaacaaaagagatggatgatattgacaatttagatgatactgatttaaaaaaattcagaagaaacatacagatgatatttcaagacccttacgaatcattaaatcccagatggactataaaagatataatattagagccattaaacatacacaacattggaagtctaaatgatagggaagaggcagttaaagaaatattgactactgttggtttgacacctcctgaaaattacatgccacgatatcctcacgaattatctggtggccaaagacaaagagtttcaattgctagaactttagtcatgaaaccaaaatttgtagtttgcgacgaaccaacttctatgcttgacgtttcaataagaatatccataatggaccttatgcttaatcttgcaaaagatttagaagtttcatacttatatataactcatgacttagctgttgcaagatacatgtgcaatagaattgctgttatgttcaatggtaaaatagttgagattgctgaaactgaagagctgcttaaaaatcccagtacatccttataccaaa

SEQ ID NO: 268650 - DNA, 767 bp, Unknown
  Bacterial polypeptide expressing nucleotide sequence isolated from the Sargasso Sea
cctgagtgtcgcgttcaggagtgtggaagccgttcgcggtgtgtcgttcaccatcgatcgcggtgagacgcttgcgctggttggggagtcggggtcggggaagtcggtaagtgcactctcaattctgcaactcctaccatatccggtcgcctcacaccccaccggatccatcgaggttgccggcgtgcagacgattggggcagaggagtcttcactgcgtgagattcgcggtagccgtgtctcgatgatctttcaggaaccgatgacgtcactgaatccgctgcataggattgagaagcagattggtgagattctgctgattcaccgcgggatcaaactagccgatgcgcgccctcgcattttggaactactacagttggttggtttgcaggaggccgagctcaagatgaagagctatccccatgagctgtctggtggtcaacgtcagcgagtcatgattgccatggcccttgctaacgaacctgacctgttgattgccgatgagccaactaccgcgctggatgttacgattcaggcgcagatcctcgcgcttctaacagacctgcagcaacggttggggatggctatgctgctcattacccacgaccttggcgttgtgcgcaagatggctgacaacgtgtgtgtaatgaccgatggggagattgtcgaacgtggtgagtgccagagggttttcaatgaccctcaacatgactacacaaaacacctgatcgcggcagagccgaagggtaagccgctgccggcagacg

SEQ ID NO: 268651 - DNA, 447 bp, Unknown
  Bacterial polypeptide expressing nucleotide sequence isolated from the Sargasso Sea
tatgcgctcgtctgatttagtacatgcaagtttgtcgctcacaaatgttacgctttttcgcacggacaaattaatctttagggacttaaatcttagtctctcttcaggagagatttgcattctaaatggtccaaatggagccggaaaaacaagtctccttcgaatcattgctggttatcttccgctgaatcatggaataatgagtttgggtggacatatttttgagcctttaaaatcaaatttaccaatctggtatattggaaacccatttggttttcacccaaatttatctgcagccaaaaacttatttcaaattgccatgatgcgaaaattacaaatgatagaggaagataagttcaatattaacgaatttataaaacagccaattcggacactatcaactggtcagttacagcgccttgctctcagtcagctacttttgagatc

SEQ ID NO: 268652 - DNA, 694 bp, Unknown
  Bacterial polypeptide expressing nucleotide sequence isolated from the Sargasso Sea
atgttaatagttgattctcttgttaaatcatttggagggttattggccattgacgatctttcctttcaggttaaggaaggagaaattcacgctgtaattggacctaatggtgcaggaaaaaccactttgataagccagcttagcggagaaatcaaacctgattcaggaactgttttgtttgatggaataaatatttcaggtatggatgtacatttgcgctcttcacttggacttgcacgttcattccaaattacaaatatttttcttgatttaactgcacatgacaatgtttctcttgcagtacaggctcatgcaggtcattcatttaaattctggaaagatgccagaaaagatcatgaactcagacaacctgcgctggaatttttaaagcaagttggtttagaaaatagagcagaagttgtggctgggcaactatcacatggtgagcatcgtcagttggaaattgctatggctttggcaaccagacctaaattattgcttcttgacgaacctatggcaggaatgggccaaaaagaatcactagcaatggttaaaattatacgggaacttaaaggcaaattaaccatcctgcttatagagcatgatatggatgtggttttcaccttagcagataagatcacagtgcttttaaatggcagagatatagcaactgatagtccagagaacattcgga

SEQ ID NO: 268653 - DNA, 442 bp, Unknown
  Bacterial polypeptide expressing nucleotide sequence isolated from the Sargasso Sea
atttaattgggtttatggaaaactatataatattcaaaatttaaatgaccgaattgatcaccttgctgataaacttagattaaaagatcttttagacaaaattactggggaactctcttctggacaaaaaaatcgagtaagtcttgctaaagctttaataaacgatccaacagttcttttactagatgagcctacagcttcattagatcctgagactggtgattttataagaacttttttagaagattataaaaaagaaaaaaaaatatcagtcttacttgcttctcataatatggaagaagttaagaggttatgtagttctgtaatgatgatgagagatggtttgattgttgatagagggactcctgaagatttaataacaaaatatggaagaagaaatttagaagaagtatttttagaaatagtgagaaaagaaaaatga

SEQ ID NO: 268654 - DNA, 613 bp, Unknown
  Bacterial polypeptide expressing nucleotide sequence isolated from the Sargasso Sea
actttatttaattctattgtaggctatcaccctattgataatggttcgatcatttttgataataatgaaatttcaaagttacttgtcggggatatagcaagacttggaatgttaaggacattccagcaaactaggatatattcaaaaatgaattgtgtggataatatgcaaatttctatttcacaccgaaaagattctaaagactcaatgtttgctagtagaaaaggagaaattaaagaaagagcggaaaatcttcttgaatttgtaggcctatattcaaagcgaaatcttatttcaggagatctttcttttggacaacaaaaactactagaatttgcgatggcattaatgaatgatcctaaagttttgcttcttgatgaacctactgctggaatcaatccaacattaattaatggacttattgatagattaagaaaagcaaatgaagaattaggtattacattatgtgttatagaacataatatgagagtgattatgaacttagcttcacatatttattgtttggcaaacggtaaagtacttgcgaatggctcacccagtgaacttcaaaaagatcaacgggttattgatgcttatttagggggtcattaga

SEQ ID NO: 268655 - DNA, 742 bp, Unknown
  Bacterial polypeptide expressing nucleotide sequence isolated from the Sargasso Sea
catgcgacgcccttggcccccgctgcaggaggcgagcgtgcttaagatcgaccacctgaccaagacctttggcggcctggcggcggtgaacgacgtcagcaccaccatcgagcccggcaagatcaacgccatcatcggccccaacggcgcgggcaagaccaccttcttcaacctcatcagcggcgtgcaccggcccagctccggcaccatcacgctgcaggggcgcgacgtgaccgcgctgcgcaccgacgaggtggcgcgcctgggcgtggcccgcaccttccagaccacggcgctgttcgacatggctacggtgctggacaacctcatcgtgggccaccggctgcgcacgcgctcgggcctgctcgacgtgctgtgcaactcgcgccgcctgcgcgaggaagagcgcatctgccgcgaaaaggcgcgcgacgcgctcgactttgtgggcctgtcgcacctgtcccaccgcatggcgggcgacatctcgcaggaggagcgcaagcgcgtggcctttgcgctggcgctgtccaccgggcccagcctgctgctgctggacgaacccgccggcggcgtgaaccccgatgaaaccgagggcctggccaacctcatccgcaagatggtggccagcggcctcaccgtgtgcctgatcgaacacaagatgaacatgatcatgagcctggccgacaagatcatggtgctgaactatggcgagaagatcgccgagggcacgcccgccgag

SEQ ID NO: 268656 - DNA, 262 bp, Unknown
  Bacterial polypeptide expressing nucleotide sequence isolated from the Sargasso Sea
tcgccaatactggtgtttgatgaagccacctcagcgctggattctgccgctgagcaggccatattgcaggccatgcgcgaggtggcgcgtaatcataccagcctggtcatagcgcaccgcttatccactattaccgatgcagacaatattatcgtgctgaaaaacggcgaactggccgagcaaggtacacatgacgaactgcttgccgcgaacgctgaatacgcccgcatgtggcagttacagcaaaaacagcagcactgag

SEQ ID NO: 268657 - DNA, 457 bp, Unknown
  Bacterial polypeptide expressing nucleotide sequence isolated from the Sargasso Sea
atgtctaagaaagtcgcgagtttagaaaatatatctaaaacatatgggaaagaggatctaactgttaaagccttagacagcataaatttagaaatttataaaggtgattatttagcagtaatgggagctagtggctcaggcaaaagtacagctatgaatattattgggtgtctagatagaccatctgaaggtatttataaattaaatggtattcctgttgagaatttatctgatgatgagctcgctgaaatacgtaaccaaaaattaggttttgtttttcaacaatttcatctgctttcagacgcgactgcacttgaaaacgtaactttgccgatgatttatgctggtattgagcctgagcaaagattagagcgaggtaagagtgccttaaaaaaagttggcctttcagaaagaatgaataatcgcccaaaccaattatctggaggtcaacaacaac

SEQ ID NO: 268658 - DNA, 873 bp, Unknown
  Bacterial polypeptide expressing nucleotide sequence isolated from the Sargasso Sea
cctttcggtggcggtaggcctgacgccggagatgttgccgatgattgtcacctcgaccctggcgcgcggggcggtgaagctgtcgaaacagaaagtcattgtgaagcacctcgacgcgattcagaactttggcgcgatggacatcctgtgcacggataaaaccggcaccctgactcaggataaaatcgtgctggaaaaccatactgatatttccggtaaggtcagcgagcgggttctgcattgcgcatggctgaacagccactatcagaccgggttgaaaaacctgctcgataaggcggtgctggaaggcgtagatctggatgcggcgcgccagctttctgaacgctggcagaaagtcgatgaaattccgttcgacttcgaacgtcgccgtatgtcggtggtggtgagtgaacaggatggcgtgcatcagctgatctgcaaaggcgcgctacaggagatcctgaacgtctcgactcaggtgcggcataacggtgaaatcgtgccgctggacgacaccatgctgcgccgtatcaaacgcgtcaccgataccctgaatcgccaggggctgcgcgtggtggcggtggcgaccaaatatctgcccgcccgcgaaggcgactatcagcgcattgacgagtccgatctgatccttgaaggctacatcgccttcctcgacccgccgaaagagaccaccgccccggcgctgaaagcgctgaaggccagcgggattaccgtcaaaattctcaccggcgatagcgagctggtggcggcgaaagtgtgccatgaagtgggtctggacgccggcgaggtcgtcaccggtagccagattgaaggcatgagcgatgacgagctggcggcgctggccaaacgcacgac

SEQ ID NO: 268659 - DNA, 293 bp, Unknown
  Bacterial polypeptide expressing nucleotide sequence isolated from the Sargasso Sea
cgtgaaacaggactggccgcggatcctgtccctcggagagcagcagcggctggctttcgggcggctgctgctcaacgctccccgtttcgcggtgctggatgaagccaccagtgctctcgatgtggcgacggaggatcacctctatgcgctgctgcgtcagcgggagctggcggtgatcagcatcggccaccgccccaccttgaaggactatcacgacaccgtgctggagctgagcggtgatgggggatggcgactgctgccggcgaccagctatgacttcgggcgttcctgat

SEQ ID NO: 268660 - DNA, 949 bp, Unknown
  Bacterial polypeptide expressing nucleotide sequence isolated from the Sargasso Sea
tttattacgcatgatatgggcgtagtgcagaaagttgctgatagagttgttgttatgcttaatggaaaaaaagtggaagaaggaacagcaaaagaaatttttttaaaaccaaaacatccttacacaaaagctttactttcagctgtaccaaaattagggagtatgaaaggccgtagattaccagctaaatttgccaatatagacgtaaaaagagctgaaggtgacgaagttaaggatattaaagacggacatcaacttcaagatataaaagatcaggttaactataaatcccctcctctattaaaagttgaaggattgacaacacgttttgaaataaaacaagggatgggaggaaaaaaaggaatagtgcatgctgttcaaaatatagacttttcaatgcaaccaggggaaaccttcggattagttggtgaaagtggttgtggaaaatcaacaactggaagaagtattctcagacttactgaacccacaagaggaaatgtaatttttgatggcgtagatctgtcatctttgactataaaagaattaagaacttatagaaaacaaatgcaaatgatttttcaagacccatttgcttcactcaatccaagaatgatggtaggagaaacaattgcggaacctatttacgttcatggattagctaagggaaaagaagttacagatcgtgttgaaaaactattagatagagttggacttactccagattatgctgtgagatatcctcatgaattatctggtggacaaagacaaagaataggtatcgcaagagctttagcattagaaccaaaactcattattgctgatgaagctgtttctgcgttagatgtatcaattcaagctcaagttgttaatcttatgatggaattacaagaagatcttgggttgtcatatttatttataagtcacgatatggctgttatagaaaggagta

SEQ ID NO: 268661 - DNA, 310 bp, Unknown
  Bacterial polypeptide expressing nucleotide sequence isolated from the Sargasso Sea
aatgtctgacacaattattaaaataaaagatgtaaataagtggtttggcgactttcaagttttaaaaaatattaatttagaagtttcagctaaacaaaaaattgttgtttgtggaccctcaggatcaggtaaatctacattaattagatgtataaacagattagaagaacaccaagaaggtaacattgtagtagacggaaccgaattatctgaagatacaaaaaatattgaaacaatcagagctgaagtgggaatggttttccaacagtttaatttatttccacacttatcaatcttagataattgtaca

SEQ ID NO: 268662 - DNA, 518 bp, Unknown
  Bacterial polypeptide expressing nucleotide sequence isolated from the Sargasso Sea
aatgaaacctatttttactgtgaaggatctaaacattagtttcttacaagatggagcacgtttcgaggcagttaacagcgtatcgtttcaggttaataaaggagaaactgttgctttagttggagaaagtgggtcgggaaagtcagtaactgcactaagtactgctgctttattgggaaatgctgcttcagttgatggtgaaataaatattgatggaaattcagttgacccaaaggatgagcgagctctgcagaaattgagaggaagtcaggttagctttatattccaagaacctatgacatcactcaatccattgcataccatcgaacggcagctttcagaaacaatatcgttacatcaacaattgaataaagaaaaattacgagaaaattgcataaatcttttagaaaaggtgggaataagagacattgagtttaagctaaacgcttatccgcatcaattgtctggaggtcaacggcagcgtgttatgattgcgatggcaatagcaaatcgcccta

SEQ ID NO: 268663 - DNA, 936 bp, Unknown
  Bacterial polypeptide expressing nucleotide sequence isolated from the Sargasso Sea
agatttagatgcgccgattacatctttatctgcaggcgaaaagcaaagagttgaaattgtaagaattctacttcaggatcctcaaattttaattatggatgagccaacctcagttttgactccgcaagaagttgaaagtttatttgtaactttaaatgctttagtaaaagaaggaaggacaatattatatataactcataagttagaagaggtaatatctatttgtgatacagttacaataatgcgcaatggtgaggttatagatacttcatcaacatctaattttacagccaaatcattagcgactaaaatgttgggacaaaaacttgacgatcttaaaactaactatgaacacgtaaaagatgaatttaattttgaagttaaagatatttcttgtgaatttaatgatccttttcttacagatttaaaaaatatttcttttaaggttagggttggtgaaatttatggcattgctggtgttgcaggaaatgggcaatcagaacttatggatatattaacaggagaaaatattaatatttcttctggagaaataatttttaataaaaataaaattcaaaactttggtcctcaaaaaagaagagatttatcaatttcctttgtaccagaaaacagattagggcatagcgctgtccctgaattaagtttatctgaaaatattttattaagtcagtttccgaaaaataattttttgaagaatggtataatattaaaaaataatatcgatgattatgcaaataatgtaataaaaaattttaatgttgtaactcctggcaatgacgtaaaagcttcaagcttgtcaggtggtaacttacaaaaatacgttattggaagggaaatatcatcaaatcctaaattgttaataatttcacatcctacttggggaatagatgctggtgcagaacacgcaataagaga

SEQ ID NO: 268664 - DNA, 340 bp, Unknown
  Bacterial polypeptide expressing nucleotide sequence isolated from the Sargasso Sea
aaaattactggagaactttcttctggacaaaaaaacagggtaagtcttgctaaagctttaataaatgatccaacggtacttttgttggatgaacctactgcttcattagatcctgaaactggtgattttgtaagatcgtttttagaagattataaaaacgaaaaaaaaatatcagttttgctcgcctctcataatatggaagaagtaaaaagattatgtagttctgttttaatgatgaaagatggtttaatagtggatagaggaactcctgaagaattaataacaaaatatggaagaagaaatttagaagaagtatttttagaaattgcgagaaaataaa

SEQ ID NO: 268665 - DNA, 823 bp, Unknown
  Bacterial polypeptide expressing nucleotide sequence isolated from the Sargasso Sea
tcaataaatagcaagaaaattttaaataatattaattttaatctcaataaagatagtatctcatgtatccttggaccatcagggagtggtaaaacaaccttactaaaacttattgctggtttagatagggtacaatctggaaaaattataataaatggtgaagaagtaagtagtattactaagcatttaccaactgaaaaaagaaaaattggttttttatttcaagactacgcattgttccctcacttaacagtaaaacaaaatttagaatatcccataaattataaaaactcagattataaaattgaagatattattgatttaataaaattgccaaattcattgaataaatttcctcatgaattgagtggtggagaacaacaaagagtggctttggcaagatcaataatttctcaaccagatttactacttttagatgaaccattttcaagtctagatttgaatttaagagaagaagttagggacgatactttgcatttactccaaaaatcgaacatatcagttgttattgtcactcatgacccttttgaagctatgttcatttctaataagattaatataatggatacttcgggatatatcattcaatctggaagtcctgcagaactctataaaaatcctaaaaattcctacgtgacagaattttttggcgaaacaaatcgatttagtggaatcgttaataattcttatgttaatacacctattggaaaaataaaagcaccaagtaatttagaaaacaaaaatgttgaaatacatataagaccagcaaggtgtaaaattaaaacaacaacctaccccagtt

SEQ ID NO: 268666 - DNA, 596 bp, Unknown
  Bacterial polypeptide expressing nucleotide sequence isolated from the Sargasso Sea
tatgatccatttcgaaaatgttggaaagcgttatgcttcgggcagagaagcgctctctggggttagctttaacttagaaaaaggtgatatggcatttatcactggtccctctggggccggcaaaagtaccctactaaaactcattgcgttaatagagcgtcccacaagaggaactgtgcttgtagacaatcaaaacacatcccgtattccacgccgacgaataccttatttccgaagacgaattggcattatcttccaagatcataagcttctagctgacagaagcatattcgataatgttgcgctgccacttcttataagctccctaaggcatcgtgaggtgagccgtcgtgtgcgagccgcactagaccaagtaggtcttctagaacatgaaaagttttctccattgtctctttctactggtgaacaacaacgtgtcggcattgcaagagcaattgcgagcagaccggccctagttatagccgatgaaccaactggcaatcttgacccagatctttctctagaaatcatgagattatttgaacgatttaaccaggtaggtgtgacgcttcttatagcaacccatgatattgagc

SEQ ID NO: 268667 - DNA, 274 bp, Unknown
  Bacterial polypeptide expressing nucleotide sequence isolated from the Sargasso Sea
tatgcaaaaccgcttaatgcattaccctcaacaactttctggaggagagcaacaaagagttgccatagctcgtgcttttgcctgtgaggctgatgtattattttgcgatgaaccaactggaaatttagattccagtaacagcgaactgattgctaatcttatctttgatacctttctagaatcctcaagtgccttgattatcgttactcacgatatttccttagcgaataggtgtgatcaacaaatagagataatagatggcaaagtcctatga

SEQ ID NO: 268668 - DNA, 894 bp, Unknown
  Bacterial polypeptide expressing nucleotide sequence isolated from the Sargasso Sea
ccattttaggtctatatgcagcctcagcgtttagactcattccttctatgaataaaattactaacagtctacaatctgtgagatacgcttttgcatctatacaagtactttatgacgacttgaaagatcaaaaaactaaatttaataaaaaaaatataaaaataaaatctatcaatgaaataaataagtgggactcaatttattttcaaaacgtctcttacaaatatcctaacgcaacaaaaaatgtagtaaaaaatattaatatacaaattaaaagaggaagtgtcgttggcattattggagaaacaggttctggtaaaagtacaattgttaacttaatatctttacttttaaagccttcaacgggcgagataaaaattgatgattttctgataaactctaatgattttaaaaatcaaaatgttaaagatacttggcaatcgaggatagggtatgtgccgcagcaggtatatttaaatgatgatagtattgcaaataatatagcttttggaaattcagaagaaaatatctcacttaaaagagtgaatgaagtattaaggcaatgtcagcttgatgatctcatcaaagatttgccaaatggcattaatacaaaagttggagaaagaggtataagggtttcaggtggccagttacaacgtattggaatcgctagagcattataccatgatcctgatgtattaattttggatgaagcaacaagtgcgctagatacggaaacggaaaaaaaatttatagaatctctctattcaattagaatgaataaaacattattaattatttcacacaaactatcaatattagacgattgtgatgtagtatttaaactaaaaaatcaatcattatataaagtcgatttaaaaaatgaagaatgaa

SEQ ID NO: 268669 - DNA, 578 bp, Unknown
  Bacterial polypeptide expressing nucleotide sequence isolated from the Sargasso Sea
aatgaacgaattggtcctgcagcttgaaggcttggagaaatcctttggggcgttgcgcgcaacacgcgatgtgtggcttgatgtcgagcatggcgaaatacacgcgctgattggcccaaacggagccggtaaaacaactcttgtgcgccagatctacggatctgaaacgtccgatgcgggtgttgtcaaactccgtggcgaggttatgaacggccttactgtgcctcaaagggtcgcgcgtggcattggccgttccttccagatcagcaacgtgctgatggatttcacggtgcttcagaacgccatccttgctgagcaggcacggcttggtgaatccttccggttttttaggcctgccttcgatgatcaagcgctgatcgacggcgcgagcgtgatgcttgatagggttggccttggcgatcgtgcggcaacgcctgtcgccgatctggcgcatggtgagcgccgccttctggaactagcgctggcccttgcagcggagcctgccctgctgcttctcgacgagccgatggctgggtgcggttcggaggaaacaaagcatatgatcgagattcttgctg

SEQ ID NO: 268670 - DNA, 247 bp, Unknown
  Bacterial polypeptide expressing nucleotide sequence isolated from the Sargasso Sea
cgcactcatcaatacgcctgatattttaattgtcgatgagcccacatcagcccttgatgccaaagcgagagatagcttcatggacgtgctaaaaaaactcgccaaaaacagtgcgttggtttttgtcagtcacgacccttacttaaagaagtatttctcaaggcatatgagtatgcatcaatttaccccgaatcatcaaaaagtcgctgatgtgtctgatgcctctagggacgcatcaccatgttaa

SEQ ID NO: 268671 - DNA, 349 bp, Unknown
  Bacterial polypeptide expressing nucleotide sequence isolated from the Sargasso Sea
attgctgatcaagctaaaaaatttccaggacagttatccgggaggtcaacaacaaagatcagcactagcacgagcgttatgtatggagccaaagattatgctttttgatgaacccacttcagcacttgatccagaaatgatcaaagaagttttagatgcaatggttgatcttgccaaagcagggatgaccatgattgttgtaacacacgaaatgggatttgcaaaagaagttgctgacaatatgatttttatggacgaaggtaaaattgttgaaaaagctaaaacgaaagaatttttcgaaaatcctaaatctgaaagaactaagttatttttaagtcaaattttataa

SEQ ID NO: 268672 - DNA, 721 bp, Unknown
  Bacterial polypeptide expressing nucleotide sequence isolated from the Sargasso Sea
ataaaattacttccagcttttcaacaaatttattcaagcattgcaataattaaagccaatattcccgcatttgaatctatacaacaagatcttcatgactcattacataaagaatctaaatctcaacagtttgaacaaaatcatcttaatcccaaacacagtatttcacttgagaatataactttcacttatccaaataaagaagagcctgcactgaataaattagatatgctaattccctcaaatagtgttattggcattgttggcccatccggctctggaaaatcaacgctaatagatattttgttatgtttaattgaacctgataatggaaacctaaagattgatgacgaaataataaatcgtcaaaatagacgatcgtggcaaaatacaattggttttgttgcacaaaccatctttttatcagaaggaactattgctgaaaatgttgcatttggtatacccgaaaaacaaatcaaccttagccaagtccaaaaagttttaaagttggcccatctaagtgattttatttcaactcttgatcaaggtatttatacaaaagtaggtgaacgaggagttcaactatcaggaggtcaacgtcaaagaattggaattgcgagagccttatatcataacgctgaggtacttgtatttgatgaggcaacaagctcgctagatggaattactgagaaaatgattatggaagccattcataatttta

SEQ ID NO: 268673 - DNA, 775 bp, Unknown
  Bacterial polypeptide expressing nucleotide sequence isolated from the Sargasso Sea
gatggcaggaagccaggtgccggagaatgcgcgaccgcgccttgtgtcccataccgagggcctgctcgccagtggcatcggcaaaagtttcaacaagaagcgcgtcgtgcgcaacgtgtcgatgcagctccgccgtggcgaggctgtaggcctgctggggcccaacggcgccggcaagaccactaccttccatatccttgttggccttcttcccgccgacgagggcaacgtgcaactggacggcaacgacatcaccggactgccggtgttccagagggcgcgtctcggccttggatacctcccgcaagaatcgagcattttccgcggccttacagtggaacagaacatccgtgctgtgctggagacgaccgacggcaccaaaagcgaccacgacgccattctcgaggacctgatggccgagttttccatctcgcaccttcgcaacacctcgtctgtaaacctgtcaggcggtgagcgtcgccgtctcgagatcgcacgggccctggcgatgcgcccaacatttcttcttctcgacgagccgctcgccggcatcgacccgatcgcgcttaccgacattcgaaatcttatcggccagctcaaaatgcacgggctcggcgttctgatcaccgatcataacgttcgcgagaccctcgatatcgtcgaccgcacctatatcatccatgacggcactgtgctgatggaaggcacgccggacgaggtgatcggccaccacggggtccgcgaggtgtatctcggcgaccgtttcaccatctga

SEQ ID NO: 268674 - DNA, 637 bp, Unknown
  Bacterial polypeptide expressing nucleotide sequence isolated from the Sargasso Sea
cggggggctcatcctcgacgggcgtgaggtggcggggccgggcccggagcgggccatggtgttccagaaccatgccctgctgccctggctcagcgtccagcagaacgtggcgctggcggtggggcaggtggagccgaaccggcgggcggtggcggagcgggtggactactacctctccctggtgcagatggagcacgccagccagaagatgccccacgagctgtcgggggggatgaagcagcgggtcggcatcgcccgtgccctgtcgctctcccccaaggtgctgctgatggacgagccgttcggtgccctcgatgccctgacccgtgcccatctgcaggacgcgctgatggccatccaggccgagctcggcaataccgtcatcatgatcacccacgacgtggacgaggcggtgctgctctccgatcgcatcgtcatgatgaccaatggccccgccgccaccgtcggcgagatcctgaccgtggatttgccaaggcccagggacagggtggccctggcggacgatggtcactatcacaagctgcgccagcaggtgctgcgcttcctctacgagaagcagcgcaaggtgacgcccctcaaggtggccgagccagttcgtagccagcgccgggcctga

SEQ ID NO: 268675 - DNA, 739 bp, Unknown
  Bacterial polypeptide expressing nucleotide sequence isolated from the Sargasso Sea
gatctaagaatctaccaaaatgaaacgcttgggttaattggtgaaagtggttcaggaaaatcaacattaggaaaaactatgcttggtttaaatacgtatggtggaaatataaatattttcaatgaaactttaaatatagaagacaaaaaactcatcaacaacattaggaaagatataggagttgtattccaagaacctttccaatcattaaatccccgaatgaaaataaaaaatatactttctgaaccactcgtaatccacaataaaagcattactaaggatgaaattgaaataaaaactcaaaaagcaatggaaagtgtattgttagaaaaagatcaactagaaaaatacccatcacaactaagtggaggccagcaacagcgaatcggtattgctcgtgcaataatcaataatccaaaattagtcatattagatgaaccaacttcttctttagatttatcagttagaaacgatgttcttagattattaaaaaatattcagagtgaatttggattaacttatttatttataagccatgatattcacactataaaaaatatatctgataagatagctgtcatgtatttaggctcaattatggaatatggaaatacaaataaagtaatttcagagccaaaacatccatacacacgtgcacttctttcatctgttctttcagctaatccagatgaaaaaagagagcagattaaattagttggagaaattccaaaaataactt

SEQ ID NO: 268676 - DNA, 237 bp, Unknown
  Bacterial polypeptide expressing nucleotide sequence isolated from the Sargasso Sea
agcaaagagttgctattgctagagctttagtgaataatccaagcattctctttgctgacgagccaacgggtaatttagattcaaaaacaggagccgatgttatgaatttatttaaagaacttaataatcaaggacaaactattatattaattactcatgaagataatattgcagcacaatcaaacagaattatcacgattaaggatggtctgataaaatctgataacataaattaag

SEQ ID NO: 268677 - DNA, 582 bp, Unknown
  Bacterial polypeptide expressing nucleotide sequence isolated from the Sargasso Sea
catgcaggacgtgctaatttgccgcaatattaataaaacctatcaagatggcagtaatgctacccccgttttacacgatgtctctctttcaataaaagctggcgaacatgttgctattttaggtagctccggctcaggtaaaagtacgcttttacatatacttggagggctggataagccttccagcggcgaagttgaatttaatggaaagtcactcggtcaattatctggcaacgcattagcaaagctacgcaatgaccacatggggtttatctaccagttccatcacttgctaggtgaattcaccgctattgaaaacgtagcaatgccactgagaattaggggcgtatcaagcaatgctgccctttcgaaagcccgtgagatgttagaagaagtgggactttcacatagaattgatcacttaccctctgccatgtctgggggagaaagacagcgtgtggcaatagcacgggcccttgttaccgagccttcagtagtgcttgccgatgaacctaccgggaatcttgatgattctacaggtgagcaaatctataaatttgctaccagcttaagtgaaaaaaa

SEQ ID NO: 268678 - DNA, 661 bp, Unknown
  Bacterial polypeptide expressing nucleotide sequence isolated from the Sargasso Sea
gaatattgatatacaagcaggtgaacgtcttgctttagttggtgcaagtggtgcaggtaaaaccaccctctttcaattgctaatgcgtttttacgacccaagtagcgggcaaattctgtttaacgggatgcctattaataaaatgcccgttgatgttttgaggagacatattgcgatagtcactcaagagcctgtggtttttgctgataccgtgttggagaacattcgctacggcagccctaacgcaagtgatgacgatgtaataaatgcggcgaaacaggcgttcgctcacgaatttatcgataaccttgatgagcgctataacacacagttaggcgaacgaggcgtgaagctttcaggcggtcagaaacagcggattgccattgctcgcgctattttggccgaccgcccaatcttacttctcgatgaagcgacgagtgcgcttgatgcgatgagtgagcgtatggttcagcaagcgatagataggttaatggtgggcaaaaccagcattgtgattgctcaccggcttgcaacggttcaacacgccgaccgaattttggtcatggataaaggtcaagtcgtaggaagcggcgaccatgcatcgttaatgaaaagcgacaccctgtacagggaatacgctgaactgcaattgcttagctga

SEQ ID NO: 268679 - DNA, 652 bp, Unknown
  Bacterial polypeptide expressing nucleotide sequence isolated from the Sargasso Sea
atgtctgagactgtaatcaaatgtgagtcagtttataaaatttttggacaaaatgccaaaaagatgcttgaagaatctaatggcaatgtagatgcaaaaacctttcaggaaaaaggatgtatagttggagttaataatgcttctttcgaagttgcaaaaggagaaatgttagtagtgatggggttatctggttcgggcaaatcaactttgcttagatgtatatcaagactaacagatgcaacaggtggaaaaattttcatagaaggtcaagatttacttgaattaaacaataaagaattaattgaacttagaagaagtaaaatgggaatggtatttcaaagttttgctctactacctcataaaacagtagttgaaaacattgctttcccactccagatcaaaggtacaaagactgaagatagtattaatagagcaatggaaatggtaaaactagttggcctagatggaagagaaaactatttcccaagagaactttcaggtggacaacaacaacgagtagggatcgcaagatcattagcagtagagcctgatatatggtttttagatgaacctttttctgcattagatccattaataagaaaagaaatgcaggatgagtttttaagacttcaggaaaaattacagaagacca

SEQ ID NO: 268680 - DNA, 484 bp, Unknown
  Bacterial polypeptide expressing nucleotide sequence isolated from the Sargasso Sea
tatgatagacttccaaaatgtctcttacacacatcaaaaaggtagaggagttactaatttatctttttcaatagataatggagagtttgtttttttaattggtccaacaggttctggcaaaacaactttaatgaggttgatttactttgatttattttgtgattctggaaaaataaatgttggtgatttcaagtcagataaaatgagtaaaaatcgtgttccgctattgcgtagagatataggtatggtttttcaagattaccaccttttaaatgatcgaaatgttttccataatgtggcacttcctttacatgtaattggttgtgatgcaagtgaaattgcatacagagttgaggacgctttagatatggtaggttttgaaggtaaaaggactcattacccctatgaattatcagggggtgaaaaacagagagtgactttagcaagagcaattgttaaagagccttcaataattttagccgat

SEQ ID NO: 268681 - DNA, 319 bp, Unknown
  Bacterial polypeptide expressing nucleotide sequence isolated from the Sargasso Sea
aatgaaccttgccgataatcaaattcacgtaaaccttcattactcagcgcgagagaatcaacacagaaatttccgtctggatgttgagcttgaattaccgggtcaaggcataactgcagtgtttggagagtcagggtccgggaaaacaacattgttgagatgcttagcaggtcttgagaagagcgcacagggaatcgtgaagatgaaaacggaaatttggcaaaatgaggaggcctttttgccgacgaatttgagacatgtgggatatgtctttcaagaaccaagtttatttccacatttgacgatcgaaaaaatatag

SEQ ID NO: 268682 - DNA, 766 bp, Unknown
  Bacterial polypeptide expressing nucleotide sequence isolated from the Sargasso Sea
aatggctactattgaattacaaaacttaactaaagcattcggagatttaattgcagtagataatgtctctctgaaagttgatgaaaacgaagttctttgtttattaggtccttctggatgtggcaaaacaactactttaagaatggttgctggtctcgaagtcgcaacttctggagatatatttattggcaataaaaatgttaataatcttgatacacgtgatagaaatttagcaatggctttccaattttatgcactttatccaagcttaactgtagcagaaaatttagctaacccccttcatgcagaaaatttaacaggcgaagaaattagaaaaaaaatattcgaagtagctgatattctacaattacgtgatattgtaaatagaaaacctcatcaattagcagaaggagaaaaacaaagagttgcggtaggtcgagcaattattagagatcctgagtgtttcctgtttgacgaaccattaagtagacttgatgtgcaattgcgtgaacaaatgagaggtcaaattaaagaagttttatctgatttaaaaaaagctactgttattgttacacatgatcaattagaggctcttacaatggcaacaaaaatagctgttatgcgagatggattgattgagcaagtctcatcaccacatgatatttttgctaaaccaaataatacatttgtagctggatttattggaacccctcaaatgaatatattagattgtaatattagtgaaattaattcatcaataattaaa

SEQ ID NO: 268683 - DNA, 474 bp, Unknown
  Bacterial polypeptide expressing nucleotide sequence isolated from the Sargasso Sea
aaaaaaatattaatggtaattataagactttatcaaatttagtaggctacttgccgcaagacgtatttttgatagacgatactatttctaaaaatattgcactaggacaaaaagacagtgagatagatgtaggtaaaattttaaaatgtattgaacaagtaaaacttggtaattttatttctgagcttcatcaaggcattgaaaccagtgttggccaaagaggtattcaaatctctggaggtcagagacaaagaatatcactagctagagcattatatcacgatagaccagttttaataatggatgagtctacaaattcattagaccaagagacagaaaatgaaatcttatcacaaatttattcattgaaaggattaaaaactgtgataatgatatcgcataaaatagaaagtttaaattcatgtaataaaatttaccaaattaaagatggaaaaattttatttattgaataga

SEQ ID NO: 268684 - DNA, 373 bp, Unknown
  Bacterial polypeptide expressing nucleotide sequence isolated from the Sargasso Sea
ggaggagaacaacagcgggtacagctggcgcgcctgctggttcagctttgggagcccgtgcctcggcccaaatggttatttctcgatgaacctacttccgccctggatattcaccaccagcagcacctttttcgtctgctgcgtcgcctggtgcgtgaacggcagtttagcgtctgctgcgtcctgcacgatctcaacctcgcagcgcgttatgccgaccgcgtggtattgatggaacgcggcaggattgttgataacgggtatccgcaggatgtcctgaagcaacgggcgctgaacgcgctgtacggtgccgatctcacggtcataaatgaaccggagcatcgaacgccgcttatcgtcctcaatcaataac

SEQ ID NO: 268685 - DNA, 367 bp, Unknown
  Bacterial polypeptide expressing nucleotide sequence isolated from the Sargasso Sea
gatgaagcaacgggtagggatagcaagggcgttggcaatggagccctcagtgctgctcatggacgagcccttcggggcgctggatgcgctgacccgcgcccacctgcaagactcggtgatggagattcaggccgatctgaataacaccgtgatcatggtgacccacgatgtagacgaggcggttttgctgtcggacaagatcgtgatgatgaccaacggcccggctgcgactgtaggcgaggtgctggaggtggatttggcgcgtccgcgtgaccgcctggcgttggccagtgacgagcgctacaactacttccggtcgcaggtgctgagttttctctacgagcgccagcgccggccggcggagtaa

SEQ ID NO: 268686 - DNA, 832 bp, Unknown
  Bacterial polypeptide expressing nucleotide sequence isolated from the Sargasso Sea
atggtttatcaacaatttattaattaccctcatcttaatgtttatgagaacataatttttccgcttaaacaaagaaaactaagcgaagagcaaattaagatggatgtagaagatgcacttaagactgtaggattagttggttttgaaaatcgtaaaattcaagaattatctggtggtcaacaacaaagagtagccttagccaggtctcttgcaaagaaggcaaagatacttcttctcgatgaaccattggttaaccttgattacaagctaagagagcaattaagagaggaatttaaaagaatattttctgagggcctgtctcaagatacaattttaatatattcaacaactgatcctcaggaagtaatggagttaaatggtgaagtaatagtattacatgagggtaaagttttacaaaaaggagatgctaaagaaatatttgaaaatccaaagaaccttaaagtagcagaaatctcaaacgatccgccaatgaatattttaacaggtaataaaagttcagataagttaacctttgaaaatatttcaataaatttgcctgaatatttaaaagagttaaagagtcaaaattattatttcggaatcagagcctcagaaataaaacttgataaggaaggagaagagtttgaaattgaacttgcagaaataagtggttcagaaactttactccatttaaaaaaaggaaactcgaaagttatagctttaattgaagaagtaatgaatttcaaaatacatgagaaagtaaaagtgaaattcaatgaaaataaattctatgtattcaataataatgaagaattagtttcttcaccctatg

SEQ ID NO: 268687 - DNA, 607 bp, Unknown
  Bacterial polypeptide expressing nucleotide sequence isolated from the Sargasso Sea
atttataatctatctcttaaattttatccaaaacaaatcgtaagtattattggtaaaaatggttctggaaaatcaacattaattaagatattatttggaataattagaataaatataggatctatatttgtatatggaaatgatatatctaaaatagatattagaaaatggagaagttatatacattattgtcaacaaaatccagtattatttaatagaacagtagatgaaaatttattttatagtaatgaattaaatagagttaaatctcaaaaaataataaaagaattgggtattaaagatattattgaaaatattcaaaaaacaaaaggtccattgggagtttctggaagaagactttctggaggacagagacaaattattgctttattaagagttattttaaaacctaaaccaataatattattagatgaaccaacttctgctcttgattataaaattaaagaaaaattatataatatgattaaatatatgaaaaaacaaggtagttcagtaataattatatcacacgataaatctttaatagatatgtcagatagaacaattgaattagaagatggaaaaattattaaagatgatatgtaaa

SEQ ID NO: 268688 - DNA, 646 bp, Unknown
  Bacterial polypeptide expressing nucleotide sequence isolated from the Sargasso Sea
agagctttagtttttgaacctcgattagtattaatggatgaaccacttggagctcttgataaaaaactaagagaacaaatgcaatatgagataaaacatattcatgagagaattggaattacagttgtgtatgtgactcacgatcagagtgaagcattaacaatgtcaaatagaattgcagtttttaatgatggaaaaattcaacaaatttcaacaccagatgtgctttacgaaaaacctgataattcttttgtcgctcaatttattggtgagaataatcaaatcaaaggaaaagtaaaatctgttaatgggaaaaattgtgtaatagagacagataatggcgatgagataaattcacttaaggtgaatattaattctgttggagacacttcaatgttatcattaagaccagaaagagtttgggtaaatgtaaatgaaaaagactatgaaaataattttgaagcaaaggttgaggaattaatatatttaggtgatcatgtaagaacaagagttaaagtgtgcggaaatgatcaattcattgttaaaataccaaattcatcagatcattcagatcttaaagaaggtgctacagttaaattgtcctggaaatctgcagacacaagagctttagattttaaagcctaaa

SEQ ID NO: 268689 - DNA, 248 bp, Unknown
  Bacterial polypeptide expressing nucleotide sequence isolated from the Sargasso Sea
catgatcacaattgaatccatgcacaagtggtttggcgatttccatgtacttaaagatattaaccttgaagtaaaacgaggtgcgaaaattgtgatctgcggaccttccggatcagggaaatctacactcatccgatgtattaacaggctggaagagcaccagcagggaagtatcgttgttgatggtacagaactgacaagcgaccttaaaaacattgaaattgttcgctctgaagtaggcatggttt

SEQ ID NO: 268690 - DNA, 729 bp, Unknown
  Bacterial polypeptide expressing nucleotide sequence isolated from the Sargasso Sea
tgatgaaactttgataatccataaaaatttgacaaaaactgatgcaagacagagaaccattgaattattgaaaaaagttaagatacccgagccagaaattaaggtagattcttatcctcatcagctttccggtggccaaaggcaaagaataatgattgcaatggcgttggcaaatgaaccagatttgttaattgctgatgaacccactacagctttagatgtaaccgtggagaaagcattgcttgacttactttcagatctgcaagaagaatttggaatgtctatattgttcattacacacgatctcaatattgttaaaaaattctctgacaacgtatgtgtaatgaaggatggagagattgttgagtctggaaaagtttctgctttgttccaaaatcctcaacatccttacactatgaaacttttagattctattccaggaaaaaaagaatctatgaattccgaatctgatgttctattggatgctaaagaggttgatatcaattaccccattacaaaaaatctattagggcaagtaactgaatacctcaatgctgtaaaaaaagtgaacatacaaatttattcaggttccactacagggttggtaggtgaatccggatcaggaaaatcatctctagcaagagccttgttggggattgaaaaatctgagggagtaattcaatttgatggattggatattaataatttaagctcaaatgagacacgatt

SEQ ID NO: 268691 - DNA, 553 bp, Unknown
  Bacterial polypeptide expressing nucleotide sequence isolated from the Sargasso Sea
atgtctgaaccagtaattaaatgtgaaaatgtttataaaatctttggagctaatgctcaaaagatgctgaaagactcaaatggaagtgttgatgctaaaacctttcaagaaaacggatgtattgtgggagttaataatgcttcatttgaagtttctaaaggtgaaatgttggtcgttatgggtttatctggttcgggaaaatcaactttattaagatgtatttctagattaactaatgcaacaggtggaaaaatttttatagaaggccaagatttactacaattaaacaacaaagacctcattgatcttaggagaaataaaatgggaatggtttttcaaagttttgctttgcttccacacaaaactgtggttgaaaatatagcttttccacttcaaattaaaggtgtcaaaactgaggatagcataagtaaagcaatggatatggttaagttggttggacttgatggaagagaaaattattttccaagagagttgtcaggaggacaacaacaaagagtaagaattgccagatcattagctgtagaaccagata

SEQ ID NO: 268692 - DNA, 455 bp, Unknown
  Bacterial polypeptide expressing nucleotide sequence isolated from the Sargasso Sea
accaaaagaagatttgcagtatgtactatcggttatggatgacttggacctcgagaatgtagctgagaggtatgtcacagaactatctggaggcgagcgtcaaagagtcattatcgctcgcgctttggttcagcagcctcagatcctcctgctggatgaaccaactacggccctcgacttaggccaccagcaagaagtgcttgaacttgtagataagcaacgtcagagtctagggctggctgtcattagcgcattccatgatctgactcttgcatctcagtatgggacttcaatggctcttctcgtagacggtatggtcacaaaatcaggaaaaccaagtgaagtaatcaccgaagagtcattaaaggaaatctatggcgcaaacgtatcgatcaatagggatggaaacaccttgagtgtggtgccgaagcgtcaagaagattccagtaactaag

SEQ ID NO: 268693 - DNA, 760 bp, Unknown
  Bacterial polypeptide expressing nucleotide sequence isolated from the Sargasso Sea
agtattaaaggtgatctaagtattaaaaatgaaaattataatcaggttaaaggtcacattacttttaaagacagtatttctttagataatatttcttttagatttaacgaaaatgaaccttacatttttaaagatttaaatctcaagatatttaaaggtgatattataggaatcataggtgaaaccggcagtggtaagacgacattaattaattttataatggggttacttttgcccgacttaggtattataaaaattgatggaaaaaagttagaaaatttaaatttatctagctggcaaaaaaaaatttctcatgttccgcagtcaattttcatttcagatagtactttagctgagaatattgctttcggcattccaaagagagagattgatttagcaaaagtaaaaacagtttgtgagattgtttgtttgagtgatgtggtagaaaattggaagaataaatatcaaactattgttggagaaaatggcatgaggacttctggaggacaaaaacaaagaataggaatcgcaagagctttatatagaggttgtgaagttttaattttagatgaggctacaagtgctcttgaccagaaaacagaagatcttattttagaaaatattaataaaagtttaaataaaataactcttattatgattgctcatagattaaaatctcttaaaaaatgctcaagaataattgaagttaaaaatcagcatatatccgaaatatttgaccacaaaattttattaaaataat

SEQ ID NO: 268694 - DNA, 652 bp, Unknown
  Bacterial polypeptide expressing nucleotide sequence isolated from the Sargasso Sea
atggaaattaaaaattttaataaaacaaagctcgttaaagatataaattgtttaagcgtaaataatctaagttctttttataaaaaaaagaaaacactaaataatataagtattaatgtaaaggaaggagagattgttggcctcttaggccctaatggagctggtaaaacaacgtgttttcagtgcattgttggacttcaaaatatcagtcatggcaatataaaattaaatgatatcaatataacaaacttgcctatctataaaagagcaaaatttggattgaattacctcccacaagaaacatcaatctttcgcggtttaacagtcgaacaaaatattttgtctataatgcaattaaacaattcaaagaatgataagcaaaataacgaatttttaaatgaattactaaatgaattttctttagaccacattaggaatgcatctgctttaactttgtcaggcggtgaaagaaggagggttgaaatagcaagagctttggcatcgcaaccaaaatttttacttttagatgaaccacttgctggaattgaccctattgctttaattgaaattaagaatataatttataaacttaaaaacaaaaatattggtacattaataactgaccacaatgtgagagaaactctaaatacag

SEQ ID NO: 268695 - DNA, 595 bp, Unknown
  Bacterial polypeptide expressing nucleotide sequence isolated from the Sargasso Sea
atggcatactttgaaggagcaaaaatgactgcaggttatggggatggtcctgatattattagttcatgttccataactgccaataggggagagatagtagctattttaggtcccaatggtgctggtaaatcaacagccatgaaagcgatgctcggattattaaaattaaaatcaggctctataactttgaatggtgaagatatttcaaaaattaatcctcaagatcgagtaaaaaagggtatttcatttgttccacaaacaagaaatgtatttgctgagttgactgtaagagaaaatttagagattggtggctttttgacagaagggagtttagaaaataaaattgagagtatttatagtttatttccaatcttgagtaaaaaaaaatcccaagtcgtcggacaattatctggtggacaacgtcagcaagtcgcccttggtagggctttaatgagtgatccatcagttcttatgttagatgagcccacagctggagtttctccaattgtaatggatgaattgtttgaacatataataaaagttaaaaaaacaaatgttgccgttattatggttgagcaaaacgcaaagcaagcat

SEQ ID NO: 268696 - DNA, 260 bp, Unknown
  Bacterial polypeptide expressing nucleotide sequence isolated from the Sargasso Sea
gctgctgatcttggatgaggccaccagtgccctcgacagcgccagtgagcgtcttgtgcaggaggccattcagcaggtggagggtcactgcacagtgctggtgatcgcccaccgcctcagcaccatcgtgaacgccgatcagatcctggtgttggagcgcggccgcatcattcagtgcggcagtcatcaccagttgctgcaggctccggggatgtatcaacagctgtggcagcagcaatccaaggcggcagcgctctgat

SEQ ID NO: 268697 - DNA, 532 bp, Unknown
  Bacterial polypeptide expressing nucleotide sequence isolated from the Sargasso Sea
actaaaagagttgatttattaaatactttaaatttcatctctccatacatagaattaccaaaaaagctgactgttaaacaaaatctagaagtatatggcagactctatgatgttaagaatttgagttcgaaaattgattacctcgctgataaattaagactgaatgaaataatttataaaattactggtgagctttcttccggtcaaaaaaatagagtgagtcttgctaaatcgataattaatgacccaaccgtattacttcttgatgaaccaacagcatctctagatcctgaaactggggattttgtgagaagttttttagagaattatcaaaaagaaaaaggagcctcaattttacttgcttcacacaatatggcggaagtagaaagattgtgctcttctgttcttatgatgaaaaacggagttataattgatcaagatagtcctgaaacattaataaaaaaacatggtagaaaaaacttagaagaggtttttttaaaattaacaagagaagagcatgaatctaaataaa

SEQ ID NO: 268698 - DNA, 385 bp, Unknown
  Bacterial polypeptide expressing nucleotide sequence isolated from the Sargasso Sea
ctaactgctgtagagcaagttgaattgccgcttatttatcaaaatgtttataatagaaaagaaaaagctttaaaggcacttgatatggttggtttgattgacagggtagattttaagccaagtcaattgagcggaggtcaacagcaaagagtatcaatagcaagatctttagttgttgaacctaaagttgttcttgcggacgaaccaactggtgcattagataacgcaactggttctgaagttatgggtacattaaaaaatcttgtaaaaaatgaaggaataactgtcataatcgttacacatgaatcagaaatagctggctatactgaaagaacaatatcaataaatgatggaaaaataataaaggacaaaaaaaataaatgag

SEQ ID NO: 268699 - DNA, 475 bp, Unknown
  Bacterial polypeptide expressing nucleotide sequence isolated from the Sargasso Sea
aatgactggcaggttattaaaacaaaagcaaaatttcttaatgcttgcgctttattttggccccgcagagaaagaagaagaagaacatcgtgaaaaagttgaacgagtgatagatttccttgacttacaatcgattagacgtactcctgttggctcgcttccatatggtttacaaaaaagagttgagcttggaagagcattggctatggagcctgaaatacttttacttgatgaacctatggctggaatgaatgtagaagaaaaacaggatatgagtaggtttgtattaacagtcaacaatgaattgaaaacaactatagttctaattgaacatgatatgggtgttgttatggatatctcagacagaattgtggtcttagactatggaaaaaaaattggatctggtttacctaatgaaattagaagcaataaggcagtaatcgacgcctatctaggagtagctgacgatgagtaa

SEQ ID NO: 268700 - DNA, 202 bp, Unknown
  Bacterial polypeptide expressing nucleotide sequence isolated from the Sargasso Sea
acaccttaatatccagatgtggaaatatttactagaatcatatgcaagtgagcaagctgcacgcatgctgtctatggagaatgctacttcaaatgctcaggatatgatcaaagatttaacgttacaattcaataaggcaaggcaggctgcgataacaacagaaatgttagaaatcgttggtggagctgaggccttaggataa

SEQ ID NO: 268701 - DNA, 516 bp, Unknown
  Bacterial polypeptide expressing nucleotide sequence isolated from the Sargasso Sea
atcaattggatttaacagtcagaagggcaaacaaatttcaatacttagaaatgtttcaacaaatataaaaaaaggagagactgtagggatcgtaggggagtcgggttctggaaaaagcacattagcacttgctatgatggggtatataaaacaaggcttatttcctcttaagggtgaatgcctctttaaatctgacgatttattgaagatgagcagtagacagctagaaaaaataagaggtagaaaaatagccatgatacctcaaaatgcaggacaagcattaacaccgaatttaaaaattggataccaaattgatgaagcattaagattacatacagatctaaacaaaacagagagagacaaaaaaatttcaaagttactaaataaagttagacttccttcaccagaaactatggcttttcgttatccacacgagctttctggagggcagcaacaaagggtggctgttgcaatggcattggctggcaaaccagatttacttttattagatgagcc

SEQ ID NO: 268702 - DNA, 520 bp, Unknown
  Bacterial polypeptide expressing nucleotide sequence isolated from the Sargasso Sea
atgactgatccgatactagaaattaaaaacttatcagtgtcctttatgacaaggtctgcagaaatacctgcagttatggatttttcaatggatatttatgaaggcgacgcaatgggtttagttggagaatcaggctgtggtaaatctacggttgctttagcaataatgaaataccttggaggaaatggtaaaattgttgggggaagtattaagtatcgtggccgtgacatgtcatcatttacagaaagagagcttgaaaatcttagaggatcagaaatagctatgatttatcaggagccaatggcttcattaaacccggcaatgagagtttcttctcaattaattgaagttccaatgcttcatgaaaaaattgcaagagaggatgcttggaagcgttctatagaaatgcttgaaaaagtaaatttacctgatccagatcgtataatgaatgcatttccccatcaactttctggaggtcaacagcaaagaattgtcattgctatggctttgctttctaaac

SEQ ID NO: 268703 - DNA, 742 bp, Unknown
  Bacterial polypeptide expressing nucleotide sequence isolated from the Sargasso Sea
ggagtcacaatccaatttggcggcattaccgcgctcgataacctcacgttcactgtcgattcgacgcaaatctgtggcctcatagggcctaatggggctggaaagacaacactttttaatgtcatgagcagaatctacgaccccacacaggggcgcataatattcaatggggttgaccttcttagcctttcaccccacgaaatctcacaaacaggaatcgcgcgaactttccaaaatcttgccttatggccaaggatgactgtcgcagaaaatgttatggcaggagcgcacatcaaaggcaagcagaacttcttttcagcaatggcacgcataggactccaaacagaagaacgagatcttcgacaaaaagcctatgaaaccatggagatgctcaatctgctcgaacatgcagaaaaaccttgcgatggattgccattcggaactatgaaacggatagaactagcacgcgctctagtaagtaaccccaaactgcttcttctagatgaaccagcaacaggattaacccactcagaagtaggtgaactctcagaagtcattatctcaatccgtaaaaactttaatctcacaatcctgctagtagaacatcacatgggcatggtcatgagcatgtctgaaaaagtcgttgttctcgacttcggagaaaagatagcagaaggcacaccaacagaaatccaaaacaatccgctagttgtatccgcataccttggagcacctaaataat

SEQ ID NO: 268704 - DNA, 885 bp, Unknown
  Bacterial polypeptide expressing nucleotide sequence isolated from the Sargasso Sea
tctctaaatccattgcacgtcatagaaaaacaaatttcggaaaccctagctctacacagcggcttaactgggccagaagcaagaaggaagtgtatagagcttttggaattggttggccttcaaaagccagaaactagactgcaatcctatcctcaccaattgtccggtggacagcggcagcgggtaatgatagcggcagctcttgcaaataagccggatcttttaatagctgacgaacctactactgctttggatgtaaccgttcaagcacaaatccttgatttgttaaaagacctaaaaaaagaacttggaatggccttattgctgattactcatgatttgggtgttgtaaaaaagattgctgatgaagtttgcgttatgagtgaaggccaaattgttgaatctaaaccaatagataaacttttcgccaatccagaacatccctacacacgaaaactcataggatcagagcctagtggcgcgccaaacccgatttctgacagtgctaaaaaaattttagaagttgatgacttaaaagtttggtttccaattcaaaaaggtattcttaaaagaacgattgggcacataaaggctgttgatggaataagcttttctatcagatctggcgaaaccttgggcgtggtgggtgagagcggatctggaaagacgacattagggttggcggcccttagattacaagcgagtagagggaaaattgtttttattgggaatccaataaacggcttgaaaaataaaaatctcaggccattccgctcgccaatgcaaattgtttttcaggatccatttgggagcctatctccaaggatgtccatggccgaaattattggtgagggattacgcgttcatagttataaacaaacgggt

SEQ ID NO: 268705 - DNA, 433 bp, Unknown
  Bacterial polypeptide expressing nucleotide sequence isolated from the Sargasso Sea
aacttacttggaatagctcaaataataaaaaaagatgccagagaacaaaaagatattgtagaaaaattaatggctgaattttcgattacgcacttaagagatgtaaaggcgacagctttgtctggcggagagagacgtataacagaaattgctcgtagccttataaataatcctaaagtacttttattggacgagccttttgcaggtgtagatttgctttcgatacaagatattaaacaactacttttaaaattacaagctagaggttgtgcagtgctagtaacagaccataacgcatctcaactcttaagcgttgttgatcgtgcctatgtgattgctaacggatctatagttgcgaatgggactcctcgccaaattgtaaatacaagcgaagcaaaaaaactatattttggtgaagattttaatttctaaa

SEQ ID NO: 268706 - DNA, 733 bp, Unknown
  Bacterial polypeptide expressing nucleotide sequence isolated from the Sargasso Sea
aatgtttattgaaataaaaaatctttccaaaacttacgacaaatatttagctgtagataaaattaattttcagattgaaaaaaataaaactattggattgttaggtcctaatggttgcggaaaaacaaccacaattggaatgatgcttggcttagtcacacctacaaatggagaaataaatattgaaaataaaaatttgaattcatttaggcgagatgaaatattaaaaagatttaattttgcttctccttatgtagaattaccaaaaaaacttactgtaaaacaaaatcttgagatttatgggaggttatatggtattaaggaattaggcgaaagaataaatgaaatttcaagtgatttaaatatcaaaaaatttttttcaagaaagaccggcgaattatcgtcaggtcagaaaaatagagtttcattagcaaaatcattaataaacaaaccagaaatattacttttagatgaaccaactgctagtttagatcctgacataggtgattttataagaagttatatacaagactacaaatctaaaaataaagttactattttgcttgcttctcataatatgagtgaagttgaaagactttgcgatagtattattatgatgagaaaaggcaaaattgtagataaaggcacttgtttagaattaattaaaaaacatggaagaaataatttagaagaaacattcttaaaattagctaggagtaaagatgaattttaa

SEQ ID NO: 268707 - DNA, 685 bp, Unknown
  Bacterial polypeptide expressing nucleotide sequence isolated from the Sargasso Sea
atgatcgagatcgaggatactttgcaaaatggagtacctaatgtaactttcaaaaatgtaggtttttcatggccaggaaaaaatgaccatgtaataaataattgtaatttttctattaataaaactgggttatggatgattgttggtaaaaatggaagcggaaagagtaccttgcttaagttaattaatggacttctaaaaccaagcaatggagtcataaataaattagcgaacattgggatggtttttcagaatcctgatcatcaaatattaatgccaaactgcaggagtgaacttcttctgaatattaatcaaaatttaagtagaaaagatatttctaataaaattgacattgctctaaacaaggttggattagctggatttgataaaaggtcgattcatacattaagtggcggtcaaaaacaacgtttaactattgcatcttcattgataagtgataagaatttcattcttatggatgagcccacagcgctattagatagttctagtcaattagccgttttagaaataattaaaggccttacaaagaataaaagaaacccattcactgctttatggattactcatcgtttagaggaattaagttatgcagatgcagttgcagagatgaagaatggaaatttatcagattggcagaaaccatttaactttcaatataattaag

SEQ ID NO: 268708 - DNA, 418 bp, Unknown
  Bacterial polypeptide expressing nucleotide sequence isolated from the Sargasso Sea
atgaatggcattaatgacaatttaaccgttggtcaaaatttgaaattttggtttgatatttatggagattctaaggcaaaagttcttaaaaccttaaaaattgataatataatcaataaaaaagtatcagattgttcggtagggcaaaaacgtttagttggccttgtacgggtttttagctctcaaaaaaaaatactccttatggatgaaccaacaactagtttagatgagcaaaacaaagaacttgtctttgagcagataaatgagcataaaaaaagcggaggctcttcaataataatttctcatgatgaattcccatctgaaaaattaattaaattaaagtatgatcctacaacacaaagtagcactcttgatacaagagtaatttcatcagtaaaagcgaggatgaaaagttgat

SEQ ID NO: 268709 - DNA, 474 bp, Unknown
  Bacterial polypeptide expressing nucleotide sequence isolated from the Sargasso Sea
gatgctggagctgagggatgtcacggttccagggcgtgaacgcccgcggctccgtggcctcagcctcagccttaatccaggggagcgcgttgccctggtgggggccagcggtgctggcaaaagcaccttgcttggtgtggccaatggcctgattcagcccagtagtggttcggtgcagtggtttggcgaaccacggctgcgccgccggttgcgctcgcgtatcggcaccctctggcaagaccttcgcttaatcgaaggactctccgttcagcacaacctcaacaccggccgccttgcggcctggtcctggtggcaggtgctgctgaacctgctgcagcccttggagcaacgaccctgcgccgaagcccttgcccaggtggaactggatgcatcactactgcccttgccgctgagctcgctctccggcgggcagcgtcagcgggtggcctttggcgcggttgctgcgccaaaacg

SEQ ID NO: 268710 - DNA, 505 bp, Unknown
  Bacterial polypeptide expressing nucleotide sequence isolated from the Sargasso Sea
tatgaataaaaattatttagaaatcaataatgttgattttcaagttggaggaaaggtaaaagtaaaaaatttatctttaaaaattcagaataaaggccaaattatatgtcttttgggaccatcgggtataggaaaaacaactatcctcagatcaattgctggattagaaaaaattgataaaggttcaataaaattaaaaaatacaattttatcctcaaaatctgaacatgttgaaccagagaatagaaatatttctctttcatttcaagaaaatgcactatttccgcactatacagtagaaaaaaatatttattttggaactgatagaaataaattaaacggaaaaaaaaaaattgaaccaaaaaaaataattaaaattcttaacatagaaaaaatactagataagtacccacatcaaattagtgctggagaggcacaaagagtttctttgacaagagctctagtctcaaatcctgatttgttattattagacgaaccattatca

SEQ ID NO: 268711 - DNA, 667 bp, Unknown
  Bacterial polypeptide expressing nucleotide sequence isolated from the Sargasso Sea
ttgcggaaaaactactcttttaagattaatcgcggggttcgaatatccctccaaagggaggtctctctaaatgataaggaaatttcaaataggaaaaaaattcttagtcctgagaaaagaaatattggtatggtttttcaagactatgcacttttccctcacttaactgttttggaaaatgtaatttttgggttgaaaaacaaaaaagaaagatctagagttgattatttattgaatgttgttggtcttgatagttttgttgaaaggtacccacatgaactgtctggaggccaaaaacaaagactcgcaattgcaagagctcttgctccaggtactaattttattttattagatgaacctttttgtagtcttgatatgcatgtcaaactaaaattgagaagtgaactccctaatatcctaaaaggttgtaatgcaagcggattaatggttactcatgatccggaagaagcgatgtcaatttgcgataaggtcgccgttatgaatgatgggaaaatacatcaaattgatacgccaattaatcttctaaataatcccaagaccatatttgttagtagttttattttgggtaataatattattaatctcaaaaaaaatggtaattcatatatttcttgtttaggtgaaataaattgttcagagttttgaa

SEQ ID NO: 268712 - DNA, 114 bp, Unknown
  Bacterial polypeptide expressing nucleotide sequence isolated from the Sargasso Sea
aaatgaaaaatggcgaattgctagggttgcttggtccttctggttgcggaaaaactactcttttaagattaatcgcggggttcgaatatccctccaaagggaggtctctctaaa

SEQ ID NO: 268713 - DNA, 584 bp, Unknown
  Bacterial polypeptide expressing nucleotide sequence isolated from the Sargasso Sea
aagcagcggatcaggtaaatcgactttgctcaacctgattgctggtatcgatttgcctgatcaaggtgaagttcgtattgatggaaaaagtctgggacaaatgtccgaaaagaacagaactttgttaagacgcagaactatgggatttgtttttcaatccttcaatttgatcccaacactgaacgtttatgaaaacttaatgcttcctctcgaacttaaccaaatatcaaaaaattcggggattatttcacaaatgcttgaagccttgggtcttaaggagcgtgaagaaagtcatccagacaggctttccggaggagaacagcaacgtgttgccattgcacgagctttgatgcatcaaccgtccctcctccttgccgatgaaccaacaggcaatttggatgcggagaccagccaagaaacgcttaagcttatcaatcatttagtccatcgttcaagaacgaccatgatcatggcaactcatagtcaggaagttattgaatgggtggaccgcgttttgggcattgaggatgggaaattgattgaacttaaaacttctgaagcgatccaaaaactcgcctcatgag

SEQ ID NO: 268714 - DNA, 651 bp, Unknown
  Bacterial polypeptide expressing nucleotide sequence isolated from the Sargasso Sea
gtgttgctattggtagagctttagttagagatgcaaaagtttttttatttgacgaacctttaagtaatcttgatgcaaaattaagagctgaactacgttatgaaattaaaaaacttcatagagatttatcaaatacaatgatttacgttactcatgatcaaatagaagctatgacgcttgcggatcgtatatctgttatgaaagatggattaatacagcaattagatacacctaaacaaatttacaacaaaccagctaatttatttgtggctgggtttattggatctcctagcatgaattttttaaatgccaaatttgaaaaatcaaatcaaaatataattgttggcaaaaagcaaattgatatttctaaatatgaaaatatcaataatttgatgaatgagcaagaggttgtctttggaataagacctgaaaatataaacatagaaaaaaatgaaaattctattcaatgtaaagttgaattagtggaacctatgggggcagatactcttgtgtggactagtgttgaagataatccaatatctattaggctagaaggaagttcgaattttaatttaaatgatgaaataaacatttcatttgatataaataaatcttcaatatttgacagtaaatcagaggagagaatttaat

SEQ ID NO: 268715 - DNA, 769 bp, Unknown
  Bacterial polypeptide expressing nucleotide sequence isolated from the Sargasso Sea
attatctggaagcggtaagtcaacacttgtaaggcatattaatagattattagagccaacatctggaaaaattttaataaacaaccaggatgtaatgcaatttaataaagaaaatttacaagaacttagaaataaaaaaattggtatggtttttcaaaattttgcattgatgccccacagatctgttttagataatattgcaatgcctttagaaataagaggagtaagtaaaaacgataggttagatgcagcaaataacatcttaaatattgttgaattacaagggtggggtaataaatacgcacatgaattatctggaggaatgcaacaaagagtagggttggcaagagcattagctgctgatcctgaatttttactcatggatgagccttttagtgcacttgatccacttataagacgccaacttcaaacagagtttattaaactttctaagcaaatgaaaaagacaactgtatttataactcatgatcttgatgaagctgtaagagttggacatagaatagcaataatgcgagatggaagagtggttcaaataggaacccctgaagaaatagttgtaaatccatctgatgaatatgttgcagattttgtaaaaggaatttcaagattaaaagttgtgcaggctaaaactattatgcaacctttagagcaatataaaaaaaacttcggggaaaatttaagtaataataaaaaagtaaatgaaaacgatatattaagcaaacttatcgaaacttctgtttctaaagat

SEQ ID NO: 268716 - DNA, 438 bp, Unknown
  Bacterial polypeptide expressing nucleotide sequence isolated from the Sargasso Sea
aatgtatttattacacgggaaaaatataacatgtggctatgacactgttgatattctatcagaatgcacagttggtgttaagaaaggtcagatagcctcaattgttgggcctaatggcgcaggcaaatcaactgctatgaaatcaatatttggattactaaaaataaagattggtgaaatttttctagataatgaagatattactaatcttcttcctcaagagagagttcttaaaggaatgggttatgttccacagactaacaatatatttccaacattatcagtccaagaaaacttggaaatgggcgcatttattcaaaacgaggatttttcagatattttagattttgtttatgaccttttccctgttttgaaagaaaaaagaaatcaacaagctggtcaattatctggaggacaacgacagcaagttgcggttgg

SEQ ID NO: 268717 - DNA, 403 bp, Unknown
  Bacterial polypeptide expressing nucleotide sequence isolated from the Sargasso Sea
aacgtccaactgccactccgtttttccaaaaaacgtgctcaaagagcaggtcgcaaccaggcggaacggcttgaagaagcccaaaggctgctaacggcattagggctgtccgaaccgctcaaggagggacgtccggtggtggaattgagtgtcggccagcagcagcgtgtggctgccgccagggccctcatcggccggcctgagttggtgattgcggatgaacccacttcagccctcgacgcggatctcagagaggtgttcctcaatctgctgtatgcggaatgtgacaaggctggcagtgccctgctcttcgtcagtcatgactcggaactgagccgattcttcgggaggagtctttctcttcctcagatcaacagggtttcgagtttggaggcagcatgat

SEQ ID NO: 268718 - DNA, 610 bp, Unknown
  Bacterial polypeptide expressing nucleotide sequence isolated from the Sargasso Sea
tgacctcgtaaaactgcctagagcttttgccgaaagaatgccgcggcaattgtcaggtggccagaaacaaagagtgggcattgcaagagcctttgccggtggcgcgagaatagtcgttgctgatgaacccgtttcggcgctcgacgtttctgttcaggctgcggtaactgatttattaatggaaattcaaagaaatgaaaaaacaacgcttttatttattagccatgatctttcaatagtgcgttatctttcagacagggtgatggtgatgtatctagggcatgtagttgaactgggaactaccgatcaagttttttcacccccttatcacccctacactgaggctcttttgtcggcagttcctatagcggacacaagtgtcgaaaaagagcatattgttttagagggagacattccatctgcgatggaccccccgagtggttgcccttttcaaacccgctgtcggtggaaaaaagatgttccgggcaacctatgcgaaacagaaattccacctcaacggaatttatcaataggtcaccaagtaaaatgccacttaagtgagaacaaactatcggaaatggcacccgttataaaacttgcagctgtatga

SEQ ID NO: 268719 - DNA, 505 bp, Unknown
  Bacterial polypeptide expressing nucleotide sequence isolated from the Sargasso Sea
atgagtgatcaagccgttgtagaaatggagggagttgctctagatttccctgttaaatcatcaggttatctactgttgaaggaactcctaactcgccgaacaaaagataaaattcattcaaaatattatcgagcattggatgatattactctttcaataaacaaaggagatgtagttggaatagtcggccccaatggtgctggaaaaagcacactgctccgagtaattgcgggaatttattgtcctgatgaaggcaaaactcggacaaagggcagactcgctttacttgctggtttaggggcaggcttccaaagaaacctaaccggtagagagaacatatatttgagtggcagcgtctatggaatgtctaaacaggaattgtacgatttgattccttcaatcgtcgtatattcgggcatcggatctttcattgatcaacctctgcggacgtattcttcagggatgaaggctaaattggcattttccattgcatcacacctctcac

SEQ ID NO: 268720 - DNA, 667 bp, Unknown
  Bacterial polypeptide expressing nucleotide sequence isolated from the Sargasso Sea
tatgtccgagccagtaatcaaatgtgaaaatgtttataaaatttttggagcaaacgctcaaaaaatgcttcaggattcaaatggcaatgtagatgctaaaacttttcaagaaaatggatgcattgttggtgttaataatgcttcatttgaagtttcaaaaggtgaaatgttagttgtgatgggcttgtctggttcaggtaaatcaacattattaagatgtatttcaagattaactgatgcaacaggtggaaaaatttttatcgaaggccaagatttattaaaactaaataataaagatcttattgaacttagaagaaataaaatgggaatggttttccaaagctttgctttattgcctcataaaactgttgtggaaaatatagcatttccacttcaaattaaaggagtcaaaactgaagatagtattagcaaagcaatggatatggttaaattagttggacttgatggaagagaaaactattttccaagagaactctcaggaggacagcaacagcgagttggtattgcaagatcattagctgttgaaccagacatttggtttttagatgaacctttttcagctttagatccattgattagaaaagagatgcaagatgagtttctaagacttcaagaaaaattacaaaaaacaattatgtttattact

SEQ ID NO: 268721 - DNA, 871 bp, Unknown
  Bacterial polypeptide expressing nucleotide sequence isolated from the Sargasso Sea
cgcagcggatttggatattctcccggcgggcgatcaaaccatcatcggcgaacgaggcgtcacgctttctggtggtcaaaagcagcgtgtcgccatcgctcgcgcgctctacgccgaaagcgacgtatatgtctttgacgatccgctcagcgcgttggacaatcacgtcggttcagccatctttgagaaagtcatcacgggcgaactcaagaacaagacggtgatcctcgtcacgaacgcgctccaatacttgcccaaggcaaaccaagtggtcgttttgggagacggcaaaatgcaggaaattggaacgtacacgtctctcatggcgaagaagggcgcgttctgcaagctcatgaagacgcacggcatcgacagagaagacgccccggaaaagacctcaaagaaggagaatgacatcgccatgaagatatctccaacaattaaatcagcgggtaaagataacgatgcgagcaaggaggaagagcgcgcctttggaaacgtcggcgcgcgcgtctacctcaagcttttccaagctacgggcacgcaatggaactttttgtttgtcatcttcttcttcgggtgcgagtacggcaccaaggcgttcctcgactattggctcacttggtgggcgacgaacaagttcggttggacgagcaacgagtatcttctcatgtactttggaattttcgtcgtcaacggcgtctttatcttcgtgagaagcctcacgctttactttttcctctgccgcgcctgcaggtggatgcatgataacctgctgacgagagttttgaggatgcccatgagcttcttcgacaccacgccgagcggtagaatcatcaaccgtttcagccgcgacaccgaaaccatcgac

SEQ ID NO: 268722 - DNA, 378 bp, Unknown
  Bacterial polypeptide expressing nucleotide sequence isolated from the Sargasso Sea
ccattaataaaaatagacttgattatgcacttgaatcatctcaatctaaggaatttatatatgatcttccaaataaacttaatactttggtaggagagagaggtatccaactaagtggaggtcaaagacagagaattggaattgcaagagcattgtataatcaatcagaaattttaattcttgatgaagctacaaatagtcttgacatagatacagaacaaaaattaattagttcacttttattgatcaagaataggccgctaattataatgattgcccatagattaagaactttgaaaaaatgcaataaagtatatgaattaaaaaaaggtatgattattaataaaacaagcggtaaggaatttataaattcataaa

SEQ ID NO: 268723 - DNA, 352 bp, Unknown
  Bacterial polypeptide expressing nucleotide sequence isolated from the Sargasso Sea
atgagtgaagaatcaataatttcattaaaaaatgttaacaagtggtttggtgattttcatgtattacaagatgtaaatcttgaagttaaaaagaaggaaagaattgttgtttgcggtccttctggttctggaaagtctacaatgatcagatgtattaatagattggaagaacatcaagaaggttcaattgttgttgatggaattgagttaacgggaaatttaaaaaatattgataatgttagaaaagaagttggaatggtgtttcaacaatttaatttattccccgcatctatctgtaaaagaaaatataacactagctccaatttgggtgaaaaaaatgcccaaagctgaa

SEQ ID NO: 268724 - DNA, 382 bp, Unknown
  Bacterial polypeptide expressing nucleotide sequence isolated from the Sargasso Sea
ctggaagtaaagaaatttagtgatgaacatcttacttctgtacttcatgaagtaaatttaaaaactttagtggatcggtatcctaatcttgatatcaaacaagattggccacgaattctttccttaggcgagcaacaaagattggcttttgcaagactcttactaaattctccaagatttgcagtacttgatgaagcaacaagtgccttagatattgatactgaaaaaaaactatatagtttactaaaggaacgagaactttctcttattagtgttggacatagacctagcttaaaagattttcatgaaaatattttagaattaaatggtcagggagactggaaattattgacatctgataagtataattttaatgattagt

SEQ ID NO: 268725 - DNA, 472 bp, Unknown
  Bacterial polypeptide expressing nucleotide sequence isolated from the Sargasso Sea
aacattgcccgcttcgcgcagaatgacagtgagcttatcgtcgccgccgcattactggcaggcgttcatgagatgatcctgcgcttgccgcaaggttatgacactctgctgggcgcaggtggataccagctctccggtgggcagcggcagcgcatcgggctggcgcgcgccgtgtataacaatcctgcgtttatcgtgcttgatgaaccgaatgccaatcttgacgacgcgggcgaatttgcactcgttaaagccatcaatgctctgcgtacccagggacaaaccacagtcattatctcacaccgcccgacgctgctcggcgtggtcaataaggttttattgcttaacgatggcgttatacaggagtttggtacccgcgatcaggtttttgcccatttacgtcaggccaacgtactgaaaccggtggctacgccttctccatccacgactgaacagcaacgtgaggcttgat

SEQ ID NO: 268726 - DNA, 880 bp, Unknown
  Bacterial polypeptide expressing nucleotide sequence isolated from the Sargasso Sea
aaaattacttccagcctttcaacaaatttattcaagcattgcaataataaaagctaatattccggcatttgaatctatacaaaaagatctttatgactcattacatatagaatctagatctctaaagcttgaacaaaattatcttaatcctaaaaacagtatttcaattgaaaatatcacttttacctatccaaacaaagaagagcctgcactgaataaattgaatatgctaattccttcaaatagcgtgattggaattgttggaccatctggttctggaaaatcaacgctgatagatattttgttatgtctgattaaaccagataatggacatcttaagattgatgacgaaataataaattataaaaatagacgatcatggcaaaataccattggctttgttgctcaaactatctttttgtctgaaggaactattgctgaaaatgtagcatttggcatacccgagaaacaaatcaatcttaaccaagtccaaaaagttttagagttagcccatcttaaagattttatctcaacacttgatcaaggtattcatacaaaagtaggtgaaaggggagttcaactttcaggaggtcagcgtcaaagaattggaattgcaagagccttgtatcaaaatgcagaggtccttgtttttgatgaggcaacaagctcgctggatggtattactgagaaaatgattatggaatctatccataattttagcggaaaaaaatctataatcttgatagcccatcgtctaaaaactgtaaaaaaatgcgacaaaatattttttataaacaaaggaaaagtaacagatcaaggtacatatcaggaattaattgaaagaaataaacattttaaagatatggcaactcatgcctaa

SEQ ID NO: 268727 - DNA, 681 bp, Unknown
  Bacterial polypeptide expressing nucleotide sequence isolated from the Sargasso Sea
gatgtcaaataacatccttgaaataaaaaatcttagaaaaagctttggtgggttaaaggccgttgatattacaagcttgaattttgaaagaaacaaaattataagcttaataggtccaaatggagcaggtaaaacaacattctttgacttaatcacgggattcacaaagcaagatagtggaactacaacatttgatggaaaaaatatatctaatctagagtcctataagatatcaaggctaggaatggtaagaacatttcagttaacaaaagtttttgacagaatgactgtaaatgaaaatattttattttctgcatcttcattaaaaaatgatagatttattaattcattatttaaatccacaatgaagtcaaaaatagaacaagagttgaatgaaaaaaagaatgaagtattaaacatggtaaatctttaccatatgaaagattcttatgcaagagagttgtcgggaggccagaaaaagttacttgagctcgcacgtgtaattattcaaaaacctaaaattctacttttggacgaacctttagcgggtgtaaatccaaaactttctgaggaaatcctgagtttgataaatacttttgcaaaagagggaatttcaattttgatggtagaacataatattagtgcagtaatgaaagtttcagatcacatagtcgttttagc

SEQ ID NO: 268728 - DNA, 240 bp, Unknown
  Bacterial polypeptide expressing nucleotide sequence isolated from the Sargasso Sea
aatggcattttttgaaggcaatcaaatgactgcaggttatgatgaaggagccgatataatttcttcatgtacaattaatgttaataaaggggaaattgttgcaatacttggacctaatggggctggaaaaagtacagcgatgaaagctatgcttggtttgctcaacttacgatcaggtgacgtaaccattgatggaaaaaacatatcagatttaaacccacaagacagagtgaaaagagg

SEQ ID NO: 268729 - DNA, 730 bp, Unknown
  Bacterial polypeptide expressing nucleotide sequence isolated from the Sargasso Sea
gtgatctgcattgcgctgtggcaaagccggggcacgggcgctgctgcggccaatgtgcaggatgtgacggtgggcagctttgcggccttcatcacggccatgctgatgctgattgcccccatccgacgcctggccgatgtggccaaccccatcacgcgtggcgtggcggcgctggagcggggcctgcatctgctggagggctcgggcgacgagaccggcggcacgcaggtgcccggcaaggcgcgcggcgaaatcgagttgcgcgacgtgtccgtgcagtttggcgaggacaaggcaccggccctgagccatgtggacctgcgcgtgcgcccgggcgaggtggtggccctggtcggcccctccggcgcgggcaagaccacgctggtgaacctgctgccacgctttttgcagcccacgggcggccagttgctgctggacggcacgcccctgcccgaatgggatctggccgcgctgcgccagcagttcgccatggtcagccaggacgtggtgatgttcaacgacaccattgccgccaacgtggcgctgggcggggtggaagacgaggcccagctgtgggccgcgctggatgccgccaatctgggctcccatgtgcgcggactgtccaacggcctgcagacggtagtgggccacaacgccagccagctgtcggggggccagcgccagcggctggcgatttgcacggcgctgtacaggatgcgcccatcctgat

SEQ ID NO: 268730 - DNA, 649 bp, Unknown
  Bacterial polypeptide expressing nucleotide sequence isolated from the Sargasso Sea
ctaataaagagttataatggaaaagtggtgttggatgttcctttgcttataattgaacaatcgcaaattgtttcaatatgtggtccctcaggggccggaaagacaactctgttaagtattttaggaactttaatgaaagcagataatctaaaagaaagatcactaaaaataatgaatgaagatattaataaaatgtctttaaattatttagcaaaatttagaaataatcacttaggatttatttttcaattccatgagctactggatgaattcaatgttatagaaaatattataattcctgggttaatagcgaataaggataagaaattactgttaaaaaaagctaccgaaattcttaaaattttaaatatttttcatctaaaattaaataatcccaaaaacatttcaggaggtgaaaaacaaagagttgctgtagcaaggtcacttataaataatccatcgattatatttgcagatgaaccaagtggaaatttagatgctagaaatgctgatgaattacacaagttattttttagattgcgagatgagtttggacaaacatttgtaattgttacacacaatgaaaaattgtcaaaaatatcagataaaatattaatacttgtcgatggtaaaattcaagcaaagtgaa

SEQ ID NO: 268731 - DNA, 841 bp, Unknown
  Bacterial polypeptide expressing nucleotide sequence isolated from the Sargasso Sea
catggctaaaattacattaaacaatttaagtcatagctatgttcctgattatacagatgcagacttagtattaagagacattaatattgattggaaagatggaggagcatacgctttattaggtccctcaggatgtgggaagacaacgcttttaaatatcatttcaggattaattaaaccatctaaaggagatattttatttgatgataaaaatgttacgtcgttaaatccagtagaaagagatatagctcaaatatttcaatttcctgtcatctacgacacgatgacagtttatgataatttagcttttcctttaaaaaatagaaatctttctgatacagaaattgactctaaagttagagaaatagcagaaatgttagaattaacatcaacattaaacaacagagcctctggtttgacagcagacggtaaacaaaaaatttcgttaggcagaggattagttagatcagacgtcaatgtaattatgtttgatgaacctttaactgtaattgacccacatcttaaatggattttaagatctaaattaaaagaattacatcaaaaaattaatcgaacaatgatttacgttacgcatgatcagacagaagcattaacattcgcagatcaagttgttgttatgcacgaagggcaaatagttcaaacaggaacacctgtagaattattcgagaaaccaaaacacacttttgttggtcactttatcggttctccaggtatgaacattttaccttgccaaattaaaaatgggcaaataaattttgcaggacaagaaatacaaagtaatttcaatattaaaaaaaataattttaaacaacacaattag

SEQ ID NO: 268732 - DNA, 709 bp, Unknown
  Bacterial polypeptide expressing nucleotide sequence isolated from the Sargasso Sea
tacattagtaagacatattaatagacttttagagccaacttcaggcaaaattttaattaatggtcaagatgtaatgggcttagaccgagaaaaccttcaagaattaagaaacaaaaaaattggaatggtttttcaaaactttgcacttatgccacataggtcagttgtagataatattgcaatgccgcttgagataagaggtgtaagtaaaaatgatagattggatgctgcaaataaaattttagaaattgtagaattacaaggttggggtaataagtttgcccacgaattatctggaggtatgcaacaaagggtaggtcttgcaagagcactggcagctgatccagaatttcttttaatggatgagccttttagtgcattagatccactgatcagaagacagcttcaggctgagttcattaaactttcaaaacaaatgaaaaaaactacagtatttatcactcatgatttagatgaagcagtaagagtaggacatagaattgcaattatgagggatggaaaagtaattcaaataggtacacctgaagaaatagtcgtaagtcctgcagatgaatatgttgctgactttgtaaaaggaatttcaagacttaaagttgttcaagccaaaacaatcatgcaatctatagaaaattatgaaagtgctaacggaaaattaaatgaaaatagtcaaagtgttggagaaaaatga

SEQ ID NO: 268733 - DNA, 442 bp, Unknown
  Bacterial polypeptide expressing nucleotide sequence isolated from the Sargasso Sea
gcttcatttttcaagctttatgttagttcaaagcttaacagccttagaaaacgtgatgctaccggcagaaattgcagggcttgataacccaaaggcactagctttggatattctagagcaagtcggattgaaacatcgcgcacaccacttccctaatcagttgtcggggggcgagcaacagcgtgttgccatagcgcgagcatttattacctctcccaaaatacttttcgccgatgagcctaccggcaacctagacgccaaaaatagtgaaaaaatcgaagcgctgttgttcgagatgaatagagaaaaaggcacaactctcgtactcgtaactcatgataacgagcttgcggaacattgtgacaggcaactcactatgaatgctggagaactcattgaaacaaccggcgcgaacacaatgaataaaaaagaggcggtttag

SEQ ID NO: 268734 - DNA, 454 bp, Unknown
  Bacterial polypeptide expressing nucleotide sequence isolated from the Sargasso Sea
atgccaagtttaaaagatatcaaaactcagatcaattcagttggatctacaaaaaaaattacatcagcaatgaaaatggttgctgcaagtaagttacgtagatcacaagaaaaagctgaagcggcaagaccatattcatcaagactagaggagatgctttcctctcttgcatcatctgccgcatctggggaaggtataattaaactcttaacaggcactggcaatgatcagaattatgtcgtagttccagtaagtgctgatagaggtttatgtggtggatttaacagcagcataaatagagaaacttttaagttagttaaatcacttgagggtaatggaaaaaaagttcaactaatgccagttgggaaaaaaagtagagacttttttaatagggtaatgaaggatcaaattatagagagttttgtcgacttaaatgtttcaagtactggttacg

SEQ ID NO: 268735 - DNA, 223 bp, Unknown
  Bacterial polypeptide expressing nucleotide sequence isolated from the Sargasso Sea
tatgtcagagtcgattattcaaatgaaggatgtaaacaagtggtttggagattttcaagttctaaaagatattaatcttgaagttaaagaaaaacaaaaaattgttgtttgtgggccatctggttctggaaaatcaactttaataagatgtataaatagattagaggaacatcaaaaaggccaaataattgttgatggaaatgaactttcagaaaaaaactaa

SEQ ID NO: 268736 - DNA, 445 bp, Unknown
  Bacterial polypeptide expressing nucleotide sequence isolated from the Sargasso Sea
aatggctttttttgaaggaagtaaaatgacagctggatatggaaatggtccagatattataagttcatgttcaattaatgcaaacagaggtgagatagttgcaatactgggccctaatggtgctgggaaatctacagcgatgaaagctatgttgggtcttcttaatttaaaagcaggatctgttttaatggatggaaaagatatttcaaatctatctccacaaaacagagttaaagcgggaatatcatttgttccacaaactagaaatgtttttgctgacttaactgtaagagaaaatttagaagttggagcttttctaagagaagatgatataaataaagttattgaagagatttacgatttatttcctattttaaatgaaaagagattacaaaaggttggtcaattatcaggcggacaaagacagcaagttgcactaggtaga

SEQ ID NO: 268737 - DNA, 592 bp, Unknown
  Bacterial polypeptide expressing nucleotide sequence isolated from the Sargasso Sea
atgtttaagtttgaaaaattagtttttggtgatctcggttggggagatgaatttttatttgctttgttgatgactattctagttagtatatgctcaatgggtcttggagtttttattgcaatttttgctgcatggtcaaaattaacttacaataaaatattaaatttcattgctagtttttacacaacagtaattagaggcatacctgagttacttgtaatttatttaatattttttggaggtagtgcagcaataatgaatgtagcaaaaacattcggttataatggttatattgaattaaatgcatttactattagtgttattgcaataggaattatttcagcaacatattcaaccgaagtattacgagcagcatatttgtcaataaacaaaggtcaaattgaggcagctaaaagtttaggattatcaaaatttcatatatttcttaaaattctaactccacaaatactaagacatgcaatacctggtttaggtaatgtatggcaagtgacacttaaagatacttcactcatatcggttactggattggtagaaataatgcgacaaacaagaatagcctcaaaatgttgag

SEQ ID NO: 268738 - DNA, 871 bp, Unknown
  Bacterial polypeptide expressing nucleotide sequence isolated from the Sargasso Sea
atgagtcaaaatattttagaagtaagaaatttagttaaacattttgaagtttcaaaaagtgtcttttcaagaaataagaaaatagtaaaagctgttgatggtataagttttgatataaaagctggtgaaacccttggattagttggtcaaagtggatgtggaaaaactacaacagctagatcattatgtttattagacccaaaaacctctggaagtgtaagtttttacaatcctgatacaaaatcaatggaatcaatcgataaaattgatgaagatggaatacgtgtatttagaagaaacatgcaaatgatttttcaagatccatatgaatcattaaatcctagatggacaataaaagacataattaaagaacctttagatattcacaatatagggtctttttctgaaagagaagatgcagtagttgagattttaagaacagtaggcctcacacctcctgaaaattatatgtctagatatcctcatgaaatatctggtggccaaagacagagagtctcgatagctaggactttggttatgaaacctaaatttgtagtttgtgatgagccaacatccatgttggatgtctcaataagaatttcaatcatggacttaatgcttaatcttgcaaaagaactggacgtctcttatttgtatatcactcatgatttagctgttgcaagatatatgtgtaacaggattgctgtgatgtttaatgggaaaattgttgaaattgcagagactgaagaattgttaaataacccaattcatccttatacaaaacgattgatttcatcaattcctattcctgatccttcatacaaaagagaacaatatgatatgaactttgacgaacttgacaacatattca

SEQ ID NO: 268739 - DNA, 802 bp, Unknown
  Bacterial polypeptide expressing nucleotide sequence isolated from the Sargasso Sea
atgtcatatataaaaatagaaggagtagagaaaacttttactaaaccaaaaagcaatgaagttgtggttgcattagatggagttgatgctgaaattgattcaggagaatttgtttcaatagttggacctagtggatgtggaaaatctactcttttaaggactattgcgggacttgacgctatagatcaaggggcagtaactatagaatcgaaagaagtcgatggggcagatccggatagaggattactttttcaagactacgcattgtttccatggaaaactgtagaggaaaatattgaatttggtctcaaagtgaggggagttaaaaagaatgaaagaaaaaatatttcgaaagagtttatcgaattggttaatttgaaaggatttgagcaaaaatatcctcacgagttatcgggagggatgagacaaagatgcgctttagctagacttttagctaataatcccaaaatattgctaatggacgaaccacttgcagcaattgatgctcaaactagaaagattctccaggaagaagtattagaaatttgggataaagaaaaaaaagctgggagagaaaaaacaataatttgggttactcatagtatcgaagaagctgtttttctttctgatcgagttttaataatgagtcgtcgacctgctactataaaggaaagtgtcaaaattgatcttaaaaggccgcggactgacaaaacagagtcagatcctagatttgcgaaattatgtgctcaattatggtcttctatgaaggaggaggctgcaactgcaattttagaatcataat

SEQ ID NO: 268740 - DNA, 694 bp, Unknown
  Bacterial polypeptide expressing nucleotide sequence isolated from the Sargasso Sea
tatgcatgcattatctataaaagatctctcaaaaaaatataaaagcggtgttgaagcactcaagtccgtcagttttgatgttcaagaaggagatttttttgctcttctaggtccgaatggtgctggaaagacaaccgcgataggaatcatcacatcgcttgtaaataaatcttcaggatcgatagaggtttttggtcatgatcttgacaaagaattggcaatggcaaaatcttgcatcggcgttgtgccacaagaagtcaatctgaatctttttgattacaactttaatattttggttaatcaggcagggttttatggtatctccagaagcgagggaaagaagagagctgaacagtatctgaaacagatgcagctctgggaaaaaagaaagacaaacgccagaagtctatcaggaggcatgaaaagaagactgatggttgctcgagcattggttaatcagccaaagttactcctacttgatgagccaacagcaggggttgacattgaaacaaggagaatgatgtgggattttctcagagatctgaatgcaaaaggaacaacgatcattctaacaactcattaccttgaagaagcagagcagttgtgtaacaaggtcgccatcattgatgaagggaaaattatagaaaatagactcgatgcaaaatgttttaaaaaagctcaagaccgaagtatt

SEQ ID NO: 268741 - DNA, 904 bp, Unknown
  Bacterial polypeptide expressing nucleotide sequence isolated from the Sargasso Sea
aaagaaaatttaattttaggaattgatgaaaagatgtcttattcggatttagaaaataagttagaaaatataagctcaagatataatcttttcttagatttagatgctccaatcactgctttatcagctggagaaaagcagcgtgtagaaatagtaagaattttattacaagaccctcagatacttattatggatgaaccaacttcagttttaacaccacaagaagttgaaagtttgtttgtaacgttaaatgcactcgtcaaagaaggtcgtacgatattatatatcactcataaactcgaagaggtaatatcaatatgtgacacagttacaataatgagaagtggtgaaattatagatacttcaagtacttccaatcagactgcaaaaacactagcaacaaaaatgctaggacaaaaattagatgatttaaaaactaattatggtcatataaaagatgaagttaactttgaagttaaaaatatttcatgtgattttaatgatccatttttaacagatcttaaaaatatttcttttcaagttagagtgggtgaaatttatggtattgctggtgttgctggtaatgggcaatcagaattaatggatattttaacaggagaaaatataaatattaaatctggatcaattacttttgataataaaaaaattgaaaagtatgggccacaaaaaagaagagatttatctatttcgtttgttccggaaaatagattggggcatagtgcagtacctgaattaagtttgtctgaaaatattcttttgagtcaatttccaaaaaataattttattaaaaatggtataattttgaaaaataatgttgatgattttgccaacaatgtaattaatgaatttaaagttattactcctgggaatgacgctaaagcat

SEQ ID NO: 268742 - DNA, 223 bp, Unknown
  Bacterial polypeptide expressing nucleotide sequence isolated from the Sargasso Sea
atggaagaccactatagtgataaaatggatgtgattatacaaaacttaagcaaagcaattaatgacccatcaaatgctccaaagcttttagtaggaaccggagaagacaaaagtcatttatgcgtgataatgacagcagacagaggtctttgcggaggatttaatacaaatattgttaagctatcgaaaaattattttaataaaattttaaaagaatcaaaaa

SEQ ID NO: 268743 - DNA, 785 bp, Unknown
  Bacterial polypeptide expressing nucleotide sequence isolated from the Sargasso Sea
aatgtttaggaaagtatttggtaatacttctcccgaagcattagatgcaatccaaaacaaaggtatttcaaaaacagaagccctagaagaatataattcagtcattggtgtttcagatgtttcatttgatgttaatcaaggtgaaatattttgtgtaatgggtctttcaggtagtgggaaatctacactagttagacatataaataggctattagaacctacatctgggaaaattttaatcaatgatcaagatgtaatgcagctagatagagatcatttacaagaattaagaaacaaaaaaataggtatggtttttcaaaactttgccttaatgcctcacaggtcagttgtagataatattgcaatgcctctagagataagaggggttagtaaaaacgaccgtctagatgcagcgaataaaattttagaaattgtggagttgcaaggatggggaaacaaatttgctcatgaattgtcaggaggaatgcaacaaagagtaggacttgcaagagcactagcagcagatccagagtttcttttaatggatgaaccttttagtgcattggatccattaattagaaggcaacttcaatcagaatttatcaagctttcaaaacagatgaaaaagacgactgtctttataactcatgacttagatgaggcggtaagagtaggacatagaattgcaattatgagagatgggaaagtaatacaaataggaactcctgaacaaattgtcgttagtcctgccgatgaatatgttgcagattttgtaaaaggaattt

SEQ ID NO: 268744 - DNA, 538 bp, Unknown
  Bacterial polypeptide expressing nucleotide sequence isolated from the Sargasso Sea
aatgactaatcaattaattaaaataactgatctaaataaagaatatattataaatgaagataaaatttgtattctcaataaagttaatttttctcttagagaagaagaaataatatcaattacaggtccgtctggttcaggtaaatcaacttttttaaacatattggggttattagattctagttataaaggaaattatatatttttaaataaagatgtaagcaatttaggaataaatgaaaaaaataacattcggaataaatctataggttttgttcatcaattttttcatcttattccagagttaaatgttttagaaaatgtttcattaccaaatttaattatgaaaaataaatataaaatttcttttcaagaagctaaaaatattatcattaaatttggtcttaaaaacagattatattctaaaccatctgaattatctggaggagaacaacaacgagttgcaatagctagggctttaataaacaaaccagcaattatcattgcagatgaaatgactggtaatttagatgaaaaa

SEQ ID NO: 268745 - DNA, 778 bp, Unknown
  Bacterial polypeptide expressing nucleotide sequence isolated from the Sargasso Sea
atggcaattataaaaaaatttagaataaaatcttttaaaaatataaactcaataatcaagtttgaaaatgtatccatcgcttacggaaataggactgttctagataatataaattttagtattaatgaaaaaactatacatggcttacttggtcctaatggtgcaggtaaatctactctctatcatttaatgactggtctcattgaaccaaaacaaggaaaaattttaattgaaaacaaagatgttacaaactttccagtttatttaagaacaagacaatatggtataggatatgttccacagtatggtggggcttttgctgatcttactcttcatgataatttaaaagcaataagtgaaatagttatagaaaataagaatttgagatctgaaagaattaattatttaatatcgaaacttgagcttgaaaatcttaaagatatcaaagcaaaatatctttctggtggagaaaaaaagaagttagtaattgcattatctttattaagtaaaccaaaaatacttttactcgatgaaccatttagtgcacttgatgtgcttacaatcaaaatgttacaggaattgattgtaagtttacaacaagataataatataactatttgtatctgcgatcatattgctacatcgcttctccagatagtagatacagccatgatacttagtaacggaaaaattattgcccaagataccccttcaaatttaattaaagatatagatgcaaaaaatgcatactttggtgataattttaaaataaattaaa

SEQ ID NO: 268746 - DNA, 793 bp, Unknown
  Bacterial polypeptide expressing nucleotide sequence isolated from the Sargasso Sea
atgcagccagatgaagggctatttactcgccagatgccgggggatcggtttcgcaaccagactgatccggtgctacagctggaaaaaattaacgttaacttcgatggttttcaggcgctaaccgatctcacgctcaatattggcgttggggaactgcgttgcatcatcgggcccaacggcgccggaaaaacgacgttaatggatgtcattaccggcaaaaccaggccgcaaagtggtcgtgcgatatacgatcagtcgaccgacttaacgacgctggatcccattgccattgcacgtcagggaattggacggaaatttcaaaagcccacggtatttgaagcattaacgctggaagagaaccttgagctggcgctgaaaaatgataaatctgtttggggttctctacgggcacgactctcaggcgaacaacgggatcgtattgatgaagtactggcgctgttgcggctgggtaatgagcgggcccgccgcgccggtctgctttcgcatgggcaaaaacagtttctcgaaattggcatgctgctggtacaggagccgcatttactgctactggatgaacccgcggcggggatgactgatgcggaaacggaatacacggcggagctgtttcgccagcttaccggtaagcactctttgatggttgttgagcacgatatgggatttgttgaaaccatcgccgatcgcgtcacggtattacaccaggggcaagtattggctcaggggagtctgcgtgaagtgcaggccaacgagcaggttattgaagtttatctcgggc

SEQ ID NO: 268747 - DNA, 817 bp, Unknown
  Bacterial polypeptide expressing nucleotide sequence isolated from the Sargasso Sea
tttatttggaaagctgaagtgttacctgaattccctaggtcattaatagagccctttggtattacattaatttttgctattggacttttcccttatataactggtcaaaataattcaattcttatagagatagttccatttttagcaacaattgcagtggctgcattaaaactaactcctccattacaagattcctttagggcattaacttgtatgcgtgcatcaatccctgatttagaagagatactaaaattaatagagcttccttccattcgactaactaaaagctcaaaaggtgttcccacaaaaaaaggtattgagccaaggaacagcataaaacttgaaaaacttagttataaatatccaaatagtgatgaatacactttaaaagatataaatctcactatacctattggatcaagaatagctttcattggggaaactggaagtgggaaaacaaccacagccaatcaattactttgtcttcttagacccacggatggaaaacttttattagatgggatcgaacttaatgataaagaagttcctgcttggcaggattgttgctcttacgttccacaagcaattactttattaaacagcaatattattgaaaatattgcatatggattagataaagaattaatagataagacaagagtctgggatgcacttaaggcagctcaattggcagaattagtatcagaaatgccaaagggtttaaatacatcagttggcgataatggcattagattgtctggaggacaaagacaaagattagatatagcaagagctttttataggcaatcaaaattac

SEQ ID NO: 268748 - DNA, 397 bp, Unknown
  Bacterial polypeptide expressing nucleotide sequence isolated from the Sargasso Sea
atgacgtcttcaaaaagttttgtaaaatttgataaggtagacaaaagttatgacggtaaagttttagtcgttaaagacttgaatcttgacatcaacgaaggcgaatttattacaatgttgggaccatctggttcaggaaaaacaacttgcctaatgatgttagcaggttttgaaacgcctactaatggtgaaatttatttagattcaaaacctatttctagaattcctccacacaaaagagggataggaatggtttttcaaaattacgctttatttcctcatctaacagtttatgaaaatttagcttttccattaaaagttagaaaactttctaaagatgatattgataaaaaagtcgataaagctttatctatggtttctttatccggattgaaaa

SEQ ID NO: 268749 - DNA, 520 bp, Unknown
  Bacterial polypeptide expressing nucleotide sequence isolated from the Sargasso Sea
gatggcctccctgaaggacattcgtaaaagaatagatagcgtcaaaaaaacccagaagacgacaagcgccatgaatatggtgtcggccgccaagttgaaaagggctgagaataatatccgaagtgccatcccttattcagataaactgaaagaagtcgtttcttccctgagaagtcgattatccgacgaggaaaatccgttgtttcaggaaaaggacggtgaaaagactgcagtcattctcatcaccagcgacaggggactttgcgggggattcaataccaacctctgcaaaagggtgctggaacaatttggagatattccgactgatcttctgaccatgaccatgatcggccgcaaggggtttgattacttcaaacgccgttcctatgaaatccagggcaattttcaggaaactcgtccagaagaccaaatcaatgtggtacgtgaggtcatcagccagtgcatcaggcgctatgaaaatggggaattggataaagtttacctagcctacaaccattaa

SEQ ID NO: 268750 - DNA, 298 bp, Unknown
  Bacterial polypeptide expressing nucleotide sequence isolated from the Sargasso Sea
caacgttgtgctatcgctagagcattatgtatgcaaccaaaaattatgttatttgatgagcctacatctgctttggatccagaaatgattaaagaagtactagatgcaatggtaagtcttgcaaaaggtggaatgactatgattgtagtaacacatgaaatgggatttgctaaggaagtcgcggatgaggtaatttttatggacgaaggtatgataattgaaaaggcggaaacaaaagaattctttgctaacccaaagagcgatagaacaaagctttttttaagccaaattctttaaa

SEQ ID NO: 268751 - DNA, 283 bp, Unknown
  Bacterial polypeptide expressing nucleotide sequence isolated from the Sargasso Sea
tatgtcaaaaaattcagaatttgttaaattcgataaagtagacaaaagttatgatggtaaagttctagtcgttaaagatctaaacttagatattgctgaaggtgaatttattacaatgcttggaccgtctggttcaggaaaaacaacttgcttaatgatgttagccggatttgaaactcctactaatggagaaatatatttagacaaaaatcctatatcaaatattccacctcacaaaagaggaataggaatggtttttcaaaactatgcattatttcctcat

SEQ ID NO: 268752 - DNA, 436 bp, Unknown
  Bacterial polypeptide expressing nucleotide sequence isolated from the Sargasso Sea
atttaatctgcttccttatttttcacttgaagaaaacgtcctgctgccactccgtttttccaaaaaacgtgctcaaagagcaggcagtaaccaggcggaacggcttaaagaagcccaaaggctgctaacagcattagggctgtccgaaccgctcatggagggacgtccggtggtggaattgagtgtcggccagcagcagcgtgtggctgccgctagggcactcatcggtaggcctgaattggtgattgcggatgaacccacttcagccctcgatgcggatctcagagaggtgttcctcaatctgctgtttgcggaatgtgacaaggctggcagtgccatgctcttcgtcagtcatgacttgcaactgagtcgattcttcggaaggagtctttctcttcctcaaatcaacagggcttccagtttggaggcagcatga

SEQ ID NO: 268753 - DNA, 408 bp, Unknown
  Bacterial polypeptide expressing nucleotide sequence isolated from the Sargasso Sea
tatgactggtaaagaagattcatttgtcgtttttgacaaggtccaaaaaagttatgatggattaagtcttgttgtgaaagatcttaatttacatattagaaaaggtgagtttttaacaatgttgggcccttcaggttcaggaaaaacaacttgtttattaatgttggcgggatttgaaactgctactcatggtgagattttatttgatggtaagcctataaacaatattcctcctcataaaagaggaattggaatggtttttcaaaattatgctttgttccctcatatgactgtaggtgaaaacctatcttttcctttggaggttagaaaaatagataagaatgagagagaaacgaaagtagttaacgcacttgaaatggttcaaatgtctgaatttattaacagaaa

SEQ ID NO: 268754 - DNA, 886 bp, Unknown
  Bacterial polypeptide expressing nucleotide sequence isolated from the Sargasso Sea
ccggctgtcatgttgttatccgttatcacttttgccatctggatgataataggccctgagcctagcttcggatttgcctttgtggcggcggtttcggttttactcatcgcctgcccctgcgctatgggtctggcaacacccaccgccattatggttggaaccggtcgtggcgcagaaaatggtattctcatccgcaacggcagtgcgctggagagcctcgcgcaaattgatacggtaatgttcgacaagacaggaacgttaacccaaggtatgccagaactttctgacattctcgatcctgtgtccggagaaagccttatcaaagacgagaatgttttggtgctgattgcagcggcagaagcgcaaagcgagcacccagtctcgagagctattgttgaggccgctattcaaaagggtcttgttttgcccgcggcatcggaattctccgtttgccccgggcttggcattgaggctcttgttgagggcaaacacattcaaattggctccgcccaacttatggctcaagaaaaagttgagatcggattggctctggatttggcggctagtttagccaaaaagggtaagatcgtggttatggcggccatcgactctaaattagtcgcggtattgggtattaccgattccgtgaaacccgaggttccacaaactctctcagaaattgaaaccattggcctgcaagttggcttgattaccggcgacggtaagctaacggcagatttcgtggcctcggaactaggtattagccaaattacgccagaaaccctgccggatgataaagcgagtgaagttgttcgtcttcagaaagaaggccggaagattgcttttgtcggcgatgggattaatgacgcgccggcgcttgcggtgg

SEQ ID NO: 268755 - DNA, 250 bp, Unknown
  Bacterial polypeptide expressing nucleotide sequence isolated from the Sargasso Sea
cttctacttttagatgaggcaacatctgctctggatacaaagtctgaaagattagtccagaatgccttagataatttgatgaaaaatcgaacagttcttgttatagcacatcgattatcgaccattaaaaatgcagataggataattgtattggacaaaggggccatagttgaatcaggcacgcataaagagctttacgataaaaacggtatttattacaatctttataatattcaatttgaaagctgat

SEQ ID NO: 268756 - DNA, 502 bp, Unknown
  Bacterial polypeptide expressing nucleotide sequence isolated from the Sargasso Sea
gggaacttgtatcttgacgaaaaagacctgaccagttttacgcggaatcaagcagcaaaatttcggaatgagtcaattggctttatcttccagttccatcaacttttaaatgatttcaacgcgcttgaaaatgtaatgattcccggattaatacatggtggctccactgggattgttaaaaaaaacgctattaatctgctggaaaatgttggcttagctgagcgagcatttcataaaccatctcaactctccggcggagaacagcagcgagttgctattgcacgtgcattaattaacaagccccgtattgttctagctgatgaacctaccgggaatcttgatgaagaaacaggagagcaggttatggatattcttcttcgactaaaccgagaacataaaacaacatttataatgataacacataacccctcacttgcatctagaatgcagtttcagtatcgcatggaaaatggacaattacatttgattgcgaataaataag

SEQ ID NO: 268757 - DNA, 610 bp, Unknown
  Bacterial polypeptide expressing nucleotide sequence isolated from the Sargasso Sea
tatgtcgacattgctcgatatcaaaaatctttcgacccatttcaacacctccgcaggaacgattaaagcagtaaacgacgtttcatttaagctgagagaaggtgaaacattaggactggttggggaaagtgggtgcggcaaaagcgtcacggcactttccataatgcgactcgtcccatctcccccagggcgaatcgtatccggcgatgtaattttccaaggcaaaaacctgttggaaatatcagaagaggaaatgcaaaacgtcagagggcgcgatattggaatgatttttcaagagcccatgacatcgctgaatcctgtgctcagtatcggacgccaattacgggaaccgctggaactgcatctaggtatgacaaaacaacagtcattgaaaaggtccagcgaattgcttgaactggtgggtataccagatccagcaaccagactaaagacatttccccaccagacttcgggcggccagcggcagagaatcatgatcgcaatggctctgagctgtgaaccaaagctgctcatagcagacgaagcaactaccgcactggatgtgaccattcaggcacagattttagaaatcatcaaggaacttacggac

SEQ ID NO: 268758 - DNA, 730 bp, Unknown
  Bacterial polypeptide expressing nucleotide sequence isolated from the Sargasso Sea
atggaaaatattattcagacagtaaaaaatctttccattggatttaaaagcaaaaaaggtgatgaaatatcaatacttagaaatataacaactaatatcaaaaaaggtgaaactgtaggaatagtaggagagtctggatctggaaaaagcactcttgctttagcgatgatgggctatgttaaacaaggcttatatacaattgaaggtgagtgtttatttaaatcaaacaatcttcttgctatgaaaaatagagatttagagaaaattagagggagaaaaatagcgatgatacctcaaaacgctggtcaatcattaactccaaatttaaaaattggataccaaatagatgaagctttattactccatacaaatttaaataaagttgctagagataaaaaaatatcagaattattaaataaagttagacttccttcaccagatacaatggcttttagatatccacacgaactttcaggagggcaacagcaaagagtagcagttgcaatggcacttgcaggaaatccagatttattattattagatgaaccaaccacaggtttggatgtaacaacacaagctcatgttttggagctactaaaatttatagctaaagataccggaacatcaatggtttatgttagccacgacctcggagccattgcacaggtaagtgatagaataatagttatgtatgcaggagaaattgtattagaaggacctgctagaaaaa

SEQ ID NO: 268759 - DNA, 244 bp, Unknown
  Bacterial polypeptide expressing nucleotide sequence isolated from the Sargasso Sea
tatgaaaaactcatttatacaaataaataatatttcgaaacattttgcagatgtaaaagcagttgatgatgtttcatttgagatcaaggaaggtgaatttttttcccttttaggaccttcaggatgtggcaaaacaacattattgaggctattggcaggatttgaatatcctacttctggcaatctattaattgatgggacagatattactgcattacccccagacaaaagacctacaaatatg

SEQ ID NO: 268760 - DNA, 895 bp, Unknown
  Bacterial polypeptide expressing nucleotide sequence isolated from the Sargasso Sea
tatgaaaaaaaatgtaatcgaagtaaagaatttagaaaagtattttgaagtatccggtggtttcttttctagaaaaaaagctaccgtaaaggcagtagatgatattacttttgaaataccttttggtgagagtttaggcctagttggtcaaagcggatgtggtaaaacaactactgctagagcactttgtttattagatcctaaaactgggggagaagtcagtttttataataatgaaaaatcagagatggaaagtattgatgaacttgaaggcgaagaattaaaaaaattcagaagaaatatccaaatgatttttcaggatccttatgaatcacttaatccaagatggacaattaaagatattatccttgaaccactcaacatacataacattggtgatttagatgaaagagaagaagcagtcgctgaaatactgcaaactgttggattaacaccgcctgaaaattatatgccaaggtatccgcatgaattatctggaggacaaagacaacgtgtatctattgcaagaactcttataatgaagccaaaatttgtagtatgtgatgagcctacttcaatgttagatgtatcaataagaatttcaattatggatttaatgttaaatctagcaaaagatttagaagtttcttatctttacataacacatgatttagcagtggcaagatacatgtgtaacagaattgcagtgatgtttaatggaaaaattgtagaaatcgcagaaactgaagagttattaaacaatccagttcatccctatacaaagagattaatttcctcaataccagttccggatccaacatatgatagaaaagtatatgatatcaattttgatgaacttgattcacttattgaaaaacatggatcagacagtcct

SEQ ID NO: 268761 - DNA, 487 bp, Unknown
  Bacterial polypeptide expressing nucleotide sequence isolated from the Sargasso Sea
gatgacagggatccatctatcggggaaaacaaaactcggagcagaagaatttgagttctcatttgaaacagggactcataagcgaatagcaatcataggtccgaacggatctggaaagacaacattattgcgcttgattgctggccatgaatgtctaacatcaggttcattacaaattggtaaagctatctacgacgaaccagtatcagaatgcttcgttcccccgcacctcagagatcttgtcttgcaacatcaggggggaagcgtgtttcctcacctaacagttgaagataacgttgctttcccctaccgagcaaaagggtattcaaagagaaatgctcgatcgcttgctcgtgaaacccttgaagattttggcttatcaaaactcaaacataagtacccggaacagctgtctggaggacagactgcacgcgtgtccttagctagatccctaactaggcgaccaaaactactgttacttgatgac

SEQ ID NO: 268762 - DNA, 872 bp, Unknown
  Bacterial polypeptide expressing nucleotide sequence isolated from the Sargasso Sea
attaagcactgctgctttattggggaatgctgcttcagttgacggtgaaataactattgatggaaacccaattgatccaaaggacgaaagggctctgcagagattgagaggagctcaggtgagctttatattccaagaacccatgacttcactaaatccattgcataccattgagcggcagttatcagaaacaatatcgttacatcaaaacttgaataaacaaagattgcgagaaaattgcatagctctcttagaaaaggtgggaataagagacgttgagtttaggctaaacgcttatccgcatcaactgtctggcggtcaacggcagcgtgttatgatagcgatggccatagcaaatcgccccaaaattttgatagcagatgagcctacgactgcattagatgtaacaattcaagcacaaattctaaatctcttagcaaatttaaaaaaggaatttggaatgtcgatgctttttatcacacatgatcttaacatagtgaggcaaatagctgaccgcgtttgtgtaatgaatgctggaaagatagttgagcaaggagttactgatagtgtttttgaaaagccaaagcatgagtatacaaagaagcttttaaaggcggtatcagcttcaggtccaaaattgatttctgcacaatctaaggtaattttgaggtctcaaaataccaaagtgtggtttcctgtttataaaggtttattgaagcgaacagtaggtcatattaaagcgctaaactcggcgacttttgatgtaagaatgggagaaacattgggaatagtgggtgaaagcggttcaggtaaatcaactattgctttagctcttatgcgattaattgattttgatggtaaaattaattttg

SEQ ID NO: 268763 - DNA, 619 bp, Unknown
  Bacterial polypeptide expressing nucleotide sequence isolated from the Sargasso Sea
aatggaccaaaaaaacaaaatttcgatccgtaatctatataagattttcggcgctgaaccagaagctgcactccagcatgtccaaaagggtatcggtaaggcggatttacttgaacaacaccttcacgttctcggtcttcaagatatcaacatcgatataggcgagggtgaaatcacagtcattatggggttgtccggttccgggaaatcaaccctcatacgacatctcaatagattgatcgaacccaccgccggcgaaatcgaagtggatggcgaagacgttctagcctttgacgaagaacggcttcggcggttacgccgggaaaccatgtccatggtttttcagaaatttgcgttattccctcataagacagtggcagataacgcggccactctgctcagggtacgcggcgccgaccgacaagatagtggtaccgaggccaataaatggctagatcgtgtcggcctatacggttatggcgatcattacccgcatcaactgtctggtggaatgcagcaacgagtaggaatcgctcgggccttggcttcaaattcaccgatcatgctcatggacgaagcgttttcggctcttgacccattgatccgtaccgaatatgca

SEQ ID NO: 268764 - DNA, 409 bp, Unknown
  Bacterial polypeptide expressing nucleotide sequence isolated from the Sargasso Sea
atggtaaaaaataaaaacaaatcatctaaaccagttattgaaattaaagaaatgcataaatggtttggaacatttcatgttttaaaaaatatttctctgggtgttaatcaaggtgaacgtattgttatatgtggtccgtcaggttctggtaagtcaacactaattagatgcatcaatcgtctggaagttcaccaaaaaggagatattatagttaatgacgttgaacttactggtgatttaaaaaatcttgaatcaataagaagtgacgttggaatggtattccaatcttttaatctttttcctcatttaactgttcttgaaaactgtactttagcaccaatctgggtcaaaggtcttcccaaaaaagaagcgaatgaactagcaatggaattgttaaccacgtgttaaa

SEQ ID NO: 268765 - DNA, 934 bp, Unknown
  Bacterial polypeptide expressing nucleotide sequence isolated from the Sargasso Sea
caactgtctgatcatgaaagaatccttaattcatatcctataatgctgtcaggaggaatgaggcaaagagttctaattggaatgtctttattaaataatcctaaacttctaattgcagacgagccgggcacagcgttagacgtcaccacccagaaagagatacttgacctcttaaattctttagtaaaagacgaaggcttgtctctattattcatcacccacaaccttggcgttgtcagagaaatggcagaccgaatatatgtaatgcaaaatggaaaaatcgtagaaactaacagccgggaaaatatttttaaaaaaccgaaacaccaatacacgattaaattaatggaaagtgtaccgccactctttggtgataaagtgatagatgttaaaaacacaaattcagaagttgatgaaattattagtgtctcaaaccttaataaatcttttcctattagaactggattcttcaatcggattacttcccaaaaccatgcagtaaagtccgtcaatttgactataaattctggcgatatatatggaatagcaggagagtctgggtcaggcaaaacaaccatagccaaaatcttactaggcctctatggaaaaacttctggaactattaaaatagacaaattaaaccttgacgaacaagttgcactcaagagttacagaaaattgattcagatagtttatcaaaatccaggttcgtcacttaataggaagcgaaccgtgtcacaaatattatctgtaccactaaaattttctggttatagtaataagatgataaaggatagggtgaatgaactcctgcagatggtaggtttaccggcctcctatagttcgatgtatccgcatgaattgtcaggggggcagaagcagcgagtagcaatagccagagcgctttccttggagccaaaaattatagtgttag

SEQ ID NO: 268766 - DNA, 854 bp, Unknown
  Bacterial polypeptide expressing nucleotide sequence isolated from the Sargasso Sea
cggctataccgcgttcgaacgcgctcgcgccgaacgcctggcccagcagcaacaggcctttgaaaagcaacaggcgcaacgtgcgcacatggaaagctacatcgcaaggttcaaggcccaggctaccaaggcccgccaggcccagagccggatcaaggccctggaacgcatggaagagctgtcggcggcccacgtcgattcgccgttcgactttgtcttccgtgagtcggtgaagatctccagcccgctgttggacctctcggatgctcgcctgggctatggcgacaaaaccatcctggagaaggtcaagctgcagcttacgccgggcgcacgcatcggtttgctcggcccgaacggcgcaggcaagtcgacactgatcaagaacctttcgggtgagcttgagccgctggccggccgcctgacccgtggcgagaacacggtggtgggttacttcgcccagcaccaactggactccctggacgccaaggccagcccgctgttgcacctgcaacgcctggcgccgaccgagcgcgagcagaccctgcgcgacttccttggcggtttcgacttccgtggcgcacgcattgacgaacctgtgctgaatttctccggtggcgaaaaagcacggctggccctggccctgatcgcgtgggatcgcccgaacctgttgctgctcgacgagccgaccaaccacttggacctggaaatgcgcctggcgctgaccatggccctgcaggagttcagcggtgcggtattggtggtgtctcacgaccgtcacctgctcaagagcactaccgacaatttcctgctggtcgccgacggcaaggtcgaagagttcgacggcgacctggacg

SEQ ID NO: 268767 - DNA, 739 bp, Unknown
  Bacterial polypeptide expressing nucleotide sequence isolated from the Sargasso Sea
gatgagtgaactaactcttgcaggaatcactatacgattcgggggtcacgtagcgttgaataatgttcacttagcagttgaatccaatagcatcaccggcctaataggacctaacggggctggaaagacaacgttatttaatgtgacaagcggtttgcttaagccgaacgaaggaactatccggcttaatgatcaagtaatgaccgacctttctccttaccgtcgcgcaaagcttggattggggagaacctttcagagacttgaactattcccaagtttgtcagtggaagaaaacatacaagtagcagctgagatcagaggagaatggttccgatcctctaacggcgcctcgagtgttagtgctagcgtccaacaagtaatgaagctaacagggctagatagcatagcctcgaaaagtgttgctgaaatccctaccggtaaagccagactggttgagttagcacgatcagtagttcaatggccctcaatgcttcttcttgacgaacccgcctcaggccagaacgaaaacgaaacagaagaattcgctcaaatcttgaaaattttaaactccgaaggggtcactattttcctcgtagaacatgacatgtccctagtaatggatgtctgtgacaaagtattcgtattggatttcggaacgctaatagcagatggctcaacggaagagattcaaaataatccagtcgtaattgacgcctacctgggaggaattaatggataa

SEQ ID NO: 268768 - DNA, 643 bp, Unknown
  Bacterial polypeptide expressing nucleotide sequence isolated from the Sargasso Sea
gatgatataacttttgaaattccctttggagagagtttaggtttagttggtcaaagtgggtgcggaaagacaacaactgctagagcattatgtttacttgatcctaaaactgggggagaggttaatttttacaataatgacgtatcttctatgcaaagtattgatgagcttgaaggtgaggaattaaagaaatttagaagaaatatacagatgatttttcaagatccttatgaatctcttaatccaagatggacaattaaagacataattttagaacctcttaacatacacaatattggtgatttagatgaaagagaagaagctgtatctgaaatattacaaacagtaggacttactccaccagaaaattatatgccaaggtatccccatgaattatctggaggtcaaagacagagagtgtctatagccagaacacttataatgaaaccaaaatttgttgtttgtgatgaacctacctcaatgctagatgtctcaataagaatttctataatggatttaatgttaaatctcgccaaagatttagaggtttcttatctttacataactcatgatttagcagtagcaagatacatgtgtaatagaattgctgtaatgtttaatggaaagatagtagaaattgcag

SEQ ID NO: 268769 - DNA, 454 bp, Unknown
  Bacterial polypeptide expressing nucleotide sequence isolated from the Sargasso Sea
aaaaacttaatagtatatgaaaaattatataatgttttaaatattaataatacaattgaatatctggttgaaaaactaagattatcagattgtttaaatagaattacaggtgaactttcttcaggtcaaaaaaatagagtaagtttagcaaaagctttaataaataacccaagtgtattgcttcttgatgaaccgacagcatcacttgatccagaaattggtgattttgtcagaacatttttagaaaattataaaaaagaaaaaaaaatatcaattttattagcatcccataacatgaatgaagttacaagattatgtaagaaaattttaatgatgaaagatggtgtcattattgataagggaaatccagaagaattaataaaaaaacatggtagaaaaaacttagaagaagtgtttcttaaactttcaaggaataaaaatgagctttactaga

SEQ ID NO: 268770 - DNA, 216 bp, Unknown
  Bacterial polypeptide expressing nucleotide sequence isolated from the Sargasso Sea
tatgaataattcatttatacagatcaataatatttcaaaacactttgtagatgtaaaagcagtagatgatgtttcatttgagattaaagaaggtgaatttttttcacttttaggaccctccggatgtggtaagacaacattactgaggttattggcaggatttgaatatccaacttctggaaatctattaattgatggaatagatattactgcatt

SEQ ID NO: 268771 - DNA, 673 bp, Unknown
  Bacterial polypeptide expressing nucleotide sequence isolated from the Sargasso Sea
attatcagggggacaacaacaaagagtagccgtagcaagagcattggtatttgatcctgctgtagttctaatggatgaacctcttggagcgctggataaaaatttaagagaaagcatgcagtatgaaattaagcacatccatgaaagcattggagtaactgtagtttatgtaactcatgaccaaagtgaagctttaacaatgtcaaatcgtattgcagtatttaatgatggtaaagttcaacagctttcaagccccgataaattatatgaggaaccagaaaactcatttgttgcagaatttattggagagaataatagatttgatggagaggtattagatgtttctaatggtgtttgtaaagtaaaaataggacagagcgaaatattagcaaatccaatttcagtaaaatctaagggtgaaaaaacaaaagtttctattagaccagaaagagccttaattaacccaaaaaataaaatggataataatcaaaaaggcaaaattgaggaagtgatttatcacggagatcatacaagggttagaataaatttacttggtaattctgattttatattaaaggttcctaacagttcacaaaatttagatataaaactcggcaatgaaataagtattggctggaatagccaagatgctagagccttggaccctaaataa

SEQ ID NO: 268772 - DNA, 709 bp, Unknown
  Bacterial polypeptide expressing nucleotide sequence isolated from the Sargasso Sea
gatgaaaaaatactacatagagttgcaaggactttacaaatcctactttgacggctccggggatcaccatattttaaggggtgctaatcttaaaatagaaataggtgagacggttgccattctaggaagcagtggatccggaaaatcgactttgctcaacctgattgctggtatcgatctgcctgatcaaggtgaagttcgtatcgacggaaaaagtcttggacaaatgtccgaaaagaacaggactttgttgagacgcagaactatgggatttgtttttcaatcattcaatttgatcccaacactgaacgtttatgaaaacttaatgcttcctctcgaactgaaccaaatatcagaaaactcggggattatttcacaaatgcttgaagctttgggtcttaaaggtcgtgaagaaagtcatccggataggctttccggaggagaacagcaacgtgttgccattgcacgagctttgatgcatcaaccgtcacttctccttgccgatgaaccaacaggcaatttggatgcggagaccagccaggaaacgcttaaactcatcaatcatttagttcatcgttcaagaacgaccatgatcatggcaactcatagtcaggaggttattgaatgggtggaccgtgttttgggtattgaggatgggaaattgatcgaacttaaaacttctgaagcgatccaaaaactcgcctcatga

SEQ ID NO: 268773 - DNA, 666 bp, Unknown
  Bacterial polypeptide expressing nucleotide sequence isolated from the Sargasso Sea
gatgccaaaaaactccgtaacaatctcttgtaaaaatgtttggaagctttacggatctaatcctttaaaatatctagcaagcaaaaattttagtccttctatagctgaattgaaggaatctcaatatattcctgcagtttttgatgcttctattgatgtctttgagggagaaattctagttatcatggggctaagcggatcaggtaaatcgagtttagttagatgtatgacgagacttattgaacctacaagtggtgagatctattttgagggatctgatttacttaaagcaactgaaaaagaattaattgaaataagacgacataagatgggtatggtttttcagaattttgcattaatgccccatagaaatgtattagacaacattgcttttcctttagaagtccaaggtgttaatagagatcaaagagaaaaaagagctttagaaataatagatttagttggtcttagtggaagagaaaaatactatccaagagaattatctggtggccagcaacaaagagttggattagcaagatctttggcagttgagcctaatatttggtttttagatgaacctttttctgcacttgatcccttaataagaaaggagatgcagaatgaatttattagacttcaaaatcttctaaataaaacaattgtttt

SEQ ID NO: 268774 - DNA, 601 bp, Unknown
  Bacterial polypeptide expressing nucleotide sequence isolated from the Sargasso Sea
atgccaagtttaaaggatatcaaaacccagattaactctgtagtttctacaaagaaaatcactacagctatgaagatggtagcagcaagtaaattgcgaagatcgcaagaaaaagcagttgctgcaagaccttattcttcacgcttagaggaaatgttatcttcactggcatcttcagcagcatctggagagggcattattaaacttcttactggtactggtaatgatcaaaattatattgttgtaccagttagtgctgatagaggtctttgtggtggctttaacagcagtattaatagagaaacatttaagttggtaaaatctttagagaatgatggcaagaatgttcaattaatacctgttggaaaaaagagtagagattttttcaatcgtgtgatgaaagagcaaattgttgaaagctttattgatcttaatgtatcaaataatggttatgactctgcactaaatgtatcaaacaaacttcaagatttatattttgagggaaaatttgataagtgcattttagttttcaataaatttaaatcagcaatttctcaagaagtaacacagcaacagcttattccattagatgtatcagagt

SEQ ID NO: 268775 - DNA, 332 bp, Unknown
  Bacterial polypeptide expressing nucleotide sequence isolated from the Sargasso Sea
cctgctccgccgagggacgtcgacaaacgcggagaaggagggcgagacgcgactcggatccgacgagtggtcggaactcgccgccggcctcgacgcggttggcgactggtcgtcgatcctgtccctcggcgagcaacagaggctggcgtttgccagggttttactcgcgcgtcccccggtggcgctgctcgacgaggcgacgagcgcgttggacgcggttaacgaggcgagaatgtactcgctgcttcgggatttggacgacgtggcgtacgtgagcgtgggacacaggggttctctgctgggttttcatgaacgggtgctgcggctggagg

SEQ ID NO: 268776 - DNA, 377 bp, Unknown
  Bacterial polypeptide expressing nucleotide sequence isolated from the Sargasso Sea
acaaatgcctcttggcctaaatactattgtaggacaatcaggagtaaaaatatctggaggagaacggcaaagaattagtatagcaagagcaattcttaaaaactctcctatacttctcttagatgaagcaacttctgcattagataataaatcagagacaaaagttcagctagctcttaacactcttagcaaaggaagaactactatagttgttgcacatagactttctactatagctgactctgataagattattttgattaatgaagggaaaatagaagaaagtggaaaacattcggaattattaaatcaagagactatgtatgcaaagctgtataaaaaaagtcaaagtgaaacaagtaatatcaaaaattgat

SEQ ID NO: 268777 - DNA, 691 bp, Unknown
  Bacterial polypeptide expressing nucleotide sequence isolated from the Sargasso Sea
atgcaaagttctataaaggtcataaatctaaaaaaattctatggagccaaagaagctgtaaaaaatattagttttgagattaaagaaaatgaaattattggtttactaggtccaaatggatcaggaaaaactacaaccattggtatgatattaggtttattaaaacctacaagtggagaagtaataattaatggattaaaaatagatagaaatccaattgaaattttaaaaaaaatcaattttatttctccttatatagagttaccaaaaaagttaactgtaaaacaaaatttgattgtctatggtaagctttactcagtaaaaaatttaaatcaaaagatagattatttggttagcaaattaagattagaaaatttacttaacagagttactggagaattatcatctggacagaaaaatagaataagtttagcaaaagcaataattaatgatccaagtgtactgctacttgatgaacctacagcatctctagatcctgaaataggtgattttgtaagaacatttttagaaaattatagtaaagaaaaaaaagtatcaattttattggcttctcataacatggacgaagtcactagattgtgctcctcaataatgatgatgaaaaatggtataattattgatcaaggtaaaccaaatgatttaattaaaaaacatggaagaaaaaatttga

SEQ ID NO: 268778 - DNA, 790 bp, Unknown
  Bacterial polypeptide expressing nucleotide sequence isolated from the Sargasso Sea
attttgctacgaatcaaagactgttttgcgtgaaatatctcttcgaattcgccgaggagaacgaactgctgttttgggaccaaacggttcaggaaaaacaactttactgggtctattcggcggacttcttaaaccaaaaaacgggcgtataactctatctggtattgatcttgccgatatgtctccgactcaaatcgcccgccgagtagccatcgtcccgcaagaaactaaactcacatttgattattctgtccttcagatgacgctcatgggacgataccctcatcttaaacggtttgaacacgagggacttgatgattttaagatcgctcgtgaagcattagccgccacaggaatatcccagcttgaagaccgtagttataaaacacttagcggcggcgaaaaacaacgagtagtcattgcaagtgcgttaactcaattgtggcaactgaaagactctcaaaaacctagtccaaacgaaggacttcttctattggacgaaccgacggcttcacttgatatcggctatcaactggacataatcaaggcacttctgatcttgaacgcaaatcacaaaaccacccttgtgatatcaacccatgatttgggcctggctgccaggttatctgacgaaattatcatgatacgtcacggtcgcctgcttgcaacaggacctactgaaaacactttaacaagagaaaccattcgcgatttatacgacattgaggcggaagtgcatcgcaatcaagagacaggccacctgatggtcgttccattagcaaggaaatga

SEQ ID NO: 268779 - DNA, 580 bp, Unknown
  Bacterial polypeptide expressing nucleotide sequence isolated from the Sargasso Sea
atgacagataaaaagcctgttctttcagttgagaatctgactgtgaaattgccagatcatgctgatcgtttgaatgccattgaggaagtcagttttgacgtcaggactaatgagattctttgtgttgtgggagaatcgggttcaggaaaatccgtaacggcccacactgtgatgggcttgcttccgccgaaacagttaaaaccaactgcaggcaggattcttctccaggacgaaaatctttttgaaaaaagcgagttggagttgagggagatgcgtggggcgaagatgtcgatgattttccaggaaccgatgaccgccctgaatcccgtcgttacggtcggagatcaaatcgaggaggttctccgaattcaccgaccctccaatccaaaagagcgagccaggctgtgtaacgaagtcatggccgcagtgaatcttcctgaacctgaaaaattaagaaaaagttatccccatcaactttcaggaggacagcgccaaaggatcatgattgctgcggccctaattttagaaccctttctcctgattgcagacgaaccgacaactgcactggatgttacaaccc

SEQ ID NO: 268780 - DNA, 541 bp, Unknown
  Bacterial polypeptide expressing nucleotide sequence isolated from the Sargasso Sea
ttggatacttctgataatggaacatatgatcttgataaaattagaattgcaaacatgaatgaaaaaaaagcagccaactacagaaataaatttttaggatttgtttttcagtcatttaatttaattaattataaaaatgctcttgaaaatgttgcattgccactttattatcagggtatttccagaaaagatagacaaaaaaccgccttaaattatttagataaagtaggtttgaaagattgggctgaacacttaccaagtgaattatcaggtggacaaaaacaacgagttgcaattgcaagagctttagcttcaaatccaaaggtccttttggctgatgagcctactggagctctcgattcaacgacgtcaatggaggttatggctcttattcaaaaaattaacaatgaaggtaaaactatactagtggtaacgcatgaacatgatattgctaaaatgtgtaaaagagtagtccacttgagagatggagtaattgttgaggataaaaaaataaaacagaatattataaagaatgtttaat

SEQ ID NO: 268781 - DNA, 685 bp, Unknown
  Bacterial polypeptide expressing nucleotide sequence isolated from the Sargasso Sea
acaagacccatgcctcttcgggattattggcccgaatggtgcaggaaagagcacgctgcttaaggcaagtctggatcttgtgcaaagagctggtggaaccgtgcgattctggggtcaacggctcgctgaggtgcgttcaaaaatcgcgtatgttcctcagcgggaaacagttgattgggactttccagtcagcgtcatggatgtagttcgtatgggtgcaacttcaaggcttggctggtttcgacgaggtggaaaacgtgagcgtgagttggctcttgcaagtcttgatcacgttgggcttgcggattttgcaaagcgacaaatagggaagctctcaggagggcagcagcagcgggtctttctagcacgagcgcttgctcgcgaggctgagatctatctcctcgacgagcccatggcaggtgtcgacgctggatcacaggagcagatattcagtatccttgccgaactgcgggatcagggcaaattagttgttgcagtgcatcacgatatacgtacggctgcccaatggtttgatgcaattgctcttgttgacatgcgtcttgttgcagccggtccaacggctgaggtgcttacaccagaaaatctaaccatgacatattctggtcgcctcggcattctggatgaaattggggaggcagtggagcggagaggaaggacatcatga

SEQ ID NO: 268782 - DNA, 739 bp, Unknown
  Bacterial polypeptide expressing nucleotide sequence isolated from the Sargasso Sea
tatgcaacacccaactatcctgatgcagagcatcaccaaaattttcgccacagacgaaatggaaacccatgcgttacggggtatcgatttacaaatttcctcaggcgacttcgtttctatttgcggcccttcaggttgcggtaaatctactttgttgtctttgcttggtttattggacatgcccagtggtggtagctatcaaatagaaggcaaggaagtcagtggcttaagccttagcgaagcggcctttatccgtaatgaaaagattggctttatctttcagtcgtttaacttaatagatgagctgactgtattcgacaacatagccctccccctgcgctatcgccgccagtctgtagctaaatctgaaattgaagatcgcgtcatggcctgtctgaaaacagtagatatgactcacagagcgggtcacagacctaaccaattatccggtggtcagcaacaacgtattgccatagcccgtgctttagtgggtagcccggctttgctgttagtcgatgagcctacaggtaacctggactccagaaatggcgacgccgtgatggatatgttgtgtgaactgaataacaacggcaccactctgtgcatggtgacacacgacccacgttatgccgatatggccagccgcaagttgcacctgctggatgggcgtattctggatagtgacggcacacctatccagcagcagaccccagttttacgccaggttgcagctcagtaa

SEQ ID NO: 268783 - DNA, 115 bp, Unknown
  Bacterial polypeptide expressing nucleotide sequence isolated from the Sargasso Sea
aaaagtatcaaatttttacaagtagatgcttgtatagagagaagcccatcacaattatcgggcggacagagacagcgtgtgcaaataggaagagcgttagtgagagaaccaagaa

SEQ ID NO: 268784 - DNA, 385 bp, Unknown
  Bacterial polypeptide expressing nucleotide sequence isolated from the Sargasso Sea
gccgctaagaattagagggctttcgaccaaattggcccacggcaaggctcgtgaaatgttagatgaagttgggctttctcaccgcgtcgaccatttaccatcgaccatgtcaggcggtgaacgacagcgtgtggcaatagcacgagctttagttaccgagccatcagtggtactggccgacgaacctacaggaaatcttgatgactcgacgggtgagcaaatttataaactgcttactagcttaagtgataaaaaagggacagcgtttgttgtcgttacccatgatattaccttggccgggaaaatggacagggtgctgaagataaaggacggcagattagcgagcgatacgttattcaaggagagccaagatgctcgcctttga

SEQ ID NO: 268785 - DNA, 883 bp, Unknown
  Bacterial polypeptide expressing nucleotide sequence isolated from the Sargasso Sea
ccatcaataagagctaaagactccccacatcaattttctgggggacaaagacaaagagtaatgattgcgatggctctggctttagaacctgatataatcatagcagatgaacctactactgctttagatgttacaattcaggctaaaattttggaattattaggtgagcttagggatgaaagaaatatgggtttaattttaattacccacgatttggctatcgcttcagaaatctcagataatgtaatagtgcttaataaaggtaaaatcgttgaaaaagggataacaagagatgtcttcgtaaaccctaaccatacttatacaagacagttaatggattctattcctggaaaaataataaaacagaaaaagaaaatattaaaaaaattatctgacccaattttagagataaaaaatatttcaaaattttatgatacttttgcttgtgatgatgtaagttttaatttgtttcctaatgaagtcttgggaattgtaggtgagtcagggtcaggtaaaactactatctctaatttaattttaagattggtaagtccctctaatggtaaaattttatatcatggaaaaaatattttaaattttaacaaaaaagatctatttaattttagaaggagggttcaagtagtatttcaagatccttatgcatccttaaatccaacaatgaatatatatgacatcatatctgagccatgggtaattcattcagattttttagataaaaaatttcataaaagtaaagtatcagatcttttaaaaagtgtagggttacatccagatgatgctatcaagtttcctcaccaattctctggtggacaaaggcaaagaattgctattgcaagagcttggctctcaatccagaaattat

SEQ ID NO: 268786 - DNA, 637 bp, Unknown
  Bacterial polypeptide expressing nucleotide sequence isolated from the Sargasso Sea
tatgcacactaaacacttagagttagagcaggtgggtatcgacttccccacaccgaaggggccatttactgcgcttcaagatgtaaatcttaaaatcagcaaaggtgaatttgtttcattaattggccattcaggctgcggtaaatcaacggtgctgaatatcgtcgcaggtttgcaccaagctactaccggcggcgtaattttagatggcgcagaagtgaagcagcctggacctgaacgcgcagtagtctttcaaaaccattctttattaccttggcttacggtatacaagaatgttgagctggccgtaaaatcgaccatgcgaggcaagagtaaaaacgagatgcgtgactggatcatgcacaacctagagcttgtgcacatgacccacgcccttgataaattacccagtgaaatatcaggtggtatgaaacagcgagtgggcattgcacgagcgttggcaatggagccaaaagtgctgctaatggatgaaccgttcggtgcgctagacgccctaactcgcgctcatcttcaagactcgctaatggaaattcatgctgatttgggtaacacggttatcatgattactcatgatgtggatgaagcggtattgctatcagaccgtattgttatgata

SEQ ID NO: 268787 - DNA, 625 bp, Unknown
  Bacterial polypeptide expressing nucleotide sequence isolated from the Sargasso Sea
atgaccgatgcagtaataaagtgtgaatctgtatataaaatttttggagcaaatgccaaaaagatgctccaagaagcaaatggaaatgtagacgcaaaaacattccagaaaatgggatgtattgtaggtgtgaacaatgcttcttttgaagtttcaaaaggagaaatgttagttgtaatgggattatctggttcaggaaaatctacattattaagatgtatctctagattaacagacgctacagatggaaaaatttatattgaaggtcaagatttactctcattaaaaaataaagaactaattgaacttagaagaaataaaatgggaatggtctttcaaagttttgctttgcttccgcataaaacagttttagaaaatattgcttttccacttcaaattaaaggaatcaaaactgaagatagcataaataaagctgtagatatggttaaactcgttggtcttgaaggaagagagaattattttccaagagaactttctggtggacaacaacaaagagtaggtattgcccgttcattagctgttgaacctgatatttggtttctagatgaacctttttctgcactagatccattgattagaaaagaaatgcaggacgaattttaag

SEQ ID NO: 268788 - DNA, 743 bp, Unknown
  Bacterial polypeptide expressing nucleotide sequence isolated from the Sargasso Sea
gatgggtttggatccggagcagccgctcagagcgctgtcagggggttggcgccggcgggcggccctggcccgctcgcttgcccctcgccctgacctgctgctgctggatgagccgaccaaccatctggattttgaggcgataagctggttggagagccgtctcgcggccttttccggggcggtgttgtttatcacacacgatcgggcatttctccagcgcctcgccacccggatcgttgaaattgatcgcggcaaactgcgtagttggccaggcgattatgctgactttctgcgccgccgggccgaggcaattgccgcagaacgccaagcgaattcggagttcgaccgcaagttggccgaagaagagatctggatccgacagggaatcaaagcgcggcgcacaagaaacgagggaagggttcgcgcgcttgaggcgatgcgtgaagtacgcgcacaacgggtgaatcctgatgccagggccagggtgcacatagaggaggccgatcagtcgggtcgcaaggtgctggacgcgaggagtctccgctttgggtatggcgattcgatgttgattcaggacttctctttgcggattcggcgtggtgaccggataggtctcgtcggaaacaacggtgtcggaaaaagtaccttactgagactgctcttgggagaaatcgagccaaaggcaggttcgatcaagtggggtgtgaacatccagcttggctatttcgaccagcaccgccggg

SEQ ID NO: 268789 - DNA, 385 bp, Unknown
  Bacterial polypeptide expressing nucleotide sequence isolated from the Sargasso Sea
aatgttgtacttcctctttattatcaaggaattaaaagaaaagaaagagaaaaaattgcacttgaatatctagataatgtaggtttgaaaaattgggcatcccacttacccagtgagttatcaggtggtcaaaagcaaagagtagcaattgctagagcaatggtttcaaaacctaaagtcttattggctgatgaacctacgggtgcattagactccaaaacatctagtgaagtaatgtctttaatacaagaaatcaacaactctggcaaaacaattcttgttgtaactcacgagcaagatattgccaaaatgtgtaaaagaattgttagacttaaagatggagttattgtggaggacaaaaaaataaaccaaaaagttttataaa

SEQ ID NO: 268790 - DNA, 543 bp, Unknown
  Bacterial polypeptide expressing nucleotide sequence isolated from the Sargasso Sea
aatggaaagcgttattgaaattaaaaacttttccctatcatttaaacaccaccacggtcttgttccggccgtttcagatatcaatttaactctcaaaaagggacagacccttgggcttgttggtgagtctggttcaggaaagagtgtaacgtctcttgccattatgggactccttccctttccggaagcaaaagtcatttctggagaagtcctttatcaagggaaagaccttttaaaaataaatcaaagagagttttccaatataagaggcagtaaaattaccatggttttccaagaacccatgaccagccttaaccctgtctttaatattggaaatcaattgatggaacccttaaaactccatcaaggattaaagaaaaaagaagcctttaaaaaagccatttctctattagaggaagttggtcttccagacccagaaagaaaagttcaagatttccctcatcaactttcagggggtcaaagacaaagggtcatgattgccatggccctcgcttgtgaacctgactttatgatctgtgatga

SEQ ID NO: 268791 - DNA, 917 bp, Unknown
  Bacterial polypeptide expressing nucleotide sequence isolated from the Sargasso Sea
aactacgcttttaagattgatcgcagggttcgaatatccctctaaagggaggatttctttaaatgatagagaaatttcaagtaggaaaaaaattcttagtcctgagaaaagaaatattggtatggtttttcaagactatgcacttttccctcacttaactgtatttgaaaatgtaatttttggtttgaaaaacaaaaaagacagatctagagttgattatttattaaatgttgttggtcttgatagttttattggaaggtacccacatgaattgtctggaggccaaaaacaaagactagcaattgcgagagctcttgctccaggtacaaattttattttattagatgaacctttttgtagtcttgatatgcatgtcaaactaaaattgagaagtgaactccctaatattctaaaaggttgtaatgcaagcggattaatggttactcatgatcctgaagaagcgatgtcaatttgcgataaagtcgccgttatgaatgatgggaaaatacatcaaattgatacaccaattaaccttctaaataatcctaagaccatatttgttagtagttttattttgggcaataatattatcaatctcaaaaaaaatggaaattcatatatttcttgtttaggtgaaataaatagttcagagtacttgaaaaatacaggtatcaaaagtatgtcaatttcgcctaaatttatttcaattagaagatccgaatctggtgatgcgattgttatatcaaaagaatttcttggagaatatcttatatataaagtatctattaatggagacatattaaggattagaactgatattaataatctccttaataatggtgataaatgttcactttctattaataaaaatagtcatgtttttttatatcctggagcatataaggaatatatataga

SEQ ID NO: 268792 - DNA, 685 bp, Unknown
  Bacterial polypeptide expressing nucleotide sequence isolated from the Sargasso Sea
atgactaataaattaattactattcaaaatttatctaaagaatttataattaataaaaataaaacctgcatactacaagatattaattttaaagtttataaaggagatgttatttctatttctggtccctctggttcaggtaaatctacttttctaaatattttaggtttactagactctacctttactggatcttatgagtttttaaatcacaatgttaatagtttaaaatataatgaaaaaaataatatcagaaataaatctattggttttgtacatcaatttttttatttaattcctgaattaacagtattggaaaatgtatcattacctaatttaatacttaacaatagtatgaaaaaaactatcaatattgctagagaaatacttataaattgtggattggaaaatcaaatgtattcaaagcctatttatttatctggtggtgaacaacaaagggtagctattgcacgagctctaattaataatccagatttaataatagctgacgaaatgactggaaatttagatgaaaaaactgcagatactatatttgatttttttatggaaaaaatttcttcaaataaccaaactcttatatatgttactcataatttaaaatatgctcgtaaggctaataaagcctttgaaatatcaaataataaaattaatcatattttatgat

SEQ ID NO: 268793 - DNA, 619 bp, Unknown
  Bacterial polypeptide expressing nucleotide sequence isolated from the Sargasso Sea
atgtctgagccagtaatcaaatgtgaaaatgtatataaaatttttggagcaaatgctgaaaaaatgcttcaagactcaaatggtaatgttgatgcaaaaacctttcaagaaaatggatgtatagttggagttaacaacgcttcttttgaggtttcaaaaggagagatgttagttgttatgggtttatctggttcaggtaaatctactttattaagatgtatctcgagattgacagatgcaacaggtggaaagatttttattgaaggtcaggacttgttacaattaaataataaagatcttatagaccttagaagaaataaaatgggaatggtttttcaaagctttgctttacttccacataaaacagttgttgaaaatatagcttttcctcttcaaattaaaggagtcaaaacagaagaaagtattaacaaagcaatggatatggttaaactagttggtcttgatggtagagaaaactattttcctagggaactttcaggaggacaacaacaaagagtaggtattgcaagatctttagcagttgaacctgatatttggtttttagatgagcctttttcagctttggatccgttaattagaaaagagatgcaagatgagt

SEQ ID NO: 268794 - DNA, 826 bp, Unknown
  Bacterial polypeptide expressing nucleotide sequence isolated from the Sargasso Sea
acctacagaaaaaagaaaaattggttttttatttcaagattacgctttattcccacatttgacagtaaaagaaaatttgagatttccaactaatgctaaaaattcaactaataatgttgatgaaattattgaattaataaaattaccaaattcactagataaatacccacacgagttaagtggtggtgaacaacagagagttgctcttgcacgatctataatttcacaacctgatttactattattagatgagcctttttcaagtttggatttaagtcttcgagaagaggtgagagatgatacgctgcatcttttacaaaaatcaaatgtgtctgtaattatagtcactcatgatcctttcgaagcaatgtttatctcaaatcatataaatattttcgataaatcaggttcgattgtacagtcaggaactccgaatgatctctataacaatccaaaaaattcatatgttacaggtttttttggtgaaacaaataaatttgaaggtgtcgttaaagaatctcacattcacacaccggttgggaaaattaaaacacctggaaatttagaaggtgaaaaagttgtggtacacataagacctcaaggtataaaactcaacaaacaaccaacaccagttaatggaattaagggaaccgttatggcatcaaaattaatggggtcatttagttttatccatttatctgttttagataataataatgaagttgttcatgtacatagccacatgcctgctgactttaatccaaaacaatcttctgcagtcgagatagaaattgataatgaacaggcttacatatttaagaattag

SEQ ID NO: 268795 - DNA, 537 bp, Unknown
  Bacterial polypeptide expressing nucleotide sequence isolated from the Sargasso Sea
aatgaattttccactagaattaattagattatcaaaaacttatggtaataataatgaggctgtaaaaaatgtttctttcaaaataaaaaagaatgagataataggaattcttggtcctaatggttgtggaaaaacaacaacaattggaatgatcttgggactgttaaaaccatcaagtggtaaagttcttattaatggagttgaagttgaagttaaaagagttgatttattaaataatcttaattttatatctccttatattgaattaccaaaaaaattaactgtaaggcaaaatttagaagtatatggaagactttatgatgttaagaacctagaaacaaaaattaattatcttacagaaaaactaaggcttaaaaaaatcatagatagaattaccggggaactttcttctggtcaaaaaaatagggttagcctagcaaaatcaataatcaacgacccagtggtattacttcttgacgagccaacagcatcacttgatcctgaaactggcgattttgtaagaagttttttagaaaa

SEQ ID NO: 268796 - DNA, 860 bp, Unknown
  Bacterial polypeptide expressing nucleotide sequence isolated from the Sargasso Sea
attgtttgggtccttcagaggtctaggaaaaacctcaattttaaaagcaattgcaggtcttattaagcctagcaatggttctattacttttttaaaaaatgtattatcttcaaataacgtattaataccaacaggtgaaagaaaaataggattaatgtttcaagaagacgttttatttccgcattatactgtaaatgagaatattgagtttggaattcttaataaagataaaaataaaagaaaaaaaatagtatcaaaactattagatgtttttaaacttaatgatgtagcagagttatatcctgataaactttctggtggagaaaaacaaagagtagctctagctagaattttaataactaagccaaaagtattactaatggatgagcctttttcaagtttagattatcatttgggtaaagaaattagtgagtttactataaaactattaaaagataatcaaatatctgtgatttttgttactcatgatatcaaatctgctttcagagtaagtgataaaatgctaattataaaaaatggtaaaataatacagaatgatactccagaaaatatttataataaaccttccgataggtttattgcagaatttgttggagaaactaataaaatagaggctaaaatcaataaatttggcgagatattaacaccctttggaaaagttaattgtttggaatgtaaaaatagtaagcaagagtgcaatagcaaaaaacacttctttcttatcagacctgaggatgttagttttggtaaaaatggagtgaagtgcaaagttttagataaatttttccttggagatatatgggagtacaaagtttcaataaaaaaaacatttcctgttt

SEQ ID NO: 268797 - DNA, 828 bp, Unknown
  Bacterial polypeptide expressing nucleotide sequence isolated from the Sargasso Sea
aatccaaaagaatttttaaagattcataataacaaccctgatcaaaaaacaatccaaacagctgggtatattcaagcaataagaaatgcttctttagaagtttatgaaaatgagattcttgtaattatgggtttaagtggttcaggaaaatcaactttggtgagatgtatgtcaaggttagttgatcctacaattggagaaattttttttgaaaatattgacatgggaaaattatcaaaaaatgagttaatagaaataagaaggcataagatgggcatggtgtttcaacactttgctcttttccctcataggacggttatagaaaatattgcttttcctttagaggtacaaggtattaatagaaaagaaagagaaaagtctgctttagaaattattgatcttgtcggcttacagggaagagaaaattactttccaaaagaactttcaggtgggcaacaacaaagggtaggtattggtcgttcattggctgtaaaaccagagttatggtttttagatgaaccattttctgcattagatccattaataagaaaagaaatgcaaaatgaatttttaaaaattcaaagcactttaaaaaaaactattatttttataactcatgattttgatgaagcaattaagttagcagatagaattattataatgaatgaaggtagaatagttcaaattggaagtccagaagacttaattatgaagccagctgatgattatgtgaaggaatttactgaagacttaccaagagagaggctattatctgttaaaagtataatgaataataaaaaagaaccagttaactctacaaaagtatat

SEQ ID NO: 268798 - DNA, 767 bp, Unknown
  Bacterial polypeptide expressing nucleotide sequence isolated from the Sargasso Sea
tatggagttaatagtggctaaaatagatttatcaaatatttctcacacctataaccctaacgatgtaaatccaacgtatgcattaaatcctttttcaatgacttgggaaaatggaaaccgttacgcaattcttggcccatcaggatgtggaaaaacaacaatgctaaatattgtttctggtttagttagaccctctgatgggaaaattttatttgatgatgtagacgtaactgatttaaaaacagaaaggagaaacattgcacaggttttccagtttccagtcatttataatactatgacagtatatgataatttggcatttcccttaaaatgtagagatttttcaaaagaaaaaattaaagaaagagttcaatcagtttcagtaacattaaatctttcttcctttttaaacatacccgcaagaaaactcacagcagaccaaaaacaactcatatctcttggaagagggttagtaagagaggatgttgcagcggttttaatggatgaacctcttactgtaattgatccagatttaaaatttaagcttagaagaagtttaaaagagattaatgaacagtataaaactacattagtttatgttacccatgatcaaaacgaagctatgacttttgccgataacataattgtaatggatcagggggaaatagttcaagttggactaccaaaagaattatttgagaaaccaaaaactacttttgttggatattttattggatcgcccgctatgaacttatttaattctgagg

SEQ ID NO: 268799 - DNA, 802 bp, Unknown
  Bacterial polypeptide expressing nucleotide sequence isolated from the Sargasso Sea
tatgtctgaaacggtaatcaaatgtgagaatgtttataaaatctttggagcaaatgccaaaaaaatgttgaaagattcaaatggcaatgttgatgctaaaacttttcaagacaatggatgtattgtaggagtaaacaatgcttcatttgaagtttccaaaggcgagatgttggttgttatgggtttgtctggttcaggaaaatcgactttattaagatgtatttctagattaactgatgcaacgggtggaaaaatttttatagaaggccaagatttattacaattaaacaacaaagatctcattgatcttagaagaaataaaatgggaatggtttttcaaagctttgctttgttgccacataaaactgttgtggaaaatatagcgtttccacttcaaattaaaggggtgaaaactgaagaaagtataagtaaagcaatggacatggttaagttagttggacttgatggaagagaaaactattttccaagagaactttcaggaggacaacaacaaagagtaggaattgcaagatcgttagctgtcgaaccatatatttggtttttagatgaacccttttcagctttagatccattaattagaaaagaaatgcaagatgaatttttaagacttcaagaaaaattacaaaaaacaattatgtttattactcatgatttcgacgaagctttaaaactcgcagatcgtattgcaattatgagagatggtataattgaacagttagacacacccgctaatattgtattaaatccagccacagaatatgtaagacaatttactgaggaa

SEQ ID NO: 268800 - DNA, 825 bp, Unknown
  Bacterial polypeptide expressing nucleotide sequence isolated from the Sargasso Sea
gccctaggcacggcggtgattctctggtacggagcccggttggtggttaccggtgaggtgactggggcccagtttgtcggctttcttggcttatcactaaagttgtatgctccagtgaaaaacgtcgcaaagtttccggcggtagcgcagcctgggcttgtagctgctgagagagtcttcgagttcctggacaccaacgctaagatcacggacagcccagacgcgagggtcattaaaggttttgatcgcgagattgtctacgaccgagtctcgttttcctatcatcaagggacttcagtactgagggatctatcctttagagtcccgcgaggaactgtcctagcactcgtagggccgagcggggccggaaagagcaccgtagtcgatcttctgagccgcttctttgaagtatcaagtggctctatttcaatcgacggagtagatgtgcgggacgttcgggtatctgatctgcgttccctcatggcggtcgtggcgcaagaggcagtgctctttcacgacacggtagctcgcaacatcgcatacggccgaccgggggcgacagcagatgaggtcatggcggcatctcacgccgcgaatgcgcacgagtttatagtagggcttcctgatgggtacgacactgtagttggcgaacggggcatggaactttctggtggggagcgtcagaggatagcgatcgctcgtgccatccttcgcgatgctccgattctgatcttcgacgaggccacaagcgctctggataccgaatccgaacgcctcattcaggacgccttggcccgacttgtcgaaggccgtacggtactcgtt

SEQ ID NO: 268801 - DNA, 912 bp, Unknown
  Bacterial polypeptide expressing nucleotide sequence isolated from the Sargasso Sea
tcaatgccaaaaaaatgcttcaagaagcaaatggaaatgtagacgcgaaaactttccaagaaaatggatgtattgttggggtgaataacgcttcttttgaagttgcaaaaggagaaatgctggttgttatgggtttatctggttcaggaaaatctacattattaagatgcatttcaagattaacagatgcaactggtggaaaaatttatatagaaggtcaagatttgctttcattaaaagaaaaagaactcattgaacttagaagaaacaaaatgggaatggttttccaaagttttgctttacttccacataaaacagttttggaaaacattgcttttcctcttcaaatcaaaggaatagagactgagaaaagtattaataaagctatggacatggttaaacttgttggtcttgatggaagagaaaattattttccaagagaactttcaggtggacaacaacaaagagtaggtattgctcgatcattagctgtagaacctgatatttggtttttagacgaaccgttctctgcactggatccattgattagaaaggaaatgcaagacgaatttttaagacttcaagaaaaattaaaaaaaactatcatgtttatcactcatgattttgatgaagcattaaaacttgctgatcgtatagcaattatgaaagatggaataattgaacagttagataccccagcaaaaattgttttaaatccagcaactgaatatgtaaaaaaatttactgaagaagtaccaagagaaaaagttttaataatagaagatgtaatggatgcaccaacctcagataatttaagcaatctaaaagtttcaaaagacgagataatagaaaatgtagctgaaaaaattttatctcaagaaaaatcagtaggtgtaattgacaaaaaataat

SEQ ID NO: 268802 - DNA, 837 bp, Unknown
  Bacterial polypeptide expressing nucleotide sequence isolated from the Sargasso Sea
aatttataaactatcctcatttaaatgtttttgaaaacatagcctttcctttgaaacaaagaaaaatagatcaaagtgtaataaatgaaaaagtaatggatgctttaaagtctgtaggattgttaggttatgaaaatagaaagattcaagagctttctggagggcagcaacaaagagtttcgcttgcaagatctttagtcaaaaacgcaaaaatattattattagatgagcctctagtaaacttagactacaagttgagagagcaactaagagaagagtttaaaaacctattttctaaggggttagcagatgaaacaattttaatttattcaactacagatccaagagagactatggaattaaatggcgaagttatagttttagatgaaggcaaggtcttacaagttggtccagcaaaagaaatatttgaaaaccctaactctttaaaagttgcagaaatttctaatgacccgccaatgaatataatagaggctaaaatttcagataatcttattaaatttgaaggcattgatgtagaggctccacaacatttatctaaattaactgaagatggtttaaaaatcggattaagatcttctgatatagaattaaatgaaaatggacatgagtttgaagttgagcttgcagaaataagtggttcagaaacattgcttcacttaaaaagaggaaatacaaaaataatagtttcaatagaagaagttttaaactttaaaattcacgataaaatcaaaattaactttaaaattgataaagcttatgcatttcatgctgatggaaaattagcatcttcaccttttggaggtttgaatggctaaa

SEQ ID NO: 268803 - DNA, 630 bp, Unknown
  Bacterial polypeptide expressing nucleotide sequence isolated from the Sargasso Sea
tatgaacatcatagaagtaaaagacttaaagaaagcctatctgctaccaggagataaatcgaaaacattcaatgcagtcgatcatatctctcttggaatcaagaaaggagaggtttatggaatactcggtccaaatggagcaggcaagaccacaacactagagatgttagagggtcttaaagaaattgatgatggctttgcgatcatcgatggcattgatgtgagtaaagatccttatgcagttaagaaggtgattggtgtgcaacttcaaagtaatgagtattttgataaactggacctcagtgagcttcttaccttattttctaaactctattcaacaaccatcgatcactcgaagctactggatcaagtaaatttattggataaagcaaatgcaaaaacccaacacttgtcaggtggtcaaagacaaaggttttcaattgcctgcgcactggttaataaccccaaaatactctttctggatgagccaacaacaggcctcgatccccaagcaaaaaggaatttatggactttggtaaaggatctcaatgcttctggtatgacaatcgtgttgaccacacacaatatggaagaagcagagtatctgtgtgaccggattgcaatcatgga

SEQ ID NO: 268804 - DNA, 625 bp, Unknown
  Bacterial polypeptide expressing nucleotide sequence isolated from the Sargasso Sea
tcatatattaaaggggttgaattttcacgttatttccggctctacagtagcaattattggagcttcaggtacggggaagagtacatttctacatgcgcttgggactctggaaaatatcgaccagggtcagttgtttcttgacgggaaagatcttgcgggttttacacgcaatcaagcagcacaattccggaatgaatcaattggctttatcttccagttccatcaacttttaaatgatttcaacgctcttgaaaatgtaatgattcccaggttgatacatggaggagccactgaacttgtgaaaaaaaacgctattgatctgctggaaaaagttggcttggctgagcgtgcatttcacaaaccatcacagctttccgggggagaacagcagcgagttgctatagcacgagcattaataaacaagccccgtattgttctggctgatgaaccaaccggtaatcttgatgaagaaacaggtgtgcaggtaatggatattctgcttcgacttaataaggaacatcaaacaacttttataatgattactcacaacccctcacttgcacctaaaatgcagtttcagtatcgcatggaaaatgggcaactacatttgattgcgaaaaaataa

SEQ ID NO: 268805 - DNA, 826 bp, Unknown
  Bacterial polypeptide expressing nucleotide sequence isolated from the Sargasso Sea
ataaagatagctatatttgctgcagcagcttttagattaatgccctcaattaatagaatagtctattgttatcagggtatagttttttccgaagcaacactaaataaaataattgattttaatactctaaataaaaacttaaaacaaaatataaaaaattttaatcaaaactttgaagaattagaattaaaaaaaatcaattttaaatataaagataaagaaatatttaaggatttaagtattaaaataaaaaaaggagaattcattggtgtttatggagaaagtggttcaggaaagactacttttgtaaatataatatcgggcttactagaaccagaaaatggagagtattgtttgaattcaaaaaatataaaagttagtaatgagaattggaaaaatatttttgggtatgttccacaatttgtaaatttaattgacgatactttaattcaaaatattacaatgtgtgatcctaaagaaataaactacaatttattcaatgatatttgtaataagatgaaaatacaggaactaattgataaatatggtaaagaaaaaattggagaaagaggtataaaaatatccggcggccagtttcaaagaataaatttagccagagccctatatcataaaccatctgttttaattatggatgaagcaacaagtgctttagataatgaaactgagagaaaaattttagatacagttttagaactcaattctaaagaaaatttaacagtaattttaatatctcacaaacttgagaatttaaaaagttgtaataggaagtttttgttagataataaaaatttaattgagcagtaaa

SEQ ID NO: 268806 - DNA, 319 bp, Unknown
  Bacterial polypeptide expressing nucleotide sequence isolated from the Sargasso Sea
agagtaagtttagctaaagcgttaattaatgagccttctgtattattattagatgaacctacggcgtctctagatcctgagactggagattttgtaagaaaatttattgaaaatatttctaaagaaaaaaaaatgtcaattttgttagcttctcataatatggatgaagtaaaacgtttgtgtaaaaatgttttaatgatgaacaatggagtaataattgataaagggacgccaaatgatctcatttcaaaacatggtaaaaaaaacctagaagaagtatttttgaaactaaatagaaaagaaaatgagctacaataga

SEQ ID NO: 268807 - DNA, 522 bp, Unknown
  Bacterial polypeptide expressing nucleotide sequence isolated from the Sargasso Sea
gatgagctggcggcgccgcccaagtcctgccccggatgcattcgcgcaattggacgcggcgcccgaactggtgctgcacgatctgcgagtggcggtcgatgggcgtgtgctggttgagcgcttatcgatgacggccaccgccggacagctctggtgcgtggtcggcccgaatggcgcgggcaagtcgacatggttgtcggtgctggcgggcttgcgttcgccggacggcggcagcgtcgcgcttgacggtgtgccgcttaccgattggccgccgctcgcgatggcccgccgtcgcgcgtttctgccgcaggccttgcacgacacctttcccatcaccgtgtacgacgcggtgatgaccggccgccacccgcatctcgcgcgctgggaatgggagggagatgccgatgcgcgcgctgtggatgcagcggtgtcggcgctgcagctacagtcgctggcagaacgcgatgtgcgcacgctttctggcggtgagcgtcagcgcgtggcgatggctgccgtggtggc

SEQ ID NO: 268808 - DNA, 826 bp, Unknown
  Bacterial polypeptide expressing nucleotide sequence isolated from the Sargasso Sea
cttaaagggctgacgaaaaactttgctggaatggaaaaaccggccgtcgccccgctcgactgtatagtgcatgcgggctacgtgaccgggcttgtcgggccggacggcgcgggcaaaaccacgctgatgcgcatgctggcgggattattaaaacctgatgccggaagtgctgcggtaattggttttgaccccatcaaagacgacagcgcgctgcacgcggtgctgggctatatgccgcagaaatttggtctgtatgaagatttgaccgtcatggagaacctcaatctctatgccgatttgcgcagcgtcaccggtgaggcgcgagaaaaaacctttgcccgactactggagtttacttcgctgggcccatttaccggacgactggccggcaaactttccggcggcatgaagcagaagctcgggctagcctgtacgctggtcggcgaacccaaagtgttgctgctggatgagccaggtgtgggtgtcgacccaatttcccgtcgcgaactgtggcaaatggtccacgaactggccggagacggcatgctgatcctctggagtacgtcgtatctggatgaagcagagcaatgccgtgatgtgctgctgatgaacgaaggcgaattgttataccagggcgatcctactcagcttacgcaaaccatggctggtcgcagcttcctgatgagcagtccgcaggaaaataaccgccgactgctgcaacgcgcgttaaaactaccgctggtcagcgacggaatgattcaggggaaatccgtccgtttaatcctgaaaaaagaggcgacagctcagcagatccaaaacgctgacg

SEQ ID NO: 268809 - DNA, 313 bp, Unknown
  Bacterial polypeptide expressing nucleotide sequence isolated from the Sargasso Sea
acaacaacgagttgcaatagcaagagcgttagctatgaggccaaaagtaatgcttttagacgagataacatctgccttggaccccgaagtggttggtgaggttttaaatgtaattagatcactaaacaaagagcataacctaaccatgattatggtaactcatcaaatgggatttgctcgtgaaatatcagatagagtttgtttttttaatgatgggaaaatttttgaacaaggtcccccagaaaagctatttggagacccaaaaaatgagagaacaaaacaatttttacatgctgttctcgatgcaaattag

SEQ ID NO: 268810 - DNA, 110 bp, Unknown
  Bacterial polypeptide expressing nucleotide sequence isolated from the Sargasso Sea
tttctttattctttcctaccttatggtattcaaaaaagaatagaattagctagagcattagccatgaaaccaaaagttctgcttctagacgaacctgcagcaggttcgtc

SEQ ID NO: 268811 - DNA, 652 bp, Unknown
  Bacterial polypeptide expressing nucleotide sequence isolated from the Sargasso Sea
atgagtgatagtataaaaatttcttgcaaaaatatttggaagctctatggcgatcatccagaaaaatttctaaaagattataataataatccatctacagaagatattaaaaaaaataaatttattcctgcagttagagatgcaaacatagatgttattactggtgaaattttagttattatgggattgagtggttcaggcaaatcaacattgttaagatgtatgtccaaacttatagaaccaacaattggtcaagttttttttgagggaaaagatttattaaaaacatctgaaaaagagttaatagaaataagaagacacaaaatgggtatggtattccaacactttgcattacttcctcatagaaatgttcttcaaaatgtggcatttccattagaggttcaaggacaagacataaataagcgtgaagaaagagctaaagaggtagtaaaattagttggtttagagggaagagaaaagtattatccaagagaattatcgggaggtcaacaacaaagagtaggtctagcgaggtctttagcagtagaacctgatgtttggtttctagacgaacctttttctgctctagatccattaattcgtaaagagatgcaaaatgaatttttaagactacaaagtatcttaaaaaaac

SEQ ID NO: 268812 - DNA, 316 bp, Unknown
  Bacterial polypeptide expressing nucleotide sequence isolated from the Sargasso Sea
cttctcgggggggcagatacagaggatagcaattgcaagagcaatactagggaacccatcaattcttcttttagacgaggccacgagtgcgttagatgcagaatcagaatctgaagtacaaaaaggacttaatagagctatgaaagatagaacagttattgtaattgctcatagattagccactactcaagaggcaaataaaatagttgttttcgataaaggtgaaattattgaagttgggaaacatattgatttaataagtaaacctgggatttataaagaattatgtgaaaaacaattgattaaaaaattatga

SEQ ID NO: 268813 - DNA, 349 bp, Unknown
  Bacterial polypeptide expressing nucleotide sequence isolated from the Sargasso Sea
ggagttggcaggaagcagggacgaagatagggctcgaaatctactagcccttgtaggactagaagacgaggtcgatcgatttccagcagagatcagtgggggtcagcagcagagagtagccattgctagaagcctggcaaagaggccacggcttcttcttggggacgagttgacggggaatctagactcatggacatcatctgttgtaatggaagtcctagtcaaggcgtgcgactcggagggaatcacatgtgtattcgtcactcacgacgagtctctggttcaatatgctactagggtaattaggatcgacagtggcaaaatcatctccgatgacatagtaggatag

SEQ ID NO: 268814 - DNA, 370 bp, Unknown
  Bacterial polypeptide expressing nucleotide sequence isolated from the Sargasso Sea
ctgaaagataaaatgggaaaaatcatagagttaaaaaaagtaaacaaatggtttgataaatttcaagttctaaaagatattgatttagatgttgcgcctcaagaaaaaatagtaatctgcggaccatcaggttcaggaaaatctactttgattagatgcatcaacagactagaggagcatcaagaaggaaatattgttgttgatggaacagaattgtcagaaagcacgaagaatattgaaaagattagagctgaagttggaatggtatttcaacagtttaatttatttcctcatttgtcaattttagataattgcacgttggcacctatatgggtaaaaaaactacccaaaaaagatgctgaagaaatag

SEQ ID NO: 268815 - DNA, 665 bp, Unknown
  Bacterial polypeptide expressing nucleotide sequence isolated from the Sargasso Sea
gcaacggcaacgcgttgcgctggctcgagctatggcgccatcaccaagggtcctgctgttcgatgagccatacgcaaatctagatgcgcccctcagaagggccctgcgtgaggatgccagacgcatcattcgggatacaggcactgtgggactgttcgtcactcacgacccggctgaggtattaatgatggctgacaatgtcgcggtgcttgaccaaggtgcaattatggagagcggcacaccgcaggcactgtacgacaggccacagtcgagattcgccgcggagttattcggcgagcctcaagtattcggaggaacaatttatgaggatcgaatcgtgacgccgctgggggactgggagcgccgggcattggttgatcaagctacgagcaatggtgatgcgtcgctggtagtggatgctgaccgtctagagctgcagcctgacgataacgggatgcaggtcactgatattcagagcttcggaaggttgactcgcgtttcgtttgatgggacggaaggcgaattgacagtgattctgaactggccaaaaaatgcgggtaccgcgataggagtgggttcgagagtgcgggtggtgccaaagtctggtgctgtttttgcatctccctgcaatgttgaattcaataatgattctcattatcattaga

SEQ ID NO: 268816 - DNA, 532 bp, Unknown
  Bacterial polypeptide expressing nucleotide sequence isolated from the Sargasso Sea
aaatcaacattattaagtattatcggaaccttagacaatgctgatagtggagaacttttaattaatggaattagtattcaggaaaacaccaatattgataagctaagaaataagagtataggttttgtattccaatttcataatctaatttcagaactaacattagaagaaaatgtcagtcttccaaaaatgatagccaaagaacaatgggataaagatgagttaattgacctttttgagtacttcgatctaagagatagaatgaattcattcccaaatgatttgtcaggtggtgaaaagcaaagggtggcagtgatgcgagctgttattaataatccatcaattattattgcagatgaaccaacaggaaatcttgataaggaaaatgctttaaaaatgatgtctctttttgaaaaattgaatactgaaaaaaaactcacaataattatcgcaacgcatgatgaggatgtttttaatatcggtcacaaaaaatatcaattagttgacggttgccttgatttagttcattagt

SEQ ID NO: 268817 - DNA, 829 bp, Unknown
  Bacterial polypeptide expressing nucleotide sequence isolated from the Sargasso Sea
gccaaaagcgcgtcaggcaaaatcaaaggcgcggatcaacgcttatgaaaaaatgctggctgatgagaatgatcgccagattgataccaccaaaatccatattccggccggtccgcgtctgggcgatgtggtgatcaatgccaacgggctgggcaagggatttggtgagcgtttgctgattgaagatctgtcattccggctgccaccgggcggcattgttggcgttatcggaccaaacggcgccggcaagacaacgctgttccggatgattaccggcggcgaggcacctgatgccggtgccttcaccgttggtgacacggtaaagcttggctatgtcgatcagtcacgtgacgatctggaaaatgacaagaccgtctgggaagtgatttccgatgggcttgatgaaattgaacttggcaagcgtacgatgccttcacgcgcgtatgtcgggcagttcaacttcaagggcggcgaccagcaaaagcgtgttggtcagctatcaggtggtgaacgaaaccgtgtgcatctggcccgaatgttaaaaagcggggccaatctgctactgcttgacgaaccgacaaatgatctggatgtcgacacgctgcgtgcattggaagaagcgctggaagaatttgccggctgcgcggttgtggtcagccacgatcgctggttccttgaccggattgcaacgcatatcctcgcctttgaaggtgacagccatgttgaatggtttgagggcaattacgaggcatatgaggctgatcgcaagcgccgccttggtgccgaggctgaccgcccgacccgcatcaaatacaagccgatcagccgg

SEQ ID NO: 268818 - DNA, 388 bp, Unknown
  Bacterial polypeptide expressing nucleotide sequence isolated from the Sargasso Sea
gcacgtgcaattgcggctgggccggatttgatcatagcggatgagccaacttctgcactagacgtttctatccaggcacagatactggaccttttggcggacctaaaacaggaaaaaggacttacaatgctatttatttctcatgacctcgccgtcgttcgccaggttgcggatcgcgtagctgttatgcggcaaggtcgtatcttggaactcggaccagtagatgacgtctggagtgcaccgcgccatccttacaccaaggcgctgatagaggcagcgccagtcccagaccctcttagaaaacgtgggctccgtacgccaatgcctggtaggtttgcgacaggtaaactgacagaggccgcgccgggtcattgggtagctttatgac

SEQ ID NO: 268819 - DNA, 519 bp, Unknown
  Bacterial polypeptide expressing nucleotide sequence isolated from the Sargasso Sea
aacttggagtgacaaccattatggttactcacgatcaagaagaagctcaaacgatggcagatagaatatttgttatgaatgaaggtgagattattcaatctggaactcctagtgaaatttatacgaaggccaactctccttttattgcttcttttattgggagtatgaattttatacctgcaaccattaatagttctaaaaaagtgaagtgtaataatattgaaataaattgtgatctaggctcttttaaagaaaatgattcagttcaattagctgttaggccagaggaaatttattttaagcaagaaaatcaagatgataatatcattacagcttcagtaaaagaaatagaatttttaggctcttttcaacgagtttattttgaggcaaagagttttacaaataatttaatcattgtagatgttccaagtgcaaatgctcgaaaaattaaattagttattaatgaagaaatgaatttatatttttctaaacaagatgcacgcatttattcaatttaaa

SEQ ID NO: 268820 - DNA, 757 bp, Unknown
  Bacterial polypeptide expressing nucleotide sequence isolated from the Sargasso Sea
atgtctaaaataactttagaaaacctaagtcatagttatcttgataaacaaaattctgactcggactgggcccttagaaatatagatcttgattggaaagacggcggtgcttacgcattgctcggtccatcaggctgtggaaagactacattattaaatataatttctggtcttctaaacccaaccaaaggtaaaattttatttgatggtaaagatataacttctttatcccctgttgaaagaaacatcgcacaaatatttcaattccctgtaatttacgacactatgacagtttatgataacctagcttttccattaaaaaataggggaatgtcagatggagaaattgactcaagagtaaaagaaatagctgaaatgttggagctcactagcactcttaacaatagagcttcaggcttaaccgcggatggaaaacaaaaaatttcgttaggaagaggcttagtaagagcaaatgtaaatgtaattatgtttgatgaaccgttaacagttattgatccgcatttaaaatggatacttcgttcaaaactcaaggaacttcatcaaaaaattaatagaacaatgatttatgtaacacacgatcaaaccgaagctcttacgtttgctgatcaagttgtcgtaatgcacgaaggtcaggttgttcaaacaggtactcctgtcgaattgtttgaaaagccaaagcatacttttgttggacattttataggttcacccaggcatgaatattattccgtgtaaa

SEQ ID NO: 268821 - DNA, 514 bp, Unknown
  Bacterial polypeptide expressing nucleotide sequence isolated from the Sargasso Sea
atgaaaaatagattccttaaattagaaaatatttattatcaagtaggctcaaaaaaaatattagaaaatatttcttttattttaaaaaaaggagaaatattgagtattattgggccttctggatcaggaaaatctactattttgaaagtcattgcaggattaatcaaaccaacggtaggtaaagtagttttatcaaatgaaatactaacctctaataatattttgataccaacagggaaaaggaatattggtctaatgtttcaagaagatgttttattccctcattacaacgtttataaaaatatagaatttggaattcaagatattccaaagcatactagacaaaaattaatgataaaactactaaatgaatttaaattaacaaatttagcaaaactatatccagaaaaattatctggtggtgaaaaacagagagtagcacttgcaagaattttaattaccaagccaaaaattttattaatggatgaaccattctcgagccttgatacaattg

SEQ ID NO: 268822 - DNA, 271 bp, Unknown
  Bacterial polypeptide expressing nucleotide sequence isolated from the Sargasso Sea
tgcaatcgtatcaaaaccgtcgttacttattttagatgaagcaacaagtgcacttgattcacagtcagaagcaattatacagtcatccattcaagccttaaaaggatcatttactattattgtcattgcgcatcgattatccaccattcaaatggcagattctattgttgttttaaataatggaactattgttgaaacaggaacacaccttgaattgttaaaaaataaatccgcttatcatcaaatggctgttaaacaaaacctgcattaa

SEQ ID NO: 268823 - DNA, 493 bp, Unknown
  Bacterial polypeptide expressing nucleotide sequence isolated from the Sargasso Sea
gcactagtacaacaacaaccctttttgttttcaggaaaaattattgatgttataagaatgggcagaaactttacgaaagaagaagttatagaatccgcgagaatagcaaacgctcacaactttattcaaaaacttcctgagaaatatgaaactatgataactgaaagagggtcaaatttctcaggggggcagatccaaaggatagcaattgcaagagcaatacttggaaacccgtcaattcttcttttagatgaagccacaagtgcgttagatgcagaatcagaatctgaggtccaagaaggacttaatagagctatgaaagatagaacagttattgtaattgctcatagattagcgaccactcaagaagcgaataaaatagttgttttcgataagggtgaaattcttgaagttgggaaacatattgatctaatcaaaaaacctggaatttataaagaattatgtgaaaaacaattgattaaaaaattatgac

SEQ ID NO: 268824 - DNA, 929 bp, Unknown
  Bacterial polypeptide expressing nucleotide sequence isolated from the Sargasso Sea
aatagggtcagaaagtattctcaataatatttcatttatacttggtcagggccgtattctggccataactggcgagagtggttctggaaaatctatgacagcactttcaataatccaacttcaacccaaatacgcaaaattaaagggaaaaatatttttcaaagatcaagatatcactaaaaaagacgagtttgagttatgtaaaatccgtggagctaaaataggaatgatatttcaagaacctatgacagctttgaatccagtaaaaactgtaggagatcaaatcagcgagacgatcgtattacacagtgaaaaaaataaaaaatctgctgatacggaaactctcaatattttagaaagagtaggcctaagcccagcaactgaagtaataaaacgctacccacacgaattatcgggagggcaacgtcaaagggttgttatagggattgcaattgcattgaaaccttcgattgtaattgctgacgagccaactacagctttagacgtaacaactcaggcccagattctagctctacttaaaagattagttaaagaagacaatatctctttaattttgataacgcatgaccttgcggttgtctccgacatggcagatgagattgcgattatgcaaaacggtatcattgttgaaattgatgaaacacaaaatttatttcgaaatatgaaacatccctatacccgttcactttttgcagcatcaggacattcagttgatttaccctcagcaaagagaagtgccgaccttcttttgacaatccaaaacgtcacttgcagatacaggttagcgcgcactaaaattttttcgaaaagtgattattttacggctgtttccaatgtttcttttgacataaaaaatggtgaaagagttgggactggttggagagtctggttgcggcaaatcaacccta

SEQ ID NO: 268825 - DNA, 619 bp, Unknown
  Bacterial polypeptide expressing nucleotide sequence isolated from the Sargasso Sea
catcaacggccagctaaggcccgatgccggacgggtgcgcgtgttgggcgcggacgtgacagggaatgcgccgcaccgaatatggcgctatggggttgggcgcacattccagatcacggctaacttcgctagcatgacggttcgcgagaatgtgcaactggcgctggcatccgccaacggcgcggcgacggggctgggacgcaggctcgagcggcgctattgcggtcaggcggagatgctagtcgcgatggttggactggaggcgcgcgctaatgacgccaccgttaaacttccctatggcgaccttaagcggctcgagcttgccgtcgccatggccaacaccccgtcgctgttgctgatggatgaaccgacggcgggcatggcgaacgatgcgcgtgtcggaatgatggaactggtggacgcgatggttgctgagcgcggcgtctcggtgctgttcaccgagcacgacatggacgtggtatttgggcatgcggatcgggtgatcgttctcgacgggggccgggtgatcgccgcgggcagtcccgaagcgatacgcgccgatgcgagtgtgcgtgcggtttatctcggcacgttcgaggggacgggagataagccatga

SEQ ID NO: 268826 - DNA, 827 bp, Unknown
  Bacterial polypeptide expressing nucleotide sequence isolated from the Sargasso Sea
acaagaagctttagaaaaatataattcagtaattggtgtttccgatgtttcattcgatgttaataaaggtgaaatcttttgtgttatgggattatctggaagtgggaaatcaacacttgttaggcatattaatagattattagagccaacatctggaaaaattttaataaacaaccaggatgtaatgcaatttaataaagaaaatttacaagaacttagaaataaaaaaattggtatggtttttcaaaattttgcattgatgccccacagatctgttttagataatattgcaatgcctttagaaataagaggagtaagtaaaaacgataggttagatgcagcaaataacatcctaaatattgttgaattacaaggatggggtaataaatacgcacatgaattatctggaggaatgcaacaaagagtagggttggccagagcattagctgctgatcctgaatttttactcatggatgaacctttcagtgcacttgatccgcttataagacgccaacttcaaacagagtttattaaactttcaaaacaaatgaaaaagacaactgtatttataactcatgatcttgatgaagctgtaagagttggacatagaatagcaataatgcgagatggaagagtagttcaaatcggaacccctgaagaaatagttgtaaatccatctgatgattatgttgcagattttgtaaaaggaatttcaagattaaaagttgttcaggctaaaactattatgcaacctttagagcaatataaaaaaaactttggggaaaatttaagtaataatgaaaaagtaaatgaaaacgacatataag

SEQ ID NO: 268827 - DNA, 233 bp, Unknown
  Bacterial polypeptide expressing nucleotide sequence isolated from the Sargasso Sea
gggagaacaacaaagggttgccattgccagagcatttgcatgcgaagcgaaggttttgttttgcgatgagccaaccggaaacctagattctacgaacagtaaaatgatctcagatttactttttgatgtttttaacgaatcaagcactgcacttatcattgtgactcacgacgaagacttggccgatcgatgtgatcaaaaaattagactcattgatggaaaaattcaatgaa

SEQ ID NO: 268828 - DNA, 841 bp, Unknown
  Bacterial polypeptide expressing nucleotide sequence isolated from the Sargasso Sea
cgcgccaatcccaagggccgtcaggcaaaaagcaaggcgcgtatcgcgcgctttaacgatctcgtcgatcaggagtttcagtcacgaagcgaaaccaacgagatctacattccgccgggtccgcgtctgggcgacaaggtgatcgaaattaaaaacctgcgcaaagcttttggcgacaaactgctgattgatgatctatctttttctttgccgccaggcggcatcgtcggcatcatcggacccaacggcgcgggcaagaccacgctctttaaaatgctgactggtgtcgaagcgcctgacagcggcgagatcaatcggggcgatacggtggacatcgcctatgtcgaccaaagccgggatacgctggatgacagcaaaaccgtttgggaagaaattgccgacgggcttgatatgcttgaagtcggcaagtaccagacgtcgtcgcgcgcatatgtcggacgctttaacttcaaagggccggatcagcaaaaacatatcggatcgctgtcgggtggagaacgcaaccgtgtgcatctggcaaaggtcttgcgccagggcggcaacgtgctgctgctcgacgaaccgaccaacgatctggatgtggaaacgctgcgcgcacttgaagttgcgctgacggattttccgggctgcgccgtcgtcatctcacacgaccgctggttcctcgaccgcattgcgacgcatatcctcgcctttgagggtgacagtcaggtgacgtggttttctggtaacttcgctgaatacgaagccgaccgcaaacgccggctgggcgacgatgctgatcagccacaccgcatcaaatacaagcctattcagcgctgaa

SEQ ID NO: 268829 - DNA, 529 bp, Unknown
  Bacterial polypeptide expressing nucleotide sequence isolated from the Sargasso Sea
atgaatagagatgaaattttatctcgtataaatttcgcttcaccatacatagagttgccaaaaaaattaactgtaagacagaatttagaaatttatggaagactttatggtatcaaaaatttaaaagaacgtatagatgaggtgtcagaagatttaaatataaaagatttttttaaaagaaaaactggagaattatcttccggacaaaaaaatagagtttctttagctaagtcattaattaataagccagaaattttacttctagatgaaccaactgcaagcttagatcctgatattggtgattttattagaggttatattcaaaaatacaaatctaagaatcaggtcactatattattagcttctcacaatatgagtgaagttgaaagattgtgtgacagcataataatgatgaaaaatgggaaaattattgatcgaggaacatgcaaagaaataatagaaaaacatggaagaagtaacctagaggaaacttttcttaaacttgctaggagtgaaaatgaattttaat

SEQ ID NO: 268830 - DNA, 571 bp, Unknown
  Bacterial polypeptide expressing nucleotide sequence isolated from the Sargasso Sea
atgagtaaagatcttctcgagattactggaatgcataagagcttcggtggattaaaggtgatagatgatgtttctttcaatgttagatcaggaagtcgtacagcccttatagggccaaatggtgctggaaaaacgactatttttaatttactgacaggcgtctatccaatcgattccggaattatcaaaattgatggagaagatataactaatgtcccacccgaagatcgtgtaactgttggaatgtcgcgtagtttccagaatatacggctaatgcctcacttgagcacggtggaaaatgtcatgttagggcagcacgcgcgcgcgcgtagtcttggtaatttgctgtttcctcttggaatgtttccccaaaataaatggagaaaattggctgaagaagccctggagaatgccgggattggaacctatcccggagaggtggttgccaatcttccatacggtattcagaaacgtatagaggttgttagggcgatggtctcggacccaaagctgttacttctggatgaacccgctgctggtctcaatatatcagaaaccgggaagttacagt

SEQ ID NO: 268831 - DNA, 169 bp, Unknown
  Bacterial polypeptide expressing nucleotide sequence isolated from the Sargasso Sea
ttgaggggtggaatccttcttactcttgaagatttatcggttgcttttggcagtaacaaagctctcagtaaaataaatttgaaagtttctaaaggagagatgctttttgtgacgggcgtgtctggagcgggaaaaacaaccctattaaggtgtatcgcagggaagtaga

SEQ ID NO: 268832 - DNA, 651 bp, Unknown
  Bacterial polypeptide expressing nucleotide sequence isolated from the Sargasso Sea
catgtctaaaataactcttaaagatcttagtcatagctatctttatagtcagtctaaaaaagaagattgggctttgcgagatgtaaatattgattggaaagacggtggtgcctatgcattactgggaccatctggatgtggaaagacaacgcttttaaatattgtttcaggtttaattacacccactaaaggacaaattttgtttaatgatgatgatgttacactaaataatccggtcgaaagaaatatagctcaaatttttcaatttccagtaatttacgacacaatgagcgtatatgataatttagcttttccactaaaaaaccgaggtatttctaaagaggaaattgattcaaaagttctagaaattgctgaaatgttagaattaaaatcaactttgtacaacagagcttcgggattaacggctgatggaaaacaaaaaatttctcttggtagaggacttgtaagatcagatgtaaacgtaataatgtttgatgagcccttaacagtgattgacccacatttgaaatgggttctaagatctaaattaaaagaactacatcaaaaaataaataggacaatgatttatgttacacatgaccaaactgaagccttaacttttgcagatcaggttgttgtaatgcacgaagg

SEQ ID NO: 268833 - DNA, 523 bp, Unknown
  Bacterial polypeptide expressing nucleotide sequence isolated from the Sargasso Sea
aatgactgatgccgtaattaaatgtgagtctgtatataaaatatttggagcaaatgctaaaaaaatgctccaagaagccaatggaaatgtagatgcaaaaacatttcaagaaaaaggatgtattgtaggagtcaacaacgcatcttttgaagttttaaaaggagaaatgttagtagtaatgggattatctggctcaggaaaatctacattgttaagatgtatttctagattaacagacgcaacggatggaaaaatctacatagaaggtcaagatttactctccttaaataataaagaattaattgaacttagaagaaataaaatgggaatggtttttcaaagttttgctttacttccacataaaacagttttggaaaacattgctttcccacttcaaatcaaaggagttgaaattgaagatagtgtcaataaagctatggacatggttaaactcgttggtcttgatggaagagaaaattattttccacgagaactttccggagggcaacaacaaagggttggt

SEQ ID NO: 268834 - DNA, 841 bp, Unknown
  Bacterial polypeptide expressing nucleotide sequence isolated from the Sargasso Sea
tacttccagagatgctttagatgcaatccaaaatcaaggaatttcaaaaacaaaagctttagaagaatacaattctgttattggtgtttcagacgtttcttttgacgttaaaaaaggtgaaatattttgtgtaatgggactttcaggaagcggaaaatcaacattggtaagacatattaatagacttttagaacctacttcgggaaagattttgattaacggcaaagacgtaatggaacttaatcgagagcatttacaagaattaagaaataaaaaaataggtatggtttttcaaaactttgctctaatgcctcatagatctgttgttgacaatatagcaatgccattagaaataagaggtataagtaaaaatgatagattggatgttgcaaataaaattttagaaattgttgaattgcaaggttggggcaataaatttgctcatgaattatctggaggtatgcagcaacgagtagggcttgcaagagcactagcagcagatcctgaatttcttttaatggatgaaccatttagtgcattagaccctctcattagaagacaactgcaatctgaatttattaaactttcaaaaaaaatgaaaaagactactgtctttattactcatgatttagatgaagcggtaagagtaggtcatagaattgcgattatgagagatggtaaagtaattcaaattggaactccagaacaaattgtaattagtcctgcagacgaatatgtagctgattttgtaaaaggaatatctagacttaaagttgttcaagcaaaatcaatcatgcaaaaaagtgaggagtatgaaagtagaaatagtaaattacctgac

SEQ ID NO: 268835 - DNA, 635 bp, Unknown
  Bacterial polypeptide expressing nucleotide sequence isolated from the Sargasso Sea
agtgaggcaaccaaaagttctattattagatgaacctttaggtgctttagataaaaaattaagagatgaaatgcaattagaattaagaactctacaaaaaaatattggaattacttttgtattcgtcactcatgatcaacaagaagctataagcatgtcagacagagttgcagttatgagcgatggaaaaattcaacaactatcagcacctaatgaactttataaaaatccaaaaaatatatttgtaagtgattttattggtgaaacgaattttcttaaagctgaaactaaatcgagtgatggagaattcatcaatgtttcaatagaggaattgggagaatttaaaattaaaaataatttaaatatcacagcaaattcttctgaagttgtttgcagtgttcgcccagaatctatgatgatttcaaaagtgaaatctgactgggatatttgtcttgatgctaatattattcagacttcatatctgggagagatgactagattttatgttgaagtgaaaggaattaataagactatcactgtttcttcacaacattttgacaatcaatcttttgaaaataatgagtgctttataagtattagcttagaagatatttctttattgaataaaaaatagc

SEQ ID NO: 268836 - DNA, 800 bp, Unknown
  Bacterial polypeptide expressing nucleotide sequence isolated from the Sargasso Sea
agaaatttttattgatggagaaaacatcaataatctaaatcagaccgagttacgcgaaataagatcttccaaaattgggatggtttttcaaaatatggcgttgcttcctcataaaaatgtccgtgaaaacgttgcttttgctttggaattgagaggtattgataaaaagagtcgggacaaggttgctaatgaaaccttggaaaccgttgaattgtcaggctggggagatcgctatcctgacgaattgtcaggagggatgcaacaaagagtggggttggccagagccattgcggccaatccgcaaatactcttaatggatgagcccttctcggcattagatcctttaattagaagacaattgcaggaccagttcattgaactctctcagattatgcacaaaacgacaatttttataactcatgacttggatgaagcaattcgaattggacaacggattgccattatgaaagacggaatgctggtccaaattggtgagccggaagatattgttacagatcccgtggatgattatgtggctaagtttgtttcaggcatttcaaatttacatttagtaacggctgggaaaatcatgcaatcgattgccgaatatgaggcctctgccggacctgtcaaggaggagtcattgctgaaggcaaaactcgacgatgatttagattgcttgatcgatttatcaataaagacagatgaacctattctgatagaatccgaaagcaaaatagttggaatcgtgacgaagaaaacccttttggcaggaatccaggggcattggaatacttaaa

SEQ ID NO: 268837 - DNA, 574 bp, Unknown
  Bacterial polypeptide expressing nucleotide sequence isolated from the Sargasso Sea
atgtcaaatgctataatttctgcagaaaaattaaatctagtttttgaaactgctgatgatgatgtaattgctttaaaagatgtctctttggatattaacaaaggtgagtttgtttcttttatcggcccatctggttgtggaaaaactacatttttaagagcaatagcttctttagaacaacccaccagtggaaatctgacggtaaatggaatgtcaccagaggaggcgagaaaaagtagatcgtatggctatgtttttcaagctgctggtttatacccctggagaaatatttataaaaatgtaagtctcccactagaaataatgggatataaaaaaaatgagatacctggaattgttgaaaaagtattaaaacttgtagatttaaaaggatttgaaaaaaaatttccttggcaattgtcaggtggaatgcagcaaagggcttctatagctagagcactttcttttgatgcagacatcttgttaatggatgaaccatttggtgcgttagatgaaattgttcgagatcatttaaacgaacagcttttgaaacttggaaaactacaaacaaaacaat

SEQ ID NO: 268838 - DNA, 349 bp, Unknown
  Bacterial polypeptide expressing nucleotide sequence isolated from the Sargasso Sea
ttaattaataaaaatgaaaagaaaagttatgaaatttctaaaaaactacttcttgaattcggtttagatgaaagaataaattataaacctttaaaattatcaggaggagagcaacaaagagtcgctattgctagagctcttgtgaataaccctgatttaattttagctgatgagatgacaggtaatcttgatgaagatactgctaacaatatttttaaattttttatcaattatatcgaacaaactaaaaaaactttagtatatgtaactcataacaaaacctactcgttattagcagatgaaacttattattttaaaaataagaatatacatttaacaaatgaataat

SEQ ID NO: 268839 - DNA, 715 bp, Unknown
  Bacterial polypeptide expressing nucleotide sequence isolated from the Sargasso Sea
taataattcacctttactgcttaaaaagaaaataaatcttaaaaatatcactttcaaatatagtgaaaagtcttttccagttattcagaacttgaatttaacaatattaaagggtgaaaaaattggtattgttggaaaaactggtgctgggaaaagtacattggtagatataattatgggccttgttgagccaagtgaaggatctatatgcatagatggtattaatttatttaatgataagtctgaggatttgttgaagtcatggcaagattctcttatgcacgtacctcagaatatttttcttgcggattcttcaatagcagaaaatattgcacttggtgtaaataaaaaagatatagattacgatagagttaattacgtagctaaacaaactcaattaattgattttattgatgaaaataaagatggctttgatactttcgttggagaaagagggataagactaagcggtggacaaaaacaaagaattggtattgcaagagctttatataaaggggcaaaaataattctcttagatgaggcaacaagtgctttagataatatcacagaagaaaaaatagtagaaagtttaaattatttaggttcagatataaccataataataatcgctcatagactaaatactctacgtttttgtgataaggtttttgagttaagacaaggtaatttaacccaaaaaaatcttttttcttag

SEQ ID NO: 268840 - DNA, 664 bp, Unknown
  Bacterial polypeptide expressing nucleotide sequence isolated from the Sargasso Sea
actgcggatagaggtttatgcgcgtggttacaacacaaatataataaaaaaggtagaaataagatatgcagaattagtcaaacaagggtatcagccaaatttgattttggtagggaagaaagctattggatattttcaaaatagaaaggatagatatgtaattaaaagtactttcaaagaactagaacaggtacctacagtcaaggactctgaaggagttacaaatgagattttagctgaatttctttcagaaaattctgatagggtggaaattatttatacgaaattcatcactctagtcagctgcgccccagtcgttcaaacactattgccacttgaccctcaaggaattgctgaggaaaacgatgaaatttttaggttgactacgaaagatagtaagttacttgttgaaaaatcaaatattgaaaaaagtgattcagagaagttgccatcagatattgtttttgaacaaagtcctgatcaactattagattcgttattaccattatatttacagaatcaggtactaagagctctgcaagagtcggcagcttcagaactcgcctgcaggatgactgctatgaataatgcgagtgataatgctaaagaattagcaagtactttgaatctaacttataacacagccagacaagcagctattact

SEQ ID NO: 268841 - DNA, 156 bp, Unknown
  Bacterial polypeptide expressing nucleotide sequence isolated from the Sargasso Sea
aaaaaaagttgggctttcagaaagaatgaataatcgtccaaaccaattatccggagggcaacaacaacgagttgctatggcgagagctattatcaataatcctgcaattttgttagcggaagaacctactggagcactagattcaaaaaccactga

SEQ ID NO: 268842 - DNA, 769 bp, Unknown
  Bacterial polypeptide expressing nucleotide sequence isolated from the Sargasso Sea
tttgggaaataaaaaatttatttctttaaataatagtatcagctttaaaaatatatcatttcagtatgataatgaaaaaaatgtattaaaaaatttaaattttgaaattaataaaaatcagattacagctttggttggggagtcaggtagcggaaagtcaactattgcagacttaattataggattaatttcacctcaaaaagggaaaattatgattgatgataatgatattttagatctagaaataggaacctttagaaaaaatattggatacgtttctcaagatatttttttatttaacgacacaattcaacgtaatctaacttggatggcagattatgatataaaggaagatgatatttggaatgctttaaaacaagcaaatgccgatgaatttgtaaagaaaatgccagaaaagcttgatacaatagttggagaaagaggtgtccaattatctggaggacaaagacagagactatctttggcaagagtatttttgaaaaaaccaaaggtattaattttggacgaggcaacgagttcgcttgatagtttaacagaaatagaaattcaaaatacaattgagatcatgtcttcaactaatgaaattacttttttaataattgctcataggttgtccacaataaaaaatgcagataaaatcattgttttagacagtggtaatattgttcaaagtggagattatactgaattagtctctttgaaagatggtaaatttaatataatgctcaattcacaaataataaaataa

SEQ ID NO: 268843 - DNA, 919 bp, Unknown
  Bacterial polypeptide expressing nucleotide sequence isolated from the Sargasso Sea
catccttgtgatggtgatctacagctggttgctcaccctgatcgccttgtctgtgttgccgattcagatcggtctcacggtgctaggtgctcccctgttccgccgccagttccgtgctgctgcggaagaaaacgccaagactcagagccatcttgtggaggtgctgaccggaatccagacggtcaaggcacagaacgtggagatggtcagccgttggcgctggcaggagttttattcgcagtacatcgcccgcacgtttgagaagacgatcaccggcacggccttgaatcagaccagccaggtgctgcagaagatttcccagctcatggtgctctggatcggggcctcgatggtgttgaacggtgacctgagcctcggccagttgatcgctttccggatcatttccggctatgtgactcagcccctgctgcggttgtcgacgatctggcagaacattcaggaattgcgggtgagcttcgagcgtcttgctgacgtgatcgacacccctcaggaatccgacgaggtggacaaatccaaggtgatgctgcctccgttgcagggggaggtgcggttcgaggacttgtccttccgtttccgccctggtcaaccggaggtgttgaaggacatcaacttagagatcaaggccgggacatttgttggcatcgttggccagagcggcagtggcaagagcactttgatgaaactgctgcctcggctctacgagcccggtgagggccgaatcctgatcgacggctacgacatcgccaaggtcgagctctattcgctgcgtcggcagatcggcattgtccctcaggatcctttgctgttcagcggcaccgttagcgagaacatcgctttgacgaatccggaggcgtcgagtgaagagattgtgcgagcggcccgcctcgctaatgcccac

SEQ ID NO: 268844 - DNA, 707 bp, Unknown
  Bacterial polypeptide expressing nucleotide sequence isolated from the Sargasso Sea
cctagacgatgaacccactgatgccctgttgctcagcgtgaaggatccagccgtggaactctccacaggcccggcgattggggtggagctgcagcagctgtgcttcggacacacgcccggcaagccgccgctgctcaacagcattgatctgacggcggtgcccggggaatgggttgcgatcaccggcccaagcggcagcggcaaaagcaccctgctcaacctgatcgccggcctgctgcagcccgattcaggccaggtgctgctgaatggacagccgctactgagcctgtcgcacaaacagcgcagccacgcgatcgcgatggtgcgtcaggaggatgcgctgctggatgtgagcctgagggagaacctcaccctctgggatccgagcatcagcgacttcgccttacattccatatgccacgacctggggctggacgcggtgctgcaacaactgccccaagggctggatacggtgctgcaacctggccagttcaacctcagcggcggccagcgccagctactgaatctcgggcgggtgctgctgcagagcccccagctgctcctcctcgatgaggccacttcagcgctggacagcagcagcgaaacgaaggtctatgaactgctgcgtcgtaggcattgcacggtggtgatggccgcccatcgcagtggcagcatcaagcgagcagaccgggtgtttgagctgtaag

SEQ ID NO: 268845 - DNA, 394 bp, Unknown
  Bacterial polypeptide expressing nucleotide sequence isolated from the Sargasso Sea
atgcccgtgacgcccccctccgagacacctgccgcgcatggcatcgagttccgggatgtcagcaagcggtacggctcgtcgcccgacgctccgctggtggtagaccacatcagcttcagcgtgccgcgcggcacgctcaccaccatcctcgggccgtcgggctgcggtaagacgaccacgctgcgcctgattgccgggctcgagtcacccacatcgggccgcatctttatcgacgggcaggatgtgacccccctcggcccggcgcagcgcaatgtgagcctggtgttccagaactacgcgctgtttccgcacatgaatgtcatcgacaacgtggtctacggcctgcatttgtcgggcctgggcaaacagcaggtgcgcgacaaggcgcgtgcca

SEQ ID NO: 268846 - DNA, 655 bp, Unknown
  Bacterial polypeptide expressing nucleotide sequence isolated from the Sargasso Sea
aatggattcattgagttcagctattaaaatagaaaatgtttggaaagtatttggaaatacttcacccgaagcattagatgcaattcaaaataaaggtatttcaaaaacagaagctctagaagaatataactcagtaattggtgtatcggatgtttcatttgatgttaaacaaggtgaaatattttgtgtaatgggtctttcaggaagtggaaaatctactcttgtaagacatataaatagacttttagaacctacttcgggaaaaattttaattaacggtcaagatgtaatgacacttgatcgtgaacatttacaagaacttagaaataaaaaaataggtatggtttttcaaaactttgcattaatgcctcatagatctgttgttgataatattgcaatgcctcttgagataagaggagtgagtaagaatgatagattagacgctgcaaataaaatattagaaattgtagaattacaggggtggggaaataaatttgcacatgaactgtctggaggtatgcaacaaagagtagggcttgcaagagctttagctgctgatccagaatttcttttaatggatgaaccttttagtgcattagatcctttaattagaagacaactttcatcagaatttattaaactttcaaaacgatga

SEQ ID NO: 268847 - DNA, 463 bp, Unknown
  Bacterial polypeptide expressing nucleotide sequence isolated from the Sargasso Sea
ttatgtacaaaacacgactatccggtcgctacggtcggccatcgggctggtatcgcaggatgtattactgcttaacggcaccatttttgacaatttaacctatggtctggcaaatccggaagccgatgaggtatacaaagcagccagccaggcaggcctcgacaatatcataatgcgtttacctaacgggtatgacactcaggtaggagagggcggcatcaaattatccggcgggcagcgccaacgcattgctctggcccgcgcgttgctgctcaaaccgaggattttgttgcttgatgaacccacatccatgttagacgaacaggccaggctcagttttaaggaggaatttcatggattgtttgcccggtttaccgttatcatgatctctcatgaccccacactatctaacgttgccgacgtggtttataagttagaaaatggtgagttaaatcggcagtaa

SEQ ID NO: 268848 - DNA, 782 bp, Unknown
  Bacterial polypeptide expressing nucleotide sequence isolated from the Sargasso Sea
attgcagccgcaaagccgattcattggggttaccggtccatcaggtgcgggaaaaagcagcttgtttcgcgccctagctggcgtagaaaaaagcgcaagtgtgcaaatgccgtggacctctcaaaaggtcggtatcgtttttcagcagcccatgctatttccccataccgatgtacgcggtaatttagccttggcgcagcgtcacgcaagccctaatgcaatgtctatcgatgcgtgtttgcgcggctgttattgcgaacatttaattgataagccagttcaagcgctttctggcggagaagcgcagcgggtcgcgattgcgcgtgcgttggtcaatggaccagatgtgttattgctagatgaatcgttaagcgcaattgatatcttcacccgtcgcaaaatttaccagtttttgaataatttgtgtgtgttagggaagctcacctgccttgtaatttctcacgatttagatgaccttgccttgttcagcgatgagttggtttttattgaccaaggccgcaccgagctttgtggaaaaacgcgcgatgttttgactcaagtattcgaaaaagaaggatttgcgacaccgtctagcgtacttgagggatttaaagttactgcacaaagcgacgcacacgacagcaaccagtcacaaaacgccgttgtcagctacaaacacggtagccaaacgcaaacagatcaaaatgctctaaccttacaaggcaatgagcagtgccagtcggaaaacggaattgagcgcgttgaggtagcggggcaagaga

SEQ ID NO: 268849 - DNA, 626 bp, Unknown
  Bacterial polypeptide expressing nucleotide sequence isolated from the Sargasso Sea
tatgatatttagactaattggtcatattaaccaacaaagtttagctgtagataatattggcggaacttcaacttcaaaaacttttaattatgcaaagaacagtaataaatttgaaatttcaaatgcttcagtaacatatgatttaagtaaagaagtttctgaaaacaattttgttctaaaaaatataaatttacaatttaataaaggacaaaaaataatgttaattggagaaaatggatcaggtaaaagtagtgctttaattttatctagaggattattttcgagaacaataggtcaacaccgtgggacaatcaacttgtttggaaataatacaaaggatttaagtcttggtgagttatctcaaatggcaaggatagtttttccaagtgccgcacatggtcttgttggaataagaattaatgatgaattggaactgagtcttttaagatcaaaaattgataaatctaaatggaaagaacaaaaattaaaaattcttaaattggtaggtttagatgaaagttttttaaagagaaaaaccttgtcattgtcgggtggacaacaacagagagttgcaattgcttctgccttaattgcagagccggaattacttctattcgatgaagtta

SEQ ID NO: 268850 - DNA, 817 bp, Unknown
  Bacterial polypeptide expressing nucleotide sequence isolated from the Sargasso Sea
aatgcttgaagagtctaacggcaaagtagatgcaaaaacttttcaacgaaatggatgcatagttggtgttaacaatgcttcttttgaagtttcgaaaggtgaaatgttagttgtaatggggttatctggatcaggcaaatcaaccttattaagatgtatttctagacttacagacgcaactggaggaaaaatttttatcgaaggtctagatttgcttcaattaaaaaataaagagttgatagatctacgaagaaataaaatgggaatggtttttcaaagctttgctttattgccacataaaaccgttgtagaaaatattgcatttccattacaagtcaaaggagtaaatactgaagatagcattagcaaagctatggatatgttaaaactagttggattagatggaagagaaaattattttcctagagaactttcaggagggcaacaacaacgagtaggtattgcaagatcactagccgtagagcctgatatttggtttttggacgaacctttttcagcattagatccattaattagaaaagaaatgcaggatgaatttttaagacttcaggaaaaattacaaaaaacaataatgtttattactcacgattttgatgaggccttaaaacttgctgaccgtattgcgataatgaaagacggaataattgaacaattagacactcctgcaaatatagttctaaatccagctacagagtatgtaaggaagtttactgaggaagtgccaagagaaaaagttttgataattgaggatgttatggatgcccctattactgaaaatttaggtgaattaaaggta

SEQ ID NO: 268851 - DNA, 466 bp, Unknown
  Bacterial polypeptide expressing nucleotide sequence isolated from the Sargasso Sea
aaattaactgtaaggcaaaatctagaaatatatggaagattgtatggaatttctaatcttgacgagagaataaatgaaatttcggaagatttagatattaaaaatttttttggaaggaaaactggtgagttatcatctggtcaaaaaaatagggtatcgttggctaaatccttaattaacaaaccagaaattttacttctagatgaaccaaccgctagtcttgatcctgatattggtgattttataagaagctatatacaagaatataaaataaaaaataaagttacaattttattagcgtctcataatatgagtgaagtggaaagactatgtgatagcgtaataatgatgcgtaaaggaaaaataatagacaaaggaacatgtgaagaactaataaaaaaacatgggcgagataaccttgaagaaacatttttaaaattagcaaggagtaaagatgaattttaat

SEQ ID NO: 268852 - DNA, 547 bp, Unknown
  Bacterial polypeptide expressing nucleotide sequence isolated from the Sargasso Sea
atctggaaagtcaacactaataaatttaattataggtttttataaccctgatagtggaaaaattaaagctgatcatattgatattttagataatattagtaattggcagaatttgattggctatgtgccacaaaaaatatttttaactgatgacactctggaaaaaaatattgcttttggagttgaagaagatgaaattaaaattgaaaagttaaattatgctataaatcattctcaattgaatgaattcatttcagatagggaacttggtttaaaaacaaaaattggcgagcggggcaaacaaatttcagcagggcaagcccaaagaattggtattgctagagcattatacaaaaatccaaaaatattaatatttgatgaggcaacaagtgcactagataaaaaaacagaaaaaagaattatagaagatgtgttgaatcttaaaaataaaggtatcacagtgatactagtaagtcatgaaccgagtgttctcgcatactgtgataagttttacgatttagatgaaaataaatacataaaaaattaa

SEQ ID NO: 268853 - DNA, 529 bp, Unknown
  Bacterial polypeptide expressing nucleotide sequence isolated from the Sargasso Sea
atgtctaatagcagcaataaggaagtagttctttcttcaaaggatctggtggctggataccttccaggtgttgatattttgactggttgcaattttgaacttcataagggtgaattggttggaattatcggccccaatggagcagggaagtcaactttagttaaaagcatgttcgggcttgttgaagtgagaagtggtgttgtcgaactgatgggggaagagataacaaatcttccagcacaccagcttgttgaaaaaggggttggttttgttccacagacagaaaacgtttttccttccttaacagtgtccgaaaatcttgaaatgggtgcataccaacttcctaagaaccaagttgaagagagaattaaggaaattgccgaccttttcccaagacttggagagagaatccgtcaacgtgctggacttctttcaggtggtgagcgacaaatgcttgccatgggaagagctctaatgatgcagccaaccgtgcttcttcttgatgaaccttctgcgggtttatctccag

SEQ ID NO: 268854 - DNA, 873 bp, Unknown
  Bacterial polypeptide expressing nucleotide sequence isolated from the Sargasso Sea
aatgcctgatggctacaacacattagttggagatgatggtgctttgctttcaggtggtcagaagcaaagaatagcgatagcaagagccatattaaaaaattcacctattttaattttagatgaagcgacttcagctttagactcagaatcagaaattaaaatacaagaagcaatgtctaacttaaccaaagacagaacaactttagttatagctcataggctatcgactattgaagatgctgacaaaatagtagtgctagataatggaaagatagtagaagaaggaagtcatgaagagctacttagtttagatgctcattacgctaagctacatgctaatcaatttaaagacgatactcctagtaaagttgaggaagcagaaatcagctttcctatggtcccttctgccgttaaccccatagaccatacaagctttatagaaaaatcttggtatagaaagagtatgctgtcatggatgttgtggccgctctctaaattaacttcctatgtatctgaaagaagatatagaaactatttaacctctaagcccgaagtggacgaactaaatgttcctttagtggtagttggtaacatagtggcaggaggaacaggtaaaactcccattgttatatggctcttagaaaaattaatagaaaaaggatataaaccctccattgttagtaggggttttggagggcaatctaatagatatccattaattattgatgcccagactgatagttcagaaagtggtgatgaaccaaaaatgatttttttaaatacaggagtaccagtatgtgtatctcctgatagagtaaaaggaattaaagaactagttaccaaaacagatacaaacatcataattagtgatga

SEQ ID NO: 268855 - DNA, 766 bp, Unknown
  Bacterial polypeptide expressing nucleotide sequence isolated from the Sargasso Sea
aatgaaaaaacggttgtccacattagcggaaaacgcatcccctgctataaacatcaacaatgtcagttttagctacccaagtagtaaagcattatttactgaccttaaccttaatatccgcgctggagaaaaactggcgctggttggccctagcggcgcaggcaaaacgacattatttcagcttcttatgcgtttttatgagccttcatcgggcagcgttgtatttaacgaaaccaacatcaataatctgccattagcacaattacgtgatcaaatagcggtagtaacccaagagcccgtggtatttgcgcgctctgtgatggacaacatccgctatggaaagcctgaggccactgatgaggatgtggttaaagcggcaaagctcgctttcgcccatgaatttattgattcccttgataaccgatacgacacccagcttggtgaacgcggaataaaattatcgggtggacaaaagcaacgtattgccattgctagggctattttagccgaccgacctattttactgcttgatgaggcaaccagtgccctcgacgccatgagtgagcgaatggttcaacaggcgattaaccgcttaatggaagggaaaaccagcattgtgattgctcatcgactagcaactgttcaacatgccgaccgcattgttgtaatggataaaggaagcatagtggccactggggatcatgcctcattgatgaaaagcgataccctgtatagggaatacgctgaactgcaattgcttagctga

SEQ ID NO: 268856 - DNA, 682 bp, Unknown
  Bacterial polypeptide expressing nucleotide sequence isolated from the Sargasso Sea
atgcaaaatttagttgaagtaaaaaacttaaaaaaaaattatggttctaaagaagctgtaaaagatatttcatttgctataaaaaaagatgaaattttgggcctacttggcccaaatggttctggaaaaactactactataggtatgttgcttggattactaaagcccacagatggagaaatattaattgatggaaaaaaaatagagggaaatcgtatagatatactaaaaaaaattaattttatttctccttacatagaattaccaaaaaaactaactgttaaacaaaatttaatcgtatatggaaaattatataatgttttaaatattaatagtacaattgaatatcttgttgaaaaactaaggttatcagaattgttaaatagaattacaggtgaactttcctcaggtcaaaaaaatagagtaagtttagcaaaagctttaataaataacccaagtgtattgcttctggatgaaccaacagcatcacttgatccagaaattggtgattttgtcagaacgtttttagaaaattataagaaagaaaaaaaaatatcaattttattagcatcccataacatgaatgaagttacaagattatgtaagaaaattttaatgatgaaagatggcgtaattattgacaagggaaatccggaagaattaattaaaaaaccatggtaga

SEQ ID NO: 268857 - DNA, 788 bp, Unknown
  Bacterial polypeptide expressing nucleotide sequence isolated from the Sargasso Sea
tcaagcgttcctgaagccataggatgctccaatgatggagatccaataattcaggttagaaatatcaggaagtggtatcaagtaaataaaggtttgcctatcataggtagccatgattggttaaaagctgttgatgatgtttcatttgatgttccaagtggtcaaactattggtttagttggtgaatcaggatgtggtaaaactactactgcaaaaatggttttaggccttgaggatccatcaacagatggaggtgtacctgtaggaagtatttactttgaaggtcaagatgttacaactctaagttcagctggtaaaagagaaatgagaagatctgttcaggccgtttttcaagatccatggtcatcattaaatcctagaatgagagttaacacaatcattggagagcctttagaaattaataccactatgactaaaaaagaaagaaatactagggcaggagatctactagctgaagtaggactaaatccttatcaaggaaacctttaccctcatgaattttctggtgggcagagacaaagaatcggaatagctagagctttagctttaaaccctaaactaattgtgcttgatgaacctgtttcggctttggatgtatcgattcgagctcagataatgaatatattggttgatcttcagaaagaacataatttagcatatatcttaattgctcataacctagcaaccgtaaggtatatgtgccacagaactgcagttatgtatttaggagtagtacaagaatatggtgatacagaggcaatctttgc

SEQ ID NO: 268858 - DNA, 913 bp, Unknown
  Bacterial polypeptide expressing nucleotide sequence isolated from the Sargasso Sea
gcagcggtatgcaattttgggaccttctgggtgtggaaaaaccacgatgttaaacattgtttctggattagtgaggccatccaaaggtgaaatattattcgatgaaacacctgtgactgatttaaaaacagaagatagaaatattgcccaggttttccagttcccagtaatttacaatacaatgactgtttatgataatttagcgtttccactaagatgcagggaatttacaaaagaaaaaattgaagaaagagtaaaagcagtttcagatactttaaatttatcttcatttttaaactcaccagcaagaaaattaacggctgatcaaaaacaacttatctctttaggtagagggttggttcgagaagacgttgcagctgttttaatggacgaacctcttacggttatagacccagatttaaaatttagacttcgaagaaacttaaaagaaatcaatgaacaatataaaacaacattggtttatgtaactcatgatcaaaacgaagctatgacttttgcagaaaatataattgttatggatcaaggtgaaatcgtacaagttggattgccaaaagatttatttgaaaaacctaaaacaacttttgtaggttattttattggctcccctgcaatgaatatctttcattcaactgtttcttctgatcatgaagtaaaaattaatgatactacaattaagacaaattcaaatttaggaaatttaaaagataaaaatgttaaactgggtattagatccgagttcatagaattggctgaaaaagaaaaaagtaatacagttaaaattaaacttacaagagttgaggactttggtaattttaagctccttacaggaaaaatgggtgatttagtgattaagtcaaaagtagaaagagaaaaacccattccagatggagaa

SEQ ID NO: 268859 - DNA, 736 bp, Unknown
  Bacterial polypeptide expressing nucleotide sequence isolated from the Sargasso Sea
cttgttaacggctcggaaggaggccgaggtccccgcggatgaggaaatcctccgagtggagggactgaggatgcattttccggtcaggggaggcgttctctacaggcagactggctccgtgaaggccgtggatggcgtcgacctaaccatccgcaagggagaaacccttggtctggtcggggaatcgggttgcggaaagtcaaccctcgggaagtgcatcgtacgcctcctcaaccctacgggtggccgggtggtcttcaagggcacggagcttacccatatgtcccaatcggccttgcgaccctaccggcaggatttccagatggtttttcaggatcctgcggaatctctcgatgcccgcatgtcggtgggagagcttatatcggaacccatggtcattcagggaatcggtacgcgtccggaacgggtccgacgggtagaggaactgctcgagttggtcggccttcccaagactgcgtcccagaagttttccttcgagttttcgggaggtcaacgccagcgcattggcatcgcccgggcacttgcggtcaaccccgatctgcttgtcttggacgaacctgtctcggccttggacgtatccgttcaaagccaggttctcaacctgctcatggagctgcagcgtgaactcggcctatcctaccttttcatttcccatgatcttgccgtggtcaagcacgtgtcggaccgcattgcggtcatgtacctgggcaaaatc

SEQ ID NO: 268860 - DNA, 621 bp, Unknown
  Bacterial polypeptide expressing nucleotide sequence isolated from the Sargasso Sea
ccggaaagaccacgactatttccatgctgctcggccttctgatcccaaccgccggggaacttcaggtactgggggtagacatgctgcgcgaccgctattccgccctggccgacgtgaatttctcttcgccctatgtcgatctgcccaaacggctgaccgcccgggaaaacctgatggtttatgccaagctatacggcgtttctgacccggtcgcgcggctaagagaactggcaggcgatctcgacattaaaaagttgctcgatcggcccttcggggagctgtcatcgggccagaagacgcgcgtttctctcgccaaatcacttctcaacgaacctaagcttttgctgctggacgaaccgacggcatcgctggacccagataccgcggactgggtacgcacctatctgatgaccttccagaaaaatcgtggtgcgacaattcttctggcatcgcacaacatgtcggaagtcgaacgtatgagcagccatgttctgatgatgaaggaaggcaacattgtggaccgggacagcccgtcgggactgttgtcgaaatacggacgtcaaaatctggaggacgttttcctggatattgcccgcgaccgcagtaacacagcggcataag

SEQ ID NO: 268861 - DNA, 274 bp, Unknown
  Bacterial polypeptide expressing nucleotide sequence isolated from the Sargasso Sea
gtttgtgatgaaccaacctctgctttagatgtaagtatccaagctcaaatattaaacttactaaaagatttacaagatcaattaaatctgacaatcttatttattagccatgatttaccagtggtaagacaaatgtgtgatagaatagcagtattaaaaaatggcagactttgtgaagtttcaatgacagaagaattatttaaaaatccatcacatgaatacacaaaagagttattaacattaatgccaaagatagaatctatttatagctaat

SEQ ID NO: 268862 - DNA, 556 bp, Unknown
  Bacterial polypeptide expressing nucleotide sequence isolated from the Sargasso Sea
atgtctattgaaataataaatctatctaaaaaatttaatgacatttacgctgtaaataaaattaattttactataggcactaacaaaacggttggattacttgggccaaatggttgtggaaaaactacatcaattggaatgatgcttggacttattaaaccaacaagcggagaggttaaaatacaaaataaaaatatagacacgatcgaccgtaataaacttttaaatattatgaattttgcatctccttacgtagaattgccaaaaaaactcagtgtaaaacaaaatttagaaatatatggaagactttatggtgttgaaaatttatcttcaagaataagtgaattaacaaacgatttggatttaaaagattttttaaataaaaaaactggagaattatcgtctggtcaaaaaaatagggtttcgcttgcaaaatcattaataaataaaccagaaattttacttttagacgagcccactgcaagtctcgatccagatactggtgattatgttaggtcgtatatccagtcttataaatctaaaaatcaagttacaa

SEQ ID NO: 268863 - DNA, 301 bp, Unknown
  Bacterial polypeptide expressing nucleotide sequence isolated from the Sargasso Sea
atgtcagataatattattcaaataaataacatgaataaatggtttggagatttccaagttttaaaaggtattaatttagaggtaaaaccaaaacaaaagattgttgtctgcggtccttctggttcgggaaagtcaacattgataagatgtataaacagattagaagaacatcaagaaggtgaaataatagtagatggaacggaattaactgaagacactaaaaatatagaacaaattagagcagaggttggtatggtatttcaacaatttaatttattcccaccatttatcaattcttgat

SEQ ID NO: 268864 - DNA, 526 bp, Unknown
  Bacterial polypeptide expressing nucleotide sequence isolated from the Sargasso Sea
atggagacatgtgtggcattaatttctgctcaaaatttaaaaaaaacttttggtgacattgaagctgttagtaatgtaagtttgacactatctacaggtgaggttgttggatttcttggtcctaatggagcaggtaagtctacaacaatgaaaatgttaacaggttttttagaaccagatgatggttctattatcataaatagttcagatttgcaaaaagaacccttgaaagcaaaatcacatattggatacttacctgaaggtgcaccatcatactcagacatgaatgtattttcttttctaaagtttgttggattgatgcggggattaagaggtaaaaaattaaacgatagattaaatattatgtcccaatctataaatttgtcttcagtttggtttcaacccattgaaactctctcaaaaggttttaaaaggagggttggcattgctcaggctctaattcatgatcctaaaattttgatattagacgaacctactgacggtttagatccaaaccaaaaatacg

SEQ ID NO: 268865 - DNA, 586 bp, Unknown
  Bacterial polypeptide expressing nucleotide sequence isolated from the Sargasso Sea
ttttgcaggacaagaaagatcgcaaatggaaccagaacttgctgcaaaaagtggaattgcaagaacttttcaaaatatagctctttttaaaggaatgagtaccctagataacttaatgactggacggttattaaaacaaaaacaaaacctttttatgcaagcattatattttggaccagcagaaaaggaagaaacttttcatcgagaaaaagtagaaatggttatagattttttagatctacaatctataagaagaacgcctgttggatctctaccatatggtcttcaaaaaagggttgagcttgggagagcattagccatggaacctgaaatacttttgttagacgagcctatggcaggaatgaatgtagaagaaaaacaagatatgagccgatttgtcttaacagcaaattatgaactcaaaactactatagttctgatagaacatgatatgagcgtagttatggatatttctgatagaattgtggttttagattatggaaaaaaaattggttctgggaagccagaagaaataagaaaaaataaggctgttattgatgcctatcttggcctctcagatgattag

SEQ ID NO: 268866 - DNA, 625 bp, Unknown
  Bacterial polypeptide expressing nucleotide sequence isolated from the Sargasso Sea
cttgggcctaacgggtgcggtaaaactacaaccataggtatgattcttggtttacttaagcctactaaaggaaaagttctaataaatggcattgaaatagaaaaacaaagagttgacttgttaaataaattaaattttatttcaccttacattgagttaccaaaaaaattaaccgtaagacagaatctagaagtttatggaagactttatgatgtaaaaaaacttgaaaataaaattgattatcttagtgagaaattaagacttaatgaatttattaataaaataacaggagaactttcttcaggtcaaaaaaatagagtaagcctggctaaatctattattaatgatccctcagttcttcttcttgatgaaccaactgcatctctagatcctgaaacaggcgatttcgttagaggctttttagaagaataccaaaaagaaaaagaaacttctattctcctggcttcacacaacatggcagaagttgaaagattatgttcctcagtctttatgatgaataaaggatctattatcgatcaaggagctcctgataaattaattcaaaaacatgggcgtagaaatatggaagaagtttttttaaaacttacaagagatttaatatgaa

SEQ ID NO: 268867 - DNA, 504 bp, Unknown
  Bacterial polypeptide expressing nucleotide sequence isolated from the Sargasso Sea
ttgtcgatatgggtatttgccaagttcctgaaggaagaagaatattttcaagattaactgtagaagaaaacttaagattaggtgctcatgccaatgaaaaagggaagtattttgaaaatgacattaaggaagtttatgatttatttccagtattaagtgatagaaaaactcaaagaggcggaactctttctggtggagaacaacaaatgttggcgataggaagagcgttaatgagtaaaccaaaagtacttttattagatgaaccctctttaggaatagctccaaaactggtaaatcaaatatttgtttcaataaaaaacattaacaaagaaaaaaacgttactatttttttagtagagcaaaatgctaaaaaggctttagagcttgcagacagagcatatgttttagttaatggcaaagtgaccataaagggttctggtcaagagttactcaaaaataaagacatacaagccgcttatctcgaaggtggggcaaaaaattaac

SEQ ID NO: 268868 - DNA, 589 bp, Unknown
  Bacterial polypeptide expressing nucleotide sequence isolated from the Sargasso Sea
gatgtctggtgttgttgctccagatactggaaatgtgtcttttgatggtaaagaaacaaaaatttctacaagaaaacaatctgaagaagttgcaggaattgaaacgatatatcaaaattctgctttgtgcgatgatatgacaattattcgaaacatttttatgggaagagaaatcactaatttatttggttttatggaccataaaaaaatggaagatttatctttggaagttttagaatctggtgttcatatttcaggtattgattcacctcttaaagaaatcggagctttatctggtggtcaaaaacaggcagtggctattgctagggcagtttattttaaaagaaaaatattattacttgatgagccaacttcagcattatctgttcgtgaaacagaaagagtgttgaagtatgtaactgaattaaaaagtgaaaatgtgtccagtgtaattgttacacataatttataccatgcttttcaggtttgtgaccgttttgttgtaatgagtcacggcaaagtaatttttgaaaaaaataaatctgatacaaatcttgatgaagtaacggagcaagttattaaagtttaa

SEQ ID NO: 268869 - DNA, 715 bp, Unknown
  Bacterial polypeptide expressing nucleotide sequence isolated from the Sargasso Sea
atgtctgaaccagtaattaaatgtgagtctgtttataagatatttggcgaaaatgctgaaactatgcttaaggaagcgaatggcaatgtagatgcaaaaacttttcaagaaaatggatgtatagttggtgtaaataatgcttcctttgaggtatcaaaaggagaaatgttggtcgtaatgggactttcaggatcaggtaagtctacattgctaagatgtatctcaagattaacagatgcaactggtggaaagatatttattgaaggtcaagatctattaaatttaaataataaagaattgatcgatcttagaagaaataaaatgggaatggtttttcaaagctttgcgcttcttccccataaaacagtagttgaaaacatagcttttcctttacaaattaaagggattaatacagaggatagcatcaataaagcaatggatatggtcaaattagttggcttggatggaagagaaaactatttccctcgagaattatctggaggacaacaacaaagagtaggtattgcaagatcattagcagttgagccagatatttggtttttagatgaacctttttcagcgctagaccccttgatccgaaaagagatgcaagatgaattcttaagactccaagaaaagttacaaaaaacaattatgttcattactcatgattttgacgaagctctaaaacttgctgatcgtattgcaattatga

SEQ ID NO: 268870 - DNA, 796 bp, Unknown
  Bacterial polypeptide expressing nucleotide sequence isolated from the Sargasso Sea
atgtcacaaattaaaatagtaaatttacaaaaatcatttggggattttacagcagttaaaaattccaatttaacaattaatgataaagagttctttgttttacttggaccatcaggttgtggaaaaacaacaactcttagaatgattgctggattagaattacccacatcaggagaaatttacttgggagatgaagaagtgggaatgcttagagcgtctgagagagatatagcttttgttttccaattattcgcactttatccgcatatgaatgttaaaaataatttgtcatttccactaaaaatgcagggatatagcagaaacgaaataaaaactagagttgaggaagctgcaaaacttttaagaattgatcatattttgaattcaaatatttcatcattatcaggaggagacaggcaacgtgtagctcttggaagagctttggttagaagaccaaaagcattcttaatggacgagccattaggtacattagatgcagaatttagagaattaatgtgtttagaacttaagaagttgcacctagatattggtgctaccactgtttatgtaacccacgatcaattagaagcaatgtcattggctgatcgtattgcagtgatggatggtggcgaaattttacaagctgatgagccagcagtaatttacaacaaacctaccacaaagtttgtagcttcttttattggttctcgtggaatgaattttataaatattgatcaaggtatctcaaatgaacaatcaactttaaatatagagggaacaaatttaacataccaaa

SEQ ID NO: 268871 - DNA, 652 bp, Unknown
  Bacterial polypeptide expressing nucleotide sequence isolated from the Sargasso Sea
cattggtcgagcaattacaagaaaaccaaaagttttcttatttgatgaaccactttcaaaccttgatgctgcattaagagttcaaatgagagttgagttagctaaacttcataatgaattagatgcaacaatgatatacgtaacgcacgatcaaactgaagcaatgacacttgctgacgatattgttgttctagatacaggtattgtttcccaaaaaggttctcctttagaattatatgataagccaaataatatgtttgttggtggatttattggatcacctaaaatgaactttatgccttcaaaaatattaagcaaaagtgctgactctactgaagttgatattatggggatgtcaaaaatatcagttcctaaattatcagcgtcatcttctgaaggtgacgcagtaactttaggcattagacctgaacacttagtagtcaatggtgactcagatggttcttgggaaagtaaagtgttcgttgttgaaaaacttggtgacgtcacttatctatacctcgaaaaagatggagagccattagttgctgaagctgaaggtcattcagatatcaaagttggagatactgtcaaagttgggttccctgctggtagatgccaattatttgatagttcaagtcaggcttttaaataa

SEQ ID NO: 268872 - DNA, 370 bp, Unknown
  Bacterial polypeptide expressing nucleotide sequence isolated from the Sargasso Sea
atgtcaaaaaatgattctttcgtaaaatttgataaagttgacaagagttatgatggaaaagttttagtagtaaaagatttaaatttagatattgctgaaggtgaattcataactatgcttgggccttcaggttctggaaaaactacctgtcttatgatgcttgcaggatttgaaactcctacaaatggagaaatttatttagattcaaatccaatttcaaatattcctcctcataaaagaggaataggtatggtttttcaaaactatgcgttatttcctcatatgactgtttatgaaaatttagcttttccattaaaagttagaaaaatttcaaaagaagaaatagataataaaattgacaaggcgcttt

SEQ ID NO: 268873 - DNA, 609 bp, Unknown
  Bacterial polypeptide expressing nucleotide sequence isolated from the Sargasso Sea
cctcgattggaatgcttttagggctgataacaccaacagagggtaaaattttaattaataacaaaaatcttaatgattataaaagaaacgaaattctgtctcaattaaattttgcctctccttacgttgagcttccaaaaaaacttacggtaaaacaaaatctccaaatttacggaagattgtatggtgtaaaaaatttagacgaacgtataaacgaagtttctagtgatttagatataaaaaagttttttgagagaaaaacaggtgagctttcttcagggcaaaaaaatagagtcgcattagcaaaatctcttataaataaacctgcaatacttttactagatgaacctactgcaagtttagatcctgatataggtgattttataaggagttatttacaagagtataaatctaaaaatgaagttactattttattagcctcacataatatgaatgaagttgaaagactttgtgactccatcataatgatgaagagtggaaaaattgttgatcgagggacttgtgagcagctgataaaaaagcatgggagaaataatttagaggaaacttttttgaaattagtaagggactctgatgaatttcaataag

SEQ ID NO: 268874 - DNA, 862 bp, Unknown
  Bacterial polypeptide expressing nucleotide sequence isolated from the Sargasso Sea
catggctcatgacgagcgcctagtacctatcagagagataaagacaaaggttacggctctaacccaggaaaatataactagctcaaaaaaggacgaccctcttctacttagtgtgcgcaatctaagaaagacctattatacacgcaagaaaagcctctttagccggtctgcgaggcacagcatcccggccgttgcaggcgtgagctttgatgtgccacgaggcacttgtgtcgggctggtaggtgagtcaggctgcggaaaaactaccaccagcaaaatgataatgcgggccgttactccagatactggtgagatcgtcctaaatgactctggcaagacaataaatgtacttggactaaagaagcgagatgaacttttgcgttataggagaaaagtgcagtacatcttccaggacccatacagttcactgaacccacggatgaccgtctttgacatcataagcgaaccgctattaatacacgatgtcggcacaaatgagacgcgcgcaagtagagttcgggagcttatggatcttgtggggttaccagtgaagtacttgcgccgttacccccacagcttttctgggggccaaaggcaaagaattggtatagcgcgggctcttgcacttcagcccgacctgataatatgtgacgaacccgtttcagcactagatgtttctatacaggcgcaggtcctaaacctactaagagacctcaaaagtgagcttggcttgacgtacctcttcatctcacacaacctagcagtggtggattatattgccgatcacgtaattgtgatgtgtgctggccatatagttgaatctgctccaaggtctatcttttttaaggacccaaagcacccc

SEQ ID NO: 268875 - DNA, 709 bp, Unknown
  Bacterial polypeptide expressing nucleotide sequence isolated from the Sargasso Sea
aatgccttctttaaaagatttaaagattagaataaatacagttaaatcgacgcagaaaataacttctgctatgaaaatggttgcgtctgcaaaattaaagcgagctcaagaaaaagccgaatctggaaggccatatgcaactaaaatgagcagcatagtatctacacttgcatcaaaagttaattctgagagtggtccaaaattattgtttggcaataaagaaaataaaagagttttacttgtagcaatttctgcagatagaggcctttgtggcggttttaacaacaatatatctaaagaaataagaaaaagagttaatgatctcaaaaaagataataaagaggttaagttaatattagttggcagaaaagttggcacagtcttaaaacgagaaatgggagatcaaataattggctcatttaccgggatacagggtgataatttatcattttcaaaaatatctccaataactctacaaattatttcattgtttgaagatgacaaaattgactgtgtggaaatgtattataatcgttttaggtcggtgatctcccaagttgtaactaaaaaacaactcatacctgctgacgttaatacagagactccagataatgttgaagaaagtacatatgagtatgagccagaagaagaaatgattttagatcacttgctaccaagaaatttatcaacacaaatttatagtgcatta

SEQ ID NO: 268876 - DNA, 844 bp, Unknown
  Bacterial polypeptide expressing nucleotide sequence isolated from the Sargasso Sea
ttgaacgaagtgtacgaacgcttggacgaaatcgaagccgactcggcgacagcgcgcgccggacaaattttaggcggtctcggctttgatcccgaggagcaactcaaggcgacgaaagatttctccggtggttggcgtatgcgcatcgcgctcgccgccgcgctgttcatgaagcccgatctgttgctcctagacgagcccacgaaccacttggatgtccacgcgttgacgtggttggaggaatttttacgcaagtgggagaaaaccgtcctcatcgtctcgcacgatagaggtttcctgaacgattgtacgaccgcgactgtgtttctacaccacaaaaagttgcgttactacggtggttcgtacgacaccttcctcaaggtgcgcgccgagcacagagccaacgaggaggcgattcagcgcaaccaaaatctccgcgaggcgtctctcaaacaattcatctcgaggttcggtcagggtcacaagaaaatggtgcgtcaggctcagtgtcgcatgaagatgctagaaaagttgcagagcgaacgcgtggacgtggattacgacgacccttacctgcgcatcaacttcccgtcggcgtctccgttgccgccgccgtgcatctccgtcatgaatgtcgcctttggatacgagggctatcaaacgctttatcaaaacttggactttggtttagacatggacagtcgcgtcgccatcgtcggtccgaacggggccggtaaatccaccttcttaaagcttctggagggtgacatcttacccaccgaggggtggatcaatcgtcacaccaagcttcgcctcgcgcgcttttcccagcaccacctcgaga

SEQ ID NO: 268877 - DNA, 696 bp, Unknown
  Bacterial polypeptide expressing nucleotide sequence isolated from the Sargasso Sea
attgcttaaagctgataatataactcttcattatggctcatcccagatattacatggtgtctccataatagcaaacgtaggacagattacttgcatcatgggttcaaacggggttggcaagacttctttattaagagtactgtctggcagtcatctcagtagcggcggcagctatcaactcgatggagaggaggtgtctaagtatcgagctgataaactggcgagattaggagtggcatatgtcccacaagggcgtttgattttcccaatgttgacagtgcgtgaaaatctgcagacaggcttcgcctgccttagccgagacgaacatgtaatttccgatgacatatataatctgtttccagtgcttaaaactatgcttgatagacggggtggagacctctccggtgggcagcaacagcagttagcgattgctcgagcactgataacaaagcccaggtttttgctacttgatgagcctacagagggaattcagcccaatattattactcagattggagaggtgatagagttccttaagtcacagaaaaaaatagcgataattttagttgagcagtattttgattttgcttatcgtctctcggacaatatctatgcgatgacgcgcggacagattgtccatgacagctgcaagtctagaattaacgagtctgagttgcgcaaactggttggggtata

SEQ ID NO: 268878 - DNA, 170 bp, Unknown
  Bacterial polypeptide expressing nucleotide sequence isolated from the Sargasso Sea
aatgagtaaaattattgaattaaaaaatgtaaacaagtggtttgataaatttcaagctttaaaagatattaatcttgaggttaatcaacaggaaaaaatagtaatttgtggtccttcaggttctggaaaatctacactatttagatgtattaatagattagaggaacatc

SEQ ID NO: 268879 - DNA, 437 bp, Unknown
  Bacterial polypeptide expressing nucleotide sequence isolated from the Sargasso Sea
tttatttaaatctgtaattaaatcaaaatctcaaaagaaatatgaagaaaatctgaaagacaaagctaaaaacataatggaagatctaaacatcttgcatatggcagattcttatgcaagagaactttctggtggtcaaaaaaaattacttgaattagcaaggtcaattattaatgaacccgaaatactgttattagatgaaccattagctggagtaaatccaaaattagctgaggatattttgtcgctcataaaaaaactttcaaatgaaggtataacaatattgatggtagaacacaatattgaagcagtaatgaaaatctctgaaaggattgttgttctagctgaagggtcgctaattgcagatggaaacccaaatgaaattagaacagatagaaatgtaatagaagcatatttaggaaaagataatgactaaa

SEQ ID NO: 268880 - DNA, 567 bp, Unknown
  Bacterial polypeptide expressing nucleotide sequence isolated from the Sargasso Sea
aatgaaaattgaagtctctaacctgcacaagagctattacgatggagaaggtcacaaacttcatattttaaagggacttaattttgaaataatttccggttctactgctgcaattgttggagcttcaggtacagggaaaagtacatttatgcatacgcttggaactctggaaagcatcgaccacgggaacttgtatcttgacgaaaaagacctgacgagttttacgcgtaatcaagcagcaaaatttcgtaatgagtcaattggctttatcttccagttccatcaacttttaaatgatttcaacgctcttgaaaacgtaattattccaggattaataaatggaggtaccactgggattgttaaaaaaaacgctattaatctgctggaaaaagttggtttagctgagcgagcatttcataaaccatctcaactctccggaggagaacagcagcgagttgctattgcacgggcattaataaacaagccccgtattgttctagctgatgaacctaccgggaatcttgatgaagaaacaggagtgcaggttatggatattcttcttcgact

SEQ ID NO: 268881 - DNA, 536 bp, Unknown
  Bacterial polypeptide expressing nucleotide sequence isolated from the Sargasso Sea
tattgcttttatatttgttacacatgatcaagaagaggcacttactatgtcagataaaattgtagttatgaatcatggaaagataatacaaacaggtacaccaattgaaatttatgacaaacctcttagtaaatttactgcgcaattcataggtgagagcaatttttttgaaggtgaaattattgaaagaaataaaaaaattaaaattaaaactcattattcaaatattttatatttagagaattcaaatcaattcaatttttcagacaatcaaaagttaaatattttgttaaggcctgaagatttatcactgtatccttataattcttatgaagattgttttatagaaggggagattaagcaaatattttttctaggaactgattttaagattttattaaacattgacaaagaaaaaattatacattgtattttgagagactctgtcagaaatgaaataaataaatgtaaaattgggaataaaataaaattattttataatccgtcttcattaagagttttaaatgataaataag

SEQ ID NO: 268882 - DNA, 566 bp, Unknown
  Bacterial polypeptide expressing nucleotide sequence isolated from the Sargasso Sea
tttggataaattcaatagaacattaatcagaattaagcctgaaaaaaatatcaattgtttaccaatttttattaaagacttaactcttattttggataatagaaaaatattgtctagtttaaatctttctatcaattcaaataatgttacggttattatgggtccaaatggtgcaggaaagagccttttcttaaaaattttaaatggaattttaacacctacatcaggatgcattacatggaataataaaaaacaattttcagatacattaaatacgcaagcttttgtttttcaaaaacctatcctgcttagaaggtcagttattgcaaatttagattatatggatagtgttcttggatataagaagaaaattagtaaagacagattattagaaattgtccaacttaaaaagcaaaaaaatcagccggccagaatgctttcactaggagagcagcaacgtctttcacttgtcaggtcattaatgctacgtccaaatttattgcttttagatgagcccacggcaaatcttgatccggcttcaactaaaattatggaggatataattt

SEQ ID NO: 268883 - DNA, 864 bp, Unknown
  Bacterial polypeptide expressing nucleotide sequence isolated from the Sargasso Sea
attggctttgatccgatcaaaaacgacagcgcactgcacgccgtgctcggttacatgccgcagaaattcggtctgtatgaggatctcaccgtgatggagaacctcaacctgtacgcggatttacgcagcgtgacgggcgaggtacgggaaaaaacctttgcccgcctgctggagtttacctcgctcggcccgtttaccgggcgtctggcgggaaaactgtccggcgggatgaaacagaagctggggctggcctgtacgctggtcggcgaacctaaagtgctgctgctggatgaacctggcgtcggcgttgatccgatttcacgtcgcgaactgtggcagatggtgcacgaactggcgggcgacgggatgctgatcctgtggagcacctcctatctggatgaagccgaacagtgtcgggacgtgctgctgatgaacgaaggcgaactgctgtatcagggggagccgacccaactgacgcaaaccatggcgggacgtagttttttgatgcacagcccgcaggaaaacaaccgtaaactgctccagcgggcgttaaaactgccgcaggtcagcgacggtatgatccaggggaaatcggtgcgtctgatcctgaaaaaagaggccacggcggacgacattcgccatggcaacggcatgccggagatcgacatcagcgagacggcgccacgcttcgaagacgcgtttatcgatctgctgggcggtgccgcgacctctgaatcaccgctgggcgccattctgcataccgtagagggaacgcccggagaaacggtaattgaagcgaaagcgctgaccaagaaatttggcgacttcgccgccaccgatcacgttgattttgccgtccagcgc

SEQ ID NO: 268884 - DNA, 389 bp, Unknown
  Bacterial polypeptide expressing nucleotide sequence isolated from the Sargasso Sea
tatgagtcaaattactatgcaacctgccgatgcgatgattacgctcgaagatgtgaataaatggtacgggcaatttcacgtacttaaagatattaaccttaaggtaaagcaaggggaacgcatcgttctgtgcggcccttccggctcagggaaatccacgactattcgttgcattaatcatctggaagagcatcagcagggtcgtatcgtagtggatggcatcgaattaaacgaagatattcgtaatatcgagaaggttcgccaggaagtggggatggtatttcagcacttcaaccttttcccgcatctgacggtactacagaactgtacgctggcaccgatctgggtgcggaagatgccgaagaaggaagccgaagcgctggccatgc

SEQ ID NO: 268885 - DNA, 736 bp, Unknown
  Bacterial polypeptide expressing nucleotide sequence isolated from the Sargasso Sea
atgccaaattcaattgaagtcataaatctaacaaaaacttataaatctaaagaagctgtaagaaatataaatttcaaaataaatgaaaatgaaattgtagggctgcttggtccaaatggatgtggcaaaactactacgataggaatgatacttggtttactaaaaccaactagtggaaaagtcttaataaatggaatgaatcttgaaaaaaataaaatctctcttcttcataaaatgaattttatttcaccatatattgaattacctaaaaaacttaaagttaaacaaaatttgatagtatatggaaagttatacaacataaaaaatttaaatgaacaaattgattatctgtccaacaaattaagattaaatgaacttttggataaagttacaggagaactctcttcaggacaaaaaaacagagtcagtttagctaaagctttaatcaataacccttcagtacttttactagatgagcctactgcctctttagatcctgagactggtgattttataagaacatttttagaaaattataaaaaagaaaaaagaatatcagttctactagcttcacataatatggatgaagtgaaaagattatgtgattcaatactattaatgaaagatggtttgattctagatagcggtacaccagataatttaattaaaaaatatggaagaaaaaatctagaagaagtgtttttagaaattataagaaataaaaatgaattttaat

SEQ ID NO: 268886 - DNA, 903 bp, Unknown
  Bacterial polypeptide expressing nucleotide sequence isolated from the Sargasso Sea
caatgcctcctttgaagtttcaaaaggagaaatgttggttgttatgggtttatctggctcaggaaaatctacactattaagatgcatttcaagattaacagatgcaactggtggaaaaatttttatagaaggtcaagatttgctttcattaaaagaaaaagaacttattgaacttagaaggaacaaaatgggaatggttttccaaagttttgctttacttccgcataaaacagttttggaaaacattgcttttccgcttcaaatcaaaggtatagagactgaaaaaagtatcaataaagctatggacatggttaaacttgttggtcttgatggtagagaaaattattttccaagagaactttcaggtggacaacaacaaagagtaggtatcgctcgatcattagctgtagaacctgatatttggtttttagatgaaccattctctgcacttgacccattaattagaaaagaaatgcaagatgaatttttaagacttcaagaaaaattaaaaaaaacaattatgtttataactcatgattttgatgaagcattaaaacttgctgatcgtatagcaattatgaaagatggaataattgaacagttagacactccagcaaaaattgttttaaatccagcaactgaatatgtaaaaaaatttactgaagaagtgccaagagaaaaagttttaataatagaagatgtaatggatgcgccaacctcagaaaatttaagcgatctaaaagtttcaaaagacgaaataatagaaaatgtagctgaaaagattttatcacaagaaaagtctgtaggtgtaactgacgaaaataataaaattgttggtacagttcaccccttcaaaataattcatactgtttttggaggaagaaagaaacagttagatcatgg

SEQ ID NO: 268887 - DNA, 334 bp, Unknown
  Bacterial polypeptide expressing nucleotide sequence isolated from the Sargasso Sea
cgtctctcgattgcccgtgccctggtcaaggactctcctatcctcatccttgatgaggccacctccgccctggattccgagtcagaaatcgaagtccagcaggccatcgaaaacctgatggaaaaccgcaccaccgtggtcatcgcccaccggctctccaccatccgaaacgccgaccggatctgtgttatggaagaaggaaggattgtcgaggaagggacccacgaggaacttctactcctcgaaggacgctacagccaacttcatgccctccagttccgcagcgaaaccgaagaagaactaggccattcaggaaattatcttgtttcctaaa

SEQ ID NO: 268888 - DNA, 938 bp, Unknown
  Bacterial polypeptide expressing nucleotide sequence isolated from the Sargasso Sea
tatgacagtgggtgaactttccgctttccttttttatgccgtaatggcaggcggcagtgtggccacaatcagcgaagtcattggtgaagtacagcgaggtgttggtgcaagtgagcgtttgtacgagctattcactactgagcctgctattcgctctttgaatgctgacactgctgaagcctctgctccttcaacgtactcagcattaaaaggagcaagcactaaaccgataatctccaaagcggcaccaaaaatagaactggaaaatgtcagctttgcttaccccaacagcaaacctttgtttaataatttgaacattaacattcaagcgggagaacgccttgctttagtgggggcaagtggagcaggaaaaacaacgctgtttcaattattaatgcgcttctacgacccaagtgcaggacaaatactgttcaatggagcaccaatcaacaaaatgcctgtagatgttctgcgccaacatattgccatagttacccaagagcccgtggtatttgctgataccgtgttggaaaacattcgctacggcagcccacatgcaagtgacgacgcagtaataaacgcgtcgaagcaggcatttgcccacgaatttatcgataacctagatgagcgctataacacacagttaggcgaacgaggcgtaaaactttctggcggtcaaaaacaacgtattgctattgctcgcgctattttggctgaccgcccaattttactccttgacgaagcaaccagtgcgcttgatgcgatgagtgagcgtatggttcagcgagccatagataggcttatggtgggcaaaaccagtatagtcattgctcaccgacttgcgacagtgcagcacgccgatcgcatattagttatggataaaggacaggttgtgggtagcggcgatcacgcatcgttaatgaaaagcgataccttgt

SEQ ID NO: 268889 - DNA, 634 bp, Unknown
  Bacterial polypeptide expressing nucleotide sequence isolated from the Sargasso Sea
tttggaggttcaatcattgagaaagtattttccaatacgcaaagggtttattaaaaaaactgtaggacatgtgaagtcagtagatggaattaactttcacattaatgaaggtgaaacccttggattagtgggtgaaagtggatgtggaaaaacaaccacagcacgttgtattctcagagcaatgaaacccactgaaggaaaaatccagtttaaaaccactgatggttcacatacagatttagcaactttgaaagaagatcaaataaggagtttaagaactgacattcagatgatttttcaggacccgtttgcctcattgaatccaagaatgaatattctggatttaattggtgaaccaatgctggtaaatggtttgacaaatcgaaagcaaagaacagaaaaagtagcagaattactgaaaatggtaggtttgcgtcctgagtatatgcaacgttttcctcatgcatttagtggtggacaacggcaaaggatagtaattgccagggccttggctttaaaaccaagactggttgttgctgatgaaccagtatctgctttggatgtttcagttcaagcacaagtattaaatctaatgttagaattacaacaaaacttaaaccttacttatttgttt

SEQ ID NO: 268890 - DNA, 234 bp, Unknown
  Bacterial polypeptide expressing nucleotide sequence isolated from the Sargasso Sea
aaaggaaaattgtaaaatctctaattcccagacacttaaatgtacaagtttggaaatatttattagaatcatatgccagcgagcaagctgcaaggatggttgccatggaaaatgcaactagtaactctgaagatatgattaaaaatttaacgttagaatttaataaagcaaggcaagcagcaatcactacagagatgttagagattgtaagtggagccgaagcacttaaataat

SEQ ID NO: 268891 - DNA, 235 bp, Unknown
  Bacterial polypeptide expressing nucleotide sequence isolated from the Sargasso Sea
catgagtaagaatgctatcatttcatttcatgacgtcaccaagtcattcggagatgtaaaggcagtaaatagcgtttgtttcgaaataaaacgtggtgaattttttgcacttcttggcccttcaggttgtggtaaaacaacactactgcgaatggttgctggttttgaaattccagattcaggggagattgcaattgataatcaactcatggctggaactcctccaaatctaagg

SEQ ID NO: 268892 - DNA, 703 bp, Unknown
  Bacterial polypeptide expressing nucleotide sequence isolated from the Sargasso Sea
ttcgacaagacgggcaccctcaccagcgacgagatggaggtgctcggcgtcgccggcctcgcctcctcctcctccgcctcctcctcctcctcctcctcctcctccgccgccgccgccgccgccgccgcctcccccgtggactcggggctggtctcggcggcggcggtgccggaggagacgagcctcgtgctggcgggctgtcagcagctcgtactcgtcgacggcgagctgctcggcgatccgatggagcgcgcggcgctgcaggcggcagggtggctctttgcgtcggaaggcgtctgcgtctgccgcgacccgggcaggcgggcgcagctgcggatcgtccagcgcttccccttctcctccgagctccgccgctccgccaccgtcgccgccgtcgagaggaagcaaggcaagcagggcgggctctcgtcggcgctgctcggcggccctccgccgccgccgccgccgcagcatgtggtcttgtgcaagggagcgcccgaagtgatgcgcgctctgttggcggcggtccccgagggctacgatgacgcctacacccaccacgtccggctcggccggcgcgtcctcgcgctcgcttccaagccgctgccctcgcacgacgtgctcgcccggcagctgagccgcaccgaggcggagcagggcctccgcttcggcgggtttctggtgctccactgcccgccaaagc

SEQ ID NO: 268893 - DNA, 526 bp, Unknown
  Bacterial polypeptide expressing nucleotide sequence isolated from the Sargasso Sea
ctgccatggaagacggtgaaggagaatatcacctttgcgttgatgaatggcggcaagacgaattcggcggcggaagccaacgatatcgccatggaatacatccagaaggtgaagctggaccgcttcgagaatacgtatccccatatgctgtccggcggcatgaagcagcgcgtggcgatcgcccgcggcatggccatggaaccggacatcctgctgatggatgagcctttcgcggccctcgacgcgctgacccgtcgtcagatgcaggaagagctgttggaactttgggacgagacgcgcttcaccgtcctgttcgtcactcactccattgaggaggcggtgatcgtcggtagccgcatcctcatcatgtcgcctcatccaggtcaggtaaaggcggagctcaacgcacacgaccaatcacacgcgacgatcggccaggacgatttcgccgagcttcagaacaagattcacaatatgatttttgccgatcgcgtcctcgaagacgaggcaattccgcatgcctagc

SEQ ID NO: 268894 - DNA, 921 bp, Unknown
  Bacterial polypeptide expressing nucleotide sequence isolated from the Sargasso Sea
taataatgcttcttttgaagtttcaaaaggagaaatgttagttgtaatgggattatctggttcaggaaaatctacattattaaggtgcatctctagattaacagatgccacagatggaaaaatttttatagaaggtcaagacttgctttcattaaacaacaaagaattaattgaactaagaagaaataaaatgggaatggtttttcaaagttttgctttactcccacataaaacagttttggaaaatattgcttttccacttcaaattaaaggagttgaaacagaaaatagtattaataaagctatggacatggttaaacttgttggtcttgatggaagagaaaattattttccaagagaactttctggcggacaacaacaaagagtaggtatagctagatcactagctgttgaaccagatatttggtttctagacgaacctttttcagcactagacccactgattagaaaagaaatgcaggacgaatttttgagacttcaagaaaaattaaaaaaaacaatcatgtttattactcacgattttgatgaagcgctaaaacttgctgatcgcatagcaattatgaaagatggaataattgaacagttagatactcctgcaaaaatagtattaagtccagcaactgagtatgtaaaaaaatttactgaagaagttcctagggaaaaagttttaataatagaagatgtaatggatgcacctacagcagataatctgagtgatctaaaagtttcaaaaaatgaaataatcgaaaatgtagctgaaaagattttaagtcaagaaaaatccgtagctgtaactgatgaaagcaataaaattgtaggaactgttcatccttcaaaaataattcatactgtttttggagggagaaaaataacgattaaaatatggaatttattaaataa

SEQ ID NO: 268895 - DNA, 487 bp, Unknown
  Bacterial polypeptide expressing nucleotide sequence isolated from the Sargasso Sea
atggcattttttgaaggaaataaaatgactggtggttatggagatggtccagatataattagttcttgtactatcgatgttaacaaaggagaaattgtagcaatcttaggacctaatggggcagggaaatcaactgcaatgaaagctatgcttggattgcttaatcttaaatctggaaatgttttaattgaaggagaagatatttcaaaattgtctcctcaagaaagagtgaaaaaaggtatttcatttgtccctcaaacaagaaatgtatttgcagaattaactgtcagggaaaacttagaagttggagcatttttaagagaagacgatgtattaaaagtaattgaagaaatatatgatttatttccaattttaagagataaaaaagatcaagtagttggtcaattatctggaggtcaaagacagcaagtagcactaggaagagctttgatgattagaccgtctgttttgatgttagatgaaccta

SEQ ID NO: 268896 - DNA, 295 bp, Unknown
  Bacterial polypeptide expressing nucleotide sequence isolated from the Sargasso Sea
aaagtttccggaggacagcatcaaagaattggaatagctagagctctttacagaaaccctaagatatttgtaatggatgaagctacaagtgctttagattacaaaactgaagataacattatgagagatctgaacttgaaaaacactgatttaacagcaattatagtaagccatagatctagagcagttaaaaactgtgatctaatttattatttagaaaatggtagaattaaagattttggatcattcaataatctttcaaaaaaatataaaaaattgaaattaagaaactaat

SEQ ID NO: 268897 - DNA, 321 bp, Unknown
  Bacterial polypeptide expressing nucleotide sequence isolated from the Sargasso Sea
aatgtctgatccaataataaaaattcaaaatatgaataaatggttcggtgattttcaagttttaaaaaatataaatcttgaggttgaagcaaataaaaaaattgttgtatgtggtccatctggctcaggaaaatctacactgattagatgtattaatagattagaagagcatcaagagggtgatataattgttgatggaaatgaattatcagaaaaaacaaaagatattgagaaaataagagctgaagttggaatggtttttcaacaatttaatttatttccacatctttcaatattagataattgtacacttgcaccaat

SEQ ID NO: 268898 - DNA, 710 bp, Unknown
  Bacterial polypeptide expressing nucleotide sequence isolated from the Sargasso Sea
cgacgtgtctttcaagctcgagggcgggcagacgctcggcttggtcgggtcgtcgggctgcgggaagtccacggtgatgcgcctcctcctgcgcttctaccggccgtcctccggctcgatcaccatcgacggccaggacatcgcccgggtcagcggcgcctcgctgcgccgcctcttcagcgtcgtcacccaggacgcccagctcttcaacggcagcatccgcgagaacatcgcctacgcacgcagcggcgccggcgacgccgagatcctcaaggccgcgagccgggcggagctcgccctcgacgcggagggcagcgacctgcgcctcgacaagccctgcggggagaagggcgccaagctctcgggcggccagcagcagcgtgtcgccctcgcgcgggccatgctcaagaacggcaccatctacctcctcgacgagcccacgaccggcctggacggggtcgtgagcaagcagatccagaaaacgctcgacagcttctccgcgaacatgacgacgattatgattacgcatcatctcgaggacttgaagcacgcccacgccatcctctacctcgactcggggaagattatcgagcgcggcacctttgacggcctccttgcccagggcggcaagtttgcggagcaggtggaggcgaggaagcggggcggaggctctaccgaaagcggacctactaatatcctccatctgtaga

SEQ ID NO: 268899 - DNA, 593 bp, Unknown
  Bacterial polypeptide expressing nucleotide sequence isolated from the Sargasso Sea
ggtatggtttaggaaaaagttacggccccctctaaagccttaccaaatagcatatcaaggtgtagccagaacattccaaaatatcgcactatttaaaggtatgtctacgcttgataatattatgactggaagatttactcatatgacgtcgggcgtagctgctcaggctgtttggaaaggtcctgcagaacgtgaggaaatcagaaatagagaaaaagttgaacaaattattgattttcttgagattcaaaaaatcaggcgaactgaagttggtcgtttgccatatggattacaaaaaagggtagaattgggtagagctcttgcagctgaaccaaagctattattactcgacgaacctatggcgggtatgaacgtagaggagaaagaggacatgtctcgtttcgttctagatgttaacgaggagtttggtacaaccgtcgctcttatagaacatgatatgggagttgtgatggatattgctgatagggtagtagtaatggactatggaaaaaagattggggatggtacccctgcagaggtgagaagcagtcaggtcgtcattgacgcatatttgggtgtcagtcatgagtgaa

SEQ ID NO: 268900 - DNA, 433 bp, Unknown
  Bacterial polypeptide expressing nucleotide sequence isolated from the Sargasso Sea
aatgttctggaaaaggtatcctgcaattaagagaaattccgctaattatggaaaaattgaacttgaaaatgttcatgtttcttttgatagtaagaacataatattgaatgactttgttttaaatattgataaaggtaaatatgtttctatcttagggactagcggaattggaaaaacaacattattgagagcaatatctgggtttaaaagaatcaattcaggctatataagaataaatggacaactagcttcttcaggtttttcacatatgcctccagaaaatagaaatttaggatttgtttttcaggattatgcattatttcctcatttgaatgtatttgaaaatgtaggatttggattgggaaggaaagttaaggatagaaaaataaaaattcagagtattatagaaatgatagatttaaaaaaaccatga

SEQ ID NO: 268901 - DNA, 274 bp, Unknown
  Bacterial polypeptide expressing nucleotide sequence isolated from the Sargasso Sea
atgattataaaacttaaacaagttactaaaaattacggtaatgtacaaggaatttcaaacataaatttagaagtcaacaagggtataacgggaatactaggtccaaatggagccggtaaatcaactacaatgaaaataattttaggattatctagaccatcaaggggtagagtaacagttgatggaaggaatccctttgacgattgggagttaaagaaagattttggctttgtccctgaatatgactgtttttacgaacatatgtctggtttag

SEQ ID NO: 268902 - DNA, 877 bp, Unknown
  Bacterial polypeptide expressing nucleotide sequence isolated from the Sargasso Sea
taagattgagaacaaaggaaatgtaactctaacaggattaaccattagcgatacacttaccgacggcaatggaggatcacttacattaaacaatggtccttcatatgattcgaccacgttaggatcatcacctgggacgcttaaggtaggagaggtgcagacttatacagcactgtatgtgatcactgcaccagtggttaggaccccaagtgtcatcaacagtgctgttgcaacggctagcagtacaagtgctcttgtttcagataccagtgatgatggtaacgatgatgatggcaacactgtagatgatccaacggttgttaatatatctccagacccatcaattgaagctgtaaaaactgctacggtcagcgatgttaatgcaaatactcttaatgatcctggagatattatcacctatacgatagtcgttgttaatacaggcaatgttactctgacaagtattaaccttgcagatacgatgaccgataacaatggcaatgcacttagccttgatggtggtccaacatttgtttcttcaagtggttcttcagtagcaggcacactagcctctgcagagagcgcaacttatacggcaagctatacaatagcaccaggagctgcattctccggagcaattaaaaacagagttttagttacaggaagtagtcctgggaacacaggagatgtaactgactttagtgataatggcaatgacaatgacgggaatatttacaacgacttcactgtagttcagacttcagctgaggcttcaataaatgtgataaaatcagcaacggtgagtgatgttaatgcaaatagtttgacagatgcaggggatatcatcacttatacgattgtagtttcaaatactggg

SEQ ID NO: 268903 - DNA, 343 bp, Unknown
  Bacterial polypeptide expressing nucleotide sequence isolated from the Sargasso Sea
caacacccaagtagactttcttggaggtcaacaacaaagagtagcaatagcaagagctcttgctatgagaccaaaagttatgcttcttgacgaaataacatctgcacttgatccggaagtagtaggtgaagttttaaatgttattagatctttaaataaagaacataatttaactatgattatggttactcaccaaatgggatttgctagagaaatttcagatagagtttgtttttttaatgagggcaaaatatttgaagaaggacccccagagaaattatttggcgatccacaaaatgagagaactaaacaatttcttcatgctgttcttgatgcaaattag

SEQ ID NO: 268904 - DNA, 182 bp, Unknown
  Bacterial polypeptide expressing nucleotide sequence isolated from the Sargasso Sea
gatactttttttagacgagcccacatcagctctggataaagaaaatacagaaattgtcttagaattaattaaatctaagcttaataaaaatgtagcaataatcactatcatacatgatgcaaccattagaaatcaaatttgtaccagggagtttaatttagaaaattttacagaagtatgat

SEQ ID NO: 268905 - DNA, 280 bp, Unknown
  Bacterial polypeptide expressing nucleotide sequence isolated from the Sargasso Sea
gagagctttatgtatggaaccaaagattatgttgtttgatgaaccaacatcagcccttgaccctgaaatgattaaggaagttttagatgtaatggtcaatttagctaaccaaggtatgacgatgatcgtagttacgcacgaaatgggctttgctaaagaagttgcagataaaatgatctttatggatgaaggtatgatagtagaaaaagctgatacaaaagagttttttgctaatccaaagagtgatcgtactaagcttttcttaagccaaatcttataa

SEQ ID NO: 268906 - DNA, 586 bp, Unknown
  Bacterial polypeptide expressing nucleotide sequence isolated from the Sargasso Sea
ccgcgaggtgaatcagccgggaccagaacgcgcggtggtatttcagaaccacgcattgttgccttggctgacctgctatcagaacgtggaactggcagtaaagaccgtgttcaagggccgcaagaacaagcgggagatgcgcgagtggatcgagcacaacctcaaactggtgcacatggatcacgccatgcacaagtatcccgccgagatttccggcgggatgaagcaacgggtagggatagcaagggcgttggcaatggagccctcagtgctgctcatggatgagcccttcggggcgctggacgcgctgacccgagcgcacttgcaggactcggtcatggagattcaggccgatctgaacaacacggtgatcatggtgacccacgatgtcgacgaagcggtgctgctgtcagacaagatcgtgatgatgaccaacgggccggcggcgactgtgggagaggtgctggaggtggacctggcgcggccgcgggaccggctggcgctggccagtgacgagcgctacaaccacttccgctcgcaggtgctgagttttctgtacgagcgtcagcggcgcccggtggagtaa

SEQ ID NO: 268907 - DNA, 316 bp, Unknown
  Bacterial polypeptide expressing nucleotide sequence isolated from the Sargasso Sea
aatggttaaagctaataaatcaaaaaacaatattaaaaactttaaaacagtctcaattaataatttgagtcacttttatggaaaaaatgagaataaaaaacaagttcttaatgacgttaatttaaatattgataaaggagagttggttcttttaaaaggaccgtctggatgcggtaaaacaactcttttaactttaattggtgctttgagaacctgtcaaagtggggatttaaaagtattaaataatcaattaaatggagcttcaaggaaaacgcgtcaggttcttagaagaagtataggaatgatttttcaaggg

SEQ ID NO: 268908 - DNA, 852 bp, Unknown
  Bacterial polypeptide expressing nucleotide sequence isolated from the Sargasso Sea
ttaacattaaagcaggggagtctcttgggttagtaggccaaagtggttgtggaaaaacaacaactgcccgatctttatgtttgctagaaccaaaaacatctggaagtgttaatttttttaatcccgaaaaaaatattatggaatcaatcgatgcaatcgatgaagatgggatgagagtttttagaagaaatatgcagatgatatttcaagatccttatgaatctttaaacccaagatggacgattaaagatattattaaagagcctcttgatattcacaatattggttctttaggcgaaagagaagaagcaatagttgaaatattacgaactgttggtttgacacctccagaaaattacttacaaagatatccgcatgaaatatctggtggacagagacaacgagtatcaattgcaagaacattaattatgaaaccgaaatttgtaatttgtgatgaaccaacctctatgctcgatgtttcaatacgtatatcaattatggatttaatgttaaatcttgcaaaagaacttgatgtgtcttatttatatataacacatgatcttgctgttgcacgatatatgtgcaatcgaatcgctgttatgtttaatggaaaattagttgaaatagcagaaactgaagagctactaaataatccaatccatccttatacaaaaagactgatatcatcaataccaataccggatccaggttacaagagagaacgttatgaagttaattatgatgaactagacaaaattatatcaagtaatccaaatgaaaaaatggtagatattggaaacgaacatttagttgcaactcacgatacgaaggatttctttattgaaacttaaa

SEQ ID NO: 268909 - DNA, 733 bp, Unknown
  Bacterial polypeptide expressing nucleotide sequence isolated from the Sargasso Sea
atgtctcaaattaaaatagtaaatttacaaaaatcatttggggattttacagcagttaaaaattccaatttaacaattaatgataaagagttctttgttttacttggaccgtcaggttgtggaaaaacaacaactcttagaatgattgctggattagaattacccacatcaggagaaatttacttgggagatgaagaagtgggaatgcttagagcgtccgagagagatattgcttttgttttccaattatttgcactttatccgcatatgaatgttaaaaataatttgtcatttccactaaaaatgcagggatatagtagagacgaaataaaaactagagttgaggaagctgcaaaacttttaagaattgatcatattttaaattcaaatatttcatcgttatcaggaggagacagacaacgtgtagctcttggaagagctttggttagaagaccaaaagcattcttaatggacgagccattaggtacattagatgcagaatttagagaattaatgtgtttagaacttaagaagctacatctagatatcggtgctactacagtttatgtaacccacgatcaattagaagcaatgtcattggcggatcgtattgcagtgatggatggtggcgaaattttacaagctgatgagccagcagtaatttacaataaacctacaacaaagtttgtagcttcttttattggttctcctggaatgaattttataaatattg

SEQ ID NO: 268910 - DNA, 652 bp, Unknown
  Bacterial polypeptide expressing nucleotide sequence isolated from the Sargasso Sea
attgcatccaattagcttcaatttaggaccaggaaaaattcttggtgttgtcggtcctaatggttcaggaaagtcaactcttttaaggctattgtatcgcttctataaaccaacttcaggattgattaaaattgatgatacgaacatctggtcagtttcaaacaaagaagtagctcgaaaagtggcagttgttttacaagaacaaccttcagattttgccttaaatgtttttgatattgtatcgcttggacgaactcctcatcgtagttggggtagtaatacaaatggaattcatgataataaagtcgtaaaaaactcattagaatatctatcacttttagagtttgcagatcgaaaatttaacactttatctggtggtgaacgtcaacgtgtaatggtagcaagagctattgctcaagaaccaagtcttttagtgctcgatgagcctacaaatcaccttgatattaagcaacagcttgaagtacttaatttaatccgaaatttacctctaactattataacttcattacacgacttaaatatggcttcttcagtttgtgatgaagttttacttttgaaccatggttattctctaggatatggaattcctaaggatattttttcagaaaaaactatttcagatgcttttgac

SEQ ID NO: 268911 - DNA, 745 bp, Unknown
  Bacterial polypeptide expressing nucleotide sequence isolated from the Sargasso Sea
aatgaataaatttcaacttttagatgatggcttaataattaataaaatttcgaagtcctatggaaataaaaaagttgtaagggatataagcatatcaatcaatagaggggaaatagttggtttgcttggaccaaacggcgcaggaaaaactacaacattttatatgattgttggtttagtaaagcctgatacaggctcaatattgttagataaaatagaaatttctaaaatgcctatttattcaagagggttacagggcattagttatttacctcaagaaccttcaatatttagaggtatgaatgtcgaggataacttactttcaattattgaaattgtagaaaaagataaaaataaacatgatataattttacagagccttctaaatgagtttgatattaaccatgtaagaaaatcaaaatctatagttttatcaggtggtgaaagacgaagattggaaattgcaagaaccttagcctcaaaaccaaaataccttcttcttgatgagcctttaacaggtattgatccagtatcaattgaagaaataaaaataattataaaaaaattgaaagaaaaaaatattggtgttttaattacagatcataatgtaagagaaacactaaaaatagttgacaaagtatatattgtaaacgaaggaatgatatttttctccggaaaccctgatgaagccatctctgatgaaagaataaaaaaattctatcttggtagtgatttttcaatttaa

SEQ ID NO: 268912 - DNA, 405 bp, Unknown
  Bacterial polypeptide expressing nucleotide sequence isolated from the Sargasso Sea
tagaatcagcaaaaaaagcaaacgctcacaacttcattcaaaagctttctcaggaatatgaaactgagataaccgaaagaggatcaaatttctcaggtggtcagatccaaaggatagcaattgcaagagcaatacttgggaacccatcaattcttctattagatgaagccacaagtgcgttagatgcagaatcagaagctgaagtacaaaaaggacttaatagagctatgaaagatagaacagttattgtaatagctcatagattagccaccactcaagaagccaataaaatagttgttttcgataaaggtgaaattattgaagaagggaaacacattgatttaataaataaacctggaatttataaagaattatgtgaaaaacaattgataaaaaaaatatagt

SEQ ID NO: 268913 - DNA, 349 bp, Unknown
  Bacterial polypeptide expressing nucleotide sequence isolated from the Sargasso Sea
atgacatcttcaacggcaacgtccgcggtgatccgtgcctctgccctgtgccacagctacgggaagggcagcatgcgtcgccgcgttctgcagggcatcaacgttgagatccagcctggtgaagtggtcctgctgacaggaccttccggctgtggcaagaccacattgttgacattgatcggtgcgttgcgcagcgtccaggaagggcaattggatgtgcttggcgttcccctgcgcggggccagtgcaggccagcgccgacgggtgcgcgaacgcattggcatgatttttcagggccacaaccttctgcgttgcctgacagctgagcagaacgtgcagatgggcgctg

SEQ ID NO: 268914 - DNA, 325 bp, Unknown
  Bacterial polypeptide expressing nucleotide sequence isolated from the Sargasso Sea
aatgcgccggcgcaagggcggcaacctctcgggcgggcagcagcagcagctggccattgcgcgcgccctggtcaccgaccccaaggtgctgctgctggacgagcccaccgagggcatacagccttccatcatcaaggacatcgccaaggcgctcaacgagatccgcaagctgcgccgcatcaccatcgtggtcagcgagcaggtgctttccttcgccatggatgtggccgaccggctgttcgtcatcgagggcgggagattggtacatgaaaccgcgcgtgccgataccgacgagcagcgcatcaagtcctacctctctgtatga

SEQ ID NO: 268915 - DNA, 730 bp, Unknown
  Bacterial polypeptide expressing nucleotide sequence isolated from the Sargasso Sea
catgacgctttgcctgaatcaggtggaactgtcctttgctggccgccctgtggtccgcggggtcagccttcagctcgatgccggtgaagtggtcgggttgctgggaccgaatggggcgggcaagaccaccacgttcaaccttgtcaccgggatgctccggccggacagcggtgatgtgctcctcgatggcgaatccatcagcccgctggccatgcccgaacgtgctcgcatgggcatcggctacttacctcaagaggccagcgttttccgcaacctcacggttcaggacaatctgctgctggctatgcatcaaagcggctatccatcccatctgcgccgcgcccgcctcgatgagctggttgaggatttccaattggaccgttttctgcatcgcaagggctttcagctctccggcggagaacgccgtcgcacagaagtggcgcgtgcgctggcggtgggtcccaacggtccgcgttatctcctgcttgatgaaccctttgctggcgttgatcccctcgcggtcaatgacctgcaacagctcatccgcagcctgcgagagcgtggcgttggcatgctcatcaccgaccacaacgtgcgtgaaacgctgtccattactgaccaggcctacatcctcaccgacggcacgatcctggcttccggcacggccgatcagttggccagtgatgccaacgtcaagcgccgttacctcggggaggatttcaggctgtga

SEQ ID NO: 268916 - DNA, 715 bp, Unknown
  Bacterial polypeptide expressing nucleotide sequence isolated from the Sargasso Sea
atggaaatagcggttcaagcggtttcacatcagtacggcggccaccacgcgctggacaatataagcctttgcctaaaacctggcttaaccatgctgcttgggccaaatggcgcaggcaaaagtaccttatttgcgcttattacgggccttcaaaaactcacgcaaggcagtattacctttgatggtgctaccctgtctcaatctcgcacaagtattatggcgaaaatgggcgtggtatttcagcaaagtaccttagatatcgacttatcagtgaaacaaaatttgtcctactttgcttcgctccacggcataagtaccactagcgcgctatctcatattcaaggcctgctcgacgagctcgatcttacgagtaagctcaacacaaaagttcgcaacttaaatggcgggcacagacgtcgggtcgagttagctcgctgccttattcacaagccatccttgctgctattagacgagcctaccgttggcttagacatagaatcccgtcatcttattttgcgggtagtacaagcactcgctcattcgcaaaacgtaagtgtactgtgggccacgcatttatttgaagaagtgaagcacaacaacaacttgatagtcttatcaaaaggacgagtgttagcccacaaccaatgtgaagccttgttagccaagtatcatcaacaagatattgagcacctttggcagcatttgatgcaggaag

SEQ ID NO: 268917 - DNA, 912 bp, Unknown
  Bacterial polypeptide expressing nucleotide sequence isolated from the Sargasso Sea
cgagcgggcgatggcgctactcgacgaggtcggcatccgtgacccacaagcggcgatgagtgccttcccccacgagttctcaggcggtatgcgccagagggtcatgattgccatggcactcattaatgaaccgaagctactgattgccgacgagcccaccaccgccttggacgtaaccattcaagcgcagattctcaaactcattgccgagttacagaccaagcgggacatcggtgtgctcttcattagccacgatctggcggtggtatcagacaccgccgatcaaatcgtggtgatggaaaaaggtaaggtggttgagagcggccaaccgaaggcgatttttgacaacccgcaacacccttatacccaaaagcttttggccgcgatcccgagtggccaaaaggcggccgatacggtgacgccagacccgctgattcgtatcgagaatctgcgcacctggtttacgccgaccggcggtgccgacccggtcaaggcggtggacgatgtctcactcgagattcaccgtagtgaagtactggggttagtgggtgagtctggtagcggcaagtcgacgctggggcgctctatcctgcggctggtgccgattaccgacgggcagatcaccttcgagggcactgagttatcagcgctggagggtaagtcacttaagcagtttcgtcaccgcatgcagatgatttttcaggacccttatgcatcgctgaacccacgcatgaccgtgtatgacacgctcgccgagcccctactattgcatgggctggtgcgcaaagccgatctggatcaggcgatccgtgagctcatggataacgtgggtctggcacgcgcgtttgtccgcaagtatccccacgagttctcgggcgggcagcgtcagcgtattgccatttggccgcgcac

SEQ ID NO: 268918 - DNA, 319 bp, Unknown
  Bacterial polypeptide expressing nucleotide sequence isolated from the Sargasso Sea
gatgccaagtcttaaagatttaagaaatagaatatcaagtgttaaatcaactaaaaaaattacatctgcgatgaaaatggtggctgctgcaaagttaaaaagagctcaaacaaatgctgaacaaacaagaccgtatgcaaaaaaaatcaaagaaatagttgatgatctttcagagaatgtgaatacaagctcgtttaaatttggtaactctgatctttctgaaaaatctaagaacattttacttatagtttgctcggcagatagggggttatgtggagggtttaatggatcaataataaaatttacaaaaaaaattgtc

SEQ ID NO: 268919 - DNA, 591 bp, Unknown
  Bacterial polypeptide expressing nucleotide sequence isolated from the Sargasso Sea
aatgataaataaaatttccaaatcctatggaaataaaaaagttgttagagatataagcatatcaataaatagaggtgaaattgttggattacttggtccaaatggcgcaggaaaaactacaacattttatatgattgtgggtttagtaaagccagataccggctcaatcgttttagataagattgaaatttctaaaatgcctatttattcaagagggcttcaaggtattagttatttgccacaagaaccatcaatttttagaggcatgaatgttgaagataacttgctagcaataattgaaattgtagaaaaagatcaaaacaagcaaaatataatattgcaaagcttgctaaacgaatttgatattaatcatgtcagaaaatctaaatcaatagttctttcaggaggtgaaaggcgtagattagaaattgcaagaacattagcctcaagaccaaagtaccttcttcttgatgagcctttgactggaattgatccagtctcaattgaagaaattaaaattatcataaaaaaattaaaacaaaaaaatattggtgttttgattacagatcataacgtaagagaaacattaaa

SEQ ID NO: 268920 - DNA, 949 bp, Unknown
  Bacterial polypeptide expressing nucleotide sequence isolated from the Sargasso Sea
gggccctctgtcgggcggcgaaaagcgtcgggttgctttatgccgcttgttactctcttccccagatatgttgctgcttgatgaaccaacaaatcatttagatgcggaatctgttagttggttgcaaagatttctccatgatttttctggtactgtggtcacagttactcacgacaggtattttttggatgaagttgctggttggatacttgagctggatagagggcagggaataccctacgaaggaaactattcgggctggttggaacaaaaacaaaagcgaatggagcaagaaggccgtcaggacgcctctcgtatgcgatctctagctgaggaattagagtgggttaaggcttccccgagagggcgtcaggccaaaagtaaagctcgattgaccgcgtatgaggaacttttggcccaaggtcaagagaaagccattgataatactaaaataatgataccagccggtcctaggttgggagatttagttattgaaactgacaagctcgttaaaggtttttcggatcagcttttaattgatgaactatcttttaggctaccggcaggcggcatagttgggataattggtccaaacggcgcaggtaagacgacgttgttcagaatgattacggggcaagaagaaccagataatggatcaatcaaggtgggggatactgtaaaattgggctatgtcgaccagtcgcgagataacctgaacccgaaagctactgtctgggaagaaatatctgatggtttggatgaaattgagttaggtaaaagaaagatgcaaagtcgcgcttattgcggcctatttaacttccgtggaccggatcaacaaaaagtagtaggccagctttctggcggggaaagaaaccgtgttcatctcgcgaagatgctaaaatcgggtgctaatcttattttactggatgagcccaccaatgaattagat

SEQ ID NO: 268921 - DNA, 568 bp, Unknown
  Bacterial polypeptide expressing nucleotide sequence isolated from the Sargasso Sea
tttttgacttttaatgtctgtggtcttaaaacaaattttgcagatcgttatcctcatgaaatgtcaggtggccagaggcaaagagtgggaattgctcgtgcccttgctatgaatccagagtttattatctgtgatgaggcggtttcggcccttgatgtctcgattcaggcgcaggtaattaatttgctcgaagatctaagggatgaatttggattaacgtatttgtttatatctcatgatttgagcgtagtgaggcatatttgtcatagagtggctgttatgtatctcggtaatattgttgagttagccgagtgtgatgaactatttgacaaccccattcacccgtatacgcgcgctttactggaggcggtaccaattcctgacccagatattgaaaatgctagggtgcataaggtggtgaagggtgagataccaagtcccattaatccgccaggtggatgcgtgtttcatccgcggtgtgaattagaggttgagacttgtagtaaaaaaatgccagaatttagagaggttcgtccaggccactgggtggcttgcacggaagtgtgat

SEQ ID NO: 268922 - DNA, 829 bp, Unknown
  Bacterial polypeptide expressing nucleotide sequence isolated from the Sargasso Sea
ttcgatctcaagcagggggagacgctggggctggtgggcgagtccggctgcggcaagtcgaccctggggcgcaccctgctcaagctgttcgagccgaccgccggcaccatcaccttcgaggggcgtgacatcacccacctctcgtccaaagagatgcgatctttgcgccaggagatgcaaatcgtgtttcaggatcctgcggaatccctcaacagccgccacacggtggggcagatcctggaggagcccttcgtcattcacggcaagggcaacgccgaacagcggcgcgtctgggtgcaggagctgctggagaaggtggggctgcccggcagcgcggtggatcgttatccccatgagttttcgggcggccagcgccagcgcatcggcatcgcccgggccatcgccctcaagcccaagctgctggtctgtgacgaggcggtgtcggcgctggatgtgtcggtgcagtcccagatcgtcaacctgctgctcaccctgcagcgggagatgaacctcgccattatcttcatcgcccacgacctgtcggtggtcaagcacatctcggatcggattgcggtgatgtatctgggcaggatcgtcgagctggccgaggcccagtcgctctacctggcgccccgccacccctatacccaggcgctcatttcggccattccggtgccggacccgcgtcggcgcagccagcgcatcctgctgacgggagatgtgccatctcccatctcgccgccgagcggctgccactttcatcaacgctgcccttatgccggcgagctgtgccgcaccaagtcgccgagcctgcagccgtgcgacgggg

SEQ ID NO: 268923 - DNA, 874 bp, Unknown
  Bacterial polypeptide expressing nucleotide sequence isolated from the Sargasso Sea
acggaaggttcgcctacggtgacagggattatcagtctcaatccgggtggggaaacatctcttttgcgtgtaacagccgcagtggaaaaaggctcgcagcatccgctgggtatggcagtagttaaagcagcacaggaaaaggggatcgcaatacccgcagtcactcatttcgatgcaccgtcgggtaaaggtgtctcaggcgatgtcgaaggtcaacgggttgttattggtaatgaactggctatgcaggaaaacagtatcgttattgataatcaaaaggccgttgcggatacgttgcggatggaaggcgctaccgttatctatgtggccacagacggggaccttgcaggcctgatagctatctcggatcccgtgaaaacaaccacgccggatgcgcttaaagctttgcgtcaggcggggatccgcattgttatgctcaccggggataaccagcttactgctgaagcagtcgcacggaaactgggaatagatgaggttgaagccggaattctgccggatggcaaaaaagcagtgataacccgactgaaagagtctggccatgtggttgcgatggccggagacggtgtgaatgatgccccggcgctggcagcggctgacgtgggtatagccatgggaacgggtacagatgtggcaattgaaagtgccggagtcacccttctcaaaggcgacttgatgatactgaacagggcccgtcatctgtcagagatcaccatgaaaaatatccgtcagaatctgttttttgcatttatctacaacgcacttggcgtgcctgtggctgcaggtctgctttatcctgtgtatggaatactgctgtcgccagttattgcggcggcggccatggctctttcctccg

SEQ ID NO: 268924 - DNA, 746 bp, Unknown
  Bacterial polypeptide expressing nucleotide sequence isolated from the Sargasso Sea
attgtcccggccagactctttaaatttatctaaatctccaattcttgaagttcataaccttgagaaggtctttcaatcgcctggaatttttaataagaataaaataatagctgtagataatgtatcatttaaagtatttaagggtgaaattgtcgcacttgttggagaatccggtagcggaaaaagtactatagcaaaattagtaactcgcatgataagaccatctgcaggatctatttacttagatggtaaaaataaaaaggttaccgagtctcgtaatgtccctctagaatatcgtaaaacagttcagatggtgttccaggatccatttggatcccttaattctatacatacggtctatcatcatttagcgagaccgttgcttagacatgggttgaaaaaacaagaggagatactttcacatattatccatttactagaaaaagttggtctcaatccaggagaaaaatttgctgagaaatttcctcacgaaatgtcgggtggtgaaaggcaacgagttgcaatagcgagagctttaagcttagagcctcaaatcattgttgcagatgagccaacctcaatgcttgatgtctcgatccgaatggatatactggaaatattcgcaaaaatgcgtaaagaaaataatttaacagttctttttatcacacatgatctggcttctgctagatacttatctgataggattctggtcttaaaaaatggatctataattgaggaaaatatat

SEQ ID NO: 268925 - DNA, 778 bp, Unknown
  Bacterial polypeptide expressing nucleotide sequence isolated from the Sargasso Sea
aatgagaggtatatcttcaaaaacaagacaaaaaaaatcattagaatggcttgaaaaattagaagttagagaacttgcaaaaagagatatttcaactttatcagggggacaaaaacaacgagtggctttagcaagatcattagtaatggaacctgaaatcctacttcttgatgagcctttgtcggcgttagatgcgcatttagtaattagaatgcaagcagtacttactcagttacaaaaagagttaggcattacttttgtttatgtaactcattcacaatcagaagcatttgcaatggcgaatagagtaataataatgaatgttggagaaatttcacaaataggcacaccaaaagacatctatagatctccaactaatcaatttgtagctgaatttgtaggaagaaacaatatacttagtggaaaggtttatgatataaaatcaaagatagcttttataaaaactaactcaggtaactacaattttgaaataatagatcaaaatataaagcttggtaatactttaaattacataatttctgcagatttaatgaatttctcattagttaaaccaaaaaattctaatatagtaaattgcaagcttatttcagaagaatatattggctcaatggtaactttatttttagaaagcgttgatggaactgaatttaaaattcaaatgcaagaaagagaacattcaaaattaaacattcaaaatggtgaaaaatattggctaagttggtcaaagaagaatgtccatactttaaaaaaggattaa

SEQ ID NO: 268926 - DNA, 850 bp, Unknown
  Bacterial polypeptide expressing nucleotide sequence isolated from the Sargasso Sea
tcaacattagttagacatattaatagacttctagaacccacttctggaaaaatactaataaataatcaagatgtaatgaagtttgataaagaaaacttgcaaaaattaagaaataaaaaaataggaatggtatttcagaattttgctttaatgcctcataggtcagttttagataatattgcaatgcctttagaaattagaggagtaagtaaaaatgatagattggatgcagcaaataatattttaaacattgtagaacttcaaggttggggaaacaaatatgctcacgaactatctggaggtatgcaacaaagagtaggtttagctagggcattagccgctgatccagagtttttattaatggatgagccttttagtgctttagatcctttgataagaagacagcttcaaacagaatttatcaaactttcaaaaaaaatgaaaaaaacaactgtctttataacacatgatttagatgaagcggttagagtaggacatagaatagctataatgagagatggagcggtggttcaaattggaacacctgaagaaattgtagttaatccagcagatgaatatgttgctgattttgtaaagggaatttcaagattaaaagttgtgcaagcaaaaacaatcatgaaatctataaaagattatgaaaataaatttggctcactagataataataacgaaatagtaaacgaaaatgaagttttaagtaaattaatagaaacttcaatttcaaaagataaaccaattgttgtgtcggataaaaataatcaaaaaataggagttataagccaacctgatcttttaaaagctgtcgttgaaggaaatgaaaatgagtaaa

SEQ ID NO: 268927 - DNA, 652 bp, Unknown
  Bacterial polypeptide expressing nucleotide sequence isolated from the Sargasso Sea
ctggggggtcagcaacagaggattgcattggctcgtgcaatggctccaaagccttcattgcttctcatggatgaaccattctcgagtcttgatgaagaattaagagagcagctagctagagaagtaagattgattttgaagcacgaaaatatatccgctcttttggtaacgcacgatcaaaacgaagcatttgctatgggtgatgacatctgtgtcctaaaccaaggcagagttcagcaaaccgattctgcatataatctttatcacaatccgagaaatcgttttgtagcagaatttattggagaaggatcaatattttctggagttattgtctctaaagatacaatcgaaacggatttaggtaaaatcaaaggtgttttacctgaatcttttaaaaagatggcgaatgtggaagttttgattcgtccagaaaatgttgttttatctgatatgaatgaaattcaagctgtagttaaagatcgttattttcgtggatcggggtttttgtacaattttaaaaccatcaacggacacgaattattatctataattcctagcaaggataaactttcattagatcaagtagttggtttacaactgaagattgaaaaactaattgttttcaacccatcttcgagggctcttaattaac

SEQ ID NO: 268928 - DNA, 611 bp, Unknown
  Bacterial polypeptide expressing nucleotide sequence isolated from the Sargasso Sea
aatgaatttagttgcaaataatttaacttataaacctaaccatgaatttcatttaaatgatatttcatttaattttaaaaaaggaaatctgtatacaattcttggaagaactctctctggcaaaactactcttctaaaaacaatagctggattattaaatcctgacagtggtgtaattcattttgaagataaagaatttagcaaaataccagtttggcaaagaaatgtggcgatggtttaccagcaatttattaattacccgcacctaaatgtatacgaaaatatttcttttccattaaagcaaagaaaactagatgaaaacaaaattaaaaatgacgtgaacgaagctttaaaaactgtgggtttgataggttttgaaaatagaaaaattcaggaattatctggaggccaacaacaaagagtagcattagcgagatcattagcaaagaaggcaaaaattttattattagatgagcccttagttaatctagattataaattaagagagcagttaagagaagaatttaaaaggattttttcaaaaggttttgcagaggatacaattttaatttattcaacaactgatccacaagaggtaatggaactaaatg

SEQ ID NO: 268929 - DNA, 543 bp, Unknown
  Bacterial polypeptide expressing nucleotide sequence isolated from the Sargasso Sea
aatgaataaatttttagagatacaaaatttaaatatatcattccaaggaaacagatcatttaatactttaaataatttcaatttaaaattaaataaaaatggaagtttaggcattgtaggtgagtcaggaagtggcaaaactcttagcatgttagcattaacaagactacttccaaaacaagctttaatttcttcaggttcattttcttttttagaccaagatttatctaaagtagataacttaaacttttataaaaattttagtggtaagaaaatctcaatgatttttcaagaaccaatgactgcacttaatcctgtttatacaattggtcgtcagcttatgtacacttatatgtaccataacaaagttactaacaaagaggcatacaacaaatctttagaaatgctagatgcagtaaaattaactaataatacagaaagaatgaaacaatatcctcatcaattgtctggtggtcaaagacaaaggataatgatagccatggccttgataaataaaccccaactactaatagctgatgaacc

SEQ ID NO: 268930 - DNA, 482 bp, Unknown
  Bacterial polypeptide expressing nucleotide sequence isolated from the Sargasso Sea
aatggccagtttaaaagatataagaagccgaatagatagcgttaaaagaactcagaaaactacaagtgctatgaaaatggtatctgcggctaagctgagaaaatctgaggataatataaaagcagctcttccatacgcacaaaaattgaaagatatagtgtcccctttatgttctcgctttagagaggggaacgtagaagataactttgtgaggtttttccaaactaaagaggggaataaaactgcagttattttaattacaactgatagaggtctatgtgggggtttcaacgctagtctctgtaagggtttgtcacaaaaactattagaagaaggtattgatcgggcagaattttcaataatcggtaggaaaggaaatgattttttcaaaaaaacaactcacgaaattctaagttttcacagtggtacgcaaccagaaaatcaattgtcattagtcaaagaaattgtaaataattttacga

SEQ ID NO: 268931 - DNA, 289 bp, Unknown
  Bacterial polypeptide expressing nucleotide sequence isolated from the Sargasso Sea
aaacttattatttgcgatgaaccaacaagtgctctagatgtatctgttcaagctcaaatattagcacttttaaaaaaattacaaaaagagtatgagcttggatatttatttatcacgcataatataagtgtcgtagaatatattgctcattatgtagcagttatgtatgaaggaaaaattgttgaacagggtagagtcgataaaattctcaaaaatcctgaaaacccatatacgaaaagattattgtcagctgtaccacgaatagaattgaagtcacgagcactataga

SEQ ID NO: 268932 - DNA, 936 bp, Unknown
  Bacterial polypeptide expressing nucleotide sequence isolated from the Sargasso Sea
gaacaacatttgcaaaatataaaaggaacggtaattgcagtcacccacgataggtactttctggataatgttgcaggttggatattagaattagatagaggagaaggaatccctttcaaaggaaattacagctcatggctagaccaaaaatctaaaagattagctcaagaagaaaaaagtgaaagtaagagaagaaaggctttagaaagagagcttgaatgggtcagaaaaggggcgaaaggtagacaagccaaaggaaaagcaagacttaataattatgaaaacatgagaaatgagtctgttaaagaaaaggagaccaaaattgaaatccctattccaaatggaccaaggttaggaaatgaagtaatagaagctcaaagtatttccaaaggatatgatggcaatttattatatgaagatttaaatttcaaattgcctccagcaggtattgttggtataattggacccaacggagcaggaaaaacaactttatttaaaatgattatgaatgaagaaacacccgactctggttcatttaaagttggagagactgttaaaattgggtatgtagatcaaaggcataagtcaattgatccaaatgaatccatttatgaggttataagcggaggaaacgataccattcaaataggtgggcagtctgtaaattctagagcttatgtatcaaaatttaattttaatggtgctgatcagcaaaagaaagttggtgttctttctggaggtgagagaaatagacttcaccttgctatgactttaaaaacagaagctaatgttttattattagatgagcctacaaatgatattgatgtcaatacacttcgtgcattagaagaaggaattgaaagttttgcaggatgtgctgtagttatttcacacgatagatggtttttagatagaatttgtacgcatatcctagct

SEQ ID NO: 268933 - DNA, 709 bp, Unknown
  Bacterial polypeptide expressing nucleotide sequence isolated from the Sargasso Sea
atggatttagttgcaaataacttatcatacaaaccagatgatcaatatcatttaaacgaagtatcgtttaattttaaagaaggaaatttatatacaattctaggaagaacgttatcaggaaaaacaactctactaaaaacaattgctggtcttttaacaccagatagtggtgaaattgaatttgatggtaaaaatttcttaaaaattcctgtctgggaaagaaatgtagcaatggtttatcagcaatttataaactatcctcatttaaatgtttttgaaaacatagcctttcccttgaaacaaagaaaaatagatcaaagtattattaatgaaaaagtgatggatgctttaaagtctgtaggtttattaggttatgaaaacagaaagattcaagaactttctggaggtcagcaacaaagggtttcgcttgcaagatctttagtcaaaaacgctaaaatattattgctagatgagcctctagtaaacttagactacaaattgagagagcaacttagagatgagtttaaaaacttattttctaaagggttagcagatgaaacaatattaatttattcaaccacagatccaagagaaactatggaattaaatggtgaagttatagttttagatgaaggcaaggtcttacaagttggtccagcaaaagaaatatttgaaaaccccaactctttaaaagttgcagaaatttcta

SEQ ID NO: 268934 - DNA, 711 bp, Unknown
  Bacterial polypeptide expressing nucleotide sequence isolated from the Sargasso Sea
aatgtcagataataaccaacttccagtaattaaatgtgaatcagtttataaaatttttggcaacaatgctaaaaatcttttagaagactctaatggaaatgttgatgcaaagacttttcaagacgcaggatgtatcgtaggagtaaataatgcttcattcgatgtaaaaaaaggtgaaatgttggttgtaatgggtttgtctggatctggtaaatcaactttacttcgctgcatttcaagattaaccgatgccacagcgggaaaaatatttatagacggagatgatttactctcaatgaatagtaaagaactaattgaattaagaagaaataaaatgggaatggtttttcaaaactttgctttgttgccacataaaacagtattagaaaatatagcttttcctcttcaaattaaaggaactaataccaacgagagtattgctaaagcaatggaaatggttgagttggtaggcctgaaaggtagagaaaattattttccaagagaattaagtggtggtcaacaacaaagagttggtatagcaaggtcacttgctgtggagcctgatatatggtttttagatgaaccattttcagctcttgatcctttaattagaaaagaaatgcaagatgaattcttaaggcttcaaggagttcttaaaaaaacaataatgtttgttacacatgattttgatgaagccctaagattagctga

SEQ ID NO: 268935 - DNA, 721 bp, Unknown
  Bacterial polypeptide expressing nucleotide sequence isolated from the Sargasso Sea
gttgaaagatataattttttcttatccaggtaagtcaaattcaacacttaatgaactcaatattgaaataccagttaataaaacagttgggatagtaggatcatcaggttcaggaaaatctacaataattgacattatattagggcttataaatccagataaaggtgaaattgtaatcgatggtgaatttaaaattaataaagataatattcacttcatgcaggataagattggttttgtcccccaatcgatttttttatctgatgcatcaataaaagagaatatagcttttggcgaatctattagtgagatagatgaatctaagattgaaaaatcactcatattggcaaatctggatgagtttattacaacactgccagatggattagatactcaggttggtcaaaatgggatgcaattgtcaggcggtcaaaggcaaaggattggtatagcgagagcattatacagagagagtgaaattttgatctttgatgaggcaactagctcccttgataatgttaccgaagcacttgttatggatgccataaataattttgcaaagacaaagacaataataatagttgcccatagactgagtaccgtccaaaaatgtgacaaactttatcttattgataaaggaaacgtggttgatagtggcaattatgaatatctactagaaaacaataaagagtttttagagatggcaacaatcattaattga

SEQ ID NO: 268936 - DNA, 929 bp, Unknown
  Bacterial polypeptide expressing nucleotide sequence isolated from the Sargasso Sea
ttggagcaacgctgaaagtatgcttaaagaagcaaatggtaatgttgatgcaaaaacatttcaagaaaatggatgtattgtaggagttaacaatgcctcttttgaggtatctaaaggtgaaatgttagttgtaatgggcttatcaggttcaggtaagtcaacattgttaaggtgtatttctagattaacggacgcaactggtggaaaaatttttattgaaggtcaagatttgcttaatttaaataacaaggaacttattgatttaagaagaaataaaatgggaatggtttttcaaagttttgcgctacttccacataaaacagttttagaaaatattgcttttcctcttcaaattaagggtattaaaactgaagatagcattaataaagcaatggatatggtcaaacttgttggtctcgatggaagagaaaattattttccaagagagttatctggaggacaacaacaaagggtaggaattgcaagatcattggcagttgagccagatatatggttcttagacgaacctttctctgcattagatcctcttataaggaaagaaatgcaagatgaatttttaagacttcaagaaaaattacaaaaaactattatgtttattactcatgattttgatgaagccttaaaacttgctgatcgaattgcaattatgaaagatggaataattgagcagttagatacacctgctaacattgttttaaatccagctacagaatatgtaagaaaattcacagaggaagtgccaagagaaaaagttttattaattaaagatgtaatggatgaaacaacctctgatgtgggtgatttaaaagtttcaaaagatgagattattgaaaacgttgctgaaaaaattttaactcaagaaaaagcagtagctgttacagatggcaaaaataatattgtaggttcaa

SEQ ID NO: 268937 - DNA, 784 bp, Unknown
  Bacterial polypeptide expressing nucleotide sequence isolated from the Sargasso Sea
tatgtctgaaccagtaattaaatgccaatctgtttataaaatctttggagcaaacgctgaaagaatgcttaaagaagcaaatggtaatgttgatgcaaaaacatttcaagaaaaaggatgtattgtaggagttaacaatgcctcttttgaagtatctaaaggtgaaatgttagttgtaatgggtttatcaggatcaggtaagtcaacactattaaggtgtatatctagattaacagacgcaactggtggaaaaatttttattgaaggtcaagacttgcttaatttaaataacaaggaacttattgatttaagaagaaataaaatgggaatggtttttcaaagttttgcgctacttccacataaaacagttttagaaaatattgcttttcctcttcaaattaagggtattaaaactgaagatagtattaataaagcaatggatatggtcaaacttgttggtctcgatggaagagaaaattattttccaagagagttatctggaggacaacaacaaagggtaggaattgcaagatcattggcagttgagccagatatatggttcttagacgaacctttctctgcattagatccacttataaggaaagaaatgcaagatgaatttttaagacttcaagaaaaattacaaaaaactataatgtttattactcatgattttgatgaagccttaaaactagctgatcgaaattgcattatgaaagatggaataattgagcaattagatacacccgcgaacattgttttaatccagctacggaatatgtaa

SEQ ID NO: 268938 - DNA, 799 bp, Unknown
  Bacterial polypeptide expressing nucleotide sequence isolated from the Sargasso Sea
tatgaccgatataattcaaaaagtaaaaaacttatctattggatttcgaagcaaaaagggtgaagaaatattaattttgaaaaatataaacacaaatattaaaaaaggtgagacagttggaatagtgggggaatctggttccggaaaaagcacattagcattagcaatgatggggtatgtcaaacatggcctttatactattggaggagaatgtcagtttaattcttcaaatttactgaaaatgaaaagtaaagatttagaaaaaatcagaggtagaaagatagcaatgattccacaaaatgcaggccaagcattgacaccaaacttaaagataggttatcaaattgatgaagctttacaattgcactcagatttagatgaaaaagaaagagaaaaaaaaatttcagaactattgaataaagttagacttccctcaccggaaacaattgcccttagatatcctcatgaactctcaggaggtcaacaacagagagttgctgttgccatggctttagctggaactccagatttacttcttttagatgaaccaacaactggattagatgtaacaactcaagctcatgtattagaacttctaaattttattgcaaaagatactggaacatctatggtttatgtaagccatgaccttggagctattgctcaagtgagtgacagaatcattgttatgtattcaggagaaatcgttttagaaggtccatcaagagatatccttaaaagaccaattcatccttatacccacggattgcttaaatccataccaaaattatctttagcc

SEQ ID NO: 268939 - DNA, 424 bp, Unknown
  Bacterial polypeptide expressing nucleotide sequence isolated from the Sargasso Sea
tttaagaaaagagaaagttggttttgttttccaatcattcgaactcttaccaagccttaccgcgttagagaacgttatgttgccttctgagctaaaagatgaagatgaaccagaagaaagagcaaaatattttttggatagagttggattaaaggaaagagaacatcactatccaaatcagttatccggtggagagcagcaaagggttgctatcgcaagggcattcgcttgctctgcaaaaatattatttgctgatgagcctaccggcaaccttgatccaaagaatggagaaatggtttctgatcttctttttgaagtcaattcagaaactgataatgcattggttgttgtgacacatgatcatgatctagcagataggtgtgataaaaagattaatctcaaattaggaaaaatagttgaataa

SEQ ID NO: 268940 - DNA, 370 bp, Unknown
  Bacterial polypeptide expressing nucleotide sequence isolated from the Sargasso Sea
atgacatcttcaaaaagctttgtaaaatttgataaagttgacaaaagttatgatggtaaggttttagttgtcaaagatttaaacctagacattgatgaaggtgaattcataacaatgttaggcccctcaggctcagggaagacaacttgcttgatgatgttagcaggttttgaaacaccaactaacggagaaatctatttagactcaaaacctatttcaagaattccacctcacaaaagaggtattggaatggtttttcaaaattatgctttatttccacatttaacagtttacgaaaatttagcttttcctttaaaagttagaaaactttcaaaagacgatattgataaaaaagttgataaagcattat

SEQ ID NO: 268941 - DNA, 696 bp, Unknown
  Bacterial polypeptide expressing nucleotide sequence isolated from the Sargasso Sea
aagatgtcgcgcggcgggttgcagacgcgttgaaactcgtgcaactgggcgacgccgggcatcacatgcccgcgcaattgtcgggcggcatgcagcagcgtgtggcgctggcacgtgcgctcgtgatcgagccggacgtgctgctgctcgacgaaccgctttccgcgctcgacgccaatctgcgcgcctcggtgcgttccgaattgaaggccttgcatgagcgtctgccgaatctgacgatcgtctgcgtgacgcacgatcaggacgacgcgctggtgctgtccgaccgcacgctgctgatgcgcgaagggcgcatcgcgcaactcggcacgccgcagcagttgtacgacacgccgaacgacgggttcgtcgcgcgttatctcggcgcggccaatctgctgccgccgcaggtcgcattccccatggacgacgtgcgctacaacgagcgcgagcgggtggcctgcctgcgtcctgaagcgctgcgtatcgcgccgctcggcgaagggcagttgcacggcgcgattacgtcggtcgaatggtatggcgcggtgttgtcggtatcggtcgttctggacgcgatgccgaacgagccggtgctcgtcaccatgcagcgcggccaaggcatgatgccggagaagggcgcgcgtgtttccctgcgttatgaggctgacgatgtcgtccttatcaacccctgat

SEQ ID NO: 268942 - DNA, 361 bp, Unknown
  Bacterial polypeptide expressing nucleotide sequence isolated from the Sargasso Sea
ggaacgggccgatgaaaaggcccgcaacctcaacggcgggcatcgccgccgtgccgagattgcccgcgctttgatccatgaccctaaagtgcttctcttggacgaaccgactgttggacttgatgtggcggcgcggcaggggcttgtggcgcatgtgcatgctctggccgaggcggggctttgtgtcctctgggcgacgcatttgaccgatgaagttcgcgctgaagaccggttgattatgctggatcagggtcgcattttgaaaaatggcatggccggcgatattgcggcggggcggccattaacgcaggtgttcttggagctgaccggcgcggcgcaagatgcgggggtggcgttatga

SEQ ID NO: 268943 - DNA, 758 bp, Unknown
  Bacterial polypeptide expressing nucleotide sequence isolated from the Sargasso Sea
agactgggtatgtctctagtttttataagtcatgatttatcagtagtaaaaaaattatcagattatatttatgtaatgaaaaatggtaaaattgtcgaatttggtacaaatgatgaaatatttaataatccaaaaaatgagtatacaagagaattagtttcttatcagagtaatattaaagagagcaaaaattttgattcagattctatcttaaaagttgaggatttagatgtatggtacccaattaaaaaaggccttctaaaaagaacagttgactatgtaaaagcaattaaaaatgtcagttttgatttaaaaattggtgaaagtattggtatcgttggagagtcaggttcaggaaaaacatctcttattttagcaattttaaatttaatagaatcgaaaggaaaaataaaaataaataaaaaagatcttaatcaattaaataaaaaggaaatgctaaatttaagaaaggaaatacagattgtctttcaagatccattttcatcattaagtccaagaatgaatatagaggatattatttctgaaggtatgttaattcattatccaagtataagtaaaaaagaaaaagaagaaaaaataaaaaatatattagataaagttggattagagtataaaaatacaattggaaaataccctcatgaattttcaggaggtcaacgtcaaagaatttgcatttgcagagctctaattttagaaccaaaaatttttatattagatgaacctacttcagctttaga

SEQ ID NO: 268944 - DNA, 691 bp, Unknown
  Bacterial polypeptide expressing nucleotide sequence isolated from the Sargasso Sea
aatgccaagccttaaagatcttagaaatagaatatcaagcgttaaatcaacaaaaaaaataacatctgctatgaagatggttgcagcagcaaaattgaaaagagcccaagataatgcagaaagatctcgaccctatgctaataaaatgaaagatattgttatatctcttatttcacgatcaaatacagataatctcaaatttagtaaaactaataataaaaaaaaaacagtcttattaattgtttgttctgcagatagagggttgtgtggagggtttaatggctcaataatcaaacacactaagaatttaaccgacacattgaaaaaaaatgggaaaaacttcaagtttttatttgttggcaaaaaggcatatcaatccctaaggaggctctacaaagatttaacaattgatttagtctctgactttgcaaaccctagaattgagtttgaaattgcaagctcaattagagatcaagttcttaaacttttttttgatagtgaaatctcagaatgttatttaatatatactaagtttaaaagtgcaatctcacaaaatgttgaatctcaaaaactacttcctgtcgaaaaagattaccaacaagatagtcacccaaaaaccgtaatgtatgattttgaacctaatgaagaaataattttagatgacataattcctagaaacattgcaatccaa

SEQ ID NO: 268945 - DNA, 682 bp, Unknown
  Bacterial polypeptide expressing nucleotide sequence isolated from the Sargasso Sea
atgttaaatatttccaaagttgaaactttttacggtaatattcaagctcttagaggagtagatgtaaaagtaaataatggagaaattgttgctttaatcggatccaatggtgctgggaaatcaaccttattaatgacgataagtggagttaataaagcagctaccggtgaaatactttttgatagcaaaagtattgctaatatgcctccacatgacatcgtaaatcttggaatctcgcaagtccctgagggaagacgaatattctcaagattaactgtagaagataacttgagattgggagcatctgtaaataaaaagggaaaaaattttgatctagactcaaaggatgtttatgatctttttcctgttttaaaagacagattatcacaaagaggtggaactttatcagggggagaacaacagatgttggccataggtagagccatgatggctcgaccaaaagtacttttgttagatgaaccctctttaggtatagcgcctaaattagtaaaccagatatttacgtccattaaaaacattaataaagagaaaaaagttacagtttttctggtggagcagaatgccaaaaaagctttagagcttgcagatcgaggctatgttttagttaatggaaaaatttctttagagggcgctggtaaagatctgcttaacaacccaagac

SEQ ID NO: 268946 - DNA, 341 bp, Unknown
  Bacterial polypeptide expressing nucleotide sequence isolated from the Sargasso Sea
aagaagaagcctatcaagcgagcactagaggtagttaatgacgttaaactccctgatccagaaagaattttaaaatcttttcctcatcagctttctggaggtcagcagcagcgtatagttatcgcaatggcattaatgtcaaaaccgtcacttttaatattagatgaaccaactaccgctttggatgtaactgtagaggcagcggtcgtcgatctcgtaaaggatctcggaaaaaaatatggtacttcgatgctatttatttcccataatctgggattggttttggagacttgcgatagaatttgcgttatgtattccggcgaggctgttgaaactggatc

SEQ ID NO: 268947 - DNA, 556 bp, Unknown
  Bacterial polypeptide expressing nucleotide sequence isolated from the Sargasso Sea
cgagcgtattgccataattggtgaaaacggcgtatgtaaaacaacgttacttaacacgttagcaggaaaacttacaccaaaggcaggtgaatttaagtggtctgaaaacgctaacatcggttactatgcgcaagaccacgctgacgaattcgaaaaagacatgaacttgtttgagtggatggagcaatggcagcaagaaggcgacgacgagcaagttgttcgcagctttttaggtcgtatgttgttctcacagaacgatattaaaaagtcggtaaaagtaatatcaggtggtgagcaaggccgtatgttgtttggcaaaattatgatgcataaaccaaacatacttttaatggatgagccaaccaaccacatggatatggaatcgattgaagcactaaacttagcgcttgaagcatacgaaggcactttactttttgtatcgcatgaccgccagtttgtctcttctgttgcaacccgtatatgggaaattaaagacggtaaaataatcgactttagaggtaattactctgagtacctagcaagtaaagaagcgtaa

SEQ ID NO: 268948 - DNA, 359 bp, Unknown
  Bacterial polypeptide expressing nucleotide sequence isolated from the Sargasso Sea
ttttaatagaaaaactggtgagctttcctctggtcaaaaaaatagagtttctttagcaaaatctttaatcaataaaccagaaattcttctattagatgaacctacagctagcttagatccagatattggtgactttataagatcctacattcaagattataaatctaaaaatcaagtaacaatattattggcttcacataatatgagcgaggtagaaaggctttgtgacagcattataatgatgaaaaaaggaaaaattgttgattttggaacttgtaaggaacttattcaaaaacatggaagggataatttagaagaaacatttttaaaattagtcaggagtaaagatgaattttaat

SEQ ID NO: 268949 - DNA, 551 bp, Unknown
  Bacterial polypeptide expressing nucleotide sequence isolated from the Sargasso Sea
aatgtttgttcaaatcaagaatctttcgaaaatttataaaaagtttttagcggttaataaaataaattttaatatagaaagaaataaaactattggtctattgggaccaaatggttgtggtaaaactacaaccatcggaatgattttggggctagtcactccatctgaaggagaaattttcatagaaaataaaaatattgaaaaatatagcagggatcagattttaagtagatttaattttgcctccccgtacgttgagttgccaaaaaaacttacagtcaaacaaaatcttgagatatatggaagactatatggaattaaaaatcttaaagacagaataaatgacatagcaagtgatttagacataaaaaatttttttgagagaaagacaggagagttatcctcaggtcaaaaaaatagagtatctctagctaaatctttgattaataaaccagaaattctgcttttagatgagcctactgcaagtttggatcctgatattggagatttcatcagaagttatatacaagaatacaaatctaaaaataaaa

SEQ ID NO: 268950 - DNA, 778 bp, Unknown
  Bacterial polypeptide expressing nucleotide sequence isolated from the Sargasso Sea
cgaaatccaactggattggaactcgctgcgccaattcgaggcgaaatcgtcttcaaggatgtcgactttgagtataatctagagcgaccggtgtttagtggactgaatctgacaatcgagggcggaaaagtcgtcgcgttggtcggagcgtccgggtgcgggaagagtactgtgaccaagctcatcgaacgcttctacgatccgacgcgcggtaccatcactctcgatggcatcgacattcgaaatcttcgtatcgataaactgcgcgccaacatcggcatcgtttcacaagagccactcttgttcgaagcttctatcgccgataacatcgccgccggtcgaccgcaagcaatctcgggcgcgaaggcctcgatgaatgaaatcgtcgccgccgccgaagctgcgtccgcgcacgagttcatcatgtcgttcccgaacgggtacgataccatggttggcggtaagaactcgaagctctctggtggtcaaaagcaaagaattgccatcgcgcgcgctgcgctgagaaatccgtcaattttgattctcgacgaagccacgtccgcgttggacacggaaaacgaacgcctcgtgcaagatgcgctcgatagcttagtgcactccgtcgcgggtgggcagcgaacgacgatcgtcatcgcgcacagattgacgacggtgcgcgacgcggataaaatcgtcgtgctcgggagcgaggatgcgtccgcaggattggcgggcggcgccggcagcgcgcacggttccgtcgtatggaacaaggcac

SEQ ID NO: 268951 - DNA, 558 bp, Unknown
  Bacterial polypeptide expressing nucleotide sequence isolated from the Sargasso Sea
aatgctcaaaattactaatgtagaaacattttatggtaaaattcaagcacttagaggtgttgatatagatgttaacgatggagaaattgtatctttaattggttctaacggcgctggtaagtctactttgttaatgactataagcggagtaaataaagctagaagtggaaatataaattttaatggtgaaagaattgaaaatagagaacctcacaaaattgttgacctaggcatttgtcaggtgcctgaaggaagaagaatattttcaaggttaactgttgaggaaaatctgagattgggagcttttactaatgaaaaaggaaagcacttcgaaacagacataaaagatgtgtacgatttatttcccgttttaagtgatcgaaaaactcaaagaggtggaacattatctggtggggaacaacaaatgcttgcaatcggaagagcattaatgagcaaacctaaagtacttcttttagatgagccttctttaggtatagctccaaaattagtaaatcaaatatttgcttcaattaagaatattaataaagaaaaaaatgt

SEQ ID NO: 268952 - DNA, 385 bp, Unknown
  Bacterial polypeptide expressing nucleotide sequence isolated from the Sargasso Sea
gtagtcgagcacttcacaagtggtaaagttgatgaaatacatgtggtctataattattttattaacctagcgcaacaagaagttaagtctgaggtattactacctttagtttatgatgatgaagatggcgctgttagagatagactctatgaaccatctaaagataggttagttagctctctagtgccacgacatttaaacattcaaatttggaaatatcttttagagtcatatgcaagtgagcaggctgccagaatgttggcaatggaaaatgccacaacaaatgctggagatatgataaaaaatttaacactagaatttaacaaagctcgtcaagctgcaattacaactgagatgcttgaaattgttagtggtgctgaggctt

SEQ ID NO: 268953 - DNA, 433 bp, Unknown
  Bacterial polypeptide expressing nucleotide sequence isolated from the Sargasso Sea
atgtcagaagattcaataatttcattaaaaaatgtaaataagtggtttggtgaattccatgtacttaaagatgttgatcttgaggtaaaaaagaaagaaagaattgttgtatgtggtccctctggttctggaaaatcaacaatgattagatgtattaatagattagaggagcaccaagaaggcactataattgttgatggcattgagcttaccgggaatttaaagaatattgatagtgtaagaaaagaagttgggatggtttttcaacaattcaatctttttcctcacttaagtgtaaaagaaaatattactctagcaccaatttgggttaaaaaaatgccaaaagctgaggctgaagaattggcaatggaacaacttgaaattgtaaaaatacctgaacaagcgaataaatatcctggtcaactttcaggtg

SEQ ID NO: 268954 - DNA, 594 bp, Unknown
  Bacterial polypeptide expressing nucleotide sequence isolated from the Sargasso Sea
ccggagaccgggtcgcaattgtggggcgttctggttctggcaaaagcacactgcttcatttgcttgcaggtctagatgatcttgattcagggtcgatcaaagttggaggtctgccactttcaggtcttagtccagacgcccgagccgcgattaggatgagatacatgggatttatatatcagcaacatcatctgcttccagagttcgatgcattggaaaatatctgcatgccactgcgtctatcaggttcaggaaagaaggaagctgataagcttgggagggaattgttggagcgcgtgggtcttggggatcgagcaaatcacaagccttcagagctatcgggtggtgaaagacagcgagttgctctggcacgggcagtcatttccaagcccgacttagttctagctgacgagccgactggcaatcttgatgaggaaaacgcagcaagcgcgatcgaattgttgctagagctcactattaattcaggtagctcaatattgatggttactcatgaccatagtttactctcagggtttgatagggttttagaactgtcctcagggttgttgtccgaagcatcagaggttggatgaa

SEQ ID NO: 268955 - DNA, 529 bp, Unknown
  Bacterial polypeptide expressing nucleotide sequence isolated from the Sargasso Sea
gatattcaaatggttttccaagatccaacagaaagccttaacccgcgttatacagctaggcaatcaatctatgatccactaaaaaatttaactaaaatgaataatgacgaaattaataataagattatagaagtgtcaaatttagtaggcttacctcttaatttacttgatcgtttacctcatcaactctctgggggccaaaaagcaagagtagggatagcaagggctatagcactttcaccaaaaattttaatacttgacgaacctaccgcatcgctcgatgtgtcaattcaagctatcattttaaatttgcttgtggatttaagagctaaattagatatgagttatctttttgttagtcatgacctgaatgtagtacaacttctttgcgattatataattgtaatgaaagaaggcctaattattgaacaaggcaaatctaaccaaataattagtaatcctgaagaaaattacactaaatcattattggcagcatcacctaaaccacccaagcttcctaaagcataat

SEQ ID NO: 268956 - DNA, 520 bp, Unknown
  Bacterial polypeptide expressing nucleotide sequence isolated from the Sargasso Sea
atggcatactttgaaggagcaaaaatgactgcaggttatggggatggccctgatattatcagttcatgttccataactgccaataggggagagatagttgctattctaggtccaaatggagctggtaaatcaacagccatgaaagtgatgctcggattattaaaattaaaatcaggctctgtaactttaaatgatgaagatatttcaaatattaatcctcaagatcgtgtaaaaaagggcatttcatttgttccacaaacaagaaatgtatttgcagaattaactgtaagagaaaatttagagatcggtggctttttaacagaagggagtttagaaaataaaattgagagtatttatagtttattcccaatcttaagtgaaaaaaaaacccaagtcgtcggacaattatctggtggacaacgtcagcaagtcgcgcttggaagagctttaatgagtgatccatcagttcttatgttggatgagcccactgctggagtttctcccaattgtaatggatgaa

SEQ ID NO: 268957 - DNA, 434 bp, Unknown
  Bacterial polypeptide expressing nucleotide sequence isolated from the Sargasso Sea
aatgtcagatccgattataaaaattcaaaatatgaataaatggttcggtgattttcaagttttaaaaaatattaacttagaggttgaggcaaataaaaaaattgttgtatgtggaccttctggatcgggtaaatccacactgattagatgtattaacagattagaagagcaccaagagggtgatataattgttgatggcaacgaactatcagaaaagacaaaagatattgaaaaaattagagctgaagttggaatggtttttcaacaatttaatttatttccacatctttcaatattagataattgtactcttgcacctatttgggttaaaaaaatgccaaaaaaagaagctcaagaacttgcattagatcaacttaaaaaagtacaaatagatgatcaggcaaacaaatttcctggacaactatctggaggtc

SEQ ID NO: 268958 - DNA, 583 bp, Unknown
  Bacterial polypeptide expressing nucleotide sequence isolated from the Sargasso Sea
aatggcaaaaattgaaatacaaaatttatcaaaacaatttggagaaatttacgctgtaaacaatcaaaatttaattgttaataaaggagagtttctaatattgcttggaccttcaggatgcggaaaaactacaaccttaaattgtatagcgggattagaaatgccaagctcaggaaaaatattatttaatgaagttgatgtaacatatagtcctccacattctagaaatattgcaatggtatttcaatctgcgttactttatcctcatttaaattgtaagcaaaatatattaatgagtttacaaaaagctaacataaatgatgatgagaaagaaaaaagaattttagatgctgtagaaattttaaatattaaagatttattaaataaaaaacctcatgaattatcagggggagaaagacaaagagtagccacggcaaaagcaattgttagacaaccagatgcttttttactagatgaaccaatggcagcattggatgcagctttaagacaaactttaagatcagaattagtaaatttacaaaaaaaactaaataccacaactatttttgtaactcatgatcaa

SEQ ID NO: 268959 - DNA, 624 bp, Unknown
  Bacterial polypeptide expressing nucleotide sequence isolated from the Sargasso Sea
ctggtcagagtggtagtggtaaaagcacacttatgaagcttcttccaaggctatacgaaatagaggaagggaaaatacttatcgacgattacgatgtaagcaaaaccgagctttactctgttcgaaggcaaattggtatagttcctcaagagcctttgttattctcagggacagttagcgaaaatatagccctgaccaaaccagatgtagattcagaagaaataattagagccgcaaaaatcgctgatgctcatgatttcataatgagcttgcctcaagggtatagtacaaatgtaggagaaagaggttccagcttgtctggaggacagaaacaaaggatagctatcgcaaggacaatcataagtaatccaaaattattaataatggacgaagctactagtgctctagactatcaaacagaaaaaaaggtttgtgacaacctaaaaacaagctgtaaaggagtaacagtatttttcatcacacacagattaagcaccattaaaaatgcagataaaataattatgatgaacgaaggttcaatagcagagatcggtaatcataatgatttaatagagaataaaggaagatattatgctctttaccgccaacaggaggcaaattaat

SEQ ID NO: 268960 - DNA, 785 bp, Unknown
  Bacterial polypeptide expressing nucleotide sequence isolated from the Sargasso Sea
gaacggagatatcgatttacttgatggactgaaaagagaaggaaaaaatctagtagtgggttatttttctcaacaccaagtggatgatctggatttacaaaaaaatgccattcaacatattcaaagtatagatgagaaggctacagaagcggagataagaaattttcttggaggttttaatttcagagataacaaggctaaagatgctattaaaaacttctcaggaggagaaaaggcccgattggctttagcaaaaatcgcctttcgaaagcctaacctactcctaatggatgaaccaacaaatcacttggatatggatatgagacaggctttgacggtagcactgcaagattttagcggagcgatattactcatatctcacgatagacatcttttagccaatacagttgatgaatttttaataatagataaaggtaaattaagcagatttaatggtgacctagaagactatcgaacattaatccttaaaggctctgttaataatgaatcagttaaagataaaaaagagtctagaagtaaactgcaaaaaaaagaagttaagtccatcaaagcaaatattagctctttagaaaaaactctaaaaagattgcaaagaaagctttctgaagtaaatgataaattaaactctcctgattcatataatgaagattcagggaacaactttcatgacttattgagggaacaagtaaatttgatatcagaaattgaaaatgcagaacaagaatggcttgagttaaatcaaaaacttgatgaatctgtttaac

SEQ ID NO: 268961 - DNA, 648 bp, Unknown
  Bacterial polypeptide expressing nucleotide sequence isolated from the Sargasso Sea
aaacggtgcaggtaagtcaaccttactccgtattatggctggcgtagataaagatttctcaggtgaagctcgtgcacaaccagggatcaaaatcggctatctagaacaagaaccgcctttagatccaaccaaagacgttcgtggtaacgttgaagatggcgtacgtgaagcacttgacgctttagaacgtcttgatcaggttttcgctgagtatgctgaaccagatgctgattttgatgcgcttgcgaaagagcaagaaaaattagaatcaatcatccatgcatgggatgcacacaatcttaataaccaacttgaaattgctgctgatgcattgaatcttcctgcttgggatgctgatgtatcattactttcaggtggtgagcgtcgtcgtgttgcattatgccgtttattactttctaagcctgatatgttgcttctcgacgaaccgacgaaccatttagatgctgaatcagtatcttggttagaacgtttcttgaaagacttcccaggcacgatcgttgcgattacgcatgaccgttatttcttggataacgttgctgagtggattcttgaacttgaccgtggacatggtattccttaccaaggtaactattcttcttggttagaacaaaagaatgcgcgtttaga

SEQ ID NO: 268962 - DNA, 823 bp, Unknown
  Bacterial polypeptide expressing nucleotide sequence isolated from the Sargasso Sea
atgaaaaaagaaattcttaaattacgcgatgtaaaagtctactttcctgtaaaagcaggagtcttcaatcgaactgtcggacatgtaatggcggtcgatggtgttgatttagatatttatcgcggtgaagtattaggcctggctggagaaagtggttgtggtaaaactactctaggtaaagcaatcttaagattagttgagccaacaaatggtgaagttacatatgtttcaaaggaagatgatgaaacagaactaacttcattagaaaaaaaagatatggatccttttcgaaaaaaacttcagattgtttttcaagatcctcattcctcccttaatccttcttttactatttttggatctcttcaagatcctttaaaaaaatttggagttaattcaaaagaagagagaagaaaaataataggtgatctattagaagcagtgaatatgcgtagagaatatatggatcgatatcctcatgagttttcaggaggtcaaagacagcgaattggaattgtaagagctttgtgtttagatcctgaattgattgtatgtgatgaagccgttagtgcattagatgtttcaattcaggctcaagttttacaattattaatgcagcttaaaaaagataataatttaacttatctatttattactcatgatctaagtgtgacagaatatttatgtgatagaattgctgttatgtatttaggaagaattgtggagctttgtgactctgaagatctttataaaaatactcttcatccctactctgaagctttaatatcagcaataccagtcgcagaccttgataagaaaactaaaa

SEQ ID NO: 268963 - DNA, 498 bp, Unknown
  Bacterial polypeptide expressing nucleotide sequence isolated from the Sargasso Sea
actccggcagaatctgctttgaaaacacagatctcatgcagatgaaaagggaggaatcctctgcattccgaaataaaacaatcggattcatcttccagtttcaccagttactccaggacttcaatgctttggagaatgtcatgatcccggctctgattttgggaaactccagaacaactgcaatggaacgttcaaaaatgttgctggatcaagtggggctttttgatcggatgcatcacaaaccctctcaactttccggtggtgagcagcagagagtcgcaattgccagggctttaacgaacagacctaagcttcttctggcagatgagccaaccgggaatcttgatgaagaaactggcagacaggtgatggaacttttgctgaaactcaatcaggaaaatcatactactctggttatgatcacccacaatcaaaaactggcgatggagaccaattctaagttccgtcttgaaaacggattgttaaaccaggagtagc

SEQ ID NO: 268964 - DNA, 674 bp, Unknown
  Bacterial polypeptide expressing nucleotide sequence isolated from the Sargasso Sea
aatgttaaaagttcgtgaattatcaaaatcaattaaaggcaaaagaattgttaataatgttagctttgacgttaattttggttcaatatttggtttattaggtccaaatggagcaggaaaaacatcaacattttatatgattgctggtttaataaaaccagatagtgggaaagtattaatttcaggtcaggatatttcaaatattccaattcactcaagatcaaagctcggtattaaatatttacctcaagagccatctatttttaaagatttaacagtatatgaaaatttatatggcttagctgaattatcatttaccaataaaaaaagtattaataattttatagaaagttcaatggatgaatttagtttatctagcatttctagtcttagaggcagacaattatctggaggacaaagaagaaaagttgagattgcaagaacacttgctgctgatccaaaaattatacttctagatgagccttttgctggtattgatccaattgcaattgatgatatcaaagatgttctaaataagcttatcttaaaaaaaattggaatattaataacagatcataatgttagagaaacattggaaatttgtgaccaagccgctattttaaataatggagaaataatagcaaaaggtgaaaaagattatttgataaacgata

SEQ ID NO: 268965 - DNA, 838 bp, Unknown
  Bacterial polypeptide expressing nucleotide sequence isolated from the Sargasso Sea
taacttttcagataatggatgtattgtaggagtaaataatgcttcatttgaagtttcaaaaggagaaatgttggttgttatgggtttatcaggttcaggtaaatcaacattattaagatgtatttctagattaactgatgcaactggtggaaaaatttttatagaaggtcagaatttattaaaattaaataataaggaccttataaatctaagaaggaataaaatgggaatggttttccaaagcttcgctttacttccacacaaaactgtagtcgagaatatagcgtttccacttcaaattaagggagtaaaaactgaggaaagcattagtaaagctatggatatggttaagttagttggtcttgatggaagagaaaattattttccaagagaattatcaggaggacaacaacagagagtgggtattgcaagatctttggcagttgaacctgatatatggtttttagatgaacctttttctgctttagatccgttgattagaaaagaaatgcaagatgagtttttaagacttcaagaaaagttacaaaaaacaattatgtttataactcatgattttgacgaagctttaaaacttgccgaccgtattgcaattatgaaggatggtataattgaacagttagacacacccgctaatattgttttaaatccagcaacagaatacgtaagaaaatttactgaggaagtgcctagagaaaaagttttattaatcgaagatgtgatggattcatccaaagaaaatcttggtgatttaaaggtttcaaaagatgaagttatagaaaatgttgctgaaaaaattcttactcaagaaaattctgta

SEQ ID NO: 268966 - DNA, 178 bp, Unknown
  Bacterial polypeptide expressing nucleotide sequence isolated from the Sargasso Sea
atggccgatgttaagatgagctctatctacaaatccttcggaaatacggaggtcattcatggtgttgatcttgaagtagaagaccatgaatttgtggtttttgtgggaccttccgggtgtgggaaatcgacacttcttcggcttgttgccggtttagaagatgttacacagggagaaa

SEQ ID NO: 268967 - DNA, 798 bp, Unknown
  Bacterial polypeptide expressing nucleotide sequence isolated from the Sargasso Sea
tatgatatatagaagtatgatatgcttatcagattctcaaggacagtggcaaaaagtgataagcaaaattggttcaattgaaattgttaatgatgaattacaaaatgcaaaaacttataaacagaaaaatggagacaagtctttagaagattttaagtacgaaattgaattgaaagatttaacattttcatatgatgctaaaagtaaagttttagataatattaattttactattcatgctcaaaaaactattggtattgttgggccatcaggatcagggaagtcaactttacttgatataatatctactcttttacaaccaacccagggaaagttgatcatagataacatttcttcaaaaataatcgataccgaatcatggagaagtcagataggatatgtatgtcaagattctgttatgtttgatgataccatagcaaacaatattggcatgtggaaaggtgattttaataatgatgagaattatagaaaaaaattaattgatgcatcaattgatgcaaatgcgcatagttttatagttgattttgatagaggatatgataccaaaattggtgatagaggcatcaagttatcaggtggacaaaagcaaagaatttttatcgctagagaattaatgaaaaatccaaaaatactcatacttgatgaggctacatcagctcttgatagtgaatctgaaaatatgattagggcaagcattgactctttaaaaggaaagttaacagttgtcattgtagctcacagaatatcaacaattaaaaactgtgaccacataatagt

SEQ ID NO: 268968 - DNA, 468 bp, Unknown
  Bacterial polypeptide expressing nucleotide sequence isolated from the Sargasso Sea
aactaaataaatcttctttgaggtcaatgataggatacgtaccccaagaaaccatattatttcatgacagtgtcagaaataatatatcatttggagataagaaaatttctgacgatcaaattaaaactgctctaaaaagagctggagcggaaggtttcattaaccagttaccaaatagacttgattttaatgttggtgagcatggtgggcgattatctggagggcaaaaacagcgactaggtctagcaagagccctattatactcacctaagcttctgatacttgatgagccgacttcagcactagataaacgaagtgagaatgccattatagatacgcttaatgaacttaggggaacagtgacgataattgcaatatcgcatcaagagacatttgttaaaacatctgatagaaaatatctactcgaaaacggaaaactaaaagagcaagaaatttatactaattaag

SEQ ID NO: 268969 - DNA, 694 bp, Unknown
  Bacterial polypeptide expressing nucleotide sequence isolated from the Sargasso Sea
tgatgttcaagaaggagatttttttgctctacttggccccaatggtgccggaaagacaactgcaataggaatcatcacatcccttgtaaataagtcatcaggatccatagaagtttttggtcatgaccttgacaaagatttagcaaaagcaaaatcttgcatcggcgttgtgccacaagaagtcaatctcaatctttttgattacaactttaatattttggttaatcaggcagggttttacggcatcccaagaagcgaaggaaagaagagagctgaacagtatctgaaacagatgcagctctgggaaaaaagaaagacaaacgccagaagcctatcgggaggaatgaaaagaagactgatggttgctcgagcattggttaatcgaccaaaactcctcctgcttgatgagccaacagcaggagtcgacattgaaacaagaagaatgatgtgggattttctcagagatctgaatgcaaacggaacaacaatcattctaacaacacactatcttgaagaagcagagcagttgtgtaataaggtcgccattatcgatgaagggaaaatcatagaaaatgactcgatgcaaaatgttttgaaaaaactcaagaccgaagtatttatccttaatacagagaagccactcgataaagcacatgaaattgatggttatgcctctgctttgaaatcaccacaa

SEQ ID NO: 268970 - DNA, 523 bp, Unknown
  Bacterial polypeptide expressing nucleotide sequence isolated from the Sargasso Sea
tttgataagagttgaacacttctataagaattatgggccctatccagcagtgatagatgtatcctttgaagtgcttaaaggtgagatagttggttttcttggtcctaatggagcgggaaaaactactactatgagaagtatcacaggatatttgcctcctacatcaggaaatatcacagttagtggatatgattctgtcaaatattctcttgaagcaagaagacatataggttacctaccagaaactgttcctctttatttagatatgactgtgacagattatttgagtttcatgggaaaaataagaggaatgaatcagaaatggataaatgaaagaattaataaagtaattgatcacgttagattaggtgattacagaaatacacatgttggaaaattatcaaaaggttatagacaacgaactggaattgctcaagctatacttcatgaacctgacgttttgataatggatgagcctactatcggaattgatccaattcaagtagtagaaacaagagaatga

SEQ ID NO: 268971 - DNA, 851 bp, Unknown
  Bacterial polypeptide expressing nucleotide sequence isolated from the Sargasso Sea
tctttctgaatcatcaatcaaatttgaaaatgatgaaattattgcctgtcccaaaaaaaccttatccgctttgagaggtaataaaatctctatgatatttcaggaaccaatgacgtcgcttaatccttatcaaaaagtaggcttccagatagatgaaacactaatagttcataaaaaattaccaccaaaacaagctagagaaaagacgattgacctattaaaaaaagtaaaaattcctgaaccagaaacaaaagttgattcttatcctcatcagctatcaggaggtcaaaggcaaagaataatgattgctatggctctagcaaacaaaccagaactattaattgctgacgaaccaacaactgcccttgatgtaactgttgagaaagcattattagaattattatctgacttacagcaagagtttggcatgtctatattattcattactcatgatttgaatattgtaagaagattttctgatgaagtttgtgtcatgaaagaaggaaaaatagttgaatcagggaaggttaaggatatttttgataatccacagcattcctataccgtcaagttacttaattccatacctggcaagaaagcggaattaaatcttgagaatgagcagttacttactggtcaaaaagtggatataaaatatccaataacaaagaatatatttggcaaaacagtagattttttgaatgctgtaaagaaagttgatataagaatacacagtggctccactacaggcttagttggtgaatctggttccggtaagtcatccttggcaagagctttgttaggtattgaaaaggcagaaggtagcatcatttttgacggaaaaaatatac

SEQ ID NO: 268972 - DNA, 445 bp, Unknown
  Bacterial polypeptide expressing nucleotide sequence isolated from the Sargasso Sea
ttattcatccctcaaaaaccttatatgttgcttggttctttaagggaacaattatgttatcccacagaagttagtaaatttagtgatgaacacctcacttctgtacttcatgaagtgaatttaaaaaccttagtagatcgataccctaatcttgatatcaaacaagattggccgcgaattctttctctaggcgagcaacaaagattggcttttgcaagactcttgctaaattctccaagatttgcagtacttgatgaagcaactagtgctttagatattgacactgaaaaaaaactatataatttattaaaggaacgagaactttctcttataagtgttggacatagacctagtttaaaagattttcatgaaaatattttagaattaaatggaaaaggagactggaaattattgacttctgataagtataattttaaggattagc

SEQ ID NO: 268973 - DNA, 634 bp, Unknown
  Bacterial polypeptide expressing nucleotide sequence isolated from the Sargasso Sea
atgcttggctcgaacggggttggcaagtcatcaatttttaatttaattactggtttagttcaaccaagttatggatcaatacattttgataatataaaagtaaatgaatatccaatttatctaaggacaaaaaaatttaaaatcggaatgatacctcaaaatggagggtattttcatgatctgacattaattgaaaatctaaaagcaattggtgagattcaaatagaaaatcaacatgatatgaattcaaaaataaaccaattgatatcaaggtttgaattagatgcggtaagaaatattaaagctaaatttttaagtggtggacaaaaaagaaaattggttatagctcttgctcttttaggagatcctaaagttttattactagatgaaccatttgctgctttagatgtgatgacaataaagatgttgcaagaagttattgtaaatctgcaagctgaaaataatattggaatatgtatatgtgaccatcaagctagagatttattgaattgtgttgatgtagctatagttttatcaaattgtaaaataatcgctaaaggtacaccaaatgaacttataaataattcaaatgctcgtgcagcttattttggtgactcgtttaaatttaattaaa

SEQ ID NO: 268974 - DNA, 703 bp, Unknown
  Bacterial polypeptide expressing nucleotide sequence isolated from the Sargasso Sea
tatggatgaagccatcatagatcttaacaaattatgcttccgctggaaaaattccagcagaatgctgctcaatattcctgagtttagaatgaagcagcatgaacatatttttttgcagggtcccagtggatgcggaaaatcgacactgctttcattagttggtggaattttgatttctgagtcgggatcacttaaggtacttggacaggaaatatgggatctctcacgttcaggtagggatgcgtttagagtggatcatattggcttcatctttcaacttttcaatttactaccttatctatcgattgaggataatgtaatgttgcctctaagattctcaagaatccgtgctaaaagagctggaaagacaaaacttgaccggttgaaagaaacccatagacttttaaaagcactcggtcttgaggaacagctggcagaaaaaaatcctgtcattgagcttagtgtagggcagcaacaaagggttgctgcagcaagagcgctaataggtagcccagagcttataattgcagacgaaccaacttccgctttagattcagaccttcgtcattcttttctcgaactactctttggagaatgtaaaaaatcaggaagtaccctactttttgtaagtcatgattcttcactgagagataatttcaaaactaaagcttcgatggatgaactaaacaaagtaataatttaa

SEQ ID NO: 268975 - DNA, 236 bp, Unknown
  Bacterial polypeptide expressing nucleotide sequence isolated from the Sargasso Sea
aatgaacgcgccgttgattagtttgcaaggtttgtcaaaagaatttcatggaaaaaatgttgttgaactcgttaaccttaccatcaaagcaggagaattttacggcattttgggaccttcgggctgcggcaagaccaccctcctgagacttatcgccggtttagagcagccaagctcaggtcaaataatcattgatgggcttagtatgaactccgtcccggcaaatcgccgcccag

SEQ ID NO: 268976 - DNA, 808 bp, Unknown
  Bacterial polypeptide expressing nucleotide sequence isolated from the Sargasso Sea
catggctaaaattactttaaaaaaattaagtcacagttatttagctaatcaaaaaaatgatgctgattgggccctaagaggagttgacattgattggaaagatggaggagcttatgccttattaggaccttcaggatgtggaaaaacgacattattaaatattatatctggcttattaaaaccaactgaaggtgagatattatttgacgataaagatgtaacaacacttaacccagttgaaagagatattgcacaaatttttcaatttccggtcatttatgacacaatgactgtttacgataatttagcatttcctctaaagaatagaggtttatcagatactgaaatcgatagtaaggttaaagaaattgcggaaatgttagaattgacctctacattaaacaatagggcatctggattgacagcagacggaaaacaaaaaatttcgttaggtaggggccttgttagatctgatgtgaatgtaattatgtttgatgaacctttaacagtaattgatccacatttgaagtgggttctaagatcaaaattaaaagaattacatcaaaaaattaatcgtactatgatttatgttactcatgatcagatagaagcattaacattcgcagatcaagtcgttgtgatgcatgaggggcagattgttcagacaggaacacccgtagaattatttgaaaaaccaaaacatacgtttgtaggtcattttataggttcacctggaatgaatattcttccttgtgaaataaagaacggacaaataaatttgaaggaaaaatattacccacaaatacta

SEQ ID NO: 268977 - DNA, 751 bp, Unknown
  Bacterial polypeptide expressing nucleotide sequence isolated from the Sargasso Sea
gaaaaaatatctctctcatttggcggtgtgcatgctttagatgaagtgacattcgacatcagaaaaggtgaaattagagcaattataggtccgaacggggctggtaaatcatcgatgctaaatgtgataaatggtttttatcagcctcagcaagggtttattaaatacaagggcaatgaaagaaaaaaaatgagcccgcagatagctgcgtctcaaggtattgcgagaacttttcaaaatatagctctatttcgaggtatgagtacactagataatattatgaccgggcgtaacctaaaaatgaggagaggcattttttggcagatgatacactggggtccagcgcgtaatgaagaaattcatcatagagagattgcagagcatgtcatcgattttcttgagatagagcctatccgaaagacacccgttggacgattaccatatgggctccaaaagagagttgagttgggaagggctcttgccgcacagcccgacttactcctactggatgagccaatggcaggaatgaatgtggaagaaaaagaagacatgtgcaggtttataattgatgttaatgaggagtttggtactaccatagctcttatcgagcacgatatgggcgtggtgatggacctttctgaccgagttgttgttttgaattatggcaagaaaattgcagatggcactcccgactttgttcgtgctgaccagggtgttgttgatgcatatttgggcgttagcgagaagtaga

SEQ ID NO: 268978 - DNA, 556 bp, Unknown
  Bacterial polypeptide expressing nucleotide sequence isolated from the Sargasso Sea
tatgatagaaattaaaaatttacataaatcctacgaaataggggcatcctcattgcatgttcttaaaggtattgacttttctgttgaagatggagatttagttgcaattatgggatcttctggttccggtaaatcaacactgcttaacattcttggtatgttagatacttcagatgttgggacatatgatttagataagattagaattgcagatatgaatgagaaaaaagctgctaactacagaaataaatttcttgggtttgtttttcagtcatttaatttaattaattataaaaatgctcttgaaaatgttgccttgccattatactatcagggaatatcgagaaaagagagacaaaaaactgcattaaactttcttgataaagttggcttaaaagactgggcagatcatctgccaagtgaactatctggtggtcaaaaacaaagggttgccatagctagagcattggcatcaaatcctaaagttcttcttgcagacgaacctacaggtgcacttgactcaacaacatcacttgaggttatggctcttatcaaa

SEQ ID NO: 268979 - DNA, 486 bp, Unknown
  Bacterial polypeptide expressing nucleotide sequence isolated from the Sargasso Sea
atgtatttctttttgaaggaagtgtttttgaaaatattgcatacggaaatattgaagctaatagtgaggaagtttggaatgctgcaaggctttctgagtcagatagatttatcaatgatcttccaaataaagaagacacaatagttggggaaagaggccaaaaactttcaggtgggcaaaggcaaagaatttcaattgccagagcaatccttaaaaacccagaaatactaattctcgatgaagcaacatcagcagtagataatgaaactgaagcggcaatacaggaatcactcgaaactttaaaagaaggtagaactgttattgcaattgctcacagactttcaactataagaaatgctgatttaatctatgtgttagaggatggtgagatagttgaaaatggaacgcatgatcaacttttaggaaataataatgtttacacaaaactctgggatgttcaaacaggaaaaactagaaaatattaat

SEQ ID NO: 268980 - DNA, 433 bp, Unknown
  Bacterial polypeptide expressing nucleotide sequence isolated from the Sargasso Sea
aaattatatagtgtatcagatataaaaagtagaattgaatatcttgttgagaagttaaggttatcagaattattaaataaggttactggtgaactctcgtcgggacaaaagaatagagtaagtttggcaaaagcgctaataaatgatccaagtgtattgctgctagatgaaccaactgcctctcttgatccagaaattggagattttgttagaacatttttagaaaattacaaaaaagaaaaaaaaatatcaattttgttagcttcacataacatgaatgaagtcacaagattatgtaaatcaatattgatgatgaaagatggcttaattatagatcaagggagtccggaagaattaattaaaaagcatggtagaaaaaatttagaggaagtgtttttaaaactttcaaggagaaaagatgagcttaactaga

SEQ ID NO: 268981 - DNA, 616 bp, Unknown
  Bacterial polypeptide expressing nucleotide sequence isolated from the Sargasso Sea
atcagcatcatctatctagcagttgacggggtcttggcaggattactagcggtctcagacccgataaaaccgacctctaaagaagcagtcaccaagcttaaggctgataacgtaaaaatcatcatggccacgggagacgggctcaccaccgcacgtgctgtcgccaaggagatgggtattgaagaggttcatggtgaagtgaaacctcaggacaaggagcgcctggtggcggacctccagcaatccggtcgaaaggttgccatggccggcgacggtatcaacgacgcaccggccttggcgcgagcagatgtgggcattgccatgggtacagggactgacgtcgcgatgaatagcgcgcagctcacgctggtaaaaggcgacctgatggggattttacgggcacgggcactttcggttgcaacggtaaaaaacatgcggcaaaacttggggttcgccttcctttacaactcaatgggtattcccctcgccgcaggcctgctctatccactgacggggcaccttctgtctccaatgattgctgcgttagccatgagcgtcagttctgcgtctgtagttttcaatgctttgaggctgaggaatacccgaattgaatgag

SEQ ID NO: 268982 - DNA, 705 bp, Unknown
  Bacterial polypeptide expressing nucleotide sequence isolated from the Sargasso Sea
aatggaaatagcggttcaagcagtttcacatcagtacggcggccaccacgcgctggacaatataagcctttgcctaaaaccaggcttaaccatgctgcttggaccaaatggcgcaggcaaaagtaccttatttgcgcttattacgggccttcaaaaactcacgcaaggcagcattacctttgatggtgctaccctgtctcaatctcgcacaagtattatggcgaaaatgggcgtggtatttcagcaaagtaccttagatatcgacctgtcggtaaaacaaaatttgtcctactttgcttcgctccacggcataactaccacttgcgcgctatctcatattcaaggcctgctcgacgagctcgatcttacgagtaagctcaacacaaaaattcgcaacttaaatggcgggcacagacgtcgggtcgagttagctcgctgccttattcacaagccatccttgctgctattagacgagcctaccgttggcttagatatagaatcccgtcatcttattttgcgggtagtacaagcactcgctcattcgcaaaacgtaagtgtactatgggccacgcatttatttgaagaagtgaagcacaacaacaacttgatagtcttatcaaaaggacgagtgttagcccacgaccaatgtgaagcccttgtagccaagtatcatcaacaggatattgagcacctttggcagcattt

SEQ ID NO: 268983 - DNA, 403 bp, Unknown
  Bacterial polypeptide expressing nucleotide sequence isolated from the Sargasso Sea
atgaaaaatgaacttgaattaatcaatattaaaaaatcttatggtaattttaatgctatacatgggattaatttaaagattagtgaaggatcctattgttgtcttcttggtccttcaggttgtggaaaaacttctttacttaggatgattgctgggcatgaagagataagtgaaggggaaatttatcttggcccctctagactaaatgaacttccacctgccaaaagaggaacatctatgatgtttcaaagttatgctttattccctcatttaaaagttttagataatgtttcttttgccctaaaaattgctggaaaatcaaaagaagaaagaactaaaactgccttgaaatatattgaaatggttcaaatgcagggatatgaaaatcgtttgcctcatcaat

SEQ ID NO: 268984 - DNA, 820 bp, Unknown
  Bacterial polypeptide expressing nucleotide sequence isolated from the Sargasso Sea
agtaggtgaatctgggtcaggaaaatctgtgacagcactatcaatccttcagttactgcctgaaggaacagttcagtattcttctgaatcatcaatcaaattcgaaagtgatgaaattatttcttgtcctaaaaaacccctgtctgctttgagaggtaataaaatctctatgatatttcaggaaccaatgacatcgcttaatccttatcagaaagtaggcttccagatagatgaaacacttatgatacataaaaaattaacatcaaaacaagctagaaaaaagacgattgatctattaaaaaaagtaaaaattcctgaaccagaaacaaaggttgattcttatcctcatcagctatcaggaggtcaaaggcaaagaataatgattgctatggctctagcaaatgaaccagaactattaattgctgatgaaccaaccactgcacttgatgtaactgttgagaaagcactattagaattattatctgacttacagaaagagtttggcatgtctatattgttcattactcatgacttgaatattgtaagaagattttctgatgaagtttgtgtcatgaaagaaggaaaaatagttgaatcaggtaaggttaaggatatttttgataatcctcagcactcatataccatcaagttacttaattccatacctggaccgaaaccggaattaaatctagaaaatgaggagttgctcattggtcgaaaagtcgacataaaatatccaacagtcaagaatatatttggcaaaacagtagattttttgaatgctgtaaaaaaagttgatataacaatacacagtggttct

SEQ ID NO: 268985 - DNA, 337 bp, Unknown
  Bacterial polypeptide expressing nucleotide sequence isolated from the Sargasso Sea
tatgataagcgtatccgatgttaatctaacatttgaaacaaatgacggtcctgtaaatgcgttaaggagtgtatctttggaagttaatgaaggagattttgtatcctttattggaccatctggatgtgggaaaacaactcttctcagagttattgctgcacttgagaaacctacagaaggtaaggtagttgtaaataacatgacacctgatgaagcaagaaaagcaagagaatatgggtatgtgttccaggctgcggggttatacccctggaggacagtaagtggaaacattaagctgcctctagagattatgggatattctgctagtgagaaagaa

SEQ ID NO: 268986 - DNA, 706 bp, Unknown
  Bacterial polypeptide expressing nucleotide sequence isolated from the Sargasso Sea
atttcaccagagttcacctcaagtaaaacagttattcataatgtttcgcttgatgtgaactctggtgaaattgttggacttttgggcccaaatggcgcgggcaaaactacaaccttctatatgattgttggcttattaaaatcagatgagggtagcatatacattaatgatcaaaatataacttacgaaccaattcataaaagatttgagcaaggaatcagctatctacctcaggagccatctgtattcagagacatgacagcaaaagataatattgattcaattcttgaagttgatagtagtcttagtaaaattcaaaaagccaacattcttgaacatctgattgagaaatttgatttaagtaagttcattaatactaaaggtatacaattgtcgggaggagagagaaggagagttgaaatcgctcgggcattagctctaaaacctaagtttcttttactcgatgaaccatttgcagggattgatccaatatctgtaatagatttacagaaaataataaaagttttggcaaaagaagatataggaatactaattactgatcataatgtcagagaaacattgaaaatatgtgataaatcatacgttatcaactcaggcaaagtgttagcatccgggaaatccaaagatcttgttaaaaatgaaattgttaagaaagtctatttaggtgaatcttttaaattgtgaa

SEQ ID NO: 268987 - DNA, 355 bp, Unknown
  Bacterial polypeptide expressing nucleotide sequence isolated from the Sargasso Sea
gatgcaaggactatctaagctatatagacataaacgatcaattgaacttttaaattccgttggattagaagatcaattaaatagaagacctaatcagttatcaggagggcagcaacagagagttgctgtagctcgagctttagcttcaaaaccaaagtttgttcttgctgatgagccaactgctaatctagattcatcatcaacagccaacctacttgatataatgagtaagctgaataagacagaaaaaatgacttttatcttttctacccacgatcaaagggtaatagacagagcaaatagaattataactttggaagacggcaaaatactttctgataaaaaaatcaaataa

SEQ ID NO: 268988 - DNA, 472 bp, Unknown
  Bacterial polypeptide expressing nucleotide sequence isolated from the Sargasso Sea
atgttagctgtaagaattaacaatctttcttattctatgaatgaaaagaaaatattaaataatattaatctactgctagaaaaagaaaaaatagcctgcatactgggcccttctggttgtggtaaaactaccctactaaaactaattgcaggattatccaaagtacaagagggggaaatattcctaaatgaaactctagtgagctcttcagacactcatttaaaaacagaaaaaagaaagattggatttctttttcaagattatgctttattccctcaccaaactgtgaaacaaaatttacaatttgcgataaaagataaatctacttctcacagggttgaggaaattatggatgttataaaactttctgactcactcgaaaaatatcctcacgaattaagtggaggggaacaacaacgagtagccttggctcgctctataatagcaaaaccagatttattattattagatg

SEQ ID NO: 268989 - DNA, 727 bp, Unknown
  Bacterial polypeptide expressing nucleotide sequence isolated from the Sargasso Sea
aatgaatgaatctgtagtgcaggtaaataatttagcgaaacaatttaaaaatgctttagctgtaaacgatgtaagttttagtattactagaggaacaattcttggtcttttaggaccaaatggatgcggcaaatctacaacaataggtatgatgttaggtttgataaaacctacatccggagaagttataattaataatcaaaatattgaaaacaatagaactagtttattagaaaaaatgaattttatttcaccttatatagaattgccaaaaaaacttaccgtagaggaaaatttaaaagtttatggaaaattatatggtgtaaaaaatttaaaagataaaatttataatttaatggaaaaacttaatctaactgaatttagatcaagaaaaactggagagctatcttcaggacaaaaaaatagagtctcattagcaaaagcactaattaatgatccagaaatacttttactagatgaacctacggctagtcttgatccagatgttggtgataatattagaagttttattgaagattttgcttcaaatcaaaacacaacaattttattagcctctcacaatatgaatgaggttgaaagactctgtcatgaggtaatgatgatgaaggatggaaaaataattgataaaggaaaaagcaatgaattaataagtaaacatggaagaaaaaatttagaagaagtttttcttaaaatagttagagaataa

SEQ ID NO: 268990 - DNA, 730 bp, Unknown
  Bacterial polypeptide expressing nucleotide sequence isolated from the Sargasso Sea
atgacaaattctatcgaggtaataaacctatctaaaaaatataaatcaaaaaatgctgtaaataatataaattttaaaattggtgaaaatgaaattgtcggcttattgggtcctaatggttgtggaaagacaaccaccattggaatgatattaggattactaaaaccttctagcggtcaagttttaattaatggaaaaaatatagagacaaacaagatatctctattacataaaatgaattttatatctccttatattgagcttcctaaaaaattaaaagttaaacaaaatttaattgtttatggaaaattatataacgttgatgatttagaaaatcgaattgattatctttcagatcaacttaggctaactgaccttttggataaaataacaggtgaactttcatctggacaaaaaaatagggtcagtttggcaaaagctttaataaatgatcctacagtactgctactagatgagccaacagcttcactagatcctgaaacaggagattttgtaagaacatttttagaaaattttaaaaaagaaaaaaaaatttcagttttacttgcatcacataatatggatgaagttaaaagattgtgtggttctgttttaatgatgaaagatggaattattgtagatagtggaacgccaaatgatttaatattgaaacatggaagaaaaaatttagaggaagtttttttggaaatagcgaggaataaaaaatgaa

SEQ ID NO: 268991 - DNA, 598 bp, Unknown
  Bacterial polypeptide expressing nucleotide sequence isolated from the Sargasso Sea
gcgacttgataaaaaactcagacagagcactcagtttgagctgatggatattcattatgagcttggcataacctttgtaattgtcacacatgaccaagaggaagcaatgacgctctcagatcgaattgcgatcatggagcaagggcagtttgtgcaaataggttctccaaatttaatttatgaaaatccaagatctaagtttgtggctgacttcttgggcaatatcaatctcctagaagcgacgataactgaacaaaatgacaaagagatcgttgtcgactgtgctgcacttggaggcgagttaaagtttgatcaaactgaacaagcgaatgcgtctgaaatgactgtggctctcagaccagaaaaggtaatgattgaaaaaaacataccaacgaatgatgaccaaagtcatattaaaggcattgttgaagactttggatacttcggtaatctttctatttatcgtgtcaaaactgagagtggtcatgtcattcaggtcagtaaacaaaacagagatcgagttgagcagtccattaagtgggaagatgaggtttacctttcttgggataatgacagcctgatgttattgggtgaatag

SEQ ID NO: 268992 - DNA, 487 bp, Unknown
  Bacterial polypeptide expressing nucleotide sequence isolated from the Sargasso Sea
aatggaaatagcggttcaagcggtttcacatcagtacggcggccaccacgcgctggacaatataagcctttgcctaaaacctggcttaaccatgctgcttgggccaaatggcgcaggcaaaagtaccttatttgcgcttattacgggccttcaaaaactcacgcaaggcagtattacctttgatggtgctaccctgtctcaatctcgcacaagtattatggcgaaaatgggcgtggtatttcagcaaagtaccttagatatcgacttatcagtgaaacaaaatttgtcctactttgcttcgctccacggcataagtaccactagcgcgctatctcatattcaaggcctgctcgacgagctcgatcttacgagtaagctcaacacaaaagttcgcaacttaaatggcgggcacagacgtcgggtcgagttagctcgctgccttattcacaagccatccttgctgctattagacgagcctaccgttggc

SEQ ID NO: 268993 - DNA, 91 bp, Unknown
  Bacterial polypeptide expressing nucleotide sequence isolated from the Sargasso Sea
attgcaagagctctttgtatggagccaaaaaataataatttttgacgagccaacatctgcattagatcctgagatgattaaggaagtttag

SEQ ID NO: 268994 - DNA, 453 bp, Unknown
  Bacterial polypeptide expressing nucleotide sequence isolated from the Sargasso Sea
gattaaccgtagaagaaaatttaagattaggtgctcatgcaaatgaaaaagggaagtattttgaaaaagatgttaaggaagtttatgatttatttcctgtattgagtgatagaaaaacgcaaagaggcggaacactttcaggaggagaacaacaaatgctagctattggaagagctttaatgagtaaacccaaagtgcttttattagacgaaccttcgttaggaatagctcctaaattagttaatcaaatttttgtttcaataaaaaatattaataaagaaaaaaatgttacaatctttttagtagagcaaaatgctaaaaaagctttggagctcgctgatcgcgcctatgtactagtcaacggcaaggtgaccattaagggttctggtcaagaacttctaaaaaacaaagatattcaagcggcctatctagagggtggagcaaaaaattaac

SEQ ID NO: 268995 - DNA, 893 bp, Unknown
  Bacterial polypeptide expressing nucleotide sequence isolated from the Sargasso Sea
ttttgaaataaaacaaggtattggaagtgaaaaaggaatggtacatgctgttgaaaatatagatttttcacttcaacccggagaaactttaggtttggttggtgaaagtggttgcggtaaatctactactggaagaagtattgttcgcttggtggagccaacaaggggagaagtaaactttaatggtcaagatttaatctctttgaataagacggaaatgcgagattttagaaggcaaatacaaatgatttttcaggatccttttgcatcattgaatccaagaatgactgttggagatactattgcagagcctatttttgttcacgataaaattaaaggagacgaattaaaggatagaatttctatgttattaaaaagagttggtcttggtcctgattatgcaacgagatatcctcatgaactatctggtggtcaaagacaaagaattggaatagctagagcaattgccttaactccaaaacttataatagcagacgaggctgtttcagcactagatgtatcgatacaagcgcaagttgtaaacttaatgatggatcttcaagaagatcttaagcttgcctatttgtttataagtcatgacatggcagtgattgaaagagtaagccatagagtagctgttatgtatctaggagaaatagtagaattaggattaagaagccaaatttttgagaacccacaacacccttacacaaaaaaacttatgtctgcagtcccaattgcagacccaaaaaacagaaagaaagagcttaacttaatgacagatgaaattccaagtttagttaagccaatgggatatgagcctgaaaagaaacagctaattaatgttagtgacggacatcaagtaatgccttttgatggaatgaaaatttgaa

SEQ ID NO: 268996 - DNA, 838 bp, Unknown
  Bacterial polypeptide expressing nucleotide sequence isolated from the Sargasso Sea
atcaggcgtcatcattcctgacgaaggtaaaatttatttaaatgaaaataatctaaagctcaattcgccattagatgcaaaaaaaaatgatatcggaatggtattccagcattttaatctttttgaaactttgtccgtatttgaaaacttaataatagactcagatgaagaaagggaaagtttaagagaaaaaattgatacaattatgaaaaaatataatttttcaattgatcttgatattcctgttctaaatctatcagcaggtcaaaaacagaaagtggaaataataagatgcctaataaggagtccaaaagttttaattatggatgaacctacatctgtattaacagaacaagaaacgagtgaattattcttatctttgaaaaaattttcagaagaaggaattttaattatttatattacacataaactaaaggaagttatgcagctttgtgatgaagttgctgtaatgagaagaggaaagttggtttctgtaagtgaaataaacaacgaaaatattgagtcacttgctaacaaaatggtgggtcagaacctaaaaacaattaagaaacaaaaagcgaaaacttcatcagatcagttaattaaaataactaatcttaattttacaagtgaagatccttttgaaacaaatttaatgaatattaatttttctgttaatcgaggggagtgtttaggaattgccggtatatcaggaaacggacaaagtgaattatttcaagtattaagtggtgaaattatttcggaaaagaattctatagaatttaataaaaattatataggagatttaaatcctcaagaaagaagagaatatttgatg

SEQ ID NO: 268997 - DNA, 585 bp, Unknown
  Bacterial polypeptide expressing nucleotide sequence isolated from the Sargasso Sea
tatttgatgagcctttatcaaatttagatgcagcactaagatcagaaatgagagttgagatttccaaattacataatcaaattaaaacaaatatgatttatgttacgcatgatcaggtagaggctatgaccctagctgataggattgtaatattaaatcttggtaatattgaacaagttggaactccagacgaaatttacaacaatccagcaaatatttttgtagctcaatttattggaactccaaaaatgaacattttaccactaaacaatgaaaatattatttcagaaaataaaattaagtttttaggtaatgaaataacttttgaaaaaactaaatttgataaaaagaaatatttcttaggaataagacctgagcattttaatttatctaatgaatcacaatttaaatttaaacctaaaattgatcttgttgaaaatttaggaaatgaaaagattgtatacatgagtaacgacaacttagaacttagtgcaaaaatttctagtcaggaagattttcaaaatcagattaattttgactctaaagatatttttatttttgacgaaaacggaagaagaatttaaa

SEQ ID NO: 268998 - DNA, 373 bp, Unknown
  Bacterial polypeptide expressing nucleotide sequence isolated from the Sargasso Sea
ttaaatgttttcgaaaacgttggtttgggcttggggagaaaagttaatgacagaagaataaaaatacaaaacattatagatatgattgacttaaaaggtcatgaaaaaaaatatccaaatcaattgtcaggaggtcaacagcaaagagttgctattggaagagctttggctattagtccatctgcaatactaatggacgaacctttttcgaatttagattttagtttaaagaaaatattgtctaatgaagttaaaaaaataatcaagaatacaggaacaacaacaattatggttactcatgatgaaatagaggctgaaagattatctgatgagtgttatttactcgaaaatggcaaaataaaacagatttaat

SEQ ID NO: 268999 - DNA, 289 bp, Unknown
  Bacterial polypeptide expressing nucleotide sequence isolated from the Sargasso Sea
gctatcgctagagcattatgtatgcagcctaagataatgttatttgatgaaccaacctctgcgcttgatcctgagatgattaaagaggttttagatgcaatggttaaccttgctaaaggtggtatgacgatgatcgttgtaactcatgaaatgggatttgcgaaagaggtagcagatgaggttatttttatggacgaaggtatgatagttgaaaaaaataccacaaaagaattttttgctaacccaaaaagtgacagaacaaaacttttcttaagtcaaatattataaa

SEQ ID NO: 269000 - DNA, 709 bp, Unknown
  Bacterial polypeptide expressing nucleotide sequence isolated from the Sargasso Sea
tgtgtctctatcctatggaaacagacagatattagaaaatattaattttaagataactgaggggcaaatatttggaatgttgggacccaatggtgttggaaaatcaactatatttaatcttataactggtttaattaatccaggaaacggaaaaattaaaatagcgggtgaagatgtaaccaaataccctgtctatctgcgaacaaaaaaatttaaagtaggttacgttccacagtatggtggtttttttaatgatctaactcttcatgataatttaaaagcaattagtgaaattgtaatagacaacaaaaactaccgaatagagagagtaaattatttaatttctaaatttgaacttgataatctaaaagatataaaaggaaaatttttatcaggtggacaaaaaaaaaagttagtaattgcattatcattattaagtgaaccaaaagtacttcttttggatgaatgctttgctgctttagatgttttaacaataaaaatgctacaagaaataattgtaaacctccaaaatgaaaatagaattacaatttgcatatgtgatcatcaagcaagagatcttttagcatgtgttgatatggccatgatattaagcaatggcaaaattatagctcaagacatgccatcaaatttagtaaaaaatatcaatgctaaaaatgcatactttggcgataattttaaatttaattaa

SEQ ID NO: 269001 - DNA, 970 bp, Unknown
  Bacterial polypeptide expressing nucleotide sequence isolated from the Sargasso Sea
gaacctaagcgatgtgactctcaaaaaatagaaatgacagaaatgaaaaagactgatcgtcattcaacacgctgcttaaaatttcaggaaattgattggatggctcccgtaacaaaggccgaaacttcaaatcaggttgagccaggagatgttattctcaaaattgataatctaaaaaaatattatgaagtcgccgcaaacgcgttatttggctcatctggcgataaaaaagttgtaaaagccaacgaaactctttctttcgaagcaagagagggtgaaactttagcaattgtaggagagtcaggatgcggaaaatcaacattagcaaaggtcttgatgggcctagaaaccgctacagatggtactgttgtattagataataattcaatcggctcaattccaatagaaaaccgaacgacagaaactgttgcagatattcaaatggttttccaaaatccatttgacacactgaatccttcaatgaccgttgggcggcagatcgttcgcgcactagaaatttttaagtttgggaaaagtgacaaagatcgaaatgaacgcctgttagaacttctagatcttgtaaaactacctcgtgagtttgcagatagaatgccccgacaactatcaggtggtcagaaacaaagagttggaatcgccagagcatttgcaggtggagcaagaatagttgtagcagatgagccagtatcagcccttgatgtgtctgttcaagctgcagttactgatttacttatggaaatccaaagaaatgaaaaaactaccctgctgttcatcagtcacgatctctcaatagttcgttatctctctgatagagtaatggtgatgtatttaggacatgttgtagaattaggaaccacagaccaggtttttgcaccaccttatcatccctatacagaagcacttttatcggctgttccgatagcagacactaatgttgagaaagagcatatcg

SEQ ID NO: 269002 - DNA, 748 bp, Unknown
  Bacterial polypeptide expressing nucleotide sequence isolated from the Sargasso Sea
gcaggttgccctgatcgacacgtcacccacagctatggagacaagatcctgtttctgggggctgaactggaggtcgagcggggcgaccgcatcgccttcgtgggtcccaacggcgcaggcaagtcaaccctgctgcgcctggtcatgggggtggaaccccccgatgaaggcagtgcccgactgggggagcacaacgtgattgcgggctacttcgaacagaaccaagccgaagcactggatctatcgaagaccgtgatcgacacgatgtacgaagcggtccccgactggacccagacccaggttcgttcgctgctgggcagtttctgcttcagcaacgacacggtgttcaaagaggtcgggaagctcagcggaggagagaaagctcgcctggcacttgcgctgatgttgctcaccccctgcaacctgctggtcttggatgagcccaccaatcacctcgacattccggccaagcagatgctcgaggacgccttgatggcctacgaaggagctgcgctactggtctcccacgaccgttatttcatctcccgcgtggccaaccggatcgtcgagctgcgagagggcgagctggtcctgtatcggggtaattacacctactacctcgagaaaaaagaggaggaaagggctgctgccaaggagaaagaactggctgcagagcgagagtccaagcggaaagccaacaaagagaagcagaaagcacgcgacgcccgccgcaaaaaggcggcctgac

SEQ ID NO: 269003 - DNA, 449 bp, Unknown
  Bacterial polypeptide expressing nucleotide sequence isolated from the Sargasso Sea
tggaaaaactttgaatcatataccaactgaaaaaagaaaagttggacttttactacaagatggcactttatttccccatttgacagttgaacaaaatatttattttggaatgaataaaaaacttaaagctaaagaaaaattaaatttaataaatgataatctaaaaaaagcaaatatggagggctttcaagatagatatcctcataccctatctggagggcaaaaagctagaatagcctgtcttagagcaattttatccgaaccggaaatattattactggatgaaccattttcatctttagaccctgaatttagaaatacatttagaaattttatgattaataaagtaaaagaaagcaatattccttgtttattggttactcacgatgaaagtgataaattgattagcaatgaacaaccaatagatttaaacttatttatggaataaa

SEQ ID NO: 269004 - DNA, 667 bp, Unknown
  Bacterial polypeptide expressing nucleotide sequence isolated from the Sargasso Sea
tatggatgatggtcttattataagtaaaatttctaaatcttatggaaataaattggttgttagagatattagtatatcaattaatagaggtgaaattgttggacttcttggccctaatggtgctggcaaaacaacaactttttatataattgttggattagtaaagcctgatactggttctatttatttggataaattagaagtttcaagtctaccaatttacaaaagaggggtaatgggaataagttatttaccacaagaggcatcgatttttagagggatgaatgtagaggataatttactctcaattattgaaatacatgaaaaaaatagaggtaaacaagatataatattacaaaatttacttaatgagtttgatataaatcatgtaagaaaatcaaaatctatagttttatctggaggggaaagaagaagattagaaatagcaagaacattagcttctaatccaaaatatttacttctagatgaaccgcttactggtattgacccagtatctatagaagagatcaaaattattattcgaaaactaaagcaaaaaaatataggagttttaataacagatcacaatgttagagaaacattaaaattagttgataaagtatatatagtgaatgaaggtgccattttttttaaaggtaatccaaat

SEQ ID NO: 269005 - DNA, 529 bp, Unknown
  Bacterial polypeptide expressing nucleotide sequence isolated from the Sargasso Sea
ggcagaccgttacccccatgaaatgagcggaggtcagagacagcgtgtcggaatcgcccgggcactctccctgaaccccgaattcatcatttgtgatgaagcagtttcggcgctggatgtttcgatccaggcgcaggtcatcaacttgttggaagacctgagggaagagttcaacctaacttatttattcattgcccatgatttaagtgtggttcgccacctctgccagaaagtggccgtgatgtatttgggcaaaattgtggaaatggcggattgtgatgaactttacgacaatccccaacatccttataccaaagctttactgaatgcggttccggttccggatcctgaagttgaaaaaaacagggaacacaacatcatgacaggggaagtcccaagcccgatcaatccaccttcgggctgtgtctttcacccgcgttgttccctggcagtggaatcctgtaaatcggatatccctgttttggaagataaacgtgcaggccattttgtcggctgcacccaggtctaa

SEQ ID NO: 269006 - DNA, 613 bp, Unknown
  Bacterial polypeptide expressing nucleotide sequence isolated from the Sargasso Sea
tctgcaatgaagatggttgctgcaagtaagctacgtagatctcaagaaaaggcagaagccgcaaggccttattcttcaagattagaagaaatgttatcttctctggctacttctgcatcttcaggagaagggattataaaacttttaactggcactggagaagatcaaaattatattgttgtacctgttagcgcagatcgaggtttatgtggtggttttaacagtagtataaacagagaaacatttaagctagttaagaaattagaatctgaaaacaaaaaagttcaactgctacctattggtaaaaaaagcagagatttttttcttcgtactttgaaagaaaatataacagacagctttgttgatacgaatgtatctagtgcaggttacaatatagcattagaaatttctgcaaagttacaatctttatattttgaaggaaaatttgataaatgtattcttgtatataataaatttaaatctgcaatttctcaagaagtaacacaacaacaattaatacctcttgatatatctaacaaaaacaatgaagataaatccaatgaaactgaaagttctaaaaaggcaatatatacttatgaacctgagaagaaac

SEQ ID NO: 269007 - DNA, 526 bp, Unknown
  Bacterial polypeptide expressing nucleotide sequence isolated from the Sargasso Sea
atttcaggttgtttctttcgcaacaacaaccggttttacaacggctgacttcaatgcttggccgctttttttaccatacctacttttatatgcagccattattggtgcgtgcgcaggttcaactggtgggggaatgaaggttatacgaatattgctgatcttcaaacaaggtatcagggaagtacagcgtttaattcaccccaaagcagttattcctgtgaagcttgggagaaatcctgtgccagatagagtaattgagtcggtatgggggtttttcgctgtttacgtcatggcattcctagttatgctacttgcgctagtcgcgactggattagatatcataactgcatttagcgcggtgggatcatgcattaataatttaggtcctggtttggcagacgtgtcgacgacttacgaatctataccaacccaagcaaagtggattttgtgtgttgcaatgcttttggggcgactagaggtatttaccctattggttctattcactccgatgttttggcggcgataa

SEQ ID NO: 269008 - DNA, 349 bp, Unknown
  Bacterial polypeptide expressing nucleotide sequence isolated from the Sargasso Sea
tatgtctgaaaacatcattcaaataaataacatgaataaatggtttggggattttcaagttttaaaaggaataaatttggaggtaaagccaaaagaaaaaattgttgtctgtggaccatcgggctcaggtaagtccactttaattagatgtattaatagattagaggaacatcaggaaggaaatataattgtagatggtactgaattaactgaagatacaaaaaatatagagcagattagagcagaggtaggaatggtatttcaacaattcaatttgtttccacatctatcaataattgataattgtacgctagctccaatttgggtaaagaagctcccaaaaaaagaa

SEQ ID NO: 269009 - DNA, 773 bp, Unknown
  Bacterial polypeptide expressing nucleotide sequence isolated from the Sargasso Sea
tatgcatgcattatcaataaaagatctctcaaaaaaatataaaagcggtgtcgaagcactcaaatccgtcagttttgatgttcaagaaggtgatttttttgctcttcttggtccgaatggtgccggaaagacaaccgcgataggaatcatcacttcgcttgtaaacaaatcttcaggatcgatagaggtttttggacatgatcttgacaaagaattggcaaaagcaaaatcttgcatcggcgttgtgccacaagaagtgaatctgaatctttttgattacaactttaatattttggttaatcaggcagggttttatggcatcccaagaagtgaaggaaagaaaagagctgaacagtatttgaaacagatgcagctctgggataaaagaaaaacaaacgccagaagcctatcgggaggaatgaaaagaagactgatggttgctcgagcattggttaatcaaccaaagctactcctgcttgatgagccaacagcaggagtcgacattgaaacaaggagaatgatgtgggattttctcagagatctgaatgcaaacggaacaacgatcattctaactactcactaccttgaagaggcggaacagttgtgtaataaggtcgccattattgatgaagggaaaatcatagagaatgactcgatgcaaaatgttttgaaaaagctcaagaccgaagtatttatccttaatacagagaagccgctcgataaagcacctcaaattgatggatatatcactgctttgaaatcaccacaagaga

SEQ ID NO: 269010 - DNA, 662 bp, Unknown
  Bacterial polypeptide expressing nucleotide sequence isolated from the Sargasso Sea
aatgaataaatttaaattacttgatgatggattaataattaataaaatttctaaaacctatggaaataaaaaagtagttagtgatattagtctttcaattaaaagaggtgagattataggattgctaggtccgaatggagcaggcaaaactacgactttttatatgatagttggtttggtaaagcctgaaactggtaatatacttcttgacaaaattgatataactcaagctccaatttatctaagaggtgctaagggcattagttatcttcctcaagaaccatcaatatttagaggcatgaatgtagaggataatttactatctatcattgaggtagtagaaaaagacaaaaataaacatcaaattattttgcaaggtttattaaatgaatttaatataagtcatgtaagaaaatcatcctcaacagttttatcaggaggagaaagaagaagattagaaatagctagaactcttgcttcaaatccaaaatttttacttctagatgagcctttaacaggtatcgatcccgtatcaattgaagaaattaaatctatcataaaaactctcacaaaaaaaaatatcggtgttttaataactgatcacaatgttcgtgagacattaaaaattgttgataaagtctatatagttaatgaaggaagta

SEQ ID NO: 269011 - DNA, 726 bp, Unknown
  Bacterial polypeptide expressing nucleotide sequence isolated from the Sargasso Sea
aaaggttttattaaaaaaactgtaggacatgtgaagtctgtagatggaattaactttcacattaatgaaggtgaaacccttggattagtgggtgaaagtggatgtggaaaaactaccacagcacgttgtattctcagagcaatgaaacccactgaaggaaaaattcagtttaaaactagtgatgggtcacatactaatttagcaaccttgaaagaagatcaaataaggagtttaagaactgacattcagatgatttttcaggatccatttgcctcattgaatccaagaatgaatattctggatttaattggtgaaccaatgctggtaaatggtttgacaaagcgcaagcaaagaacagaaaaagtagcagaattactgaaaatggtaggtttgcgtcctgagtatatgcaacgttttcctcatgcatttagtggtggacaacgacaaaggatagtaattgccagggccttggctttaaaaccaagactggttgttgctgatgaacccgtatctgctttggatgtttcagttcaagcacaagtactaaatttaatgttagaattacaacaaaacttaaaccttacttatttgtttgtcgctcacgatttaagtgttgttaagcatattagtgatcggattgcagtgatgtatgtaggtaaaatcgttgaatctgcacctactgattctttatttaataaacccaaaacatccttatactgcagcact

SEQ ID NO: 269012 - DNA, 782 bp, Unknown
  Bacterial polypeptide expressing nucleotide sequence isolated from the Sargasso Sea
ggttaccaaatcgacgaagcattaagattacatacaaattttcaaaaggaagatagagatgtaaaaatttcagagttattaaataaagttaggttgccttctccagagacaattgcaaaaagatatcctcatgaactttctggaggtcaacaacaaagagttgcagttgcaatggctttagcagggagcccggatcttttattattggatgagccaactactgggcttgatgttacaactcaggctcacgtattagagctattaaactttatcgcaaaagatacaggcacatcaatggtatatgtaagtcatgatttaggagcaatagcgcaggtaagcgatagagtaattgtaatgtattctggtgaaattgttcttgatggaccagtaaggactatacttaaaaatccaattcatccttatacttatggattattaaaatctataccaaaattaactttatctgggcttcccaattcaatgtcaggtagtcagccacaacctggaacaataaaagagggatgtagtttttacgatagatgtgagtttgctgaagataaatgcaaaataaaatcgccagagttagaatttgttaatgagttcaatacaagtgttagatgttttaaccacaaagaacttcataaaaaaaaggataaggataaaaaatcttcaaaaaatgtcttaagaaaattaacaaaaaatgaaattttagatatatcgtctgtttcaattagttatgcaaaacaaaaattcatcgaacaattactaaataaaattgatga

SEQ ID NO: 269013 - DNA, 481 bp, Unknown
  Bacterial polypeptide expressing nucleotide sequence isolated from the Sargasso Sea
aagttaataaagagttggagaaaaggtgttagtttagtttctcaggatatatatttactcgacagaagcataaaagaaaatatatctttaacaaacaagccaaatttaattaataataaaaaacttaacaaggtaatttctttagctgaattaaataaattcacaaaaaagcttaaaagaggagttgattcaaaagttggtgaagagggaatctggcttagtggaggacaaaagcagaggattggaatagcaagaggattttacaaagattcgaatctaataattctcgatgaagcaactagtgcacttgatgaaaaaacacaaaagaaaatcctcagtaatttaaatagagagtttaaagataaaactataataatgattagccatcgattaagtactctaaaaatttgtgacgaaatatatgagataaaaaatggggaattaaacgttgttgatattgataaaattttaatgcaataat

SEQ ID NO: 269014 - DNA, 697 bp, Unknown
  Bacterial polypeptide expressing nucleotide sequence isolated from the Sargasso Sea
gatgattttaagtgcaagagacatatcaaaatcttacagaggaaggaaagtagttaataatatttctattgaagtaaatcaaggagaaattgttggtttacttggcccaaatggtgctggaaagaccacatcattttatatgattgttggaataataaagcctgaacaaggtgatatttttcttgataacgaagttatctctaaatatccaatgtatcaaagagctcaaaaaggaataggatatctcgctcaggaagaatcagtgttcagaaagctttcagttgaggataatatactaggtgttctagagttttcaggactttcaaaaaatcaacaggaagagaaagctcaacaattgatggaggagtttggattaattaatataagaaaaagtagaggtgatcttttatctggtggtgaaagaagaagaactgagattgctagagctttagcaaataacccaaactttttactattggacgaaccttttgctggagttgatcctatagcagttgaagatattcagtcaattatttctgttttgaaaaagaaaaatattggaatacttattacagatcataatgttcaagaaacacttgcaattacagacagaacttatttgatgtttgaaggtaaaatccttaaagaaggtgtgcctgaggatcttgcaaaagacgaaatggtcagaaaggtgtat

SEQ ID NO: 269015 - DNA, 607 bp, Unknown
  Bacterial polypeptide expressing nucleotide sequence isolated from the Sargasso Sea
atgaacttaaaaattcaaaatgtatctctttcaattaaggggagatttattgtcaatgatgtttctataactgtaaatccaggagaggttgtaggtttaatgggacctaatggtgcagggaaaactaccacttttaatcttgcagttgggaatataaaacctgataaaggagaagttttaatgaatggtaaaaatatcactaatcttccactccctattagatcaaaacttgggttagggtatttaactcaggaggctagtatatttagaaacctcactgttaaggacaatatagatttggctttacagaattcatcttatagtcgagcggcaattagaaatagaagagagcaattaattaatgaatttaatttgaataattttgtagataattacggttatcaactttcaggtggagaaagaaggaggtgcgagatagctagagctcttactgtaggaagaaaagggcctaaatatttattattagacgaacctttctctggaatagatcccttagctgttaatgatttaaagaaactaattctcaaattaagtggtgatggggtagggattcttattacagaccataatgtgagggagaccctat

SEQ ID NO: 269016 - DNA, 934 bp, Unknown
  Bacterial polypeptide expressing nucleotide sequence isolated from the Sargasso Sea
tttgcgcagagcaaaagaagttcttgtcgacgttaagctacccgatccagagagaattttaaagtcatatcctcatcagctttcaggtggccaacagcagcgcatagtcatcgctatggctctaatgtccaagccagcacttttgattttagatgagccaacgacagcattggatgtgacggtcgaagccgccgtggtagatgtagtgaaagacttaggcaaaaaatatggcacttccatgctgtttatctcgcacaatctgggattaattctggaaacttgtgatcaaatttgtgttatgtattctggtgaagccgtagaaacaggttcaatatcagatgtttttgataaaatgcagcatccctacactcaggctttattccaatccatccctcttccaagcgctgataaaaatagtcgtcccctggtagcaattccaggcaactttccattgcctcatgagcgaccaaccggatgcaattttggtccaagatgtaattattttaaagatggcttatgtaacatccaagctataccaatgaacaaaatcaaaggttttgagagacacttcagtcgatgttcaagaatagaggaaataaattgggacacaccaatttcgagttcgtcacagttcgaaagtccaccaccgggggatgtggtcctaaaaatagataatctgaagaaatattacgaagtagcagctaatgcattatttggctcaagcggcacaaataaaacagtgaaggcaaatgagacactttcgtttgaagctagggaaagtgaaacattagcgatagttggagaatctggttgtgggaaatctacatttgcaaaagtattgatgggtctggagaccgcaaccgacggcgatattcttttagacaaggaaaacatagaatctacaccgatagaagctcgggacactcaaacggtc

SEQ ID NO: 269017 - DNA, 318 bp, Unknown
  Bacterial polypeptide expressing nucleotide sequence isolated from the Sargasso Sea
aaagacaaagaatagctattgctagagcactaattcttaaacctcgatttataattcttgatgagccaacttctgctttggatagatcaattcagattcaagttatagatgttctaaaacagcttcaattgaagtacaaacttacttatttatttataagtcatgatttgaaggtcattcgctcaatgtgcgacaagatttttgttatgagtgaaggctccatggtggagtacggaaatgccaaagaggtttttaataaccccaaagaaaactatacaaagaagcttcttgatgcttctcttaaatattcctcttagt

SEQ ID NO: 269018 - DNA, 376 bp, Unknown
  Bacterial polypeptide expressing nucleotide sequence isolated from the Sargasso Sea
tttggagaataataatatagatataaacaatgataaaataggaaattatggaaaatccctttcgggaggtcaaaaacaaagaattggaattgctagggcattatataataatccaaaagttttaatattagatgaagccacaagtgcattagactcaattaatcaaaataaaattctctcgaatattcttgaatttactaatgtaagtataataattttaataactcataacactaatcttttaaaaaattttgataatatttatttgttagataatggaaaaatagttgcccaaggagattttaatgaattatcaacaaataacttgttatttaaagagttgactgtaaacaaagaagttaaaaagaaattatga

SEQ ID NO: 269019 - DNA, 607 bp, Unknown
  Bacterial polypeptide expressing nucleotide sequence isolated from the Sargasso Sea
atgagcacgcgtcccttcctcgaagtctcgggtatcaccgtgcgcttcggcggcctggtggccgtgaacaacctctcgttcgacgtggcgcgtggctccatccatgcgctgatcggtcccaatggggccggcaagtccaccaccttcaactgcatctcgcgctactaccagcccaccgaaggccgcatcgtggtcgacggcgaggacgtgacgcaccatgccccttcgcgcatggccggcatgggcattgcgcgcaccttccagaacctggagctgttcggtgatctcagcgtgtacgagaacgtgctgctgggctgtcattcgcacagtgccaacaccctgggacggctgctgcggcggcccagtggtgagatccgcgatctggtggacagcctcatcgagcgcgtgggcctgacccacgaccgcgatacccgtgccaaggagctcgactttggtcatcagaagctgctggagattgcgcgcgccctggcgctcaagccgcgcctgctgctcctcgacgaaccggcggctggcctgcgcaaccgggacatcgagaacctggatcacctgctcacgcaactggccgagaaggacggcatcaccgtgc

SEQ ID NO: 269020 - DNA, 714 bp, Unknown
  Bacterial polypeptide expressing nucleotide sequence isolated from the Sargasso Sea
aaatttctaatgttgaaactttttatggaaaaatccaagctcttagaggtgtagaccttgatgtaaatgatggtgagatcgtctctttaattggctctaacggagcaggtaaatcaactttgctgatgactattagtggagtgaacaaagctaaaagaggaaatatagttttcaacggtgagaatattgaaaacaaacagcctcataaaattgttgatatgggtatttgccaagtaccagaaggaagaagaattttttcaagattaaccgtagaagaaaatttaagattaggggctcattcaaatgaaaaagggaagtattttgaaaatgatattaaggaagtttatgatttatttcctgtgttgagcgatagaaagactcaaagaggcggtacactctctggaggagaacaacaaatgttggcgataggaagagctttaatgagtaaacccaaagtgcttttattagatgaaccttcgttaggaatagcacctaaactggtaaatcaaatttttgtttcaataaaaaatattaataaagaaaaaaatgttactatttttttagttgaacaaaatgctaaaaaagctttagagctagcagatagggcatacgttttagttaatggaaaagtgaccattaagggttctggccaggagttacttaaaaataaagatatacaagctgcttatcttgaaggtggggcaaaaaattaac

SEQ ID NO: 269021 - DNA, 787 bp, Unknown
  Bacterial polypeptide expressing nucleotide sequence isolated from the Sargasso Sea
atgaccgacgagcagaccagcgaaactctcctggaagtagacgccatatcgctgtcctttggcggtgtgcacgcgctcgtggatgtcagttttgatattcgcaaaggggaagtccgttcgatcatcggccccaatggggcaggcaagagctcgatgctcaatgtgatcaacggcttttatcacccccaggaaggcaccattacctaccaggggcgggccagaaagcagatgcggccccatgatgccgcggccggcggtattgccagaacgtttcagaacatcgcgcttttcaagggcatgagcaccttggacaacatcatgaccggccgcaatacccatatgagcaagtcgcttttctggcaggcattgcggatcggtccggcgcagcgtgaagagatcgagcaccgagagtttgttgagcatgtgattgattttctcgagattcagtctattcgaaaaaccccggtgggccgcttgccctacgggcttcaaaaacgggtagaactgggccgggcgctggcagcggaacccacgttgctgttgctggatgagcccatggccggaatgaatcttgaagaaaaagaggacatgagccgcttcattctcgagaccaatgacgaatttggaaccaccattgccctcattgagcacgatatgggcgtggtgatggatatctcagatcgggtggtggtgttggactacggacgtaaaattgcggaaggcacgcccgaggaagtacgtgccaatcaaaatgtaatcgatgcctatcttggagtgagccatgact

SEQ ID NO: 269022 - DNA, 928 bp, Unknown
  Bacterial polypeptide expressing nucleotide sequence isolated from the Sargasso Sea
tcatctgaagaagttaaggcagcaaactaccatgcaataaaactttctgctgcatttatcccaataattagaattgctattttatttggatttacagcaaccttgttaataggaggatttatggctttagatggtcaaataaaagtagcaatgtattcagttctcctctttataactcaaagattgctttggccattaacggaacttggtgatacttttgatttatatcaacgagctatggcatcatttaaaagaattacaacgctaaaagataccaggccaacaataactaatggcaacagcgaattaaagaattttgaaaattctatagtattcaatgatgtaaatttttcctacgttgaagggttttctgttttaaataatgtttcagtggaaatcaataaaggccaaacagtagcgattgttggaagcacgggttctggcaaatcgacaatgattaagcttattttaagactttatgatgtgactgaaggagatataaaatttgacaatataaacataaaagatttagaccttacaagcttaagaagcaatattgcattggttagccaagatatatttctttttgaaggatctgtatttgaaaatattgcatatggaaatctagatgcatctgaagatgaaatttgggaggctgcaagactatcagagtctgacgattttataaatcaacttccaaataaagaacatacaattgttggagaaagaggacaaaaactttcaggaggtcagcgacaaaggatatctattgcaagagccattttaaagaatcctgaaatattaattttagatgaagctacctcagcagttgataatgaaacagaagctgcaatccagcgttctctagatacccttaaagaggggagaaacagtatagccattgcacatcgtcttttcacaataagaa

SEQ ID NO: 269023 - DNA, 469 bp, Unknown
  Bacterial polypeptide expressing nucleotide sequence isolated from the Sargasso Sea
aattaaaggtaaaacaaaatttaattgggtttatgggaaattatacagtgttgaaaatatagaagatagaattgaatatctctcaaataaactcagattaagtaatattatggataaaattactggtgagctttcgtctggacaaaaaaatagagttagtttagctaaagctttaatcaatgatccaacaattcttttattagatgaaccaactgcatctttagaccctgagacaggtgattttattagatcttttttagaaaactataaaaaagaaaaagaagtttctatcttactagcttctcataatatgtctgaggttgaaagactttgtgattctgtattaatgatgaacaatggaaagataattgacagcgatactccaaaaagattaataaaaaaacatggtagaaaaaatcttgaggaagtttttttacaacttgtaaggaataacgatgagttacaatag

SEQ ID NO: 269024 - DNA, 709 bp, Unknown
  Bacterial polypeptide expressing nucleotide sequence isolated from the Sargasso Sea
atggcatattttgaaggaattaaaatgacagctggttatggtgatggtccaaatattattaactcttgttcaataaatgtagaaagaggagagattgttgcaatacttggtccgaatggagcaggtaagtctaccgcaatgaaagctatgcttggattattaaatttaaaatcaggtaatgtaattttagatggtaaagatatttctaaggtttcgccacaagatagagtaaagaatggaatttctttcgtgccacaaacaagaaacgtttttgcagaattaactgtcagagaaaatttagaaattggtggatttttaagagacaaaggtttggaaaaaatgattgagacaattactgatttgtttccgattttgggagaaaagcagacacaagtagtggggcaattgtctggcggtcaaagacaacaagttgctttaggtagagcattgatgagtgaaccctcagttttgatgttagatgaaccaactgctggggtatcaccaatagtaatggatgaattatttgaccatataattaaagtaaaaaaaacgaacgtggcaataataatggtagagcaaaatgctaaacaggctcttaatatttcagataggggctatgttttagttactggagaaaataaatttgagggatcaggagaagagctacttaatgatcctgaggtcagaagatcatttttaggagcttaaa

SEQ ID NO: 269025 - DNA, 374 bp, Unknown
  Bacterial polypeptide expressing nucleotide sequence isolated from the Sargasso Sea
gctgggccccctggatcaaaaaacctgccttgcgctgatgcaccaggtgaaactgagggccgatttgctgaaacagcccgtgcgtgagctctccggagggcagcgccaacgggtggctctgggccgtctgttgcatcagcggcctgaactcgtgctggcagacgaacccctctccgcccttgatcccagcctcgccgaagacgttctcaacaccctgcttctcttaccgggctgtttgatcagcctgcatcgaccggatctgatacaccggtttgatcgggttctggggctacgtggtggtgccctggtgatcgatgcggcttcagacaccattcatcgggatcagttggaatggctctacgcatcggcctgaa

SEQ ID NO: 269026 - DNA, 793 bp, Unknown
  Bacterial polypeptide expressing nucleotide sequence isolated from the Sargasso Sea
aatgagtattctagaagtaaacaacgtgagcaaatcatttggaggtgtaaaagcaaatgttgatatatctatgtccgttgataaaggaaaaattgttggtctaattggtcctaatggatctggaaaaacaactttgtttaattctattgttggtacttatcctatagatcaaggatctataaaatttaacggcaaagaagtttcagaattaccagttccagtaatagcaaaactaggattacttagaacatttcaacaaacaagaatatatggaaaattaaattgtgtagaaaatatgctaattagtcataaggcaagtgatgaaagcttggttaaaatattttctcaaatacctaaaaatttaacagaaaaagctgaaaacttgttaagctttgttggattatatcaaaaaagaaaattaagagccggagacttatcttttggtcaacaaaagctattagaactcgcaatggcattaatgaatgaaccagaaatgctgttgttagatgaaccaacagctggaataaatcctactttaataaatggaattattgatagacttataaaagttaatcaagattttggaattactttattcgtaattgaacataatatgagagtaattatgcaactagcagagagtatcttttgtttagctcatggaaaattattagctaaaggaactcctgaagaaataaagaatgataacagagtaatcgacgcttatttgggggggcacatatggggcaatcatacgaagttcttggagatgcaccaaagccagaagatttaa

SEQ ID NO: 269027 - DNA, 702 bp, Unknown
  Bacterial polypeptide expressing nucleotide sequence isolated from the Sargasso Sea
ttagaagacataaaatgggtatggtattccaacactttgccctattccctcatagaacagtaatagaaaatattgcgtttcctttagaagtacagggcataaataggacagaaagagagaagtctgctatggaaatcattgatctagtaggacttcaaggaagggaaaattattttccaaaagaactatcaggaggtcaacaacaaagagtaggtattggccgctctttagctgtaaaacctgaattatggtttctagatgaaccattttctgcattagatccactaataagaaaagaaatgcaaaatgagtttttaaaaattcaaaactcacttaaaaaaactattatttttattactcatgattttgatgaagcaattaaattagcagatagaattattattatgaatgaaggaagaatagtacaaattggaagtcctgaagatttaattatgaagcctgcaaatgattatgtaaaagaatttactgaagacctcccaagagagaggttattatctgtaaaaagcataatgaataatcaaaaacaaccaagtaattctttaacagtttatgaagatgaaaaaatattttcaattcttgaaaaagttctttctgaaggctcagtttcagttattgatagatcaaataatgttgttggctctctcaataaagaaacagtatctagatttatcaacaattaaa

SEQ ID NO: 269028 - DNA, 631 bp, Unknown
  Bacterial polypeptide expressing nucleotide sequence isolated from the Sargasso Sea
atgagcttagaagtacagaatctatcctattcatttaagaataatctcttaataaaagggttaaattttaaaattgaaaaaaacgagattggctttgtaagtggctctagtggtattggaaaatctaccctcttaaatattatctctggcttgaaaaggccagactctggttcaataatttgtaataacaatttttttaatggggatggattgtttgtgcagcctgagaaaagaaacattggttatgtttttcaagactttgcattattccctcatataaatgcagaaaaaaatattaaatatggaatgcaccaagataatataaatttttttgatgaggtggttgatacgcttaacctaaaaaaacatataacaaagatgccacatgaactttctggcggtcaacaacaaagagttgcaattggcagagctattttaataaaaccacaattaatactacttgatgaaccattttctaatcttgatcaagcaaatgttaatttggcaaaaagattaatagtaaaggttatagaagatttacaaataccctgccttctcgttacacatggatcaagtcaatctgatttaggcttaatatcaaaagagaattattatttcttaattttttaaa

SEQ ID NO: 269029 - DNA, 228 bp, Unknown
  Bacterial polypeptide expressing nucleotide sequence isolated from the Sargasso Sea
aatgagtcaggatattatcattgcatttaatgaagtcagtaagtcatttggagatgttaaggcagtaaaagctgctaattttgagatacaacgaggtgaattttttgctctgcttggcccttcaggatgcgggaaaacaacacttctcagaatggttgcaggttttgaaataccagattctggtgaaatttcaattgataatcaacacatgtctggaactccaccaaa

SEQ ID NO: 269030 - DNA, 761 bp, Unknown
  Bacterial polypeptide expressing nucleotide sequence isolated from the Sargasso Sea
gtttccgccattttggtttgtaattaatatcattaacggagctgagaatgagcgtgaagatttaaattcaggatatgatgctgatttgaataattcaatagtatttgatgatgttagtttttcttatgatcataaaaatatcctaaataaggttaattttgaggttaaagcaggagagtttataacaattgttggttcttccggaggaggaaaaactactctaagtgatatgttattaagatttaatgagccagatgagggtcaaatatcaatagatggaaaggatattaggagtttgagtaaaaaatcattaagagcaatgttagggtatgtgccacaggaaactattttatttcatgacagcataaaaaataatatcacatttggagatgaaaaaatttcagatgagcaacttaaaatagctctggaaagagcaggtgcgatgagttttataagcaaattacaaggaggtatggattttgttgttggggaacatggtggccgtctatctggagggcaaaaacaacgtcttgggttagccagagccttattattttcaccaaagcttctaatacttgatgaaccaacttcggctttagacaaacaaagcgaaaaagacattcttgatacacttaatgatttgagaggaagtgcaaccattatagctatttctcatcaggaaacattcgtaaatgcatctgatagaaaatttattcttgagaagggaaaattaagtgaacagaaaattgatttaaattaat

SEQ ID NO: 269031 - DNA, 633 bp, Unknown
  Bacterial polypeptide expressing nucleotide sequence isolated from the Sargasso Sea
tatgactgatgctgtaattaagtgcgattctgtatataaaatttttggggcaaacgccaaaaagatgcttcaagaagcaaatggaaatgtggacgcaaaaacattccagaaaatgggatgtattgttggtgttaacaatgcttcttttgaagtttcaaaaggagaaatgttagttgtaatgggattatctggttcaggaaaatctacattattaagatgtatttctagattaacagacgctacagatggaaaaatttatatagaaggtcaagatttgctctcattaaaaaacaaagaactaattgaactcagaaggaataaaatgggaatggtctttcagagttttgccttacttccacataaaacagttttggaaaatattgcttttccacttcaaattaaaggaattaaaactgaagatagcattaataaagctgtagatatggttaaactagttggtcttgagggaagagaaaattattttccaagagaactttctggcgggcaacaacaaagggtaggtatcgctcggtcattagctgttgaacctgatatttggtttttagacgagcctttttctgcattagatccattgattagaaaagaaatgcaggatgaatttttaagacttca

SEQ ID NO: 269032 - DNA, 223 bp, Unknown
  Bacterial polypeptide expressing nucleotide sequence isolated from the Sargasso Sea
caacccaaatacatacttcttgatgaggctaccagtgcactggatgcacgaaatgagcagtatgtgtttgatcggctccgtgattcctcaatgcaatatattttagtgtctcataagcctcaattggcctgctactttgatcgtgtgcttaaattcgaggtggatgggggctggagtgtgatgtccgctgatcagtacgaaaatcaattgacttcacagtagg

SEQ ID NO: 269033 - DNA, 535 bp, Unknown
  Bacterial polypeptide expressing nucleotide sequence isolated from the Sargasso Sea
aatgaaaatccatgtttcaaatcttcacaaaagtttcttagatggagaaggccgtaagttacatattttacgtggaattaattttgaagcaaattcagggtcgaccgttgcaattttaggtgcgtcggggactggtaaaagtacttttttgcatattttaggggcgttggaaagcatagatgaaggtgtacttagattaggggatgaaaatttatctgatttaaatcgtgaccaagccgcaaaatttagaaataaagaagttggttttgtcttccaatttcatcaacttttacaagattttacagcactagaaaatgttatgattcctcaattaattcaagggggtaaaattgacttagtccgaaaaaattctatagatttacttaaaaaagttgatttatatagtcgctcaggacacaagccggctcaactatctggaggcgaacaacaaagagtagccatagcaagagcattagttaatcgtccaagtattgttttagctgatgaaccaactggtaaccttgatgaaagaact

SEQ ID NO: 269034 - DNA, 556 bp, Unknown
  Bacterial polypeptide expressing nucleotide sequence isolated from the Sargasso Sea
atggatttagttgctaacaatttatcttataaacctgatgatcaatatcatttaaacgaagtatcttttaattttaaagaaggaaatctctatacaattttaggaagaacactatctggaaagacgactttattaaaaacaatagccggactgttgacaccagacagtggtgaaattgaatttgatggtaaaaattttttaaaagttccagtctgggaaagaaatgtagcaatggtttatcaacaatttataaactatcctcatttaaatgtttacgaaaacatagcctttcctttgaaacaaagaaaaatggatcaaagtattattaatgataaagtaatggatgctttaaagtctgtaggattgttaggttacgaaaaaagaaaaatccaagagctttccggaggtcagcaacaaagggtttcgcttgcaagatccttggtcaaaaatgcaaaaatactattactggatgagcccttagtaaacttagactataaattgagagagcaactaagagaagagtttaaaaacctattttcaaaaaggtttagctgat

SEQ ID NO: 269035 - DNA, 79 bp, Unknown
  Bacterial polypeptide expressing nucleotide sequence isolated from the Sargasso Sea
acttgcattagccagagcaatgttacaaaaggcagatattcttttaatggatgaaccgacaaatcacttaggatgttaa

SEQ ID NO: 269036 - DNA, 502 bp, Unknown
  Bacterial polypeptide expressing nucleotide sequence isolated from the Sargasso Sea
acgtttaaaataggatacgttcctcaatatggaggatattttcatgatcttaccttgctacaaaatcttaaagcaatagcagaaatacagataacagataattttacaaggttgaatactattgaaaaagttatatcacaatttgaattagattcgattataaatattcctgcaaaatttctatctgggggacaaaaaaaaaaattagtaattgctttggccttacttaataaccccaaagttttacttctagatgagccatttgcagcgcttgatgttttaactataaaaatgttaaaagagttgattgtaaatctccaatcacaagaaaaaataagcatttgtatttgtgatcaccaagcaagagatcttctatcttgtgttgacagtgctataatcttatcaaattgtaaaattatagcaaaaggaacacctgctcagcttgttaacgatatcaaagcaaaaaatgcatactttggtgattcattcaaatttaattaat

SEQ ID NO: 269037 - DNA, 711 bp, Unknown
  Bacterial polypeptide expressing nucleotide sequence isolated from the Sargasso Sea
aatgaatgaattattaaaaattaataatttaaacattagctttgaatcaagtggtaatgacttaaaaactcttaaagattttaatataagtctaaaggaaagagaaagtttaggcatagttggtgagtctggaagtggtaaaacattatcaatgctagctttaacaagacttttaccaaaacaagctaaaataacatctggttcaatcatatttagaaataaaattttaaataacttattaaacaaaaatttttataaagaaatcagcggtaataaaatctcaatgatttttcaagaaccgatgaccgctttaaatcctgttcatactgttggaaagcaactgttagatacttatctctatcacaatgacgtaagttttgaaaaaggtgtttctagagctttagaaattttagatgccgttcaattatccaaaaataaacaaaggatggagcaataccctcatcaattatctggaggtcaaaggcaaagagttatgattgcattggccttaattaataatccagatttattaatagctgatgagccaacaactgcattagatgttactgttcaaaaagaaattattcaacttatctcaaaacttagagaaacaattggaatggctcttatatttatatctcatgacttaggagtagtatcacaaatttcggataatattatagtcatgaaagatggtgatattgttgaaaa

SEQ ID NO: 269038 - DNA, 754 bp, Unknown
  Bacterial polypeptide expressing nucleotide sequence isolated from the Sargasso Sea
tatgaccagaaagccaaaattagtttcttcgaacaacggtctcgtaataaaaaatatacgtaagacactctctcgtaaacaaattgttagagatgttagcttaaaattaaaacgaggtaatacggttggtttactaggacctaatggtgcaggcaaaaccacaactttttatatgataatgggcttattagattgtgatggtggagagataatgcttgacgataaagatcttacaaatttgccaatgtacaaaagagcaaggatgggtttgggttttttgccacaacagccgtcgatatttagaggaatgtcagttgaagataatttactttcggtcctcgaaacaaagaattaccaaaaagaccataaacaaaacatgcttgaagaactattaactgaattttctctcgcccacctaagaagagcaatgccacatatgcttagcggcggtgaaagaagaagaactgaaatagctagatgtttatgctcaaatccaagtattatattaatggatgaacccacagcaggagttgatccacttggaattgatgatataaaaatgttaattaaacaactaatgaataaaaatatcggtgttttaattacagatcataatgtcagggaagtattagatatatgcgattattcatatgtcatgcactcaggagaaatcattgcagatggtgatagtaatcaaatactaggtaacaaagaagtaagaaaattttatttaggtaactcatttagatattag

SEQ ID NO: 269039 - DNA, 418 bp, Unknown
  Bacterial polypeptide expressing nucleotide sequence isolated from the Sargasso Sea
tatattattgagttattagaaaaggttggccttaaaccaggtaagagttttgctgaaaagtttcctcatgaaatgtctggaggcgaaaggcagcgcgtagcaatagcaagggctttgagtgtggaacctcaaataattgtagcagatgagcctacttcaatgttggacgtatccattagaatggagatacttgaaatttttgcaaaaatgcgtatagaagatactttaacagtttttttcattactcatgatcttgcatcagctagatatctggcagatagaataattgtattaaaaaatggcaaagtcattgaggaaaataaatctgaagatttaatacggaatccagtagaggtatacaccaaacaattaattaaagcagcatcgcccggctggcttagtagtctggagaactaat

SEQ ID NO: 269040 - DNA, 584 bp, Unknown
  Bacterial polypeptide expressing nucleotide sequence isolated from the Sargasso Sea
aatgacagtaaaaccaaaattgatttctacaaatacaggcctagaagtgagtaacttaagaaaatcactttctggaaaacaaattgtgagagatatgtcaattaaagttggtaagggagaagtcattggcttactcggccctaacggggccggcaaaagcacagctttgtattgcattatgggtctcattgcatgtgatagtggtgaaattaaattaaacaataatgatattactactcttcccatgtggaaaagagctcaggctggacttgggtatttacctcaacaaccaagtatctttagaggcttaaatgttgaaaataatattatggccattcttgaaactactaatttaaatctagatcaaagagtaaatagacttgaggagctattagctgaatttaacttaactcatttaagaagtgctatgcctcatcaattgtcaggtggtgaaagacgtaaatgtgaatgtgcaagattacttggcactaacccctcttatgttctgtttgatgaacctttctcagctctggatcctatttctataaacgatatcaagtctgaaattaataggctaaagaaaa

SEQ ID NO: 269041 - DNA, 292 bp, Unknown
  Bacterial polypeptide expressing nucleotide sequence isolated from the Sargasso Sea
aatgagtccagttaatgccgtagacataaaaaacttatcattagtttttgaaactaatgatgggtctgttcatgcacttgaaagtatagatcttaaaattgctaaaggagactttgtctcattaattggtccatcaggctgtggaaagacaactttattaagagttatcgcggatctccaaatgccgtcttctggttcattagaagttaatggaaagtctccagaaaaagcccggacagaaagagattatggatatgtctttcaatctccagctctattcccatggagaaca

SEQ ID NO: 269042 - DNA, 634 bp, Unknown
  Bacterial polypeptide expressing nucleotide sequence isolated from the Sargasso Sea
atgattcaaaaaccacagctagttgcatcaaaaaatggattaattgttaataatttaaggaagtctctttctcacaaacagattgttagagacgtaagtttaagattacaaagaggaaaaacaattggtttattgggtcctaatggagctggtaaaacaacaacattttatatgattatgggcctgattgattgtgatggaggtgaaatattgcttgatgataagcttctaacttctcttccaatttacaaaagagccaaacttggtattggttttttacctcagcagccatcaatttttagaggtatgacagttgaagataatctgctatctatacttgaaacacaaaactaccaaaaagatcaaaagcaaaatatattagaagaattgctaacagaattttctcttacacatttaagaagagctatgcctcacatgttaagtggtggggaaagaagaagaacagaaattgcgcgatgcctatgttcaaatccaagctttatacttatggatgaaccaactgcaggtgtggatccaattggaatagatgatataaagattttgataaaacagttaatgaataaaaatattggagtattaattactgaccataatgtgagagaagtattagata

SEQ ID NO: 269043 - DNA, 450 bp, Unknown
  Bacterial polypeptide expressing nucleotide sequence isolated from the Sargasso Sea
attgcagccacaaagccgattcattgggattaccggtccatcaggtgcgggaaaaagcagcttgtttcgcgccctagctggcgtagaaaaaagcgcaagtgtgcaaacgccgtggacctctcaaaaggtcggcatcgtttttcagcagcccaagctatttccccataccgatgtgcgcggtaatttagcccttgcgcagcgtcacgcaagccctaatgcaatgtctatcgatgcgtgtttgcgcggctgttattgcgaacatttaatcgataagccagttcaagcgctttctggtggtgaagcgcagcgggtcgcgattgcacgggcgttggtcaatgggccagatgtgttattgctagatgaatcgttaagcgcaattgatatcttcacccgtcgcaaaatttaccagtttttgaacaatttgtgtgtgtcggggaagctcacctgcct

SEQ ID NO: 269044 - DNA, 346 bp, Unknown
  Bacterial polypeptide expressing nucleotide sequence isolated from the Sargasso Sea
aatgctaagtgtaaataatttgtcagtgaattatgggtctacccgcgtagtcgacaagttaaatttcgaacttgggcaagatgaaattctcatgctggtgggcccaacaggctgcggtaaaacaactatacttcaggcactagcgggtcttattcctatctctgaaggggaaatgacattaggtagttggcacagtacggcgaaaaaacacgttccgcctgaaaagcgcaatgtggggatggtatttcaagattttgccctttttcctcatctaaccgtacagcagaatgtttgcttcagattaaaagacactaaacttgccgatcattggctgaacttactcggg

SEQ ID NO: 269045 - DNA, 538 bp, Unknown
  Bacterial polypeptide expressing nucleotide sequence isolated from the Sargasso Sea
atggctagcctaaaagatatacgcaagcgcattgacagcgtaaaaagaacacagaagaccacaagtgccatgaaaatggtttctgctgcaaaactaagacgcgcggaagaccacatacgggaagcgacaccctatgcacaaaagctgaaaagcattgtttcatctctcagtacacgttttgaaggcgaagtgcaggatactggctttggcagtctcttccggcattccagcggaaaaagaaccggtgttattttagttactagcgaccgtggactttgcggagggttcaattcaaatctttctaaggctttatatcaacaacttattgatgaaggagtggagtgtgctgagtttgcaatctttggacgaaaaggaaatgattttttcaaaagaacaccacataaaattcttgtcaatcatgcaggaacccctccagatcaacatcttaacctggtcaaggaagttgtggatgattttactcggcgatttgagaatggtgaactggatcaggtgcttctcgcatacaatcatttgtaag

SEQ ID NO: 269046 - DNA, 736 bp, Unknown
  Bacterial polypeptide expressing nucleotide sequence isolated from the Sargasso Sea
atgagtgacttaattaaagcaactgacataaatgtttctagacaaggcaagaagatattggacgacgtctctgtcagtttgggacaccacgactttctgacaatcattggcccgaatggtgcgggaaaatccatgttattgaaatgtcttatgggtttttatttgcctgatgccggcaccgttaaaagggctactggattgcgagttggatatgttccgcaacactttgcgcctgaacatactatgccgatttcagtaaaacgttttctcggtttgagacgtaatgtagataaaaagcagctggacaaagttacagaagaaacttcggtaatttcacttttggaaaagccgctttttactctttctggaggggaacggcaacgtgttcttttggctagaagccttttaaataatcctcatcttttggtgcttgatgaacctgctcagaacctggatgtttcggggcaacttggtttttacagattggttgagaaaatttacgaggaacgtaaagtcagtgtattgatggtttctcacgatcttcacatggttatggcatctacaaatgaagtaatttgtctattccatcacgtgtgctgctgcggtaaacctcaggtcgtgacacaagaccccgaatttataactctttttgggaatgacatggcatcgatgatgtcagcgtatcaacacagccacgatcatatccatcaaaataatcatagccatgaatcttgag

SEQ ID NO: 269047 - DNA, 693 bp, Unknown
  Bacterial polypeptide expressing nucleotide sequence isolated from the Sargasso Sea
attgaaagctgaaaatatttccaaagaatacgttagtggaacatttataaaaaaaagaaatttagcacttaaacctgtctcattttctatcgacgataaaactccatcgattacagcaattgcaggagaaagtggtagcggaaaaacaacatttgcaagagtattagctggaattttagaaaaaagtagtggtgttttgagatatcaagataaagaccttgattatatgactaaggatgaagaattaaattttaagaaagaagttcaaactatttttcaggatccttttgaagtatataatccgttttacaaagttgatcatgtattaactactccattaaaaaagtttggaatggcaagtagtaagtcagaatcagataaaatgataatttctgctcttgaagaagtgggcttaaggccagatgaaactcttggaaggtatcctcatcaattaagcggaggtcaaagacaaagaattatggttgctagagcttttttattgagaccaaaaataataattgctgatgaaccagtttcaatggttgatgcttctcttagagctacaattcttgaagaattaaaaaatttaagaaaaaatcacaatatatctattatttacataactcatgaccttactaccgcttatcaagtagcagacaatattatgattttatataaaggtcaggttgttga

SEQ ID NO: 269048 - DNA, 754 bp, Unknown
  Bacterial polypeptide expressing nucleotide sequence isolated from the Sargasso Sea
aatgatatcaaaacctaaactaatatcttctaacagcggactcgtggttaataatttaagaaagtctctttcaagaaaacaaattgttagagatgttagtcttaaacttcaaagaggtaatactataggtttgttaggtcctaatggagctggcaaaacaacaaccttttatatgattatgggattaattcaatctgatgggggggatataactctcgacaatgaagatataactcatcttccaatgtacaaaagatcaaagaaaggcctaggttttttgccacagcaaccttcaatatttcgtgggctatcagttgaagataatttattgtcaattctcgagacacaaaaacatccaaaggatcaaagacaaaatatattagaagatttacttacagaattttcgttaactcatctcagaagagccatgccacacatgctaagtggaggggaacgaagaagaactgaaatagcaagatgtctatgctctaatcctagcattatattgatggatgagccaactgcaggtgtagatcctataggcatagatgatattaaaatgttaataagacaattaatgaaaaagaatattggtgtattaataactgaccataatgtaagagaagtacttgatatatgtgactattcttatgttatgcacggcggaaaaataattgccagtggtaatagtaataagatacttggtagttccgaagtaagaaagttttatttgggagattcatttaaatattaa

SEQ ID NO: 269049 - DNA, 469 bp, Unknown
  Bacterial polypeptide expressing nucleotide sequence isolated from the Sargasso Sea
ttaattgatggaaaagatattcaaacaaacattaatggttggcaacaaaatcttggttatgtctctcaatcaactaatttacttgatgaaagtattaaaaataatattgcctttggagtttccgaagatcaaattgacaacaaaaaacttcttgatgcatcaaagaattcccaaatttatgaatttatatcttcccttaaagaaaaatttgagtcccaagtcggggaaagaggtatagctttatctggcggacaaatccaaagaataggtattgctagagaattatacagagacccgcctataattttacttgatgaggcaacaagcgcattagatttagatacagaaaaagagtttctaaaatgtcttgatcaattaaaaggtaacaagacaatagtcttcgtttctcatagaaaatctgctttagaaaactgtaacaaaattattgatttaaatctcgatgcctaaa

SEQ ID NO: 269050 - DNA, 724 bp, Unknown
  Bacterial polypeptide expressing nucleotide sequence isolated from the Sargasso Sea
ttttgatacattaaacccttctatgaacgttggtcgacagataattcgtgcattagaaatttttcgatttggtaaaagtgataaagatcgcagcgaacgaatgttagagcttctcgatctggtaaaacttcctcgagcttttgccgaaagaatgccaaggcaactgtcaggtggtcaaaaacaaagagtgggtatagcaagagcttttgcgggaggcgcaagaatagttgtagctgatgaaccagtttcagctctcgatgtttcagttcaggctgcagtaactgatttattgatggaaattcaaagaaatgaaaaaacaacccttttatttatcagccatgatctttcaatcgttcgatatctttcggaccgagtgatggtgatgtatttgggacatgttgttgaactaggaacgactgatcaggttttttcaccaccttatcacccatatactgaggctcttttgtcagcagttcctatagcagatacgagcgtcgaaaaagagcatattgttcttgagggcgacattccatcggcaatggacccaccaagtggttgcccttttcaaacccgctgtcgatggaaaaaagatgtgccaggcgacctatgtgaaaagaaaattccacctcagagggatatatcaataggccatcaaatcaagtgccacttgagtgagaccaagttatcagaaatgacgcccgtgataaaacttgcagttgaatga

SEQ ID NO: 269051 - DNA, 827 bp, Unknown
  Bacterial polypeptide expressing nucleotide sequence isolated from the Sargasso Sea
gagccaagctggttccatctctgtctctaacatccagaagatttatgatcctgatggagcagcagttcatgcgctagaaaactgttcctgcgagattccctctggcaagtttgttgctatggtgggtccatcgggttgcggtaagagcaccctactcaacatgattgccggtttcgaccaacccactagcggcgaaattaaactcgacgatcaactgctggtcagcgcgaacacccagaccccgccaaactcagaccgggtggtcgtttttcaaaatggtgctctcttcccttggaaaacggtgctggagaacattgcttacggacccattgtccagaaaacccggggccgaggtcaggcagaagaggaagcacgagatctgcttaggaaagttggaaatcttgagcggatttccgacgctttcccaggtcagatctcctcaggtatgcagcgacgcgtggagattcttcgggcacttatcaaccaacccaaggtactcctactggatgagccgttcagagcgatggacacggtgtctaaatcaaaaatgcatcagcatctactcgacatacacgacagattcaaaccctcgatcctgttgatcacccacgatctggtcgaggctattctcctggcggatgtcgtcctcgtcatgacaacccgccccgggacgataaaggtgaaactcaacgttgacctaccccgcccaaggtcgagagacatgatcctctcggaggaatttacccaacttcaaaaacaagcgatcgctgccgtacacgaagaagcgcgcaaggcctttgaacgcggcgagaaagaactggcctgat

SEQ ID NO: 269052 - DNA, 850 bp, Unknown
  Bacterial polypeptide expressing nucleotide sequence isolated from the Sargasso Sea
tatggaaccagcaatccaaattcaaaacgtctggaaaatttttggcaatacttccaaagaagctttggatgcaattcaaaataaaaaaatatcaaaacaagaagctttagaaaaatataattctgtaataggtgtatctaatgtttcttttgatgtgaaaaaaggagaaatattctgtgttatgggactttcaggaagtggaaaatctactttagtaagacacattaatagacttttagaaccgacttcaggaaaaattttaataaacaatcaagatgtaatgaaatttaacaaagaaaatttacaagtattaagaaataaaaaaataggtatggtatttcaaaattttgctttaatgccacatagatctgtactggataatatagcaatgccattagaaataagaggcattagcaagaatgatagattagatgctgcaaacaatattttaaatattgtagaattgcaaggttggggaaataaatatgcgcacgaattatcaggaggaatgcaacaaagagtaggactggccagagcattagctgctgatccagaattcttacttatggacgagccatttagtgcacttgatccactgataagaagacaacttcaaacagaatttataaaactttcaaaaaagatgaagaagacaaccgtttttatcacacatgacttggacgaggcagtaagagttggccacagaatcgcaataatgagagatggcacagttgtacaaataggaacaccagaagaaatagttataaatcctgcagatgaatatgttgctgatttttgtaaaggaatttcaagattgaaagtagttcaagctaaacaattatgcaatcat

SEQ ID NO: 269053 - DNA, 403 bp, Unknown
  Bacterial polypeptide expressing nucleotide sequence isolated from the Sargasso Sea
tatgggtgcaataaatatatcaaatgttggcaaagtttatccaaacggaacacgtgctttagaagatgtcaatattgaaatcaatgacggtgagtttgtagttttagttggcccttcaggttgtggcaaaacaactttgttaagaatggttgctggacttgaagacataacagaaggtgaaatctctattgctgaaaatgtggttaatgaggttgctccaaaagatagggatatcgcaatggtttttcaaaattacgctttataccctcatatgtcagtttatgacaatatggctttctcacttaaattacgtaaattatccaaagaagaaatagataaaaaagtaaaagaagctgctaaaactcttgaaattgatgaattattagatagaaaaccaaaagcg

SEQ ID NO: 269054 - DNA, 818 bp, Unknown
  Bacterial polypeptide expressing nucleotide sequence isolated from the Sargasso Sea
cttgtttataaaattttttggtacaaatgccaaaaagatgctccaagatgcaaatggaaatgttgacgcaaaaaaattccaagaaaatggatgtatagtaggtgtgaacaatgcttcttttgaagtttcaaaaggagaaatgttggttgtaatgggcttgtctggctcaggtaaatcaacattattaagatgcatttctagattaactgatgctacagatggaaaaatttttatagaaggtcaagatttactttcgttaaacaacaaagaactaattgaactaagaagaaacaaaatgggaatggtatttcaaagctttgctttgctacctcataaaacagttttggaaaatattgcatttcctcttcaaattaaaggaattaaaactgaagacagtattaataaagcaatggatatggttaaacttgttgggcttgatggaagagaaaattattttcctagagagctttcaggtggacagcaacaaagagtaggtattgcaagatcattagctgtggagcctgatatttggtttttagatgaacctttttctgcattagatccgttaattagaaaagaaatgcaggatgaatttttaagacttcaagaaaaattgcaaaaaacaattatgtttattacccatgattttgacgaagcattgaagttagctgatcgtattgcaattatgaaagatggtataattgaacaattagatacaccagcaaatattgttttaaatccagcaaccgagtacgttagaaaatttactgaagaagtacctagagaaaaagttctattaattgaagatgtaatggatc

SEQ ID NO: 269055 - DNA, 322 bp, Unknown
  Bacterial polypeptide expressing nucleotide sequence isolated from the Sargasso Sea
ggaggacaacaacaacgtgttgcaatagcaagagctttagcaatgagaccaaaagtaatgttgttagatgaaataacttcagctttagatccagaggtggttggggaagttttaaatgttataaggtcattaaataaagaacacagtttgactatgattatggttacacaccaaatgggatttgctagagaaatttcagatagagtatgtttttttaatgaaggaaaaatatttgaacaaggaccaccagaacaattgtttggtgatcctaaaaacgaaagaacaaagcaatttcttcatgcagtgcttgatgcgaattaaa

SEQ ID NO: 269056 - DNA, 868 bp, Unknown
  Bacterial polypeptide expressing nucleotide sequence isolated from the Sargasso Sea
tttcaagaaaatgggtgtattgttggtgttaataatgcatcttttgaagtgtctaaaggtgaaatgctagttgtaatgggtttatctggatcaggaaaatcaacattattaagatgtatttcacgtttaacagatgcaactggtggaaaaatttttatagaaggtcaagacttacttaatttgaacaataaagaacttattgaattaagaaggaataaaatgggaatggtatttcaaagttttgcgttacttcctcacaaaactgtactggaaaatattgcttttccacttcaaattaaaggaattaatacatcagacagtattaacaaagcaatgaatatggtcaaactcgttggacttgatggtagagaaaattattttccaagagaattatctggaggacaacaacaaagggtaggaattgcaagatctctagcagttgaacccgacatttggtttttagacgaacctttttctgcattagatccattaataaggaaagaaatgcaagatgagtttttaagacttcaagaaaaattacaaaaaacaataatgtttattactcatgattttgacgaagcattaaaactcgctgatagaattgcaataatgaaagatggaattattgagcagctagatacacctgccaatattgttttaagtccagcaacagaatatgtaagaaaatttacagaggaggtgccaagagaaaaagtgttattaattaaagatgtaatggacgcatcaacttctgatgaaataggcgatttaaaagtttcaaaagatgagattattgaaaatgttgctgaaaaaatattaactcaagaaaaaactgtagctgtaacagatggtaaaaataatattgtag

SEQ ID NO: 269057 - DNA, 482 bp, Unknown
  Bacterial polypeptide expressing nucleotide sequence isolated from the Sargasso Sea
atatctacctcaacaaacttctatttttagaggtcttactgtttatgaaaatttaataggaattgctcaaatcgtgaaaaaaaatcccgaagaacaaaaaagcattgttgaaaaaataatggctgaattttcaattacacatttaagagatatcaaagcgaccgctctttcaggtggagaaagaagaaggacagaaattgctagatgtttaataaatagtcctaaagttcttttattggatgaaccatttgctggagttgatccgcttgcagttcaagatataaagcatttactattaaaattacaagctagaggctgcgctgtattagttactgatcataatgcatctcaacttcttagtgttgtggacagagcatatgtaattgctaatggaaatataattgcaaatggtactcctcgtcaaattgtgaatacaaccgaagctaaaaaattatattttggtgaagattttagtttctagc

SEQ ID NO: 269058 - DNA, 871 bp, Unknown
  Bacterial polypeptide expressing nucleotide sequence isolated from the Sargasso Sea
aaggtcggcctgctctcggggggcgaaaagcgccgcatcgcactgtgccgcctgctgctgtccaagcccgacatgctgctgctggacgagcctaccaaccacttggacgccgagtcggtcgactggctggagcagttcctgcaccgcttcccgggcaccgtggtggctatcacccacgatcgctacttcctggacaacgccgccgagtggattctggaactggaccggggctacggcattccgtacaagggcaactacagcacctggctggaccagaagcaggcccgcctggagtccgagcaaaagggcgaagaggcccgtgccaaggccctgaagaaggaactggagtgggtgcgccagaatgccaagggccgccaagccaagagcaaggcgcgtatcgcacgcttcgaggaactgagcgattacgaataccaaaagcgcaacgaaacgcaggaaatcttcattcctgtggccgagcgcctgggcacgcaggtcatcgagttcaagaatgtcaccaagtcgtttggtgaccgcgtgctcatcgacaacctgtccatgaacattccggccggcgccatcgtcggcatcatcggccccaacggtgccggtaaatcgacgctgttcaagctcatcgcgggccgcgaacagccggacagcggcgaggtcgtgatcggctcgaccgtgaagatggcctttgtggaccagcaccgtgatgccctgtcggacgacaagaccgtgtgggaagacatctccggcggcctggatatgatcaatatcggcaagttcaccatggccagccgtgcctacgctgggcgcttcaacttcaacggcggcgaccagcaaaagaaggtgggcatgctgtcgggcggga

SEQ ID NO: 269059 - DNA, 440 bp, Unknown
  Bacterial polypeptide expressing nucleotide sequence isolated from the Sargasso Sea
aaatatatcaatattgaatgaaacgttaagagaaaatattttatttggtctcagcagtaagcaattttctgataaggaagtccttaaatctatagaactttctaatcttaaaaatttacttttaaaattaccagatgggttagatcataagattaaagaaaaaggcttgaatttttctggcggtgaattgcaaaggatagggattgctagagctttagtattcgatcccgaaatattaatttttgatgaagcaacaagtgctttagatacttttacagaaaatgaaatacttaaagatataaattcattaaagagcaaaaccataattatgatttcacatagaatgaataccctcaaatattgtgacaaaatatatttaatagataagggaaaaataaaagataatggatcttacgataaattcaatgaaaaatactgaa

SEQ ID NO: 269060 - DNA, 666 bp, Unknown
  Bacterial polypeptide expressing nucleotide sequence isolated from the Sargasso Sea
catggccagtcatcaatatgtttacgtaatgagccgtcttagcaaaacttggccgggtggaaaggaagtgttgaaaaatatcagcctatcatttctgcctggtgccaaaattggggtattggggctgaacggggctggtaaatcaactttgcttcggatcatggctggcattgagaccgaatttcacggcgaggcatgggctgcagatggcatcaaaattggctatttgccgcaagagccagaactggatccgtcgcttgatgtcgctggtaatgtaatggccggcatgggccgtgcaaaagagcttgtcgaccgatttaatgaggtcagcgctaaatttgccaaagaaatgaccgatgatgaaatgaattcggttattgccgaacaggcagagttgcaagaagagattgatgcgattgatggctgggatttagagcggaaagccgaaattgcaatggatgcgttgcgggtgccagctggtgacgctgatgtgactaaactgtccggtggtgaaaagcgccgcgtagcgctttgccagcttcttcttagcgcgcctgacatgttactacttgacgaaccaacaaaccatctggacgccgaatctgtcgcgtggctgcaaaaatttcttcatggtttcccaggtacagtggtaactatcacccacga

SEQ ID NO: 269061 - DNA, 529 bp, Unknown
  Bacterial polypeptide expressing nucleotide sequence isolated from the Sargasso Sea
aaagctttgcgtcaggcggggatccgcattgttatgctcaccggggataaccagcttactgctgaagcagtcgcacggaaactgggaatagatgaggttgaagccggggttctgcctgacggcaaaaaagcagtgataacccgactgaaagcgtctggtcatgtggttgcgatggcgggggacggtgtaaatgatgccccggcgctggcagcggctgacgtgggcatagctatgggaacgggtacagatgtggcaattgaaagtgccggagtcacccttctcaaaggcgacttgatgatactgaacagggcccgtcatctgtcagagatcaccatgaaaaatatccgacagaatctgttttttgcatttatctacaacgcacttggcgtgcctgtggctgcaggtctgctttatcctgtgtatggaatactgctgtcgccagttattgcggcggcggccatggctctttcctccgtcagcgtcattgtgaatgcgttgcgtctgaaaagtgtcaggctcgggaaataac

SEQ ID NO: 269062 - DNA, 356 bp, Unknown
  Bacterial polypeptide expressing nucleotide sequence isolated from the Sargasso Sea
ccttttggataaaataacaggtgaactttcatcgggacaaaaaaatagggtcagtttggcaaaagctttaataaatgatcctacagtactgctactagatgagccaacagcttcattggatcctgaaacaggagattttgtaagaacatttttagaaaattttaaaaaagaaaaaaaaatttcagttttacttgcttcacataatatggatgaagttaaaagattgtgtggttctgttttaatgatgaaagatggaattattgtagatagtggaacgccaaatgatttaatattgaaacatggaagaaaaaatttagaagaggtttttttggaaatagcgaggaacaaaaaatgaa

SEQ ID NO: 269063 - DNA, 253 bp, Unknown
  Bacterial polypeptide expressing nucleotide sequence isolated from the Sargasso Sea
aaacaaagaatttctcttgcaagagctttttatcataagagaaaaattttttttcttgatgaagcaacgtcagctttagacaataaaacagaggaagagatagtttctgaaattaaagaacttagaggaaatcacacaatgataattattgcacataggtataaaacagtcgaaaattgtgaccgaatatatgtactaaaaaatggtgttataaaagaatctggaaatccaaaaaatattttattaaactaat

SEQ ID NO: 269064 - DNA, 184 bp, Unknown
  Bacterial polypeptide expressing nucleotide sequence isolated from the Sargasso Sea
tgaccctccagtaataatattagatgaagcaactagtgctttagatataacaactgaaaaaaaaataatgaatacaatttttaatttaaaaaataaaactataataataatagcccatagattaaaaactgttgaaaaatgtgataaagtttttcgctttgaaaaggggaaaattgttaattga

SEQ ID NO: 269065 - DNA, 439 bp, Unknown
  Bacterial polypeptide expressing nucleotide sequence isolated from the Sargasso Sea
atgtctgatccaataattaaaattgaaggaatgaataaatggtttggtgattttcaagttttaaaagacatcgatttagaagttgaaaaaaataaaaaaattgtagtttgtggaccttcaggatcaggaaaatcaactcttataagatgcatcaacagactagaagagcatcaaaaaggtacaattattgttgatggtactgaacttacagaaaatacaaaaaatatagaagcaattagagcagaagttggaatggtttttcagcagtttaatttattcccacatctgtccatattagataactgcaccttagcacctgtttgggttaaaaaaatgccaaaaaaagatgcagaagaacttgcaatgaaacaattagaaaaagttcaaattgctgaccaagctaaaaaatttcctggtcaattatcaggtgtcaacaaca

SEQ ID NO: 269066 - DNA, 391 bp, Unknown
  Bacterial polypeptide expressing nucleotide sequence isolated from the Sargasso Sea
aagaggttcggaacgtgcggaggatctgatccgtaaagttcgtctgcagggcaaggaagacagttacccgggagaactctctggaggacagcagcagcgtgttgcgatcgcaaggtccctagcgatgaatcccgatgtgatgctttttgacgaggtcacctcggcccttgatcccgagacggtaaaagaggtcctggtcaccatcaaggaactggcccaggaaggaatgacctgcatccttgttacccacgagatgggatttgccaaagaagttgcagaccacatctattttaccgacaacggtgtgattttggaacatggccccccttccacgttttttaccgaatccagcgatcctcgtaccagggagttcctcagtcaaatcctctga

SEQ ID NO: 269067 - DNA, 394 bp, Unknown
  Bacterial polypeptide expressing nucleotide sequence isolated from the Sargasso Sea
cttgtcaggcggacagcagcaaagggttgcgttagcacggtctttggcgacatctcccaccgtattacttcttgacgagccattttcggcactcgacacctttactcgcagttcgcttcagcaagacgtagcagcgatttgtaagcagaaaggtatcacgatggtgttggttacccatgacatagatgaggctgtgatgatgtccgaccgcgtgttcgtgatggatcaaaatcctggccgaattattgatgaaattaaagtggatctcgcgtggccgaggaagcacatgagccaggacttccagtgcatccgtgaggatcttatgaccgcttttaaggggacggagaaaacggagtctctccgagctttagatggcggtcgctctgcggcctaa

SEQ ID NO: 269068 - DNA, 146 bp, Unknown
  Bacterial polypeptide expressing nucleotide sequence isolated from the Sargasso Sea
gaaaattgcatagctctcttagaaaaggggggaataagagacgttgagtttaggctaaacgcctatcctcatcaattgtctggcggtcaacggcagcgggttatgatagcgatggccatagcaaatcgccccaaaattttgatagc

SEQ ID NO: 269069 - DNA, 301 bp, Unknown
  Bacterial polypeptide expressing nucleotide sequence isolated from the Sargasso Sea
ctgacatcaaaaaatggagaatctttaaaagctgagaaaagagaccttggtttaatgtttcagagttatgctttatggcctcacatgacagtttttaaaaatatagaatttggtttggttatgaagaaactatctttggaagaaaaagagattcgttataagcaaatggaaaaactatttcatcttgaaggactaagaaatcgttatccatctgaactatctggaggccaacaacaacgtgttgctcttgctagaatgctagctgtaaaaccctctcttctgttacttgatgaaccacttc

SEQ ID NO: 269070 - DNA, 801 bp, Unknown
  Bacterial polypeptide expressing nucleotide sequence isolated from the Sargasso Sea
gatgccaagaaaaataaaattggaatggtttttcagcatttcaatttatttgaaactttatcagtatttgaaaacttaagtatagatgcaactgaagataacaaaagtttaagggtaagaataaatgaaatattaaaaaaatataactttaatattgaccttgacattcctgtattaaatttatcagcagggcaaaagcaaaaagttgagattataagatgtcttttaagaagccctaaagttctaatcatggacgagcctacatctgttttgactgagcaggaaacagaggaattatttatatctttaaaaaaattctgtgatgaaggaatattaattatttacataactcacaagttaaaagaagttttgtctttatgtgatgaggttgctgtaatgcgaaaaggtaaggttgtatcggttagccaaacacaaaatgaaagagttgaaactctcgcaaataagatggttggtcaaaaactagctaaaattaagaaaaaaattaatatttccaaaaataaagatgagatatttaaagtaaaacatttaaatttttatagcgatgatccttttgaaacaaatttagttaatctaaatttttctgtaaagaaaggagaatgtttaggtatagcgggtatttctggcaatggtcaaaacgaactctttcaaattttgagtggggaaataattacaccagatacatcaatcatttttcgaaataaggaaattgctaaattaaatccaaagcaaagacgagagtatttaatggctttttctcctgaagatagaatatctcaagcg

SEQ ID NO: 269071 - DNA, 637 bp, Unknown
  Bacterial polypeptide expressing nucleotide sequence isolated from the Sargasso Sea
atgaataaatttcaacttttagatgatggattaatagtaaataaaatttccaaatcctatggaaaaaaaaaagttgttagagatataagcatatcaataaatagaggtgaaattgttggcttacttggcccaaatggcgcaggcaaaactacaacattttatatgattgtgggtttagtaaagccagataccggctcaatcgttttagataagattgaaatttctaaaatgcctatttattcaagaggacttcaaggtattagttatttgccacaagaaccatcaatttttagaggcatgaatgttgaagataacttgctagcaataattgaaattgtagaaaaagatcaaaacaagcaaaatataatattacaaaccttgctaaatgaatttgatattaatcatgtcagaaaatctaaatcaatagttctttcaggaggtgaaaggcgtagattagaaattgcaagaacattagcctcaagaccaaagtaccttcttcttgatgagcctttgactggaattgatccagtctcaattgaagaaataaaaattataataaaaaaattaaaacaaaaaaatattggtgttttgattacagatcataacgtaagagaaacattaaaaatagggataaagt

SEQ ID NO: 269072 - DNA, 663 bp, Unknown
  Bacterial polypeptide expressing nucleotide sequence isolated from the Sargasso Sea
aatgtttatagtagttaaaaatctaacgaaaatttacaataaatatttcgctgtaaataaaattagtttccaaattgaaaaaaatagaacgattggacttcttggtcctaatggttgtggaaaaacaacaactattggtatgctgcttggtctggtctctcccacaagtggagaaattttaattgaaggtaaaaatattaatttatttaaacgggatgaaattttaaaaagatttaattttgcctcaccatatgttgagttaccgaaaaagttaacggtgaaacaaaatctagaaatatatggaagattatatggaataagtgacttaaataaaagaatttatgagatttcgagtgatctagatataaaaaatttttttgatagaaaaactggagaactttcatctggtcaaaaaaatagagtttcattggcaaagtcactaattaacaagcctgaaattcttcttctagatgaaccaactgcaagtttagatccagatataggagattttattagaagttatattcaagagtataaacaaaaaaatagagtgactattttattggcttctcataacatgagtgaggttgagaggctttgtaacagtattattatgatgagaaaaggtaagattattgatagcggaacttgtgaaaatttaat

SEQ ID NO: 269073 - DNA, 577 bp, Unknown
  Bacterial polypeptide expressing nucleotide sequence isolated from the Sargasso Sea
aagcctacagatggagaaatattaattgatggaaaaaaaatagaaggaaatcgaatagaaatacttaaaaagataaactttatttctccttacattgaattgcccaaaaaactaactgttaaacaaaacttaatagtatatggaaaattatataatgttttaaatattaataatacaattgaatatctagttgaaaaactaagattatcagatttgttaaatagaattacaggtgaactttcttcaggtcaaaaaaatagagtaagtttagcaaaagctttaataaataacccaagtgtattgcttcttgatgaaccgacagcatcacttgatccagaaattggagattttgtcagaacatttttagaaaattataaaaaagaaaaaaaaatatcaattttattagcatcccataacatgaatgaagttacaagattatgtaagaaaattttaatgatgaaagatggtgtcattattgataagggaaatccagaagagttaattaaaaaacatggtagaaaaaacttagaagaagtgtttcttaaactttcaaggaataaaaatgagctttactaga

SEQ ID NO: 269074 - DNA, 707 bp, Unknown
  Bacterial polypeptide expressing nucleotide sequence isolated from the Sargasso Sea
aaaaggagtcactaaacactttgatgatgtacaagcattatcaaagatcgacttaaatgttgataaaggtgaatttataactatcgttggtccttctggatgtggcaaatctacattattgagaataattgcgggtttagtggctccttcagaaggtatcatcaataaacaaaatacaagtggtgcttttgtttttcaagattctgcattgcttccatggaggaccgtgcagaagaatgttgaacttctcatggaattagagaatgttgacaaagtagaacgaaagcatagagcagaacaagcattagagcaagtcgggctaactggatttaataaaaattatccgcatcaactatctggtggcatgaaaatgagattgtcattagcaagatcattagtgcttaaacctgactttctgctcctcgatgaacccctatccgcagtagatgaacttacaagagaagttttacaagaagaaatacacgaactttggaaacaagaaaagtttacttcaatacttgttacacataatgtagcagaagcagtttatttgtctaatcgtgtaattatcatgtcaccaagacctggttatataactcacatcgtagatattccatttaaaaaaagaaatcaattactacgttccaaacaacaatttacaaaaatagtgaatgatatttctggaaagttgaggacatggaagtaaa

SEQ ID NO: 269075 - DNA, 727 bp, Unknown
  Bacterial polypeptide expressing nucleotide sequence isolated from the Sargasso Sea
tatgtcgactcttacatcagctggtctaaaaaaatctttcgagagtaaaacagttattcataatgtttcgcttgaggtgaactctggtgaaattgttggacttttgggcccaaatggcgcgggcaaaactacaaccttctatatgattgttggcttattaaaatcagatgagggtagcatatacattaatgatcaaaatataacttacgaaccaattcataaaagatttgagcaaggaatcagctatctacctcaggagccatctgtattcagagacatgacagcaaaagataatattgattcaattcttgaagttgatagtagtcttagtaaaattcaaaaagccaacattcttgaacatctgattgagaaatttgatttaagtaagttcattaatactaaaggtatacaattgtcaggaggagagagaaggagagttgaaatcgctcgggcattagctctaaaacctaagtttcttttactcgatgaaccatttgcagggattgatccaatatctgtaatagatttacagaaaataataaaagttttggcaaaagaaggtataggaatactaattactgatcataatgtcagagaaacattgaaaatatgtgataaatcatacgttatcaactcaggcaaagtgttagcatccgggaaatccaaagatcttgttaaaaatgaaattgttaagaaagtctatttaggtgaatcttttaaattgtga

SEQ ID NO: 269076 - DNA, 538 bp, Unknown
  Bacterial polypeptide expressing nucleotide sequence isolated from the Sargasso Sea
ctgagaacgttggaaactacagttatttgggtgacacatgatcaggaagaggctcttcttgttgccgaccgagtagcattcatgatcgacggtgagataaagcaaattgacagcccagagcatatatacatgtaccctgcaacactggaggctgctgagtttattggtgaaggagttgcttttctgtctgagattcgcagtgatcaaatcacaagtatttttggtgatttaccaatatccgaatgtgctactgagagtaatcgcttagaaatcgatcaatcatcatccgcaatactttttgttagaccagagcagataacactggagccggatcaaatccacgtgggttcgaccgtcgcagggacggtaatttccaaggactactttgggcacagtagtctactgactgtgcaattggacgataagtcattattcaaagtgagagtgacttctcgagtcgaggtcagtgagggacaaagattaaatctgggacttcgggaatatccgagagcatttgcccagacagttagtgtataga

SEQ ID NO: 269077 - DNA, 621 bp, Unknown
  Bacterial polypeptide expressing nucleotide sequence isolated from the Sargasso Sea
aatgagtttgtttgaagtaaaaaatatcactgtagcatttggaggagtaaaagcccttaatgatgtatcgttcggtgtcgacaaaggtgaaatatttacaataattggtcctaacggagcaggtaaatcaacactcttcaatgtaataagcagaatctatgagccaagcaaaggtgagatatattttgaaaatcaaaacatctcaaaaactaagcctcacaatatatcaaaacttggaatagcaagaacgtttcaaaatttagaattatttgaaaatgcaactgttctacagaatttacttcttggacgacatatttataaaaaaacaaatattttgtctgaggtattttttacacctagtgcccgtaagcaagaacatgaatacagacttaaagttgaagaggtaattgactttctagaccttcaacattaccgagatactcttataaacggccttccatacggtgttcgcaaaaatgttgaacttgcaagagctctttgcactgatccaaaattacttctattagatgaaccgtcatcaggattaacaaatgaagaaacaattgatcttggcttttggataaaagatattcaatctttattaggaattaccataattat

SEQ ID NO: 269078 - DNA, 607 bp, Unknown
  Bacterial polypeptide expressing nucleotide sequence isolated from the Sargasso Sea
gatgggcattcttgaagtcaaggacgtcaacaaacgcttcggtggccttcaggccctgggtaacgtcaacctcagcgtggcagagaactcctgccacgtgatcatcggccccaacggggccggcaaatccaccctgctcaactgcttggtgggcaagttgatcccggataccggcagcgtcctgttcgacggacagagcgttctgggacgcaagccctacgagatcaaccagatgggcatttcacgagttttccagacaccggaaatcttcggagacctcagcgttctggaaaatatgcttatcccgatctttgccaagcgcgacggggccttccgcatgcatgccgtggaagacaccgccaacgagaaagagatcgtggagcaggctgaacatatgctcgaaagcctgaacatggccgacaagcgccatatgcattccgcctcgatgagccgcggggacaaacggcggcttgaaatcggcatgtgccttgcgcaagagccccggcttttgcttctggatgagccgacagcgggcatggcgcgggcggataccaacaacacgatcgacttgctcaagcagatcaaggatgaacgtgacatcacgatc

SEQ ID NO: 269079 - DNA, 574 bp, Unknown
  Bacterial polypeptide expressing nucleotide sequence isolated from the Sargasso Sea
atgagtttcaaaattaatattaagaacaagtcatttattaataaacatgataaaaaaaaagttgaggttcttaagaatatcaaaattgaaatacagtcaaatgaatttgtttgtattgttggtccttcaggttgtggaaaaacaacattaatgaatatgattggtggtttaattccttttgataataatgaaaaaattggaagagatttagataatgatgatacatttggctatgtatttcaaacatcgcgactactaccttggcttaccgtgaaagagaatattgaactcgtaagtaaaaaagacacaaatttagatattgagatcaatcatttattgaaagaatttgatttattagaatttataaactatttcccaaaagctctatctggaggtatgagaaggagagtttctttagtacgagcgctaattaacaaacctgaagttttgttaatggatgaaccatttgtatcacttgaccaaccaactgctgagaatctgtataaagttttaattgatttctggaaaaaaaatccaattacagttattttgataacacacaatttaaaagaag

SEQ ID NO: 269080 - DNA, 713 bp, Unknown
  Bacterial polypeptide expressing nucleotide sequence isolated from the Sargasso Sea
tgaggagtctgaaacacaagaaaatgttttaggctccttatttaatattaaaacaataaatttatcaaaatcatttggtggaactaaagctctagattctattaatattgaattaaattcaaaaaaaattcatggtctggttggtcagaatggtgcaggtaaatcgacgttgggaaaaattattggtggtcatcatagattcacagaaggtaaacttttaattaatagtcaatatgttgacaagtggtctccaaaactagcattagataaaggtatagcaatgatccatcaagagcttgcacttgttcccaggatgacagtttttgaaaatatttttttaggaattgaaaaaaataaatttggaattttaaaaaagaaaaattttgggctttacgatactttagaagaaaagataggatttgggttaaatccaaatgaaatagttggtaatttaaggattgctgatcaacaaaaagttgagataatgagagcattagcaagagatgcgaaagtaattataatggatgaaccaacatcatctctaacaaaagatgaggtagaaagattgcactcgctgatgaagaaacttaaatcttcaggatacttaataatttatgtttctcattttttagacgctattcttgaggtatgtgatgatgtaactatacttagagatggaaaattaataagatcaaactcaatagaaaaagaaa

SEQ ID NO: 269081 - DNA, 160 bp, Unknown
  Bacterial polypeptide expressing nucleotide sequence isolated from the Sargasso Sea
gcaagagcattatgtatggaacccaaaataatgttatttgacgaacctacatctgctttagaccctgaaatgattaaagaagttttagatgcaatggtaagtcttgcaaaaggtggtatgacaatgattgttgttactcacgagatgggatttgctaaag

SEQ ID NO: 269082 - DNA, 254 bp, Unknown
  Bacterial polypeptide expressing nucleotide sequence isolated from the Sargasso Sea
taaaaatcctaacgttttagtttttgatgaagcaacgagcgcactagataacctcacagagcaagcagtaatggatgcagtacacaatttgggaaaagatgttactataattatgattgcacacagattaactacagtaaaggattgtgatattatttttttcctagaagatggaaaacttgcagcacaaggtacatttgacaaattaatacaaaataatgataattttcgtgcaacagcagctcaaatttaaa

SEQ ID NO: 269083 - DNA, 532 bp, Unknown
  Bacterial polypeptide expressing nucleotide sequence isolated from the Sargasso Sea
tatggcagaacaacctagctatggttccatttatctccttggacatagcttggcagataccaacaaagaggatttgactaagcttagaagaagaattggtatagtatttcagaacttcagacttttaaaccatcttacagcagcagagaacgtcgctttaccgctacgcatcgctggagcaacagtgagccaagttaaagattatgtgctcgagctgctcgattgggtcgggctcagagaacagagagataaaatgccttcatcgttatccggagggcaacaacaacgagttgctctagctagggcggttgtaaccaggccatcactgctgctggcagatgagcctactggtaatattgacgatgaaaatgcaaaaaaaataatgtatcttctaacggagctgaataaaattggtaccaccgtcatcgttgccagtcatagaaaagatttgtgccgcgatcccaatatcaaccaacttcttattgagtcgggaaggcttgcggtcttaaacaagtctccaaagcagtgctga

SEQ ID NO: 269084 - DNA, 741 bp, Unknown
  Bacterial polypeptide expressing nucleotide sequence isolated from the Sargasso Sea
caccaaatatttatggctcaaagataccctcatgagctatctcggaggacagcagcaaagagtggctatagcaatggcattagcaggcagtccagaattattacttttagatgaaccaactaccggtcttgatgtaacaactcaagctcatgtacttgagttattaaatgaaattgctaaagatagagacacctcaatggtttatgtaagtcatgaccttggagcaattgctcaagtaagtgacagagtaattgtaatgtacgctggagaaatagttcttgatggtgatgttcgagaagttttaaattcccccctccacccttatgcttatggattacttaattcaataccaaaactctctttaccaggattgcctgaagcaatgcctggcacaccaccccaacttgaacaaaatataaatgggtgtagtttttctgaaagatgtgaatttgcatcagataaatgcaaaaattcaaggccagagctttttactcctaagaataaaaaaatgaaagttagatgtttttggcatagtaaattatcagagaaacaatataaaccaaattatggtacacatttagcaaataaaacaaaaaatttggatgaagtcttaaaattagacaaaatatcaatcacatactctaagcaaagtatcctagatcaattattaaaccgcttttctgaaaagaatattactgtaaaagatattgaaattgaaattaacaaaggagaaaccattgc

SEQ ID NO: 269085 - DNA, 412 bp, Unknown
  Bacterial polypeptide expressing nucleotide sequence isolated from the Sargasso Sea
tataacattcaaaatttaaatgaccgaatagatcaccttgcaaataaacttagattaaaagaccttttaaacaaaattactggagagctttcttctggacaaaaaaacagggtaagtcttgctaaagctttaataaatgatccaacagtacttttgttggatgaacccactgcttcactagaccctgaaactggtgattttgtaagatcgtttttagaagattacaaaaaggaaaaaaaaatatcagttttgcttgcctcccacaatatggaagaagtaaaaagattatgtagttctgttttaatgatgaaagatggtttaatagtggatagaggaactcctgaagaattaataacaaaatatgggagaagaaacttagaggaagtatttttagaaattgcgagaaaataaa

SEQ ID NO: 269086 - DNA, 733 bp, Unknown
  Bacterial polypeptide expressing nucleotide sequence isolated from the Sargasso Sea
aatgtttatagaaattaaaaatcttacaaaaaactataataagtttttagcggtaaataaaatcaattttttaattaaaaaaaataaaactataggtttattaggacctaatggttgtggaaaaacaacaactattggaatgattctcggtttagttacaccatcgagcggggaaataaaaattgagaataaaaatattagcacattcaaaagagatgaaattttaaaaaggtttaactttgcctcaccgtatgttgagctgcctaagaaacttactgtaagacaaaatcttgaaatatacgggagattatatggtattaaaaatttaaatgagagaattgatgaaatctctgaggacttaaacattaaaaatttttttgataggaaaactggagaattgtcatcaggtcaaaaaaatagagtatccttagctaagtctttaattaataaaccggaagttttgttgttagatgaaccaactgcaagtttagacccagatattggtgattttgtaagaagttatattcaagattataagtctaaaaacaaagtaactattttattagcctcccataatatgagtgaggtagaaagattgtgtgacagtgtaattatgatgcgtgaaggtaaaattatcgatgaaggtacctgctccgatttaattaaaaaacatggaagaaataatttagaggaaacatttttaaagctcgcaaggagtaaaaatgaattttaa

SEQ ID NO: 269087 - DNA, 615 bp, Unknown
  Bacterial polypeptide expressing nucleotide sequence isolated from the Sargasso Sea
attgttggagagtctggatctggaaaaagtactcttgcactagcaatgatggggtatgttaagcatggtctctacactattggaggagaatgtgaatttaattcattttatcttttaaaaatgaaaaatagagatttggaaaaaatcagaggtagaaaaatcgcaatgatacctcaaaatgcagggcaggcactgacaccaaatttaaaaataggttatcaaattgatgaagcattacagttgcattctgatttcaaggaagaggaaagagaacaaaaaatttctgaattgttaaataaggtgagacttccttcaccagagacaattgctcttcgatatcctcatgaactttcagggggacaacaacaaagagttgctgttgctatggcattagctggaactcctgaccttttactattggacgaacctaccactggcttagacgtgacaacacaagctcacgttttagaactgcttaatttcattgccaaagacactggaacatcaatggtttatgtgagccatgatctaggagcaatagctcaagtaagtgaccgtattattgtaatgtactctggtgaaatagttttagagggaccctctagagatattctt

SEQ ID NO: 269088 - DNA, 268 bp, Unknown
  Bacterial polypeptide expressing nucleotide sequence isolated from the Sargasso Sea
gatattagcagaccgccctatccttttattagatgaagccaccagcgcacttgatgcgatgagtgagcgtatggttcaacaagccatagaccgtcttatggtaggtaaaaccagtattgtcattgcacacagacttgccactgttcaacacgcagatcgcatcatcgtaatggataaaggcaacatcgttggcatgggtgaccatgcttcactcatgaaaagcgataccctgtatagggaatacgctgaactgcaattgcttagctga

SEQ ID NO: 269089 - DNA, 665 bp, Unknown
  Bacterial polypeptide expressing nucleotide sequence isolated from the Sargasso Sea
tgctaagggagtcattaaatcctacaagaacggtgaaaataaattaaaagttcttgatggtattaatctccctcttgagcagggggaaataattactgtagttggtaaatctgggtctggaaaatcaacactattaaatatcttaagtactctagatagtgcagatgaaggtgagataataatagatggtaaaaatatcgaaggatactcagatattgaaatatctaaatttagaaattcattcattggttttgtattccaatttcatcatttattacctgattttactgttgtagaaaatatcttgatgccggcatggataaaaagagacaaatctaaacttaataaagcttacgaattattagagactttacaattaatgggtattaaggataaatatccaatggaattatcaggaggtgaaaagcagcgtgttgcagtattgagagcattaataaatagaccaaaaattttatttgcagatgaaccaactggtaatttagatgaaaataatgcgttattattagttgacctattaaggaaaataaacagagattacgaggtggcaatactattgacaacgcataatccagatgttgccgcaattggtaaaaaaagatatgaactcaaatcagggttattagaaaaaagtaaagatttataga

SEQ ID NO: 269090 - DNA, 775 bp, Unknown
  Bacterial polypeptide expressing nucleotide sequence isolated from the Sargasso Sea
atcatcagataactctagtaatacaccggtaattaagtgtgaatctgtttataaaatttttggaagtaatgcttttaaacttcttgaaaattcaaatggacaagttgatgcaaaaacttttcaagaagctggttgtatagtaggcgtaaataacgcctcttttggagttcaaaaaggtgaaatgatggtagtcatgggattatcaggctcaggaaagtcaacattacttcgatgcatatcaagacttacagatgccactgctggaaaaatatttattgatggtgaagatttgttatcaatgaatagcagacaattaatcgaattaagaagaaataaaatgggaatggtctttcaaagttttgctcttctacctcacaaaactgttattgaaaatattgcttttcctcttcaagtcaagggcaccaatacaagagaaagtatggcaaaagctttagagatggttgagttagtaggattaaaaggtagagaaaattattttccaagagaactttcaggagggcagcaacaaagagtaggaattgcacgttcactagcagtagaacctgatatttggtttttagacgaaccgttttcagctcttgatcccctcatacgaaaagaaatgcaggatgagtttttaagattacaagcagttttaaataaaacaattatgtttgttacacatgatttcgatgaagctcttcgcttagcagatcgtattgcaattatgaaagatggaataatagaacaattagacactcctgataatattgta

SEQ ID NO: 269091 - DNA, 823 bp, Unknown
  Bacterial polypeptide expressing nucleotide sequence isolated from the Sargasso Sea
caagtcaatcaaagcaaacaaggccttttagttgaaatcttatctggcctggatgccctaagggtaaatggagcatattcatttataaaaagaaaatttagcgcacaggcagacgattattcaaaagttaccaatagcgcaaaaaggtttaatcaaattaccaccaattatgtgagtattgtgcaacaaatcgctcaaattgcaattatcgtttacggttttcatttgtttgtggaacaaagaatatcgatgggggctattattgccactatgatcttatcaggaaaaacgcttggtccgctagctaaaatggcccaaacactcgggcgggcaaacagcgcctacgttgcgcgaaacaatttgatcgattttttttcccaacaacgccgagaacgtttctctaaagttggcctagaaaatgtcagaaaaaatttagcaatcgacatacagaatgcctccgtaaaactatccgcagacagtaaaccaatttttacgaacctttcgtttgatgtaaagaaaggtgagaaaatcgctattattggtagatcgggtgccgggaaaacaacactcctaagaaccgtttgtgggcttctagagcccgagaccggatccgttcagatcaatggcgaccaggccagctcaattccgagagatgaattattcaggcacgtgggggtcgttcttcaagaaagttggttgttttctggcactctgagagacaacctaacgctcggctatgaagattttaatgatgaacaagtaagcgaagctctgaacgcagcaggagctcattttctaggagaaaataaaggggaaatgcttg

SEQ ID NO: 269092 - DNA, 733 bp, Unknown
  Bacterial polypeptide expressing nucleotide sequence isolated from the Sargasso Sea
gatgctaaaagtaaacaatcttgtaaaatctttcgggggtatcctagctactgataaacttacttttaaagttgaaccaggagaattgcacgctctgatcggaccaaacggagctggaaaaacaacattgataaggcaaattactggagaaattaagcaggactcgggtacaatatattttaatgacaaagaaatatctgctcttcctattcatactagatctgcacttggattagcccgttcatttcagatcacaaatattttcaaagacatgactacattggaaaatgtcactcttgcagttcaatctcgtataggtcattcattctatttctgggcaaatgctaaaaaagatccaaagttgatagagccagccactatttttttaaagcaggttggactggaagatcgtgcagatatcatttcaggacaactttcccatggagagcatcgtcaattggaaattgctatggcattagcaaccgagcctaaaatgcttctccttgatgagccaatggctggaatggggaccgaggagtcaaaattaatggttgaaattattcagaaacttaaaaaaaaaataactattcttctagtggaacatgatatggatgttgtttttgcattatcagacaaaattaccgttctagtttatgggaaagttattgcaacaggctatcctgatataataagaaatatacctgaagtacaagcagcatatctcggagagtaa

SEQ ID NO: 269093 - DNA, 717 bp, Unknown
  Bacterial polypeptide expressing nucleotide sequence isolated from the Sargasso Sea
cgatccagaaactttccatggaagttgaggcaggagaaatccatgccgtcatcggtccgaacggagcaggaaaaaccaccctgattgcccaactttccggatcccttaaaccggattccggaagaatactcttcgaacatcaggacattactcacgtccctgaataccgtcgcagcgccttggggctggctcggtccttccagatcacaagcgtcctcaaaaatttttccgccttggacaacgtggcccttgcggttcaggcccacgcaggacactcgttccgtttctggaataaagccaggaaggctcaagaattgaaggaaccggccctcgaaatccttgaaaaaatcggcattacggaccggatggacatgcctgcctctagcctcagccatggcgagcagaggcagttggaactcgccatggctctggcaacacgtcccaagctgctcctgctggatgaaccgatggccgggatgggcgttgaggaaagtcaaaaaatggtggagttgctccaggatctcaaaggcacccacaccctggttctgatcgaacatgacatggacgccgtttttgccctggcagaccgtatcaccgtactggtttatggagagtccatcgcctgcgatactcctgaaaacatccgttccaacccggaagtccgaaaagcctacctcggtgatggagaagtcctcactgaaatcgaagaagtctgaa

SEQ ID NO: 269094 - DNA, 685 bp, Unknown
  Bacterial polypeptide expressing nucleotide sequence isolated from the Sargasso Sea
tatgaacatcatagaagtaaaagatttaaaaaaagcttatctactgccaagcgataaaacaaaaacattcaatgccgtagacagcatctccttgggaatcaaaaaaggggaggtctatggaattcttggtcccaatggggcagggaagaccacaactttggaaatgctagaaggccttaaggaaattgatgacggctctgcaatcattgatggtattgatgtaagcaaggatccttacgaagttaaaaaagtcatcggtgttcaactgcaaagcaatgagtattttgacaagctggatctcagcgagctactgactttattttctaaactctattctacaaatatcgatcactcaaagttgctagaccaagttaatttgctggataaagcaaatgcaaaaactcaacatctatcgggcggtcaaaggcagagattctcaattgcatgtgctttagtgaataaccccaagatactctttctagatgagccaacaacaggacttgatccgcaagcaaagagaaatttatggaatttagtaaaggatctcaatgcatccggcatgacaattgtattgacgacacataacatggaagaagcagaacatctatgcgacagaatcgcgatcatggacgaaggcaaattgattgcagaggacacaccgaaggcattgattgagaaaatatgc

SEQ ID NO: 269095 - DNA, 361 bp, Unknown
  Bacterial polypeptide expressing nucleotide sequence isolated from the Sargasso Sea
cttggataagttttttgattctgacagggggctcgtccgggctgttcaaaatcttcatctcgatatcaaagaaaatgactttatagttcttctaggccccagcggttgtgggaagacaactactttgcgttgtgtggctgggctagagagacctaacggtggtagcatagagatagctggtacattagttgattcagtcgataagggcgaatttgttccaccggaacggcgtgatattggcatggtctttcaaagttatgcggtatggccacatttgaacgtttatcaaaatgttgctttgcctctaacggatggtagccgaagggttcctaaagaccaggttaccgatcgggttatgaaa

SEQ ID NO: 269096 - DNA, 562 bp, Unknown
  Bacterial polypeptide expressing nucleotide sequence isolated from the Sargasso Sea
atgtccagtttaacgatcaaaaacctgaataagatatacaatcctgggaaaaatgaagtccatgccgtcaaggatttcaatcttgagattgaagatggagaatttgttgctttgttggggccctccggatgtggcaaaacctcaacacttagaatgattgtaggactagagagtattacttcaggcagtatcttgttcgatgatgttgaaattaatcacttatctcccgaacaacgtaacgttgcaatggcctttgagtcctatgctttgtatccaaattttaccatttttgaaaaccttgcctttcctttagaagttaaaaaaaacagttcctcagaaatctccaagaaagtaggtgagattgcagaaatgcttcaaatcaccaatatcctagagcttaaaccgaatcagctttctggaggacagcaacagcgagtttcattgggtagagccctgattcgggatcctgcagtatttatcctagatgaagtgatgagtcatttagatgcccatttgaaatttcagatgctttttgaattaaaaaaaattcatcagacttgaa

SEQ ID NO: 269097 - DNA, 621 bp, Unknown
  Bacterial polypeptide expressing nucleotide sequence isolated from the Sargasso Sea
aatgaacctaaagattcataatgtatccctttcaattaaagggagattaatcgtaaatgatgtttccataactgttaatccaggggaagttgtaggtttgatgggacctaatggtgctgggaaaactacaacttttaatcttgcagttgggaatataaaacctgataaaggtgaaattataatgaatgggaaaaatataaccaatcttcctctcccaattagatcaagacttgggttgggttatttgactcaagaagcgagtatatttagagacctcaatgttaaggataatatagatttggctttgcaaaattcatcttatagtagagcggcaattagaaatagaagagaacaattaattaatgattttaatttgaataattttgtagatagttatggttatcaactttcaggaggagagaggaggaggtgtgaaattgctagggctctcactgtggggagaaaaggacctaaatatttgttattagatgaaccgtttgctgggatcgatcctctagctgttaatgatttaaagaaattaattcttaaattaagtagtgacggggtggggattcttattacagaccataatgtaagggaaacccttttaattacaaacaa

SEQ ID NO: 269098 - DNA, 835 bp, Unknown
  Bacterial polypeptide expressing nucleotide sequence isolated from the Sargasso Sea
ttaggcatagttggtgagtctggtagtggtaaaactttaagtatgcttgcgcttacgagattacttccaaagcaagctatagtatcttctggctcaattgatttcttaaaccacaatttatctgaaatagataatttaaatttttataaaaattttagtggaaagaaaatttcaatgatttttcaagagccaatgactgctcttaatccagtatacacgattggccgtcagcttatgtacacatatatgtatcataataaagttggtaaaaaggaagcacatcataaatccttagagatgctaagtgctgttaaattatcagataatttggagagaatgaaacaataccctcatcaactgtcaggtggtcaaagacaaagagtaatgatagcaatggcattaataaataatccttcattattaattgctgatgaacctacgactgcactagatgtaacagttcaaaaagaaataataaatctaatccaagagttaaaagaaaaatttggaatggctttaatttttatttcacatgatttgggagttgtctctcaagtatccaaaaatattatagtaatgaaaagaggtgatataattgaaacaggcaaaacatacaatgttctcaataaaccaaaaaagctatatactaaaacattaataagttgcctaaaaaacttaaatacaaaacgtaaaataaataagcatcaaaagaataataaaattatagaaattaaaaacttatcaaaaatctataagttaccatcaaaattattttctgcaaaaaaaaatataaatgctgtaaatgatattaatttttctgtttatgagggagaaa

SEQ ID NO: 269099 - DNA, 625 bp, Unknown
  Bacterial polypeptide expressing nucleotide sequence isolated from the Sargasso Sea
tgaggtgaatagtttcataattggacctaatggagcaggtaaatccactttattaaaagcaatcatgagtttaataaaagtatccgcaggaagattttatgtaaatggtgaagaaaaaacaaacctatctacacatagaattgttatggaaggaataggctatgttccacaagtagcaaatgttttcccatctttaactattgatgaaaatttagagatagggtcgtggagtattaaaagaaataaaaaagaagcactcacaaaaatttataatgactttccaatgttgggaaatagaaaaaaagacaaagcgggcaatctctcaggcggacaaaggcaaattttagctctagcaagagcattggttacctccccatctttattgctactcgacgaaccttcagcaggattgtctcctgtagcgattaatgaggtgtttacatctataaaagaaataaatgactctggagtatcaattcttttagttgaacaaaatgcaaaaagggcactttcttttagtgatagaggatatgttcttgaccaaggtcgtaatgcataccaaggaaaaggtgaagagctattaaacgattctagagtaattgatttatatttaggaaaactataa

SEQ ID NO: 269100 - DNA, 730 bp, Unknown
  Bacterial polypeptide expressing nucleotide sequence isolated from the Sargasso Sea
atgtcaatatctcttgaaataattaatttatcaaaaacttatgggtcaaaagaagcagttcaaaatatttcttttaaagtaaatcaaaataaaattattgggattcttggtcccaatggttgtggtaaaacaacaacaattggtatgatcttgggtttactaaaaccaacaaaaggcaaagtattaatcaacggtatagagattgaaaaaaatagagtaaatctattaaataaattaaattttatctcaccttatatagagcttccaaaaaaattaactgtaaaacagaatcttgaagtttatggaaggctctatgatgtaaaggatcttaaaaataaaattaattatctatgtgaaaaattaagattaaatgaatttattaataaagtcacaggtgaactttcctctggacaaaaaaatagagttagtcttgccaagtcaattattaatgacccctcagttcttctcctagatgagccaactgcgtctcttgatcctgaaacgggagattttgttagaagttttttagaggagtaccagagagagaaaaaaacttctatacttctcgcttcacataatatgtcagaagtggaaagattgtgttcctcggtgctgatgatgaataaaggatctattattgataaaggaactcctaaagaattaatcaaaaaacatggaaggaaaaatatggaggaagtttttctaaaaattaccagagatctaatatgaa

SEQ ID NO: 269101 - DNA, 585 bp, Unknown
  Bacterial polypeptide expressing nucleotide sequence isolated from the Sargasso Sea
ccaccgccgggagcatccgcctgctcgaccatgacatcacccgcaccgacccggccaaggtggcgcgcatggggctggttcgctcgttccagatctccgcggtgttcccgcacctctcggtgctggacaacgtgcgcgtcgccctgcagcgcccgggcgggctggccacccagttctggctgccgatgcgttcgctgaaccggctgaacgaacgtgccatgcagctgatcgagtcggtcggcctggccgacaagcgacacgaaccggccgccgatctgtcctacgggcgcaagcgcgtgctggaaatcgccaccaccctggccttggagcccaaggttctgctgctcgacgaacccatggccggcatgggccatgaagacgtgcacgtggtggccgagatcatccgcgaagtggctacccagcgtgcggtgctgatggtcgagcacaacctcaaggtggtggccgacctctgccatcaggtgaccgtgctgcagcgcggcgaaatcctcacttccggcgactaccgcacggtcagccaggacgagcgcgtgcgcgtggcctacatggggaccgacgatgactgaa

SEQ ID NO: 269102 - DNA, 527 bp, Unknown
  Bacterial polypeptide expressing nucleotide sequence isolated from the Sargasso Sea
aagagatgaaatattagctagaataaacttttgctctccgtacattgagctaccaaaaaaactaacggtaaagcaaaatttagaagtgtatggaaggttatacggagttaaaaatttgagtgaacgaatattagaaatatccaaagatttagacattaaaaatttttttaaaagaaaaactggtgagttgtcctctggacaaaaaaatagagtatccttagctaaatcattaattaataaaccagaaattttacttttagatgagcctaccgcaagtctagatcctgatattggtgactttgtaagaagttatattcaagaatatagatcaaaaaatcaagtcactatacttcttgcttctcataacatgaatgaagttgaaaggctttgtgacagtataataatgatgaagaaaggtaaaatcatagatagaggaacttgtaaagaaataataaaaaaacatggaaggaataatcttgaagaaacgtttctcaaactagctaggagcagagatgaacttcagtaag

SEQ ID NO: 269103 - DNA, 718 bp, Unknown
  Bacterial polypeptide expressing nucleotide sequence isolated from the Sargasso Sea
atgaataaaccaatattggaatgtaatggtatagcagctggatacgtaaaagggctcaatatcttgcaggggattgacttagttgtttctgaaggagaaatcatttcaataataggtccaaatggtgcgggtaaatcaacattgttaaaagcaattatgggtttaattaatgtgtccgcaggtagattttttattaatggtgtggagaaaacaaatctttcaacacataaaattattaacgaagggataggctatgtgccacaagttgaaaatgtatttccttctttaacaattgaagaaaacctagaaataggagcttggtctttaacaaaaaatagaaaaagcagcattacaaaggtgctcaaagacttccctcttttaaatgaaagaaagaaagaaaaagctggaaatctctcaggtggtcagaggcaaatcttagcattagcaagagctttagttacttctcctaacttgcttttattagatgaaccatcagcaggactttcacctgttgcaataaatgaagtttttaaaacaataaaagaaattaatgaaaaaaatgtatcaatcttattagttgaacaaaatgcaaaaagagctttgaaatttagtaatcgtggttatgtattagaccaaggaagaaatgcgtatcaaggtgaaggggtagaacttctaaacgacccaagagttgtagatttatatttaggaaaactataaa

SEQ ID NO: 269104 - DNA, 250 bp, Unknown
  Bacterial polypeptide expressing nucleotide sequence isolated from the Sargasso Sea
gttattagacgaggccacctccgcactcgatgctgttacagaagcaaatatttcaaaatcattagataaactaagcgaaaacacaacgactatcgttgttgcacacaagctcagtagcataaaggatgcggatactatattcgttttagatgacggcagtcttgtggagtttggcactcatacggagttattaaaaaagaaaaaatactatgcaaccatggtgaatgctcaaaataaaaatgacaaataa

SEQ ID NO: 269105 - DNA, 681 bp, Unknown
  Bacterial polypeptide expressing nucleotide sequence isolated from the Sargasso Sea
aatgcaaaattctataaaagtaataaatttaaataaatcgtacggatcaaaagaagctgtcaaaaatattaattttgaaattaaagaaaatgagatagtaggattgcttgggcctaatggctcaggaaaaactacaactattggaatgatactgggccttcttaagcctagtagtggtgaagtattaattaatggattaaagatagaaaaatatagagatgatattcttcaaaaaattaattttatttctccttatattgaattgccaaagaagctaactgtaaagcaaaatttaattgtatatggcaaactatattctgttaaaaatttaaaagaaaaaattgattacttggtaaataaattaagattagaaaatctactaaatagaataactggtgaactatcttctgggcaaaaaaatagaataagtttagcaaaagcaataatcaatgatccaagcgtattgctactagatgagcctacggcatccttagatcctgaaataggagattttgttagaacttttttagaaaattataagaaagaaaataaagtatctattttattagcttctcacaacatggatgaagtgacaaggttatgctcctcaattatgatgatgaaaaatggctctattattgatgaaggtaaaccaaaagatttaattaaaaaacatggaag

SEQ ID NO: 269106 - DNA, 595 bp, Unknown
  Bacterial polypeptide expressing nucleotide sequence isolated from the Sargasso Sea
gccccaaaaccttcgctgctcttgatggacgaacccctatccagtctggatgaggaactgagagagcaactggcccgggagattcgactaattttgaagcaggaaaagatatccgccatattggtgacccacgatcagaacgaagcctttgccgtgggagaccatatctgtgtaatgcaccaaggccgagtacagcaaaacgattctgcatataatctatatcatcgtcctctaaaccgttttgttgcagaatttatcggagaaggtacattactgccaggcgtagttgccgatgaggatagtattgcaacagatttgggagaaattaaggggaatttaccggaatcctgtaagcatcaagataatgtcgacgttttgatccggcctgagaacgttatcttagcggataataaagaaaataaagccgtgattacggagcgttattttcgaggttccaattacttgtatactttaaaaacgaacggcggagtggaactgctatgcttacttccaggctccgaggcccttcaaatagatcaatatatcagcgtccgacttcaaatcgagaaaccagttgtttttagccgcccataaa

SEQ ID NO: 269107 - DNA, 394 bp, Unknown
  Bacterial polypeptide expressing nucleotide sequence isolated from the Sargasso Sea
aatgatttcaatgctcttgaaaatgtaatgattcccaggttgattcatggagaagccactggaattgtgaaaaaaaatgctattgatcttctggaaaaagtaggcttggcggagcgtgcatttcataaaccctcacagctttctggaggagaacagcagcgagttgctatcgcacgtgcattaataaacaaaccccgtgttgttctggctgatgaaccgaccggcaatctcgatgaagaaacaggcgtgcaggtaatggatattctgcttcgactaaataaagaacatcaaacaacatttataatgattacccacaacccctcacttgcatctaaaatgcagtttcagtatcgcatggaaaatggacaattacatttgattgcgaataaataag

SEQ ID NO: 269108 - DNA, 553 bp, Unknown
  Bacterial polypeptide expressing nucleotide sequence isolated from the Sargasso Sea
tggttctggaaagaccacgcttctcaactgcttatctgcattggacagcccgacatccggagaataccaattctcgggcaacaaggtcccaaagaacgaatcagaggccatgactacattcagaagagagaacattggatacgtttttcaattcttcaatctactacaggaccttactgttttggagaacctactgctaattcaggagttggcaggaagtagggacgaagatagggcccgtagtctactagcacttgtaggactagaagccgaggtcgatcgctttccagcagagatcagtgggggccagcagcagagagtagccattgctagaagcctagcaaagaggccaaggcttcttcttggggacgagttgacggggaatcttgactcatggacatcatctgttgtaatggaagtcctggtcaaggcgtgcgactcagagggaatcacatgtgtattcgtcactcatgacgagtctctggtgcaatatgctacaagagtcattaggatcgacagtggcaaaatcatctccgatgacattgtaggatag

SEQ ID NO: 269109 - DNA, 706 bp, Unknown
  Bacterial polypeptide expressing nucleotide sequence isolated from the Sargasso Sea
tatgattaaagtaaataatatatttaaatcatttaaagaagaagacgttttaataaatgtcacatttgagtttgaaaaaggatccattgtgggctttttgggaccaaatggagccggtaagagcaccttaattaagatattgactggggttataagtccagataaaggaactatttatataaataacgaaaatatagcagaaagtaggaacataacaaaaagcaatataggctatatacctgaagtaccaactggttttaataatttaactgttaaggagtttttatatttttgtggagaattaagaaatttaaaaaaatgcataataaaatcagaattggatttgattgatcagcaatttcaaataaaagatattttccgtaaaagaatggatagtttgtcaaaaggattgcgtcaaagaatatggctaattcaagcaatattacataatcctgatgtactattgcttgatgaacctactgatggactagatccaattcaaaaaagaagtataataaaatttattaaaaatattggatttaataaaacgataattattacttcacatacattagaggatttacaaatattatgtaatcatgtattaataataaaagatggaatacttatttttaatgataatttagaaactgtgataaagaactataataatttgaataatgcatacatgcaaattataaattaa

SEQ ID NO: 269110 - DNA, 712 bp, Unknown
  Bacterial polypeptide expressing nucleotide sequence isolated from the Sargasso Sea
aatgcttgaactcgataatctaaatgtaaattttggaaaaattaaggccgtttgtgatgtgtgtctcaaaatttcacgtggtgaaataattacgatcacaggaccaaatggcgcaggaaaaagcagcactttaaatgctattaccggtattattagacctgtaaaaggctcaatcaattttagaggcgaggaaattgctggtcaaaccagtgaaaaaataatcaaaaaaggtattgtgcaaattcccgaagggagaaaaatttttggcactttaactgtaagggaaaacattatcatcggaggttatcgaaaacttccgttcaccttatataaccaaaatatgaagagtgttttgaatttattccctagcctagaaaataggttagatgaaaatgcatccaaccttagcggggggcaggcgcagctacttgccttggcgcgaggcctgatggcggagcccgatcttttacttttagatgaacctactcttggattatctccaatacctgcaatggagatatttaagttacttaaatggctaaagagtgcaggaatgacaataattttagtagaacaaaatattcataaaactctcgcaatttctgatagaatctatattcttgaaagtggcaaagttattttgaaaggacgcccagataaaataaaaagcgctccagaatttttgcagtacgcgggagactattctgtttag

SEQ ID NO: 269111 - DNA, 549 bp, Unknown
  Bacterial polypeptide expressing nucleotide sequence isolated from the Sargasso Sea
aatgatcaattctcttcaaataataaacttatcaaaagcttatgatgcaaaagaagctgtaaaaaatatttcatttaaattgagtcaaaatgaaattgttggaattcttggtcctaatggatgtggtaaaactacaactataggaatgattttaggtttgcttaaacctacatcaggcaaaatacttatcaacggtatagaaattgaaagtcacagagtcaaactattaaataagttaaattttatctctccctatatagagttaccaaaaaaattaaccgtaaaacaaaatcttgaagtttatggcagactttatgatgtaaataagctcaaaataaaaattgattatctgtgcgaaaaattaaggctttatgagtttataaataaaattactggagaactttcttcggggcaaaaaaatagagttagtctagcaaaatcaattattaatgatcctgaggttttacttttggatgagccaacagcttctcttgatcctgagacaggagattttgtaagaagttttttagaagaatatcaaagagaaaa

SEQ ID NO: 269112 - DNA, 634 bp, Unknown
  Bacterial polypeptide expressing nucleotide sequence isolated from the Sargasso Sea
atgcaaacaaattcacaaaaagaaaatgcacctaaattcctagaaatcaacggtatcagtctctcgtttcgagaaattcaggctctaagaaatgttagttttactgttaataagcatgagttatttgcaattattggccccaatggagctggaaaatcatctatgctcaattgtataaatgggttctatcatcctcagctaggaacaataacttttaaaggtcaaacacgtcatcgaatgcaaccctacgaagctgcgcgacaaggtattgcccggacatttcaaaatattgcgctatttcgcggtatgtccacactcgataatataatgaccggacgaaacactaaaatgaaaagaaacctactttggcaagcccttcattttgggccggcaaaaactgaagagcttgaacatcgcgaggcagcagagcgtgtaattgactttcttgagattgagtcaattcggaaaactcctgtgggtacgctgccatatggccttcaaaagcgcgtggagttgggtcgcgcactagcagcagaaccagatttactcctactggacgagccaatggctggaatgaacctagaagaaaaacaagatatgtgccgctttattttagaccttaacgacgaatttg

SEQ ID NO: 269113 - DNA, 495 bp, Unknown
  Bacterial polypeptide expressing nucleotide sequence isolated from the Sargasso Sea
ttgtatttgttacgcatgaccaggaagaagcgctaacaatgtcagaccgtattgctgttattaatgaaggtgagatacaacaaattggggagcctgagcaaatatatgaaagtccatccaataagtttgttgcaaattttataggtgaagcaaatttattatctggtgtttgcaaaactcctggagaaaatggtgtttgtgaacttgatactgggcatgaattaaacttgtttgtaccccctcacataaaacaaaatgataaagtaacaatatttattagacctgagagaattaagatagaaaaatcatctaaagataaaagtcagctaagtatttctgaatttacttatcttggtaatgctgcaaccatccaattaaaatcaaataatcaattaattaatgtaaatttaccaattgaagatttaaaagtttttaaaaaagatgattacgttgatattcattttccaaaagaaagtgctcaggttattgactaat

SEQ ID NO: 269114 - DNA, 271 bp, Unknown
  Bacterial polypeptide expressing nucleotide sequence isolated from the Sargasso Sea
catgcttagtttgcaaaacatcagtaagcgttttgacggtaaaccggccctcgacgccctctccctcgatattcacgaaggcgagtttgtggtgctggtcggcccctccggctgcggcaaaagcaccctgctgcgcctgctcgccggactggagccggtgagcgagggggaaatctggctgcacgaccagaacatcaccgccctgtcgccgcgcgagcgcaacttcgcgatgatcttccagaactacgccctgttcccgcacctgtcggta

SEQ ID NO: 269115 - DNA, 685 bp, Unknown
  Bacterial polypeptide expressing nucleotide sequence isolated from the Sargasso Sea
tatgctcgatatagagaatacttcgcaagatgaagtacccaaaataacttttaacaatgtaagcttctcatggccaggaaaaaaagagcgtgtaatacagaactgtagcttttctattaaaaaaaagggtttgtggatgatagtgggtgaaaatggtagtggtaagagtaccttgctaaaattaattaacgggcttttaactccaagtaatggattaataaataaatcagcaaaggttgggatggtatttcaaaatcctgatcatcaaattttaatgccaaactgtaggagtgaacttcttttaaatattaatcaaagattcagcaaaaaagatacagctaataagatcgattttgcacttaagaaagttggactaagtggatttgataaaaggccaattcatactttaagcggaggtcaaaaacaacgcttaactattgcttgttgcttaatcagtgataagaatttggtccttatggatgagcccacagcgctattggatagcacaagtcaattaaaagttttagaaataattaaagatcttacaaacaataagagtaatccatttactgctttatggattactcatcgtttagaggaattaatttatgcagatgcagtcgcagagatgaagaatggaaatttatcagagtggcaaaaaccattaaactttaaatataattag

SEQ ID NO: 269116 - DNA, 732 bp, Unknown
  Bacterial polypeptide expressing nucleotide sequence isolated from the Sargasso Sea
aattaacggccgcgcagcgcaaggcgcgcttggatgacatgctcgccctagtgaaactcgaaggcttagccaagcgttatccccatgagttgtccggcgggcagcagcagcgggtgtcgattgcccgcgcgcttgcgtatgagccgcaattactgttactcgatgagcctttttcgaatatcgatgcccaagtgcgccacagcatgatggcggagatccgcagcattctcaaacagcgtaatgtcagtgcggtatttgtaacccacagtaaggacgaggccttcgtctttgccgataccttggccatttttaaccaaggtgtgatagtacagcatggccgcgccgaagacttatatgccgcgcccaatagccgttatgtggctgattttctgggcagtggcaactatctacccgccgaagtgatcgatggtcatagtgttgccaccccgattggtgagctgcgcagcctgacgcccttgtcacaatcccatgctttcaatggccaagtgtttttgcggccacagcaattggcgctcagcgccgatgatgctggcgtaggcactattactgagcggcgcttcctcggggcattttgccattactgggtgaaagtcgaggcggcgtcccacgcccattatgtcgaagtacgcagccaaatcatgcagttgaatgtcggccagcgggtgggattaagcactgagccgcattccttagtgctatttgaatcttaag

SEQ ID NO: 269117 - DNA, 394 bp, Unknown
  Bacterial polypeptide expressing nucleotide sequence isolated from the Sargasso Sea
aatggcattttttgaaggcaatcagatgacagcaggttatgatgaaggagctgatataatctcttcatgtacaattaatgttaataaaggggaaattgttgcaatacttggacctaatggggctggaaaaagtacagcgatgaaagcaatgctcggcttgctcaacttaagatcaggtgacgtaaccattgatggaaaaaatatatcagatttaaacccacaagacagggtgaaaagaggaatatcatttgttcctcaaactagaaatgtatttgctggtttaacagtaagagaaaatttagaaataggagcattccttagaaatgatgaattagatgaaattattgaagaaatatatgagttatttccaattttaagtgataaaaaaactcaa

SEQ ID NO: 269118 - DNA, 601 bp, Unknown
  Bacterial polypeptide expressing nucleotide sequence isolated from the Sargasso Sea
tatgagcgatgcagtaattaagtgtgagtcagtttttaaaatttttggcacaaatgcgaaaaagatgcttgaagattcaaatggaaatgtagacgcaaaaaaatttcaagaaaatggatgtatagttggtgttaataacgcctcttttgaagttgcaaaaggagagatgttagttgtaatgggcttatccggatcaggtaaatcaacattacttagatgtatttctagattaacagacgctacagatggaaaaatttatatagaaggtcaagatttgctttcattaaataataaagaacttattgagcttagaagaaataaaatgggaatggtttttcagagttttgcattacttcctcataaaacagttgtagaaaatattgcttttcctcttcaaataaagggaattaaaacagaagacagcattagtaaagcaatggacatggttaaactcgtaggccttgatgggagagaaaattattttccaagagaactttctggagggcaacagcaaagagtaggtattgctcgatcattagctgtcgaacccgatatttggtttttagacgaacccttttcagcattagatccattaattaga

SEQ ID NO: 269119 - DNA, 406 bp, Unknown
  Bacterial polypeptide expressing nucleotide sequence isolated from the Sargasso Sea
cgacatagtaagagtagccaaaatctcagatgcgcacgattttataatgggattaaacgatggttatagtacaaacgttggagaaagaggagctggtttatctggtgggcaaaaacaaaggattgctattgctagaacacttttaacaaacccaaaactattaattttagatgaagctactagtgctcttgattatcaaacagagagaaaagtttgtgatggacttcgtaatgcagctaaaaattcaactgtcttcttcattacccatagattaaatacagttaaaaaggctgatttgattgttatgttacataacggttctgttgaagaagttggatctcacgaggaacttatgaaattaaaaggtagatactatgccttatttaggcaacaagaagcttcataa

SEQ ID NO: 269120 - DNA, 719 bp, Unknown
  Bacterial polypeptide expressing nucleotide sequence isolated from the Sargasso Sea
gaagatgacggaagccgttctggaactgaaggatgtgtgtttccgttggcccaaccaggatcgggcaaccatcgatcttcccgaactgaagattgatcagggagaaagcatcttccttcagggaccgagcggcagcggtaaatcgaccctgctctccttggtgggagggattttgatcgctgaatccggcagtctcagggtgctcggggaggaattgaaaagcctctcacgtgcccgcagggatgccttccgcgtcactcacctcgggtttatcttccaactatttaatctacttccttatctttcacttgaagaaaacgtcctgctgccactccgtttttccaaaaaacgtgctcaaagagcaggccgcaaccaggcggaacggcttgaagaagcccaaaggctgctaacggctttagggctgtccgaaccgcttaaggagggacgtccggtggtggaattgagtgtcggccagcagcagcgtgtggctgccgccagggccctcatcggccggcctgagttagtgattgcggatgaacccacttcagccctcgacgcggatctcagagaggtgttcctcaatctgctgtttgccgaatgtgacaaggctggcagtgccctgctcttcgtcagtcatgactcggaactgggccgattatttggaagaagtctttttcttcctcacatcaacagtgtttccagttttgaggcagcgtgat

SEQ ID NO: 269121 - DNA, 745 bp, Unknown
  Bacterial polypeptide expressing nucleotide sequence isolated from the Sargasso Sea
atggctaaaattactttaaaggacttaagtcatagttatttagaaaagcaaaatagcaatgttgactgggctcttagagaagttaacattgattggaaagacggcggagcatatgcacttttaggtccatcaggatgtgggaagacaactttattaaatattgtttcaggcttgttaaaacctactaaaggcaaagtgttgttcaatgacaaagatataacaacattaaatcctgttgaaagagacattgctcaaatatttcagtttccagttatctatgacactatgactgtttatgataatttagcgtttcccttaaaaaatagaggtctttcagaatcagaaatagaatctaaagtaaaagaaattgctgaaatgcttgaattaacatcaactttaaataatagagcttcgggtttaacagctgatggtaaacaaaaaatttcattaggcagaggtcttgttaggtcagacgtaaatgtaattatgtttgatgaaccgttaactgtcattgatccacatttaaaatgggttttaagatctaaattaaaagaattacatcaaaaaattaatcggacaatgatctatgtaacgcatgatcaaacggaagctttaacttttgctgatcaagttgttgtaatgcatgaaggacaaattgttcaaactggaacaccagttgagctttttgaaaaacgtaagcatacattcgttggacattttattggttcactctggaatgaatatc

SEQ ID NO: 269122 - DNA, 326 bp, Unknown
  Bacterial polypeptide expressing nucleotide sequence isolated from the Sargasso Sea
tgcgcagtttggttcagatttagatgcatctacacagcagttattaaacagaggatcaaaattaactgagctattaaagcaaagccaatattcgccacttaaagtagaagaacaggttgtgagtatttactcgggggtgaatggatatcttgataattttgaaaattcgaaaataaaggattttgagaataaattattggatgaaataaagtcaaatgcaccagatatattaaattctatacgtgatactggaaagttagagggtaaacccgaggaaaaattaaaaaatatacttgataaaatgaaagagaattttaatgcctagt

SEQ ID NO: 269123 - DNA, 709 bp, Unknown
  Bacterial polypeptide expressing nucleotide sequence isolated from the Sargasso Sea
gtaaataaaatttctaaatcttttggcaataaacaagtagttagaaatatatcactaaatattaatagaggagaaattgttgggttattgggccctaatggtgcgggcaaaacaactaccttctatattattgtaggattaatcaaacctgataccggagaaatttatattgaaaatatagatgtttcaactctacctatttatctaaggggacaaaagggaataagctatttacctcaagaagcttcgatctttagaggaatgaatgtagaagataatttaatgtcaataatagagataatagaaaaaaataaagataaacatcaaattattttagaaaatctattaaatgaatttgacatccgacatgtaagaaaatctaaatcaattgtactctcaggtggagaaagaagaagattagaaattgctagaactttagcatcaaaccctaagtatttacttctagatgagccgcttacagggatagatccagtatctattgaggaaataaaaataattattaaaaaattaaaaaataaaaatataggtgttttaattacagatcataatgttcgtgaaacattaaaaattgtagataaagtatatatagtaaatgaaggtactattttttttaaaggcctcccccaagatgcagttaatgataaaaaaataagaaatttttatcttggttcagattttaatctttagc

SEQ ID NO: 269124 - DNA, 667 bp, Unknown
  Bacterial polypeptide expressing nucleotide sequence isolated from the Sargasso Sea
atgaataatcaaatcgaaataaataatctttctaaaatttatgacaatggatttaatgccttaaaagatatcaatttaaatattaaaaagggtgaaatttttgcaatgcttggaccaaacggtgcaggtaaaactactctaataaatattatatgtggtattgtaaggccctctcacggaaaggtgatggttgagaattttgatataataaatgattatagagaaacaaggtcaagaattggattggtcccacaggaacttacacttgaacaatttgaaactgtgtttaacaatgtttcttattcacgaggtctttatggaaaaaaaccaaatccattacttatcgaaaaagtcttaaaacaattaagtttatgggataaaaaggatttaattttaagacaattatctggaggtatgaaacgaagagttttaattgcaaaagctctatctcatgagccagaaatattatttttagatgaacctactgccggtgttgatgtcgagttaagaaaagaaatgtggaaagtagtcgagacgttaagagaaactggcgtaacaattattttaacaactcactatatagaggaagctgaggctatagcagataggataggagtaattaatcaaggagagataataatagttgaggaaaagaaaaaactctaaa

SEQ ID NO: 269125 - DNA, 502 bp, Unknown
  Bacterial polypeptide expressing nucleotide sequence isolated from the Sargasso Sea
tatgattaaaactttaattgaaactattaatcttaaaaaaacctatcaacattttaatgggaatattacattatttaacaatattaatttaaaaatcaaacagggagagctagtagcgttagttggaccatctggatctggaaaatcttcattgctccatttattagctctattagatgagccaacaaggggagaagttattataaacaacattgttacaagaaaattttcagatgaaaaaaaagatgaaactagaagaaaaaatgtgtcaatcatttttcaggataataatttattaaatgattttacggccattgaaaatgtgatgatgccattaattattaagggtgaaaatatattatatgcaaaaaaagaggctcaaaaaattcttaaagctgttaaaatttttgataggtctcaacattttccaaacgaactttctggcggagaacaacaaagagtagctatcgctagagccttaatagctagaacaaatttattt

SEQ ID NO: 269126 - DNA, 272 bp, Unknown
  Bacterial polypeptide expressing nucleotide sequence isolated from the Sargasso Sea
aagaatattatctcttggtgaacaacaaagactagcttttgcaagacttttactaaactcgccacaatttgcagtacttgatgaagcaactagtgcgttagatattgaaacggaaaaatatctctatggtttgcttatcaaaagagaactttctcttataagtgttggtcatcgtccaaccctaaaagaatttcataataacgttttagctttaaacggtaaagggaactggcaattgttacctacaaaaaactataattttgataactaaa

SEQ ID NO: 269127 - DNA, 697 bp, Unknown
  Bacterial polypeptide expressing nucleotide sequence isolated from the Sargasso Sea
atgatatcacttcaatctgttagcaagagatatggatctaaggtagttgtccgggatgtctcttttgaagtggcagaaggcgaggtagttggatttttagggcctaatggtgcgggcaaaacgacgacactccgaatgatttctggttatattacccctactgtcggccgtattgaggtggctggatatgatgtggttcaggacaatattagtgtagctaaaagaattggctatcttcctgagcttcctcctttatacgacacactaagtgtcgttggataccttcgttttgtagcaaaggcgaagggggttactagatcggaaatggatttagagctcgaccgggtcgctactgcgtgcagactggggtctgtttttcgacacgaggtatttaagttatcaaaagggtatcgacaaaggctggggcttgcccaagctctgatcggaaaacctgatgtcttgttacttgatgagccgactagtgggcttgatccaggccaaattcaggagaccagggaagtaattcgttcttttggaaaagagcatacggtgttattgagcactcatatcttatccgaggtaacccgtatatgtcagcgtgttgcaatcataaacgaaggtcgtctgctcaccattgatacaccggcaggacttcaacgggctgctcaggaagctaactgcatcgtcttaaaggtat

SEQ ID NO: 269128 - DNA, 733 bp, Unknown
  Bacterial polypeptide expressing nucleotide sequence isolated from the Sargasso Sea
catgagcaatcgtattctggaagtcgatagcctttcgatcgcgtttcgaggaaacaaggtagtccgcgatgtcagtttcagcatcgatcgtggggagaccgttgcgattgtcggtgaatccggttctggtaaatcggtgacggcgttgtcggtgatgcaactactaccctatcagtatgcaagccatcccactggctccattctcgtggatgggcaagaggtcgtgggcgccgaggaagacgacatgctgaagatccgtggtgatcgtgtaggcatggtgttccaggagccgatgacgtccttgaacccgttacatcatattgaaaagcagattgctgaagtgctttatgtgcaccgcggaatggggctgatcgaagcccgtgaacgtaccctcgaactgctgactctcgtaggacttccgcgtccggaagaacgccttcgttcttatccccatgaactttccggtggtcaacgtcagcgggtcatgattgcgatggcgctggctaacgaaccagacctgctgatcgcagacgaaccgacaacggcactcgacgtcacgattcaggcgcagattctggaactgcttgacgatctgaaggcacggctcgatatggcgctgttgctcattactcacgatctgggtgtcgtgcgcaagatggcggatcgtgtgtgtgtcatgacaaacggtgacatggttgagcagggcagtgccgacgatatctttgacagacca

SEQ ID NO: 269129 - DNA, 413 bp, Unknown
  Bacterial polypeptide expressing nucleotide sequence isolated from the Sargasso Sea
tcaagcttataatttaattcctgtattgactgctaaggaaaatgtcgaatttattatgttaatgcaaggagattctgctaatgaaagaaaaactagggctgaggaacttttaaatgctgttggtttgttggatcagataaatagaaaacctggacaattatcgggcggtcaacagcaaagagttgctgttgctagagcattagcgtctaaacccaaatttgttttagcagatgaacctacagctaatttagactctacatctacttctaatcttttggatattatgtataggctaaataaggaagagaatatgacttttatattttctacacacgaccaaagggtaatagaaagagctaaaagaattatcactttagaagacggaaaaattctttctgataaaaagcaataat

SEQ ID NO: 269130 - DNA, 299 bp, Unknown
  Bacterial polypeptide expressing nucleotide sequence isolated from the Sargasso Sea
cctagcaacacaaccaagattgttggtctgtgatgagccaacatcagcactagacgtaagtatccaagcacaaatattaaatttattaaaagatttacaagaacaattaaatttgacaatcttattcattagtcatgatttaccagtagtaagacaaatgtgtgatcgaatagcagtattaaaaaatggaaaactttgtgagacttcagaaactgaagagttatttaaaaatccatcacatgattacacaaaagaactactaacattaatgccaaaaatagaatcaatttataactaag

SEQ ID NO: 269131 - DNA, 739 bp, Unknown
  Bacterial polypeptide expressing nucleotide sequence isolated from the Sargasso Sea
atgtctgaaccagtaattaaatgtgaagctgtttataaaatttttggagaaaatgctaaaaaaatgcttcaagaatcaaatggcaatgtagacgcaaaaacttttcaagaaaatggatgtatagtaggcgttaacaatgcttcatttgaagtttcaaagggagaaatgttagttgtaatgggtttgtctggatcgggtaaatcaactttattaagatgtatttcaagattaactgatgcaacaggcggaaaaatttttatagaaggtcaagatctacttcaattaaataataaagaactaattgagcttagaagaaataaaatgggaatggtttttcaaagttttgctctacttcctcataaaacagttgtagaaaatattgctttcccactccaaattaagggaattaaaactgaagatagtattagtaaagcaatggatatggttaaacttgttggtcttgatggaagagaaaattattttccaagagaactttctggaggccaacaacaaagagtaggtattgcgagatcattagcagtagagccagatatttggtttttagatgaacctttttctgcattagatccattaattagaaaagaaatgcaagatgagtttttaagacttcaagataaattacaaaaaacaattatgtttattacacatgattttgatgaggctctaaaacttgctgatcgaattgccattatgaaagatggaataatgaacagctaga

SEQ ID NO: 269132 - DNA, 388 bp, Unknown
  Bacterial polypeptide expressing nucleotide sequence isolated from the Sargasso Sea
tggtagggcaattacaagaaatcctaaattatttttattcgatgaaccactttcaaatcttgatgcagctttaagatcagaaatgagagttgaaattttcaaattacacaaaaaattaaaaagcaatatcgtttatgtaacccacgatcaaattgaagctatgactttagccgataagattgtgattatgaataatggaaaaattgagcagtatggtagcccagaggatatctataataatccaaaaaatatttttgtagctgaatttataggaaaccctaaaatgaatattttaaagatcaaaactcaagatattttaaataaaaatacttttaagttacttgggaaagaaattaaatttgaagaatcttattttgataaagagttt

SEQ ID NO: 269133 - DNA, 398 bp, Unknown
  Bacterial polypeptide expressing nucleotide sequence isolated from the Sargasso Sea
gatggctagcctaaaagatatacgaaaacgcattgacagcgttaaaagaacacagaagaccacaagtgctatgaaaatggtttctgctgcaaaactaagacgcgcagaagaccacatacgggaagcaactccatatgcacaaaagcttaaaagcatcgtctcatcactcagttctcgttttgaaggcgaggaacaagataccggcttcggtagtctctttagaagccccagtggaaaaagaactggtgttattttaataacaagtgaccgaggactttgcggaggtttcaattcaaatctttcgaagagtttacttcaaaaacttatggatgaaggagttgattgtgctgagtttgtgatctttggaagaaaagggaatgattttttcaaaaggaccc

SEQ ID NO: 269134 - DNA, 667 bp, Unknown
  Bacterial polypeptide expressing nucleotide sequence isolated from the Sargasso Sea
agaaatttaattttagaagttaagaacatcacaaaagaagttaacagcccagaggggcttttgacaatagttaaagatattaatttatcagttgagcaaggcaaacctatatctttagtgggtccatctggatctggaaaaaccacactcttagctattatggcagggcttgatttaccgacttctggaagtgtgactctgttgggatctaaaattacatctcttgatgaagataagagggcgcaaatcagaggcaaagatgttggctttgtttttcaatcatttcatttaatgccaagattgactgctctggataatgtaatgttacctcttgagatttcaggagatccccgttcaatggataaggctcaggaagcgcttaagcaagttggattatctaaaagggcaaagcactttgcaactcagctcagcggcggtgaaaagcagcgtgttgctattgcaagatctattgtaaacaaaccaaaaattttatttgctgacgagccaaccggcaacttagatcaaaaaagttcaggctccataacggatcttttattttcactaaatgaattaatacaaactaccttggttttagtaacccatgatttatctttagcagataaatgtgatgaagtttttgagctctcagaaggacatctattgtgat

SEQ ID NO: 269135 - DNA, 994 bp, Unknown
  Bacterial polypeptide expressing nucleotide sequence isolated from the Sargasso Sea
aaatctacattggttaaaattttatcaggcgtaattatgccagacgaaggtgaaatatttttaaataaaaatattttaaaaataaactctccaattgatgcaaaaaaaaatgatattggaatggtttttcagcactttaacctttttgaaactttatcagtatttgaaaatttaattattgattcagaagaaactccagaaaatctgaaagaaaaaattcaattaattatgagaaaatataacttttcaattaatcttgacattccagttttaaatctttcagcaggacaaaaacaaaaagttgaaataattagatgtttaataagaaatcctaaagttcttattatggatgagcctacatcagtattaacagaacaagaaacaagtgaattatttttatctttaaagaaattttctgaagagaaaattttaataatttacataactcataagcttaaggaagtaatgaagctttgtgatgaagttgcagtcatgagaagaggaaagcttgtttctgtaagtgaaataaaaaatgaaaatattgaatcacttgctaataaaatggtaggtcaaaatttaaaaactattaaaaaaaaaaaatcatctatatcgtcttcagatcaattaatcaaaattaccaatcttaatttcactagtgaagatccttttgaaactaatttagaaaatattaatttttcagttaatcgtggtgaatgcttaggcatagctggaatatcaggaaatggccaaagtgaactatttcaaattttaagtggagaaataatttcagataaaaattccatagagtttagtaataattttattggagatcttaatccacaagaaagaagggaatatttgatggcattttctcctgaagatagacttgagcaagcagcaattcctcaaatgaaaatttttgaaaatgtagctttaaataattttaaatcatcaaatttttttaataatggtttgataaatgagagtagaataa

SEQ ID NO: 269136 - DNA, 405 bp, Unknown
  Bacterial polypeptide expressing nucleotide sequence isolated from the Sargasso Sea
aaaaagtagagattgtagaagaactgcaagcaaagaatgaatttgtagcaatgacaggtgatggagtaaatgacgcacctgcactggctagagctgatgttggtattgccgttggttctgggactgatgtagcagccgaaaccgcagatattattctggtaaatagtaatcctaaggatattgctaatctaattcttttcggaaaagcgacctacaacaaaatgattcaaaatctgatttgggcgacgggatataacgtagtagccatacccttagctgccggcgtattgtattcttctggatttgtattgggaccagccgtaggagcggtatttatgagccttagtactattattgtcgccattaatgctcagttactgaaacgtaaaatcggtaaaaaataat

SEQ ID NO: 269137 - DNA, 847 bp, Unknown
  Bacterial polypeptide expressing nucleotide sequence isolated from the Sargasso Sea
ataccagcgactggcaaagcttttagaaacgatgccgcgccaaacagaaaaaatggaactcccaccaataacaggtcgtgtgagcgcacgcaatgccagcgtgattcctccgggagaaagacgcatcaccttacaaaatgtaaccttagatattccagctggcaccgtgtgtatggtcgtcgggccctctggcgcaggcaaaagtacatttttaaaggctctgctcggtttgtggccgaccgcagctggtgagataagagtcgatggcaccgagccttcgaaatttgacagggctgcgtttggaccgcagcttggttatttaccgcaagatatcgaattgttagagggcactgttgcgaaaaatatcgctcgatttggagacatcgattcggaagcggtgattgcagcggcgcacgatgctggtattcacgagttcgttctctctttgtcagagggctatgagaccgagctgggtcctttgggaacacagctctctccaggacaaaggcaacgggtagctctcgctagagctttatacaagaatccaaagttggtcgttctggatgagccgaattctaatttagatgaatcgggtgagtccgcacttcataccgcgataaaaaaacttaaagacgccggatcaactgtcgtgatcgtatcgcacagagagggcgtgctcccgttatctgactcaatactagtcctcacagccggcaaggtaaagagttttgaagccactgcagatatggtggcgcggatcgagaaatcaaaaaaagaaactcagaaaaggctagcttccaacaaggttaaacctgttgtgcaaacaatccctgccgccggcctagcg

SEQ ID NO: 269138 - DNA, 524 bp, Unknown
  Bacterial polypeptide expressing nucleotide sequence isolated from the Sargasso Sea
ttatgtaactcatgatcaaggagaggcccttacaatgtctaatcgtattgcggtgtttgatgacggtgaaattcagcagcttgctgctcccgatattttgtatgaagcccccgaaaatgcttttgtagcacaatttataggagaaaataatacactttttggtaaagtcagtaaggttgatggtgaaatttgcacggttaatctggatagtggtgaaacattgaaagcgcttgcagtaaaaattgaaggagctggaagcgataccatgatttcgttaagaccggaaagagtggtagtaaatccagattcagataaatatccaaacagactttctgcaaaagtagaagaacttatctatttgggagatcatatacgctcccgaatgaatgtttgcggacatgacgattttattgtcaagattccgaactctgcacagcatgctcaacttgaaccagggcaaacggtccaggttggttggctgtcggaagactctcgggcactggatgtgcctgtttcatcctgaa

SEQ ID NO: 269139 - DNA, 778 bp, Unknown
  Bacterial polypeptide expressing nucleotide sequence isolated from the Sargasso Sea
atgagccctaaaatctttgccaaatcactggatttaacattttcgacaaatgatgggccagttcatgccctcaaagatgttgatcttgatattaatgagggtgattttgttagttttatagggccgtcaggttgtggtaagactacttttctaagagttcttgcggatctagaaaaaccaactggtggcaaagttcagattaatggggtttctccgacggatgcaagaaagagtagagcatacggttacgtttttcaggctcctggtctctatccatggcgaacaataggtaaaaatatcaagcttcccctcgaaataattggattgagtaagcaggagcaaaatgatcgtgttgaaagagttttaaggcttgtcgatttacaagattttgaaaacaaatttccttggcaattatctgggggcatgcagcagcgagcatcaattgctagggctttagcatttgatgctgatatattgcttatggatgaaccttttggtgccttggatgaaattgttcgagatcatcttaatgaacagttattagacttgtggcgaacaacgagcaaaacaatatgcttcgtgacccattcgatacccgaggccgtttatctgtccacaaaaatagtagtaatgtcaccccgcccaggaaggatcattgatgttattgagacttcacttcccaatgaaagacccctagatattagagagtcttctgaatttatagccatagcacagagggtcagagagggactacgttcaggacactcatatgaatgag

SEQ ID NO: 269140 - DNA, 727 bp, Unknown
  Bacterial polypeptide expressing nucleotide sequence isolated from the Sargasso Sea
acggccgcgcagcgcaaggcgcgcttggatgacatgctcgccctagtgaaactcgaaggcttagccaagcgttatccccatgagttgtccggcgggcagcagcagcgggtgtcgattgcccgcgcgcttgcgtatgagccgcaattactgttactcgatgagcctttttcgaatatcgatgcccaagtgcgccacagcatgatggcggagatccgcagcattctcaaacagcgtaatgtcagtgcggtatttgtaacccacagtaaggacgaggccttcgtctttgccgataccttggccatttttaaccaaggtgtgatagtacagcatggccgcgccgaagacttatatgccgcgcccaatagccgttatgtggctgattttctgggcagtggcaactatctacccgccgaagtgatcgatggtcatagtgttgccaccccgattggtgagctgcgcagcctgacgcccttgtcacaatcccatgctttcaatggccaagtgtttttgcggccacagcaattggcgctcagcgccgatgatgctggcgtaggcactattactgagcggcgcttcctcggggcattttgccattactgggtgaaagtcgaggcggcgtcccacgcccattatgtcgaagtacgcagccaaatcatgcagttgaatgtcggccagcgggtgggattaagcactgagccgcattccttagtgctatttgaatcttaag

SEQ ID NO: 269141 - DNA, 310 bp, Unknown
  Bacterial polypeptide expressing nucleotide sequence isolated from the Sargasso Sea
atgtctgaaagtattattcaaataagtaacatgaataaatggtttggagattttcaagttttgaaaggaataaatctagaggtaaaacctaaagaaaaaattgtagtatgtggtccatcaggctcaggtaaatctactttgataagatgcattaatagattagaagaacatcaagaaggtaatattgtagttgatggaactgaactcactgaagatactaaaaatatagagcaaattagagctgaggtaggaatggtttttcagcaatttaatttattcccgcatttatcaattttagataaaagtacgt

SEQ ID NO: 269142 - DNA, 588 bp, Unknown
  Bacterial polypeptide expressing nucleotide sequence isolated from the Sargasso Sea
accttgcaggcctgatagctatctcggatcccgtgaaagcaaccacgccggatgcgcttaaagctttgcgtcaggcggggatccgcattgttatgctcaccggggataaccagcttactgctgaagcagtcgcacggaaactgggaatagatgaggttgaagccggggttctgcctgacggcaaaaaagcagtgataacccgactgaaagcgtctggtcatgtggttgcgatggcgggggacggtgtaaatgatgccccggcgctggcagcggctgacgtgggcatagctatgggaacgggtacagatgtggcaattgaaagtgccggagtcacccttctcaaaggcgacttgatgatactgaacagggcccgtcatctgtcagagatcaccatgaaaaatatccgacagaatctgttttttgcatttatctacaacgcacttggcgtgcctgtggctgcaggtctgctttatcctgtgtatggaatactgctgtcgccagttattgcggcggcggccatggctctttcctccgtcagcgtcattgtgaatgcgttgcgtctgaaaagtgtcaggctcgggaaataac

SEQ ID NO: 269143 - DNA, 634 bp, Unknown
  Bacterial polypeptide expressing nucleotide sequence isolated from the Sargasso Sea
cctcaatctcaaggtcgaaaagcgggaaatcgtcgcggtcatgggccgcaacggcatgggcaagaccacgctgttcaagacgctgatgggcatcgtcccgcagaccgcaggcagcgtgcaggtggatgggcaggaagtcgccgggctggagccccatcagcgggttgccagcggcgtggcctacgtgcctcaggggcggatgatctttcccagcatgacggtgctggagaacatccagaccggcctgccggcagccgccggcggcaaggtgccggatgatctctacgcgctgttccctgtgctgcacgacatgcgcaagcgcaagggcggcaacctgtctggcggacagcaacagcagctggcgatcgcccgggcactggcgaccaatcccaaggtgctgctgctggacgagccgaccgagggcatccagccgtcgatcatcaaggacatcgcgcgcacgctgaaagagatccgctcgattcgcgatctgaccatcgtggtttccgagcaggtgctgtcgttcaccatggaaatcgccgaccgcttcctggtcatcgagaagggccgcttcgtgctggaggaaagcgcagccaatgccgacgaggcgaccatcagtcgttacctgtcggtgtaa

SEQ ID NO: 269144 - DNA, 586 bp, Unknown
  Bacterial polypeptide expressing nucleotide sequence isolated from the Sargasso Sea
aatgacaataaaaccaaaactagtttcatccaataatggtcttgtggttaataaacttagaaagactctctcacaaaaacaaatagtgagagatgtgagtctcaagcttgaacgagggaaaacaatcgggttactcggcccaaacggtgctggaaaaacaacaacattctatatgatcatgggcttaattgattgtgatgggggtgaaatattacttgacgatattcatcttacatctcttccgatgcataaaagggctaaactaggcataggatttttaccacaacaaccctcaattttcagaggtatgtcagttgaagacaaccttctatcgatactagaaactcaaattctcccaaaagatcaaaaacaaaacatgctagaagaattactcactgagttttctctcacacatttaagaagagcaatgcctcatatgctaagtggtggagaaagaagaagaacagaaattgcaagatgtctttgttctaatcctagtataatacttatggatgagcctactgctggtgtcgatcctataggcatagatgatattaaagttctcataaaacaattaatggattaa

SEQ ID NO: 269145 - DNA, 571 bp, Unknown
  Bacterial polypeptide expressing nucleotide sequence isolated from the Sargasso Sea
catggcatctaaagaaataaaattatcatgtcgaaatgtttggaaagtctacgggaaaaccccggataattttttcgataataataatggcaatgtttcagatcccttaaaattagctcaggaaatgaaccataaagagcatattgttgcaaatgctaatgttagctttgatgttcatgtaggcgaaatatttgtaataatgggtctctctggctctggaaaatcaacaatcattcgctgtttgtcaagattagtagagcctacagcaggagaagtaattttagataatgaagatttgcttaaaaaaacaccaaaagaattaacagaaattagaagacataaaatggggatggtatttcagaattttgggctaattccacatttaaatgttattgaaaatatagcttttcctctaaaaatacaaaatttcaacaaagatacttgttttgaaaaagcaaaaaaagttattgagttagtcggtctggaaggcagagaagaaaattatccatcacaattatcaggcggccagcaacaacgagttggtatagcgcgttcattaattgttgaacca

SEQ ID NO: 269146 - DNA, 762 bp, Unknown
  Bacterial polypeptide expressing nucleotide sequence isolated from the Sargasso Sea
atcgggaaaaagcacattggcattagtaatgatggggtatgtaaaacatggcctatatacgattggaggagagtgtgagtttaattcttcaaatctactaaatatgaaaagtaaagatttagaaaaaatcagaggcagaaagatagcaatgataccgcaaaatgcaggtcaggcattaacaccaaacttaaaaataggttatcaaattgatgaagctttacaattacactctgatttaagtgagaaagaaagagaaaaaaaaatttccgaattattaaataaagttagacttccttcaccagaaacaattgctttaagatatcctcatgaactttcaggaggacaacaacagagagttgctgtagcgatggcgttagctggaactcctgatttgcttcttttagacgaaccaactacaggattagatgttacaacacaagctcatgtattagagcttctcaattttattgcaaaggatacaggaacttcgatggtttatgtaagtcatgacttaggagcaatagcccaagtgagcgatagaattattgttatgtattcaggagaaattgttttagaaggtccttcaagggatattcttaaaagaccaattcatccctacacacatggattattaaaatctataccaaaattatctttagctggcctacccgagtcaatgcctggtagtcaacctcaaccaggaataattcaaagtggttgcagttttttcgatagatgcaatttttctgaggataaatgtaa

SEQ ID NO: 269147 - DNA, 670 bp, Unknown
  Bacterial polypeptide expressing nucleotide sequence isolated from the Sargasso Sea
atgaacaaaatcaaatttgagaatgtgtccaaggcttattcgggtgggcgacaagctctatccgaagtgtcactggaacttattgagggagaagttaccttccttacaggacattcgggtgcaggcaagagctctttgttgaaacttatcatgcgtgaccagttagcaaccgatggagtggtctccgtaaatggggttgatctggcgagtataaaggatagcaacttaccttattatcgaagagggcttggaatcgtcttccaagatcactatctcctaatgaagcgcacagtctttgaaaatgtagctatcccgcttagtttaattgggctaagtgacgaggtgatggcgcggcgagtaagagcagcattgacgattgttggtttagaggcgttgtctggaagcaaaccgacagagctttcagcgggagagagacaaagggtaggcatagcaagagcggttgttatgcggcctagaattcttctggcagacgagcctacaggtaatttagatcccgaactatctcttagagcaatggagctttttgcgcaatttacggaaatcggttcaatagtcattgtcgccagccatgatcagtttttgattgagcaaatgaaagcgagggttgttgagttgcgagagggacgagtagttcatgattctcgttagc

SEQ ID NO: 269148 - DNA, 389 bp, Unknown
  Bacterial polypeptide expressing nucleotide sequence isolated from the Sargasso Sea
catgactacattcataaaggcaaatttccaagtcagctatccgaattttaattttgatgttgatttgcaactcccagcatctggaataaccgtggtatttggcccttcgggttcaggtaaaactaccttattacgatgcctggcaggtttcgaaaaatcaggtaggttagaaatagcaggagagatttggcaggataagaataaattccttcctccgaacgaacgcgcgattggtatggtatttcaggaatcccgtttgttctcgcatttaaaagtccgagaaaacctgttgtatggatataaacgtactccggcggaatcgagaaaactgcatctggagggggtggcgcgtgtattggctttggaaaatcttttaaatcgtggtatcg

SEQ ID NO: 269149 - DNA, 616 bp, Unknown
  Bacterial polypeptide expressing nucleotide sequence isolated from the Sargasso Sea
atgaatttaattattaaatcactaaatttttcttatcagagtgaagaagttttcaaagatttaaatctcaactttaattctggaatcttaaatctcatctcgggtccaagcggttcaggaaaaactacattgctaaatttgatcgctggattagaaaaaccctcctctggtttaataatgcttgatgataatattcaatcaagtaatgataaatttatcgagcctgaaaataggaatatcggctttatttttcaggattttgctttatttcctcacttaaatgttaaacaaaatattgaattctcaggtaatcggaatgaagagttattaaataaattaattaataagctttctattgcaaatcatctttctaaatatccgtatgaactctcaggaggacagcagcaaagagtttcaatagcaagagccttattctcagaaccaaaaattcttttaattgatgagcctatttcaaatcaagataaaaacaataaaattgaaataataagaattatttctgaattcattaaagaaaaagaaattgtatgtattttagtttctcacgaagaaataaataatgttcaggttgaaaccagatctttcaacttttcttaga

SEQ ID NO: 269150 - DNA, 352 bp, Unknown
  Bacterial polypeptide expressing nucleotide sequence isolated from the Sargasso Sea
tatgggtaatgatcacttcgtaagatttgaaaatgttgataaaagttacgatggtaaacaacttgtcgtaaagggtttaaatctagatattgaagaaggtgaatttgttacaatgcttggaccatctggttcaggtaaaacaacttgcttaatgatgttggctggttttgaaactccaactaatggacaaatttatttagataacaaagtcatttcagatattcctccacataaaagaggtataggaatggtatttcaaaactatgcattgtttccacatatgacagtttatgaaaatttagcatttccgttaagagttagaaaaattccaaaagatgaagctgataaaaaa

SEQ ID NO: 269151 - DNA, 305 bp, Unknown
  Bacterial polypeptide expressing nucleotide sequence isolated from the Sargasso Sea
gctggaccaattcaaaaatcaatatgagaacagaataggagaagatggtttaaaaatttcaggtggtcaaaggcaaagagttggtatagctagagcgttgtataaaaagtcatttttaattatacttgacgaagttacctcagctttagatgaatacactgaagaaataatattaaaatttatttttaaaaatagtgaaagtaaaacaaaagttatcgtaagtcataaaccctccacattaaaattttgtgataatacttatatgctagaagatggaaagttaattaaaaaagatataggttaaa

SEQ ID NO: 269152 - DNA, 540 bp, Unknown
  Bacterial polypeptide expressing nucleotide sequence isolated from the Sargasso Sea
ttataaggttaatgcctgatggctacaacacattagttggagatgatggtgctttgctttcgggtggtcagaagcaaagaatagcgatagcaagagccatattaaagaattcacctattttaattttagatgaagcgacttcggctttagactcagaatcagaaattaaaatacaagaagcaatgtctaatttaaccaaagacagaacaactttagttatagctcataggctatcgactattgaagatgctgacaaaatagtagtgctagataatggaaagatagtagaagaaggaagtcatgaagagttacttagtttagatgctcattacgctaagctgcatgctaatcaatttaaagacgatactcctagtaaagttgaggaagcaaaaatcagctttcctttgatctcttctgccgctaaccccatagaccatacaagcttcatagaaaaatcttggtatagaaagagtatgctttcatggatattgtggccgctctctaaattaacttcctatctatctgaaagcaagatataga

SEQ ID NO: 269153 - DNA, 543 bp, Unknown
  Bacterial polypeptide expressing nucleotide sequence isolated from the Sargasso Sea
aatgaatttagtagcaaaaaatttaacttacaagccagataatgagtttcatttaaaagatgtttctttcaattttaaaaaagggaatttgtacaccattcttggaaggactctttcaggcaaaactacacttttaaaaacaattgctggattattaaatcctgatagtggtgaaatcaaatttgaggataaagaatttaataaaataccagtttggaaaagaaatgttgcaatggtttatcagcaatttattaactatcctcacttaactgtttatgaaaatatttcttttccattaaaacaaagaaaattagataagcaaaaaattaaaattgatgtagaggaagctttaaaaaccgtgggtctcatgggtttcgaaaaaagaaaaatacaagaattatctggaggtcaacaacaaagagtagctttagcaagatcattagcaaaaaaagcaaaaattttactattagacgagcctttggttaatttagattataaattaagagaacagcttagagaggaatttaaaagaattttctcagg

SEQ ID NO: 269154 - DNA, 806 bp, Unknown
  Bacterial polypeptide expressing nucleotide sequence isolated from the Sargasso Sea
tatgtctgaaccagtaattaaatgtgaagctgtttataaaatttttggggaaaatgccaaaaaaatgcttcaagagtcaaatggcaatgtagatgcaaaaacctttcaagaaaatggatgcatagttggtgtgaataatgcttcatttgaagtttcaaaaggagaaatgctagttgtaatgggtttgtcgggttcaggtaaatcaacattattaagatgcatttctagattaacagatgctacaggtgggaaaatttttatagagggtcaagacttacttcaattaaacaataaagaactgatagagcttagaagaaataaaatgggaatggtttttcagagttttgctctacttcctcacaaaacagttgtagaaaatattgcttttccacttcaaattaagggaattaaaactgaagacagtataagtaaagcgatggatatggttaagcttgttggtcttgatggaagagaaaactattttccaagagaactttctggaggacaacaacaaagagtaggtatagctagatcattggctgtagaacctgatatttggtttttagacgaacctttttctgctctagatccattaattagaaaagaaatgcaggatgaatttttaaggttacaagaaaaattaaaaaaaacaattatgtttattactcatgattttgatgaagcactaaagcttgctgatcgtattgccattatgaaagatggaataattgaacagctagacacacctgcaaatattgttttaaatccagcaactgaatatgtaaggaaatttactgaagaagtac

SEQ ID NO: 269155 - DNA, 793 bp, Unknown
  Bacterial polypeptide expressing nucleotide sequence isolated from the Sargasso Sea
gattaacaacaaggatgtaatggaacttgatcgagaacatttacaagaattaagaaacaaaaaaataggtatggtttttcaaaactttgcactaatgccccatagatctgttgttgacaacatagcaatgccactagaaataagaggcattagtaaaaatgatagattggatgccgcaaataagattttagaaattgttgaattacaaggttggggtaataaatttgcccacgaattatctggtggtatgcaacaacgtgtgggacttgcaagagcgctagcagcagatcctgaatttcttttaatggacgaaccgtttagcgcattagatcctttaattagaagacaattgcaaacagaatttattaaactttcaaaacaaatgaaaaaaacaactgtctttattactcatgatttagatgaagcggttagagtaggtcatagaattgcgattatgagagatggtaaggtaattcaaattggaactccagaacaaattgtagttagtcctgcagacgaatatgtagcagattttgtaaaaggaatctctagacttaaagttgttcaagcaaaatcaattatgcaaaccattcatgattatgaaagtaaaaatagcaaattatctgacaatctacagagcgtagatgaacatgagttattaagtaaacttatagaaatttcaaaatctgaccaaaaatcattaatagttaaagataaaaatcaaataaacattggtgtaattacacaatcagatcttttaaaagcagtagtcgaggatggtgatggagaataa

SEQ ID NO: 269156 - DNA, 572 bp, Unknown
  Bacterial polypeptide expressing nucleotide sequence isolated from the Sargasso Sea
tatgatcaaaccgcatctcactacaactttagacacaactcccgtactcaacgccgttggcctcactaaatcgtttggtgattttcttgctaacgatcagatttctttttcgatacagcctggtgaaattcatgccctggttggtgaaaacggggccggcaaatcaaccttcgttaaacttgtatacggtttgctgcaaccagatgacggtcacattttttggcaaggtgagccggtaaccgttactggtcctcttaaggcacgacagctcggcattgggatggtgtttcagcatttttcactatttgagtcactaagtgtcgttgaaaacatacaacttgccttgccggctggcgaaactttaaaaattttgtcagagcgtatccgggaaatgtctgatgtctacggtctggctattgaccctgacgcctatatctacaatctgtctgtaggccagcaacaacgcgtggaagtaatgcggtgtttgcttcaaaacccttcattgttgattatggatgagcccacatctgtgctgacgccgcaagagacagagcaactgtttttggttttac

SEQ ID NO: 269157 - DNA, 741 bp, Unknown
  Bacterial polypeptide expressing nucleotide sequence isolated from the Sargasso Sea
tatgtccgagccagtcatcaaatgtgaaaatgtgtataaaatttttggggcaaatgctcaaaaaatgcttcaagactctaatggcaatgttgatgcaaaaactttccaagaaaatgggtgtattgttggagtaaacaacgcttcttttgaagtttcaaaaggagagatgttagttgttatgggtttatctggttcaggtaaatcaactttattaagatgtatttcgagattaactgatgcaacaggtggtaaaatttttatagaaggtcaggacctcttacaactaaacaataaagatttaatagatcttagaagaaataaaatggggatggtttttcaaagttttgctttgcttccacacaaaactgttgtggagaatatagccttcccacttcagattaaaggagtcaaaactgaagacagtattagtaaagcaatggatatggttaaactagttggtctcgatggaagagaaaactattttccaagagaactttcaggaggacaacaacaaagagtaggtattgcaagatcattagcagttgagccagatatttggtttttagatgagcctttttcagctttagatccattgattagaaaagaaatgcaagatgagtttttaagacttcaagataagttacaaaaaacaattatgttcattacacatgattttgatgaggctttaaaacttgcagatcgaattgcaataatgaaagatggtataattgagcagttaga

SEQ ID NO: 269158 - DNA, 883 bp, Unknown
  Bacterial polypeptide expressing nucleotide sequence isolated from the Sargasso Sea
aatcttatcaataaaagaagcaatggttagatttaatgaaaaaccaatttttgaaaatttaagttttaatattcataggggaagtcgtatagcactagttggtaaaaatggagttggtaaatcaactttaatgaatgtaataactggttttttagatttagatgaaggagaaagatgggaagatattggtatttcaattggatatttaaaacaagacaatgaaaaaattaataatgaaacaattttcgattacatttttagaaaatttaagcaagaggataaagaaagtttaaaatataaagttgatataattgctagttcattagacctaaatacctcacaaaacatgatatcattatctggtgggcaattaaggagagcggctctagctagatcattggttgaagaaccagaaattctattactagatgagccaacaaatcatttagatcttgatgcaataaattggttagaaaattatttgttaaattatccaggaacattcctatgtgtttctcatgataagatgtttttaaaaaatgtgactaatagagttttttggcttgatagaggaaatttgagagtaagtccaaaaggctttaaagattttgataattggtcaagtgatttactagatcaagaggccagagaattaaaaaacagaaaacagagtatgttagtagacattgagtgggcatcaagaggcgttaaggcaagggttaaaagaaacataagaagattagagaaagttcaagaaatgaaaaagaaactaaaagatgatgaatcatcttatcgtaaagctgtttcaaaaatttcttataaaattcctgaccaatttgaaaatagttccaaaatgataggtgagttttttaacgttttttag

SEQ ID NO: 269159 - DNA, 673 bp, Unknown
  Bacterial polypeptide expressing nucleotide sequence isolated from the Sargasso Sea
gcaatcaagaaacgagaggtttatggaatactcggtccaaatggagcagggaagaccacaacactcgagatgttagagggtcttaaggaaattgatgatggctttgcgatcatcgatggcattgatgtgagcaaagatccttatgcggtcaagaaggtgatcggtgtgcaacttcaaagcaatgagtattttgataaattggacctcagtgagcttcttaccttattttctaaactttattcaacaagcattgatcattcgaagttactcgatcaagtgaatttattggataaagccaatgcaaaaacccaacacttatcaggtggtcaaagacaacgattttcaattgcatgcgcacttgttaataaccccaaaatactctttctggatgagccaacaacaggcctcgatccccaagcaaaaaggaatttatggactttggtaaaggatctcaattcttctggtatgacaatcgtattaaccacacacaatatggaagaagcagagtatctgtgtgaccgcattgcaatcatggataagggcaaattgattgctgaggatacaccaaaagcattgattgaaaaatatgcacctgaaccttcagatatcccattaactggaaatatcgaagatgtcttccttaatttaacgggacactctctgagagactgat

SEQ ID NO: 269160 - DNA, 601 bp, Unknown
  Bacterial polypeptide expressing nucleotide sequence isolated from the Sargasso Sea
atgagcaaattatccgtacatcatctttcaaaatcatatcgttcaagagaagttgtttctgacgttagcttagtggtagaaaatggtgaaataatagggttgcttggtcctaatggtgctggtaaaactactagtttctatatgatagtaggtctaatcaagtcatctgccggtagcatacatattgataattttgaacttgataatctaagcatggataaaagatcgcatatgggtcttagttacttaccacaagaagcttccatatttaagaaattaacggttgaagagaacataatggcaatattagaaactcataattcttcaaatcgaaacactattaaacagcgtgttgatatgctccttgatgagtttcgtataggccaccttcgaaataattatggctcaagcttatcgggaggcgagagacgccgtgttgaaatagctagggctgtagctacaaaacctagatttctattattagatgaaccttttgccggcattgatccaatctcaattggtgatatacaaaaattaatttatgaactccgcgaacatggaattgggattctcattacagatcataatgtcagagaaacgc

SEQ ID NO: 269161 - DNA, 559 bp, Unknown
  Bacterial polypeptide expressing nucleotide sequence isolated from the Sargasso Sea
accatgtccgcttctcggccggattgatgttgatgacggcaaccggcttgaagaacgcgtcaccctgatggcccagcaggacagcctgctgccctggctgaacacggttgataatgttctgctcggcgcaaggctgaggggccagaggctggatcgggtgagggccagccgcctgattgatcaggtcgggctgggtgagcatcagcataaaaagccccatgccctttcaggcggccagcgtcaacgcgttgccctcgcccggaccctgatggaagaccgcccggtggtgctgctggatgaacccttcagcgcacttgatgccagggttcgtgcggaaatgcaggaactggcagcagaacacctggccgggcgcacggtgctgctggtgacccatgatccgggggaggcagcgcggctcggtgacagtatccatgtcatgaccggcaccggcctgatcagtgtcgagccgccttcctcacccgtgatcagggcttacgatgaccccgaagttctggcctgtcagggccgactcctcaggctgttgagggaggcatcatga

SEQ ID NO: 269162 - DNA, 837 bp, Unknown
  Bacterial polypeptide expressing nucleotide sequence isolated from the Sargasso Sea
tagttaagcctgactcaggaagcatgttgtttaatcaaaatgaatatacgcctgaaaacccaaaatctgcaaggcagatgggtgtagggatggtttttcaacacttttctttatttgacgcactttcagtatatgacaacattgctataggaatggataaaacatttgacaaaaatgacttacaaaagcggatatataatgtctcaaaacagtatggactttcaatttcacttaataaaattgtaggaaatttgtcagctggggagcgtcaaagaatagaaatagtaagatgtttacttcaggatccgaaaataatgatcatggatgaaccgacatctgttttaacccctggagaggtttcagatctatttgttgttcttaaaaagttagctggccaaggagtgtcaattttatatatttctcataaactagaagaaattagagcactttgttctaaagcaacaataatgcgaaatggaaaggttgtagatacttgtgaccctcgcaaattaagtgctggaaagattgctgagtctatggtaggcggatcattttcaacaccaaaaaaaacaaaaataaagtttggtaaggttttactagagacaaaaaatgttttttttgattcaagcaacaaatttggtgttccattaaaaggaattaatctcaacttacagaaaggtcagatagtcggaattggcggcgttgccggtaatggacaagacgaattattaggcttactcagtggtgaattggttcctacaaaaggatcaatatatcttgaaggagaggatataaccttttttggtccagtcgcacgaaggcaaattggttgctgag

SEQ ID NO: 269163 - DNA, 415 bp, Unknown
  Bacterial polypeptide expressing nucleotide sequence isolated from the Sargasso Sea
agtgatgacgatgtaataaatgcggcgaaacaggcgttcgctcacgaatttatcgtttaccttgatgagcgctataacacacagttaggcgaacgaggcgtgaagctttcaggcggtcagaaacagcggattgccattgctcgcgctattttggccgaccgcccaatcttacttctcgatgaagcgacgagtgcgcttgatgcgatgagtgagcgtatggttcaacaagcgatagatagattaatggtaggtaaaaccagcatcgtgattgctcaccgacttgcgacggtgcagcacgccgatcgcatattagttatggataaaggtcaggtcgtaggaagcggcgaccatgcatcgttaatgaaaagcgataccctgtacagggaatacgctgaactgcaattgcttagctgaa

SEQ ID NO: 269164 - DNA, 862 bp, Unknown
  Bacterial polypeptide expressing nucleotide sequence isolated from the Sargasso Sea
aaataaaggaatttcaaaaactgaagctttagaagaatataactcggttattggtgtatcagatgtttcatttgatgttaatcaaggagaaatattttgtgtgatgggtttatctggtagtggaaaatctacattagttagacatataaacagacttttagaaccaacatcgggaaagattttgataaacagtcaagatgtaatgcagctcgatcgtgataatttacaagaactaagaaataaaaagataggcatggtttttcaaaactttgctctaatgcctcatagatctgttgtagacaatatagcaatgcctctcgaaattagaggtgtaagtaaaaatgatcgtttagatgcggctaataaaattttagaaatagtagaattacaaggttggggtaataaatttgctcatgaattatcaggaggaatgcaacaaagagtagggcttgcaagagcattagctgcagatccagaatttcttttaatggatgagccatttagtgcattagacccactaattagaagacagcttcaatcagaatttattaaactttcaaaacaaatgaaaaagacaacagtgtttataactcatgatttagatgaggcagtaagagtaggacatagaattgctattatgagagacggaaaagtaattcaaattggtacccctgaagaaattgtagttaatccagctgacgaatatgttgcagactttgttaaaggaatttctagacttaaagttgttcaggcaaaaacaattatgcaaacagttgaaagttatgaaagtactaacggaaaactagaggaaaatttacaaagtgtaaatgagcatgaattactaagtaaattaatagaagtt

SEQ ID NO: 269165 - DNA, 643 bp, Unknown
  Bacterial polypeptide expressing nucleotide sequence isolated from the Sargasso Sea
aatatcaaagaaaaaaactttattaataaattagataattctaaactcaatgtactcaagaatattgatatcaaaattaattctaatgagtttgtatgcattgttggaccttcaggatgtggaaaaacaacacttatgaacataattggtggattgatttatgcagataaacaaaatataaaattgaatggcaaaactaaaaaagatattgaagaaaatataagttatgtttttcaatcctcaaggttattgccttggcttactgtgagagaaaacatagaattggttagccagaaaaaaacaaatatagaaaacgatataaatggtctattaaataactttgggctttcagagtttatagatttctacccaaaagctatttcaggtggaatgagaaggaaagtttctcttgcaagagctttaataaataaaccaagtattttactaatggatgagccttttgtctcattggatcaaccgacctctgaaggtctatatgatgtgttaataaattattggaaaatgaaacctataacaataatcttaatcacccatagccttaaagaagcattattactctcagacagaatactttttttttcaaaaaaaccaggtacagtagtttttgattataaagttaagt

SEQ ID NO: 269166 - DNA, 489 bp, Unknown
  Bacterial polypeptide expressing nucleotide sequence isolated from the Sargasso Sea
aatgtcgttgattcaatttaataatcttcagtttaattatcccaattcttttgattttttatttaaaatgagtcagttttctatttcaaaaggtagtcgaatatttattgaagggcctagtgggtctggtaaaacaacgtttttaaatttaatgacaggtttggtacagccgacatcaggatcaattactgttttggaaaaggatataacgcggtcttctatgagtgatatagaccggtttcgtgcggaccattttggtattatttttcaatggtttaatttattaccttatttgtcagttttagaaaatattgaattaccttgttttttttcgactattcggaaacaaaatgtgttaaatcagtttaatacagtgactcaatctgcacgttacctatgtgataaccttgatattgatgatcagttattatctaagccagtaagtcaactgagtattggtcagcaacaacgtgtcgctattgctcgagc

SEQ ID NO: 269167 - DNA, 388 bp, Unknown
  Bacterial polypeptide expressing nucleotide sequence isolated from the Sargasso Sea
tgaagaaaaggaagaagtctatttaagaacttttttagggagaatgttgttcactggggaggaggcaatgaagggagcaaatgttctttctggaggagaaaaagttagatgtatgttgtcaaaaatgatgttggcaaaagctaattttttattaatggacgagccaacaaatcaccttgatcttgagtcaattactgcattaaacaatgccatgaaagaatttcaaggggttgttttattcacatcccatgaccatcagcttgttaatacagttgcaaatcgtataattgaattaactccaaatggaatcattgataaaatgatgaattacaatgattatgtgaaggattcaaagatcatacaattaaaagaagaactttacgcctag

SEQ ID NO: 269168 - DNA, 518 bp, Unknown
  Bacterial polypeptide expressing nucleotide sequence isolated from the Sargasso Sea
gatggcattttttgaaggaaataaaatgactggcggttatggagatggtcctgacataatcagctcctgtactattaatgttaataaaggtgaaattgtagcaatcttaggacctaatggagcaggaaaatcaactgcgatgaaagccatgcttggattgcttaatcttaaatctggaaaagttttaatagaaggagaagatatttcaaaattgtctcctcaagaaagagtgaaaaaaggtgtttcatttgtccctcaaacaagaaatgtatttgcagaattaactgtaagagaaaacttagaagtgggagcatttttaagagaagacgatgtattaaaggtgattgaagaaatatatgatttatttccaattttaagagataaaaaagatcaagtagttgggcaattatctggaggtcaaagacagcaagtagcactaggaagagctttgatgataagaccatcagttttaatgctagacgagccaacagctggagtttcaccaatagtaatggatg

SEQ ID NO: 269169 - DNA, 851 bp, Unknown
  Bacterial polypeptide expressing nucleotide sequence isolated from the Sargasso Sea
tattgattcagtagttcgccagaagttagataaagatgccgctcttgaaagatataaggctgttgttgcggtgggcggcacgagttttcaggtatttcatggagagaccttttgtatcatgggtctttcagggagtggtaagtcgacacttgttcgacacattaatcgactaattgagccaagtgcaggcggcgtttttgtcaatggcattgatgttggaaatttgtcttcgaaaggattgcgtgcgctacgatctacgactatcggcatggtgttccagaatatggctctttttcccaatcgctcagtgcgtgacaacatcacgttcggcctcgaaatgcgaaatgaaacacttgacgagcgccgggaagttgctgaggagatgctgtccttggtgcaactagaagattggggggaccgttatccctcggaactatctggaggaatgcagcaaagggtaggtcttgctcgggctctcgcagcggatcctgatattttattaatggacgagccatttagcgcgttggatcccctgattcgtcgtcagcttcaggatcaatttctggatatctcttccaaattgaacaaaactagtctcttcatcactcatgatttggatgaagcgatccggatgggtgatcggattgcaattatgaaggatggtgaatttgtccagatcggtcgaccagatgagattatcttgagtcccgttaacgattacgtggaggcattcgtcggtggtgtgtcccgtctcaaaatactctcggcaatcaatgtcatgaaaccattagagcgggatataaaggaagttacgcacctagagaattatcatatggtagatgcagactgta

SEQ ID NO: 269170 - DNA, 349 bp, Unknown
  Bacterial polypeptide expressing nucleotide sequence isolated from the Sargasso Sea
aatgtctaactcaactccaagtttcgtcaaatttgaaaaaatagataagagttatgacggagaggtcttggtagttaagaacttaaatttagatatagctaaaggtgagtttgttacaatgttaggcccgtcaggttctggtaaaacaactaccttaatgatgcttgcaggttttgaaacaccaactaatggtgaaatttacctggacacaaatccaattagcaagatacctccatatgaaagagaaataggaatggtatttcaaaattatgcactatttcctcatatgactgttcaagaaaacttagcctttccactggaagtaagaaaaatatctaaatctgaaacc

SEQ ID NO: 269171 - DNA, 571 bp, Unknown
  Bacterial polypeptide expressing nucleotide sequence isolated from the Sargasso Sea
atggctgaagttattttcaacaaactggaaaaagtttactccaacggcttcaaagcggtacatgctatcgacctgaaaatcgcggacggcgagtttatggtgatcgtcggtccatccggctgtgcgaaatccaccaccctgcgtatgctggcgggactggaaaccatcagcggcggcgaagtgcgtatcggcgagaagatcgtcaacaaccttgcgccaaaagcgcgcggtattgcgatggtgttccagaactatgcgctctacccgcacatgacggtgcgtgagaatctcgcctttggtctcaagctgagcaagctgccgaaagaccagattgatgcccaggttaacgaagcggccaaaatcctcgagctggaagagctgctcgaccgtctgccgcgccagctttccggcggccaggcccagcgcgtggcggttggccgcgcgattgtcaaaaaaccggatgtgttcctgtttgatgagccgctctctaaccttgacgccaagctgcgcgcctcgatgcgtatccgtatttccgatctgcacaagcagctgaagaaatccggcaagccgg

SEQ ID NO: 269172 - DNA, 655 bp, Unknown
  Bacterial polypeptide expressing nucleotide sequence isolated from the Sargasso Sea
atgccaaatctcaaagatctcaaagtaagaattaatagtgtccaatcaacgcagaagataacgtctgcgatgaaaatggttgcagcagcaaagcttcgacgagctcaagagcaagcagaagaagcccggccctattctcagcgaatggagcggatgattgcgacattggcccgaaaaatgagtaatgttggtggaccagcgttattggcaggaacgggtgtagaagacaagtacttgctggtagttatgacagcggatagggggctctgcggcggatttaattcaagtatagtgagagcaacgcgtaagcgtatagctgaactccaaaagaatggaaagtcggtcaagcttctctgcgtcggtaaaaagggagcggatcagctgcggcgggatgcaagtgacttgatagccgattcgttggagggcgtgacaaggggtgtaattcaatttgcggccgcgtctgatataggtaccaaattaatccagatgtttgaagcgggtgaatttgatgtgtgctcgctaatttataataaatttcaatcggctatgacgcagattgttacagagcagcagatcatccccgccaatgttatggaagaggagagtccaacttcatcaataggcgcctatgagtatgaacccgacgaagaacaaa

SEQ ID NO: 269173 - DNA, 676 bp, Unknown
  Bacterial polypeptide expressing nucleotide sequence isolated from the Sargasso Sea
atggcaattataaaaaaatttagaattaaatcatttaaaaaaattcagccagttgtaaaaattcaaaaaatatctctatcatatggaaaaaggcaaattttagatgatataagttttaatattaaccagggagagatcttgggacttttaggtcctaatggtgcaggtaaatcaacaatatttaatttgatcacagggttgattaaacccgattatggtaaaataatttttgataaaactgacgctactaactttcctatatattcaagaactgaaaaatttaaaattggatatgtgccgcagcatggtggctattttcatgatttaactttgcttgaaaacttgaatgctattggagaaatattaataaaagaaaaaaatcttagaaatagtaaaataagcgatttaatttcaagatttgaattagaaagcctaactaatgttaaagctagatttttatcaggaggacagagaaaaaaattaattatagcactcgctcttttaggaagtccaaagttattacttttagatgaaccatttgctgcattggatatattaacaatcaaaactctacaacagataattgttgatcttcaaactgaaaataatattgcaatagtgctttgtgaccaccaagctagagatttattgtcttgtgtagatgttgctattgttc

SEQ ID NO: 269174 - DNA, 298 bp, Unknown
  Bacterial polypeptide expressing nucleotide sequence isolated from the Sargasso Sea
atgactgtttctgatgaggttgtaattgaaatatcaaatatgaataaatggtttggtcactttcacgttctgcgtgatattgatttgattgtaaacaaaggtgaaagaattgttatatgtggtccttctggatctggaaaatctactttaataagatgtattaatcgacttgaagaacatcaaaagggcataattaaagttgatggagtagagttgaatgatgatgtgaaaaaaattgataaaattagaagtgaagtagggatggtttttcagtcattcaatttgtttccacatctta

SEQ ID NO: 269175 - DNA, 826 bp, Unknown
  Bacterial polypeptide expressing nucleotide sequence isolated from the Sargasso Sea
ttcacttatagctttagtccagaggaccgagtaggaattattggtccaaatggcagtggtaaatccactcttttagatctaattgcgggtaaaagattgcctacaagtgggaaaataaaacttggagaaacggttcatattggctatctagatcagcatacaaatgacttgaatcaagggagtggcctaaaccgcaaagttatcgattttgtggaggaggctgcattacgaattgatcatggaggaaaacaaattacagcatcacaactcttagaaaaattcctctttccacccagtcaacaacatagtcctctgctaaaactttcagggggagaaaaaagaagacttgctctatgcaaaatgctcattcaagcgcccaacgtattgttgcttgatgagcctacgaatgatttagatatacaaaccctaagtgtgctggaagattttcttgatgactttaaaggttgtgttgtagttgtatcgcatgatagatattttcttgatcgaactattgatcgaatttttaattttgaaaacggtcacttgcgaagatatgaaggaaattactctcgattccttgatcataaaatattagaggagcgaaacaatgaaacaaaaaaacgagccaaaatagtcaataattcacaaaacaagcgtggacaagaaataaaattagattctaaaaatgattcgagacggttgagttttaaagaagctagagaattaaaagaattagatctgagattacctatgttagaaaaaaagaaaatatatttagaaagaaagataactgatagtgatgtagacattagtgaaattagtcatc

SEQ ID NO: 269176 - DNA, 808 bp, Unknown
  Bacterial polypeptide expressing nucleotide sequence isolated from the Sargasso Sea
aagtattctcaataatatttcatttaaacttggtcacggccgtattctggccataactggcgagagtgggtctggaaaatctatgacagcactttcaataacccaacttcaacccaaatacgcaaaattgaagggaaaaatatttttcaaagatcaagacatcactgaaaaagatgagtttgagctatgtaaaatccgtggggctaaaataggaatgatatttcaagaacctatgacagctttgaatccagtaaaaactgtaggagatcaaatcagcgagacgatcgtattacacagtgaaaaaaataaaaaatctgctgatacggaaactctcgatattttagaaagagtagggctaagtccagcaactgaagtaataaaacgctacccacacgaattatcaggagggcaacgtcaaagggttgttatagggatcgcaattgcattgaaaccttcgattgtaattgctgacgagccaactacagctttagatgtaacaactcaggcccagattctagctctactaaaaagattagttaaagaagataatatctctttaattttgataacgcatgaccttgcggttgtctccgacatggcagatgagattgcgattatgcaaaacggtatcattgttgaaattgatgaaacacaaaatttatttcgaaatatgaagcatccatatacccgttcactttttgcagcatcagggcattcagttgatttacccttagcaaagagaagtaccgaccttcttttgaccatccaaaacgtcacttgcagatacaggttagcgcgtactaaaatt

SEQ ID NO: 269177 - DNA, 436 bp, Unknown
  Bacterial polypeptide expressing nucleotide sequence isolated from the Sargasso Sea
aatggcatactttgaaggagcaaaaatgacagcaggttatggggatggacctgatattattagttcatgttccataactgccaataggggagagatagtagctattctaggtcccaatggtgctggtaaatcaacagccatgaaagcgatgctcggattattaaaattaaaatcaggctctgtaactttgaatggcgaagatatttcaaaaattaatcctcaagatcgagtaaaaaagggtatttcatttgttccacaaacaagaaatgtatttgcagaattaactgttagagaaaatttagagattggtggctttttgacagaagggagtttagaaaataaaattgagagtatttatagtttatttccaattttaagtgaaaaaaaatcccaagtcgtcggacaattatctggtggacaacgtcaacaagatgcg

SEQ ID NO: 269178 - DNA, 751 bp, Unknown
  Bacterial polypeptide expressing nucleotide sequence isolated from the Sargasso Sea
atgcttgagatcagaaatctttgtaaatcatttggggctattaaagcaacagatgatgtttctctttcagttgatcgagacacaatccacgctttgattggtccaaatggtgcaggaaaaacaacactaatttctcaactttcagggtatatgcaacccgacagaggtacaattacctttgacggaaaagatttattgactattccatcagacaagcgtccacactatggacttgttcgaagttttcaaattacatctgtattcccagaactaactgttttggacaatatctgcctagttttacagtccatgaatggtcaagctcacagcatgtttcgtatggcagatatggatagctctgaacgaaacgaagcccaggaaattataactcgcgttggtctctctgataaaactcactcattgactggcaatcttgcacatggtcaaaaaagacaagtagagatcgccatggcgctggccactaaaccaaaactacttctattggatgaaccgatggctggtatgggagctgaagagagtcataagatcatgactttgcttaaaggtcttcgttcatcagttactatgcttttagttgaacatgatatggatgtggtctttagattggcagacaaggtatcagtgcttgtctatggccgtgtgatagcatcagacacacctcaaaacattcgcaataaccaggatgtgcaagaggcctatcttggtggcaatgaattgaatatggagtaaa

SEQ ID NO: 269179 - DNA, 250 bp, Unknown
  Bacterial polypeptide expressing nucleotide sequence isolated from the Sargasso Sea
atgatcaaaaaaaatagtattaataaagaaaagatagttgatctcatatctatagaaaaatcttttgatcaagttaaagctgtcaatgatgtgtgtttaggaataaatgaaggtgaatttttttcactattaggcccatctgggtgtggtaaaacaacacttttaagaataattgcaggttttgaaaaacctgaaaatggtgatgtttttattaatgggaaaaatgttaattttgttgctccaaaataat

SEQ ID NO: 269180 - DNA, 240 bp, Unknown
  Bacterial polypeptide expressing nucleotide sequence isolated from the Sargasso Sea
tatgtcggcaattatacaaatgaaagaagttaataagtggtttggagattttcaagttttgaaagatataaatcttgaagttggagaaaaacaaaaaattgtagtttgtgggccttctggatcaggcaaatctactttaatcagatgtattaatagacttgaagaacatcaaaaaggacaaattattgtagatggcaatgaactttctgaaaaaactaaggatattgaaaaaattagagc

SEQ ID NO: 269181 - DNA, 712 bp, Unknown
  Bacterial polypeptide expressing nucleotide sequence isolated from the Sargasso Sea
gaaaatattactttcacatatccaaaaaaagaagagcctgctctaaataaactagatatgctaatacctgcaaatagtgtgattggtattgttggtccatctggttctggtaaatcaacactgatagatattttgttatgtctgattgagccccaagaaggccacctaaaaattgatgacgacataataaatgatcaaaatagacgatcatggcaaaatacgattggtttcgttgctcaaactatctttttatcagaaggaactgttgctgaaaatgttgcatttggtatacctgaagaccaaatcgatcttgatcaagttcaaaaagtgctaaagctcgcccatcttagtgattttatttcaactcttgataaagatattcataccaaagttggtgaacgtggagtccaactttcaggaggtcaacgtcaaagaatagggattgcaagagctttgtatcacaaagccgaggtattggtatttgacgaggcaactagttctttagatggcattactgaaaaaatgattatggaagctattcatgagttcagtggtaaaaaatctatcattttaattgctcaccgtctcaaaactgtaaaaaaatgcgataagattttttttatagacaaggggagagtagctgatcagggaacttatcaagaattaattgaaaataatgaacattttaaaaacatggcggcgcatgcttaac

SEQ ID NO: 269182 - DNA, 694 bp, Unknown
  Bacterial polypeptide expressing nucleotide sequence isolated from the Sargasso Sea
tatgcacactaaacacttagagttagagcaggtgggtatcgacttccccacaccgaaggggccatttactgcgcttcaagatgtaaatcttaaaatcagcaaaggtgaatttgtgtcgttaattggccattcgggctgcggtaaatcaacggtgctgaatatcgtcgcaggtttgcaccaagctactaccggcggcgtaattttagatggcgcagaagtaaagcagcctggacctgaacgcgcagtagtctttcaaaaccattctttattaccttggcttacggtatacaagaatgttgagctggccgtaaaatcgaccatgcgcggcaagagtaaaaacgagatgcgtgactggatcatgcacaacctagagcttgtgcacatgacccacgctctcgacaaactgcctagtgaaatttcaggtggtatgaagcagcgagtgggcattgcacgagcgttggcaatggagccaaaagtgctgctaatggatgaaccgtttggtgcgctagacgccctaactcgcgctcatcttcaagactcgctaatggaaattcatgctgatttgggtaacacggttatcatgattactcatgatgtggatgaagcggtattgctatcagaccgtattgttatgatgaataacggcccggcagccaccattggcgaaattctagatattgagttgccgcgtccg

SEQ ID NO: 269183 - DNA, 462 bp, Unknown
  Bacterial polypeptide expressing nucleotide sequence isolated from the Sargasso Sea
tttgggaagtcgcaagaagggcaaagctaagtgaacttattaaaacgttgcccgatggcatgagtactgttgtaggtgaaagaggcttaaaactatcaggaggagaaaagcaaagagtggccatcgccagaactcttctaaaaaatcccccaattctaattttagatgaagccacgagttctttggatactcttacagaaaaagagataaaggtttcattaaataatttagcaaaaaaaagaacatctataatcatagctcacagactatctactattgtagatgcagataaaattcttgtatttgaaaaaggtaaaattattgaacaaggtacacatattcagcttttaaaaaagaaaggtctttatgcagatatgtggaacacacaacagacaatcgaaaaagctgaagagacacttcagaatataaaacctgaatataaaaagttacttcgaaaataaa

SEQ ID NO: 269184 - DNA, 268 bp, Unknown
  Bacterial polypeptide expressing nucleotide sequence isolated from the Sargasso Sea
aatggaaccaaaaattatgctttttgatgagcctacttcagcattagatcctgaaatgattaaagaagtattagatgttatgaaagagctagctaagtccggaatgaccatgattgttgtaactcatgaaatgggctttgctaaagaggttgcagatagagttatgttatttgatgaaggtatgcttgttgaagaaaataccccagaagagttctttaataatcccaagagtgatagaactaaactatttttaagtcaaatactttaa

SEQ ID NO: 269185 - DNA, 352 bp, Unknown
  Bacterial polypeptide expressing nucleotide sequence isolated from the Sargasso Sea
aaaaaagatcaacatccaagtagactttcagggaggtcaacaacaaagagtcgctatagcaagagctcttgcgatgagacctaaggtgatgcttttagatgaaataacatctgcattagatcctgaagttgttggagaagtattaaatgtaattagatcactaaataaagagcatagtttaaccatgatcatggttacccatcaaatgggatttgctagagaaatatcagatagagtttgtttttttaacgaaggtaaaatatttgaagaaggtccaccagaaaagttatttgggaatcctcaaaatgagagaactaagcaatttcttcatgctgtacttgatgcaaattaa

SEQ ID NO: 269186 - DNA, 689 bp, Unknown
  Bacterial polypeptide expressing nucleotide sequence isolated from the Sargasso Sea
aatgtttaagtttgaaaaattggtttttggtgatctcggttggggagatgaatttttatttgccttgttgatgactattttagttagcatatgttcaatgggtcttggagtttttattgcaatttttgctgcatggtcaaaactaacttacaataaaatattaaatttcattgctagtttttacacaacagtaattagaggcatacctgagttacttgtaatttatttaatattttttggaggtagtgcagcaataatgaatttagcaaaaacattcggatataatggttacattgaattaaatgcctttactattagcgttattgcaataggaattatttcagcgacatattcaaccgaagtattacgagcagcatatttgtcaataaaccaaggtcaaattgaggcagctaaaagtttaggattatcaaaatttcatatattccttaaaatattaactccacaaatactaagacatgcaatacctggtttaggtaatatatggcaagtgactcttaaagatacttcactcatatcagtgactggattggtagaaataatgcgacaaacaagaatagcctcaaatgttgagcattctccattaacttttttaattactgctgcctttttatatttatttctttacaccttttcaggtaaattttttaactatattgaaaaaaaatcaa

SEQ ID NO: 269187 - DNA, 439 bp, Unknown
  Bacterial polypeptide expressing nucleotide sequence isolated from the Sargasso Sea
gatgaccaaatatgctctagaaattgaacaacttaataaaacttataggaatggtgtaaaggcactaaaagacataaatctcaatgtcgaggacggagatttatttgcattccttggtccaaatggggctggtaagtctacagttataggaattattacaacactagtcaacatcacatcaggtacagtaaaagtatatggaaaagacattcgtcaatttcctgaagcaacaaaaaaaatgattggggttgtcccacaagagtataatcttaaccagtttattccgattcaagagacaatgattaatattggtggatattttggtttaacaaaaaaacaatctatgaacaaaactcaggagctttttgaggacctaggtatatggcataagagagaatgtacaccgagagaattatcgggcggaatgaagagaagactt

SEQ ID NO: 269188 - DNA, 620 bp, Unknown
  Bacterial polypeptide expressing nucleotide sequence isolated from the Sargasso Sea
aaaagttcttgatggtattaatctctctcttgagcagggggaaataattactgtagttggtaaatctgggtctggaaaatcaacactattaaatatcttaagtactctagatagtgcagatgaaggtgagataataatagatggtaaaaatatcgaaggatactcagatattgaaatatctaaatttagaaattcattcattggttttgtattccaatttcatcatttattacctgattttactgttgtagaaaatatcttgatgccggcatggataaaaagagataaatctaaacttaataaagcttacgaattattagagactttacagttaatggatattaaggataaatatcctatgaaattatcaggaggtgaaaaacagcgagttgcagtattaagagcattaataaataggccaaaaattttatttgcagatgaaccaactggtaatttagatgaaaagaatgcgttattattagttgacctattaagggtaattaacagagattacaaggtagcaatattattgacaacgcataatccagatgttgccgcaattggaaaaaaaagatatgaactcaaatcagggttgttagaattaaaaaaagaattataaa

SEQ ID NO: 269189 - DNA, 835 bp, Unknown
  Bacterial polypeptide expressing nucleotide sequence isolated from the Sargasso Sea
acccaagacgccaacattaagaacagtttggttaagtcgacaaaggcaaaggtgaactttgttcttcctaaaaaggcgcttttttcagcagaaaacatattaactgcagtgaatgaaatatcaatggaaactcttgagggtgaggttttgggggtggttggagagtctggaagcggaaaatcaacgcttgcaaaaacaatactggggcttcaaaagctatcctctggtcaggtcgaagtatttggtcaaaggcttacagaaatcaacaaaaaagaactcaaagaaattcgaaaaaaaatgcaagttgttttccaagaccctttttcgtctcttaacccaagaatgactgtttttgagatcctaaaagaaccccttgattccttttttccttcaatgaccaaagagtctgcgcagaaagatatagaagacggcctaatggaggttggcctgacacctgaatacttaggcagataccctcatgagctttcaggggggcaatgtcaacgagttgcaattgcaagagcccttatgccaaagccccaactattgatttgtgacgaagctgtcagcgcgcttgacgcatcaattaggggggagatcattgagcttctgctcagaattaaagcagagaaaaaactgaccatgatttttattgcacacgaccttgcagtggttagaaagatatgcgacagagttatcgttatgcaatcaggaaagatagttgagcaaggcccaacagagaaagtattttttgagccggaaaaagaatacactgctaacctattaagcgcagtgccagttccggatccaaaaatggaaagagaaaaacacacta

SEQ ID NO: 269190 - DNA, 646 bp, Unknown
  Bacterial polypeptide expressing nucleotide sequence isolated from the Sargasso Sea
ttcctgcactattaacgttaacaaaggtgaaattgttgcaattttaggacctaatggagctggaaaatctacggcaatgaaagcaatgcttggacttcttaaattgaaatcaggaaatattttaattaatggtgaagatataagcattttatctcctcaagaaagagtaaaaaaaggaatttcatttgttcctcaaaatagaaatgtatttgctgaattaacagttaaagaaaatttagaagtaggagcatttttaagagaagacgatgtgtcaaaagtgattaaagaaatttatgatttatttccaatcttaagtgaaaaaaaagatcaagttgtgggtcaattatctggaggtcaaagacaacaagttgctctaggaagagctttgatgattagaccttcagttttaatgttggacgaacctaccgcgggagtttcaccaatagttatggatgaattatttgaacatataattcaagtcaaaaaaactaatgttgcaataattatggttgaacaaaatgctaagcaagcacttagtatttctgatcgtggatatgttttagtaacaggagaaaataaatttgaaggatctggtaaagaattattaaatgatcctgaagttagaaggtcttttttaggagcataa

SEQ ID NO: 269191 - DNA, 146 bp, Unknown
  Bacterial polypeptide expressing nucleotide sequence isolated from the Sargasso Sea
aaggatgatggcgatggagaatgctacatcgaatgcaggagatatgattaaaagtttaacattagaatttaataaagctaggcaagctgcaataactacagaaatgttagaaattgttagtggtgctgaagctttgaatgattagg

SEQ ID NO: 269192 - DNA, 292 bp, Unknown
  Bacterial polypeptide expressing nucleotide sequence isolated from the Sargasso Sea
gatgagcccacgtcggctctggatgtctcagttcaggcgcaggttctgaatcttctgaaagatcttcaaaaggatcttggactgacgtatctgtttatcacccatgaccttgccgtcgtgagagtgatggcgcatcgtattggcgtgttgaagtctggacgacttgtagaagaggaggacaccaaacgtctgattgagtttccccagtcggactacacacgaatgctgatccggtctgcgccgcgcattcgtccctcagaccaggtccacgcggccacaatacctgtctagg

SEQ ID NO: 269193 - DNA, 415 bp, Unknown
  Bacterial polypeptide expressing nucleotide sequence isolated from the Sargasso Sea
tatggcctttgaagtaaataatttatctttttcttttaataatagttttcatatagaaaatttgagctttaaaattgcgcaaagtgaagtatgtttattaaaaggagctagcggttctggaaagtccacacttttaaatattatttctggtttaaagaaacctgataatggaaacattatccttaataataatttacttaatagcgaaaacgaattcattaatccagagaaaaggaacataggttatgtttttcaagactttgctttatttcctcacataaacgctgaaaaaaatattaaatatgctatgtcaattagtgagaatgttttatttgatagattatcaaataaactaagcttatctaatcatctcagtaagatgccatatgagctctctggcggtcaacagcaaaga

SEQ ID NO: 269194 - DNA, 498 bp, Unknown
  Bacterial polypeptide expressing nucleotide sequence isolated from the Sargasso Sea
tatgaatgagaataatattgaaattttaaatatacaaaaattaaatatatctacatttaataataaaattttaaataacgtttcattaaaaattcataaaggtgaaatgataggtttggttggtgagtcaggtagtggaaaatctgtcacagcattatcaatattagctctgcttgatgaaaaagctatgaaaattgatacaggaaaaatttttttatcgaacgaaaatatattagaaaaaaatgaaaaggaaatgcaagaaatcagaggtaataaaatatcaatgatttttcaagaaccaatgacttcacttaatcctgtttttactattggagatcaaattaatgaagttcatagtattcataataatctaaataaagataaagctgatgaattgactatcagtttattggatagagttggtattccaaatcctgaaatttcaattaaaaaatatccacatcagttatctggtggtcaaagacaaagagtaatgat

SEQ ID NO: 269195 - DNA, 421 bp, Unknown
  Bacterial polypeptide expressing nucleotide sequence isolated from the Sargasso Sea
gatgtctaaaaatacagaattcgttaagttcgataaagttgacaaaagttacgatggtaaagtcttagtagtaaaagatttaaatcttaatatctcagagggcgagttcattactatgcttggtccatctggttcaggaaaaacaacttgtctgatgatgttggctggatttgaaacaccaaccaatggtgaaatctatttagattctaatcctatttcaaatattccaccacacaaaagaggaattggaatggtttttcaaaattatgcattgtttcctcatatgacagtttatgaaaatctagcatttcctttaagagttagaaaagttcaaaaagatgagattgataaaaaagtagataaagctttatcaatggtttctttatcaggatttgaaagtagaatgccagcgcaattatct

SEQ ID NO: 269196 - DNA, 681 bp, Unknown
  Bacterial polypeptide expressing nucleotide sequence isolated from the Sargasso Sea
taaaagatatttcatttactattaaaaaagatgaaattttaggtctacttggtccaaatggttctggaaaaacaactaccattggtatgttgcttggattgctaaaacctacacaaggacaagtattaattgaaggaaaaaaaatagaggaaaaccgaatagaaattcttaaaaaaataaattttatttcaccctatattgagttgccgaaaaaactaacagttaaacaaaatttaattgtatatggaaaactatataatgtttcaaatataaaaaatagaattgattacctggttgaaaaacttagattgtcagatttattaaatagagtgactggggaactttcgtcaggacaaaaaaatagagccagcttagcaaaagctctaataaataatccaaccgtcttacttttggacgaaccaacagcttctcttgatccagaaataggtgattttgttagaacttttttggaaaattataaaaaagaaaaaaaaatatcaattttattagcctctcataatatgaatgaagtcacaagattatgcaaatcggtattaatgatgaaggatggagaaattatagacaaaggtatacccgaagatttaataacaagacatggtagaaaaaacctagaagaggtttttttaaaactttcgaggaacaaaaatgagtttcactaga

SEQ ID NO: 269197 - DNA, 747 bp, Unknown
  Bacterial polypeptide expressing nucleotide sequence isolated from the Sargasso Sea
cggggaaaggtgtttcaggcgatgttgaaggtcaacgggttgttattggtaatgaactggctatgcaggaaaacagtatcgttattgataatcaaaaggccgttgcggatacgttgcggatggaaggcgctaccgttatctatgtggccacagatgggtaccttgcaggcctgatagctatctcggatcccgtgaaagcaaccacgccggatgcgcttaaagctttgcgtcaggcggggatccgcattgttatgctcaccggggataaccagcttactgctgaagcagtcgcacggaaactgggaatagatgaggttgaagccggggttctgcctgacggcaaaaaagcagtgataacccgactgaaagcgtctggtcatgtggttgcgatggcgggggacggtgtaaatgatgccccggcgctggcagcggctgacgtgggcatagctatgggaacgggtacagatgtggcaattgaaagtgccggagtcacccttctcaaaggcgacttgatgatactgaacagggcccgtcatctgtcagagatcaccatgaaaaatatccgacagaatctgttttttgcatttatctacaacgcacttggcgtgcctgtggctgcaggtctgctttatcctgtgtatggaatactgctgtcgccagttattgcggcggcggccatggctctttcctccgtcagcgtcattgtgaatgcgttgcgtctgaaaagtgtcaggctcgggaaataac

SEQ ID NO: 269198 - DNA, 433 bp, Unknown
  Bacterial polypeptide expressing nucleotide sequence isolated from the Sargasso Sea
tatgaataatattattacatttgataaggtttccaaatcttttggtgagcttaaagtattagaccaattaaatttagaagtaaaagatggtgaaaaattagcactgattggtccaagtggttctggcaaaacgacaatcttaagaattttaatgacattagagacaatagatagtggttttgtatctgtgaataatgagtatttatggcatgaaaaaattaatgataaagtagttcccgcaactgataaacatttacaaaaaatgcgtgatcaaattggcatggtttttcaacaattcaatttattcccacacttaacagcgatagaaaatgttaaacaacctcaaattttagttaaaaagaaaaatgaaagtgaagcaaaagaaaaagcagaagatctatttaacatgattggattaattgataaaattgat

SEQ ID NO: 269199 - DNA, 271 bp, Unknown
  Bacterial polypeptide expressing nucleotide sequence isolated from the Sargasso Sea
aatatgtgatgaaccaacttctgcattagacgtaagtatacaagctcaaatattgaatttattaaaagatatacaagatgaattgcatctcactatgctatttattagccatgatcttcctgtaattcgccaaatgtgtaaccgaataattgtactaaaaaatggtgctgtctgtgaaacaaaagatacagaggaattgtttaataatcctgagcatgaatatacgaaggaattaattagacttatgcctaaaattgaatcaataatttaa

SEQ ID NO: 269200 - DNA, 877 bp, Unknown
  Bacterial polypeptide expressing nucleotide sequence isolated from the Sargasso Sea
ttcaaaggagagatgttagttgttatgggtttatctggttcaggaaagtcaactttattaagatgtatctcaagattaacagacgcaacaggtggaaaaatttttatagaaggtcaagatttattaaagttaaacaacaaagacctcatagatctaagaagaaataaaatgggaatggtttttcaaagctttgctttacttccacacaaaactgtcgttgaaaatattgcttttccacttcaaattaaaggggtgaaaactgaagaaagcattagtaaagcaatgaatatggttaaactagtcggtcttgatggcagagaaaactattttccaagagaactttctggaggacagcaacaaagagtaggtatcgcaagatctttagctgttgagcctgatatttggtttttggatgagcctttctcagctttggatccattaattagaaaagaaatgcaagatgagtttttgagacttcaagacaagttacaaaaaacaattatgtttatcacacacgattttgatgaggccttaaaacttgctgaccggattgcaattatgaaagatggaataattgaacagctagatacacctgccaatatagttttaaaaccagctacggaatatgtaaggaagtttacagaggaagtccctagagaaaaagtcttattaattgaagatgtaatggacacttctaaagacaaccttggtgatttaaaagtttcaaaagatgaaataatagagaatgttgctaaaaaaattctcacccaagaaaaatctgtcgctgtagttaatagtaataatgaaattattggctctattaatccaactaaaataatcaacaccgtttttggagcaaaggaaaatagtaactaaa

SEQ ID NO: 269201 - DNA, 798 bp, Unknown
  Bacterial polypeptide expressing nucleotide sequence isolated from the Sargasso Sea
taatttttccgcttaaacaaaggaaactaagcgaagagcaaattaagatagatgttgaggatgcacttaagactgtggggcttgttggttttgaaaatcgtaaaattcaagaattatcaggaggtcagcaacagagagtagccttagcaaggtcacttgcaaagaaggcaaagatacttctacttgatgaaccattggttaaccttgattataagttaagagaacaattaagagaggaatttaaaagaatattttctgagggcctttctcaagacacaattttaatttactcaactactgatcctcaggaagtaatggaattaaatggagaagtaatagtgttagatgagggtaaagttttacaaaaaggagctgcaaaagaaatatttgaaaatcctaaaaacttaaaagttgcagaaatttcaaatgatccaccgatgaacatttttaaaggaattaaaagttcaaatgaattaaactttgaaaatatttcaataaatttgccggcatattttaaaaatttagaggatcaaaattattacttcggaataagagcttcagaaataaaacttgataacaaaggagaagagtttgaaatagaacttgcagaaattagtggctcagaaactttactgcatttaaaaagaggaggctcgaaaattatagctttaattgaagaagtgatgaattttaaaattcacgaaaaagtaaaagttaaattcaatgaaaataagttctatgcgttcaataataatgaagaattagtttcttctccttatggagttttaaatggctaaa

SEQ ID NO: 269202 - DNA, 717 bp, Unknown
  Bacterial polypeptide expressing nucleotide sequence isolated from the Sargasso Sea
aatggtttatcagcaattcataaactatcctcatttaaatgtttttgaaaacatagcctttcctttgaaacaaagaaaaatggatcaaagcattattaaagaaaaagtaatggacgctttgaaatctgtaggcttgctaggttatgaaaatagaaagatccaagagctttctggaggacagcaacaaagggtttcgcttgcaagatctttagtcaaaaacgctaaaatactgttgctagatgagccattagtaaatttagactataaattgagagagcaacttagagaagagtttaagaacctattttctaaagggttagcagatgaaacaatattaatttattcaactactgatccaagggaaactatggaattaaatggtgaagttattgttttagatgaaggtaaggtcctacaagttggtccagcaagggaaatatttgaaaatccaaactcattaaaagttgctgaaatttctaatgatccaccgatgaatattatagaagctaaaattttagataatcatattaaaattgaaggcattgatgtagaggccccgcaacacttatctaaactaaccgaagatggtttaaaaattggattaagatcttctgatattgaacttagcgaaaatggtcatgaatttgaagttgagcttgcagaaattagtggttcagaaacattgttacatttaaaaagaggagccacaaaaattat

SEQ ID NO: 269203 - DNA, 808 bp, Unknown
  Bacterial polypeptide expressing nucleotide sequence isolated from the Sargasso Sea
aatgaataatataaaaaaatttagaattataaaatttaaatctaaacctatattagcagcaaaaagtatatctaagtcttttgataaaagagttattttaagaaaaattgacatacacttaaatcaaggtgaaatgcttggactgctcggaagtaatggagctggaaaaagtacttttatgaatatagttttaggacttttaaaatgtgattttggagatatttttttaggtaatacaaaattaacaaacttagctattcacgaaagatcaaaattgggaattgcgtatttgccacaacaaacttcaatttttagagggcttactgtttatgaaaatttattaggtatagctcaaattgtaaaaaagagagcttcagatcaacatagcatagttgaaaaactcatggcagaattttcgataacccacctcagagatgttaaagctaccgctctttctggtggtgaaagacgtagaacagaaattgcaagatgtttaataaataatccaaaagttcttttgttagacgagccatttgcaggggtggatcttctaagtatacaggacataaaaggacttcttatgaaacttcaatcgcgtggatgtgcagtattggtaacagaccacaatgcatctcaacttctgagtgttgtagatcgtgcctacgtaatagctaatggaacgatagtggctaacggaactccaagacagattgtaaatacttctgaagcaaaaaaattatactttgggagaagattttaccttttagtatttataaatgaaataaagattttctgtttatctaaatag

SEQ ID NO: 269204 - DNA, 703 bp, Unknown
  Bacterial polypeptide expressing nucleotide sequence isolated from the Sargasso Sea
gaaatgctagtagtaatgggtttatctggttcgggtaaatcaacacttcttagatgtatttcaagattaactgatgcaaccggtggaaaaatttttattgaaggtcaagatttattagaattaaataataaagagctaattgagcttagaagaaataaaatgggaatggtgtttcaaagctttgctttgttacctcataaaacagttgttgaaaacattgctttcccactgcagatcaaaggtactaatactgaagatagtatcaacagagcaatggaaatggtgaagctagttggacttgatggaagagaaaactattttccaagagagctttcaggtgggcaacaacaaagagtagggatcgcaagatcattagctgtggaaccagatatatggtttttagacgaacctttttctgcattagatccattgattagaaaagaaatgcaagatgagtttttaagacttcaggaaaaattacagaaaaccatcatgttcattactcatgattttgatgaagcattaaagttagctgatcgaatagcaattatgaaagatggtataattgaacaattagatacacctgcaaacattgtattaaatccagcaactgaatatgtaagaaagtttactgaagaagtaccgcgagagaaggttttaataattgaggatgttatggatgcctcaattaaagataatttag

SEQ ID NO: 269205 - DNA, 910 bp, Unknown
  Bacterial polypeptide expressing nucleotide sequence isolated from the Sargasso Sea
catgattgagacgattgacctgacgaaaaagtatggcgatttttttgctcttgaatcactggatttgaagttggagcaaggagatctatttggatttattggtccaaatggcgcaggaaagacaaccaccatccggatcttgtcaactctcctccagccaacatggggagaggcatatgtgtgtgggcattccatctacacgcaccctcgagagattcgaaggagcattgggtacatgccggatatttttggtgtgtatgatgatatgcgggtgattgagtatttggagttttttgctgctgcgtatcggatttatggtgcagaaaggcgtcgtgttgcggaacgctcactcgaactcgttgaccttgtggcgaaacgtgatgagcttgtaacaagtttgtctcgcgggatgactcagcgtctgggcttggctcgagtattactccatgatcctcatgtgcttcttcttgatgaacctgcgagcggactcgatccaagagcacggattgaaatgcgaaatctgctcaagcgtctccaaggcatgggaaagacggtgcttgtatcaagccatattcttcctgaactagctgatatttgtaatagggtcgggatcattgaatatggtcggctgcttgcatgtggtgatgttcaggatcttctcaggcaggttcgtggacagccggtcattcggattcgtgtggccggggattcattggctgctgcaaacgctctcgagacagccgcagaggccaaaggggtcactgttcgggatggcgatgttttagttgctctggctgaaggagtggtagatcactcgcctcttgtaaacaggcttgttgcagctggtgagaaggtcttagtgggtcaggagcaggaagttaacctagagacggcattcttggaactgacc

SEQ ID NO: 269206 - DNA, 838 bp, Unknown
  Bacterial polypeptide expressing nucleotide sequence isolated from the Sargasso Sea
cacgacttggttagaatcgaaagcgaaacgcttagacatggaagataagaaagcctcgagcatggataaagcgttaaaacaagagttggattgggtgcgcaaaaacgcgaaaggacaacagaaaaaaggaaaagcgcgtttacgagcttacgaagagttatgcgcggcttcggcggaatataccaaacgcgaaggcatggattctatcaccatcccaactgcgcctcgtttaggcgacgtcgttttgacgtgcgaaggcttgacgaaaggttttgacacgagaggtttacttatcgacaacttcacggcaactattccaccggggtcgatcgtcggcatcgttggtggtaatggtgcgggtaaaaccactctttttagaatgattgtcggagaggacgagccagatgggggttcgtgcaaggttggcgagacggtcaaactaatgtacgtagaccaatctcgcgactccttagactcgacgaaatccgtcttcgaggaactcactggtggtgccgatgaggttaatttaggcggcaaagctgtcaactctcgagcgtattgctcttggtataacttcaaatcctccgaccaacagaaaaaagttggtgacctttccggcggcgaacgcaaccgcctccaactcgctcgagtattaacttccggcggcaactgcctccttttggatgaaccgaccaacgacttggacgtcgccacgttgagagcgctcgaagaagctttactctcctggaacggttgcgctttcgttatctcccacgaccgatggttcctcaacaaaatcgccacccacatcatcgcgtttgaaggcgactcgcaagac

SEQ ID NO: 269207 - DNA, 830 bp, Unknown
  Bacterial polypeptide expressing nucleotide sequence isolated from the Sargasso Sea
agcatttattaattacccacatctaaatgtttatgaaaatatttcttttcctctcaaacaaagaaaattaagtgaagataaaataaaaaaagatattaatgagtctttaaaaacagttggcttgattggttttgaaaatagaaaaatccaagaattatctggaggacaacaacaaagagtagccctagctagatcattagcaaaaaaagcaaaaatattacttttagatgaacctcttgttaatttagactacaaattgagagaacagctgagagaagaatttaaaaagatattttctcaaggtatatcagaggaaactatcttaatttattcaacaacagacccacaagaagttatggagcttaatggcgaagtaatagttttagatgaaggtaaagttttgcaaatggggcccgctaaagaaatctttgaaaatccaaaaaatcttaaagttgcggaggtttcaaatgatccacctatgaatataataaaaggatctaaaaatgcagaaaaaataaattttgagaatataaatatagatatagcaaaccatttgtcaaaattaaaaaataaagattattactttggtattagagcttcggaaataaagttagataacgaaggacaagagtttgaagttgaattagctgagatcagtggctcagaaactttacttcatttaaaaagaggaaatacaaaagtaatttcattaattgaagaggtaatgaactttaaaatccatcaaaaagtaaaaattaaatttaatgaaaataaattttatgcattcgatgagagtgaaaaattagtttcttcaccttatggaggtttta

SEQ ID NO: 269208 - DNA, 280 bp, Unknown
  Bacterial polypeptide expressing nucleotide sequence isolated from the Sargasso Sea
aattcacgatttcattgatagtttgccaaataattttgaaactagagtaggtgaggatggaactttgttgtctggaggtcaaaagcaaaggataggtatagcaagagctctatttagaaaaaaagagattttaaccttagacgaagcgacaagtgcattagatattataacagaggaaaaaatattaaaaaacctaaatggaatagaagagctgactataattcaaatcacacatcgtaatttaaaaactataagctatgatcaagaaattaatttttaa

SEQ ID NO: 269209 - DNA, 428 bp, Unknown
  Bacterial polypeptide expressing nucleotide sequence isolated from the Sargasso Sea
tgcatctgaagaagaagtttgggaagctgcgagactttcggaatcagataagtttataaatttattaccaaaaaaagaaaaaacaattgtgggagaaagaggtcaaaaactatcaggaggtcaacgacaaaggatttcgatagctagggctattttaaaaaatccagagatattaattttagatgaagcaacgtctgcagttgataatgaaactgaagcagcaatacaaagatctattaatactcttaaaaaagggagaactgtaattgcaatagctcatcgtttatcgactattagaaatgcagagattatttatgtactagaagatggcagaattgtagaatctggaaatcacgaaagtcttttggatattaaaggtgtttattcaaaattgtggtctgttcaaacaggcgaaaaaattagctaac

SEQ ID NO: 269210 - DNA, 709 bp, Unknown
  Bacterial polypeptide expressing nucleotide sequence isolated from the Sargasso Sea
cttatctgaaattattgaacacttattaccagatattgacggtgaaaatcatcctttgctagatacaagagatgtaaaaagaaaggcatatttaattgtttcagctgaccgtggattagcaggtgccttcaatgcgaatgttttaaaagtggcccaaaaagaaattgatgattttggtaaagataatgtagaccttttttgtgttggaaaaaaagcaagagattattttcgtcgaagagaatataatttgatagaagatcatgttgaattttgggcagatatggaatttgagcatgcaatgatgatcagtagaagtctaatttcacattttaacagttttcaggttgacgagattcatgttgtatataactattttgtgaatattacccaacaagaaattaaatccgaaacgttgcttcctcttgtttatgacccttcaaaaaataaacgatcagacagactttatgaaccatcaaaagagcaaatcgttaacactctggtcccaagacattttaatgttcaggtttggaaatatttattagagtcttatgcaagtgaacaagctgcgaggatgctatcaatggaaaatgcgacttctaatgcgcaagatatgataaaagatcttactttacaatttaataaagcaaggcaggctgcaattacaacagagatgttagaaattgttggtggagctgaagctttaggttaa

SEQ ID NO: 269211 - DNA, 544 bp, Unknown
  Bacterial polypeptide expressing nucleotide sequence isolated from the Sargasso Sea
gcgcctaggcgtcggccggaccttccaggtcactgccgtctatgcttccatgtcggtggtggaaaacgtgcagatggctctgatctcccataaccgaaaggcattttccgccttcacccgggcggccaagctctaccgggacgatgccatggcgctcctaggcctgatcggcatgaaagatcaggctgaccgggccgctaacatccttgcctacggggatttgaagcgtctggagctggccgtcgccctggcacacgacccggcgctcctgctcatggacgagcccaccgccggcatggctccgggtgaacgccgcgcactcatgaagctgaccgccgacatcgtcgccgagcgaggcgtcagcgttctgttcacggaacacgacatggacgtggtgtttgagaacgcacatcgcgttctagtcctaaaccggggccagctgctggctgaaggctccgtcgacgacgtccgcgccaaccgggctgtccaggaagtctacctgggcggcggcacaaccttcggcggagacggcgaccatgcttga

SEQ ID NO: 269212 - DNA, 387 bp, Unknown
  Bacterial polypeptide expressing nucleotide sequence isolated from the Sargasso Sea
taagcgatgttggattaaaagataaaatagatgaatggccagataaactttctggtggccagaaacaacgattagcaatagctagatcattagcaatggatcctgttttaatgttacttgatgagccaacttcagcccttgatcctgaattagtaggagaagtcctatctgttctaagaaacttagtaaatgaaggaatgacaatgttaattgtaactcatgagttaggatttgcatcaaaatttggagacaggatagtctttatggatgatggagaaattattgaggaaggtgctccaaatataattctcaagtctccaaaaacagacagattaaaactcttcttagaaaagctagatattacatcattaaaggaaaaacattaat

SEQ ID NO: 269213 - DNA, 667 bp, Unknown
  Bacterial polypeptide expressing nucleotide sequence isolated from the Sargasso Sea
atgtctgaatcctcagaaaaaataaacaactctccggttatccaatgcgaatctgtctataaaatttttggtacaaatgcctcaaagcttttggaaagctcaaaaggtctagttgattctaaaacttttcaagacgcaggatgtattgttggagttaataatgctacctttggtgtaagcaaaggtgaaatgatggttgtcatgggtctatctggatcaggcaaatcgactctactacgatgcatatcaagacttactgatgctactgctggaaaaatctttattgatggagaagacttactttcaatgaacagtaaacaattaattgaattaagaagaaataaaatgggaatggtttttcaaagtttcgcccttcttcctcataaaactgttattgaaaatattgcttttcctcttcaagttaaaggtactagcactaaagatagtatatctaaagcattagaaatggtggagttagttggtttaaaaggaagagaaaattattttccacgagaactttcaggaggtcaacagcaacgtgtaggtattgccagatcattagctgttgaaccagatatttggtttttagatgagcctttttcagctcttgatccattaatacgtaaagaaatgcaagatgagtttttaagattacaaggagtttaaa

SEQ ID NO: 269214 - DNA, 617 bp, Unknown
  Bacterial polypeptide expressing nucleotide sequence isolated from the Sargasso Sea
aagagcaataacgagaaatccaaaaatatttttatttgatgagcctttatcaaatttagatgcagcactaagatcagaaatgagagttgagatttccaaattacataatcaaattaaaacaaatatgatttatgttacgcatgatcaggtagaggctatgaccctagctgataggattgtaatattaaatcttggtaatattgaacaagttggaactccagacgaaatttacaacaatccagcaaatatttttgtagctcaatttattggaactccaaaaatgaacattttaccactaaacaatgaaaatattatttcagaaaataaaattaagtttttaggtaatgaaataacttttgaaaaaactaaatttgataaaaagaaatatttcttaggaataagacctgagcattttaatttatctaatgaatcacaatttaaatttaaacctaaaattgatcttgttgaaaatttaggaaatgaaaagattgtatacatgagtaacgacaacttagaacttagtgcaaaaatttctagtcaggaagattttcaaaatcagattaattttgactctaaagatatttttatttttgacgaaaacggaagaagaatttaaa

SEQ ID NO: 269215 - DNA, 685 bp, Unknown
  Bacterial polypeptide expressing nucleotide sequence isolated from the Sargasso Sea
ctgcgtggatgccgattcgccaagctaccgcaatcgaaccagcagaggttttacgctatgagtaagcctatacttgaagttatcgatttgacccatcgattcaaaacagatgaaaagccactactacatcagatccatatgaagatttttcatggtcagacagtagccataacaggatcatctggtagcggtaaaagcacactgctacacttagtaagtggcatgcataacatccagtctggttcggtcatacttttaggaaagaatttggggcagttatctgaggaagaaaaatgcaagatgcgtcaaaaagacataggcattgtctatcagcaacaccatttattaccagatcttaatgtttctgaaaatatcacattacctttataccaacaaggactcataaaagaacatactgaagtttttgaaaaactaataacacagcttggtcttgaaaaaatagccaacaaagatatatccatactctcaggcggtgaaaagcaacgtgttagcatcgcaagggcactagtatgcatgcctaaaatacttttcatggatgaaccaaccggcaatctagacccccaaaatacgaacaagctcctcaaaatgatagccaatcttcaaaagacatgtaacctcacaattcttatggtcacacacgataacaccatagctaaaagcctcg

SEQ ID NO: 269216 - DNA, 271 bp, Unknown
  Bacterial polypeptide expressing nucleotide sequence isolated from the Sargasso Sea
tttggagccaaaaattttaatattagatgaaccaacatcagcgttagatgtgacaattcagaatcaaatactaaatcttctaaataaacttcaagaccaacttcagctaagctacatatttattagtcatgatatgacagtcatcaaagcaatatcaaataggataattgttttaaaagacgggttaattgtagaagaagatattagtagtaatatctttaattctcctaaatctgagtatactaaaaaacttatttcttccattgtttag

SEQ ID NO: 269217 - DNA, 424 bp, Unknown
  Bacterial polypeptide expressing nucleotide sequence isolated from the Sargasso Sea
gtgacccatgaccaggaagaagccctgaccatgtccgaccgcatcttcttgatgaaccagggcaagatcgtgcagagcggcgatgccgaaaccctctataccgcgccggtggatgtgttcgctgctgggtttatcggcaactacaacctgctcgatgccgacaaggccagccaactgctgcagcgaccgatcagcgggcgcatcgcgattcgccccgaggccatcgagttgagccgcagcggcgagctcgatgcgttggtgcgtagccacagcctgctgggtaacgtgattcgctaccgcatcgaagcccgtggtgtcgagctggtggtggacgtgctcaatcgttcggccgacgacctgcatccggacggccaacgcctggcactttccatcgaccccagcgcactgtgtgaagtagcctgac

SEQ ID NO: 269218 - DNA, 625 bp, Unknown
  Bacterial polypeptide expressing nucleotide sequence isolated from the Sargasso Sea
atgtctcaaattaaaatatcaaatttacaaaaatcatttggagattttactgcagtcaaaaactcaaatttaacaattaatgataaagagttttttgttttgctaggcccatctggatgtggaaagacaacaactcttagaatgattgctggattagagttaccaacatcaggagaaatttacttaggcgaagaagaagttggaatgttaagagcatccgagagagatattgcatttgtttttcaattgttcgcactttatccacatatgaacgtaaaaaataacttatcttttcctcttaaaatgcagggttatagcagaagtgaaattaaaactagagttgaggaggcagcaaaacttttaagaattgatcatattttaaactccagtatttcatctttatctggtggagatagacaacgtgtagctcttggtagagctttagttagaagaccaaaagcatttttaatggatgagcctttaggtactttggatgctgaatttagagaattaatgtgtttagaactcaagaaattacatatcgatattggcgctaccactgtttatgtaacacatgatcaactagaggcaatgtcattagctgatcgtattgctgtaatggatg

SEQ ID NO: 269219 - DNA, 545 bp, Unknown
  Bacterial polypeptide expressing nucleotide sequence isolated from the Sargasso Sea
aaaatcaacactgttaaatatcttaagtaccttagataatgcagatgaaggtgaaataataatagatggaaaaaatattaaggggctttcagataatgaaatatctacttttagaaattcatttattggttttgtgtttcagtttcatcacttattacccgattttactgttttggaaaatattttgatgcctacatggataagtaaagaaaattctaaaaaaaatacagcttacaaactactagagactttacatttaatagataaaaaagataagtatcctatggaattatcaggtggtgaaaggcagcgtgtagcagtattgagagcattaataaataatcctaaaattttatttgcagatgagccaaccggtaatttagatgaaaagaatgcgttaatattggttgacctattaagggaaataaacagagattacaaggtcgctattttattgacaacgcacaatcctgatgttgccgcgattggtgaagaaagatatgaaataaaatcaggctttttagaaaaaagaaaagacttataaa

SEQ ID NO: 269220 - DNA, 482 bp, Unknown
  Bacterial polypeptide expressing nucleotide sequence isolated from the Sargasso Sea
tattgagcttccaaaaaaactcacggtaaaacaaaatttagaagtttatggaagattatatggcattagtaatcttaaacatcggataaatgaaatatcagaagatttaaatataaaaacttttttaaatagaaaaacaggtgaattatcatcaggtcaaaaaaatagagtttcattagctaaatcattaattaataaaccagaaattttacttttagatgagcctacagcaagcttagatcctgatattggtgattttgttagaagctatattcaagactataggtcaaaaaaccaagttaccatattattggcctcacataatatgagtgaggtggaaaggctatgtaatagtttaataatgatgaaaaatggaaaaattattgacagaggaacttgtaaagaaattattgaaaaacatggacgaaacaatttggaagaaacttttcttaaattagcaaggagcaaaaatgaattttaat

SEQ ID NO: 269221 - DNA, 507 bp, Unknown
  Bacterial polypeptide expressing nucleotide sequence isolated from the Sargasso Sea
gctcctggcaaaataatattggttttgtagctcaaagtatatttctatctgatagtagtattgcagagaatgttgctttcgggattccaaaagataaaattgatactgaaagagtattaaaatctcttgagcttgctcatctcttagaacttgttgagggctttaaagatggaatttacacgcaagttggtgaacgtggtgttcaactatcaggaggacaacgacagcgtataggtatcgctagatctttataccacggagcagaaattcttatatttgacgaagcaacaagttcattagatggaattactgaaaaaatgatcatgcaagctattcatgaatttagtggagaaaaaacgattattttgattgctcaccgactcaaaactgttgaaaaatgcgatcaaatatttttcatggataaaggaagtatagtcgaccaaggtacttatatagatttatttgaaaaaaataagctttttagaaatatggctgatcatgcataaa

SEQ ID NO: 269222 - DNA, 823 bp, Unknown
  Bacterial polypeptide expressing nucleotide sequence isolated from the Sargasso Sea
cctgctacaggtgtttaagatttatggacaaatagtactagtgacagacgaaacagtgatttctgcgaattcgttgaatttaaccttccaaaccaacgacggaccagtacatgctctaaaagatgtaaaccttaatataacaaaaggtgactttattagttttattgggccatctggttgcggtaaaacaacatttttgagagttatggccgatttagaacagccaacagatgggactattacaattaatggtgttgccccaaatgtcgctagagaaagccgggcatatggatatgtttttcaatcagcgggattatatccatggcggactatagggaaaaatatatgcctaccattagaaataatggggataagtaaagctgagcaaaaagagcgagttgcaaaagtactaaagttagttgagctagaggatttcgagcggaaatttccttggcagctttctggtggtatgcaacaaagggcatctatcgctagagctctagcatttgatgctgaaatcttacttatggatgaaccgtttggggcgcttgatgaaattgtacgagactatttaaatgaacagttattagaactttggaaaaatacaaataaaactatttgttttgttacgcattccattccagaagctgtttatttgtccactaaaatcgttgtaatgtcgcctcgacctggcaggattattgatgttatagaaaacgctcttccgctagaaagaccgcttaatattcgggagtcagccgaatttatcaaaattgctcaaagagtaagacagggtttgagagagggtcattcatatgaataa

SEQ ID NO: 269223 - DNA, 691 bp, Unknown
  Bacterial polypeptide expressing nucleotide sequence isolated from the Sargasso Sea
atgccttctttaaaagatttaaagattagaataaatactgttaaatcgacgcagaaaataacttctgctatgaaaatggttgcgtctgctaaattaaaacgagctcaagaaaaagcagagtctggaaggccatatgctactaaaatgagcagcatagtatctacacttgcatcaaaagttaattctgagagcggtccaaaattattgtttggcaataaagaaaataatagagttttactagtagcaatttctgcagatagaggcctttgtggcggttttaacaacaatatatctaaagaaataagaaaaagagttaatgacctcgaaaaagataataaagaggttaagttaatattagttggcagaaaagttggcacagtcttaaaacgagaaatgggagatcgaataattggctcatttaccgggatacagggtgataatttattattttcaaaaatatctccaataactttacaaattatttcattgtttgaagatgacaaaattgactgtgtggaaatgtattataatcgttttaggtcagtgatctcccaagttgtaactaaaaaacaactcataccagctgacgttaatacagagactccatataatgatgaagaaagtacatatgagtatgagccagaagaagaaatgattttagatcacttgctaccaaagaaattatcaacac

SEQ ID NO: 269224 - DNA, 927 bp, Unknown
  Bacterial polypeptide expressing nucleotide sequence isolated from the Sargasso Sea
gctgctatgcccttcagacttactgttgctcgatgaacccaccaaccaccttgatttggatgccgtaatctggctggagcgctggttacagcgttatcagggcacactgctgctgatttcccacgataaggcgtttatcgataacaccgtggcgcagatcatcagcgttgaacagcagcaacttattgcctacaccggcaactactcaagctacgaaacccagcgtgccgaacgactgcgcttacaggacattgaataccgcaagcagcaggacaaaatcgctcatttagaatccttcattacccgctttaaggccaaggccagtaaagccaagcaggcacaaagccgcattaagcagttagagcgcatggaaacgctgctgccggcccatcatgccagccagtttagttttgaatttaaagcccccatagcattgcctaacccgctcatccagatggaaaaggtcatgctgggatatggcgatcacattgtgctggagcaggtaaagctcaatctggtaccgggcagccgcattggcttgctgggccgtaacggccagggtaaatcaacgctgatcaaactcctcgctggagtacacgagccgaaaaccggtgtatttaccacggctaaagggttaaacgtagggtattttgcccagcatcaattggaatatctggatcctcaggcctcggcattactgcatttgcagcgtctcgacagcaaagccaccgaacagcagcaccgcgacttccttggcggctttggctttcacggcgacgaagctaccggcccggtagccccaatgtctggcggtgaaaaagcgcgtttagtgctggcgcttattgtgtatcagaagccgaatttgttgctgctcgatgagccaactaaccacctcgatttagaaatgcgtcatgcgctgaatatggc

SEQ ID NO: 269225 - DNA, 382 bp, Unknown
  Bacterial polypeptide expressing nucleotide sequence isolated from the Sargasso Sea
gaaatagttgaaaaattaatggctgaattttcaataactcatttgagagatataaaagctacagcattatcgggaggagaaaggcgtcgctgcgaaattgcaagatgccttataaataaccctaaagttctattgctagacgaaccttttgcaggagttgatttgctttctattcaagatattaaaggcctgcttctaaaattacaatcccggggatgtgctgtacttgtaactgaccacaatgcttctcagcttttaagcgttgtcgatagagcttatgtaattgcaaatggagcaatagttgcaaacggaacaccaagacaaattgtaaatacagccgaagccaaaaagttgtattttggtgaggactttactatttaat

SEQ ID NO: 269226 - DNA, 472 bp, Unknown
  Bacterial polypeptide expressing nucleotide sequence isolated from the Sargasso Sea
aatggctttttttgaaggtatcaaaatgactgctggttataatgatggtcccgacataataagctcttgttctattaatgttgatagaggagagatcgttgcaattttaggaccaaatggagccggcaagtcaactgctatgaaagcaatgcttggtttactaaaattaaaatcaggtgcagtaaaaattgatggaaaagacatatctaaaatgtctcctcaggatagagttaaaagtggaatttcttttgtgccacaaaataaaaatgttttttctgaattgactgttagagaaaacttagaagttggagcttttttaagaaaagataatattaatgaagtaattgaaaaaatttaccaactgtttcctattttaaaagaaaaaagttctcaaatagtggggcaattatctggtgggcaaagacaacaagtagctctaggaagagctttaatgattaatccatcagtttta

SEQ ID NO: 269227 - DNA, 343 bp, Unknown
  Bacterial polypeptide expressing nucleotide sequence isolated from the Sargasso Sea
ctgatcaagcccaaaaatttctgggacagtgtcagtggacagcagcagagatctgctatagcaagagcattgtgtatggagccaaaaattatgctttttgatgaacctacttcagccttagatccagagatgatcaaggaggttttagatgccatggttaatttagccaaaggtggaatgacaatgattgttgttacacacgaaatgggttttgcaaaagaagttgctgacgaagtaatttttatggatgaaggtatgatcgttgaaagagcacctacaaaaactttctttgcaaatcctaaaagtgatcgaactaaacttttcttaagccaaattctataaa

SEQ ID NO: 269228 - DNA, 370 bp, Unknown
  Bacterial polypeptide expressing nucleotide sequence isolated from the Sargasso Sea
atgcttgcagtaaaaattaataacctaagctaccaaataaataataatgatattttacaaaatgttagcttggaactcgaacaagataaaatagcctgtgtactaggtccctcaggatgtggcaaaacaacgatgttaaagcttattgcaggtttagataaggtacaatctggtgaaatttatcttcatgataatcttgtaagttcaatcaataaacacataaaaacagaaaaaaggaaaattggttttctctttcaggactatgctctttttcctcacctatctgtaaaagaaaatctcaactttgctattcaaaatcataaagacttatcaaataatattgatgaaattatagagataattaagcttc

SEQ ID NO: 269229 - DNA, 627 bp, Unknown
  Bacterial polypeptide expressing nucleotide sequence isolated from the Sargasso Sea
aatgctgactgctcaaaacatcactttgcattatgcttcatctcagattttatttggtgttacgatagtagctaaaatgggggaaatcacctgcatcatgggatccaatggggtgggcaagacctcgttacttagagttctctcgggaacacacccgtcaagcgggggcatatatagactaaaccaaaaagacgtcacaaactaccaggctgatattttagcccggctaggggtggcttacgtgccccaaggccgttttatttttcctatgctcacagttagagagaatttagagactgggtttgcttgccttccaaaagatgaacgtgtcataccatcagagacataccaactttttcctgtgctcaaaacaatgttagatcggcgcggtggcgatttatcgggcggacagcaacaacagctagcgattgcgcgagctttggtaacaaaaccaaatttacttttattagatgaaccaacagaagggatacagcctaatattataactgaaattggtgacgttatatgccatctaaaatcacaaaggcagatggcgatagttttagtagaacaatattttgattttgcgtttgaacttgctgatcagatctatgcaatggttcgtgg

SEQ ID NO: 269230 - DNA, 662 bp, Unknown
  Bacterial polypeptide expressing nucleotide sequence isolated from the Sargasso Sea
tatgaacatcatagaagtaaaagacttaaagaaagcctatctgctaccaggagataaatcgaaaacattcaatgcagtcgatcatatctctcttggaatcaagaaaggagaggtttatggaatactcggtccaaatggagcaggcaagaccacaacactagagatgttagagggtcttaaagaaattgatgatggctttgcgatcatcgatggcattgatgtgagtaaagatccttatgcagttaagaaggtgattggtgtgcaacttcaaagtaatgagtattttgataaactggacctcagtgagcttcttaccttattttctaaactctattcaacaaccatcgatcactcgaagctactggatcaagtaaatttattggataaagcaaatgcaaaaacccaacacttgtcaggtggtcaaagacaaaggttttcaattgcctgcgcactggttaataaccccaaaatactctttctggatgagccaacaacaggcctcgatccccaagcaaaaaggaatttatggactttggtaaaggatctcaatgcttctggtatgacaatcgtgttgaccacacacaatatggaagaagcagagtatctgtgtgaccggattgcaatcatggacaagggcaaattgattgctgaggatacaccaa

SEQ ID NO: 269231 - DNA, 276 bp, Unknown
  Bacterial polypeptide expressing nucleotide sequence isolated from the Sargasso Sea
catttcataaaccctcacaactttccggaggagaacagcagcgagttgctatagcacgtgcattaataaacaaaccccgcattgttctggctgatgaaccaaccggcaatcttgatgaagaaacaggcgtgcaagtaatggatattctgcttcgactaaataaagaacatcgaacaacttttataatgattacccacaacccctcacttgcatctaaaatgcagtttcagtatcgcatggaaaatggacaattacatttgattgcgaataaataag

SEQ ID NO: 269232 - DNA, 836 bp, Unknown
  Bacterial polypeptide expressing nucleotide sequence isolated from the Sargasso Sea
aatttataaactatcctcatttaaatgttttgaaaacatagcctttcctttgaaacaaagaaaaatagatcaaagtgttatcaatgaaaaagtaatggatgccttaaagtctgtaggtttattaggttttgaaaaaagaaagatccaagagctttctggaggccagcaacaaagagtttcgcttgcaagatccctagtcaaaaacgcaaaaatattattactggacgaacctttggtaaatttggattacaaattgagagagcaactgagagaagagtttaaaaacctattttctaaaggtttagcagatgaaacaatattaatttattcaaccacagatccaagagaaactatggaattaaatggtgaagttatagttctagatgaaggcaaggtcttgcaagttggtccagctaaagaaatatttgaaaatccaaactcattgaaagttgcagaaatctctaatgacccgccaatgaacataatagaagctaaaatttcagataatcatattaaatttgaaggcattgatttagaggctccaaaacatttatctaaattaactgaaaatggtttaaaaatcggattaagatcttctgatatcgaattaaatgaaaatggacatgaatttgaggttgagcttgcagaaattagtggttcagaaacattacttcacttaaaaagaggaaatacaaaaattatagtttcaatagaagaagttttaaactttaagatacacgataaaattaaaattaattttaaaattgataatgcttatgcgtttcatgctgatggaaaattggcatcttcaccttttggaggtttaagtggctaaa

SEQ ID NO: 269233 - DNA, 809 bp, Unknown
  Bacterial polypeptide expressing nucleotide sequence isolated from the Sargasso Sea
catgcgcttctttcagccgaccacaaatcccgataatgccgtggaggtccgtggtctcaagaaaatctatgcctcaagcgggaaatccgcacctaaggatgctttgaaggacatcaatctggccattccaaaaggctctttctttgccttgctggggccgaacggggcgggcaagtccaccttcatcaacatcctggccggcctggttgtgaaaacggccggcgaagcgaaggtttggggttacgacataatcgacgatatgcgtgcggcccggcgctgtatcggcgtggtgccccaggaactgaacttggacgctttcttcacgccgcgtgaggtcctcgacctgcaggccggattgttcggaatccccgaaatcgcccggcgcaccgacgagattttggaagcggtcggccttgcggaccaggcgaacgcctatgcccgttcattgtcgggcggtatgcgtcgacggctcctggtgggcaaggctatggtccattcaccaccagtgctgatcctggatgaaccgtcggcaggcgtcgacgtggacctgcgccgtcagctctggagctatgtcaaggccctgaacacttcgggaacgacggtgctgctgaccacgcactacctggaagaggccgaggccatgtgcgacaccatcggcatcatcaaccacggtcagctcattgcctgcgagaagacgccggaccttttgggccggcttgattcaaaacagatggtgatcaccgtcgaccaggatttggatgcggtgcccaaggccctgaccgccttcgccaccgaacttcgcgaagcgc

SEQ ID NO: 269234 - DNA, 271 bp, Unknown
  Bacterial polypeptide expressing nucleotide sequence isolated from the Sargasso Sea
agatactttttcattaggagagcagcaaagattagcctttgcaagattactactgaattctccgagatttgctgtattagatgaagcaactagtgcactcgatattaaaactgaaaaaagactatataatttattaagagatagagaattatcattgataagcgtgggacacagacctagtttaaaggattttcatgagaacattttagaattaaatgggaagggagactggaaattatttactaccgataagtataattttaaaaattaa

SEQ ID NO: 269235 - DNA, 430 bp, Unknown
  Bacterial polypeptide expressing nucleotide sequence isolated from the Sargasso Sea
ttttggtctaacaaaagaagaaataaaagaggataaaatcattaatgcgcttaagttatctaacttgtatgattttgtaatggatcttgaatataaactagaaactgtagttggtgaaaacggagtaaaattctctggtggcgaaaggcaaagacttggaattgctagagccctttaccataatccatccgttttgatttttgatgaggcaaccagtgctttggataatttaactgaacaaaaaataattgaaaatatttttatgttaagggaacaaaaaacaataataactatagcacatagattaagcactattagatcagctgaccaaatatactttttaaaaaaaggtatgcttgctggtagtggcacatatgatgagttatattcatcaaatacagattttaaaagattagctgatctttcataa

SEQ ID NO: 269236 - DNA, 105 bp, Unknown
  Bacterial polypeptide expressing nucleotide sequence isolated from the Sargasso Sea
cccgggccattctcaaggatgccccgatcctcattctcgacgaggccacatccgcgctcgactccatgacggaaaaatccattcaggcatcccttgatgactaaa

SEQ ID NO: 269237 - DNA, 361 bp, Unknown
  Bacterial polypeptide expressing nucleotide sequence isolated from the Sargasso Sea
gctcggtcgcgtcggcctcgccgacatggccgatcaccgcgcggcggatctctcctatgggcgcaagcgcgctctggagatcgccaccacgctggcgctggacccgaaggtgctgcttctcgacgagcccctcgccggcatgggccaggaggatgtcgagacgatggcccggctgattgccgatgtcgcccgcgactgcgccgtcctgatggtggaacacaatatcaaggttgttgccgatatcggcgatgacatcacggtgctgcagcgcggcgagatcctcacgcagggaagctatgacgcggtcagcgccgatccgcgcgtgcgcgaagcctatatggggaccgaggacgatgactga

SEQ ID NO: 269238 - DNA, 446 bp, Unknown
  Bacterial polypeptide expressing nucleotide sequence isolated from the Sargasso Sea
tagaggagaaactagaagaaataaacctaaagcaatcctactaaatgtaggtcttaacgacactgcagcaattggtcagaaaaacgggaggcatcaattagatatcgatggctttgaatatggattagagagattaattaatgaaatgaactctcaaacaagtgtctttgttattggtctgacaccagttgatgagaacaaaatgcctttcgcaggatgtctatggtactcaaatgatttttgtaattcatatgaaaggagaatggaagaagtatgtctcaatcagaatgttccatttctaccaacgtttagagaaatatactctgatcagagaagtaagaattggattacaaatgatgggattcatttgaattcccagggtcatttctggattttccaaagactgaagagctgggaaattcttacaaaatggaaggattcctaag

SEQ ID NO: 269239 - DNA, 589 bp, Unknown
  Bacterial polypeptide expressing nucleotide sequence isolated from the Sargasso Sea
aattttgctggaacagacagaaatgaaatggaacctgaacttgccgcaaaaagtggtatagctaggacatttcagaacatagcactattcaaaggaatgagtacattagacaatcttatgactggtagattgttaaaacaaaagcaaaattttttaatgcaagcactttatcttggatcagtagcaaaagaagaagaagaacaccgtgaaaaagttgagagagtaatagattttttagaccttcaatcaataaggcggacacctgttggatcacttccatatggtctgcaaaaaagagtagaacttggtcgtgcattggcaatggaaccagaaatactcctacttgatgaacctatggcaggtatgaacgtagaagaaaagcaagatatgagtaggtttgttctcacagtaaataatgaattaaagaccacaatagttttaatagaacacgacatgggcgttgttatggatatttcagatagaatagttgtattggactacggcaaaaagattggatctggcttgccgacagaaattagaaacaataaagcagttattgatgcatatctgggtgtatctgatgattagt

SEQ ID NO: 269240 - DNA, 355 bp, Unknown
  Bacterial polypeptide expressing nucleotide sequence isolated from the Sargasso Sea
atgaccccgattgcagttaccctactcaccggctttcttggcgcgggtaaaaccaccctgctgcgccatattctcaacgagcagcacggttacaagattgccgttatcgaaaacgaattcggcgaagtctcggtggacgatcagctgattggcgatcgcgcaacacagatcaaaaccctgaccaacggctgcatctgctgcacccgttcgagcgaactggaagacgcgctgctcgatctgctcgacaacctcgacaaaggcaccatcaatttcgaccgtctggtgatcgaatgcaccggcatggccgatcccggcccgattattcagacctttttctcccatgaagtaatttgcg

SEQ ID NO: 269241 - DNA, 460 bp, Unknown
  Bacterial polypeptide expressing nucleotide sequence isolated from the Sargasso Sea
aatgttaaaagtaaattccgtttcaaaaattattaaagacaagaaaattctaaatggaatttcatttagcttaaattttggtcaaatatgtggtttattaggtccaaatggagccggaaaaacaacttcattttatattattgcaggcttagcaaaatctgattctggtcacattgaatttattgatcaagatattacaaatatgcctattcataagagatcaaatttaggtataaagtatctcccccaagaaccatctatttttcaaaatcttactgtttatgaaaatctttttggattagcagaattaacatttaaaaataataatgatataaaaacttctgtagaaaaattacttgatgaatttgatttaatagaaatcaggggtctccaaggcagacaactttctggaggtcaaagaagaaaagttgaaatcgcaagaaccctagtatctaatcca

SEQ ID NO: 269242 - DNA, 346 bp, Unknown
  Bacterial polypeptide expressing nucleotide sequence isolated from the Sargasso Sea
atttaaaggcaaactcgataaagatgatcatatttttttagataagttacttagttccacaaatatgatggataagaaatttagatatcctcacgaattgtcagggggtgaaaaacaaagagtttcaataataagatccatagctttaaagccaaagtgtattttcatggatgagccgactggtaatttagataatgatacttcactactcatacacgaattatgcattgatattcacaaggagtggggcattggtatatttcttgctacacacgatatggtatttgcgagtaagatggatacaaattttaatattaagaataaaaggataacagctaatgattga

SEQ ID NO: 269243 - DNA, 351 bp, Unknown
  Bacterial polypeptide expressing nucleotide sequence isolated from the Sargasso Sea
aaattgatgagtgcccagacaatctttcaggaggacaaaaacaaagactcgccattgcaaggtctttagctatggatcccatcttaatgttattagatgaaccaacatctgcattagatcctgaacttataggtgaagttttatcagttttaagaaatttagtaaatgaaggaattacaatgttaattgttacacatgaattaggatttgcttctaaattcggtgataaaatagtttttatggatgcaggtgaaattattgaatctggtcctccaaataccattctaaagtcgccaaaaacagaaagattaaaactttttttagaaaaattgagtctcacttcactttagt

SEQ ID NO: 269244 - DNA, 385 bp, Unknown
  Bacterial polypeptide expressing nucleotide sequence isolated from the Sargasso Sea
tatgtcagaagattcaattatttcactaaagaatgtcaataaatggttcggtgatttccaagtattacaagatgttaatttagaagtaaaaaggaaagaacgtatagttgtatgtggaccatctggatctggtaaatctactatgattagatgtattaatagactggaagaacatcaagaaggtactataattgtagatggtattgaactaactggaaacttgaaaaatattgatagtgttagaagagaagttggtatggtttttcaacaatttaatttatttcctcatttatcagttaaagaaaacattactctagcgcccatatgggttaaaaaaatgcctaaggctgaagcagaacaattagctatgcaacaattagaaatt

SEQ ID NO: 269245 - DNA, 525 bp, Unknown
  Bacterial polypeptide expressing nucleotide sequence isolated from the Sargasso Sea
ggtaatgtagacgcaaaaacttttcaagaaaacggatgtatagtcggagtaaataatgcttcttttgaagttgcaaaaggagaaatgctggttgtgatgggtttatctggatcaggcaagtcaaccttattaagatgtatttctagattaacagaagcaacaggtggaaaaattttcatagagggacaagatttgttacaattaaatgataaagagcttattgatcttaggagaaataaaatgggtatggtatttcaaagttttgctttgctgccacacaaaactgtaattgaaaatattgctttcccactacaaattaaaggtattaaaactgaagacagcatcagtaaagcactggaaatggttaaattggttggtcttgatggaagagaaaattactttccaagagaactctcaggggggcaacaacaaagagtaggtatagcaaggtcattagctgttgaaccagatatttggtttttagatgaacctttttctgcattagatcctttaattagaaaagaa

SEQ ID NO: 269246 - DNA, 268 bp, Unknown
  Bacterial polypeptide expressing nucleotide sequence isolated from the Sargasso Sea
gctggatgaggctactagcgcgcttgatagtgaagtagagtcctcaattcaggcagcactagaaaaagtgatgcaagggaaaacagttttagctattgcacaccgcttatctacgctcattaaaatggataaaattatcgttatggataaaggaaaaatagtagaagttggatctcacgaggtacttgtagagaataatgggctttatgctcgttactggagaagacagtcaggtggttttatagaaacaagactggcagcagaataa

SEQ ID NO: 269247 - DNA, 683 bp, Unknown
  Bacterial polypeptide expressing nucleotide sequence isolated from the Sargasso Sea
gagacagcgtgttgcaataggaagagcgttagtgagggaaccaagaatatttttatttgatgaacctttatcaaatttagatgcaaagttaagagttgagatgagacgagaaattaaaaaacttcatcagcaacttaaaacaacagtagtttatgtaacgcatgatcaaacagaagctatgagcttaggtacaaatattgcaattatgaatcatggtgtaattcagcaaaatgatacacctgaaaatatttataataaacctagtaatacttttgtggcagactttataggctctccatcaatgaatttaataaaaggcaatctaaaagagagttcaaataaagtttcatttattgcccatggatcaaatatcgaaattcagataaatggatatgattttaaagaaaagtctaatttagataataaagaagttttttttggaataagaccagaacatatattttttaaaaaatctaatgaagaggattttgagattaatttaagagcagatttaagtgaatatattggacatgaacagataatgacttttaattttgaaaatcaagaggtgttagctaagtttccatcaacagtaaaaatagatctatcaaaaaatacaaaattattctttgatttaactcaaatttcattgtttgatgctaaaacagaggagagaatttaaa

SEQ ID NO: 269248 - DNA, 525 bp, Unknown
  Bacterial polypeptide expressing nucleotide sequence isolated from the Sargasso Sea
aaatggtttttcaagatccaacagaaagccttaacccgcgttatacagctaggcaatcaatctatgatccactaaaaaattcaactaaaatgaataatgacgaaattaataataagattatagaagtgtcaaatctggtaggcttacctcttaatttacttgatcgtttacctcatcaactctctggaggccaaaaagcaagagtagggatagctagggctatagcactttcaccaaaaatattaatacttgacgaacctaccgcgtcgctcgatgtgtcaattcaagctatcattttaaatttgcttgtggatttaagagctaaattagatatgagttatctttttgttagtcatgacctgaatgtagtacaacttctttgtgattatataattgtaatgaaagaaggcgtaattattgaacaaggcaaatccaaccaaataattagtaatcctgaagaaaattacactaaatcattattggcagcatcgcctaaaccacccaagcttcctaaagtatcataaa

SEQ ID NO: 269249 - DNA, 816 bp, Unknown
  Bacterial polypeptide expressing nucleotide sequence isolated from the Sargasso Sea
attgcaatactattttggatttacagcgacacttttaattggtggcttcttagccctagacggagaaattaaagtagcaacctattcagtaatgctatttataacacagcgattattgtggccattaactgaactcggagtgatttttgattcttatcaaaaagcaatggcatcatttagacgaatattaaatttaaaaaatactttacccacaatcgataatggcaacgaaaagctcacaagttttaataagaatattgagatatcaaatttaaattttgaatacgtaaaaaattttccagttttaaatgatgtttctatagacattaataaaggtcaaactacagcgattgttggaagtacaggttctgggaaatctactctaataaaacttattttgagattatatgattcaacttccggagaaattaaatttgatggcaagaatataagagatttagaattggatagtttaagaaataaaattggattggtaagccaagatatattcttatttgaaggtacagtttttgaaaatattgcatacggaaatctagatgcaaaagatgaagaagtttgggaagcagcaaaactttcagagtctgacaaatttataaatctattgcctaataaagaaaatacaatcgttggagaaagagggcaaaaactatcaggtggtcaaaggcaaagaatctcaatagcaagagcaatactaaaaaatccagaaatattaattttagatgaagcaacttcagccgttgacaatgaaactgaagctgcaatacagaggtctattaataccttaaaagaaggaag

SEQ ID NO: 269250 - DNA, 587 bp, Unknown
  Bacterial polypeptide expressing nucleotide sequence isolated from the Sargasso Sea
attggcatttgaaaatttgacgcttggctatgatagccaggctgcagttaataaccttgaggcagatattgcggaggggagcctaacagccgttgtcggtcccaatggagcaggcaaatctaccctgcttaggggggtagttggagcgctttcgccgttagagggtagggtagccttcggcacctcgagccgcgatgatatagcttatctgcctcaacaatcagaaattgactggacatttccgctgtcggtgattgatcttgttgcaatgggcctgtggcgtgagattggtccttttggccagctcaaaggagaccgtctggctcgtgtcgaagcggcgctggcagcaatggggttgacgggctttgaaaaccgccccatcgggtcactatcaggtggccagatgcaacgtacacttttcgcgcgtctattattgcaggacgctagtctgatcctgctggatgaaccttttacgtcggtagatgctagcaccatagccgttctgctggatttgattcaaagatggcataaagaaggcctcacggtacttactgttttgcatgatcacgaaacggttcgcgcgcatt

SEQ ID NO: 269251 - DNA, 469 bp, Unknown
  Bacterial polypeptide expressing nucleotide sequence isolated from the Sargasso Sea
atgatagaaattaaaaatttacataaatcctacgaaataggggcatcctcattacatgttctaaaaggtattgacttttctgttgaagatggagacctagttgcaattatgggatcttctggttctggtaaatccacactactaaatattctaggtatgttagacacatcagatactggaacatatgatttagataagattagaattgcagatatggatgagaaaaaggctgctaattatagaaataaatttcttggatttgttttccagtcatttaatttaattaattataaaaatgctcttgaaaatgttgcattacctctatactatcagggagtatcaagaaaagagagacaaaaaacagcattaacatatcttgataaagttggtttaaaagattgggcagatcacctgccaagtgaattatctggtggtcaaaaacaaagagttgccatagcaagagcatggc

SEQ ID NO: 269252 - DNA, 798 bp, Unknown
  Bacterial polypeptide expressing nucleotide sequence isolated from the Sargasso Sea
ataatgaattaataagtcttcaaccgcctatcccacaaaataataaagatatattgccactaaagaaggttataagccttaagaacattttttatagctaccctagctcacagataacaaccttaaaagatatcaatctgagtattcctgcttattctactgtaggtatagttggtcccacaggcagtggtaagacaacaacagtagatattattttaggtctacttgaaccgaaaaaaggcaagttagaagttgatggtaaagttattgataaagataatcttaaagcttggcagagttctattggttatgtacctcaacaaatatatttagcagacgacacagttactgccaatattgctttgggtagagacccaaaatatattgatcaaaatgcagttgagcgtgctgctaaaattgcaaatgtacatgagtttattattaatgaattacccctaaaatatgaaactactgttggtgagcgcggtataagactgtcaggtgggcagaggcaacgtataggaattgctagagcactgtatcacaatccacaattgttaattttagatgaagcaactaatgcactagacaaccttactgaacaagcagtgatggatgcggttaataacttagggaacgaaataacaataattttaattactcatcgtcttagtacagtgaagaaatgtgataatatctttctattagagaaaggcgaactaaaacaacaagggacatttgaaaaattaatacagttaagcgacaacttccgagcttctgctaaaaatatacaatgat

SEQ ID NO: 269253 - DNA, 736 bp, Unknown
  Bacterial polypeptide expressing nucleotide sequence isolated from the Sargasso Sea
tatgatcttaaaggcacatgaaatttctaaatcatataaaggtaaaaaagttgtaaataaggtttccgttaaggttagtcaaggagagattgttggtcttcttggacctaatggtgcaggaaaaacaacttccttttatatgatagtaggaattattaaaccagaggaaggtgaaatatatttggataataagaagatttctaaatatccaatgtataaaagggctcaaagtgggataggctatttagctcaagaagcatctgttttcagaaaactttcagtagaagaaaatatattaagcatacttgaattttctaatctttcaaaaagtaagcaaaaagaaagaactgaatctcttatggaagaattcggattgactcatataagaaataatcgtggagatcttttatctggtggtgaaagaagaagaactgaaattgcaagagctcttgccacagacccaaagtttcttcttttagatgagccgtttgcaggagttgatccaattgctgtagaagatatacaatccattatctcaattcttaagaaaaaaaatattggcatattaattaccgatcataatgtacaggagacactagctataactgacaaaacatatctaatgtttgagggtaaaattttacaagaaggaattccagaaaaattagctgaagatgaaatggttagaaaagtttatctaggaaaaaactttgaattcaaaagaaaaaaactttag

SEQ ID NO: 269254 - DNA, 751 bp, Unknown
  Bacterial polypeptide expressing nucleotide sequence isolated from the Sargasso Sea
atggcgcagtttatttattcaatgtatcgggtgtcgaaagtagtacccccgaaaagaaccattcttaaagacatttcattgtcgtttttccctggcgccaaaattggcgtactcggtttaaacggttcaggtaaatccactttgctgcgcattatggcaggcatcgacaaagaatttgaaggtgaagccaaaccactggccggcaccaaaattggttatctgccacaagagcctgaactcgatatgagtaaaacagtgcgtgaagtggtagaagaagctgttgccgatgtgaaatacgctttaacccgtctggacgctgtgtacgccgcttatgccgatgaaaacgccgactttgacgctttagcccgcgagcagggtgagctggaagccattattcaggccaaagacggtcacaacctcgacaatattttagagcgtgccgccgatgcgctgcgtttaccggcctgggatgccaaggtgaatgtcctgtccggtggtgaacgccgccgtgtggctatttgccgtttgctcttggaaaaaccagacatgctgctgctggacgaaccgaccaaccacttagacgccgagtctgtcgcctggttagaacgtttcctgcacgactataccggcactgtggttgccattacgcacgaccgttatttcctcgacaacgtagccggctggattttagagctggaccgtggtgaaggcattccatgggaaggcaactactcttcctggcggagcaaaa

SEQ ID NO: 269255 - DNA, 685 bp, Unknown
  Bacterial polypeptide expressing nucleotide sequence isolated from the Sargasso Sea
tatgctaacgctaaaccaggtcagctatcgctggccgaacgccgccgatgactgtttacgcaatatttcgctggaactccaggagggggaatggctggcgctaacgggcgataatggcgcaggaaaatccacacttttgcgcatcatggccgggctactgacgccctcatccggcacaataaccgttcaaaatcgtgctattgcgcaactgaaaaaccgggagcgcgccagggtgctcggcgtactgtttcaggaagcggagaatcaaatctttcacagcaaggttgcagaggaagttgccttcggattacggctacagaagcttccggcgactgaaattgcgcaacgcacgatggcggcgctgcaattatgtcagttagaggatgtcgccgacgcgcacccgctcgatctgcatacggcacaacgacgtatggttgccgtcgccagtctggaagccctcaaacccgctattctactgctggatgagcccagtcgggactttgatgcacactggcttggcgtcttcgaaaactggctggcagtgtgtcgtacacgtggcgccagcgttgtagcgatcagtcatgacgctgcatttacgcagcgccatttttcgcgcatagtacggctacacaacaaaaatctcatgccgtccgatatgccccctcaagcgtcatctccagcataa

SEQ ID NO: 269256 - DNA, 315 bp, Unknown
  Bacterial polypeptide expressing nucleotide sequence isolated from the Sargasso Sea
tatgaacgacacacctcaaagttttgttaaatttgaaaagatcgataaaagttatgatggagaagtactagtagtaaaaaacttaaacttggatattgctaagggtgaatttgtaacaatgctaggtccgtcaggatcaggtaaaacaacaactttgatgatgttagctggtttcgaaactcctacaaatggtgaaatatttttagatactaaaccaataagtaaaatacctccctatgaaagagaaattggaatggtatttcaaaactatgctttgtttccccacatgactgttgcagaaaatttgtcattccc

SEQ ID NO: 269257 - DNA, 332 bp, Unknown
  Bacterial polypeptide expressing nucleotide sequence isolated from the Sargasso Sea
tatggggagctcagatagtttcgttaaatttgataaagtagataaaagctacgatggagaaacactagtagttaaagatcttaatgtagatattccccagggagaatttcttacaatgctagggccttctggttctggaaaaacaactacactaatgatgttagctggctttgaaactcctacgggtggagaaatatatttagaaggtgaggctattaataaaattcctcctaacaaaagaggaattggaatggtgtttcaaaactatgcattatttccacatttgactgtaaatgagaatctagcctttccgcttgaagttagaaaattaa

SEQ ID NO: 269258 - DNA, 655 bp, Unknown
  Bacterial polypeptide expressing nucleotide sequence isolated from the Sargasso Sea
catgtctaaaattacattaaaagaacttagtcatagctatttgtctaatcaattaaaaaaagaagattgggctttacgagatgtaaatattgattgggaagacggtggagcttatgctcttttaggcccctcaggatgtggaaaaactactcttttaaatattgtatcgggtttaataacacctactaaaggaaaaatactttttaatgatgaagatgtaacactcaaaaatccagtagaaagaaatattgcacaaatttttcaattcccagtcatatacgacacaatgactgtatatgataatttagcatttccattaaaaaacagaggtatatcaaaagaggaaattgactctaaagttttagagatagctgaaatgttagagctcaaatcaactttatataatagagcatcaggattaactgcggatggaaaacaaaaaatatcacttggaagaggattggtaagatctgatgtaaatgtaattatgtttgatgagcctttaacagtgattgatcctcatttaaaatggattttgagatctaaattaaaagagttacatcaaaaaataaatagaactatgatttacgtaacacatgatcagacagaggctttaacatttgcagatcaagtagttgtgatgcatgaaggacaa

SEQ ID NO: 269259 - DNA, 658 bp, Unknown
  Bacterial polypeptide expressing nucleotide sequence isolated from the Sargasso Sea
gacgataataaatttaaaatagaaaacatttctctagagataagtaaaaatcaaaagataggaattattggaaaaagcggatcgggtaaaagtacaattattgatattttagcaggaattttaaaagataaatcaattaatttaaaagttgatgataaaccaatcgagtcaaaaaatgaccaataccattggcaaaaaaaaatcgggctaattcctcaaaatatatcaatattgaatgaaacgttaagagaaaatattttatttggtctcagcagtaagcaattttctgacgaggaagtccttaaatctatagaactttctaaccttaaaaatttactcttaaaattgccagatgggttggatcacaagattaaagaaaaaggtttgaatatttctggtggtgaattgcaaaggatagggattgccagagctttggtattcgatcctgaaatattaatttttgatgaagcaacaagtgctttagatacttttacagaaaatgaaatacttaaagatataaattcattaaagaacaaaaccataattatgatttcacatagaatgaataccctcaaatattgtgacaaaatatatttaatagaaaagggagaaataaaagattttggatcttacgataaattcaatgaaaaatactgaa

SEQ ID NO: 269260 - DNA, 641 bp, Unknown
  Bacterial polypeptide expressing nucleotide sequence isolated from the Sargasso Sea
agccggtaggggtgctcagcggtgggaaaagagcaggttggcgttggtgaagtggctgcttgatccgcctaacttattgttgatggacgagccaaccacgcaccttgatatggccagcatcgatgcccttatcacagcgctgcaacaatatgagggcacactgattttcatcagtcacgacgttcatttcattcgtgccatttcgcaacacaccatccacgtaaatggaggtcgattgcgcaactttcctggcggctatgattattacctgcaaaagaccaacgccgagaccgctcgcgctgggctaaccagcggtgcgaagaagagctcggtcgctgcaaccccgcccaagcctaagggagatcagcgcgcacgcaaacgtgctgaagccgaagctcgaaatgctcgcagtcgcgagcgccggggaattgaaaaagaggtgaagcgtttggaagacgaaatccaatcggccgagaaaaagattactgaacttaccgaggagctcgagaatccagagacatatgatgatccggctcgggccatgaccatcaatcgagagttaacccaagcccaaaacaccctcgatagccttactcctgagtgggaggcagcagtcgaaaagcttgagcagattagctaaa

SEQ ID NO: 269261 - DNA, 320 bp, Unknown
  Bacterial polypeptide expressing nucleotide sequence isolated from the Sargasso Sea
gatgtcagataaaataattcagattacagaaatgaataagtggttcggtgattttcaagtattaaaaaatattaatttagaagtcgagaagaataaaaaaattgttgtgtgtggaccctcaggatcaggtaaatcaacattaattagatgtataaacagacttgaagaacatcaacaaggttcaattatagtagatggaaatgaattaacagaggacactaaagacatagaaaaaattagagctgaagttgggatggtgtttcaacaatttaatttatttcctcatctttctattttagataattgcacacttgcgccaa

SEQ ID NO: 269262 - DNA, 733 bp, Unknown
  Bacterial polypeptide expressing nucleotide sequence isolated from the Sargasso Sea
ttttttttaaaagatttaaactataaagataaatcagagaaaaattcaatatttaacaaattagaaatttcaaatgtttcatttgaatataatgacggtcttaatatttttaataatttaaatttaacaattaataggggtgattgtataataataacagggccttctggttctggaaaaacaacacttgtagatattttgttaggtttaataaatccaaaaaaaggaaaaattatattaaatgataatgataatagaaaattttatttgaatagtttgacctattatgtttctcagcaaaaatttttaatcaatgaaactatttttaaaaacattactatgaacgatgatatatcatcatttgaacaattatcagcatcagaaaaagaattatttaataaatccattaaatattcgggggttgaagaaattataaattctaaaaaagaaaaaatatattattatattggagaggatgggtctttattgtcaggagggcaaaggcaaagaattgcaattgcaagagctatattttcaaatagagacttaattatcttagatgagtctaccacagcattaaatgaagaattagagaaagaagtaagtaaaaatttaataaatttgactaccttaggaaagacaataatatgtataacacatcatacttacttggttccttattttaaatatcactatgatataaaaaataaaaaattaaataaaattaaataaa

SEQ ID NO: 269263 - DNA, 805 bp, Unknown
  Bacterial polypeptide expressing nucleotide sequence isolated from the Sargasso Sea
atggctaaaattactttaaaagatctaagtcatagctatttagcaaaacaaaatagcgatatagattgggcattaagagaaattaatattgactggaaagacggaggagcttacgcattgttaggcccttctggttgtggaaagacaacattattaaatattatttctggtttattaaaaccaactaaaggtgaagttctatttgatgataaagatgtaacttctttaaacccagttgaaagagatattgctcaaatatttcagtttccggttatatatgacacaatgactgtttatgataatttagcttttccacttaaaaataggggtctttctaaaacggaaattgactccaaagtaaaagaaattggagaaatgttagaactcacaccaactttaaataataaagctgcagggcttacagcagatggaaaacaaaaaatttctttaggaagaggattagtgagatcagatgtaaatgtaattatgtttgatgaacctctaacagttatcgaccctcatttgaaatggattttaaggtcaaagttaaaggaattgcaccaaaaaattaatcggaccatgatttatgttacccatgatcaaattgaagcattaacttttgcagaccaggtagtagttatgcatgaaggtcaaatagttcaaactggcactccagtagaattatttgaaaaaccaaaacatacttttgtaggtcattttattggttcaccaggtatgaatattcttccttgtgaaattaaaaatggtcaagtaaattttgaaggaaaatgtattatcaaataat

SEQ ID NO: 269264 - DNA, 622 bp, Unknown
  Bacterial polypeptide expressing nucleotide sequence isolated from the Sargasso Sea
aatgtctactattgaattacaaaatcttactaaagcatttggtgatctaattgcagttaacaatgtctcacttaaagttgatgaaaatgaagttctatgtttattaggtccatctggttgtggaaaaactactacgttaagaatggttgctggacttgaagtagcaacatcaggtgagattttaattggtgataaaaatgtaagtaatctagatactcgagatagaaatttagcaatggcttttcaattctatgctctttatcctagtttaactgttgcagaaaatttagctaatcctcttcatgcagaaaatttatcagatgatgaagtaaaaagaaaaatctttgaagtcgcagatattcttcaattaagggacattgtaaatagaaaaccacatcaacttgcagagggagaaaaacaaagagttgcagttggacgcgctattattagagatcctgagtgttttctatttgatgaacctttaagcagattagatgtgcaactacgcgaacaaatgaggggtcagataaaagaagttttatcagatctaaaaaaagctacagttattgtaacacatgatcaattagaagctcttacaatggctacaaaattgcagttatga

SEQ ID NO: 269265 - DNA, 202 bp, Unknown
  Bacterial polypeptide expressing nucleotide sequence isolated from the Sargasso Sea
cgtgattgataatatagcatttccattgaagcttcagggtattgaaaaggcagatcggtatgctcaagctgagagagttatcgagctagttggattgcagggccgtgaaaataattttccaaatgaattatcaggcggccaacagcagcgcgttggcattgcgaggtcacttgctgtaggagccagatatatggttacttga

SEQ ID NO: 269266 - DNA, 694 bp, Unknown
  Bacterial polypeptide expressing nucleotide sequence isolated from the Sargasso Sea
ctgagtatttattggggggaagagatgattaagctagaaaacatatccctaaagctggataactttcgaactaaattcactgttgaaataaagaaaggtgagtgggttggaataattggacaaagtggtgctggcaaatcaacctttttaaaccttattgctggatttgcgcagcctgaggtgggctcactgctcattaacaatatagagatgagagatctaccagcatcaaaaagatctatttcttcgctattccaagacaataatctatttccacatctcagcgtttatcaaaatattgccattgcaataaaaccaaatctaaaactgcatgataatgaaaagaaaaaaatatttgaaataattgagtacttaaatctgagtagcaaaatacattcgagtattggaagattatcaggtggcgaaaggcagagagttgcgcttggtcgcgtaatgtcatcagataaaaaaatacttttactggatgaaccctttagccaattagatccaaatctgagaattgaaatgctagagctcatcaaaaaaattagagagaagaaaaatattacaattattatggcaatccatacgcccgcagaagcgattgattttgtaagcagattcctattgattaaagagggtgagattttgagagagctagaaccacaagattacagcattgatttatattgat

SEQ ID NO: 269267 - DNA, 268 bp, Unknown
  Bacterial polypeptide expressing nucleotide sequence isolated from the Sargasso Sea
aatgcccctatattgctactgggatgaagcaacctcagctttggataatttaactgaacaaaaaatacaaacttcaatctcacaactaatgaaaaacaaaacttctataattatagctcacagacttagtacaatagaagactctgatataatatatgttttagataaaggtagggttacagatagtggaactcataaagaattattacaaaaatctaaactttatgcaaaattacaattacaagaggaattattaaagagtaaatag

SEQ ID NO: 269268 - DNA, 871 bp, Unknown
  Bacterial polypeptide expressing nucleotide sequence isolated from the Sargasso Sea
gtaattggagtttctgatgtttcgtttgatgttaataaaggtgaaatcttttgtgttatgggattatccggaagcggtaagtcaacacttgtaaggcatattaatagattattagagccaacatctggaaaaattttaataaacaaccaggatgtaatgcaatttaataaagaaaatttacaagaacttagaaataaaaaaattggtatggtttttcaaaattttgcattgatgccccacagatctgttttagataatattgcaatgcctttagaaataagaggagtaagtaaaaacgacaggttagatgcagcaaataacatcttaaatattgttgaattacaaggatggggtaataaatacgcacatgaattatctggaggaatgcaacaaagagtaggattggccagagcattagctgctgatcctgaatttttactcatggatgagccttttagtgcacttgatccgcttataagacgccaacttcaaacagagtttattaaactttcaaaacaaatgaaaaagacaactgtatttataactcatgatcttgatgaagctgtaagagttggacatagaatagcaataatgcgagatggaagagtggttcaaataggaacccccgaagaaatagttgtaaatccatctgacgagtatgttgcagattttgtaaaaggaatttcaagattaaaagttgttcaggctaaaactattatgcaacctttagagcaatataaaaaaaacttcggggaaaattttagtaataatgaaaaagtaaatgaaaacgatatattaagcaaacttattgaaacttctgtttctaaagataaaccaattgtagttgtaaatgaccataatatgaagtcgg

SEQ ID NO: 269269 - DNA, 373 bp, Unknown
  Bacterial polypeptide expressing nucleotide sequence isolated from the Sargasso Sea
ttggaaaattttaactgtaaaattaaaaaaggtaaatttactagtattataggcccctcaggaacagggaaaacaagcatattaaagttgattgctgggctaattgaacctgaaaaaggagaaatcaagtttgaaagtcaaattttgaaagatgtaatcaataaaataacactaattcaacaaaatccttcattaatgccctggttaaatgttcacgataatattacattagcaaaattgaataaaaaaaaaattaattataaaaatatagataaacttataagagatattggtttacaagagttttcttcatactttccgcatcaattatcagggggattattacaaagggttgcaatcgcaagggcattac

SEQ ID NO: 269270 - DNA, 913 bp, Unknown
  Bacterial polypeptide expressing nucleotide sequence isolated from the Sargasso Sea
tatggtgaagctccagataagtttctaaagaatacaaataacaaccctacaacagaagagattaaaaaaaataattatatacctgctgtaagagatgcatcaatagatgttaatacaggtgaaatactagttattatgggactaagcggttcaggaaaatcaacattgcttagatgtatgtcaaaattaattgaaccaacacatggccaggtattttttgagggaaatgatttgttaaaagcttctgaaaaagagttaatagatataagacggcacaagatgggtatggtgttccaacacttcgcacttttgcctcaccgaacagttttgcaaaatgttgcatttccacttgaagttcaaggacaagaaattcaaaaaagagaggaaagagcaaaagatgtaataaagctagtaggtttagaaggaagagaaaaatattatccaagggaattatcaggaggacaacaacaaagagttggtcttgcgagatctttagcagttgaaccagatgtttggtttttagatgaacctttttctgcattagatccattaataagaaaagaaatgcaaaacgagtttttaagacttcaaagtatgctaaagaaaacgattgtttttattacccatgattttgacgaggcaattagattagcagataggatagcaataatgtatgagggattaattgttcaagtaggaacccctgaagaattgataacaaaaccagctactgattatgttgcagaatttacaaaagatataccaagatcaaaattattaaatgcagaaagcattatgaatgaaaaagataaaaaacctcacgaaaacatagttaattatagtgataaaattgaaaaaagtgcatcaaaagttttaaaatcagaaagtatattttctgtagttgatgacaaca

SEQ ID NO: 269271 - DNA, 909 bp, Unknown
  Bacterial polypeptide expressing nucleotide sequence isolated from the Sargasso Sea
aatgggaacaaatataaattcttattctgaaaaagagtatcaaaatattagaggaaaaaatatttcaatgattttccaagaaccaatgagttctttaaatccaatatatacaattgaaaatcaaattagtgaggtattaaaaattcatggaaaattttcagataaagaacttaaagaaaaatgtcttgaattactaaaacaagttcaaattccagaaccagagtcaagattatcacaatatcctcatcaattatcaggaggacaaaggcaaagaattatgattgctattgctatagctaacaatccagatttacttattgcagatgaaccaactactgctcttgatgttactgttcaaacagagatacttaaattacttcaaagtcttcaacaaaaatatcaaatgtccattttatttattactcatgatcttactattgtcagacaaataagtgatagagtttgtgtaatgtataatggaaaaataaaagaaactggttttacaaaagaaatttttgaaaatccaaaagatgattatacaaaacatttattgtcatcagagccagaagaaagagatttacattatgataaaaatggaagaagcatactctcaggagaaaatctagatgtcacatttaatacaaaagtaaaagtatcaggtagaaataaagttttatcaatcaatgcggtaaataatattagccttgatcttaaagaaggtgagactcttgggattgttggcgaaagtggatctggtaaaactactttaggtcaaacattattaagattagttgatagagaatcaaacacagatgtaaaaggtgaaattaagttttttgaagatcgaattgatgatttatctagaaaacaattcaagccatttagaaatcaaatgcagatagtttttca

SEQ ID NO: 269272 - DNA, 889 bp, Unknown
  Bacterial polypeptide expressing nucleotide sequence isolated from the Sargasso Sea
tattctgaaaaagagtatcaaaatatcagaggaaaaaatatttcaatgattttccaagaaccaatgagttcgttaaatccaatatatacaatcgaaaatcaaattagtgaggtactaaaaattcacggaaaattttcagataaagaacttaaagaaaaatgccttgaattattaaaacaagttcaaattccagaaccagagtctagattatcacaatacccacatcaattgtcaggaggacaaaggcaaagaattatgattgctattgcaatcgctaacaatccagatttacttattgcagatgagccaactactgctcttgatgttactgttcaaacagaaatacttaaattgcttcaaagtcttcaacaaaaatatcaaatgtccattttatttattactcacgatctgactattgtcagacaaataagtgacagagtttgtgtaatgtataatggaaaaataaaagaaacaggctttacaaaagaaatttttgaaaatccaaaagatgattataccaaacacttattgtcttccgagccaaaagaaagagatctatattatgataagaatggaagaagtatcctttcaggagaaaatcttaatgtaacatttaatactaaggtaaaagtatcaggtagaaataaagttttatcaattaaagcggtaaataacattagccttgatattaaagaaggtgagactcttggaattgttggcgaaagtggatctggtaaaactactttaggtcaaacattattaagattagttgatagagaatcaaacacagatgtagaaggtgaaattaagttttttgatgatcgaattgatcatttatctagaaagcagttcaaaccatttagaaatcaaatgcagatagtttttcaag

SEQ ID NO: 269273 - DNA, 715 bp, Unknown
  Bacterial polypeptide expressing nucleotide sequence isolated from the Sargasso Sea
caaaaaagttaatttcgcttacaaaaaagataatcatgttcttaaaaatatcaatttagaaattaaaaaaggcgaagtcacggctttcgttggagcttcaggggctggtaagagtacaatgttagctttgatattaaaatttataactccaaataatggaaacatttttattgatgataaaaatctcaaattaataaatacaaaagacattagaaaaaacattgcactagtacaacaacaaccttttttgttttcaggaaaaattattgatgtaataaggatgggcagaagttttactaaagaagaagttattgaatcagcaataaaagcaaacgctcacaacttcattcaaaatcttccggagaaatatgaaactaagatttctgaaagaggttcaaatttctcagggggtcaggtccagaggatagcaattgcaagagccatactcgggaacccatccattcttcttttagatgaagccactagtgcgttagatgctgaatcagaatctgaagtccaagaaggacttaatagagccatgaaagatagaacagttattgtaattgctcatagattagccactactcaagaggcaaataaaatcgttgttttcgataaaggtgaaattattgaagttgggagacatattgatttaatcaataaaactggaatttataaagaattatgtgaaaaacaattaattaaaaaaatataa

SEQ ID NO: 269274 - DNA, 466 bp, Unknown
  Bacterial polypeptide expressing nucleotide sequence isolated from the Sargasso Sea
tatgattgatttagaaataaaagatttaaaaaaaagttttggtagtgagtttgtattaaaaggtctttcttttagtgttaattcgcaaagtttattagcaatcatcggttctaatggagcaggtaaatctaccttgctgagatgctgcagccgcttaattgaaccatcgagtggaagtattaaaatttttgacaaggaaataacaactttaaatagtcataagctaggtcaaatacgaagagacgtagcgtttatttttcaacggcataatttagttcctcgactaagtgtgttatcaaatgttattcatggagattttggaaatatcactagcggtataattcgagtaacacgatggtttcattttctggctcctcaaaattctagatcaagggcaatggattgccttcggaaagtaaatttatctcatcttgccatgaaaagagttgatagcctttctggagga

SEQ ID NO: 269275 - DNA, 898 bp, Unknown
  Bacterial polypeptide expressing nucleotide sequence isolated from the Sargasso Sea
ctggagcagcacttcggcccgatgagcgaagtcgcccccggctggaagctgcgcgtattgctggctcaggcgctgttctccgatccagacgtgctgctgctcgacgaaccaaccaaccacctggatatcaacaccatccgctggctggaaagcatcctcacggcgcgcaccagcaccatgatcatcatttcccacgaccgccacttcctcaacagcgtgtgcacccacatggctgacctggattacggcgagctgcgcctgttccccggcaactacgacgagtacatgaccgccgccacccaggcgcgcgagcgtctgctgtcggacaacgccaagaagaaagcccagatcgccgagctgcagacctttgtcagccgcttctcggccaacgcctccaaggccaagcaggcgaccagccgcgccaagcagatcgacaagattcagctcgaagaggtcaaaccctccagccgcgtcagcccgttcatccgcttcgagcaattcaagaagctgcaccgccaggcggtgaccctgcagaacgtcagccagggcttcgacggcgaaaccctgttcaagggcctgaacctgcagatcgaggcgggcgagcgggttgccatcatcggccccaacggcatcggcaagaccaccctgctgcgcaccatggtcggtgaaatgccacccatggccggtgaagtgaagtgggctgaaagcgccgacatcggctacttcgcgcaggatcacgccgacgacttcaaggacgactgcaccctgttcgagtggatggcgcagtggacccagggcggcgaacagctggtacgcggcaccctgggccgcatgctgttctccaacgacgagatcggcaaatcggtcaaggtgatctccggtggtgaacagggccgca

SEQ ID NO: 269276 - DNA, 539 bp, Unknown
  Bacterial polypeptide expressing nucleotide sequence isolated from the Sargasso Sea
gatgactgccctgcgcgcggaaaacctgcacttcgcctatcaggacaaggtcgtgctcgacgacgtctccttcagcctgcccagaggcaagctgatcggcatcgtcggccccaatggcagcggcaaatccacgctgctcaaactgctcgcccgccagctaccgctgcaacgcggcaccgtggagatccatggcaagccgctgctgggctactcgctcaaggcgctggcgcgagagctggcctttctgccgcaacggccggtgctcgccgaaggcatccgcgtggaacagctggtgcagtacggccgccatccgcaccagggctggttcaaccagtggagcgcggaagacgcccgccaggttgcacgcgcctgcgaggtgatgcagctcgatgcgatctggcaacgcagcgccgcctcgctctcgggtggccaggcgcaacgggcctggctcggcatgatcctcgcgcagaacaccgacctgatcctgctcgacgaacccaccagcgcgctggacatcggccaccaggccgaagtgatgg

SEQ ID NO: 269277 - DNA, 602 bp, Unknown
  Bacterial polypeptide expressing nucleotide sequence isolated from the Sargasso Sea
tatgagtaaattatctgactatgatgggccgatacttgaaattgaaaatttatcaatttcatttttcactaggctgcgagaaatacctgccgttatggatttttcggtgacagtccaacctggagaagctgttggtttagttggtgagtctggctgcggaaaatcaactgtggcactaggcgttatgcaagatcttggcgtcaacggaaaaatcgttgacggatcaataaaatttaaaggccaagatttaggaaaactatctcctgaagcccttagagatattcgaggtaatgaaattgcaatgatttaccaggaacccatggcttccctaaatccagctatgaagattgctaatcaattaatggaagttcctatgattcatgaaggaatttcgaaagatgaagcctacaggagagcacttgaggttgtaaatgacgttaaactccctgatccagaaagaattttaaaatcttttcctcatcagctttctggaggtcagcagcagcgtatagttatcgcaatggcattaatgtcaaaaccgtcacttttaatattagatgaaccactaccgctttggatgtactgtagaagcagcgtcgtcg

SEQ ID NO: 269278 - DNA, 309 bp, Unknown
  Bacterial polypeptide expressing nucleotide sequence isolated from the Sargasso Sea
cctgctcgaactcgatgacctctgcctcgcctacgacacgccgcacggccgccgcaccgtggtcgacgggctgagcctcgcgctgccgcgcggcgacatcggctgcctgctcggcgcatccggctgcggcaagaccaccgtgctgcgcgcgatcgccggcttcgagccggtgcggatggggcgcatcgtgctggacggcgtgcccgtcgcggcgccgtcgctcgacgtgccgcccgagcggcggcgcatcggcatgatgttccaggactacgcgctgttcccgcacctgagcgcggcggacaaacgtcg

SEQ ID NO: 269279 - DNA, 322 bp, Unknown
  Bacterial polypeptide expressing nucleotide sequence isolated from the Sargasso Sea
caaagaatatcaatagcaagagcacttgcaacgcagccaagacttcttgtttgtgatgaaccaacttctgcgttagatgtaagtattcaagcgcaaatattaaatttattaaaagatttacaagaacaattaaatttaacaatcttattcataagccatgatttaccagtggtaaggcaaatgtgtgatcgaatagcagtattaaaaaatggaaaactttgtgaaatttcaatgactgaagaattatttaaaaatccatcacatgaatacacaaaagaactacttacattaatgccaaaaatagaatcaatttataattagg

SEQ ID NO: 269280 - DNA, 331 bp, Unknown
  Bacterial polypeptide expressing nucleotide sequence isolated from the Sargasso Sea
aggtcagagacaaagggtatcaatagcaagagctcttgctactcaaccaagactacttgtttgtgatgaaccaacttctgctttagacgtgagcatccaagctcaaatattaaatttattaaaagatttacaagaacaattaaatttgacaattttatttattagtcatgatttaccagtggtaagacaaatgtgcgatagaatagcagttttaaaaaatggtaagctttgcgaagtttcaatgactgaagaattatttaaaagtccaaatcatgaatatacaaaagagttattaacattaatgccaaaaatagaatcaatatataattaa

SEQ ID NO: 269281 - DNA, 808 bp, Unknown
  Bacterial polypeptide expressing nucleotide sequence isolated from the Sargasso Sea
atgaataaaaatttttttgaaattaagaatgtagattttcaagtaggaggtaaaacaaaagttaaaaatctttctttacatattgaaaaaaaaggagaaataatttgtttattaggcccttctggcattggaaaaactacaatactgagatctattgctggattagagaaaataagcaacgggtcaatctctttaaaatctaaagtgctttcttctaaaaatgattatgttgagcctgaaaatcgaaatatagctctttcttttcaagaaaacgctttgtttcctcattatacaataaaaaagaacatatattttggcgcagatagaaataaaggaaatggagtaaggaaaattgatcccagaaaaattattaaaattttaaatattgaaaaaatattaaataaatatccacatcagataagttctggagaagctcaaagagtctcacttacaagggcactcgtatctaaccctgatttacttttattggatgagcctttgtctaatatagatgaaaattttaaagaagaaattcaggttaaattaaagcaaattttaaaagactataaaattacaactattatagttacgcatgactcttacgaggccttttatttaggcgataaatgtggaattatattagaaaaaaaacttaaacaattcgatgaaccttataatgtttatcattatccaaactctataaatgtggttaattttttaaatagaggagtattagtcccagcaaaagtgaccggtcaatatactctccaaaacgatgatcttggcttaataaagggaaatttgtaac

SEQ ID NO: 269282 - DNA, 502 bp, Unknown
  Bacterial polypeptide expressing nucleotide sequence isolated from the Sargasso Sea
atggcagaacactataggcttgttgcacaggatatatttctatctgatggcacaattgcggagaatatcgcttttggaatacataaaagtgaaattaatatcgataaagttagggaaacgcttaaactagctcaactcactgaattaatagacagcttagataaaggaattgaaactcccgttggagagagaggtatacaattatcaggaggtcaacgacagcgtattggtatcgcaagagcgctttatcacgatgcagaattattggtgtttgacgaagctacaagctcgcttgacggaataactgaaaatatgattatggagtctataacaaacttgactggtcagaaaactatcgtgataattgctcacagattaaaaactgttcaaaaatgtgatcaaatattttttatggatcaaggtaaggttattgactatggtagctatgaaaaattaattgaaacaaatgagctttttaaaaaaatggcttcacacgcataat

SEQ ID NO: 269283 - DNA, 541 bp, Unknown
  Bacterial polypeptide expressing nucleotide sequence isolated from the Sargasso Sea
atgtcgaatattaaaaaatttagaattaaatcatttaaggaagataagccagtcttaaggcttgataaaatttctataaaatttggtaaaaaaataatcttagataatttagatcttaaacttaataaaaatcagatattaggagttcttgggcctaacggtgctggaaaatcgacgattatgaatataattttgggcctagtaaaacaagattatggttcagtttttattgatacaaaaatagtggataaatacccaatacatgaaagaacaaaaaaattttctctgtcagtagtacctcagcactcagggtttttttttgatttaactgtttatgaaaatttaaaagctattgctgaaattactattgataatatcagttatagaaatgaaagaattgattcttcaatttcaaaattcgagttagattcgataagagatttaaaagccaagcaatgttccggtggtcaacaaaaacgtctttcaattgcgatggcattaatatcagatccagccatattgcttttggacgaaccttatg

SEQ ID NO: 269284 - DNA, 544 bp, Unknown
  Bacterial polypeptide expressing nucleotide sequence isolated from the Sargasso Sea
agttttgattaatggctttcaattagaaaaaaatagaattgaaattcttcaaaagataaattttatttctccttatattgaattaccaaagaaacttacagttaagcagaatttaattgtttatggaaaattgtattctgtcaaaaacttaaatagaagaatagattatttagtagaagaactgagattgcaaaatttacttgatagagtgactggagaattatcttcagggcaaaaaaatagaataagcttagcgaaagcgattatcaataatccatctgtcctattactcgatgagcctacagcttcacttgatccagaaacaggagattttgtaagaacctttttagaaaattataaaaaagaaaaaaaggtatctatattattagcatctcataacatggatgaagtaactagattgtgttcatcaataatgatgatgaaaaatggtttaataatagatcaaggtaaaccaaatgatttagttaaaaaacatggaagacaaaatctagaggaagtttttttaaaacttgtaaggaattaa

SEQ ID NO: 269285 - DNA, 337 bp, Unknown
  Bacterial polypeptide expressing nucleotide sequence isolated from the Sargasso Sea
tatgtttaaatttgaaaaactagtttttggagatttgggttggggagatgaatttttatttgcaacattaatgacaattctagttagtatatgttctatgggtttaggagtgtttatagctatttttgcagcttgggcgaaattaagtttaaataaatttttattatttttatcgaatttatatacaacagtaatacgaggaattcctgaattgttagtaatttacttaattttttttggtggcagtgctgcaattatgaatattgcaaaatcatttggataccacgggtatattgaacttaatgcttttactattagcgtcattgctataggaatt

SEQ ID NO: 269286 - DNA, 547 bp, Unknown
  Bacterial polypeptide expressing nucleotide sequence isolated from the Sargasso Sea
agtcatcaatggaatagatattgaaaatcaaagggtaaatatcctagaccagctaaattttatatcaccatatattgaattaccaaaaaaactaagtgtgaaacaaaatctggaggtttacggaagactttatgatgttcaaaatctcgatacaaaaattgaatacctatcagaaaaattgagactcggtaaaatcataaataaaatcactggagaactttcctctggacaaaagaatagagtaagtcttgctaaatctattattaatgatcctgctattttacttttagatgaaccaacagcatctcttgatcctgaaacaggagattttgttagaagttttttggaagattatcaaaaagaaaaggaaacatccattctgcttgcttctcacaatatggctgaagtagaaagactatgctcatctgtattaatgatgaataatggattaataattgatcgaggaagcccaagagatttaattaaaaaacatggtcgaaaaaatatggaagaagtttttttagaacttactagggaaaaattatga

SEQ ID NO: 269287 - DNA, 295 bp, Unknown
  Bacterial polypeptide expressing nucleotide sequence isolated from the Sargasso Sea
aatgtctttttttgaaggtaaaggaatgacaggagggtatggaggagtagatattatttcctcatgcaccattaatgttaatcaaggtgagattgttgcgatcttaggtcctaatggagctggaaagtctacagcaatgaaagcaatgcttggattattagatcttaaatcaggagtggttacaattgatggaaaagatatatcaaaactatctcctcaagatagagttaaacaaggtatttcttttgtgccaccaactcgaaatgtttttacaggattaacggtaagagaaaaa

SEQ ID NO: 269288 - DNA, 416 bp, Unknown
  Bacterial polypeptide expressing nucleotide sequence isolated from the Sargasso Sea
tgatgtaaaggaactaagaataaaaattgattatcttactgaaaaattaagacttaatgaatttattgataagataacgggagaactttcctctggtcaaaagaatagagtaagtttggctaagtctataatcaatgatccactaattttacttctcgacgaaccaactgcgtctctggatccagaaacaggggattttgttagaagttttttagaagagtaccaaaaagaaaggggggcttctattcttcttgcttcacataatatgtcagaggttgaaaggttatgttcttcagtgttaatgatgaataaagggtctatcattgatcaaggaactcccaaagaactaattaaaaaacatggacggaaaaatatggaggaagtttttttaaaacttacaagagatttgctatgaa

SEQ ID NO: 269289 - DNA, 559 bp, Unknown
  Bacterial polypeptide expressing nucleotide sequence isolated from the Sargasso Sea
atgactgatgctgtaattaaatgtgaatctgtttacaaaatatttggtgcaaatgctaaaaaaatgctccaagagtcaaatggaaacgtagacgcaaaaacatttcaagaaaaaggatgtattgtaggcgtaaataatgcttcctttgaagtttcaaaaggagagatgttagttgtaatgggtttatctggttctggaaaatctacattattaagatgcatttctagattaacagatgcaactggtggaaaaatttatatagaaggtcaagatctactttcattaaaagaaaaagaacttattgaacttagaagaaataaaatgggaatggtattccaaagttttgctttacttccacataaaacagttttggaaaacattgcatttcctcttcaaatcaaaggaattgaaactgaaaagagtatcgctaaagctatggacatggttaaacttgttggtcttgatggaagagaaaattattttccaagagaactttctggcggacaacaacaaagagaaggtatcgctcgatcattggctgtggaacctgacatttggt

SEQ ID NO: 269290 - DNA, 530 bp, Unknown
  Bacterial polypeptide expressing nucleotide sequence isolated from the Sargasso Sea
gatgccaagtttaaaagatattaaaactcaaattaactctgttggttcaacaaaaaaaattacgtcagcaatgaaaatggttgctgctagtaagttacgtcgttcgcaagagaaagcagaggaagcaaggccatattcatctagattagaagaaatgttgtcttctttagccacatcatctgcttcaggtgaaggagttattaaacttttatcaggaactggtaaagatgaaaactatcttattgttcctgtaaacgcagacaggggtttatgtggtggtttcaatagtagtattaataaagaatcatttaaattagctaaatctttagaaaatcaaaataagaaagttcaatttttacctgttggaaaaaaaagtagagatttctttaatcgtgttatgaaagaaaatattgttgagagctttgttgataataatgtttcaacttcaggttatgagtctgcgcttaaaatttctaataagatacaagagttattttttggaggatcatttgataagtgtattttggttt

SEQ ID NO: 269291 - DNA, 844 bp, Unknown
  Bacterial polypeptide expressing nucleotide sequence isolated from the Sargasso Sea
gaactcgaccgcggccacggcattccctgggagggcaactactcctcctggcttgagcaaaaagacgtaagactcgagcaggaagaaaagagcgcctcggcacggcgcaagagcatcgcctcggagctcgaatgggtgcgcgccaatcccaagggacgccaggcaaaaagcaaggcgcgtattgcgcgctttaacgatctcgtcgatcaggagtttcagtcacgcagcgaaaccaacgagatctacatcccgccggggccgcgtttgggcgacaaggtgatcgaagtcaaaaacctgcgcaaggcctttggtgacaaactgctgattgatgatctttctttttctttgccgccgggcgggattgtgggaatcattggacccaacggcgcgggcaagacgacgctctttaaaatgctgacgggtgttgaagcccccgacagcggtgagattgatcacggcgataccgtcgacatcgcttatgtggatcaaagccgcgatgcacttgatgacagcaaaaccgtttgggaagaaattgccgacgggctagatatgcttgaagtcggcaagtatcagacgtcgtcgcgtgcgtatgtgggacgcttcaacttcaaaggaccggatcagcaaaaacatatcgggtctttgtcgggcggtgagcgcaaccgcgtgcatctggccaaggtgttgcgccaaggcggcaacgtgctgctgctcgatgaaccaacgaatgacttggatgtggaaacgctgcgcgcgcttgaagtcgcgctgacagattttccaggttgtgcggtagtgatctctcacgatcgctggtttcttgatcggatcgcgacgcatatcc

SEQ ID NO: 269292 - DNA, 721 bp, Unknown
  Bacterial polypeptide expressing nucleotide sequence isolated from the Sargasso Sea
catgtctagttcgattcttcctttacgggcgcggaacctgcgctatgtggtcgaagggaaaaccctgatcgacgatatcagcctttctattcttcccggcacgttcaacgtcgtcctggggcctaacggtgctgggaaaagtctactcctgcgtctgctgcacgggctactcgatcccacttccggtactgtcgactggatgaatagcgcaaacggggatctgcgccggcagcaggccatggtgtttcagcggccggttctgctgcggcggtcggttgaggcgaacgtggccttcgctctcaagtcgctctcgatcccccgcgtggagcacgcgcggctgatcgatgaagcgctggaccggtcgggattggccgcatcccggcgggtgctagcccggcttttgtccgtcggcgaacagcaacgcctagcggtggcccgggcactggcgggcgggcccgatgtgatattcctcgatgaaccgaccgcgagccttgatcctgcgtcggtacagcggatcgaaggcctcttgtcgaaggcgaaccggaacggaacggcaattgttcttgtgacgcatgatatgggtcaggcccggcgccttgcccgtgaaatcctgtttctacatcggggacgattgattgaacggcggcctgccgaaaaatttttcaatcggccggaagcggatgtgtcccgcgcgtatttagaaggaaaaattgttgtttag

SEQ ID NO: 269293 - DNA, 821 bp, Unknown
  Bacterial polypeptide expressing nucleotide sequence isolated from the Sargasso Sea
tatgttagctgttgaagttcaagatttgagttattctataaataataaaaaaattttaaacaatattaattttaatttaaaaaaagatactatttcatgcatcctaggaccttctggaagtggtaaaactactttattaaaacttattgcaggattagaaaaagtacagtctggaaaaattataatcaatggtgaagcggttagcagcacaaaaaaacatttgccaactgaaaaaagaaaaattggttttttattccaagactatgctttgtttcctcatttaactgttaaacaaaatttagagtatccaattaactataaaaattcagattataaaattgaagatattatagatttaataaaattaccaaattcattaaataaatttccacatgaattaagtggcggtgaacaacaaagagtggcgttggccagatcaattatttctcagccagatttacttttgttagatgagcctttttctagtctcgatttaaatctgcgagaagaaattagagatgaaacattacatttattacaaaagtcaaacatttcggttattattgttacacacgatccttttgaagctatgtttatttctaataaaataaacataatggatactacaggttatattattcaatctggcagtcctgcagacctttataagaaccctaaaaattcatatgttactgaattttttggtgaaacaaatagatttcgtggtgtggttaataactcctatgttgaaacgcctgttggaaaaattaaagcaccaaatgatttagaaaataaaaatgttgaggtgcatgttaggccac

SEQ ID NO: 269294 - DNA, 942 bp, Unknown
  Bacterial polypeptide expressing nucleotide sequence isolated from the Sargasso Sea
aaaactatgtgtttgaagactggcttttaccgggcattaatctttttggtgatctcatgtccctgtgcgcttgtcatttctattccacttggttatttcggagggattggggcagcttcccgcaaaggcatattattcaaaggttccaactttcttgacctcatgaccagagtgaacaccgtggtgatggacaaaacaggtacgttgaccaagggagtgtttgaagttcagaaagccgtgaccatggacggaattactacagattggcttagtctggcggctgctatggaaagcaaatccacccatcccatcgcaaaagccattacagaatatactaaaaagcagggaggagaaatttcagaacccgagcaacaggaagaaatagccgggcacggtctgaaaggaaaagtaaatggtaagcatgtgctcatcggcaatcaaaaactgatggacaaggaagggatagttacctgtgctgatgctgccgaggaggtcaataccgtcattcatatagccgttgaccaaaaatatgccggttacctggtgatagcagatgaactcaaagaggatgctgcccaggcaatcaatgcattacacaaatcaggagttcgggaactgatcatgctgtcaggagacaagaatgcagtgacccaacaagtggcaaaatcactcggaatagataaagcctttggtgatctgttaccggaacaaaaggtggaaaaggttgaagaactgaaaaaggataccaaccgtatcatcgcttttgtgggggacggtatcaacgatgctcccgtccttgctctggcagatgtgggcatggcaatgggtggtttgggtagtgatgccgccatcgagacagccgatgtggtcattcagaccgaccagccctctaaaattgctactgctattcaaataggtaaacagactaaacggatcgtaggc

SEQ ID NO: 269295 - DNA, 640 bp, Unknown
  Bacterial polypeptide expressing nucleotide sequence isolated from the Sargasso Sea
agttagagatccaaaagccttcttgtttgatgaaccattatctaatcttgatgctgaattgagagtaacaatgagaaaagaattatcagcacttcatgaaaagataggcggtacaatgatttatgttacacatgatcaagttgaggcaatgacattggctgaccaaattgtagttttaaataatggttatgttgcacaagctggagcgccacttgatttatataataatcccagtgatatttttgtagctggttttattgggtctccaaaaatgaattttataaaagttaatgcaattgataatgctggttcatttaatttagtttcagatgcattaaatttgcaaacaaatcacaaaaatttacaaaataattcaccttattctcttggaataagacctgaacatatagaagtttgtgaacaccaagactcagatttaaaagtaaatgttgattttactgaacaactagggagtgaaacttatttttattgtcagggggaaggtataaaacaattaatcgttcatcataccgggcagtataaaattaataagggagaagaattatatctccgttttaaaagagattcagtacatctttttgaagagaatgggatgtctgtatcaaaaaaaaataattaa

SEQ ID NO: 269296 - DNA, 547 bp, Unknown
  Bacterial polypeptide expressing nucleotide sequence isolated from the Sargasso Sea
attggggattttggctggcttagataccgccagtagtggtgaagtttatctggctgggcaacccttacatctgttgtctgatgatgccagagccgaactgcgggcccgtgcggtcggttttgtctttcaatcttttttattgctaccgggtttaacggcactggaaaatatcaccttaccggctgaactggcaggcttggcggatgcaacagcacggggtcgcgagttgttagccctggtcggactgtcgcaccgggctgatttttatcccagccagttatcgggtggcgaacagcagcgggttgccatagcccgggcttttattaccaagccggccattttgtttgcggatgagccttccgccaatctggatgccagcaccggcgtgatgatcgaagacttgttgtttgaattaaaccagcaacaaggcaccactttagtgctggtgacgcataatccggccctggccaaacgttgtcgctatcaattgcagatgaatgctggtgtgttgcaacaacagccgttggaggtgacggatgtggcctag

SEQ ID NO: 269297 - DNA, 625 bp, Unknown
  Bacterial polypeptide expressing nucleotide sequence isolated from the Sargasso Sea
atgagccagatcttctttaccactattaacaacgaccagtacgacttcatgaccgagtgggacaccacagtcatggacaagtgggtggccgagaatattgggctgtcacgctgcaaggatgaggctgagttgttcgagacaaagtggtttgattaccgcgacatgcacccgcttatggccacatgccttttcactgaggcatacaagcgccagtactcatacatcatgctgtcgcatggccgcgaacactatgagacggccccattcacaaccggtttgaaacgtgtgccgtatcaggagctgtcgacggcgaacaaaacgtctctctggaaagcacgccagtttgccgaccagtactgctgctcttatgactacttcatttctaccgttctgtccgcagctgcacgccgtctgtgggacaaattgcctcgcccccagcatctctggcagcccgagctgatcgagatattcgaagagaagttagccaaacgcgctgtaacccgtctggatgactctctggtgagttttaagcatctgggagatatgcagcacgacccgattcaagaacgctattttgagtgggttctggagcgtctgcgtggcattacccgagacaagcgcgtcc

SEQ ID NO: 269298 - DNA, 202 bp, Unknown
  Bacterial polypeptide expressing nucleotide sequence isolated from the Sargasso Sea
  misc_feature (22)..(22): n is a, c, g, or t
ttgtttgtggtccctctggttncaggtaaatctacattgattagatgtatcaatagattagaagagcaccaagaaggagatataattgttgatggaaatgagctatcagaaaaaacaaaagatattgaaaaaataagagctgaagttggaatggtttttcaacaatttaatttatttgccacatctttcaatattagataat

SEQ ID NO: 269299 - DNA, 469 bp, Unknown
  Bacterial polypeptide expressing nucleotide sequence isolated from the Sargasso Sea
aaagagatttgggaagtcgcaagaagggcaaagctaagtgaacttattaaaacgttgcccgatggcatgagtactgttgtaggtgaaagaggcttaaaactatcaggaggagaaaagcaaagagtggccatcgccagaactcttttaaaaaatcctccaattctaattttagatgaagccacgagttctttggatactcttacagaaaaagagataaaggtttcattaaataatttagcaaaaaaaagaacatctataatcatagctcacagactatcgactattgtagatgcagataaaattcttgtatttgaaaaaggtaaaattattgaacaaggtacacatattcagcttttaaaaaagaaaggtctttatgcagatatgtggaacacacaacagacaatcgaaaaagctgaagagacacttcagaatataaaacctgaatataaaaagttacttcgaaaataaa

SEQ ID NO: 269300 - DNA, 960 bp, Unknown
  Bacterial polypeptide expressing nucleotide sequence isolated from the Sargasso Sea
cgaccgcaacccttattacgaagctggcgacattttctccgtcatcatggccaccatgatcgccttgctttctttgatggatgtggccgtcccagccgcagctgttgcgaccggccgtctggcctctcagcgtgtcattgatctggtcaagcaagtgccgctgattgaacccagccccggcagtgagctgttggcggacccgaaggcgatcgttgcatccatcgacaagattaattttcaggatgtccattttgcatatccgtctcgtcctgatctgcgcgtccttcgtggagccaacgttgagatcctcaagggcgagcactgcgcgtttgtcggctccagcggctctggcaaatcaacgatcgtccagttgcttgagaagttttaccaccctgccgccgggaagattatgatcaacgataccattgatttggcaaccatcccaccgatctcttggcgtaagttggtcggttgcgtcggacaagaacctgtactcttcgcgaccagcattcttgacaatcttcgcggcggtgatgtgtctgtctcccgcgagcgtcttattgaagttgccacacaagcgaacgcgttcgatttcatctccagttttcctaaaggcatggatacgatggttggctgcggcggtgcgtctttgagcggcggacaaaagcagcgcatcgccatcgcgcgcgccttggttcaacacccgcaattgttgctgttggatgaagccacctctgcgttggatcctgtctcggaaagccaggtgcagggcaccatcgattccattgttgcagaagtttctatgacgattatcaccattgcgcaccgtttgtcaaccatccgtcgtgcggacaagatttatgtcatcaaggaaggagttgtcgcggaatctggcggccataaggagttgctgaagcggcaaggcttgtactttgaattgtgtcttgccagccaggagtc

SEQ ID NO: 269301 - DNA, 493 bp, Unknown
  Bacterial polypeptide expressing nucleotide sequence isolated from the Sargasso Sea
tgtatttgttacgcatgaccaggaagaagcgctaacaatgtcagaccgtattgctgttataaatgagggtgaaattcaacaaattggggagcctgagcaaatatatgaaagtccatcaaataagtttgtggcaaattttataggtgaggcaaattttttatatggtttttgcaaaactaatggtgaaaacggtttgtgtgaactttatactggtcattcaatcaacttgtctgttccttcacacataaaacaaaatgataaagtaacaatctttattagacctgaaagaattaaaattgtaaaatcttcaaaagataaaagtcaacttagtatttctgaatttacttatcttggcaatgccgcaacaattcaactaaaatcaaatgagcaaataataaatgtaaacttacctattgaagatttaaaagtttttaaaaaaggcgattacgttgatattgaatttcctaaaggaagtgctcaggttattgactaa

SEQ ID NO: 269302 - DNA, 553 bp, Unknown
  Bacterial polypeptide expressing nucleotide sequence isolated from the Sargasso Sea
atgtctaacacggtaataaaatgtgaaaacgtttttaaaatttttggagcaaatgccgaaaagatgctcaaagaatctaatgggaatgttgaccccagaatatttcaagagaatggatgtatagtaggagtaaacaacgcatcttttgaagttttaaaaggggaaatgttggttgttatgggtctatctggttcaggcaaatcaacattgttaagatgtatttctagattaacagacgcaactggtggaaaaatttttatagaaggtcaagatttattaaaattaaataataaagaacttattgaacttagaagaaataaaatgggaatggtttttcaaagctttgctttattacctcataaaacagttgtggaaaatattgcttttccacttcaaattaaaggattagaaatcgataaaagtattaataaagcaatggatatggttaaattagtaggtctcgaaggaagagaaaactattttcctagagagctatctggcggacagcagcaaagggttggaattgcgagatcattagcggttgagcctgaca

SEQ ID NO: 269303 - DNA, 673 bp, Unknown
  Bacterial polypeptide expressing nucleotide sequence isolated from the Sargasso Sea
tattattgggccgagtggatgtggaaaaagctctctgttgagagttttaaattggcttactcccccagataaaggagaggtttggttggaaggtaaaattgttggctctttatcttccaaactaactattaaagaatcaaaattgttgaatagttaccgtgcaagaatgggaatggtttttcaacagtttaatgtttggcctcatctaaatgtattagaaaatgtcgttagagctcaaatggtcgtggctaaaagaagtcaggctgaagctgaagctaaggctttaaagattttagatgaagtaggattatctaccaaaatagatgaatggccggatcatatttctggagggcaaaagcaaagattggctatagccagatctttggctatggatcctatattaatgctacttgatgagccaacctcagcactagaccctgaacttgtaggcgaggttttgtcggttttaaggcggttagtaaataatggaatgacaatgttaattgttactcatgaattaggttttgcttctaaatttggcgatcgaatagtgtttatggatgggggcgaaattgttgaagaaggagctccgaaaaaaattcttagcatgcctaaaactcaaagattaaaaatgtttttagaaaaacttaacattacttcttttaaacaatag

SEQ ID NO: 269304 - DNA, 607 bp, Unknown
  Bacterial polypeptide expressing nucleotide sequence isolated from the Sargasso Sea
catggcagcagatgcagtagctttgctagaccatttaggtattgataaagctcatatagtaggtgcttcaatggggggtatgattactcaagtaataggactagatcattctgagagagcactttcattaacaccaatcatgtcgagcccaggtgctggaatagaagatgatacgctttcaccaccgactgaaagtttaatgcaaggcattataaaatctatggaacacaacttgaaaggtgaatatttagaagggctagtctgtacttatagagaactaacggggtctcgttttccgtttgatgaagaaaagtttagagaaaaagcacaagaaggaatagatcatgggcataatccttttccaggtcacggagctgctgttagttcaagccctcatcgtaaagatcgattaaaagatatcaatttacctactttagtaattcatggaacagaagatgccattcttccttttgaccatggccaagcactagcagatggtattcctaattctgaactaatgactttggagggagtaggacatgaaatccctgaacagctgaacgacgctatcgtaactaaattgatagagcactttaataaagcttaa

SEQ ID NO: 269305 - DNA, 854 bp, Unknown
  Bacterial polypeptide expressing nucleotide sequence isolated from the Sargasso Sea
aatggttacttcaattatatgtcagccaattccgaaagttctcttttgagaaacggtaaagtcttgactagacgagacctgaatggaagtgattctgcctccaagggaatcaaccttgagaagcatctaatgaatgtcaaagatgccagaaaatccgttgagggaggaaaaattggtttggatgaaagtggctttgagatcttggaacataaaacaaaagatagaaacctagattttttagatagccggctggtaattgactcctactataatgaatgcgctcaaatagtgagagaaaagagtggggctaaatgtgttataccctttgaccacaacataagatccgcagaggggaaaaaatccaagaaacaactctctgggggtcaggaggttcagggacctgcgcacgtggtacatggcgactacacacttcgtagtgctccggatcgcataaaccaactatcccaaaaactcactaaaaacgatactttaagttcggtgttagataaagaagagcgcttaattacaaaaacccaagcaaatgacattctgactggaagacgcttcgcaattattaacttgtggcgaaatattcgccccattccagtggagacaaatcctatcgcgttatgtaatgcgtccaccgttagcaaacaggatttagtagtttttgaaattcattactcagaacgaatcggggagaattatttttctaaacataacgagagacacgagtggttcttctaccctaacatgaccattgatgaggcccttctgataaaacaatgggatagccacggagatctacctacgtcagaagaaaaggtgtcaggaacaaagaagactactgctaa

SEQ ID NO: 269306 - DNA, 367 bp, Unknown
  Bacterial polypeptide expressing nucleotide sequence isolated from the Sargasso Sea
tatgattcaaataagtaacttatcatatacgttcgctaaaggtgggggtgtttctaatattgatatgtcaatgaatgatgatgaatttgcattcttgattggcccaacgggttcaggtaagactacattgcttcgattaatttatatggatttattacctcaagtaggaaatattattattggtgattatgactctgatggaatcaagcaaaaacaaatcgcacttatgaggagaaaagtcggaatggttttccaggattatcatttattgagtgaccgtaatctctttgaaaatgttgcgttgccacttcatgtaattggatatagtaaagatgaaatagtcgatcgtgtcaaagattctcttgag

SEQ ID NO: 269307 - DNA, 478 bp, Unknown
  Bacterial polypeptide expressing nucleotide sequence isolated from the Sargasso Sea
tcaatgcaacctaaagttattattgctgatgagcctacaagtgcactagatgtaattgtacaaagacaggtaatggaaacactttatgaagttcaagaaaacttaggagcagcatgcatactaattggccacgatatggggttaatggcgcaatttgctgacaaaattggcataatgtacgctggaaaaatggttgagatgggaactgttttagatatatttaaaaaacctaaacatccatacacaagacttcttattgatagtcttccagatacaaatagcaagcgtgatctaataggaattcctggaatacctccatctcttctaaacattgaagaaggttgtagtttttgcctaagaataggacaaaaaactacttcaaagataccgtgggtaaaggtatcaaaaaatcattattatcaaaaatgttctaaatgttctaattacggtaaatcaaaaaaaagagtaaaaggataat

SEQ ID NO: 269308 - DNA, 913 bp, Unknown
  Bacterial polypeptide expressing nucleotide sequence isolated from the Sargasso Sea
tttagttgagattgatgatgcggaaaggcgctttaaagcttacccacacgagctttcaggtgggcaaagacagaggattatgatcgcaatggctctggttaataaaccgcaattactaattgctgatgagccaacaactgcgttagatgtaacaattcaagcgcaaatattggacttgatgtctaaactaaaaagagatctaggaatgtcgatcttatttataactcatgaccttggattggttaaagagttttcagatcaagtttgtgttatgcaaaatgggaatatagttgaaagtggtgatacaagtaatgtatttgagaaccccaaacactcttatacgcaaaaacttttaagcgcagaacctcagcctaaagaagacattaattcagaagaagctccttttctagaaatacaaaatttagatgtttattacgacataccaagcattaatttttttaaaaaaaatagattccatgctgtaaaagatacttcgcttaatatttacaaaaataccactataggcttggtgggagagtcaggctccggcaaatctacattaggaaaagcaatcgcaaatctaactaagtttgaaggaaatatatattttgaaggtaaaaacataataagctcttcaaaagaaatcaaaaaacatattcagattgtattccaggatccatatggatctttatcaccaagaatgacaattagtgaaattgttggagaaggcttaggcgttcactttaaattatcaaaactggaaacacaaaataggattgataaagttttatctgatgtgggtattgagttgagtgcaaaaaataaataccctcatgaattttctggtggacaaagacagagaatagcaatagccagatctttaataatgaatcctgcttttatgattttagat

SEQ ID NO: 269309 - DNA, 517 bp, Unknown
  Bacterial polypeptide expressing nucleotide sequence isolated from the Sargasso Sea
tatgcatgctttatcgataaaaaatctctctaagaaatataaaagcggtgttgaagcactaaaatctgtaagttttgatgtacagcagggagatttctttgctttactcggtccaaatggtgcagggaagacaactgctataggaatcattacatcacttgtgaataagtcatcaggattaatagaagtttttggtcatgacctagacaaagaattagcaaaagcaaaatcatgcatcggtgtcgtaccccaagaggttaatctgaaccttttcgatttcaacttcaatattctagtaaatcaggctggtttctatggcatcccaagaagtgagggcaagaagagggctgagcagtatttaaaaaaaatgcaactttgggaaaaaagaaataccgacgccagaagtttatcaggaggaatgaaaagaagactgatggtcgctcgggcattggttaatcgaccgaaactcctgctgcttgatgagccaactgcaggcgttgatattgaaacaaggaga

SEQ ID NO: 269310 - DNA, 696 bp, Unknown
  Bacterial polypeptide expressing nucleotide sequence isolated from the Sargasso Sea
aagaaaataaaatgactgctggatatggcgatggtccagatataatcacttcatgttcaataaatgttaacaaaggtgagatagttgcaatccttggtccaaatggtgcaggaaagtctaccgcaatgaaagctatgctcggactgctaaatttaaagtctgggtcagtattaattgatggaaaagatatatctaacctgtctcctcaagatagagtaaaaaaaggaatttcatttgttccacagaccagaaatgtttttgcagaactaactgtaaaagaaaatttacaaataggagcttttttaagaaaagatgacattgataaagtaattgaggaaatttatgaattatttcctattttaaaagaaaaaaattctcaaatagttggtcaattatctggaggccaaagacaacaagtggcactgggtagagcactaatgataaaaccatcagtattaatgttggacgaaccaactgctggtgtgtctccaatcgtaatggatgaattatttgagcatattattaaagtcaaggaaaccaatgttggaatcataatggttgagcaaaatgcaaaacaagctttaagtatttctgatcgtggctatgtattagttacaggagaaaataaattcgaaggttcagggaaagaactacttaaagatcctgaagtaaggagatcatttttaggagcttaat

SEQ ID NO: 269311 - DNA, 285 bp, Unknown
  Bacterial polypeptide expressing nucleotide sequence isolated from the Sargasso Sea
gttctttgtgcatgaacccgaggatcatgttgtttgatgaaccgacatccgctcttgatccggaaatgatcaaggaagtgctcgatactatgatcgaactcgcaagcactggtatgaccatgatctgtgtgacccatgagatggggtttgccaaaacggtcgcggacagagttatatttatggatgagggcgaaatcgtcgagcacaacaccccggcagagttcttcgacaacccacaacatgaccggaccaaattatttttgagccaaatacttgctcattagt

SEQ ID NO: 269312 - DNA, 889 bp, Unknown
  Bacterial polypeptide expressing nucleotide sequence isolated from the Sargasso Sea
tcaggagtggtaagacctgataaaggtgaagtttttttaaatgataaaagtattaaactaaactctccattagatgctaaaaagaataacatcggaatggtattccaacatttcaatttatttgaaactttgtctgtatttgaaaacttaagtatagatagcgacaaaaaaaatgaggaactgagactatcagttagtaatatcttaaaaaaatataattttaaaattgatttagatattccagttttaaatttatcagccggtcaaaaacaaaaagttgaaattattagatgtttaatcaggagtccaaaagtattgataatggacgaacctacatcagttttaactgaacaagaaacagaagatctatttgtttcattaagaaagttttcagatgagggaatattaataatttacattactcataaattaaaagaagtactttcactttgtgacgaagtagcagtcatgagaaaaggtaaagtggtctctgtgagtaaaacaaaagaggaaaaaattgaaactttagctaataagatggttggagaaaatttaaatacgataaaaaaaaaaattaataatttcaaatatagtgaagaaattttaaaaatctcaaacttaaattttaaaagtgaggacccttacgaaacagacttgataaatttaaatttttcaataaaaaaaggagaatgtttagggatagcaggaatttcaggaaatgggcaaagtgaattgtttcaaattttaagtggagaaataattactgaatatacctctataaaatttagagataaagaaattagtaagctaaatccaagagaaagaagagaataccttatggctttctcacctgaagatcgtatttcccaagccgctttccagaattaaa

SEQ ID NO: 269313 - DNA, 252 bp, Unknown
  Bacterial polypeptide expressing nucleotide sequence isolated from the Sargasso Sea
tatgggttacagtcattcgatgagtgcagacgttcaactcgatgatgtgtgggtccaattcggcgatttcgtcgcggtccgggatgccagtctgactatcgaggggggtgaatttttcagttttctcggcccctccggctgtggcaagaccacgttgcttcgggcaatttccggtttccagccgcccagtcggggtcgcgtcctgattggcggcaaggatatggccggtatcgggcccaaccaccggcccac

SEQ ID NO: 269314 - DNA, 748 bp, Unknown
  Bacterial polypeptide expressing nucleotide sequence isolated from the Sargasso Sea
agataaattttcttttaacgatcaaatcactttaagagagatcgattataattacccaaactcatctcaaaaagttctaaagaatattaatataaatatatctgcaaaacaaagaattggaattgtaggaaaaacaggtagcggaaaaaccacactggtagatattattcttggtttacttaatcctcaaaatgggattgtgaaagttgatgaaatagatataaataaaaataatcaaagaatgtggcaaaaatcaattggctatgttccacaaaaaattttcttatctgatgatacgatagctgcaaatattgcatttggtacaaatgcaaaaaatatcaattatgacaaagttgtacaagcttcaaaaattgcaaatttacatgaatttgtaactgatgagttgccatctaaataccaaactaaaatcggtgaaagaggtgtcagattatctgggggacagagtcaacgaattgggattgcaagagcattatatcatgaaaaaaatttattagttttagatgaagcaactagtgctcttgattatcaaacagagaaagcagttatggatgctttaaaaaatataagtaaaaaaactacaataataattattgctcatcgtttaaatacaataaaggaatgtgataaaatcttttttctagataaaggtcaaataatgggagaaggagcttacaataatttaattgaaactaatgattattttaaaaaattcatctcagtaaattaa

SEQ ID NO: 269315 - DNA, 709 bp, Unknown
  Bacterial polypeptide expressing nucleotide sequence isolated from the Sargasso Sea
ctatctaaaaacttttcaagttttgaagctgtaaaagaaattagttttagtataaacgaaagtgaaattcttggattactaggtccaaatgggtgtggcaaaactacaacaattggaatgatgttaggtttattaaaaccaacaagcggtgaggttataataaatggtcttaatgttgaaaagaatagaataaatcttctaaaaaaaatgaattttatttctccttatattgaattaccaaaaaaacttactgttaaagaaaatctaatggtttatggtaaattatattctgtcaataatataaataatcgtattgattatcttactgaaacattaaggttgagtgaattcataaataaaaaaactggtgaactttcttcaggccaaaaaaatagagtaagtcttgcaaaagcagtagttaatgatccagacattttattattagatgagccaacagcttcattagatccagaaacaggagattttgttaggacttttatagaaaaaatttcatcagaaaaaaaaatgtcaatcttgcttgcttctcataatatgaatgaagtaaaaaggctttgcaaaagcattttaatgatgaaagatggaaaaattatagatagaggcacaccaacagaaataattaataaacacggtaaaaaaaacttagaagaagtttttttgaaacttaatagaactaaaaatgagttataat

SEQ ID NO: 269316 - DNA, 550 bp, Unknown
  Bacterial polypeptide expressing nucleotide sequence isolated from the Sargasso Sea
aatgccaagtttaaaagatatcaaaaatcaaatcaattctgttggttcaacaaaaaaaattacctcagctatgaaaatggtagctgcaagtaaattacgtcgatctcaagaaaaagctgaagcttctagaccttattcagcacgtttagaagaaatgctttcatctgtagcatcctctggttcttccggtgagggtgtaataaaattattaacaggaactggagaagataaaaattatattattttaccggttactgctgatagaggtttatgtggtggttttaatagcagtataaatagagacacgactaaattaattaaatcattggaatctgaaggtaagtcagttcaattgattactattggaaaaaaaagcagagatttttttaatcgtactatgaaagataaagttattgaaagctttgctgatcttggaacaactggtgcaggttatgaagttgcactagagatttcaaataaactgcaaaatttatattttaatggcaagtttgataaatgtatcattatatttaataaattcaaatccgca

SEQ ID NO: 269317 - DNA, 759 bp, Unknown
  Bacterial polypeptide expressing nucleotide sequence isolated from the Sargasso Sea
aatgaaaatggttgctgcagctaagctgagaagagcacaagaaagcgctgaaagaggaagaccttactctgagaagatgaataatatcatattaaatctatctagtggtgtttcagacaaggaaaacgcaccaaagttattatctggcacaggtgacgataaggttcatctatgtgttgtattgacagcagatagaggtctttgtggtggttttaattcaaatattattaaaaaagcaaaatcctattttcaaaaaatttctgatacaggaaaaacattaaaaattattactgttggttcaaaaggatatgatcaacttaaaagactataccaggataaaataattgaaaatatttcatttaaagagtcaaaaaacgcaaattattttgatgctgacaaagtcggaaaaataattatagaaaaatttgaaaataatgagtttgatgtatgtacaatattttataatcaatttaaaaacgtaattactcaaatccctcaagagcagcaaataattcctttaaaaactgaagaaaaagacaacaaatcatcggaggataactatgagtttgaaccagatgaagatgaaattttaggaaatttacttccaaaaaatatttcaactcaaatttttaaagcgatgttagaaaattcagctagcgaacagggttcgagaatgagtgcaatggataatgcaacccgaaacgcaggtgaaatggttgacaaacttactattgaatataatagaagtcgtcaagcagc

SEQ ID NO: 269318 - DNA, 574 bp, Unknown
  Bacterial polypeptide expressing nucleotide sequence isolated from the Sargasso Sea
aatgtttattgagattaaaaaccttacaaaagaatttaaaaatacaattgctgtaaacaatataaattttaatattgaaaaaaacaaaactatcggcctacttggtccgaacggctgtggaaaaactacatcaattggcatgattcttggtttgattaaacctacctctggtgaaattattattgataaaaaaaatttagagtctttaaagagggatgatattttgtcacgcattaattttgcttcaccctatattgagttaccaaaaaaactaacggtaagacaaaatttagaggtttatggaagactttacggaataaaaaacttaaataatcgtataaacgaaatatcagaagatctggatataaaaagcttttttaagagaagaacgggagaattatcatctggacaaaaaaatagagtttcgcttgcaaaatcattaatcaataaaccagaaattttacttttagacgaacccactgccagtctagatccagatattggtgattttgttagaagttatattcaagaatatagatccaaaaatcaagtaactattcttcttgcctcacat

SEQ ID NO: 269319 - DNA, 586 bp, Unknown
  Bacterial polypeptide expressing nucleotide sequence isolated from the Sargasso Sea
gctggaactagagggagttgggtatcacccggccgctgccgagcggccgatcctcgatgcggtgaatctttgccttgagccaggtcaggcggccctggtggtgggccgcagcggcagtggcaagaccacactgctggagctcattgcagggctcgccacccccgatggcggccagattcgctgggatggtcaagtgctgagctcccgcgagcgacgttggctctgcggactggtgtttcagttccccgaacgccacttcatcggcttgacggtggctcaggaactcaagctgggtcaccgccgcctggactctgagcgcatggagcaggtcatggccacagtcggtctggcgggggtgtcgttgcagcaggcgccagagcgcctcagcggcggtcagcagcgacgcctggccttggcagtgcagctgctgcgtgatcccaaagtgctgctgctcgatgagcccagtgccggcctggactggtccgtgcgccaggagctggtggggctggtgggccgcttggccgctgaacgtttggtgctgatcgtcacccatgaaccggaggtgtttgcagcggttgccgccaag

SEQ ID NO: 269320 - DNA, 874 bp, Unknown
  Bacterial polypeptide expressing nucleotide sequence isolated from the Sargasso Sea
ttagaaaaatataattcagtaattggtgtttccgatgtttcatttgatgttaataaaggtgaaatcttttgtgttatgggattatccggaagtgggaaatcaacacttgttaggcatattaatagattattagaaccaacatctggaaaaattttaataaataatcaggatgtaatgcagtttaataaagaaaatctacaagatcttagaaataaaaaaattggtatggtttttcaaaattttgcattgatgcctcacagatctgttttagacaatattgcaatgcctttagaaataagaggagtaagtaaaaacgataggttagatgcagcaaataacatattaaatattgttgaattacaagggtggggcaataaatacgcacatgaattatctggaggaatgcaacaaagagtagggttggccagagcattagctgctgatcctgaatttttgttgatggatgaacctttcagtgcacttgatccacttataagacgccaacttcaaaccgagtttattaaactctcaaaacagatgaaaaagacaactgtatttataactcatgatcttgatgaagcagtaagagttggtcatagaatagctatcatgcgagatggaatggtagttcaaattggaacgccagaagaaatagttgtaaatccatctgatgaatatgttgcagactttgtaaaaggaatttcaagattaaaagttgttcaagctaaaacaataatgcaacctttagagcaatataaaaaaaattttggggaaaacttaggtaataatgaaaaagtaaatgaaaacgatatattaagcaaacgtattgaaacttctgtttctgaagataaaccaattgtagttataaatgacc

SEQ ID NO: 269321 - DNA, 963 bp, Unknown
  Bacterial polypeptide expressing nucleotide sequence isolated from the Sargasso Sea
gtgacccaattagtctgacgaaaacaattaatcagagtggtcacataatagccaacgcaaatatcagttttgatgtccatgttggtgaaatctttgtgattatgggattatccggatctggaaaatctacaatagtcagatgtgtttcacgattagttgagccaaccgcaggagaagttctcctagatggtgatgacttgctaaaaaaaactgactctgaattaaccacagtcagacgtcacaaaatggggatggtattccagaactttggtcttatgccgcaccttaatgttatagataacattgcttttcctctgaagcttcaaggcgttacagaaagtgaaagatatgaacaagccaatcgggtgattgatctggtaggattgtctggcagagaacaaaattttccgaaggaattatccggaggacagcagcaacgtgtaggtattgcgcgctcccttgccgtagaacctgatttatggtttttagacgagcccttctcggctctcgatcctttaattcgaaaacagatgcagaatgaatttttaagaattcaatctgttcaaaaaaagtcagtgatttttattactcatgattttcaggaggcactgcgtcttgctgataggatggcaattatgcgagacggtgagatagtacagattggccgtccagttgatctaatcttaaaccctgcggacgactatatacgtgaattcacatatgatgttccatgggagagcgtgctaagtgtggcagacatagctaaacatcaatcgggcgccgacgcaggattaccgagggttgatggagagacccccgtcgctagcattttaccacttcttgcagcaagtgataacggagtcctcgtgacgagtagaaatggtgatttagtcggtgtagcaaatgcaaaaacttttgtagccgcgttagcatcttcagcgtcagagactagagaaagttaac

SEQ ID NO: 269322 - DNA, 637 bp, Unknown
  Bacterial polypeptide expressing nucleotide sequence isolated from the Sargasso Sea
aatgaacctaaaaattaataatgtatctctttcaattaaaggaagattaatcgtaaatgatgtttccgtaactgtaaatccaggggaagttgtaggtttaatgggacctaacggtgctgggaaaactactacttttaaccttgcagttggaaatataaaacctgataaaggtgaaatatttatgaatggtaaaaatataaccaatcttcctctcccaattagatcaagacttggattgggttatttaactcaggaagcgagtatatttagagacctcactgttaaggataatatagatttggctttgcaaaattcatcttatagtagagcggcaattagaaatagaagagaacaattaattaatgaatttaatttgaataattttgtagataattacggttatcaactttcaggaggagagaggaggaggtgtgaaatagctagggctctcactgtaggtagaaaaggacctaaatatttgttattagatgaaccttttgctgggatagatcctctggctgttaatgatttaaagaaactaattcttaaattaagtaatgacggggttggaattcttattacagatcataatgtgagagaaacacttttaattactaacaaatcatatgtattaagt

SEQ ID NO: 269323 - DNA, 622 bp, Unknown
  Bacterial polypeptide expressing nucleotide sequence isolated from the Sargasso Sea
ttgtttcaggactatgctttgtttccccacttaactgtaaaacaaaatttagaatatccaattaattataagaattcagaatataaaattgaagatattattgatttaataaaacttccaaactctttgaataaatttcctcatgaattgagtgggggtgaacaacaaagagttgcattagcaagatcaataatttctcaaccagatttacttcttctagatgagccattctctagtcttgacttgaatcttcgagaagaagtgcgtgatgaaacattacatttattacaaaaatcaaatatctctgtaatcattgttacccacgatccttttgaagcaatgtttatttctaatcagataaatattatggacacatcagggtatattattcagtcaggaagtcccgctgaactatataaaaatccaaagaattcttatgtgactgaattttttggagaaacaaatagatttaatggaatagtgagtaattctttcgtgcaaacaccagttggaaaaataaaagcacctaatgaatttgaaaacaagaatgttgaagtgcacgtaaggccacaaggtattaaactaaaacagcagccaacacccgttaatggtatcaaaggta

SEQ ID NO: 269324 - DNA, 621 bp, Unknown
  Bacterial polypeptide expressing nucleotide sequence isolated from the Sargasso Sea
agagacagcgtgtggcaattggtagagcaattgtaagagaccctaaagtttttttatttgatgaacctttatctaatttagatgcagcacttcgagttcaaacaagaattgaaatagctaaacttcataatcaattaactgctacgatgatatatgttactcatgatcaagttgaagcaatgactctagcagatagaattgttgttataaatcagggtatcattgaacaagttggaaccccagttgaactttataattctccaaaaaaccaatttgtagctgaatttattggctcccctaaaatgaatatgattaatttacaagataaacgaagtctaaatttaaaaaatcttaaccttccaagtgaagctagcaaaataggaataagacctgaacacattagtttagcaaatagtgagtctcataaactcagaggcactgtcagacatatagaaaatttaggtgaacacttattgtgttatgtcaatcttgaaatgaatagtgagatcacagctaaacttgacgtaaatagtgatatcagagttaatgaaattattaatttaaattggcatcaagatcatcaacacttttttgactctatgggtttttcgttaaattaat

SEQ ID NO: 269325 - DNA, 625 bp, Unknown
  Bacterial polypeptide expressing nucleotide sequence isolated from the Sargasso Sea
cttttgagtcagtctggtgagtccgttgccattattggcgcgtcaggctcgggtaagtcaacccttttgggcttgttagcagggcttgaccaagttacagaaggggaaattttcttagatggtgaagcacttcacagtatgaatgaagaagagcgcgcaattttaagaggaaataaagtgggcttcattttccaaagctttatgttagttcaaagcttaacagccttggaaaacgtgatgctaccggcagaaattgcagggcttgataacccgaaagcactagctttggatattctagagcaagtcggattgaaacgtcgcgcgcatcacttccctaatcagttgtcggggggcgagcaacagcgcgttgccatagcgcgagcatttattacctctcccaaaatacttttcgccgatgagcctaccggcaatcttgacgccaaaaatagtgaaaaaatcgaagcgctgttgttcgagatgaatagagaaaaaggcacaactctcgtactcgtaactcatgataacgagcttgcggaacattgtgacaggcaactcacgatgaatgctggcgaattagttgaaacaactggcgcgaacacaatgaataagaaagaggcggtttaga

SEQ ID NO: 269326 - DNA, 727 bp, Unknown
  Bacterial polypeptide expressing nucleotide sequence isolated from the Sargasso Sea
attgcaaactaaagcaccattattaaacgttcaaaatctctcgtggggaatagcaaataaacctattctcaaacacattaatgtgcaaatacctgaaggtaaatttgtgggcttaattggccctaatggtgcaggtaagtcgagtttactgcgttgtttatatcgttttaataagcctaatgaaggggttatagagtttaataaccatgatatttggcagcttaaaagtgatgaatatgcaaagtgcgttgctgttgttttacaagaggcgccatcgcattttaatttgtcgttatttgatgttgtggctcttggcctaacgcctcataaatcgttatttagctctacatcgcaaagcgaaaaacaacaaatcactctagctataaaaacggtagggcttgagctgcatacaaatcaaaattttgaatcgctctctgggggcgaaaagcagcgggcactcattgcacgtgctattgttcagcaacctcagctgttaattatggatgagcccactagccaccttgatgttaagtaccaaatacaggttatggagctggcaaagtctcttggtgttacagtatttgcttcgtttcatgatcttaatttggctagcgctatgtgtgatgagcttgtcgtcattaaaaatggagaaataacgcataccggctctcctgcagaggtactgactgagcacatgcttgatgatgtatttggtgtatgcgctcag

SEQ ID NO: 269327 - DNA, 909 bp, Unknown
  Bacterial polypeptide expressing nucleotide sequence isolated from the Sargasso Sea
cggagcggggaaaacaactttgatgagcttaataactaataaattaagtttggatcaaggacaagtcttgttctatccaaacaaagaagcaatagacatcacaaataaaaaacaagatgagatagcaaggtatggtgtagttaagacaaatcaaattattcaagacttcgaaagtctaacaattaaggattctttattacttgctattgctgctccaaagtatgagaaaatttttaattttttcagtgaagaagacctgcttagggaagcaaaaaatgaaatcgatgaatatctagattattttcattttgaggatccagataactatgctctttcagcaggagaaaaaaaactgcttgatattattcggtgtcttcttctcaaaccaaagtttctacttatggatgaaccgactgctgggcttcctgaagatcagaccaaaaaagtaatggatctgatgaagaaaaagacaaaggaagaagctatgtcaatcctcattgtagaacacaatcttgacctgatttgggaagtttcagagagagtacattttatggcagagggaaagatacttcttgaaggaagccctgaggaaataaaggcagataagaccgttgctttgaaatatatgggggaaagcgatccagtcctaactatcgaggaaccaatcactcaagaatcatctaatgaattacttgaaacaagtttcatcaaacaagttgatcctttacaaaaagaacaactgaatgctgaatataatcgatcttatgtgcctcctacacgttggtcaaaagcttcctggggaaatcactcaaagggggcagataagtcacctctaaaatcaagaacaacggtacttcgaccattcgatgataaaatagagccattacttaaagcacgagataaacgatt

SEQ ID NO: 269328 - DNA, 691 bp, Unknown
  Bacterial polypeptide expressing nucleotide sequence isolated from the Sargasso Sea
catgtcagaaaaaaaaccagataataatatagttttagagaatgtccatctgaacctaaacacctcggccggacaaattaatatattaaggggaatcagtctcaaaatcaaatcaggggagtcggttgcagtaatagggccatcaggcggaggaaaaaccactttaataatggctattgctggtttagaaaaaatttcaagcgggagtttgaaggtggcaggtgtggaaaccagtgatctaggggaagatgatttagctgtgtcacggagagaaaattttgggattgtttttcaagactttcatctaattcccacgatgacagctttggaaaacgttgccattccattagagttggcgggggaatctagcaatacggctttctctgtttctaggacccagttgcaatccgttgggcttggtcatcgattcgatcattacccttcccagttgtctggtggtgagcagcagagggtcgcaatagctagagcctatgcttcaaatccaggtatacttcttgccgacgaacccacagggaacttagatggagagacaggtgcaaaaattatggatcttctctttgagctgcacagggaaaatgggacaacgatggttctaattagtcatgatacggaacttgcggatcggtgtggtcgaacaataaccttagcggatggaaaaattaaagagtaa

SEQ ID NO: 269329 - DNA, 748 bp, Unknown
  Bacterial polypeptide expressing nucleotide sequence isolated from the Sargasso Sea
tatgttagcagttgaagttcaaaatcttacacactctattaatagtaaaaaaattttaaataatattaattttaatttaaataaagatagtatctcttgcattttggggccgtctggaagtggcaaaaccacattactaaaacttattgcaggtcttggaaaagtacaatcaggtaaaattttaattaatggtgaagaagttagtagtgcaaataaacatttgccaactgaaaaaagaaaaattggtttcttgtttcaagattatgctttgttccctcacttaactgtaaaacaaaatttagaatatccaattaattacaaaaattcagattataagattgaagacattattgatttaataaaacttccaaactctttaaataaatttcctcatgaattgagtgggggagaacaacaaagagttgcattagcgagatcaataatttctcaaccagatttactgttattagatgaaccattctctagtcttgatttaaatcttcgagaagaagtgcgagatgaaacattacatttattacaaaaatcgaatatttcagtaataattgttactcacgatccttttgaggcaatgtttatttccaatcaaataaatattatggatacatcagggtatattattcaatcaggaagtcctgcagaactatataaaaatccaaagaattcttatgtaactgaattttttggagaaacaaaccgctttcatggagtggtgaataattcttttgtg

SEQ ID NO: 269330 - DNA, 682 bp, Unknown
  Bacterial polypeptide expressing nucleotide sequence isolated from the Sargasso Sea
atgactgaaaaaataatttctattaataatttatctaaagaatttttagttaataaaaatcaaacttgtattttaaaagatataaattttagtatttttaaaggtgatgttatttctatatcaggaccttctggatcaggtaaatctacatttctaaatatcttaggtttattagattctgtatttaatggtacttatgaatttttaaattttaatgttaatcttctaaaaaataatgaaaaaaatattattagaaataaatctattggttttgttcatcaatttttttatctcatccctgaactaactgttatagaaaatgtttctttacctaatttaatccttaataataataagaaaaaatctaatgaattggctaaagaaataattgtaaattgtggattggaaaatcaaatgcattctaaaccaacttatttatctggtggtgaacagcaaagggttgcaattgcaagagctttaataaataatccagaactaataattgccgatgaaatgacaggaaacttagatgaaaaaacagctgatactatatttgaattttttttagaaaagatatcttctaatagtcaaactcttatatatgttactcataatgcaaaatatgctaaaaaagccaatcaagcctttgaaatatcaaataatcaaattaaaaaaatttaat

SEQ ID NO: 269331 - DNA, 805 bp, Unknown
  Bacterial polypeptide expressing nucleotide sequence isolated from the Sargasso Sea
atgaatactaacattcaagaaattaaagacttatctattggttttaaaagtcaaaagggtgagcaaatatcaatacttagaaacatcactaccaatatcagaaaaggtgaaactgttggtatagtaggtgagtcaggatcaggaaaaagtacccttgcacttgcaatgatgggatacattaaacatggtctttttactacaggtggcgaatgtttatttaaatctcaagatttactaagtctaaataatagggaattagaggatattagaggcagaaaaattgcaatgattcctcaaaatgctggtcaagcattaacacctaatcttaaaattggttatcaaattgaagaagctcttaaacttcatacagatttcaataaaattgaaagagaacaaaaaatttcagaattattaaatcaagtcagacttccatctccaaaaataatggctctaagatatcctcacgaactttcgggaggacaacaacaaagagttgctgttgcaatggctttagccggtaacccagagcttttattgttggatgaaccaactaccggattggatgtaacaactcaagcacatgttttagaacttttaaaagatatcgcaaaagatacaggaacatcgatggtttatgtaagtcatgatttaggagcgatagctcaagtttgtgatagggtgattgtaatgtatgcaggtgaaattgttcttgaaggaccagttagaaagattttaaaagagcctattcacccatacacatatggattattaaaatcaatccctaaactttctctatcaggacttc

SEQ ID NO: 269332 - DNA, 272 bp, Unknown
  Bacterial polypeptide expressing nucleotide sequence isolated from the Sargasso Sea
gaatccgaggatcatgctatttgatgaaccaacttccgcgctggaccctgagatgatcaaggaggtcctagacgtgatgattgagttggcagagagtggaatgacgatgcttgttgtcactcatgagatgggatttgcgactgcagtagcacaccgagtgatctttatggatgaaggagaaatcatcgaagcaaatgacccggacaattttttcaataatcctcagaacgatcgaactaaactgttcctcagtcaaatcctccaacactgaa

SEQ ID NO: 269333 - DNA, 590 bp, Unknown
  Bacterial polypeptide expressing nucleotide sequence isolated from the Sargasso Sea
cttatttgatgagccattatcaaacttagatgcagctctgagatctgaaatgagagttgaaatatcaaaattacacaaaaaactgaaatcaaatataatttatgtaactcatgatcaagtagaggcaatgacattagctgatagaattgtggttctaaataaaggaattattgaacaatttggtactccagctgaggtttactctgatccaaataacatttttgttgcagagtttattggatctccaaaaatgaatataattaaaattgataaagaacaaattgttaatacaaacacaatagaattatttaacaataagataacttttgaaaacgttgattttgaggataaggtttatctaggtattagacctgaagatatcagtgtaaaaagtgaccatgacattaaattaaatgtaaaagttgatctaattgaaaatttagggttcgagaaaataatttatactaaattaaaagaaaaacaaataataattaaatcttctgagaatattagtaatcaacaactcaatatttctttttcgaaagataaagttttattttttgataaaaataaaaataggataagataga

SEQ ID NO: 269334 - DNA, 666 bp, Unknown
  Bacterial polypeptide expressing nucleotide sequence isolated from the Sargasso Sea
aagacaacttcataacccaaggtatatttaaatttcataatgtttatttctcttatcaatctagaaaaattctctcaaatataaactttcaattttatcctcggaagttaaatattgtccttggatcatctggaacaggtaaatcaactatcttcaaattgttactaagattaaaagaacctaaatcaggcacgattactcttgataatactgacttgagagaagctaaagtttcatatttaagagaaaatatcggaattgtcaatcaaaatacctatttatttaatacaacaatatttgaaaacatcaaatatactaatgagaaaattactaaagagcaagtttctaagtttattaactctttaggtttaaataataccgtgtttaagaatcttaatttagattcagaaactggagttgaagggtttaatctatctaatggacaacgacaaatgattctaattcttagggagtattttgccaacaaaaaaatattgttaatggatgagccgacttccagtttagatgtaaaaagtaaagcaatcattatggattttataaaacatatatctactcaaaggaccattattattaccacccatgataattttgtaaaagataaagctgatattatttatgatctaaataaaatgaataaaaactaaa

SEQ ID NO: 269335 - DNA, 448 bp, Unknown
  Bacterial polypeptide expressing nucleotide sequence isolated from the Sargasso Sea
attattattcatacctcaaaaaccgtatatgctacttggttctttaagggaacaattatgttatcccacagaagtcaagaaatttagtgatgaacatcttacttctgtactgcatgaagtaaatttaaaaactttagtggatcggtatcctaatcttgatatcaaacaagattggccacgaattctttccttaggcgagcaacaaagattggcttttgcaagactcttactaaattctccaagatttgcagtacttgatgaagcaacaagtgctttagatattaacactgaaaaaaaactatatagtttacttaaggaaagagaactttctcttattagtgttggacatagacctagcttaaaagattttcacgagaatattttagaattaaatggacagggagactggaaattattgacgtctgataagtataattttaaggattaa

SEQ ID NO: 269336 - DNA, 620 bp, Unknown
  Bacterial polypeptide expressing nucleotide sequence isolated from the Sargasso Sea
catgagtaatacacttttagaaataaaagatttaaatatttcttttaacttaaacaataaaatttcaaaaactgtatctaattttaatataaatttaaaaaagaaaaaaactatcggaattgtaggagagtctggaagtggaaaaacactttcgatgttagcacttacgagacttttacctaaacaagcatttgttgaaaaaggaaaaatcatttttgatcaaaaggatataacaaatttttcaaataaagatttttacaagcaaataagtggaaaaagaatttctatgatttttcaagagccaatgacagctcttaatcctgtttatacagttggaagacagctaattgaaacatatctttttcataattatgcctcaagaaatgaggcatacaaaagatctattaatcttttagagtctgttcaattgacaaattctaaagaaagaatgaaccaatacccacatcaactctctggagggcaaagacaacgagtaatgattgctatgtcattaataaacgatccagaattgcttattgctgatgaaccgacaaccgcacttgatgtgactgttcagaaagaaatcattttattaattgaaaaattgattaaagacttgg

SEQ ID NO: 269337 - DNA, 643 bp, Unknown
  Bacterial polypeptide expressing nucleotide sequence isolated from the Sargasso Sea
aatgaaatctggcccaatatcatttcttgacaggcctaaggacaatattgcaattcggctagatggtttatcaaaaatctataaatcacaaggattttcaaagcaaaaaaatgcgctgaaggacattaaccttgccatacccgcagggtgtatttttggacttcttggcccaaatggtgcgggtaaatccactcttataaatattcttgctggaactgttattaagtcagatggacgtgttactgtttggggagaggatttggacattaatcccagacaatgcagagcgaacattggcatcgtaccgcaagaattaaatattgatgtgttcctgacaccatatgaatctttagaatttacagctggaatgtataatattcctcgcaaggagaggcttactaaggaaattcttgagatagtggggcttacagaacaaagccatgcttacgcacgaacactttctggcggaatgaaacggcggatgcttgttgcaaaagcgatggtgcattcaccacctatcctcatattggatgaacctaccgctggtgttgatgtggcattgcggcagaaactatgggataatgtaagaagcttaaatgattcgggcgttacaatcgttcttaccacacattacctagaagaa

SEQ ID NO: 269338 - DNA, 850 bp, Unknown
  Bacterial polypeptide expressing nucleotide sequence isolated from the Sargasso Sea
cattgcaggtttatcgcacgtccaagatggagaaatttttttaaataataatctagtaagttcaaataatgttcatttaaaaacagaaaaaagaaaaatagggtttttatttcaagattatgctttatttccacaccaaacagttaaggaaaacttgcaatttgctattaaaaataaatctacttcacatacaattaaggaaatactagatgttattaaactatcagattctttagacaaatatccacacgaattaagtggtggtgaacaacaaagagtagctttggcacgttcaataattgcaaaaccagatattttgttacttgatgaacccttttcaagtctagatttaaatttaagagaagaagttagagatgatacattgcacttacttcaaaagtctaatatttcagttttagttgttacccatgatccgttcgaagctatgtttatttctaataaaatttatattatgaataaaaaaggcaagatcgtacaatctggatctcctaaagaattatataatcttccaaactcatcatacgtagcaaatttttttggagaaacaaataaatttagtggagtagtaaaaaacaatactgttgaaacgcctgttggagagtttaatgttgatcacagcctggagtctaaaaatgtaaatgtatatatcaggcctgaagcagttaaattaaatcaagaacaaactcctgttaatggaattaaaggaacagtgatggcatcaaaattaatgggcggttatagttttgttcatttatcagtattaaataataataatgaaattgttcacgttcatagtcacatgccaccaacatttttacctaatcaatca

SEQ ID NO: 269339 - DNA, 673 bp, Unknown
  Bacterial polypeptide expressing nucleotide sequence isolated from the Sargasso Sea
atgagcaatgtagtaataaagtgtgaatctgtttataaaatttttggagcaaatgccaagaagatgctacaagattcaaatggaaatgtagatgctaaaaaatttcaagaaaatggatgcatagtaggcgtgaacaatgcttcttttgaagtttcaaaaggagagatgttggttgtaatgggcttatctggatcaggtaaatcaacattactaagatgtatttccagattaactgatgccacagatggaaaaatttttatagaaggccaagatttactttcgttaaacaacaaagaactaattgaattaagaagaaataaaatgggaatggtatttcaaagctttgctttgctacctcataaaacagttttggaaaatattgcatttcctcttcaaattaaaggaattaaaactgaagacagtattaataaagcaatggatatggttaaacttgttggacttgatggaagagaaaattattttccaagagaactttctggcggacaacaacaaagagtaggtatagcaaggtcattagctgtggaacctgatatttggtttttagacgaacctttttctgcattagatccgttaattagaaaagaaatgcaggatgaatttttaagacttcaagaaaaattgcaaaaaactattatgtttattaccccatgat

SEQ ID NO: 269340 - DNA, 304 bp, Unknown
  Bacterial polypeptide expressing nucleotide sequence isolated from the Sargasso Sea
gcgctgctgcgcgacgcgccgatcctgctgctcgacgaagccaccagcgcgctcgacgccgagagcgagcggctggtgcaggacgcggtcgagacgctgatggcgcagcgcaccacgctggtcatcgcccatcgcctcgccaccgtgcgcaaggcggaccgcatcgtcgtcatggacggcggccgtatcgtcgagcagggcacgcatgaaagcctgagcgggcagggcggtctttatgcacggctggcgtcgctgcagttcgacactgtcgtcgcggggcagccgatcgcgccgctgggctgaa

SEQ ID NO: 269341 - DNA, 371 bp, Unknown
  Bacterial polypeptide expressing nucleotide sequence isolated from the Sargasso Sea
gcgcttcgatcgcgcacgcgccgcgagcctggccgctcaggcaggccgcggcaacgactttctggacaaacgcgcgagcgaattgtccggtggagaggcgcagatcaccgcgctgatccgcgtgctgcaacttgcccccgaggtgctgttgctggacgaacccaccgcttcgctcgacccggaatcgtcccacgcaatcgaagcgctggtgcatgcatggttcgccgccgatcccgcccggcatgcatcgatgtgggtatcgcacgacccggcgcaagccgcgcgcatgagcgtgcggcacctcacgatgcgcgccggcgtgctcgacgaatccgtggcgacgccagtgcagcaggagctcggccaatgac

SEQ ID NO: 269342 - DNA, 382 bp, Unknown
  Bacterial polypeptide expressing nucleotide sequence isolated from the Sargasso Sea
ttcatccgtgatctgccgaatgggtacgacacgcagctggaggaacggggcacgaatctgtccggtggacagttgcagcgcattgccattgcccgggcggtgcttggtaatcctgctgttctgctgctggatgaagccaccagtgctctggatgctgaagcggaggcggctgtgcaactgggcttaaggcgtgccatgcgtggacggacggtgctggtgattgctcaccgcctggccacggtgcaggaggctgatcagattgtggtgctggagaggggttgcatcgttgaccgcggcacccacgacaccctgatgcagcgcggcggacgttatcgggacctgtgcgaacgccagttcatccgtgacctgcagaacggttaaa

SEQ ID NO: 269343 - DNA, 311 bp, Unknown
  Bacterial polypeptide expressing nucleotide sequence isolated from the Sargasso Sea
tggaggacacaaacaaagagcagctctggctagagctttgtgtatggaaccaaaaattatgctttttgatgagccaacttcagctttagatcctgaaatgattaaagaagttttagatgcaatggtaaatttagcaaaagcagggatgaccatgattgtagttacacacgaaatgggttttgcaaaagaagttgcagatgaagtggtttttatggatgaaggaatgatagtagaaagagccaagacaaaagatttctttgctaatcctaaaaacgaaagaacaaaacttttcttgagccaaattctttaaa

SEQ ID NO: 269344 - DNA, 486 bp, Unknown
  Bacterial polypeptide expressing nucleotide sequence isolated from the Sargasso Sea
aatggctaaagataacaattcaaaaaaaaatattaaaaacttaaaaacagtttcaattaataatttgagtcacttttatggaaaaaatgaaaataaaaaaaaagttcttaatgatgttaatttaaatattgataaaggagaattggttcttttaaaaggaccttctggatgcggtaaaaccactcttttaaccttgattggtgctttgagaacctgccaaagtggcgatttaactgtattaaataatcaattaaatggagcatcacgaaaaacgcgtcagattcttagaagaagcattggcatgatttttcaaggtcataatcttctgagatgtttgacagcagaacaaaatgttcaaatgggcgccgatttaataaaaggtttaacatatttgcaaagacgcgaaatagcacgcaattggttgtcagcagtagggttagaagaacatcataaaaagttgcccaatgacttgtctggtgggcagaa

SEQ ID NO: 269345 - DNA, 741 bp, Unknown
  Bacterial polypeptide expressing nucleotide sequence isolated from the Sargasso Sea
aatgtctgaatcattaaataattctaacaatactccagtaattcagtgtgaatctgtttataaaatttttggaaataatgcttcaaaacttttagagaactcaaacggccaggttgatgctaaaacctttcaagaagctggttgtattgtaggagtaaataacgcctcatttgaagttaacaagggagaaatgatggttgtaatgggattatcaggctcaggtaaatcaactttactgcgatgtatatcaaaacttacagatgccactgcaggcaaaatatttattgatggtgaagatttattggcaatgagtaataaacaattaattgaattacgaagaaataaaatgggtatggtatttcaaagttttgcccttctacctcacaaaacagttattgaaaacattgcgtttcctcttcaagtcaagggcactaatacaagagaaagtatggcaaaagctttagagatggttgagttagtaggattaaaaggtagagaaaattattttccaagagaactctcaggaggtcagcaacaaagagtgggaattgcacgttcactagcagtagaacctgacatatggtttttagatgaacctttttctgcgcttgatccacttatacgtaaagaaatgcaggacgaattcttaagattgcaaggtgttttaaataaaacaattatgtttgtaacacatgattttgatgaagctcttcgtttagcagatcgtattgcaattatgaa

SEQ ID NO: 269346 - DNA, 263 bp, Unknown
  Bacterial polypeptide expressing nucleotide sequence isolated from the Sargasso Sea
tatgagcattaaaaattacataaaaattaaaaatttatccaaaagtttcggagatgttgaagttttaaaaaatattaaccttgaagtagaagagggtgaatttttttcacttcttggaccttctggatgtggcaaaacaactttactaagaatattagctggctttgaatatctttcagaaagtgaagttttttttgatgatgccaatgtaacatctctcccaacaaatcttcgtccctcaaatatggtatttcaaaattatg

SEQ ID NO: 269347 - DNA, 139 bp, Unknown
  Bacterial polypeptide expressing nucleotide sequence isolated from the Sargasso Sea
aagatgtattaatagattagaagaacatcaaaaaggtacaattatagatgatggaacagagttaactgaaaatacaaaaaatattgaagcaataagagctgaagttggaatggtatttcagcaatttaatttatttcca

SEQ ID NO: 269348 - DNA, 331 bp, Unknown
  Bacterial polypeptide expressing nucleotide sequence isolated from the Sargasso Sea
tgctcagtttgggtctgacttagatgcatcaacccaaaaattgttaaatagaggttcaaagcttactgagttattaaagcaggatcaatacagcccaatgacagtagcagaacaggttgtaacagtttattgcggtgtaaaaggttatttggatactattgaaaataatcaaatcagatcatttgaaaaaggtttattagatttaattaagaataaaaaacctgaaatattagaatcaattcaaaatactggtaagattgaagagaacactgaaaagcttttaacagaagttataacaaactataaaaaatctaattttgaaaaaaaataa

SEQ ID NO: 269349 - DNA, 715 bp, Unknown
  Bacterial polypeptide expressing nucleotide sequence isolated from the Sargasso Sea
atgctacaaatcagaaatttagaaacatcatacggattaattcgagccttaaagggagtaaacctaagtgcaaaagagggtaaactcacttgtatacttggtccaaatggcgcgggaaaatcaactttattatttactattgcaggtattttgagtgctgacaaaggagaaattatttttcttggcgagcagatagccaatcaaagcgcttctaccatagtacgcaaagggctcgcattagtgccggaaaaccgattaatttttcctcaactatctgtagaggagaacttaaaagcaggggcatataaccgcttaaaaggagaatccaagacagttcaaaaagatattgacaatatctatgatagatttcctgttctggctgaaagatcaaaacagttaggcggaactatgtcaggtggagaacagcaaatgttagcggtggctcgagcacttatgtccaagcctaagcttcttttaatggacgaaccctcggtaggtttagcaccaatgatcgtaagtgagatcttttcaattattaaaagccttaacacggatggaatctcaattattctggtggaacaaaacgcctcaaaagcgctacagattggtgattatttctatcttttagaccaaggcaaaataatatttcaaggtgacaagaaaaagttgattgaaaaagatataattaaaaaggcctatttagggaaaaaataga

SEQ ID NO: 269350 - DNA, 724 bp, Unknown
  Bacterial polypeptide expressing nucleotide sequence isolated from the Sargasso Sea
aatggaaatagcggttcaggcggtttcacatcagtacggcagccacaacgcgctggacaatataagcctttgcctaaagccaggcttgactatgctacttgggcctaacggcgcaggcaaaagcaccttgtttgcgcttattacgggcctgcaaaaactcacaaaaggtagcattacctttgatggtgctagcctgtctcaatctcgcacaagtattatggcgaaaatgggcgtggtatttcagcaaagtaccttagatatcgacttatcagtaaaacaaaatttgtcttactttgcttcgcttcacggcataagcaccgctagcgcgctatcgcatattcaaggtttgctcgacgaactcgaccttacgagcaagctcaacacaaaaattcgaaacttaaatggcgggcacagacgtcgggtcgagttagctcgctgccttattcacaagccatccttactcctactagacgagcctaccgttggcctagacatagaatcccgtcatcttattttgcgggtagtacaagcactcgctcattcccaaaacgtaagtgtactgtgggccacgcatttatttgaggaagtgaagcacaataacaatctgatagtcttatcaaaagggcgagtgttagcccatgaccaatgtgaagccttgttagccaagtatcatcaacaagatattgagcacctttggcagcatttgatgcaggaaggctcctga

SEQ ID NO: 269351 - DNA, 577 bp, Unknown
  Bacterial polypeptide expressing nucleotide sequence isolated from the Sargasso Sea
gatgaataacacaaaaaaatttagaataattaaatttaaatctaaaccaatattagctgctaaaagtatatctaaatcttttgatggtagaattgttttaagaaaaatggatgttcgcttgaatcaaggtgagatgttaggcctgctagggagtaatggtgctggaaaaagtacttttatgaatattgttttgggtttattaaaacctgactttggggatatttttttaggtaattcaaaattaactaatttagctatacatgaaagatcaaaactagggattgcatatttaccacaacaaacttcaatttttcgaggacttactgtttatgaaaatttattagctattgcacaaattgttaaaaaaaattcaacagaacaaaaagatattgttgaaaaattgatggctgaattttcaataactcatttaagagatgtaaaagcaactgctttgtcaggtggagaacgtagaagaactgaaatagcaagatgtttaatcagtaacccaaaagtattattgctggatgaaccttttgctggagtggatttactttcaatacaggatattaagggccta

SEQ ID NO: 269352 - DNA, 574 bp, Unknown
  Bacterial polypeptide expressing nucleotide sequence isolated from the Sargasso Sea
gccttccggcggtggcaagacgacgttgttgaatgctattggtggcctggatattccggatagtggcgaggtatgggtcgcaggacaaagaatcgattgcctgtcgaaaggcgagctcgctgggttgcgactgaagcagatcggttttgtgttccaggcttacaatctaatcccggtactgacggcgcgcgagaacgtcgagttcgtgatgcaggtgcagggcatgcccgccgatgagcgcggcggcaagtctgaagcgatcctggaagaagtgggcctgagtgggctcggcgatcgtctcccggcggagatgtcaggcggtcagcaacaacgcgttgccgtggcacgtgccattgtttcgcgaccggcactcgttctcgctgacgaaccgaccgccaacctggactcgaagacgtccgacgaactgatagagctgttcgccgagctgaacgagacccacggcaccacattcgtcattgcaacacatgaccaacgtgtcatggcccatgcaaaacgcctcgtgaaaatactggatggacgaattgttgacgatatcgatcaacacactgcgtag

SEQ ID NO: 269353 - DNA, 579 bp, Unknown
  Bacterial polypeptide expressing nucleotide sequence isolated from the Sargasso Sea
aaaaagatatggttgggattgttggaaaaagtggaagtggaaagacaacattagtaaatgttcttcttggatttcataatatagatgcttcaataaaatataattcaaatatcgttaaagatattagagtttggatatcccaagtaggttatgtaccccaagatacatacttattagacgatagtataaaaaataatatagctttcggactttcagataatgaaatagatgaaactattttaaatgaggctatagaacaatcacaattaaaaagttttattgatagtttaaaagaaggtgtaaatactattataggagaaaatggagtaaagttatctggtggacaaagacagaggttaggtattgcaagagctttatatactaggccagagattttgatttttgatgaagcaactagttcactcgatatggaaacggaaaatgattttgttgaagcaatacttaaatttaaaagtaaaaaaacagtattaattattactcatagaccctcattgttaagaacttgtgacaaaatttttaagctcgaaaatggtcaattaaaattaaatgagaaataaa

SEQ ID NO: 269354 - DNA, 334 bp, Unknown
  Bacterial polypeptide expressing nucleotide sequence isolated from the Sargasso Sea
aataaaaaaaataatgaaaacaatagcctagaaagagttattgaatttattcctgaaataaaaaattttctttatagtgatgcctatcaactttcaggcggacagcagaagctagtctcactggcaagagctatgattataggtaataatttattgcttttagatgagccttttgaaggagtagcgcctgctttagcagaaaggcttgtggaattaattataggtttaaataaacttaaattaataactatgattactgagtcggatgaaacttattcaaaaattataggagctgaaatagttagacttgagagaggtaagattgttacttaat

SEQ ID NO: 269355 - DNA, 327 bp, Unknown
  Bacterial polypeptide expressing nucleotide sequence isolated from the Sargasso Sea
aattatcatctggacaaaaaaatagaataagtttagcaaaagcaataattaatgaccctaacgtgttgctactcgatgagccaacagcatctttagatcctgagattggagattttgttagaacttttttagaaaattataaaaaagaaaaaaaagtatcaattttactggcttctcacaacatggatgaggtcactagattgtgctcttcaataatgatgatgaaaaatggcttgataatagatcaaggtaagccaagcgatttaattaaaaaacatggaagaaaaaatttggaagaagtttttctaaaacttgcgaggaattaaa

SEQ ID NO: 269356 - DNA, 124 bp, Unknown
  Bacterial polypeptide expressing nucleotide sequence isolated from the Sargasso Sea
accttcagcggtgggttatcaaccgactctagcaactgatatggggaaatttacaagaaagaataacaactaccaacaagggatctattacctctgttcaagcgatttatgtccctgcggatga

SEQ ID NO: 269357 - DNA, 733 bp, Unknown
  Bacterial polypeptide expressing nucleotide sequence isolated from the Sargasso Sea
aatgtttatagaaataaaaaaattaacaaaaatttataataattttttagctgtaaacaaaataaattttcaaatcgaaaaaaataaaacaattggacttctgggtcctaatggatgtggtaagacaacaacaattggtatgatgcttggtcttgtcacgccatctgagggagaaattttaatagaaaataaaaatattaaatcattcaaaagagacgatattttaaaaagatttaattttgcatctccatatgttgaattgccaaaaaaattaactgtcaaacaaaacctagaaatttatggaaggttgtacggtattaaaaatttagatgaaagaattactgaaatatcaagtgatttagatataaaaaatttttacgagagaaaaactggtgagctgtcctcaggtcagaaaaatagagtctcattagctaaatctttaatcaataaacctgagattcttttgttagatgaacctacggcaagtcttgatcctgatattggtgactttattagaagttatattcaagaatataaaaagagtaataaagtaacgatcttattagcatcacacaatatgagtgaggtagaaagactttgtgacagtgttatcatgatgagaaaaggtaagattatagatagcggtacctgtcaagatttaatacaaaaacatggaagaaataatttagaagaaacatttttaaaattagcaaggagtaaagatgaattttaa

SEQ ID NO: 269358 - DNA, 694 bp, Unknown
  Bacterial polypeptide expressing nucleotide sequence isolated from the Sargasso Sea
ttacaaaaaagataatcaagtacttaaaaatatcaatttagacattaaaagaggggaagtaacagcttttgttggaccttccggagctggtaaaagtacaatgttggctttgatattaaagtttataactccaaataatggagatatttttatagatgataaaaatcttaaaatattaaatacaaaagatattagaaaaaacattgcattagttcaacaacaaccttttttgttttcaggaacaattattgatgtaataagaatgggcagaaatttcaccaaagaagaagttatagaatcagcaataaaagcaaacgcccacaacttcattcaaatgctacctgagaaatatgaaactaagataactgaaagaggatcaaatttctcgggaggtcagatccaaaggatagcaattgcaagagcgataattggaaacccatcaatacttcttttagacgaggccacaagtgcgttagatgcagaatcagaatctgaagtccaagaaggtcttaatagagcgatgaaagatagaacagttcttgtaattgctcatagattagccactactcaagaagcaaataaaatagttgttttcgataaaggtgaaattattgaagttgggaaacatattgatttaatcaataaacctggaatttataaagaattatgtgaaaaacaattgattaaaaagtaa

SEQ ID NO: 269359 - DNA, 892 bp, Unknown
  Bacterial polypeptide expressing nucleotide sequence isolated from the Sargasso Sea
gctcagagcgctgtcagggggttggcgccggcgggcggccctggcccgctcgcttgcccctcgccctgacctgctgctgctggatgagccgaccaatcatctggattttgaggcgataagctggttggagagccgtctcgcggccttttccggggcggtgttgtttatcacacacgatcgggcatttctccagcgcctcgccacccggatcgttgaaattgatcgcggcaaactgcgtagttggccaggcgattatgctgactttctgcgtcgtcgggccgaggccctggcggcagaacgtcaggcgaactcggagttcgaccgcaagttggccgaagaagagatctggatccgacagggaatcaaagcgcggcgcacaagaaacgagggaagggttcgcgcgcttgaggcaatgcgtgaagtacgcgcacaacgggtgaatcctgatgccagggccagggtacacatagaggaggccgatcagtcgggtcgcaaggtgctggacgcgaggagtctctgctttgggtatggcgattcgatgttgattcaggacttctcgttgcggatccggcgtggtgaccggataggtctcgtcggaaacaacggtgtcggaaaaagtaccttactgagactgctcttgggagaaatcgagccaaaggcaggttcgatcaagtggggtgtgaacatccagcttggctatttcgaccagcaccgccgggagcttgaccaggacaaaacggtcgcgcagatagtgggagacggaagggagtacgtcacgctgaacggcaaaccccgtcatgttgtgggctatctgcggggttttttgttcagtgccaaacgtgcattgacgccggtccgtgcgttatctggcggtgagagaaatcgtgtaatt

SEQ ID NO: 269360 - DNA, 229 bp, Unknown
  Bacterial polypeptide expressing nucleotide sequence isolated from the Sargasso Sea
aagacaaagaatagcccttgcaagagctttagttcaaaacccaaaactacttattttagatgaacctactagtgcccttgatccagagtcccaagacactattattaaaatcttaaagtcacttaaaggaaaatttactatgattttaataacacatcatccttcagtgagtagaatttctgataaaatatttcaattaaagaacggttatcttactgagaaaatttaa

SEQ ID NO: 269361 - DNA, 262 bp, Unknown
  Bacterial polypeptide expressing nucleotide sequence isolated from the Sargasso Sea
aatgagctgtcttggtggccaacagcaaagagttgccattgcaagggcgcttgttaatgatccaagtattgtatttgcagatgagccgactggtaatcttgataccaaaacaggtgaggaaattatgagcctttttaaagagctacatagaaatggacaaacaataatagttataacccatgaaaatgatattgctgatcaaactgacaggataataactgtaaaagatggattaattgaatctgatgagtggagagtttaa

SEQ ID NO: 269362 - DNA, 499 bp, Unknown
  Bacterial polypeptide expressing nucleotide sequence isolated from the Sargasso Sea
atggaaaataaaaattctgatgaagttatagtaaaatttgaagatgtaaccaaacagtatggtgatttagtagttttggataaactcaatttagatatcaaaaaaaatgaaatggtttcaattattggtccatcaggatctggcaaaacaacagttttaagagttctaatgacattggaaaaaattaatggaggagttattcatttagatggagaaaaacttacacacatggagtctaatggaaaattaattgaagcagatgaaaaatatttaagagaaagaagatcaaaaattggaatggtgtttcaacaatttaatctatttcctcatatgacagcacttcaaaattgcattgaagctccagtagaggtgttgggtatgaaaaaagaagaggcagaagaaagagctcttgaacttttagaattagtaggtttaacagaaaaaaaagatcaacatccttcaagactttcggggggacaacaacaaagagtgcaatagc

SEQ ID NO: 269363 - DNA, 448 bp, Unknown
  Bacterial polypeptide expressing nucleotide sequence isolated from the Sargasso Sea
atgtttttgtagtttatcagtgcatgaaaatcttgaaatgggtgcttggactattgaaactaatttgaaagaaaaatttgaagaactctacaacctatttccagatttaaaggacaaaaggaaccaattagcgggtcaattatctggtggacagagacagatggtagcaatggctaaggctttaatattaaatgccgaagttcttttattagatgaaccaacagctggtttatctccaaaatacaggggagaaatatttgctactatacaaagaataaataaaagtgggcttccagttcttatggtagagcaaaatgcaaaacaggccttacaaatttctcaccgtggttacgtattagtagatggttccaataggtacactggaactggccaagatttgtcttctgatcctgatgtagcacgaatgtttcttgggtcaagaggttaa

SEQ ID NO: 269364 - DNA, 660 bp, Unknown
  Bacterial polypeptide expressing nucleotide sequence isolated from the Sargasso Sea
tatgtcagaagctgttataaaatgcgaaaatgtttataaaatttttggctctaatgcccataaaatgcttcaagatgcaaatggcaacgtagatgccaaaacattccaagaaaatggatgtattgttggtgtgaatgatgcttcttttgaagtttccaaaggagaaatgcttgttgtgatgggtttatccggatctggtaaatcaacattattaagatgtatttcaagattgactgaagcaacaggtggaaaaattttcatagagggtcaggatctacttaaattaaataacaaagaattaattaatcttagaagaaataaaatgggaatggtgtttcaaagttttgcattactacctcataaaacagtagtagagaatattgcatttcctttacaaataaagggaataaaaactgaagatagcattagcaaagcaatggatatggtcaagcttgttggacttgatggaagagaaaattattttccaagagaactttcaggtggacaacaacaaagagtaggtattgcaagatctttagcagttgaacctgatatttggtttttagatgaaccattttccgcattagatcccttgatacgaaaagagatgcaggatgaatttttaagactttcagaaaaactacaaaaaacaattatgtt

SEQ ID NO: 269365 - DNA, 628 bp, Unknown
  Bacterial polypeptide expressing nucleotide sequence isolated from the Sargasso Sea
agagcgcgtgccctggtgggagctagcggtgctggaaaaagcacgctgctcggcgtggccaatgttctgattcagcccagtagcggctctgtggagtggtttggtgaaccacgcctacgtcgccggttgcgttctcgcatcggcacgctctggcaagacctgcggttgatcgaggggatctctgttcaacacaatctcaataccgggcggctggcccagtggtcctggtggcaagtgctgttcaacctgttgcggcccttggaataccgcccttgcgctgaggctttggcacaggtggagctagaagctgcgctgttgccgctgccactcagtgctctgtcgggaggacagcgtcagcgggtggccatggcccggttgttgcgccaaaacgccgagttgctgttggccgatgaacccctcgcgcagctcgatccgcccttggcgcggcggttgctgcagttgttgttgggcttggcgactcccccgcgggccctgctcatgagcttgcatcgccctgattggctcgacggtttcgatcgcgtcgtcggtttgcgccacggggagctgctgtttgaccgcccagcccaggacatcacaacgtcggatctggagcagctctattcatgag

SEQ ID NO: 269366 - DNA, 605 bp, Unknown
  Bacterial polypeptide expressing nucleotide sequence isolated from the Sargasso Sea
tcacgacatcggccctcccgaatcacaccctgaccgagcggttcagcttatggagcaggtcgggctgtcagccgcgcagctcgatcgcttcccacacgagttttctggtggtcagcggcaaagaatcggcatcgcgagagcactggcagttaatccggacttcatagttgcagacgagcccgtgtcagctctagatgtctcggttcaggcacaggtcatcaaccttctaagcgacctgaaggatgagctcaaccttacgatgctcttcatcgcgcacgatctggcagtggtagagcacgtatgtgatcgcgttgcggtgatgtacttggggaaaatcatggagatcgctccggccgacactctctacagtcgacccaaccacccgtacaccgaagccctgctatcagcggtgcctactcccgaacccggacgcaaaagggacaggatcacacttagcggtgatatcccaagcccgattgatcctcctgccggatgtgtcttccgtactcgatgtccacgagccgaaaaggtctgctcagaaaagatgcccaaactagtgggactaggcgaagggcacttcagcgcctgccacctgaccacatgat

SEQ ID NO: 269367 - DNA, 330 bp, Unknown
  Bacterial polypeptide expressing nucleotide sequence isolated from the Sargasso Sea
aacaagttggtgaaggcggtttatcactaagccgtggacaacggcaaacagtcgcattagcaagagcaacactcaatgatccgcctattttgctaatggatgaacccactgcaagtttagacgcacgagccgaaaaacaatttattcgctcaatgcaactggttagccgcgatagaaccctattactcataacacataaaatgcatctgcttaatcttgttgatcgcatcatcgtattagatagggggcatattatggccgatggccctaaaaatgaagtgcttgctctgctcaactccggcacaatggcaggagagcaaacaccatgag

SEQ ID NO: 269368 - DNA, 661 bp, Unknown
  Bacterial polypeptide expressing nucleotide sequence isolated from the Sargasso Sea
atgtctaaatcttcagctataatacttaaacttgaaaatctaaaaacttattttcctgttaagaaaggaatttttagaaacacagttggatatgttaaagctgtagatggaattaatttagaaattagaaaaggagagactttaggtttagtaggagaaagtggttgtggcaaaactacacttggcaaatcgattcttcaattagtcgaatctactgaaggtaaaattttatattgtagtaatggacaagaaacagaccttcgaaaacttcagcaatctgaaatgaaaccttttagaaaaaaacttcaaattattttccaagatccacattcatcattaaatccagcatttacagtatatggctcattaaaagatctactaaagaattttggaactcaatcaaaaactgaaataagaaagaaaattggagatcttcttgaagcagtcaacatgagaagagatcagatggataattatccccatgaattttctggaggccaaaggcaaagaattggaattgctagagcactttgtgtagaaccggaacttatcgtttgcgatgaagccgtgagtgctcttgatgtttctattcaagcacaagtcctaaagcttttaaaagatattaaagatgaaaataatttgacttacatttttatcacac

SEQ ID NO: 269369 - DNA, 335 bp, Unknown
  Bacterial polypeptide expressing nucleotide sequence isolated from the Sargasso Sea
tgttaatctagcgcaacaagaagtcaagtctgaggtattattacctttagtttatgatgatgaagatcgcaatgttagagataggctatatgagccatctaaggaaagcctaattaactctctagtgccacgacatttaaatattcagatttggaaatatcttttagagtcatatgcaagtgagcaggctgccagaatgttggcaatggaaaatgccactacaaatgctggagatatgataaaaaatttaacactagaatttaataaagctcgtcaagctgcaattacaactgagatgcttgaaattgttagtggtgctgaggctttgaaataaa

SEQ ID NO: 269370 - DNA, 601 bp, Unknown
  Bacterial polypeptide expressing nucleotide sequence isolated from the Sargasso Sea
attatgggctcttcaggatcaggaaagtctacattacttaacattttgggcatgctcgatgtggcaaacaaaggcacttacacccttgacggaaaagtcatcaaagacctagatgaaaccaaggcggctatttatagaaataagtttctgggctttgtgttccaatcttttaatttgatctcatataagacggcactggagaatgtcatgctgcccttgtactaccaaaaaatatcacggaaagaacgacaacaaagtgcacaaaaatatctggaagaagttggtcttggcccttgggcaagccatcatcccaacgaattatctggaggtcaaaagcagcgtgtggccattgcccgtgctttggtttctgaacctaaagtattgttggccgacgagcctacaggtgctttagacagtaaaacatcatatgaacttatggatctgcttcaaaaaatcaatgatgcaggaaaaactctgttgattgtcactcatgaattagatatcgcaaatatgtgtaaacgtattgtacatcttcgtgatggcatcatggtggaggataaaaaagtcagccaaatcaaagcaaatcagtatgtggagtaga

SEQ ID NO: 269371 - DNA, 439 bp, Unknown
  Bacterial polypeptide expressing nucleotide sequence isolated from the Sargasso Sea
ttacgaaaatttattaggcatagcgcaaatattgaaaaaaaaacctagagaacaaaaagatgttgtagaaaaattaatggcagaattttcaattacccacttaagggatgttcgcgcaaccgctttatctggtggagagcggagaagaacggaaatagcaagatgcctaataagcaatcctaaagttttattattagacgaaccttttgctggagtagacctactttcaatacaagacataaaaggattgcttttaaagttgcaatctagaggttgcgcagtattggttacagatcataatgcttcgcagcttttaagcgttgttgatcgagcatatgtgctggctaatggaataattgtagcaaacggtcctccaagagaaattgtaaatactgctgaggcaaaaaaattatattttggtgaagattttagaatttaa

SEQ ID NO: 269372 - DNA, 676 bp, Unknown
  Bacterial polypeptide expressing nucleotide sequence isolated from the Sargasso Sea
atgactaattccattgaagtaataaatttatccaaaaaatataaagataaagaagcagtagctaatataaattttaaaattaatgaaaatgaaatggttggtttattgggaccaaatggatgtggaaaaactacaactattggaatgattttaggattattaaaaccaagtagtggtgaagttttaattaatggagtgaatattgaaaaaaataaaatttcgcttcttcataaaatgaattttatttcaccatacattgaattacctaaaaaacttaaggtaaaacaaaatttaattgtttatggaaagttatataacattcaaaatttaaatgatcgaatagatcaccttgcaaataaacttagattaaaagaccttttaaacaaaattactggagaactttcttctggacaaaaaaatagagtaagtcttgctaaagctttaataaatgatccaacggtacttttgttagatgaacctactgcttcattagatcctgaaacaggtgattttgtaagatcttttttagaggattataaaaaagaaaaaaaaatatcagttttacttgcctctcataatatggaagaagtgaaaagattatgtagttctgttctaatgatgaaagatggtttaatagtggatagaggaactccagaagagttaataacaaaatagg

SEQ ID NO: 269373 - DNA, 754 bp, Unknown; identical to SEQ ID NO: 268596
  Bacterial polypeptide expressing nucleotide sequence isolated from the Sargasso Sea

SEQ ID NO: 269374 - DNA, 679 bp, Unknown
  Bacterial polypeptide expressing nucleotide sequence isolated from the Sargasso Sea
aatggctaaaattacattaaaagatctaagtcatagttatttagaaaaacagaataacgactctgattgggctttaagaggtgtaaatatagactggaaagacggaggtgcttacgcattactaggcccatctggttgtggaaagacaactttattaaatattgtttcaggcttattaaaaccaacaaagggcagtgttttatttgatgataaagatatgacatcacttaaccccgttgaaagagatattgctcaaatatttcagttcccagtaatttatgacaccatgtctgtatatgataacttagctttcccattaaaaaacagaggtctttcagactcagaagttgcatcaaaagttaaagaaattgctgagatgcttgaattgacatctacattaaataacagagcatcaggtttaacagctgatggaaaacaaaaaatttcattaggaagaggtcttgttagatcagacgtaaacgtaattatgtttgatgaaccattaactgttatagatccacatttaaagtgggttttaagatctaaattaaaagaattacatcaaaaaattaatcgtactatgatttatgtgacgcatgatcaaacagaagccttaacatttgcagatcaggttgtggtcatgcatgaaggtcaaatcgtccaaactggaacacctgtc

SEQ ID NO: 269375 - DNA, 709 bp, Unknown
  Bacterial polypeptide expressing nucleotide sequence isolated from the Sargasso Sea
catggtccgagtacttgaggctaaaggagtttggaaagtatatgaaacagcagctacgcgtgttgaggcactaagggatgtctcagtaaaaataaatcaaggagagatggttgcagtaatgggtccttccggctgtgggaaaactacgttattgaattgtctttcaggattagatgaggttagccttggaaaagtttttgttgaaggcgtctctatttttgatggtgatgatacacttagaactaaagttagaagggagcaattaggattcattttccaatcatttaatttaattccagttctttctgctttagaaaatgtagaaatgccacttcaattaaatagtgctgaacctaattcaaaagcaatcagaaaaaaagcactaagagcacttgaaaaagtgggattaaaggactgggcgtcacataggcctgcagaattatctggagggcaacaacaaagagttacaattgctagggcttatgtccatgaaccagggcttctattggccgatgaacctactggaaatctcgatacagaaacgggtactaaaattctggaccttttagttgaattgaataaggaattaaatattaccatgatgattgtgacacatgataaagaggtatcaaaaagatgttcaagaacactagaaatgcgtgatggaagaatttacaaagatacaaaaaatatacttgaagaagaataa

SEQ ID NO: 269376 - DNA, 571 bp, Unknown
  Bacterial polypeptide expressing nucleotide sequence isolated from the Sargasso Sea
atgtctagaccagtaattaaatgtgaatccgtttataaagtttttggagtaaatgcaaaaaaaatgcttcaaggagttagcggcaatgtggatgctaaagcttttcaggaagctggctgtattgtgggagttaataatgcttcttttgaagtctcaaaaggggaaatgctagttgtgatgggtttatcaggttctggaaaatcaacactgcttcgatgtatatctagattaacagacgcgacagtaggaaaaatttatatcgaaggccaagatttattagctttaaaaaataaagaattgattgagttaagacgaaataaaatgggaatggtcttccaaagttttgctcttcttccgcacaaaacagttttagaaaatattgcttttcctttgcagataaaaggaatgaaaactcaagatagtatttcaaaagctgtggaaatggctaaacttgttggtttagagggacgagaaaattattttccaagagaactatctggtggacagcaacaaagagtagggatcgctagatctctagctgttgagcctgaatatttggtttttggatgaa

SEQ ID NO: 269377 - DNA, 373 bp, Unknown
  Bacterial polypeptide expressing nucleotide sequence isolated from the Sargasso Sea
tttgggatacaccaataatagtgaagcctacgttagtttccagaatgttcaaaaaacttatgatggtgaaagctttgtcataaaaaatttgaatttagatgctgaacgtggtgaatttattaccatgcttggtccttctggatctggtaagactacttgcttgttgatgcttgctggttttgaaaccgcaacttatggagaaataatattagacggcacttctataaataatgtcccgccacacaaacgaaatatcggtatggtatttcaaaactatgccctgtttcctcatctaacagtaaatgaaaatctagctttccctctacaagttagaaaagttgaaaaaaacgaaatagcaaaaaaagttagaaat

SEQ ID NO: 269378 - DNA, 877 bp, Unknown
  Bacterial polypeptide expressing nucleotide sequence isolated from the Sargasso Sea
gggcaatgcaggaaaaatgctccaagaatctaatgggaatgttgatgcccaaacttttcaagaagccggctgcatcgtgggggttaacaatgcttcttttgaagtttcaaaaggagaaatgttagtagtgatgggattatccggttccgggaaatcaactcttcttagatgtatttcaagactgactgatgctacatcagggaaaatttttgttgaaggtcaagatttattatctttaaataataaagaattaattgagttaagaagaaataaaatgggaatggttttccaaagttttgctcttcttcctcacaaaacagtattagaaaacattgcttttcctttacagataaaaggaataaacactgaagatagtatttcgaaagcaatggatatggttaaacttgttggtcttgatggaagagaaaattatttcccaagggaattatctggaggtcagcagcaaagagtaggaattgcaagatcacttgccgttgagccagatatttggtttttagatgaaccattttctgctctagaccctttaatcagaaaagaaatgcaagatgaatttttaagacttcaaggtgttttaaaaaaaacaattatgttcattacacatgattttgacgaagcccttagacttgcagatagaattgcaataatgaaggatggaataattgagcaattagatacatcagacaacattgtattaaatccagcaacagaatatgtaagaaaatttactcaagaagttccaagagagaaagtcttaaaaatagaggctgtaatggacccggttagtgatgatcaaaatttaagtgatttaatagtttctcaaaatgcgatcattgaagaagttgctgaacaaatttta

SEQ ID NO: 269379 - DNA, 737 bp, Unknown
  Bacterial polypeptide expressing nucleotide sequence isolated from the Sargasso Sea
tatgattgaaattaagaatataagtaaatcttttaaggatcaggagtctactaatcatgttcttgacaatgtaagcattaccattagaaaaggtgattgtgtagctataataggtaaaagtggaataggtaaaagtgtacttttaaagcatattataggtctagttaagcctgataaagggagtgtttttatagatggcgttgatattaatgcaattcgatttaaggatttacaaaaaatacgatcttctataggaatggtttttcagtttggggcattattggattcgatgaatgtagaagataatataggtttagcactgaacaaattatcaaatttatctaaagactcaattaatgtcaaaatttttgattcacttgcttctgtcaatatggaaggtactgaaaaattaatgccttctgaactttctggggggatgaaaaaaagaataggtattgcaagagctattgcaatagatcctgaatatttattgtacgatgaacccactacaggattggatccaatcacaacaggaaaaattaattttttaataaaaaaaatccataatttgggtaatgtgacttctataatggttactcatgaacttaaaacagtttatgatgttgcagatagagttataatgttagatgaaaaaaaggttatctttgatggtaagcctaaacagctaattaatagcaaaataccaattattcaagaatttattggtaatagcaatg

SEQ ID NO: 269380 - DNA, 788 bp, Unknown
  Bacterial polypeptide expressing nucleotide sequence isolated from the Sargasso Sea
aatgcatccatttgaagtttcaaaaggtgagatgttggttgtgatgggtttatcaggttcaggtaaatcaacattgttaagatgtatttctaggttaacagatgctacagatggaaaaatttttatagaaggccaagatttattatcattaaacaataaagagttaattgaacttagaagaaataaaatgggaatggtttttcaaagttttgctctactacctcacaaaacagttgtagaaaatattgcttttccacttcaaattaaaggaattaaaactgaagacagtattagtaaggcaatggacatggttaagctcgttggacttgatggaagagaaaattatttcccaagagaactttctggtggacaacagcaaagagtaggtattgctcgatcattagctgttgagccagatatctggtttttagatgaacctttttctgcattagatccattaattagaaaagaaatgcaggacgaatttttaaggttacaggagaaattacaaaaaacaattatgtttattactcatgattttgatgaagcattaaaacttgctgatcgtattgcgattatgaaagatggtataattgaacaattagatacacctgcaaatatagttttaaatccagctaccgaatatgtaaggaaatttactgaagaagtacctagagaaaaagttttattaatacaagatgtaatggatccatctaccgaaaataatttgggtgatttaaaagttttaaaagatgaaattattgaaaatgttgctgaaaaaattttaa

SEQ ID NO: 269381 - DNA, 343 bp, Unknown
  Bacterial polypeptide expressing nucleotide sequence isolated from the Sargasso Sea
gttgagggaaagaggtcaaaagctttcaggtggacaaaggcagagaatttcaattgccagagcaatccttaaaaatcctgaaatacttattcttgatgaagcaacatcagcggtagacaatgaaactgaagcggcaatacaagagtcacttgaaactttaaaagaaggtagaactgttattgcaattgctcacagactttcaaccataagaaatgctgatttaatctatgtgttagaagatggtgagatagttgaaaatggaacacatgatcaacttttaggaaataataatgtttacacaaaactctgggacgttcaaacaggaaaaactagaagattttaa

SEQ ID NO: 269382 - DNA, 193 bp, Unknown
  Bacterial polypeptide expressing nucleotide sequence isolated from the Sargasso Sea
attggtagctgatatcgaggtgttcgaagggacctcgggcattgacaaccgggactgccacgtggagttcactggcgacacgctgaagatgcccatctcccaggacctcatgggccgcgcgttcaacgggtcacgcggcggtgcagagaggctacacgatcgcattcaactagcgaggtggaagaccccgaga

SEQ ID NO: 269383 - DNA, 637 bp, Unknown
  Bacterial polypeptide expressing nucleotide sequence isolated from the Sargasso Sea
ttacgaccccctcgacggccgaatcacgctgggcggtgtcgactacaagcagctcaacttcgtctccatgcaccggcagattgggacggtctctcaggagacgcagctgttcaatgacaccatcgccaagaacataacctatggtgcgccggacgacgtcagcgacgaggacgtcgaggctgttgcacgggctgcacaggcgtgggaattcatctcgagttttgaggacggcatgcacaccaaggtgggcgagcgtggacagcggctgagtggtggtcagaagcagcggatcgcaatcgcgcgctgcctgcttcgcaagccgaagctgctgctgctcgatgaggcgacgtcggcactcgacgccgcgtccgaggcagctgtgcagaaggcactcgacaccctgatctggacggggcaccataccgtgctcctcgtggcgcatcgactctcaacggttgtgaatgccaatcagatcgttgtgctccagaagggcaactgcgtcgagcagggcaagcatgccgagctgctcgataagagcggcgtttatgccgagctcgtgcacacgcagcttcagcactcggttgaggccggcgcggccggcggcggcggtgcagcgccccccagcgccgaatcttga

SEQ ID NO: 269384 - DNA, 736 bp, Unknown
  Bacterial polypeptide expressing nucleotide sequence isolated from the Sargasso Sea
atgttcattgaaataaataatcttacaaaaaattatggaaaatatacagcagtcaataaaattaatttcgcaatagataaaaacaaaactattggtcttttgggtccaaatggatgtggaaaaacaactactataggaatgatgctaggtcttgtaaccccctcagaaggagagatcactatagagaataaaaacattaatacattcagaagagatgagattttaaaaagattcaattttgcatcaccttatgttgaattaccaaaaaaacttactgttaagcaaaatcttgaaatttacggaagattgtatggtgtaaaagaattacgaaaaaggattgaagagatatctattgatttagatataaaaaatttttttaatagaaaaacaggtgaactttcatcgggtcaaaaaaatagagtttcgttagcaaaatctcttattaataagcctgaaattttacttttagatgaaccaactgcaagcttagatcctgatattggtgactttataagaagctacattcaagaatataaatcaaagaacaaaattacaattttattagcctcacacaatatgaacgaagttgaaaggctttgcgatagtatcattatgatgaaaaaaggtaggattattgatgttggcacatgtagggagctcataaaaaaacatggaagaagtaatttagaagaaacatttttaaaattagctaggagtaaagatgaatttttttaag

SEQ ID NO: 269385 - DNA, 826 bp, Unknown
  Bacterial polypeptide expressing nucleotide sequence isolated from the Sargasso Sea
ggagttactaaataaagttagacttccttcaccagaaactatggcttttcgttatccacacgagctttctggagggcagcaacaaagagtagctgtcgcaatggcattggctggaaaaccagatttacttttattagatgagccaactactggattagacgttacaacacaagcgcatgtattagaactattaagatttatagcaaaagatactggaacatctatgatctatgttagtcatgaccttggagctatagcacaagtcagtgatagaatagttgtaatgtatgcgggagaaattgttttagaaggaccagcaagaaaaatattaaaggaacctattcatccttatacttatggattgttaaaatcgatacctaaactctcactagctggacttccagcttctatgccaggaacccaacctcagcctggaagtataaatgaaggttgtagtttttatgatagatgtaatttagcaactgatcattgtaaaaaaaattcaccagatctggaacatattaaagaattagataccaatgtcagatgttttaatcataaagaattaataaatcaaaataataatttacaaacttcaataacaaaaaaatcaaataatagtgaagcaattgaagttttaaaattaaaagatgtttcaattagttatgcaaagcagaaattttttgatcaattattaaataaaatctctgatcaaaacccaacagttaaagatataaatatagatataaaaaaaggagagactattgcactggttggtgagtctggaagtggtaaatctactatcttaaaatcaattgcaggttta

SEQ ID NO: 269386 - DNA, 538 bp, Unknown
  Bacterial polypeptide expressing nucleotide sequence isolated from the Sargasso Sea
attgcgctggactaaacctttattatcatcaatattgatactcttcttgggctgtgagctctcggaaggcgtttttgagaaccctctcgatcgggaagtcgcttctagtaatggaatttctccacctgctttagtgttttatccagatatcatttccacgaatgctggtgcaggtgcacctactagcgtatatgcgatggagattagtggggtgggaatggcagagatcgagattaattacgatcccaataaggtttcggtagggtcggttgccaagggagagttatttgatggagggaatcaaccttttttccattatgaggatgatagcgcaggatccctcatagtctacattggatatcttggacccaatggaaactcgattagcggtactggtaatatcgcaaatataatatttaacactttatcagcgggctcatctgagattagtatttcaagtacaagtagaatattagatccagatgcaaaagcaatcactttaaacggttatggcaagggaacgattgatgcgcagtag

SEQ ID NO: 269387 - DNA, 661 bp, Unknown
  Bacterial polypeptide expressing nucleotide sequence isolated from the Sargasso Sea
atgagcttaatggatatcaaatttgaaaaaaattacaataattttgtattaaattgtaactttgatgtggatgaaaaaattaatggaatatttgggccttctggatcaggtaaatctactttgctaaattgtattgcaggatttacaaatcctgattcaggtaaaattttaatagaaggtaagacattttatgatttgaaaaagaaaattttattacctcctgaaaagcgaaatattggttatgtcactcagaaatctaatttatttccttcaatgaatattaatgaaaacatatattacggatataaggtagatagtagaataaacattaaagatattattgatatgatgaatattaatgatttattgctaaaattcccaaatcaaatttccggaggacaggcacaaaaagttagtattgctagagctttagctagtaaccctaatgttcttttaatggatgaaccattgtctgaattagatttgaattctaaacttatgattttgaattacttaaaaaaaattaatgcagaatataaaattccaataatttacgtctctcatgatatttctgaaatgatagctatttgtgacaatatatttataataaaaaatggaagtattaacaaaaaaatttcatcttctgaattatcactcgaaa

SEQ ID NO: 269388 - DNA, 609 bp, Unknown
  Bacterial polypeptide expressing nucleotide sequence isolated from the Sargasso Sea
aatgtctgataatctaattgaagtaagaaatctagtaaaacattttgaagtctctaaaagtttgttttctagaaataaaaaaatagtcaaagctgtagacggtataagttttgatattaaggctggagaaacactagggctagtaggtcagagtggatgtggcaagactacaactgctagatcattatgcttgcttgatccaaaaacttcaggtaatataaatttttataatcctgattctcagagtatggagtcatttgataatatcaatgaagacggtttgaagacttttagaagaaatatacaaatgatttttcaggatccttacgaatctttgaatcccagatggacaataaaagatattataaaagagccacttgatattcataacataggatctatgaatgaaagggaagaagcaattatagagattttaagaaccgtaggcttgactccacctgaaaactatcttggaagataccctcatgaaatttcaggtggccagagacaaagagtttcaatcgcaagaacactggtaatgaaaccaaagtttgtagtgtgcgatgagccaacatcaatgttagatgtttccataaggatttcaataat

SEQ ID NO: 269389 - DNA, 407 bp, Unknown
  Bacterial polypeptide expressing nucleotide sequence isolated from the Sargasso Sea
catgacatcagaaacaatgatagaaatgagtagcgttcataagtggttcggagaacttcatgttcttaacgatattaacttgaaagtagccaaaggagaaaaaattgttatttgtggaccttcagggtcaggtaaatctactttgattagatgcataaacagactagaagagcatcaaaggggagaaattgtagttgaaggtacagagctaacaaacgataacagaagtgttgaaaaaattcgtggagaagtaggaatggtatttcaacagtttaatcttttccctcatctttccatattagataattgttctttggcacctatatgggtgaggaagttgccaaaagttgaagccagagaaaaggccatggaatatttaaaaaagagtccaaatcgacgatcaggct

SEQ ID NO: 269390 - DNA, 562 bp, Unknown
  Bacterial polypeptide expressing nucleotide sequence isolated from the Sargasso Sea
aatgaatgaaataattgaaagcgttaaaaatttatcaattggatttaacagtcagaagggcaaacaaatttcaatacttagaaatgtttcaaccaatataaaaaaaggagagactgtagggattgtaggggagtctggttctggaaaaagcacattagcacttgctatgatgggctatataaaacaaggcttatttcctctcaagggtgaatgcctctttaaatctgaggatttattgaagatgagcagtagacagctagaaaaaattagaggtagaaaaatagctatgatacctcaaaatgcaggacaagcactaacaccaaatttaaaaattggataccaaattgatgaggcattaagatttcatacagatctaaacaaaacagagagagataaaaaaatttctgagttactaaataaagttagacttccttcaccagaaactatggcttttcgttatcctcacgagctttctggaggacagcaacagagagtggctgttgcaatggcattggctggcaaaccagatttacttttattagatgagccaactactggatta

SEQ ID NO: 269391 - DNA, 560 bp, Unknown
  Bacterial polypeptide expressing nucleotide sequence isolated from the Sargasso Sea
aatgaatgaaataattgaaagtgttaaaaatttatcaattggatttaacagtcagaagggcaaacaaatttcaatacttagaaatgtttcaactaatataaaaaaaggagagactgtagggatcgtaggggagtcgggttcaggaaaaagcacattagcacttgctatgatgggctatataaaacaaggcttatttcctcttaagggtgaatgcatctttaaatctgaggatttattgaagatgagcagtagacagctagaaaaaattagaggtagaaaaatagccatgatacctcaaaatgcaggacaagcattaacaccgaatttaaaaattggataccaaattgatgaagcattaaaattacatacagatctaaacaaaacagagagagataaaaaaatttcagaattactaaataaagttagacttccttcaccagaaactatggcttttcgttatccacacgagctttctggagggcagcaacaaagagtggctgttgcaatggcattggctggcaaaccagatttactattattagatgagccaactactggat

SEQ ID NO: 269392 - DNA, 1030 bp, Unknown
  Bacterial polypeptide expressing nucleotide sequence isolated from the Sargasso Sea
tatctagagcaacagaatagtaattctgattgggctttaagagatgttaatattgattggaaagacggtggtgcttatgctcttttaggaccatctggttgtggtaagacaactttattaaatattgtttcaggcttattaaaaccaacaaagggcagtgttttatttgatgataaagatgtgacatcacttaaccctgttgaaagagatattgctcaaatatttcagtttccagttatttacgacacaatgtcagtttacgataatttagctttccctttaaaaaatagaggtctttctgactcacagattgcatctaaagttaaagaaatagctgagatgcttgagttaacaaccacactaaacaatagagcatctgggttaacagctgatggtaagcaaaaaatttccttgggtagaggacttgtcagatcagatgtaaatgtaattatgtttgatgaaccattaactgttatagatccacatttaaagtgggttttaagatctaaattaaaagaactacaccaaaaaattaatcgtactatgatttatgtgacacacgatcaaacagaagccctaacttttgcagatcaagttgtagtcatgcatgaaggtcaaatcgtacaaactgggacacctgttgaattatttgagaaacccaaacatacttttgtaggacattttattggctcacctggaatgaacatacttccttgtgaaattaaaaatggtgaaataaatttcagtggtcaaaaattacaaagtcataatgctataaaaaaatcaaattttaagaaaactcaaataggtattaggccagaatttattaatttttcaaaagatgggattccggtaaaaattaaaagagtaagtaataccggaagacataagatcgttgatacagagtgtaatgggggaaatattaaaatattatctaatgcctccactgaaattccaagtggaagcgctcatataacttttaatcaaaaatacacttatgtttacggagataactggattatagaataat

SEQ ID NO: 269393 - DNA, 712 bp, Unknown
  Bacterial polypeptide expressing nucleotide sequence isolated from the Sargasso Sea
atgacaataaaaccaaaactagtttcatccaataatggtcttgtagttaataaacttagaaaaactctttcacaaaagcaaatagtgagaaatgtgagtctcaagcttgaaagagggaagacaatcggattacttggcccaaacggtgctggaaaaacaacaacgttctatatgatcatgggcttgattgattgtgatggaggtgaaatattactagatgatattcatcttacatcccttccaatgtataaaagggctaaattaggcatagggtttttacctcaacaaccctcaattttcagaggtatgtcagttgaagacaacctgctatcgatactagaaactcaaaaacttccgaaagatcaaaaacaaaacatgctagaagaattacttacggagttttcacttacacatttaagaagagcaatgcctcacatgctaagcggtggagaaagaagacgaactgaaattgcaagatgtctttgttctgatccaagtataatacttatggatgagcctactgctggtgtcgatcctataggtatagatgatatcaaagttctcataaaacaattaatgaataaaaatattggagttttaattaccgaccacaatgttagggaagttttagatatttgcgactattcttatgtaatgcattcaggagaaataattgctgagggcgaaagtgacattatactttggcaataaa

SEQ ID NO: 269394 - DNA, 1564 bp, Unknown
  Bacterial polypeptide expressing nucleotide sequence isolated from the Sargasso Sea
gggttcgctcgatgtttccagtgaaagagcaaaaagcaaagaattaaaacatttaaagttgttgtttaattttgcaaggccttattggaaaactatgatcttagcaattatagcactaattggtgctgcaattggaacactaggtataggtagagtaattcaattattaatcgatagaggttttgaagaaggatctaggggtttaagtgaaatcataattttagcatatttggttgtattaattatttcagttgcaacctttatgaggtactatctggttatgtggttaggagagagggtagtctctgacctacgtgcttcaatctataaaaaagtaattgcacttagtccaagttattttgaactaaataaaactaccgaagttttatcaagaatatctattgatactactttaatacaatcaattgttggagcaggtgcttcaattgctcttagaaatttaatgttattaataggagggttgataatgttaaatataactagtttcaagttatctctattaataatgatttcagttcccttaattattttacctcttatattatttggaaaaagagtaagaaatttatctcgtgaaactcaagcagcaatagcaaatgtcaattctgtcgctgatgagaccttaaaagaaattagaactgttcagtcttacgtcagagaagatatagagttttctagatttgtagatagagtgaactctagttttaataaggcaaaaaaacagattatggctagaggtcttttaaccttcgcagttattgcagttgcatttggatcagttgtttcagttttatggataggggcatcagacgtgatggttggagatatgacggcaggagatttaggtgcttttgttgtatatgcaataatgactgctgcttctgtggcggcattatctgaggtttatggggatctgcaaaaagccgcaggtgcagctgaaagaatctcggaactattaatggctgagccggttataaagccaccattaaaacctttaaaattaaagaataaccctcaaggcataatagaattcaaaagtgttacgtttgcatatccttccaggccgaatataaatgttttaaataatttttcgttgactattcaaccaggagaaaccgtcgctcttgttgggccatcaggttcaggaaagactactatttttcaattagtcttacggttttatgatcctcaagaaggttttatttcatttgataatctaaatttgattagggtagatcctcgggatttaagatctaatataggtactgttccccaagatccagtaatttttgatacgaacgtttgggataatattgcttacagcaaacctgatgcttcagaagcagaaatagtatctgctgctagtgcggctgcagctacagagttcattgataggctcccagaaggttacaatacaaatcttggagaaagaggagtaactttatctggtggtcaaaaacaaagaatagcaatcgcaagatcaattttacataacccttctgtgcttttgttagatgaggctactagtgctcttgatacagaa

SEQ ID NO: 269395 - DNA, 1519 bp, Unknown
  Bacterial polypeptide expressing nucleotide sequence isolated from the Sargasso Sea
cctgggggagaagcccagatacctggcaggaaatgacaaggcaacgatcggcgagttgatcaagctaaataatatttattctaggctaatcaaacttcctaaagttgttaatactcgtagttatcgtccgtttgacttgatctgtttttctcgtgatcttaagcagacgtatctacttgaatacactttaacgaagcctaaaatctcctcaattgtcgatggtcgtttggttgaactgccaacgatcccggagcttagtgcatttggatatgaaatatacccctctttatcctttgacctgaagaaaccatttgatttgctagtctttgcttacggggcagaagttaagcctttaattagcctaatacttgttagcattgttgtattaatctgtggcttgtcaatcccaattttgtcgggagtcttggtctctgatgtgattccacagggaaattcacagatgctttttgcttgtttggcaatcatcttgtttgttgtagcaacttcaactattagtcagtatattcaaggcattttaatgcttaggattgagacaaaggcagatttaaagcttcaaaccgccgtttgggataggttctttaagctcccaaatcaagtcattacaagtttcaatttgggtgatctctatgttcgtttgagctcaatatcaagaattcgctcacaacttaatgctggggcaatgtcaagtctgcttcaggcagttttctcaatctcttatatttttctgatgtatatctacagcccaactttgactgtctgtgttttattactgacaattctctatatagcgtttgtgatttattttggtaagaagtctatcgcagtgtgggtcaagctttaccagttcaaagctgaaatatctggtcagtcatttgaaactacagaaatcatacaaactctaaaagtgtattcggcgcagcgtgggttttccaggagctggcttggcaaatttagatcaatttctgatctagttgtcaaagcagatttctatagtcagtccatttcccttgtgactagttcaatgacgtcgttgggaactgttctgttttttgttgttttcactcagcaagtttttgccaatcctgaaattcttgataatccatctttggttggtaatttcgttgcattttatgttgcatttattgcttttaatactgcgatcacttccgcagtcaccgcccttgtttaccgctttgcgattgtggttgccctttgggattatgcacaaccactcattctgaagccaattgaacccagctttgcacctgattcaattgttaagtcgattgatggttcgattcaagttatgggattaacagtgaagcctaaagacagggacgtagagttgttcagtaaattaacatttaatgttgaggcaggcgagttctatggcgtcaaaggtgctcaaggttctggtaaatccacgctgcttcgaattctggctggaacagagttggttgaatattgcaaggtgatgattgatcatcttcctttagac

SEQ ID NO: 269396 - DNA, 1798 bp, Unknown
  Bacterial polypeptide expressing nucleotide sequence isolated from the Sargasso Sea
gctgcttgccgtgtatctatgcgcgccgtttgtcgcgagcgtgccgcaactcggcgcggccgactgggcgaatgtcgactggcgcgcggtgtggtcggcggtcggcatctcggcggcgagcgccagtgtggcctcgctcgtgattctgctcggcggcgtgccgctcggctatctgctggcacggtcgaactcgcgcaagatggcgctgctcggcttcgtcgtgcagttgccgctcgccttgccgccgctcacgagcggcgtgctgctgctgtttctgctcggcccgtatagctgggtcggccagttcaccgacggcgcgctgacggattcgtttgccggcatcgtgctcgcggaagtcttcgtggccgcgcccttcctgatcatcgccgcgaaatcggcgtttgccgccgtggacccggtgctcgacgacgtggccgccacgctcggtcaccatgcgggcagccgttttttccgcgtgatgttgccggtcgcatggccggcgattcgtgcggggctcgcgctcgcctggttgcgtgcgttcggcgaattcggcgcgacggtgatggtggcctatcacccgtattcgctgccggtgtacacgtacgtcgtattcggcggccagggtctgccggcgatgatgcccctgctgctgccaacgctcgccattgcgattgtgtgcgcggcgctgtcgatctatagcgttcggcagaaatccgcgctcgaacaaaccgaaaacggcgacgacgcgccggaacccggcacggatctcaccgccagccggggcgagaccgccggccggcgtctcgcctttcatctgcaacgccgcctgggcgcgttcgaactcgacatcgcgtggacgcccgcgacacgacggctcgcgatcatcggaccgtcgggctccggcaaatcgctggcattgcgcctgattgcggggctcgaatccaacgcatcctgttccgtccggctcggcgccaccgatttgagcccgctgccgcccgagcgccgccagatcggttatatgccgcaagactacggtctgtttccgcacatgacggtcgcgcagcaactcgcgtttccggtcgacgccgatgccgccagcgcgcgttactggctcgatcatctgggcctcgcgcaactggtcgcgcgcttgccgcatcagttgtcgttcggtcagcggcagcgtgtggcgctggcccgggcgctcacgcgtcatagcgaattgctgctgttcgacgagccgttcgcggcgctcgatacaccgcggcggcggcgtttgcagcagtcgttgcgagccttgcagcgcgagatagccgcggtgaccatcatcgtcacgcacgatcccgacgaagcggctctcctcgccgacgaagtgctggtggtcgaacagggccgcgtgttgcaggcgggtgccattgccgcggtattcgaacagccggcttcgatgcgggtcgccgaactgctgggcttgcacaatgtcggcgagggttcggtgaccgccccgggtcggatcgagatcggcaatggtttgacaatcgcaacggctcacggcgaccaggagattgccgttgggcaacgcatgatgtggcgcatctcgtcgcacgccgtgcatctttgtcccgatggcgcgcatgccggcgtggtcgaggcggttgaattacggcgcggcgagcggtatgtcaggctgaatatcgcgggggtacggttcgatatcgccaacggggacacccgcctgcgcgaaggaagcccctgccggatcgatattgacgatgctggcgtgtcggtctggaagctcagttga

SEQ ID NO: 269397 - DNA, 742 bp, Unknown
  Bacterial polypeptide expressing nucleotide sequence isolated from the Sargasso Sea
atgatattaaaagcaaaagaaatttcaaaatcttattcaggtagaaaggtggttgataatatttcaatcgaagtaaatcaaggtgaaattgttggtttattgggaccaaatggtgctggtaagaccacttctttctacatgattgttggtattattaaacctgaagatggaaatatatatctagataatgaaattatctcaaattatcccatgtatcaaaggtctcaaaggggaattggatacttagcacaggaagaatctgtttttagaaaactctctgttgaagataatatattaggtgttttagaattttcagatttatcaaagaaagaacaaaatataaaggcagaggagttaatggaagaatttggtttgattaatattaggaaaaatagaggtgatcttctatctggaggtgaaagaagacgaactgagatagcaagagcgcttgctaatgatccaaaatttttattattagatgagccctttgcaggagtagatcctattgcagttgaagatattcaatcaatcatttcagttttaaaaaacaaaaatattgggatacttattacagatcataatgtccaagagactttagcaataactgacagaacatatcttatgtttgaaggaaaaatacttaaagagggaattcctgaagatttagcaaaagatgaaatggttagaaaagtatacttaggaaagaactttgaatttaaaaagaaaaaaattgatttctaat

SEQ ID NO: 269398 - DNA, 1033 bp, Unknown
  Bacterial polypeptide expressing nucleotide sequence isolated from the Sargasso Sea
tatgtctaaaccagtaattaaatgtgaagctgtttataaaatttttggagaaaatgccaaaaaaatgcttcaagagtcaaatggtaatgtagacgcaaaaacttttcaagaaaatggatgcatagtaggcgttaacaatgcctcatttgaagtttcaaaaggagaaatgttagttgtaatgggtttgtctggatcaggtaaatcaactttgctaagatgtatttctagattaactgatgcaacaggcggaaaaatttttatagaaggtcaagatttacttcaattgaacaataaagaactgatagagcttagaagaaataaaatgggaatggtttttcagagttttgcactacttcctcataaaacagttgtagaaaatattgctttcccactccaaattaagggaattaaaactgaagatagtattagtaaagcaatggatatggttaaacttgttggtcttgatggaagagaaaactattttccaagagaactttctggaggtcaacaacaaagagtaggtattgcgagatctttagcagtagagccagatatttggtttttggatgaacctttttctgcattagacccattaattagaaaagaaatgcaggatgagtttttaagacttcaagataaattacaaaaaacaattatgtttattactcatgattttgacgaggctctaaaacttgctgatcgtattgccattatgaaagatggaataattgaacagctagacacacctgcaaatattgttttaaatccagcaactgaatatgtaaggaaatttactgaagaagtacctagagaaaaagttttattaatacaagatgtaatggacccgtctactactgataatttgggtaatttgaaagttttaaaagatgaaattattgaaaatgttgctgaaaaaattttaactcaagaaaaaacagtagcagtcatagataataacaacaaaattgtaggttctattaatccaacaaaaataattaatactgtttttggaggaagaaaaaatagtaattaa

SEQ ID NO: 269399 - DNA, 1165 bp, Unknown
  Bacterial polypeptide expressing nucleotide sequence isolated from the Sargasso Sea
atctatacccccgtggtcttcgccttcgccctggcggtggccgtgctgccgccgctggtcatcggtggcgcctggctcgactgggtctaccgcgccctggtgctgctggtggtggcatgcccctgtgcgttggtgatttccacgccggtgaccatcgtcagcggcctggcggccgccgcacgcaagggcatcctgatcaagggcggcgtctatctggagaacgggcggcatctggccctgctggcgctggacaagaccggcacgctgacccatggcaagccggtgcagaccgacagcctgcacttgctggaagtggatgaaccgctgcacgccgcctgggcggcgagcctggccgcgcgctcggatcacccggtttcccgggcgttggcccagcgtgccgaagagcaggggcaggcgttgcacgatgtcgaggatttcgaggcactgccggggcggggtagcagaggacggatcgatggcacgcttctctttatgggtaaccaccgcctggtcgaagacctcgggctgtgctcggcgcaactggagcagcgcctcgaggcactggagcgccagggcaagagcgtggtggtgctgtgcgacgaacagcgtgcgctgatgctcttcgccgtggccgacacggtgcgccagaccagccgcgaggcggtcgccgaacttcacgaactgggtgtacgcacctgcatgctcagcggtgacaacgttcataccgccgcggccatcgccgaacaggtcggtgtcgacgaggcacgcggcgacctgttgccagccgacaagctggcctgggtcgaggcgcgtcaggcacagggcagggtggtcggcatggtcggcgacggcatcaacgatgcgccagccctggccaaggccgagatcggctttgccatgggcgccgccggcaccgacacggccatcgagacggcagatgtcgcgctgatggacgacgatttgcgcaagattccggccttcgttcgcctgtcgcgtcagacccacgccatcctggtacaaaacatcgtcctggctctgggcatcaaggcgatcttcctggccctgacgctggcaggcgaggcgaccatgtggatggcggtgttcgccgatatgggcgtgagcctgatggtggtgttcaacggcctgcgcctgctgcgcaaatgaa

SEQ ID NO: 269400 - DNA, 598 bp, Unknown
  Bacterial polypeptide expressing nucleotide sequence isolated from the Sargasso Sea
tgctattgtgggtgcttcgggttccggcaagtctactttattaggaatattggccggtttggatcaagcatcctccggtgaagtctatctggcaggccagcctttgcatcaactgacagaagacgagagggcagaattaagagcccgctctgtaggttttgtgtttcaatcatttttattgttacctagtctgacagcactggaaaacgttactttacctgctgaactggcgggtatggcagatgcccaggctcgtggtctggaactcttagcccaggtcggattaagccacagagctgacttttttcccaatcagatgagcggtggtgagcagcaaagggtagcgatagcccgtgcttttattaccaaacctgctgtactttttgctgatgaaccttcagctaacctggacagcgcgacgggcgagaaaattgaagatttgctgtttgaactgaataagcagcaaggcaccaccttagtgttagtaacccataatcatgaactggcgcagcgttgccaatttcgatttcagatgcatgccggccacctaacggctgatttgactcaagccacagagggcaagcgtcatgtggggtaa

SEQ ID NO: 269401 - DNA, 444 bp, Unknown
  Bacterial polypeptide expressing nucleotide sequence isolated from the Sargasso Sea
tagaagaaaatttaagattaggagctcatgctaacgaaaaaggaaagcactttgaaaatgatattaaggaagtttacgatttatttcctgtattaagtgatagaaaaacgcaaagaggcggaacactttctggaggagaacagcaaatgctggcgataggaagagcattaatgagtaaacccaaagtacttttattagatgaaccttcacttggaatagcacctaaactagtaaatcaaattttcgtttcaataaaaaatattaataaagaaaaaaatgttactatttttttagttgagcaaaatgcaaaaaaggctttggagcttgctgatagagcatatgttttagtaaacgggaaggtgaccataaagggtcccggtcaagagttactcaaaaataaagatatacaagctgcttatctcgaaggtggggcaaaaaattaac

SEQ ID NO: 269402 - DNA, 952 bp, Unknown
  Bacterial polypeptide expressing nucleotide sequence isolated from the Sargasso Sea
gctttattaggcccgtcaggttgtggaaagacaacattgttgaatattatctctggactaattacaccaactaaaggtgatatattatttgatgataaaattatttcagggttgagtcctgtagagagaaatatcgcacagatttttcaattcccggttatttatgacacgatgacagtgtatgataatttagcctttcctttaaaaaatagaaaaattccagaggaagaaatcaaagtaaaagttcatgagatagctgaaatgttggaattatcttcaacattaaacaatagagcttctggtctaactgcagatggtaaacaaaaaatttcactagggcgtggattggtaagatcagatgtaaatgctattatgtttgatgaaccattaacagtaatcgatccacatttgaaatggattttaagatctaaacttaaagaacttcatcaaaagattaatagaacaatgatttatgtaacacacgatcaaacagaggctttaacatttgctgatcaagtagttgtaatgcatgaaggtcaaattgttcaaacaggaacaccagtagatttgtttgaaaaaccaaagcatacatttgttggatattttattggttcaccaggcatgaatgttttgccttgtcaaattaaaggaaatgatgtgatcgttaatggaaaaaaaatagaaactcaccaacaaattaaaaaaagtaattttaacaagacagaagttggtgtgagacctgaatttatatcttttagtaatgaaggaattccagttaaagttctatcagtaagtaatactggaaggcataaaattgtagatactgaaagtgaaaccggaaaaattaaaattattgcaaaatctaatgaagatattccgtcaggatctgcatttttaaaatttaaaaaagaatatacttatacatatggagatagttggataattgaatgaa

SEQ ID NO: 269403 - DNA, 580 bp, Unknown
  Bacterial polypeptide expressing nucleotide sequence isolated from the Sargasso Sea
tatgctggaaattcaaggcctgaccaaaacgtacgacaatggcgttaaagcgctgaataacgtcaatttatccatcagcaaaggtatgtttggcctgttaggcccgaatggcgctggtaaatcttcgttaatgcgcactattgctactttgcagcagcccgacagtggcagcatcctgtttaatggtattgatgtattaaaagacccgcaggcattacgtaaaactttaggttatctgccacaagattttagcgtctatccacgtatcagcgcttttgaactgctggatcatctggctgtgctcaaaggctttacgcagaaaaaagagcgtaaagaactggtcgaaggcttattggctcataccaacttgtttcagcataaagacaaagccgtcagcggtttctccggtggtatgcgccagcgttttggtatagctcaggctttgttgggtaacccggacttattgattgtcgatgaacccaccgcaggtttggatccggaagagcgcaacagatttcataacctgttagtcagtttgggtgaagaaaaagtcatcattttatccactcacatcgtcgac

SEQ ID NO: 269404 - DNA, 1138 bp, Unknown
  Bacterial polypeptide expressing nucleotide sequence isolated from the Sargasso Sea
gatgagcgaagtggcaccaggctggaaactgcgggtgctgctggcacaggcgctgttctccaaccccgacatcctgttgctggacgaaccgaccaacaacctggacatcaacaccattcgctggctggaacaggtgctcaacgatcgcgagagcaccatgatcatcatctctcacgaccgtcacttcctgaactccgtctgtacccacatggcggatctggactacggcgagctgcgcgtctacccgggcaactacgatgagtacatgacggccgccacccaggcccgtgagcgcctgctggccgacaacgccaagaagaaggcccagatcgccgatctgcaatccttcgtgtcgcgtttcagcgccaacgcctccaagtccagccaggccacctcccgcctcaagcagatcgacaagatcaagattgaggaagtgaaggtctccagccggcagaaccccttcatccgcttcgagcaggagaagaagctctaccgcaacatcctggagatcgaaggcgtctccaagggctatggcgaggctccgctgttcaagggcctcaacatgatgctggaagtgggcgagaaggtcgcaattctgggtaccaacgggatcggtaaatccaccctgatcaaaaccctggtgggcgcgctggcaccggacaccggcaccatcaagtggtccgaaaacgcccagatcggttactacgcccaggatcacgccgaggacttcgacaccgatctcaacgtgttcgactggatggcccagtggaaacaggagaacgaagacgagcaggcggtacgttccgttctgggccgtctgctgttctcccaggacgacatcaagaagccggtcaaggtgctgtcaggtggtgagcagggccgcatgctgtttggcaagctgatgatgcagcgccccaacatcctgatcatggatgagccgaccaaccacctggacatggaatccatcgaatccttgaacctggcgctggagatgtacaagggcaccctgatcttcgtctcccacgaccgtgagttcgtctcctccctggcgacccgcatcctggagctgactgaaaatggcatccgcgacttcggcggtacctacgaggattacctgcgtactcagggtgtggtgtaa

SEQ ID NO: 269405 - DNA, 1078 bp, Unknown
  Bacterial polypeptide expressing nucleotide sequence isolated from the Sargasso Sea
atggctaaaattgaattatcaaatatttctcattcatacaatccaaatgagcctaatccaatctacgctcttaatcctttttctatgacttgggagaatggaaaaagatatgcgattcttggaccatctggttgtggaaaaacgacaatgctaaatattgtttcaggattagtaaaacctacaaaaggaaaaattctatttgacgaaattgatgtaactagtttaataacagagcaaagaaatattgctcaagtattccaatttccagtaatttacaacacaatgactgtatatgataatttagcatttccactgaaatgtagaaatttttcaaaagataaaatagacgaaagagttaattcagtttcagatactttgaaactttcttcttttctaaattctccagccagaaaacttacagcagaccaaaaacaacttatttctcttggtcgaggattagttcgtgaagatgtggctggtgttttaatggacgaacctttaactgtaatagatcctgatttaaaatttagacttagaagaagtttaaaagaaattaacgagcaatataaaacaacattagtttatgttacacatgatcaaaatgaagcaatgacatttgctgacaatataatagtcatggatcaaggtgaaattgtacaagttggattgccaaaagacttatttgaaagacctaaaaccacttttgttggatattttattggatcacccgctatgaacttatttaagtctgaggtttcttcaaagaatactattaagttcaataatttagagattaaaactgaaacagatttatctaaactaaaaaataaagcagtaaaattaggaataagatctgaatttattaaaattgcaaatgaccaaaaagagaatgtgattgatgtaaaggttagtagagtcgaagactttggaaactttaaattaattaccgcaaaagttggtggttttgaaattaaatctaaagtggaaagagaaattcctatatcatccgaaaaactatctctatttttgccagctgaaaaatgttgtatttattcagacgaaaaactagttcagtaaa

SEQ ID NO: 269406 - DNA, 745 bp, Unknown
  Bacterial polypeptide expressing nucleotide sequence isolated from the Sargasso Sea
atgaataaatttcaacttctagatgacggattaatagtaaataaaatttctaaatcctatggaaataaaaaagttgttagggatataagtatatcgataaacagaggtgaaattgttggtttgcttggcccaaatggtgctggcaaaactacaacattttatatgattgtgggtttggtaaaaccagatacgggttcaattattttagataaggttgaaatttctaaaatgcctatttattcaagagggcttcaaggaattagttatctaccgcaagaaccatcaatttttagaggaatgaatgttgaagataacttactagcaataattgaaattgtggaaaaagataaaaacaagcaaaacataatattacaaagtttgctaaacgaatttgatattaatcatgttagaaaatctaaatcaatagttctgtcaggtggtgaaagacggagattagaaattgcaagaacattagcttcaagaccaaaataccttcttcttgatgagcctttaacaggaattgacccagtctcaatagaagaaataaaaataataataaaaaaattaaaacaaaaaaatattggtgttttaattacagatcataatgtaagagaaacactaaaaatagttgataaagtttatattgtaaacgaaggaatgatatttttcagcgggaaccctaatgaagccatctctgacgaaaggataaagaaattttatcttggtagtaatttttcaatttaat

SEQ ID NO: 269407 - DNA, 1716 bp, Unknown
  Bacterial polypeptide expressing nucleotide sequence isolated from the Sargasso Sea
ccgtggctgcgccgcgagcaggttggcgcccagccggtcttgcgcgaagtgccgatgcgcgacctggtgcccggcgacatcgtgcagctgtcagccggcgacatgatccccgccgatatccgcctgatcgagtcccgcgacctgtttatcagccaggccgtgctgaccggcgaagccttgccggtggagaagtacgacaccctgggcgatgtcacgcaaaagtccgcctctacgctggccgccgaccagggcaacctgctggacttgccgaacatctgcttcatgggcaccaacgtggtcagcggccgcgctaaagcagtggtggtggcaacagggccgcgcacttactttggctccctggccaaggcgattgtcggctcgcgggtgcaaaccgccttcgaccggggcgtgaacagtgtcagctggctgctgatccgcttcatgctggtgatggtacccatcgtgtttttcctcaatggcttctccaagggcgattggggcgatgccttcctgtttgccctggcggtagccgtcggccttaccccggaaatgctgccgatgatcgtcagcgccaacctggccaagggggctacggccatggccaagcgcaaagtggtggtcaagcgcctcaatgcgatccagaacttcggctcgatggatgtgctgtgcactgacaagaccggcaccctcacccaggacaagatcatcctcgagcatcacgtcaatgcctttggccagcgcgatgacgccgtgctgtccctggcgtggctcaacagctttcaccagagcggcatgaaaaacctgatggaccaggcggtggtgcagttctcggaacagaaccccaagttccaggtgccgtttgcctacagcaaggtcgatgaattgccgttcgactttgtccgtcgtcgcctgtcgatcgtggtcaaggatgccgccggtgatcagttgctggtatgcaagggagcggtggaagagatgctgagcatttctacccatgtcatggaggccggcgaagccttgcccctggatgaccgccgtcgtgaggcgctactggcgctcgccaatgattacaacgaagacggtttccgcgtgctggtggtagcgacccgcaatatccctaaagcgctggcacgccagcagtacaccaccagcgacgaacgcaacctggtgatccagggcttcctgacgttcctggacccaccgaaggaaaccgcaggcccggccattgcggcgctgcaacagattggcgtggcgatcaaggtgttgaccggcgacaacgccgtggtcaccagcaagatctgccgccaggttggcctggaacccggccagccgctgctgggtgtggaaatcgaagccatggacgacgccaccctgctgcgccgcgtagaagagcgcaccgtattcgccaagctcacgccgctgcaaaaatcccgcgtgctcaaggcgctgcaaaccaacgggcacaccgtcggcttcctcggtgacggtatcaacgatgcaccggcgctgcgggatgccgatgtgggtatttcggtggacagcggcaccgacatcgccaaggaatcggccgacatcatcctgctggaaaagagcctgatggtgctggaagaaggcgtgctcaagggccgcgaaaccttcggcaatatcatgaagtacctgaacatgactgccagctccaacttcggcaacgtgttctcggtgctggtggccagtgcg

SEQ ID NO: 269408 - DNA, 1069 bp, Unknown
  Bacterial polypeptide expressing nucleotide sequence isolated from the Sargasso Sea
gattgagtatggagtagtagcatcctggtttagattttgtttaaatttcttgggaggaatattgcctgtgatgatggtaggtggcagtctttggttttggagcagtggcagcataacggctggtgatatcgcagctactgggactattgctctcagactttcacaaatgacgggttgggtgagttatgttcttatggctttatattcaaatctaggagagatagaggatggaatgaaaacactctctccagatcatgacttgaccgatgtggagaatgccaaacctctctctgtccaggccggaaaaattgaatttaacaaattaagctttgcctacggaggtagagtaagtagtatcgacaatgtctccctcgctatttctccaggtgaaaaagtaggggttgttggagcgtcaggtgcaggaaaatcaaccctcgtctcaatacttctgcgcctttataatccggacaaaggctcggttaaaatcgacaaccaaaatttaaaattagtgtctcaagaaagcttaagactgcaaattggaatggtaacccaggaaactgcactgtttaatagatcagccatggataatattctttatggaaacccttctgctagtaaggaaaatgtttttaaggcagcccagcaagctgaagcacacgagtttattttatcactaaaggatcacaaaggtcgaactggatatgaagcacatcttggagaacagggtgtaaaactttcaggaggagaaagacaaaggattgctctagcgagagctattttaaaagacgctcccattcttgttctagatgaagctaccagcgctctcgatagtgaggttgagtcagctatacaaactgctcttgaaagggtcatggaagggaaaacagtgctagccattgctcatcgattatccacattagtaaaaatggacaagattgtagttatggataagggcaaagtaattgaggttggtcctcatgaatttttggtcaaaaaaggcgggctatactctcgatattggaagaggcagtcaggcggattcatagaaactagtcttgcggtcgaatga

SEQ ID NO: 269409 - DNA, 649 bp, Unknown
  Bacterial polypeptide expressing nucleotide sequence isolated from the Sargasso Sea
cctaggcgagtcgcctgaaaacctttctaacgaagctaaacagcgcattggctacgtgccacaacagccttttggctacgaaggtttcactgtcgacaaggcgttagaattacatcgcagcttttaccccaattgggacactgccttagaacaagattggttaaaacgctttgatttagatgtcactcaagcggtgcaaaaattgtcagtgggtcagcgtcaatcgttagcattgatcatggcgatggcgtatcgaccaacgctattgttgctcgatgaacccgtggccagccttgatcctattgctcgtcgccaatttatgggtgacttgtttgatctcgcgcttgagtcaggttcagcggtattattttcatcgcacattacctcagatttagagcgtgtcgccagccatgtagcgttaattaaaaaaggcgagttagtgctgtttaaagaaattgatgccctgcgtgaagaagttaaattgctcactattagtgacgacacccagctacctgcaaactacacaatattgagccaaacgggacaagccgtgctggtagacacccaaggtaacgcagaagttgttgtgggcgtacagcatgaaaaatcattgaatctagaacagctgtttatggagctgcaccgatga

SEQ ID NO: 269410 - DNA, 832 bp, Unknown
  Bacterial polypeptide expressing nucleotide sequence isolated from the Sargasso Sea
aatggtagccgtacccgaagtgctgaaccggaatgccgccgcagcgccggttcgcgacggcgcacgcatcgacgtgcgccatgtcagtcatcaattcgcgttgcgcggcgccgcgttgcccgtgttgcaggatgtcagcttcgcggtcgagccgggcgagttcgtcgcgctgctgggtccgagcggttgtggaaagtccaccttgctgcgtctcgtggcgggactcgatacgccgacgcaaggcagcgtacaggccgacggcgccacgatcgcgggccccgatccgtcgcgcgtggtggtgttccaggacccaaccttgtacccgtggcgcacggtgcgcggcaacgtcgggatcggtccgcaggcgcagcgcagaggcttcatccggcggcgtggtccacaggaagatcaggcgcggcaacgaatcgatgccgcgctggaactggtcggcctgactgaatttgccgaagcgtttccgcatcaattgtcgggcggcatggcgcagcgggtggcgctggcgcgcgcgctcgtcaacgatcctgcgctgctggtgctggacgagccgttcggcaagctcgactctctgacgcgcatccgcatgcagggcgaactggcgcggctttggcaggacgcacgcttttccgtgctgctggtgacgcacgacgtcgaagaagcgctgctgcttgccgggcgcgtgatcgttttcagcgaacggcccgcacgcgtggttgcgcaagtgcataacgacgcaccgtatccccgccatcgcgacgatccgaagctcgtggcgctgcgccgcgaggtgctcgctcaactcggactcgacacctga

SEQ ID NO: 269411 - DNA, 751 bp, Unknown
  Bacterial polypeptide expressing nucleotide sequence isolated from the Sargasso Sea
tcttttgggaaaagtgagaaagaattaattgaaatacgaaggcacaagatgggtatggtatttcaaaattttggacttttgcctcatttaaatgttattgacaatattgcatttccgttaaaactacaaggtttaaaagaaaaagataggcttcaaaaagcagcaagggttatcgaattagtaggtcttaacggaagagagaataattttccaatggaattatcaggtggtcaacaacaaagagttggtatagctagatcacttgctgtagaacctgatgtttggtttttggatgaaccattctctgctttggatccattaataagaaaacaaatgcaggatgagtttttaagaatacaatccttacaaaaaaaatcagtagtctttataactcatgactttcaagaagctttaagaattgcagatagaatggctataatgagggacggtcaaatagttcagattggtaagcctgtagatctaattctaaatccaaaagacaattatatcagagattttaccaaagatgtcccatgggaaagtgttttaaaagcttcagatatcattgataaaagtcagaaaatattacaaaaagctaaagaagttccttttgacatgccagttgcaaagatgcttccgttactttctaaaaaatctgtgggggttgtagttgtggatcaggctggtaaaaagcttgggatggcaaatgctcagagtttcgtaacagcattagcaacagcagaaaattaaa

SEQ ID NO: 269412 - DNA, 864 bp, Unknown
  Bacterial polypeptide expressing nucleotide sequence isolated from the Sargasso Sea
tagtagtgatgggattgtctggttcaggcaaatctactttgcttcgatgtatatcaagattaacagatgcaacaggtggaaaaattttcatagagggtcaagatttacttgagttaaataataaagaattaattgaacttagaagaaataaaatgggaatggtgtttcaaagttttgctttactaccccataaaactgtagttgaaaatattgcctttcctttgcagattaaaggcaccaatactgaagaaagtattaatagagcaatggagatggtaaaattagttggacttgatggaagagaaaactattttcctagagaactttcaggtggacaacaacagagagtagggattgcaagatcattagcagtagaacctgatatatggtttttggatgagcctttttctgcattagatccattaataagaaaagaaatgcaagatgagtttttaagacttcaagaaaaattacagaaaaccatcatgttcattacccatgattttgatgaggcattaaagttagctgatcgaatagcaattatgaaagatggtataattgaacaattagatacacctgctaacatagtattaaatccagcaactgaatatgtaagaaagtttactgaagaagtaccgagagagaaggttttaataattgaggatgtgatggatacttcaattaaagataatttaggagatttaaaagtatcaaaagatgaaattatagaaaatgttgcagaaaaaatacttactcaagaaaatttagtaggagtagttgactctcaaaataatattgtcggttctattaaaccttccaagataattgatacagtgtttggaggaagaaaaaacggtagttaaa

SEQ ID NO: 269413 - DNA, 1267 bp, Unknown
  Bacterial polypeptide expressing nucleotide sequence isolated from the Sargasso Sea
catgatcaccaccctgttcttcctcgccgccttgatggtgggtgtgcccatcggcgtgtgcctgtgcctgtcgggcgcggtgtacatcctcagcatcggcagcccggtgctgttccagtccttccccatgcagatgttcggcggggtggacagctatggcctcatcgccattccactgttcatcctgatcggcgagatcatgaacagcggcggcatcacgcggcgactggtggacctgtccatggccttcatcggttccgtcaaagggggcctggcctatgtgaacatcctggccaacatgctggtgtcgtccatcatcggctcggccactgcgcaggtggccatcatgtcgcaggtcatggtgcccgagatggagaagcagggctacgacaagacctttgcggccggcctcacggtatacggcggcatgctggggcccatcatcccgccctcggtgatgtttgtggtctacagcgtgctggcccaggtggccgtgggcgacatgctgattgcgggcatcctgcccggcgtgctgctcacgctgctgttctttgtcgtgatcgcgctcatggggtttgtctacaactacccgcgcagcgaaaaacgcaccctggcccagcgcgcgcgcaccgtggtgcaggccagccccacgctgctgatccccatcatcatcgtcggctccatcctgagtggcgtggccaaccccaccgaatcggccgccgtgggcgcgctggtctcggcgctggtgggccggtatgtgaccaaggaattccgcttcagcgccatgccagccatcctgctgcgctcggcgatctactcggccatcgtgctgtttctggtggcggcggcggccgtgttctcgtggctgctgatctacggcaaggtgccgcagatggtggccgcctgggtgcagacggtggcgcacgacccggtcaccttcctgctgctcaccaacgtcatcctgctggtcatcggcacggtgatcgacggcatccccggtctcatcatgaccgcgcccatcctgctgccgattgccaccgaggtctatcacatcgacccgcgccactttggcgtggtgatcgtcgtcaacctggtgctggggctgatgaccccgcccgtgggtctgagcttttttgtcgcgtcggccgtcaccggggccaagcccggaaagatgttcatcgtgaccctgccgtttttcatcatcagctgcgtggcgctggtgatgttgtcgctgttccccagcctgtcgctcggcctgctcaagtag

SEQ ID NO: 269414 - DNA, 799 bp, Unknown
  Bacterial polypeptide expressing nucleotide sequence isolated from the Sargasso Sea
atgaacctagttgtttctcagagcgcgccggtgatcgagttccgctcggtgtcgtgccgtttcatttctccagacggcaaggcgacgatcgcgttgcgcgacttcagcatggcggttgcgaagggcgagttcgtcgccatcgtcggaccgaccggttgcggcaagtcgaccacgctcagcatgatcaccgggctcctgaagccgacgaccggcgaagtgcgcgtgatgggcgcgccggtagacggcatcgatccgcgaatcggcttcgtgtttcaggccgatgcggtgtttccgtggcgttcggtcctcgataacgtggcagccgggccactctatcgcggccgctcgaaatcggccgcgcacgacgaggccaatgaatggctgcgccgcgtcgggctcgagaagttcggcaagcattatccgcatcagctgtcaggcggcatgcgcaagcgtgtggcgctcgcgcaaacctttatcaacaagcctgaaatcctgctgatggacgagcccttctcggcgctcgacatgcagacccgcacgctgatgcaggacgaactgctgcagttgtggtcggctaattcggggtcggtagtgttcgtcacgcacgatctggaagaagcgatcgcgctggctgatcgcgtgttcgtgctgagcgcgcgccccgcgacgttgaagaaggtctatgagatagatctgccgcgcccgcggatcacgtcggaagttcgctacgagccgcgcttcatcgagatttcgcgcgatatctggcatgacctgcgcgaagaagtgcagatcgcctgat

SEQ ID NO: 269415 - DNA, 1081 bp, Unknown
  Bacterial polypeptide expressing nucleotide sequence isolated from the Sargasso Sea
aatgaatttaattggagagaaaatttcttataaacctgatgagcaatttcatttaaacgatgtctcgtttaattttaaaaaaggtaatttgtataccattttaggcagaactttatctggcaaaacgactcttttaaaaacaattgcaggattattaaatccagatcaaggctcaatttcttttgaggaaaaagactttattaaaataccagtttgggaaagaaatgttgctatggtctatcaacaatttattaattaccctcatttaaatgtttatgaaaatataacttttccattagaacaaagaaaattaagtcctgagcaaataaaaaaagatgtagatgaagctctaaaaactgttgggttagttggatttgaaaatagaaaaattcaggaattatctggcggacaacaacaaagggttgcacttgcaagatcacttgcaaaaaaagcaaaaattttgctgctagacgaaccgttagttaatttagattacaaacttagagaacaattaagagaagaatttaaaagaattttctcagaaggactgtcccaagatacaattttaatttactcaacaacagatcctcaagaagtaatggaactaaatggagaagtaattgttttagatgaagggagggtattacaaaaagggcctgccaaagagatttttgaaaatccatctaatttaaaagttgcagaaatatcaaatgatccaccaatgaatgttctgaagggttcaaaaaattcaaaaaatctgaactttgagaatatttctctagaaattccaaatcattttaagaatttagaagataaagattataattttggaattagagcttcagaaataaaacttgatgaaaatggtgaagaattcgaaatagaattggcagagattagtggttcagaaacattgcttcacttaaaaagaggaaattcaaaaataattgctttaatcgaggaagtaatgaattttaaaattcatgagaaagtaaaaataaattttaatgcaaataagttttatgcttttggagaagatgaaaaattagtttcgtcgccatatggaggaacaaatggctaa

SEQ ID NO: 269416 - DNA, 754 bp, Unknown
  Bacterial polypeptide expressing nucleotide sequence isolated from the Sargasso Sea
atgacaataaaacctaaactagtttcatccaataatggtcttgtagttaataaacttagaaaaactctctcacaaaaacaaatagtgagagatgtgagtctaaagcttgaacgagggaagacgatcggattactcggtccaaacggtgctggaaaaacgacaacattctatatgatcatgggcttaattgattgtgatggaggtgaaatattactagacgatattcatcttacatctcttccgatgtataagagggctaaattaggcatagggtttttaccgcaacagccctcaattttcagaggcatgtcagttgaagacaacctgctatcgatactagaaactcaagaccttccaaaagatcaaaagcaaaacatgttagaagaattacttactgagttttcactcacacatttaagaagagcaatgcctcacatgcttagtggtggagaaagaagaagaacagaaattgcaagatgtctttgttctaatccaagcataatacttatggatgaacctaccgctggcgttgacccaataggcatagatgatatcaaatttctcataaagcaattaatgaataaaaatattggagttttaattaccgaccacaatgtcagggaagttttagatatttgcgactattcctatgtaatgcattcaggagaaataattgctgaaggtgaaagtgatataatactaggtaatagggaagctcgtaaattttacttaggagactcatttaaatattagt

SEQ ID NO: 269417 - DNA, 764 bp, Unknown
  Bacterial polypeptide expressing nucleotide sequence isolated from the Sargasso Sea
aatattaaagatgacaataaaacctaaactagtttcatccaataatggtcttgtagttaataaacttagaaaaactctctcagaaaaacaaatagtgagagatgtgagtcttaagctggaacgaggaaagacgatcggattactcggcccaaatggggctggcaagactacaactttttatatgataatgggtttaattaatgctgatgggggcaaaattactctcgataacagagatttaaccaaacttccaatgtataaacgagccaaattaggtttaggtttcttgccccaacagccatctatatttagaggtatgtcagtagaagataatttattgtctatattagaaactcaaaactatctaaaagatcaaaaacaaaacattctcgaagatcttttaactgaattttctctgggacatttgagaagagctatgccacacatgttaagtggtggtgaaagaagaagaacagaaattgcaagatgtctatgtgctgatcccagtatcattttaatggacgaaccaacagcaggtgttgaccccataggtattgacgatataaaagttcttattaggcaattaatgaataaaaatattggagtactaataacggaccacaatgtaagagaagtactagatatttgcgattattcctatgtgatgcacgccggtgaaataattgctcaaggagaaagtgataaaattttaggcaatagagaagttagaaagttttacctaggagattcatttagagtgtaat

SEQ ID NO: 269418 - DNA, 694 bp, Unknown
  Bacterial polypeptide expressing nucleotide sequence isolated from the Sargasso Sea
ttgatcagcctgcaacaggtgagcaaggacttcggggtcaagaccctgctggcccgagtcaatcttgaagtcggcccaagggagcgtctcggtctcatcggcaccaacggctcaggcaaatcaacgcttctgcgggtgatggccggcctggaacctcccggggagggcagggtgcaaatcaacccgcgcagccgggtcatctatgtcgatcagaacccggccctggatcctgagcgaacggtgcttgaacaggtctttgccggaagtggcgagaagatgcagctcgtcaagcgctacgaggggcttacccggcagctagaggccaaccccaccgatgcctcgctgctgggggaactgagcgggctgagcagccgcatggatgagctcaaggcctgggaactggaacggcagtgccaggaagtcctcagccgtcttggcatcagcgaccatcaccgcaaggtgggcgaactctcaggcggctaccgcaagcgcctggcgttggcatctgcgctggtggctgaacccgacggattgctgctggatgaacccaccaaccacctcgatgctttggcgactgaatggctgcagggttttctgcagcgcttcagcggagcgttggtgctcatcacccacgaccactatttcctcgagcgggtcaccaacaccatcgtcgaactcgacagcggcgattacg

SEQ ID NO: 269419 - DNA, 1363 bp, Unknown
  Bacterial polypeptide expressing nucleotide sequence isolated from the Sargasso Sea
tggtaatggagagtttgggattaagaatttaaatatatcaatccccagaggtaaaacaatttctattgtcggtgagtcaggttcaggtaaaactcttacagcattatcaatattaaggcttaacccaaatacatccattatttcaaatgatagtaagattattttttcaggtagagatatactaaaaatagataagaaagaattgaacgcaattaggggtaatgaaatatctatgatttttcaagaaccactcagttcattgaacccattacatacagttgaaaaacagattagtgaagctctaatattgcatacgacaaaaaaatcccaagacattcgaggcgcagttatcgatttaatgcataaagtaaggattaatgaaccagagacaaagctcacacgatatccacatcagttatctggtggggagaggcaaagagttatgattgcaatggctctatcaaataatcctaaacttctcattgcagatgaaccaacaactgcacttgatgttactgtacaatttgaaatactaaagttattgaaaactcttcagagtgaattagatctgactatattattcataacgcatgacttaagtattgtaaaaaatttcacggattatgtctatgtgatgcaaaatggatgtttagtggaagagggttcaacggacagtatattcagtaagccaagcgatgcttatacaaagagattggtcaatgcaagaaatcttgtgggaaaaagaagaaaaagaaataagtcactcgagatattgaaacttaactcccttagcgcccaatatgaacagaataaattatttcgtaagacaagagtcaataaagttgtcagtaatatcaatttatcaattaacttaggggaaacaattggtttagttggcgagtcaggttcaggtaaaacaactattggattatcaattttaagactcataaaatctgatggtaatattatctttatgggggatgatcttgcaagaaaatccttcaaagcccttaaaagaattagaaaagatttacagattgtatttcaggaccctttcggatcactatcaccaagattgacagtagagcagataattgaagaaggattgattgcgcaaaaaatcgagttggatgcaaatggcagaaaagagagggttctcgaaatactcaaggatgttggcctggagcctgaccaattgaatagatacccgcatgagttctctggcggtcagcgacagagaattgcaatagcaagagcgattatattaaggccaaaattacttgttttagatgagccaacgagttctttggatgcaactgttcagctgcaaatactaaatttgctcaaaaaaattacaagataa

SEQ ID NO: 269420 - DNA, 697 bp, Unknown
  Bacterial polypeptide expressing nucleotide sequence isolated from the Sargasso Sea
atgattaaagtagatgacatcgatttttattatggttcttctcagatattatataatgtatctctgaatgctgaagataatgaaataacttgtttaatgggatcaaacggagttggtaaaacttctttattaaaatttttgtcaggaatttatcccgcaaataaaggcaattattactttgatggaagtaatgtaacaaatactaattcatacacacttgcaaagaaaggcataggatatgttcctcaaggtagactgatatttcctctactttcagtaaaagaaaatttagaaactggctttgcttgtcttgataaagaagagcattttataccagataaaatatttgaactatttcctgttttaaaacaaatgataggaagaaggggaggagatttgtctggaggtcagcagcaacaactagctatagcaagagcattaatttcaaagcctaaaatgttattaatggatgaacctacagagggtattcaaccaaatatcattcagcaaatcggtgaagtaattaaatacttaaaaagtgatcagggaatgacaatttttttagttgaacaatactttgattttgcatttgacttagctgatcatatatatgttatgaaaagaggaagaatcataaaggatgttagaaaagattcactgaataaatcagactttaaaaaagagatttcaatttgaa

SEQ ID NO: 269421 - DNA, 808 bp, Unknown
  Bacterial polypeptide expressing nucleotide sequence isolated from the Sargasso Sea
catgaacacaagtgttgaaagaaattttaaaataggagatccaattttagaagttaataacatctcattaagctttggaggagttaacgctattactgatacctcatttaacgttcttgaacatgaagtaagagctattattggtcctaatggtgctggtaaaagttctatgttaaattgtattaacggtatttacaaacctcaacaaggatctatagcttttaaaggtaatactttaagtaaaatcacccctaacattattgcgcaaatgggcatctcaagaacatttcaaaatttggctcttttcaaaagaatgtcagctatagataatattttagttggacgaaaacttcattctaaagcaaattttttagatgttgctttacagcttcctaaagcaagaagggaagaaaaagtaaatctaaaaaaatgtgaagaaatagttgagtttttagaaatagaaaaaattaaagatacgccagttggtaaacttccttatgggatacaaaaaagagttgagttgggtagagcacttgctactgaagcttctctccttcttttagacgaaccaatggccggaatgaatgtcgaagaaaaaagagaaatgtgcaggttcattttagaggtaaatgaagagtacggcacaacaatggttttaattgaacatgatatgggagttgtaatggatatttcagatagagtagttgttttagactatggaaaaataattggtgatggacctccacatgaggtaagagctaatcaaaatgttattgatgcatatttaggagtttcacatggggagtga

SEQ ID NO: 269422 - DNA, 684 bp, Unknown
  Bacterial polypeptide expressing nucleotide sequence isolated from the Sargasso Sea
tatgtctgataaagtaattaaatgtgaggctgtttataaaatttttggggcaggggcaaaaaaaatgcttcaagatgttagcggaaatgttgatgccaaaactttccaggatgctggttgcattgtaggtgttaataatgcttcttttgaggtttcaaaaggagagatgttggtcgtaatgggattatccggctctggaaaatcgactttacttcgatgcatatcaagattgacggatgcgacagcaggcaaaatttttattgaaggccaagatttattatctttaaaaaataaggaattgatcgagttaagacgaagtaagatgggaatggtgtttcaaagctttgctcttcttccacataaaacagtcttagaaaacattgcttttcctttgcagataaaaggaatgaaaactgaagacagcatttcaaaggctatggaaatggttaagcttgttggtcttgagggaagagaaaattattttccaagagaattgtctggcggacaacaacaaagagtaggaattgctagatctttagctgttgagcctgatatttggtttttagatgaacctttttcagctctcgatccattaatcagaaaagaaatgcaagatgaattttttagactgcaaggtgctttaagaaaaacaattatgtttgtcacgcatgattttgacgaggc

SEQ ID NO: 269423 - DNA, 1906 bp, Unknown
  Bacterial polypeptide expressing nucleotide sequence isolated from the Sargasso Sea
atgaataaaagtaatttgattattaaaaataaaaatcctaaatcagttgttgaagtaaaagatcttaaagttcaatttcaattaaaagataaaattgtaaaagctgttgatggtatttcttttaacattaataaaggtgagactattgcaatagtaggtgaatcaggttcaggtaagtcagttacggcattatctttaatgagacttactgattattctggaggtagaatagttgctggtgaaataaacctccaatcaaaaaacaatcttaatctaaatttaactcggcttgatcaagaaaaaatgagagatatcagaggcaatgatatttcaatgatttttcaagaacctatgacatcactaaatccagtttttactattggtatgcaaattactgaaacaataattaagcatcaaggcaaaacaaaaaaagaagcttttgaaattgcacttgaaatgatcaagttggtaagaatacctgaaccagaaaaaaggttaaatcaatatccacatgaactctctggtggaatgagacaaagagttatgattgcaatggcattaagctgtaagccctcattattaattgcagatgaacctacaacagcattggacgtcacaatacaagcacaaatactggatttgataaaaatgttacaaagagacataggtatgtcagtaatgtttattactcatgatatgggtgttgtggctgaggttgctgacagagtcgttgtcatgtttgcaggtaaaaaagttgaagaaggcacggctgttgaaatatttcaaaatcctaaacatccatacactaggtctttattagcagctgtcccaaaacttggtagtatggttggtaaaaaactgcctgcaaaatttattaaccttgatgttaaatcttctgataatcccaaaaacaaagaaaaaatttcgacaaaaaaagttgttgaaatgaaagatactgttaatagaacttcctctccattgcttgaagttaaaggattaacaacaaggtttttgatcaagcaagattttggaagagcaggtggcaatattcatgcagttgaaaatataagttttagtttgcaaccaggcgaaacacttggattagttggtgagagtggttgtggaaaatctacaactggaagaagcataataggattaacgtcaccaacaagaggtgaagttttttttgaaggcgtagacttaacggatttaaataataaagaaatgatacaatatagaaaaaagatgcaaatgatttttcaagatccttttgcttctttaaatccaagaatgactgtaggtcaaattattgctgaaccaattatagttcatggattagaaaccaagctgggatcaaatagcagggtaataaaactattaaatcgagttggacttgatgagcaatattactctaggtatccacatgaactctctggagggcagagacaaagaattgggatagccagagctctggcattagaacctaagttaataatagctgatgaagcagtttcagctctggatgtttctattcaggctcaagtagtaaacttgatgatggaactacaagaagaatttggtttaacttatctatttataagccatgacatggctgtaattgagagagtaagtcatagaataggagtaatgtatctgggtgaaatagttgaaattggacttagaagccaaatatttgaaaatcctcaacacccttacacaaaaaaattgatggcagcagttccaattgcagatccaactaagagaaaaaagaagttaaacttaatgaatgatgaaattccgagtttattaaaaccaataggctatgaacctgaatatgttcaaatgattaaattaggagaggatcactatgtaaaaccatttgatggaatgcaggtccaaaattaaa

SEQ ID NO: 269424 - DNA, 655 bp, Unknown
  Bacterial polypeptide expressing nucleotide sequence isolated from the Sargasso Sea
aaaattttggataaaattaaatgtaatatttataatgaatcaattattgcagttttaggcccaaatggagccggcaagagtttatttcttaaaactataaacggattaactgcagtcgaatctggaaaaattaaatttaattcaagagaaattaatgatcaaataagaaaagagatagcattggtttttcaaaagcctacgcttttaagaaggactgttttagagaatatgcagtttgttttagagaaaaaaaacaagctgtctaatcttgaaatcatgaatcatttacaaagagtaggtttagatacttacaaagacaaacctgctagattattgtcaggtggagaacaacaaagattgtctcttgcaagagctttattaattaatccttccttgttacttttagacgagcctactgccaatttagacccctacagcttaaatttaattgaagaaataattttagatgaaaataaaaaaggtaagactataatcctaactacacatgatatgggccaagccaaaagattagctaaggagatacttttttttgataagggtaaactacttgaacaaactaaggcaataaatttttttacaaagccaaaaacaaaagaagctcaaagttacattaatggaaaaattcttttatgaa

SEQ ID NO: 269425 - DNA, 967 bp, Unknown
  Bacterial polypeptide expressing nucleotide sequence isolated from the Sargasso Sea
aattcaaaacaagaagcgctagaaaaatataattctgtaattggtgtttcgaatgtttcatttgatgtcaaaaagggtgaaatattttgtgtaatgggtttatctggaagtgggaaatcaacacttgtaagacatataaatagattattagagccaacatctggaaaaatattaataaataatcaggatgtaatgcaatttgataaggaggaccttcaaaatttaagaaataaaaaaatcggtatggtttttcaaaattttgcactgatgccacacagatcagttttagacaatatagcaatgcctttagaaattagaggtgttagcaaaaatgataggttagatgctgcaaataatattttaaatattgtcgaattacaaggatggggaaataaatatgctcatgaattatctggaggaatgcagcaaagagtaggtcttgctagagcattagcagcggatccagaatttcttttaatggatgaacctttcagtgctctagaccctttaattagacgacaacttcaaagtgaatttataaaactttcaaagcaaatgaaaaaaacaaccgtatttataactcacgatttagatgaggcagtaagagtaggacacagaatagctataatgagagatggagaggtagtacaaattggaacaccagaggaaattgtagtaaatccgtctgatgaatatgttgcagattttgttaaaggaatttcaagactaaaagtcgttcaagctaaaacaattatgcaatctatcgaagaatataagaaaacttttggagataatttaagaaataatgaaagagttaatgagaacgatatattaagcaaactcattgaaacttcagtaacagaggataaaccaataatagtcacaaataatgacaacctagaagttggtataattacacaatcagatttgctgaaagcagttgttgaggggaatgatagtgagtaaa

SEQ ID NO: 269426 - DNA, 853 bp, Unknown
  Bacterial polypeptide expressing nucleotide sequence isolated from the Sargasso Sea
tatgggcttatctggttcaggtaagtcaaccttattaagatgtatctcaagattgacagatgcgacaggtggaaagatttttattgaaggtcaagatttattacaactaaacaataaagaacttattgatcttagaagaaataaaatgggaatggtttttcaaagctttgctttgcttccacataaaacagttgtggaaaatatagcttttccacttcaaattaaaggtgtcaaaacagaagaaagtattaaaaaagcaatggatatggttaaactagttggtcttgatggtagagaaaactattttccaagagaactttcaggaggacaacaacaaagagtaggtattgcaaggtctttagcagttgagcctgatatttggtttttagatgagcctttttcagctttggatccattaattagaaaagagatgcaagacgagtttttaagacttcaagacaagttacaaaaaacaattatgtttattacacatgattttgatgaggctttaaaacttgcagaccgaattgcaattatgaaagatggtataattgagcagcttgatacacctgctaatattgttttaaaccctgctacggaatatgtcagaaaatttactgaagaagtaccaagagaaaaagttttattaatcaaagatgtgatggatttatcaaaagatgatttaggcgatttacaggtctcaaaagatgaaatcattgagaacgttgcagaaaaaattcttacacaagaaaaatcagttgctgtagttaataacaataatcaaattataggctctataaatccaaccaaaataatcaatacagtttttggaggaagaaaaaataacaattaa

SEQ ID NO: 269427 - DNA, 910 bp, Unknown
  Bacterial polypeptide expressing nucleotide sequence isolated from the Sargasso Sea
tatgatcctcattcaatgccaaggactgtccaaacactatggcagtaaaaaagcgctcaataacgttaacttaaccctcgaagcgggagcgcccatcgccttggttggccctaacggagcaggtaaaaccacactgtttagcctgctctgtggttacctcaccccaagcgcgggcacggtgcgtattctgggagaagcgcccaatagtccagcattattaggccaaattgccgccctgccacaggatgcaacgctcgatcccaatttaaccattatcagccagttaagcttctttgcgcgtcttcaagggatggatagcaagcaggcaaatcaagaagccctgcgagtactgaatttagttgacttagctgaggtggcgcagcaaaagccaccgagtctaagccatgggatgagtaaacgtgtggcgattgctcaagccttaatcggctcgcctaagctggtattactagatgaacccaccgcaggactcgatcccgccaatgccaagaaaatccgtgaactcgtcagaacgctgtcgcccagcaccacctttgtgatcagctcgcataacttggacgagctcgagaagctctgtgaccaagtgctgtatcttgataaaggtgagctgggccaatcgatttcgatgcgctcatccaacagcggcagtgattatctcaccctcacgatggaaagctgcgacagtgaaacgcttatccaagccgttggtcaaatagctggtgtagtgaatatcacctcaaaacaagcccatgtatttgttatccaattagatgacacggcaaatcgccattatgagtttgaaaccgccttactcgccctatttaagcagcagcattggcaatacaagatgctgctgaaaggacgcacattggaagaaacgttattttcttaa

SEQ ID NO: 269428 - DNA, 992 bp, Unknown
  Bacterial polypeptide expressing nucleotide sequence isolated from the Sargasso Sea
aatggctaaagttacattaaaaggtttaagccatagttatttaaaaactcagtcttcagatgctgattgggcaattagaggagtagatattgattggaatgatgggggcgcttatgctttattaggcccgtcaggttgtggaaagacaacattgttgaatattatttctggattaattaccccaactaaaggcgatatactatttgatgacaaagttgtttcaggcttaaatcccgtagagagaaatatcgcacaaatttttcaattcccggttatttatgacacgatgacagtatatgataatttagcgtttcctttaagaaatagaaaaattccagaggaagaaattaaagcaaaagttcatgagatagctgaaatgttggaattatcttcaacattaaacaatagagcttctggtttaactgcagatggaaaacaaaaaatatcactaggacgtggattggtaagatcagatgtaaatgccattatgtttgatgaaccattaacagtaatcgacccgcatttaaaatggattttaagatctaaacttaaagagcttcatcaaaagattaacagaacaatgatttatgtaacacacgatcaaacagaagctttaacatttgctgaccaagtagtggtaatgcatgagggtcaaattgttcaaacaggaacaccagtagatttgtttgaaaaaccaaagcatacatttgttggatattttattggttcacctggcatgaatgttttaccttgccaaattaaaggaaatgatgtgatcgttaatggaaaaaaaatagaaactcaccaacaaattaaaaaaaataattttagcaagacagaagttggtgtgagacctgaatttatatcttttagcaatgaaggaattccagttaaagttttatcagtaagtaatacaggaaggcataaaattgtagacactgaaagtgaaactggaaaaattaaaataattgcaaaatctaatgaagatattc

SEQ ID NO: 269429 - DNA, 460 bp, Unknown
  Bacterial polypeptide expressing nucleotide sequence isolated from the Sargasso Sea
atgagttttttacaatttaaagaaataacaaaaatttatccaaacggtacgctggctgtcaacaatacttctttagaaattaacaatggtgagtttatggtttttgttgggcctagtggttgtggaaaatcaacaatgctgagaatgattgctggtcttgaagacataactcgtggagaaatttttttagatggaagattgattaataaaataaatccttcagaaagagatgttgcaatggtttttcaaaattatgcactttatcctcatatgaatgtttacaaaaatttagcatacggtcttaaaaatagaggagaaacaaaagatgagattgaaagaaaagtctctgaagtttcaaagcttttgaaaattaatcagtatctcttaagaaaacctgcaatgttatcaggaggtcagagacaaagagtagctatgggaagagccaatagtaagaaaccca

SEQ ID NO: 269430 - DNA, 718 bp, Unknown
  Bacterial polypeptide expressing nucleotide sequence isolated from the Sargasso Sea
tacgctcaatccatcaatgacagtaggccgtcagatcgtacgagcactggaagtatttaaatacggcgaaagtgatgacgagagacatgaccgcatgtttcagctacttgatttggttaagttaccccgtgcatttgcaaccagaatgcctcgccaactttcgggaggtcaaaagcagcgggttggaatagcgcgcgcttttgctggtggcgctcggattgtagttgcagacgaaccagtatcagcgctggatgtatctgtgcaggctgctgtaactgatttactaatggaaattcaaagaaaagaaaaaacaactctgctctttataagtcatgatctctcgattgtacgttatctttcagatagggttatggtgatgtaccttggtcacgttgttgagttgggaacaacggaccaagtcttttcaccgccctatcatccatatacggaggcactactttctgcggttccaattgccgatacgagtattgagaaaaaacatatagtgctagagggagatattccgtccgccatgaacccaccttctggttgtccatttcaaactagatgccgttggaaaaaagacgttcctggttcactatgcgaaacagaaataccaccaataaaaactttagacggcggacaccaaatcaagtgccatttagcaaaatctaaattggaaaaaatggaaccagttatcaaaattgcagctgaataa

SEQ ID NO: 269431 - DNA, 1075 bp, Unknown
  Bacterial polypeptide expressing nucleotide sequence isolated from the Sargasso Sea
atggctaaaattgatttaagtaaagtatctcattcatataatccaaatgatccaaatccagtttttgctttaaatcctttctcgatgacttgggaaaatggaaatagatatgcaattttaggcccctcgggctgtggaaaaactacaatgctaaatattgtatctggcttggtaaggccttctgctggaagaatattatttgatgataaagatgttacagacttaaaaactgaggatagaaatattgctcaagtttttcaatttccggttatttataatactatgactgtttatgaaaatttggcattcccacttaaatgtagagatttttctaaaagtaaaactgatgaaagagttaattcagttgccgaaactttaaatttaaaatcttttttaaattctcctgcaagaaaattaacagctgatcaaaaacaattaatatctttaggaagaggtcttgtaagagaggacgtagctgctgttttaatggatgaacctttaactgttattgatccagacttaaaatttagattaagaagaaatcttaaagaaattaatgagcaatacaaaacaacattagtttatgtaacgcacgaccaaaacgaagcgatgacttttgcagataatataatagtcatgagtgaaggagaagtggtacaaactggttctccgaaagaactttttgaaagacccaatacaacatttgttggatactttattggatcaccagctatgaacttgtttgaaagtgaagcttcctcaaatgatagtgtaaagatcaatgatactttaattaaaacccatacaaatctatccaatttaaaaacaaaaaatattaaattaggaattagatctgaattcattaaaattgcacaaaaccaaaatgaaaacttaattgatgttaatgttgaaaaagttgaggatctaggaaactataaattaattaccgccaaaatgggaaactttaccattaaatcgaaagttactagagaaactgaaataccaagccagaatgttaaacttcacgtaccagctgagaaatgttgtgtttatgaggataataaattaatttaaa

SEQ ID NO: 269432 - DNA, 730 bp, Unknown
  Bacterial polypeptide expressing nucleotide sequence isolated from the Sargasso Sea
atgactattcctcttgaaataattgatttatcaaaaacttatgacacaaaagaagctgttcgaaatatttcttttaaagtaaatgaaaatgaaattattggaattcttggacctaatggatgtggtaaaactacaacaataggtatgatcctcggcttacttaaacctactaaaggaaaagttctaataaatggtgttgaaattgagaagcaaagagtaaaattgttgaacgaattaaattttatttcaccatatattgaactaccaaaaaaattgaccgtaaagcaaaatctagaagtttatggaagactttatgatgtaaaagaacttggaatcaaaattgattatcttagtgaaaaattaaggctaaatgaatttattaataaaataacaggagaactttcctctggtcaaaaaaatagggtcagtctagccaaatctataattaatgatccatcagttcttcttcttgatgaacctactgcatctttagatcctgaaacaggagattttgttagaagttttttagaggaataccaaaaagaaaaaaaaacttctattctacttgcttcgcataacatggcagaagttgagagattatgttcttcagttctaatgatgaataaaggatctattattgatcaaggaactcctggcgaattaattaaaaaacatggaaggagaaatatggaggaagtttttttaaaacttacaagagatttaatatgaa

SEQ ID NO: 269433 - DNA, 619 bp, Unknown
  Bacterial polypeptide expressing nucleotide sequence isolated from the Sargasso Sea
atgtctgaaccagtaatcaaatgtgaaaatgtttataaaatctttggagcaaatgctgaaaagatgttgaaagactcaaatggcaatgttgatgctaaaacctttcaagaaaatggatgtattgtaggagttaataatgcttcatttgaagtttctaaaggagagatgttggttgttatgggtttgtctggttcaggaaaatcaactttattaagatgcatttctagattaactgatgcaacaggtggaaaaatttttatagaaggtcatgatttattacaattaaacaacaaagatctcattgatcttagacgaaacaaaatgggaatggtttttcaaagttttgctttgctcccacacaaaactgtagttgagaatatagcttttccactccaaattaaaggagtgaaaactgaagaaagtattagtaaagcaatggacatggttaagttggtcggacttggcggaagagaaaattatttcccaagagaattatcaggaggacaacaacaaagagttggtattgcaagatcgttagcagttgagcctgatatatggtttttagatgaacctttttctgctttagatccattaatagaaaagaaatgcaagatgagtt

SEQ ID NO: 269434 - DNA, 817 bp, Unknown
  Bacterial polypeptide expressing nucleotide sequence isolated from the Sargasso Sea
atgaatgctttatcagtaaaaaatctttcaaagaaatataaaaatggtgttgaagcactacaatctgtaagcttcgatgtccagaaaggagatttttttgctttactcggtccgaatggagcaggaaagacaactgctattggaatcattacatcacttgtgaataagtcatcaggatcaatcgaagtttttggccataatctagacaaagaattagcaaaagcaaaatcctgcattggtgtagtacctcaagaagtcaatctgaatctttttgattttaactttaatattctagtcaatcaggctggtttttatggtatcccaagagcagagggaaaaaagagggctgagcagtttttaaagaaaatgcaactttgggaaaaaagaaaaaccgacgcaagaagtttatctggaggaatgaaaagaagactgatggttgcccgggcattagttaatcaaccaaagcttctgcttcttgatgagccaaccgcaggagttgatatagaaaccaggagaatgatgtgggatttcctgagagacttgaatgcaagcggaacaacaataattttgacaacacattaccttgaagaagctgaacagctgtgtaacaaagttgcaattattgatgagggaaaaattatagaaaacgacttgatgcaaaacgttttgaaaaaactcaaaacagaagtttttattcttaataccgagaagccacttcatcaagctccagacattgatggatatgtgacttctctaaaatcacctcaagaaattgaaattaccgtttctcaagaacaaggcgtgaatgatgcattta

SEQ ID NO: 269435 - DNA, 1171 bp, Unknown
  Bacterial polypeptide expressing nucleotide sequence isolated from the Sargasso Sea
gtcgaattggaaaaaaagcgttttgaaagtaataagtcacgttattcaataattaatgaagtctttggtggagtaaaagaagtgaagatcggtggattagaaaaaatttatgttgatcgttttgctaaaccttcattaaattatgcacgaactcaggctgcggcaactgctttgagacaattacctcgctttgcgcttgaagctatagcatttggggctatccttttagtaatactatatttaatttcacaaagagatggttttaatacagcattaccaattataagtttgtatgcctttgccggatatcgtcttatgccagcggtacaattgatctatagttcttttactcaacttacttttgtaggtcctgcgttaaataaattacatgatgatataaaaaaccttagttctttgactttagatgaaagtcaaaatactttgccatttaataaaaaaattactctaaaaaacattcattactcttaccccaatgcaacaagaactactttaaatgatatttcaattagtattgcagcaaaaactacagttggattagtcggtcctactggatgtggcaaaacaacaacagtggatatcttacttggtttacttcaagctcaaaaaggaactttagaggttgatggacaagttattacaaaaaaaaatattagggcctggcagcgttctattggatatgtgccacaaaatatttatcttgcagatgatactgttgcatccaatatagcttttggacaagatgctaagtatgtaaataatgaagacatagaaaaagctgctaaaattgcaaatttacatgattttgtaacaaatgaattacctaataaatatcaaacaacaattggcgagagaggaataagattatctggtggccaaagacaacgtatcggaattgcaagagccctatatcataatcctaaagtattaattttagatgaggcaactaactcactagacggtcagactgaacaagctgttatggatgcagtgaataaacttagcaaagatataacaattattttaattgctcaccgtctcaatactcttaatcattgtgatattatatttaagcttgaaaatggtatagttaagaattttggaacgtttaatgaattaattgaaaacaataaaaatcatatcacaacttaaa

SEQ ID NO: 269436 - DNA, 724 bp, Unknown
  Bacterial polypeptide expressing nucleotide sequence isolated from the Sargasso Sea
aatgaaaaattctatagaagtaattaatttaaaaaaatattatggtgaaaaggaagctgtaaaaagtctaaattttaaggttcaaagtaatgaaataatgggtttacttggaccaaatggatcggggaaaacaactacaattgggatgatcttaggtttattaaaaccctctagtggagaaatattaattaacggcttaaaattagaggacaaaaaatatgaaattttacacaaaattaattttatttctccttatatagaattaccaaaaaaactaacagtgaaacaaaatttgatcgtttatggaaaactgtattctgtaaaaaatataaagcaaaaaatagactatttggtaaataaattaagattagaagatttacttaatagagttacaggtgagctatcttctggacaaaaaaatagaattagtttagctaaagctataattaatgatccgaatgttttattacttgatgagccaacagcatctttagacccagaaacaggtgattttgttagatcatttttagaaaaatataaaaaagagaacaagatctctattttattagcatcacataatatggatgaggttactagattatgttcttcgataatgatgatgaaaaacggtcaaattatagatcaagggaagccaagtgatttaattgaaaaacatggaagaaaaaatttagaggaagtttttttaaaacttgtgagaaattaa

SEQ ID NO: 269437 - DNA, 1179 bp, Unknown
  Bacterial polypeptide expressing nucleotide sequence isolated from the Sargasso Sea
tatgtcagacgataaaaaaataattttttcaatggtgaatgtaagtaaacaaacacctcaaggaaaacagataattaaaaacattcacttgtccttttattatggagctaaaattggaattttaggtttaaatggagcgggtaagtcaacggtaatgaagataatagctggtgttgaaaatgattatcagggtgatgttgttttttctccaggatatactgtaggatatttacctcaagaacctattcttgacgattcaaaaacagtgaaagaaatagtcaaggaaggcgttcaagaagtagttgatttattgaaagagtacgatgaaattaacaataagttcatggatgaggaaatcatgaacgatgctgataaaatgaatacattaatagatcaacagggtaaggttcaagaaaaaattgaccagttggatgcatgggatcttgattcaaaactagatttagctatgaatgctttaaggacaccagaaggagaaacaagtgtaaagaatttatctggcggtgaaagaagaagagttgctttatgtagactgttgcttaaacaaccagatattttgttgttggatgaaccaaccaaccacttagatgcagaatctgttcattggttagaacaacatttgcaaaattataaaggaacagtgattgcagttacccacgataggtattttttagataatgttgctggttggattttagaattggatagaggtgagggaatccctttcaaaggaaattacagctcatggctagagcaaaaatctaaaagattagcacaggaagaaaaaagtgaaagtaaaagaagaaaggctctagaaagagaacttgaatgggttagaaaaggggcgaaaggtagacaagcaaaaggaaaagcaagactgaacaattatgaaaacatgagaaatgagtctgttaaagaaaaggaaaccaaaattgaaattcctattccaaatggtccaaggctaggaaatgaagtaatagaagctcagagtatttctaaaggatatgatggcaatttattatatgaagatttaaattttaaattgcctccagcaggtattgttggtataattggaccgaatggagcaggaaaaacaactttattcaaaatgattatgaatgaggaaacacctgactctggttcatttaaagtaggagagac

SEQ ID NO: 269438 - DNA, 1004 bp, Unknown
  Bacterial polypeptide expressing nucleotide sequence isolated from the Sargasso Sea
aatgtctgaatcattaaataattctaacaatactccagtaattcagtgtgaatctgtttataaaatttttggaaataatgcttcaaaacttttagagaactcaaacggccaggttgatgcaaaaacctttcaagaagctggttgtattgtaggagtaaataacgcctcatttggagttaacaagggagaaatgatggtagtaatgggattgtcaggctcaggcaaatcaaccttacttcgatgtatatcaaaacttacagatgccactgcaggcaaaatatttattgatggtgaagatttactggcaatgagtagtaaacaattaattgaattacgaagaaataaaatgggtatggtatttcaaagttttgcccttctacctcacaaaacagttattgaaaacattgcttttcctcttcaagtcaagggcactaatacaagagaaagtatggcaaaagctttagagatggttgagttagtaggattaaaaggtagagaaaattattttccaagagaactttctggtggacaacagcaaagagtgggaattgcacgttcactagcagtagaacctgatatttggtttttagacgaaccgttttcagctcttgaccctcttattagaaaagaaatgcaggatgaatttttaagattacaagcagttttaaataaaacaattatgtttgttacacatgattttgatgaagctcttcgcttagcagatcgtattgcaattatgaaagatggcataattgaacaattagatacacctgataatattgtattgaacccagctactgaatatgtaaaaaaatttactgaagatgtacctagagaaaaagttctaaaaatagaatctattatggatgcttatgattcaaataattcaagttctactaaagtatctaaagatgcaattattgaaacattagctgagtcaattcttaacagcaaagaaatactaactgtagttgataataataatgaaattgttggttctttaa

SEQ ID NO: 269439 - DNA, 704 bp, Unknown
  Bacterial polypeptide expressing nucleotide sequence isolated from the Sargasso Sea
cgcaggtttgatcgaaggagataccaatggcggtcgtatcgatgttaacggtcgttgtattcaaaaggatggcagactcgatagcagaatcagggttcaacgcgccgaaatcggcttcatcttccagcagtttaatctgatcgataggctatcagtacttacaaatgtgctctgtggatttttaggcagagccccacgatggcgaaccactttcctgcgctttaccaaggcagaaagaaagcgcgcgattgagtgcctgcaacgcgttggcatagccgcccaggcgacgcagcgggcatccacgctctctggcggacaacagcaacgtgctgcgattgcaagaacgctcgctcaaggtgcccgtatcgtccttgcagacgagcctatctcttcgctagacccggcatcctcaaagaacgttatggaacaccttgcggcgatcaatcgtgatgatcgtgtgactgttgtggtctcgctgcatcaggtggattacgcggttcgatattgtccccgaaccattgccttgcgggatggtgagattgtgtttgatggcgccagttcggcgcttacaccggccttgctctctgatctctacggtgacgccagcatcgaactatttggcgacccggaagaaatagaaaacccaaatattgtgccgattccaaccaaagattcgctccaacctaaggctgtcccggcctgag

SEQ ID NO: 269440 - DNA, 922 bp, Unknown
  Bacterial polypeptide expressing nucleotide sequence isolated from the Sargasso Sea
aaatggatgcattgtaggtgtgaataatgcttcttttgaggtttcaaaaggagaaatgttggttgttatgggtttatcaggttcaggaaaatccacattattaagatgcatttctagattaacagacgccacagatggaaaaatttttatagaaggtcaagatttactctcattaaaaaacaaagaactaatcgaacttagaagaaataaaatgggaatggtttttcaaagttttgctttacttccacacaaaacagttttggaaaatatagctttcccacttcaaattaaaggaattaaaactgaagatagtattaataaagctatggatatggttaaacttgtaggccttgatggaagacaaaattattttccaagagagctttcaggtggacaacaacaaagagtaggtattgctagatcattagctgttgaacctgatatttggtttttagacgaacctttttctgcgctagatccattgattagaaaagaaatgcaagacgaatttttaagacttcaagaaaaattaaaaaaaacaattatgtttattactcatgattttgacgaagcactaaaacttgctgatcgtatagcaattatgaaagatggaataattgaacagttagatacaccagcaaaaattgtattaagtccagctacagaatatgtaaaaaaatttactgaagaagttcctagagaaaaagttttaaaaatagaagatgtaatggaaaaaccaaataatgacaatttgagtgatttaaaagtttcaaaaaacgaaataattgaaattgtagctgaaaagattttaagtcaagaaaaatcggtagctgtaactgatgaaaataataaaattgttggaactgttcatccttcaaaaataattcatactgtttttggggggagaaaaaataacgaataa

SEQ ID NO: 269441 - DNA, 1036 bp, Unknown
  Bacterial polypeptide expressing nucleotide sequence isolated from the Sargasso Sea
tatgacttttgataatccagtaattaaatgtgagtcagtattcaaaatctttggttcaaatcctgagaaaatgcttgaaaaaaactcaagctacgttgactcaaaaacttttcaagaggcaggttatatagttggagtaaacaatgcttcgtttgaagtagcaatgggagaaattttggtagttatgggattatcaggatcaggaaaatctactcttttgagatgtatttctagattaaccgaagcaacatctggaaaaatttatattgatggacaagatttactttctttaaaaaataaagatttaattgaattaagaagaaacaaaatgggtatggtttttcaaagttttgctcttttgcctcataaaacagtgatagaaaatattgcatttccattgcaaattaaaggaatgaaaacttctgacagtatatccaagtccttagaaatggctaaattagttggacttgaaggaagagaaaattattttccaagagagttatctggtggtcaacaacaacgagttggtatagcgagatcactcgcagttgaaccagatatttggtttttagatgaacctttttcagctcttgatccattaataagaaaagaaatgcaagatgagtttttaagactccaaagctcattaaaaaaaacaattatgtttgtaactcatgattttgatgaagcattaaagctagctgatagaatagctataatgaaagatggaattattgaacaattagatactccggctaacatagtactaaatccagctacagaatatgttaaaaaatttacccaagaagttccaagggaaaaagttttaaaaattgaatctgttatggacaataaagatcaagacagcaatttgagtgatttcactgtatctaaagactcaattattgaaaatgttgctgaaaaaattttaggacaagaaaaatctgttgccgttgtagatgatgataataataatgttggtatcataaatcctgcaaaaatcattcgaattctttttggagagaaaaaatcataa

SEQ ID NO: 269442 - DNA, 1107 bp, Unknown
  Bacterial polypeptide expressing nucleotide sequence isolated from the Sargasso Sea
tatgattaaccttactgatttatcgatgaatttcggtaataaatcactatttgaaaattcttctcttacattcgatcctggcaaatcttatggtattgtcggtgcaaatggttcaggtaaatcaactcttttacgactagtttcaggtgatgaaaaacctatttctggaaaaatttcccttccctcaaaaataaacgttggtgttctccgacaaaatcattttcaatttgaaaatttcattgttattgatgtcgttttacttggcaaacctgagttgtgtgaagctagacgtgaaaaagataacatccttaaatcagaaaaatttgacagcgaaacaggaatcagactgggacaattagaagaaattattgcagaagaagatggttatgttgctgagccttttgctgcagaaattttgtctggactaggtgtcgatgagcaatatcacactggaccaatgaatgcactttcaggaggatttaaacttcgcgtgcttttagcacaattactttttcaacagccagatttacttctactcgacgagcccactaatcatttagacattatttcaatacgctggctggagaactatttaaattctcaatttaagggaacacttttggtaatttcccatgaccgcaattttctgaatgcagttgcaagtcatattgtcgatatagattatgaagaattaagactttatagcggaaactatgaacaatttcttgaatcaaaacttctggcagaaaatcaaaaaatgaaggagttggaaaccttcaagcgtaaatctgctgaaatgcaagcctttatagatcgttttcgggcaaaagccacgaaagcccgtcaagcgcagtctagagtaaaacaattagataaaatggaaattccagaggttaagcgaagctccagaatatctcctaatttttgttttgaacagtcccggcaatctggaagaactgtattgactgtaaataatatatgcaaatcgtttgatgataaatctgtactgaatcacatttcttttgaaatacaaagaggagaaaaagttgccataatcggccctaacggaatcggtaaatctactctgctaaaaatattcttgataaa

SEQ ID NO: 269443 - DNA, 697 bp, Unknown
  Bacterial polypeptide expressing nucleotide sequence isolated from the Sargasso Sea
tatgtctgagccagtaatcaaatgtgaaaacgtatataaaatttttggagcaaatgctcagaagatgcttcaagactcaaacggaaatgttgatgcaaaaatatttcaagaaaatggctgtatagttggagtaaacaatgcttcttttgaagtttcaaaaggagagatgttagttgttatgggtttatctggttcaggtaaatcaactttattaagatgcatctctagattaactgatgccacaggcggtaaaatatttattgagggtcaggacttgttacaattaaataataaagatctaatagatcttagaagaaataaaatgggaatggtttttcaaagcttcgctttactcccacataaaactgttgttgaaaatatagctttcccacttcagattaaaggagtcaaaactgaagatagtatcagtaaagcaatggatatggttaaactagttggtcttgatggtagagaaaactattttcccagagaactttcaggaggacaacaacaaagagtcggtatagcaagatctctagcagttgagcctgatatttggtttttagatgagcctttttcagctttagatccattaattagaaaagagatgcaagatgagttcttgcgacttcaagaaaaattacaaaaaacaattatgtttattacacatgattttgatgaagctttaaaacttgct

SEQ ID NO: 269444 - DNA, 1517 bp, Unknown
  Bacterial polypeptide expressing nucleotide sequence isolated from the Sargasso Sea
attgcctatttttgcatttataaaaccctataaatggatggttatagcagcccttggcgctttattagtaacggctggcgttaatttatcgttaggccaaggggttaagtttgttatagatcatggctttattgcgggctctcaagcgcaacttcaacaagctgtattggtacttattggtttaattagcttattggctgtaggcacctttagccgcttttatctaatgtcgtggattggtgagcgagtgagtaacgatattcgtaaagccgtgtttaatcgcattgttactttgcaccctagctactttgaagaaaaccgcagtggcgagcttatgtcgcgtttaacaaccgacaccactttgctgcaatcaattattggctcatcgttttctatggcgctgcgtagcgcattaatgctggttggcggtttggtaatgttattaattaccaacttaaagcttacgctcgtagtggttgcgtgtgtgccgctggtattagtgccgatgatggtatttggcaaaaaggtgcgtaaacttgcaagctcgagtcaagacgccattgccgatataagcacctatgccggcgagatcattcaaaatattaaagtggtacaaagctatagccacgaaacacaagagcaacatgcttttgcacttgaaaccgaaaaagccttcaacgttgccaaaagccgcattaaacagcgctcgtttttaattgccgctgtaatatttttaacctttagtgccattagcgcaatgctttgggttggcggcagtgatgtactggcaggcactatgaccgggggtgaactgggtgcgtttgtgttttacgctattatggtggcaatgtcggtggcaacggttgcagaagtgtacggcgaattgcaaagagcggcaggcgcagccgcccgcttacttgaattacttgcggtaaaaagtgaaattgaaaatcctgaaaacccgcaagacgctcagctacaaaataacgcaagtttacctgcaatctcgcttgaaaatatcagctttaattatccgtctcgcccggatgtcagtgcacttaacaaaataagcttaagcatttcgcaaggtcaaacagtcgctattgttggcccatctggcgcaggtaaaacaaccttatttgagctactacagcgcttttacgacccagctagtggcgcaataaaatttcacgatattgatattaagtcgctctctttaaacactctgcgcgataaaatgggcatggtggcacaaaaccctattttatttagctcagatgtaatgcataacattcgttacggcaatccaaacgccactgatgaacaagtatacgctgctgcaaaacatgctcatgccgatgaatttattaaacaattaccacaaggttacaacagctttttaggcgagcaaggcgttaggttatcgggtgggcaaaagcagcgtattgtacttgctagggctattttaaaagaccctgaaatactccttcttgatgaagcaaccagcgcactcgatg

SEQ ID NO: 269445 - DNA, 572 bp, Unknown
  Bacterial polypeptide expressing nucleotide sequence isolated from the Sargasso Sea
aatgattgaagtaattaatttatctaaatcttatcaaaagaacaaagctgtaaaaaatattaattttaatattggggagaatgaaattattggactacttgggcctaatggatgtggcaaaacaacaactattgcaatgatacttggtttactcaaacccagtaaagggaaaattttgataaataaaaagaatattgagaatcatagaattgaactcttacacaaaatgaattttatttctccttacattgaattaccgaaaaaactaactgtaaaacaaaacttaacagtctacgcaaaactttataatgttgaaaacataaatgaaagaattgactacttatcatctgctttaaaacttgataaattactaaataatttaactggtgaactttcatcaggtcaaaaaaatagagtgagtttggcaaaatcattaattaacaacccctctgttttactattagacgaaccaactgcctcgctagaccctgaaacaggtaatttcattagatcctttttagaggactatacaaaacaaaaaaaagtttcgatacttcttgcctctcataata

SEQ ID NO: 269446 - DNA, 724 bp, Unknown
  Bacterial polypeptide expressing nucleotide sequence isolated from the Sargasso Sea
atgcaaaattctataaaagtcattaatctaaaaaaatcttatggaacaaaagaagctgtaaaaaatataagttttgagattaaagaaaatgaaattattggcttattgggtccaaatggatctggaaaaactacaactataggcatgatattgggtttattaaaacccacaagtggcgaagtattaattaatggaataaaaatagaaaaaaatccaattgagattttacaaaaaataaattttatttccccgtatatagaactacctaaaaaattaactgtaaaacaaaatttaattgtatacggtaaactttactcggtaaaaaatttaaatgaaaagatagattatttggttggtaaattaagattagaaaatttacttaatagagttactggagaattatcatccggacaaaaaaatagaataagtttagcaaaagcaataattaatgatccaaacgttttgttgcttgatgagcctactgcatctttagatccagagataggagattttgttagaacatttttagaaaattataaaaaagaaaaaaaagtatcaattttattggcttcacataacatggatgaagtcactagattatgttcatcaataatgatgatgaaaaatggtttaataatagatgaaggcaaaccaaatgatttaattaaaaaacatggaagaaaaaatttagaggaagtttttttaaaacttgcaaggaattaaa

SEQ ID NO: 269447 - DNA, 928 bp, Unknown
  Bacterial polypeptide expressing nucleotide sequence isolated from the Sargasso Sea
atgcatgctttatcaataaaaaatctttcaaaaaaatataatagtggagtgcaagctctaaaatctgtcagctttgatgttgagaaaggagacttctttgccctacttgggcccaatggcgcaggcaagactacagctataggaattatcacatctcttgtaaataaatcttcaggatcaatagaggtttttggttatgacatagataaagaattagctaaggcaaaatcatgtataggggtagtccctcaagaggttaatttgaatctttttgattacaacttcaacattctcgttaaccaagctggattttatggaatcactagaaatgaaggcaaaaagagagcagaacaatatcttaaaaagatgcagctttgggataaaagaaaaactgatgcaagaagtttatcaggtggaatgaaaagaagactgatggttgctcgtgctctagtcaaccgtccgaagctgttgctcttagatgaaccaactgctggagtagatattgaaactagaagaatgatgtgggattttctcagggaattgaatcaaagtggaacaacaattattttaacaacccactaccttgaagaggcagagcagttatgtaataaggtcgcaattattgatgagggtgaaattatagaaaatgattcaatgcaaaatgtgttaaaaaaacttaagacagaagtctttattctcaatattgaaaaaccgcttaatgaaaaaccaatcattgaagattattcaatagatttaaagtctcctcatgaaattgagattacggtggctcaagatcagggtataaatagtgccttcatttctttagaagaacagggcattaaggtattaagcctgcgtaacaaaaatagcagactcgaagaactttttcttgatcttactaaggggcaaactggagttcactcatgag

SEQ ID NO: 269448 - DNA, 1047 bp, Unknown
  Bacterial polypeptide expressing nucleotide sequence isolated from the Sargasso Sea
ggatatgtaaaaaaggtctttatactattgatggcgaatgtttatttgagtcttccaatttgcttaaaaaaaataatagagaactagaaaaaattagaggtagaaaaatagcaatgatacctcaaaatgcaggtcaatccttaactccaaatttaaaaataggatatcaaatagatgaagcattaagattacacacaaacttgaaaaaagttgatagagataaaagaatttctgaattattaaataaagtaagactgccttcaccggaaacaattgctttaagatatcctcatgaactatctggaggtcagcagcaaagagtggcagtagcaatggctttagcaggcaatccagaactattattactggatgagcctacgaccggattagatgttacaacccaagctcatgttttggaacttttaaattttattgcaaaagataccggcacttccatggtatatgttagtcatgatcttggtgctatagcgcaagttagcgatagaatcatagttatgtattcaggagaaattgttttagaaggaccttcgaggagtattttaaaaaaaccaatccatccctatacttatggactattgaaatctattcctaagctgtcattagctggactaccacaatctatgccaggcagccaacctcaaccaggaagtattttaagtggatgtagtttttttgacagatgcaatttagccgaagatagatgtaaaaataattcaccccaacttgaatatataaatgatttagaaactagtgttagatgttttaattacaaaagtttgaaagatgaaaaagatattgctaaccaagcaagaagaaatgaaacaattattaaagaaaacgaaattttaaatttaactgatgtatctattagttatgcaaaacaaaaattaattgaccaaatattaaataaaactgtagattcaaatccaaccgttaaagatattaatatcaatattaacagaggagagacaatagctctagttggagaatcaggaaagtggaaatctactattttaaatcaatagc

SEQ ID NO: 269449 - DNA, 1033 bp, Unknown
  Bacterial polypeptide expressing nucleotide sequence isolated from the Sargasso Sea
tatgtctgaagcagtaatcaaatgcgaagcagtttataaaatttttggtgaaaacgccaaaaagatgcttcaagattcaaatggtaatgttgatgctaaaacatttcaagaaaatggttgtatagtaggtgttaacaatgcctcttttgaagtggcaaaaggagagatgcttgttgtaatgggcttatctggatctggtaagtcaactttactaaggtgtatatcaagattaacagatgcaacaggtggaaaaattttcattgaaggtcaagatttattaaatttaaataataaagagttaattgagcttagaagaaacaaaatgggaatggttttccaaagctttgctcttcttccacacaaaaccgttgtagaaaatatagcttttcctcttcaaatcaaaggtatcaaaactgaggagagcattaataaagcaatggagatggttaaattagttggacttgatggaagagaaaattattttccaagagaactttcaggtggacaacaacaaagagtgggtattgcaagatctctagcagttgaacctgatatatggtttttagatgaacctttttctgctttagatcctttaattagaaaagaaatgcaagatgaatttttaagacttcaagaaaaattacaaaaaacaattatgtttattactcatgattttgatgaagcattaaaacttgctgatcgaattgcaattatgaaagatggaataattgaacaactagatacacctgcaaatatagttttaaacccagccacagaatatgtaagaaaatttactgaagaagtacctagagaaaaagttttattaattgaagatgtaatggatgaatctatatctaataatttaggtgatgttaaagtttcaaaagatgaaatcatagaaaatgttgcagaaaaaatattaacgcaagaaaaatctgtagcagttatagatgaaaataataaaaccgttgggtcaatcaacccgacaaaaataataaatactgtctttggcggaagaaagaacggaaaataa

SEQ ID NO: 269450 - DNA, 973 bp, Unknown
  Bacterial polypeptide expressing nucleotide sequence isolated from the Sargasso Sea
catggattcatcgaattcagctattaaagtagaaaatgtttggaaagtatttggtaatacttccccagaagcattagatgcaattcaaaataaaggaatttcaaaaacacaagctttagaagaatacaactcagttattggagtatcagatgtttcatttgatgttaagcaaggtgaaatattttgtgtaatgggcttatcaggtagcggaaaatcaacacttgttagacatataaatagacttctagaacctacatcgggaaaaattttaataaacgatcaagacgtaatgaaaatggatcgtcagaatttacaagaattaagaaataaaaaaataggaatggtttttcaaaactttgctttaatgcctcatagatcagtagttgataatattgcaatgccgcttgaaataaggggagtaagtaaaaatgatcgattagatgcagcaaataaaattttagaaatcgttgaattgcaaggctggggtaacaaatttgcccatgaattatctggtggtatgcagcaaagagtagggcttgcaagagccttagctgctaatcctgaatttcttttgatggatgagccgtttagtgcgctggatcctttaatcagaagacaacttcaatcagagtttattaaactttcaaaacaaatgaaaaaaacaactgtttttattactcatgatttagatgaagcggtaagagtaggtcatagaattgctattatgagagatggtaaagtaattcaaatcggaacaccagaagagattgtagtaagtcctgcagatgaatatgttgcagactttgttaaaggaatttctagacttaaagttgttcaagcaaaaacaataatgcaaaccattgaaaattatgaaagcaaaaatggtaagttagctgaagatcttcaaattgtagatgaacatgagttattgagtaaactaattgaggttcaaaatctaaacagaaaccaataa

SEQ ID NO: 269451 - DNA, 724 bp, Unknown
  Bacterial polypeptide expressing nucleotide sequence isolated from the Sargasso Sea
atgcaaaattctattaaagtcataaatcttaaaaaatcatacggtaaaaaagaagctgtaaaaaatattaactttgagattaaagaaaatgaaatcattggtttacttggtccaaatggatctggaaagaccacaactattggcatgattttaggtttattaaaacctacaagtggtgaagtattaattaatggattaaaaatagaagaaaatccaaatgaaattttacaaaaaattaattttatttctccatatatagaattgccaaaaaagttaacggtaaaacaaaatttaattgtatatggtaaactttactcagtaaaaaatttaaatgacaagatagattacttagtaagtaaactaaggttagaaaatttattaaatagagttactggagaattatcatcagggcaaaaaaatagaataagtttagcaaaagcaataattaatgatccgcgtgtattacttcttgatgaacctacagcatctttagatcctgaaataggagattttgttagaacatttttagagaattacagaaaagaaaaaaaagtatcaattttattagcctcacacaacatggatgaagtcactagattatgttcttcaataatgatgatgaaaaatggtttaataatagaccaaggaaaaccatttgatttaattaaaaaacatggaagaaaaaatttagaggaagttttcttaaaacttgtaaggaattaaa

SEQ ID NO: 269452 - DNA, 1012 bp, Unknown
  Bacterial polypeptide expressing nucleotide sequence isolated from the Sargasso Sea
gatgagtaagtcacctaaacttgtatgcaaaaatgtttggaaactatatggagataatccaaaagaatttttacaaagtcacaataacaaccccgataaaaaaacaatagagtcagcggggtatattcaagctattagaaatgcctcattagaagtttatgaaaatgaaattctcgtaataatgggactaagtggttcaggaaaatctactttggtaagatgtatgtcaagattggttgatccaactattggagaaattttttttgaaaatattgatatgggcaaattaacgaaaaatgaattaatagaaattagacggcataagatgggtatggtgttccaacactttgctctttttcctcatagaacagtaatagaaaatatagcatttcctttggaggtgcagggcataaataaaaaagaaagagagaaatctgcttcagaaataattgaactggtaggacttcaaggtagagaaaattattttccaaaagaattatcaggaggacaacaacaaagagtgggcattggcagatcgttggcagtcaaaccagaattatggtttttagatgagccattttctgctttagatcccttaataagaaaagaaatgcaaaatgagtttttaaaaattcaaaactcactaaaaaaaactattatttttataactcatgattttgatgaggcaataaaattagcagatagaatcattattatgaatgaaggaagaatagtgcaaattggcagtcctgaagatttaattatgaaacctgcagatgattatgttaaagaatttacagaagatttgccaagagaaagattgttatctgtaaaaagcataatggatgataaaaaagtaacaaataatttggtaaaagtttatgaagatgaaaaaatattttcaattcttgaaaaagtactttctgaaggttcagtttcagttattgataaatcagataatattgttggttcactcagtaaagaaacagtatctaaatttataaataattaa

SEQ ID NO: 269453 - DNA, 521 bp, Unknown
  Bacterial polypeptide expressing nucleotide sequence isolated from the Sargasso Sea
atctttattaagaatgattagtggtttatgggaacccgatcagggattaattaaaaaaccaaaaattggggaattattattcatacctcaaaaaccatatatgctactaggctctttaagggaacaattatgttatcccacagaagttaagaaatttagtgatgaacatcttacttctgtattacatgaagtaaatttacaaactttagtggatcggtatcctaatcttgatatcaaacaagattggccacgaattctttctctaggcgagcaacaaagattggcttttgcaagactattactcaattccccaagatttgcagtacttgatgaagcaactagtgctttagatattaacactgaaaaaaaactatatagtttactaaaagaacgagaactttctcttattagtgttggacatagacctagcttaaaagattttcacgaaaatattttagaattaaatggacaaggagactggaaattattgacttctgataagtataattttaaggattaac

SEQ ID NO: 269454 - DNA, 999 bp, Unknown
  Bacterial polypeptide expressing nucleotide sequence isolated from the Sargasso Sea
tatgtctgaaaataataatccagatgctttattagaagtaattcacctaactaaatattttccaatcgaagagggatttctacgtaagcaagtcggtgcagtaaaagctgtagatgatgtaagtctttacataaacaaaggggaaacattcggactggttggtgaatctggttgtggtaagactacattaggcagatgtattgttagagccatagactctacttcaggtagcatttacctgaagttagacactggtgaaacgctagatctaagcagaatgactaataaggaattgcgagaagttagaaaacatttccatatgatattccaagatccttacggatcactagacccaagaatgactatactcgatatagtagctgagccaattcgtaacaataacttagctactggagacgaagtcatagagatggtcaaatcactactaaatgatgtagggcttgagataaaacatctcaatcgttatccccatgcattctcaggtggtcagagacaacgtattggaatagctcgttctctagcacctcgtccaagtcttattgtttgtgacgaacctgtatcagcactagatgtctcaatacaagcccaaatactaaatcttctcgaggaactgcaagaacaatacaatcttacatatttgttcatagcacatgacttagctgtggttgagcatatagcagacagaataggagtaatgtatgtcggtaaattagttgagatggcatcaacagccgatctatatagtcaacccttgcatccctatacagaggctttactttctgcagtgccttccactgatcctgacatcaagatggagcgtatcattctccctggagaaatagctgacccttcgtccccaccaactggttgttactttcatccaagatgtccatatgcacaagaattatgtgccgaagaaacacctcagtggaaagaggttgctcctgcacactatgtcgcatgtcactatgctgaaga

SEQ ID NO: 269455 - DNA, 646 bp, Unknown
  Bacterial polypeptide expressing nucleotide sequence isolated from the Sargasso Sea
aatggctaaaattactttaaaagatttaagtcatagttatttagaaaaacaacaaagcaactctgactgggcacttagagatgtcaatattgactggaaagatggtggagcatacgctcttttgggaccatcaggttgtggaaagacaacattattaaatattgtttctggcttattaaaaccaactaaaggaaacgttttgtttaacgataaagatatgacattgcttaatcctgttgaaagagacattgctcaaatatttcaattccctgttatttacgacaccatgactgtttatgaaaatttagcttttccattaaaaaatagaaatctttctgatgcagaagtagctttaaaagtaaaagaaattgctgaaatgctagagttgactccaacccttaacaatagagcttctggtttaacagctgatggtaaacaaaaaatttctttagggcggggtctcgttagatcagatgtaaatgtaattatgtttgatgaaccattaactgttatcgatcctcatttaaaatgggttttaagatctaaattaaaagaattacatcaaaaaataaatcgtacaatgatatatgttactcatgatcaaaccgaggcattaacgtttgcagatcaagtagttgtaatgcat

SEQ ID NO: 269456 - DNA, 901 bp, Unknown
  Bacterial polypeptide expressing nucleotide sequence isolated from the Sargasso Sea
attgtctgactataacgggccaatactagagattgagaatttatcaatttcattttttaccaggttacgagagataccggcggtaatggatttttcagtagctgtccaacctggagaggctgtcggtttagtcggcgagtctggctgcggaaaatcaactgtagcgctgggaattatgcaagatcttggcgtaaatggaaagattgtcgacggtttaataaaatttaaaggccaagatttaggaaaattatctccagatgtccttagagatattcgtggcaacgaaattgcaatgatttatcaggaacctatggcatctctaaatccagctatgaagattgctaatcagttgattgaagttccaatgatacatgaaggaatttccaaagatgaggcctacaaaagggcccttgaggttgttaatgatgtcaaactcccagatccggaaagaattttgaaatcttttcctcatcagctttctggaggccaacaacagcggatagttatcgcaatggcattaatgtcaaaaccgtcacttttaatattagatgagccaactacagctttggatgtaactgtagaggcagcggtcgtagatctcgtaaaggatcttggtaaaaaatatggtacttccatgctgtttatatcacataatctgggattagtattggaaacgtgtgatagaatttgtgttatgtattcaggcgaggccgttgaaactggatctataaaagatgtatttaatcagatgcaacatccttatacccaagcattatttcgatcaatcccgcttcctggcgctgacaaaaatgcacggcctctcgtagcaataccaggcaactttccactgccacatgaacgacccaaaggatgtaactttggtcctagatgtacttatttt

SEQ ID NO: 269457 - DNA, 1033 bp, Unknown
  Bacterial polypeptide expressing nucleotide sequence isolated from the Sargasso Sea
atgtctgagactgtaatcaaatgcgagtcggtttataaaatttttggagaaaatgccaaaaagatgcttgaagaatctaatggcaatgtagatgcaaaaacatttcaggaaaaaggatgtatagttggagttaataatgcttcttttgaagttgcaaaaggagaaatgttagtagtgatgggattatctggctctggtaaatctacattattgagatgcatatcaagactaacagatgcaacaggtggaaaaattttcatagaaggtcaagatttacttgaattaaacaataaagaattaattgagcttagaagaaataaaatgggaatggtgtttcaaagttttgcattgttacctcataaaacagtagttgaaaacattgcttttccactacagatcaaaggcactaacactgaagatagcattaacagagcaatggaaatggtaaaactagttggactagatggaagagagaattattttccaagagaactttcaggtggacaacaacaaagggtaggtatcgcaaggtcattagcagtagagcctgatatatggtttttagatgaacctttttctgcattagatccattgattagaaaagaaatgcaagatgagtttttaagacttcaggaaaaattacagaaaactatcatgttcattactcatgattttgatgaggccttaaagttagctgatcgaatagcaatcatgaaagatggtataattgaacaattagatacacccgcgaatatcgtattaaatccagcaaccgaatatgtaagaaagtttactgaagaagtaccgagagagaaagttttgattattgaggatgtaatggatgcgtcaagtaaagataatttaggagatttaaaagtatcaaaagatgaaattatagaaaatgttgcagaaaaaatacttactcaagaaaaattagtaggagtagttgactcaaataataatattgtaggatcaattaaaccttcaaaaataatagatacagtttttggaggaagaaaaaacggtagttaaa

SEQ ID NO: 269458 - DNA, 1033 bp, Unknown
  Bacterial polypeptide expressing nucleotide sequence isolated from the Sargasso Sea
atgtctgagactgtaatcaaatgcgagtcggtttataaaatttttggagaaaatgccaaaaagatgcttgaagaatctaatggcaacgtagatgcaaaaacttttcaagaaaaaggatgtatagttggagttaataacgcttcttttgaagttgccaaaggagaaatgttagtagtgatgggattatctggttcgggtaaatcaactttgcttcgatgtatatcaagactaacagatgcaacaggaggaaaaattttcatagaaggtcaagatttacttgaattaaacaataaagaattaattgaacttagaagaagtaaaatgggaatggtatttcaaagttttgctttactacctcataaaactgttgttgaaaatattgcttttcctttacagattaaaggtacaaagactgaagatagtattaatagagcaatggagatggtaaaattagttggacttgatggaagagaaaactattttcctagagagctttcaggtgggcaacaacaaagagtagggatcgcaagatcattagcagtggaaccagatatatggtttttagatgagccattttctgcgttagatccattaataagaaaagaaatgcaagatgagtttttaagacttcaggaaaaattacaaaagacaataatgttcattacacatgattttgatgaggcattaaaattggctgatcgtatagcaattatgaaagatggtataattgaacaattagatacacctgcaaacattgtattaaatcctgcaactgaatatgtaagaaagtttaccgaagaagtgcctagagagaaagttttggtaatcgaggatgtaatggatacaacgagcaatgataatttgggggatttaaaggttttaaaagatgagattatagaaaatgtagcagaaaaaattcttactcaagaaaaaatagtagcagtagttgattctgaaaataatattgttggatcaattaaaccttcaaaaataatcgatacagtttttggaggaagaaaaaacggaagttaaa

SEQ ID NO: 269459 - DNA, 1033 bp, Unknown
  Bacterial polypeptide expressing nucleotide sequence isolated from the Sargasso Sea
atgtccgatgctgtgatcaaatgtgagagtgtttataaaatttttggagctaatgctaaaaaaatgcttcaagatgctaatggaaatgtagatgcgcaaacttttcagaaaaatggatgcatcgtaggagttaacaacgcatctttcgaagtttctaaaggtgaaatgttagttgtgatgggtttgtcaggctcaggaaaatctacattgctgagatgtatttcaagattaacggatgctacagatggaaaaatttatattgaaggtcaagatttgctatcattaaaggataaagaactaattgaacttagaagaagtaaaatgggaatggtttttcaaagttttgcactactaccacataaaactgtagtggaaaatatcgcttttccattgcaaatcaaaggaataaaaactgaagacagtattagcaaagcaatggatatggttaaactagttggtcttgaaggaagagagaattattttccaagagaactatctggaggtcaacaacaaagagtaggtatagccagatcattagcggttgaaccagatatttggtttttagatgaacctttctcagcgcttgatccattaattagaaaagaaatgcaagacgaatttttaagacttcaagaaaaattaaaaaaaaccattatgtttattacacatgattttgatgaggcattaaaacttgcggatcgaattgcaattatgaaagatggaataattgaacaattagacacaccagcaaatattgttctaaatccagcaacagaatacgtaaaaaaatttacagaggaagttccaagagaaaaagttttaataatagaagatgtaatggatgcgccaactactgaaaatttgagtgatataaaagtttcaaaagacgaaataattgaaaatgtagctgaaaaaattttaactcaagaaaaatctgtaaatgtaattgatgaaaacaataaaattgtaggaactgttcgtccttcaaaaataattcatactgtttttggaggaagaaaaaataacagttaaa

SEQ ID NO: 269460 - DNA, 688 bp, Unknown
  Bacterial polypeptide expressing nucleotide sequence isolated from the Sargasso Sea
aatgcttaaacttaatttttctttgaaagaaagctatttaacgatttctaccaacatttccttagaacccaacaaaatttacgcagtagtaggcccttctggtgctggcaaatcaacctttttaaatctaatatctggcttcgcttctatttctagtggctccataatatggaatggacaggagatcagcaatctacctccggcaaaaagaaatgtatcaattttatttcaagataataacctattccctcacctcagcgtttggagaaacttagcactggctgttactcactggccaaaaatttccagaaataatgaggagaaactaaaagctgttatgtccgaagttggaatacttggcctagaaagcagaaaaccctcacaactttcaggaggacagcaaagtcgcgtagctttagcaagagttttactgcaaaaaaataaaattttgctattagatgaaccattttctgcattgggcccatctctcaaagatcaaatgttagaattaatcaaaaaaatttctaaaaataaaaaattgttagttttaatggtcacccacgagccagctgatgcaaaaaaagtcgcatctcaaacactcgtagtaaaagataaaaaggtacaccctccactaagcacagagaaagcactggatccaataaatggaccattagctgattatttatga

SEQ ID NO: 269461 - DNA, 573 bp, Unknown
  Bacterial polypeptide expressing nucleotide sequence isolated from the Sargasso Sea
tatgacttcaacaccagtaattaaatgcgaatccttgtataaaatatttggacctaatgcagaaaaaatgctcaaagattcaaatggcaaagtagacgcaaaaacttttcaagatgcaggatgtatagtaggtgtaaacaatgcatcttttgaagttttaaagggtgaaatgttagttgtaatgggtttatctggatcaggtaaatcaactttacttagatgtatttcacgattaacagatgctaccggcggaaagatttatatagaaggtcaagacttgttagcaatgaatgacaaacaattaatagaattaagaagaagtaaaatgggaatggtttttcaaagttttgcactacttccccataaaacagttttagaaaatattgcttttccacttcagattaaaggaagcgaaactgaggatagtattaaaaaagctatggagatggttgaattagttggtttaaagggaagagaaaattattttcctcgagaattatctggtggtcaacaacaaagagttggaatagctcgttcgttagctgttgaacccagatatatggtttttagacg

SEQ ID NO: 269462 - DNA, 1018 bp, Unknown
  Bacterial polypeptide expressing nucleotide sequence isolated from the Sargasso Sea
tatgtcaccaactattagttgcgattctgtctacaagatctttggcgccaatgcgaacaagctattagcagactctaatgggtctgtggatgctaaacaatttcaagaagcaggatgtatagtgggtgtaaataatgcctcttttgatgttgaaaaaggagagatgttagttgtcatgggcctatcaggctcaggaaaatccaccttattgagatgtatttcaagattgactgacgcaaccgcaggtaaaatattagttgacggtgaagatatttgtttaatgaacaacaaacaattagttgagcttagaagagagaaaatgggaatggtttttcaaaattttgccctacttcctcataaaacagtcattgaaaatattgccttccccttgcaggtaaaaggagtcagtacagaaaatagtatgtacaaggctttagaaatggtcgaattggttgggctcaaaggaagagaaaattactttccaagagagttatctggtggacagcaacaaagagtaggaatagctagatcactggcagttgagccagacatttggtttttagatgaaccattctctgcattagatcctttaattcgaaaagaaatgcaggatgaatttttaagacttcaaggggttcttaacaaaacaattatgtttgttacgcacgattttgatgaggctcttagattagctgatcgtattgcaattatgaaagatggaattattgaacaattagataccccgggtaatattgttttaaaccccgcaactgattatgttaaaaaatttacagaagatgttcctagagaaaaagtattaaaaatagagtctataatggaccctaaggacacaaatgcttcagacaatttaacagtatctaaagacgacattatagagagtgttgctgaaaaaattcttaatagtaaagaaataataaaagttatagatcctaaagatagttcagaagttggatcaatcaacccttcaaaagtaataaaagttttatttggtggataa

SEQ ID NO: 269463 - DNA, 805 bp, Unknown
  Bacterial polypeptide expressing nucleotide sequence isolated from the Sargasso Sea
ttgcagaacaagcagcttgtgcccgatcagggcgtcagtgccgcaataccagagttaaaaggcaatattcccccagctgcggatcaacctgcattgttggaccctttgttgatcagtatgcgggatttgcaggtccgttatggcgacaaagctgtattaaacggcattaactgggatatccgcgcaggtgaattctggcaactgcatggcccaaatggtgcgggtaaaagtaccttagtgcagttgatcaacggcgaaagcactaagggctatggccagcagctgtatttattcggccggaaaaaaggcagtggcgaaagcgtctgggatattaagaaaaacattggctgttttacccgggtgatggtacagaatttcagcagccacgacagtgtggaaaatatgctgatctctggcttttttgactctgtcggtttgtatcaacagccttctgctattcatcaaagattggcggcacagtggcttgagctagtcggtatgactgcttatgccaaactgccttttgcgcatctgggcgccggacaacaacgtttaattctggcgatgcgtgctatggtgaaacacccgcctttgttattgctggatgaaccccttgtcgggttagatgacgaagaaagtgcggtactgatagcactgatcaaccgcatggcgtcggccagaaccagcgctattgtatatatctcacaccgtgctgaaatggggttaactgcagatgcggtctatgagcttatgcctcaggttacaggctctgttggccgtattgctgttgtaagtaggttttaaa

SEQ ID NO: 269464 - DNA, 721 bp, Unknown
  Bacterial polypeptide expressing nucleotide sequence isolated from the Sargasso Sea
atgcttaagatttctaatgttgaaactttttacggaaaaattcaagcacttagaggtgttgaccttgatgtaaatgatggtgaaattgtttctttaattggctctaatggagcaggtaaatcaactttacttatgacaattagtggagtgaataaagctaaaagaggaaatatagttttcaatggtgaaaatattgagaacagacaaccccataaaattgttgatatgggtatttgccaagttcctgaaggaagaagaatattttcaagattaactgtagaagaaaatttaagattaggtgctcatgccaatgaaaaagggaagtactttgaaaatgacattaaggaagtttatgatttatttcctgtattaagtgacagaaaaactcaaagaggcggaacactttcaggaggagaacagcaaatgctggcgataggaagagcattaatgagtaaacccaaagtgcttttattagatgaaccttcgcttggaatagcacctaaactagtaaatcaaatttttgtttcaataaaaaatattaataaagaaaaaaatgttactatttttttagttgagcaaaatgctaaaaaggctttggagcttgctgatagagcatatgttttagtaaacgggaaggtgaccataaagggccctggtcaagagttacttaaaaataaagacattcaagctgcttatctcgaaggtggggcaaaaaattaac

SEQ ID NO: 269465 - DNA, 1084 bp, Unknown
  Bacterial polypeptide expressing nucleotide sequence isolated from the Sargasso Sea
tatgtcgcaaattaaaatagtaaatttacaaaaatcatttggtgattttactgcagttaaaaattcaaatttaacaattaacgacaaagagttttttgttttacttgggccatctggttgcggaaaaactacaacacttcgaatgattgcaggattagaattaccaacttctggagaaatatatttaggagaagaagaagttggaatgttaagggcctcagaaagagatattgcttttgtttttcaattatttgccctctatccacatatgaatgtaagaaacaacttatcatttcctctaaaaatgcagggttacaaaaaaagtgatatcaaaagtcgagttgaagaagcagcaaaacttttaagaattgatcatattttaaattctaacatttcctctctttcaggtggagatagacaacgggtagctttaggtagagcactagttagaagaccaaaagcatttttaatggatgaaccattgggaactttggatgctgaatttagagaattaatgtgtctagaattaaaaaaacttcatttagatattggagcaactacagtttatgtaactcatgatcagttagaagcaatgtcactagctgaccgaattgcagttatggatggtggtgaaattttacaagctgacgaaccaaatattatttacaataaacctaaaactaaatttgtagcctcatttataggatctccaggtatgaacttttttgaagttgatgaaggaatttctaaagatcaatctttagtaaatatcgaaggcactaaatttaatattcccaaacaacttgaagagtcaaaaggaagtaaaaatttctttggcatacgtccagaaaatttaactcttagtaataatgatggtcttaaaggtttagtttttggagtagagtatttaggatcaagaaaaataattacagttaaaacaagtttaggtgaaattaaagttaaaacagatatttctgttaatgttaaattaaatgaaaatgttcaggttaaacctttaaataataatattattatttttgacggtgaaacagataaatctttaaacagtgagtttataaaataa

SEQ ID NO: 269466 - DNA, 817 bp, Unknown
  Bacterial polypeptide expressing nucleotide sequence isolated from the Sargasso Sea
atgagtgagataattcaaaaagttaaaaatctttcaattggttttagaagcaaaaaaggtgaagaaattcttattcttagaaatatttcaacaaatatcaaaaaaggtgaaacagtcggcatagtaggagagtctggttctggaaagagcacattggctttggctatgatgggatatgtaaaacaaggcctttatactattgatggagaatgtttatttgagtcttccaatttgcttaaaaagaataatagagaactagaaaaaattagaggtagaaaaatagcaatgatacctcaaaatgcaggtcaatctttaactccaaatttaaaaataggatatcaaatagatgaagcattaaaattacatacaagcttcaataaaattgatagggataatagaatttcagagcttttaaataaagtaagactcccttcacctgaaacaattgccttgagatatccgcatgagctttcagggggtcaacaacaaagagttgctgtagcaatggctttagcaggtaatcccgaattgttattgttggatgagcctactacaggattagatgtaacaactcaagctcacgttttagaattattaaattttattgcaaaagatactggtacatcaatggtatatgttagtcatgatcttggagctatagctcaagttagtgacaggattatagttatgtactctggagagattgttttagaaggtccttcaagaagtatactaaaaaaaccaattcatccttatacttatgggcttttgaagtctatacccaaactttcattggctggattacctgactcaatgc

SEQ ID NO: 269467 - DNA, 583 bp, Unknown
  Bacterial polypeptide expressing nucleotide sequence isolated from the Sargasso Sea
gatgactgatataattcaaaaagtaaaaaatctatctattggatttagaagtaaaaaaggcaacgaaatcttaattttaaaaaatataagcacaaatattaaaaagggcgagacagttggaatagtaggggaatctggttcaggaaaaagcacattagcattagcaatgatgggatacgttaagcatggtctttatactattggaggagaatgtcagtttaattcctcaaatttgcttaaaatgaaaagtaaagatttagaaaaaattagaggcagaaagatagcaatgattcctcaaaatgcaggccaagctttgacaccaaacttaaaaattggttatcaaattgatgaagctttacaattacactcagatttagatgaaagagaaagagaaaaaaaaatttccgaattattaaacaaagtcagacttccttcaccagagacgattgcgttaagatatccccatgaactctctggagggcaacaacagagagttgctgttgccatggctttagcaggaacgccagatttacttcttctagacgagcccacaactggactggatgtaacaacacaagctcat

SEQ ID NO: 269468 - DNA, 598 bp, Unknown
  Bacterial polypeptide expressing nucleotide sequence isolated from the Sargasso Sea
aatgatgcttggattaattaagccaactacgggtgatattattatacaaaataaaaatataaatacatttgagagaaataaacttttaagcattatgaattttgcatcgccctacgtagaattacctaagaaacttagtgtgaaacaaaatctacaaatctacggtaggctttacggggtaaaagatttatctcttagaatagatgaattggctgaagacttaaatttaaaagattttataaataaaaaaactggtgagttatcctcaggacaaaaaaatagggtttcacttgctaagtcactaattaataaacctgaaattcttctattagatgagcccactgcaagtcttgatccagatattggtgattatgttagatcttatgttcaatcatacaaatctaaaaataaagtaactatacttttagcttctcataatatggctgaagtagaaagactttgcgacagtgttataatgatgaaaaaagggaaaattattgatcaaggaactagtaaagagataataaatagacatggtcgagcaaatctagaagagacatttttaaaaatagtaaggagtaaagatgaggtggcataa

SEQ ID NO: 269469 - DNA, 1068 bp, Unknown
  Bacterial polypeptide expressing nucleotide sequence isolated from the Sargasso Sea
aatggctaaaatagatttatcaaatatttctcattcatataatcctaatgatgcaaatccaacgtatgcattaaatccattttcaatgacttgggaaaatgggaaaagatatgcaattttaggaccatcaggctgtggtaagacaactatgctaaatattgtttcaggtttagttaaaccatctagagggaatattttatttgatgaaaaagatgtaacaaatcttattactgaagaaagaaatatagcacaagtttttcagttcccagttatttatagtacaatgactgtttatgataatttagcctttcccttaaagtgtaggaacttttccaaagaaaaaattgatgaaagagtaaaatcagtttcagatactttaagactttcatcttttttaaatttaccagccagaaaacttactgcagatcaaaaacaactcatttcacttggaagaggattggtaagagaggatgttgcaggtgtattaatggacgaaccattaactgtaattgatccagatttaaaatttagacttagaagaaacctaaaagaaattaatgaacaatataaaacgactttagtttacgtaacccatgatcaaaatgaagctatgacgtttgctgataatattattgttatggatcagggagaaatagtccaagttggacttccaaaagatctttttgaaagacccaaaacaacttttgtcggttactttattggatctccagccatgaatatttttgaaagtgaggtctgttctgaatattctgtaaaaattaataatattgaaattaaaacaaactcgaacctcacgaaaataaaagataaaaacgtaaaacttggaattaggtcagaatttataaatgttgcagaaaaagagggtgaaaatacaattaaagcttcacttactagagttgaagattttggaaatttcaaattattgacggcaaatatggataattttgtaatcaaatctaaagtggatagagaattgccaatttcaattggagatatcaatctttatataccccctgaaaaatgttgtgtgtatgagaacgaaaagtt

SEQ ID NO: 269470 - DNA, 1042 bp, Unknown
  Bacterial polypeptide expressing nucleotide sequence isolated from the Sargasso Sea
aatgtctgaatcattaaataattctaacaatactccagtaattcagtgtgaatctgtttataaaatttttggaaataatgcttcaaaacttttagagaactcaaacggccaagttgatgcaaaaacctttcaagaagctggttgtattgtaggagtaaataacgcctcatttggagttaacaagggagaaatgatggttgtaatgggattatcaggctcaggtaaatcaactttactgcgatgtatatcaaaacttacagatgccactgcaggcaaaatatttattgatggtgaagatttactggcaatgagtaataaacaattaattgaattacgaagaaataaaatgggtatggtttttcaaagttttgcacttcttcctcataaaactgtaattgaaaacattgcctttcctcttcaaattaaaggaactaatacaagagaaagtatggcaaaagctctagagatggttgagttggttggattaaaagggagggaaaattattttccaagagaactctcaggaggtcagcaacaaagagtgggaattgcacgttctttagcagtagaacctgacatttggtttttagatgaacctttttctgcgcttgatccacttatacgtaaagaaatgcaggacgaattcttaagattgcaaggtgttttaaataaaacaattatgtttgtaacacatgattttgatgaagcacttcgtttagcagatcgtattgcgattatgaaagatggcataatagaacaattagatacacctgataatattgtattgaatccagctactgaatatgtaaagaaatttactgaggatgtacctcgagagaaagtacttaagattgagtctattatggatacttatgactcaaatgtttcaagtgatataaaagtatctaaagatgcaatcatagaaacattagctgaatcaattcttaatagtaaagaaatacttactgtagttgataaaaataatgaaattgtaggttctttaaatccttctaaagtaataaaagtgatttttggaaaataa

SEQ ID NO: 269471 - DNA, 1084 bp, Unknown
  Bacterial polypeptide expressing nucleotide sequence isolated from the Sargasso Sea
tatgtctaaaattaaaatagtaaatttacaaaaatcatttggagatttcactgcagttaaaaattctaatttaacaattaatgataaagagttttttgttttgcttggcccatctggatgtggaaaaacaacaactctaagaatgattgctggattagaattaccaacatcaggagaaatttatttaggagatgaagaagttggaatgttaagagcatctgagagagatattgccttcgtttttcaattgtttgccctctatccacatatgaatgtaaaaaataacctatcttttccccttaaaatgcaaggttatagtagaagtgaaattaaaactagagttgaagaagcagcaaaacttttaagaattgatcatattttaaactccaacatttcttctttatcgggtggagatagacaacgtgtagctcttggtagagctttagtgagaagaccaaaagcatttttaatggatgagcctttaggtactttggatgcagaatttagagaattaatgtgtttagaacttaagaaattacacatcgatattggcgctaccactgtttatgtaacacacgatcaactagaggcaatgtcattagctgatcgtattgccgtaatggatggtggtgaaattttacaagctgatgaaccttcagtaatttacaataaacctgctaccaaatttgtagcatcatttattggctcccctggaatgaattttataagtattgatcaaggtatttccaatgaacagtcgactttaaatatagaaggaacaaattttaatatacctaaacagtatgagatatcaaaaggcaaaaaaaactcatttggtattcgtcctgaaaatttatctcttactaacgaaggtggtcttaaaggttcagtatttggagttgaatatttaggctcaagaaaaattgtaactgttaaaactaattttggagaaatcaaagtaaaaactgatatttcaacaactgttaaaatcaatgaaaacgttcaattaaaaccctcaaatgataacataattatttttgatggtgaaactgacaaatctcttaaaagtgagtttatgaattaa

SEQ ID NO: 269472 - DNA, 742 bp, Unknown
  Bacterial polypeptide expressing nucleotide sequence isolated from the Sargasso Sea
cctgaccaaagagttcaagggcttcaccgccgtcagtgacgtgaacctggccgttcggcgcgggtccatccacgcgctgatcggccccaacggtgcaggcaagaccacgtgcttcaacctgctcaccaagtttctggagccgacttcgggtgtcatccgcttcaacgggcacgacatcacgcgggagcagcccgcgcagatcgcacgccgcggcgtgatccgttcgttccagatttcggcggtgttcccgcacctcacactcatcgagaacgtgcgcctgggcctgcagcgcaagctgggcacgtcgttccacttctggcgcagcgagcgcaccctgcggcagctggacgaccgtgccatgcaactgctgaccgaggtggggctggaagacctggccgatgaagtgaccgtaaacctgccctacggccgcaagcgcgcgctggagatcgccaccacgctgtccatggagcccgagctgatgctgctggacgagcccacccagggcatgggccacgaagacgtggaccgcgtcacgcagctcattaagaaggtttctgccggccgcaccatcctgatggtggagcacaacatgaaggtggtctccaccatcgcagaccgcatcacggtgctgcagcgcggcgccgtgctggccgaagggccctacgcagaagtctccaacaacccccaagtcatggaagcctacatgggcacgaccgacggccaactgcagggagcgcactga

SEQ ID NO: 269473 - DNA, 766 bp, Unknown
  Bacterial polypeptide expressing nucleotide sequence isolated from the Sargasso Sea
tatgaacatcatagaagtaaaagatttaaaaaaagcttatctactgccaagcgataaaacaaaaacattcaatgccgtagacagcatctccttgggaatcaaaaaaggggaggtctatggaattcttggtcccaatggggcagggaagaccacaactttggaaatgttagaaggtcttaaggaaattgatgacggctctgcaatcatcgacggcattgatgtaagcaaggacccttacgaagttaaaaaagtcataggtgttcaactgcaaagcaatgagtattttgacaagctggatctcagtgagctactgactttattttctaaactctattctacaaatatcgatcactcgaagttgctagaccaagttaatttgctggataaagcaaatgcaaaaactcaacatctttcaggcggtcaaaggcagagattctcaattgcatgtgctttagtcaataaccccaagatactctttttagatgagccaacaacaggactggatccgcaagcaaagagaaatttatggaatttggtaaaggacctcaacgcatccggcatgacaattgtattgacaacacacaacatggaagaagcagaacatctatgcgacagaatcgcaatcatggacgaaggcaaattgattgcagaggacacaccgaaggcattgattgagaaatatgcacctaaaccgtcagatattccattgaccggaaacatagaagacgttttcttgaatctaacaggacactcattaagggattga

SEQ ID NO: 269474 - DNA, 736 bp, Unknown
  Bacterial polypeptide expressing nucleotide sequence isolated from the Sargasso Sea
gatgattttaagtgcaagggacatatcaaaatcttacagagggagaaaagtagttaataatatttcaattgaagtaaatcaaggagaaattgttggtttacttggtcctaatggtgctggaaagaccacatcattttatatgattgttggaataataaagcccgaaaagggtgatatttttcttgataaagaagttatctcttcataccctatgtatcaaagagctcaaaaaggaatagggtatcttgctcaagaagaatcagtgttcagaaagctttctgttgaggataatatattaggtgttttagaattttcagaactttctaaagatcaacagaaagagaaagctcaacagttgatggaggagtttggattaataaacattagaaaaaatagaggtgatcttttgtctggtggtgaaagaagaagaactgagattgctagagctctagcaaataacccaaactttttattattagacgaaccttttgctggtgttgatcctatagcagttgaagatattcagtcaattatttctgttttgaaaaagaaaaacattggaatccttattacagatcataatgttcaagaaacacttgcaattacggatcgaacttatttgatgtttgaaggaaaaatattaaaagagggtattccagaagatcttgcaaaagacgaaattgtcagaaaagtatacttgggtaaaaattttgagtttaaaagaaaaaaaatatag

SEQ ID NO: 269475 - DNA, 745 bp, Unknown
  Bacterial polypeptide expressing nucleotide sequence isolated from the Sargasso Sea
gatgaataaatttcagatattagaggatggtttatatgtaaataaaatttcaaaaacctatggcaataaagaggtgataagagatatcacaatttcaattaaaagaggagagatcgtaggcttattaggcccaaatggcgctggaaaaactacaagtttctatgtaattgttgggctagtcaaacctgatagaggttcaatatttttagacaaattagatatttctgaattacctatttataaaagaggtaaaattgggataagttatttaccacaagaggcttctatatttagaggtatgaatgttgaagataatttaatgtcaattattgaaataattgaaaaagataaaaataagcatgatatcattttacaaaatcttttaaatgaatttgatattaatcatgtaagaaaatctaaatcaattgtattatcaggtggtgagagaagacgattagaaatagctagaactctagcatcaaatccaaaatatctgctattagacgaaccattgactggaatagatcctgtttcaatagaagaaattaaaattattatcaaaaaattaaaagataaaaatataggggttttaataactgatcacaatgtaagagagacattaaaaattgtagataaagtatacatcgtgaacgaaggagcaattttttttgaaggagatccaaaaaatgctgtcaaagatgaaaagataaagaaattttatcttggagctgactttatactttaa

SEQ ID NO: 269476 - DNA, 922 bp, Unknown
  Bacterial polypeptide expressing nucleotide sequence isolated from the Sargasso Sea
tttggctgttgatggtgtggatttagatatttttagaggtgaagttttaggtctagctggagaaagtggttgtggaaagacaactcttggtaaagccatcctaagattggtagaacctacagatggagaagtaaaatatatttcacaagatgataatgagacagaattaacatctttagaaaaaaaagatatggatccatttcgaaagaagttacaaatagtctttcaagatccgcactcctctcttaatccttcatttacaatttttggctctcttcaagatccattaaaaaaatttggtataaaatcaaaagaggaaagaagaaaaattattggtgatctcctagaagcagtaaatatgcgcagagaatacatggatagatatcctcacgaattttcaggaggacaaagacaaagaattggtattgtcagagctttatgtcttgagccagaacttatagtttgtgatgaagcggttagtgctcttgatgtatcaattcaggcacaagtactaaaattattaatgcaacttaagaaagaaaaaaatctaacctaccttttcattactcatgatttgagtgttacagaatatctatgtgatcgaattgctgttatgtatcttgggagaattgttgaactttgtgattctgaagatctatataataatactcttcacccctactctgaagctttgatttcagctatcccagttgcagatcttgacaaacaaacgaaaagaattgttttggaaggagatgtaccaagtccagttaatccacctaaaggctgtccttttcatcctcggtgtcctaaagcaactgacatttgtaaaactgaggtaccaacattaaaaaaatattcaacaaatggtaatgaacactatgcatcttgccacttaattgatttacccgaaattagctaa

SEQ ID NO: 269477 - DNA, 1003 bp, Unknown
  Bacterial polypeptide expressing nucleotide sequence isolated from the Sargasso Sea
gttgaaagctgtcgaagctaataatcttcataaaacttttacttcaaaaaaagaatcagtagaagctgtcaaaggcgtctcgttttcagtcgaacaaggtgaggtatttagtattctaggtccaaatggagctggaaaaagtacaacaattttgatgcttacaactttattgggcatcagtaaagggactgcttcaattatgggtttagatgttgagaaacaagataaagaagtaagaacaaagataggtgtagctttacaagatactggcattgatttattactaacagcaagagaattgctttataccactggaaggctttggggtctcaacaaacaagaatcaaatacaagaactgaagagcttcttcaattagtagggttaacagaatcagcagatagaagagtcaaaacatactctgggggaatgaaaagaagactcgatttaggtcttagtcttgtaaatgaacctgaagtattatttttagacgaacctacaacgggtcttgatccagcatcaagaagagtaatttgggatgaaattaaaagactaaacaataatggagtcactgtcatcctaacaacacaatatcttgaagaggcagatgaactttccgataggttattgataatagacaaaggtgtagtggccacagagggaacatctgatgagctcaaagcaagtgtaggtggcgacgtcgtaacttttgatttcgaaaaagaagaaaatgtggaagtggcaaaaagattaattgataatgcaaaagttaatcagaagcagcttcgtataactgttgagaatggggcagagcatatcccaatatttatgaaaacatttacagaaaataagttaaatgttaaatctgtttcggctaataagcctactttggatgatgtatttctaaaagtcacaggattcagcatggaaaatgataatcaatcagaaaaaaaacaaagtaaaaaatctaactatgaaaaaagaggaagaagaattagaagataa

SEQ ID NO: 269478 - DNA, 1150 bp, Unknown
  Bacterial polypeptide expressing nucleotide sequence isolated from the Sargasso Sea
aatgccttcttatcaatatatctatgtcatgaatggtctttcaaaaacctttactggcgggagagagattttaaagaacattaatctttctttttttccaggagcaaaaataggtgtcttgggaaccaatggagcaggtaagtccacgttactcaaaatcatggcaggcatcgacacccaattcgttggagaagcttgggctgccgaaggagtaaaagtgggatacttacctcaggaaccagagttagaagccggtaaaactgtccatgagttagtcatggagggcatgtcagaaacgaagatgattctggatagattcaatgaagttagtgccaaatttgcagaagaaatgaccgatgaggaaatgaatacgcttctagcggagcaggcggaactgcaagaaaaaattgatgctgccaacgcttgggatctggatagacatgtggaaatagcgatggacgcgttgcgtttacctccaagtgatacagacgtagggcctttgtcaggaggagaaaaacgccgtgttgccttatgccgattattgctatctgccccagaccttttattacttgatgagccaacaaatcaccttgacgccgaatctgtagcctggctgcaacgatttcttcacgatttcccaggaaccgttgttacggtaacgcatgatcggtattttttagatgaagttgccgggtggatactagagctcgatagggggcaaggaattccatttgagggaaattactcaggttggttagaacaaaaacagaaacgtcttcagcaggagggtaagcaggacgcagccaggcagaggtcgttggctaatgaattagagtgggtcagagcctcgccaagagggcgccaggcaaagagcaaggctcgcttgaccgcctatgaagatcttctaaaccgaaaccaggaaaaagtagtagataacgccaaaataataattccaccaggaccgcgtcttggagatttagtcatcgaatcacttaaccttgtgaaggggttttcagaaaggcttctcgtagatgatttgtctttcaaattaccacctggaggcatcgtgggtgttataggtccgaatggagcagggaaaacaacgctattccgaatgataacgggacaagacagtcccgattccggctct

SEQ ID NO: 269479 - DNA, 652 bp, Unknown
  Bacterial polypeptide expressing nucleotide sequence isolated from the Sargasso Sea
atggataacctaatcttagaaattaaagacttgaatcatgcttacggggagtctgacttaacaataaaagatcttaatttcaatatttcagtaggagaaagagtttcaatattgggtccttcgggatgtggaaaaagtactttattgagacttattgctgggttagaaaaaccaaatagtggtgagattattaagaaagcagaagttctgaccagtaatgaaatattcattcctcctgaaaaacgcaatgttggactggttgtccaagaaaaagctctttttcctcatttgactgtttatgaaaatgtttgttttggtattcagaaaaatagagataaaaacaaaattgtatcggatcttctagaactattaaaaatagattctcttaagaataagcaccctcatgaaatatctggaggcgaacaacaaagagtagcacttgcacgatctcttgcgcccactccagatttactaatgttagatgaaccttttagtgcactagatgaggagcttaaaaaaactctatatgaagaagtgtctgaagttttttatgaaaaaaattctagtattcttttagtcactcatgatccttatgaagcagaggtcatgactgataaacagttaagaatggaaaatggtaaattaatttagc

SEQ ID NO: 269480 - DNA, 637 bp, Unknown
  Bacterial polypeptide expressing nucleotide sequence isolated from the Sargasso Sea
aatgttggcagtaagtataaaaaatcttagccataaaattaacaataaatctattttaaataatgttaattttgagctaaaaaaagattctatagcttgtattcttggaccatcaggaagtggtaaaactacacttctaaaattaattgctggtttagataatgtacaaaatggacaaatactaataaacgatcaagaagtaagttcagcaaataaacatttaccaactgaaaaaagaagaattggctttctgtttcaagattatgctctctttccacatttaacggtaaaagaaaatttaaaatacccaatcaattttaagaactctatatataagattgatgatatcattgatgttgtcaaacttcctgactcattagataaatatcctcatgaattaagtgggggtgaacaacaacgggttgctctagcgagatctataatatcgcatcccgatttattacttttagatgaacccttctctagtcttgatctaaatcttagagaagaaatacgagatgatactttgcacttacttcaaaaatcgaatgtttcgactattatcgttacccatgatccttttgaggctatgtttatttcaaatcaaataaatattatggataatagtgggagtatt

SEQ ID NO: 269481 - DNA, 1564 bp, Unknown
  Bacterial polypeptide expressing nucleotide sequence isolated from the Sargasso Sea
gctggaccgcgcccgcaacgccatcaaagggctgatgcaactcacgcccgaacaggccagcgtgcagcaggccgacggcaactggcagctcacggacctcaagtcgatcgcgctcggcgcagtggtacgcgtgaagccgggtgagcggattgcgctcgacggtgaaatcgtcgccggccgttcgagcgtcgatcaggcgccgatcaccggcgaaagcctgccggtcgacaagaccgtgggcgacgccgtgttcgccggcacgatcaaccaggccggctcgttcgactaccgcgtcacggccgccgccagcaacacaacgctcgcacgcatcattcacgcggtcgaggaagcgcaaggcaccaaggcgccgacccagcgtttcgtagaccagttcgcccgcgtctatacgccgatcgtattcgcgaccgcactcgcggtcgcggtgttgccaccgctgctgctcggcggacagtggcacgaatgggtctacaaggcactcgtgatgctggtgatcgcctgtccgtgcgcgctggtgatctcgacaccggtcacgatcgtcagcggcctcgcggctgccgcgcgcaagggcatcctgatcaaaggcggcgcctacctcgagcagggccgcaagctgagccggctcgcgctcgacaaaaccggcacgctcacgcacggcaaacccgtgcaaaccgagttcgagatcctcgccgacgtcgaggtcgtgcgttgccggacactcgccgccagcctagcgggtcgttcggatcatccggtgtcgatggcaatcgccgcagcggcaaaaaacgacagcgtcacccgtgccacggtcgatgtcttcgaggcactcgcaggccgtggcgtgcgtggcgaaatcgacggcttgccgtactggctcggcaatcatcggctggtcgaagagctcgggcgctgttcggcgtcgctcgaagcgcggctggacacgctcgaagcacaaggcaaaaccgtcgtgatgctggtggacgctgaacgcgtgctcgcgctgtttgccgtcgccgacacggtgaaggacacaagccgcgccgccattgccgaattgcagcgcctcggtgtgcatgccaccatgctcaccggcgacaacccgcacacggctgccgcgatcgcgcagcaagtcggcatcgaggaagcccgcggcaatcagttgcccgaggacaagctgaacgccgtggacggctggtcgaaagacggcgcgacggtcggcatggttggcgacggcatcaacgacgcccccgctctcgcgcgtgccgatatcggtttcgcaatgggcgcaatgggcaccgacaccgcgatcgaaaccgccgacgtcgccttgatggacgacgatctgcgcaagattccgcagttcatccgtctgtcgaaggcgacacattcggtgctggtgcagaacatcacactggcgctgggcatcaagagtgtgttcctcgtgctgacggtgatgggtctgggcacgatgtggatggccgtgttcgcggatgtgggcgcgagtctgctggtggtggcgaacggtttgcggctgctgcgcaaatag

SEQ ID NO: 269482 - DNA, 718 bp, Unknown
  Bacterial polypeptide expressing nucleotide sequence isolated from the Sargasso Sea
atgaataaaacagtgattgaatgtaatggaatcgcagcaggatacgtaaagggtttaaatatccttcagggcattgacatgatcataaacgaaaaagaaatagtatcaattattggtcctaatggagcaggaaaatcaacattacttaaagcgattatgggaataattaatatttcaggtggaagattttttatagatggtgtcgaaaaaaccaatactcctactcatcaaattgttaaagagggagttggctatgtccctcaggttgaaaatgtatttccatccttaacaattgaagaaaatttagaaattggctcttggtctatcgatacaagtatcaaacaatcaatatcaaaaatatttgatgattttcccatgttaaaagaaagaagaaaagacaaagctggaaatttatctggcggacagagacaaatactcgctctagcaagagcattaactacttctccaaagattctactattagacgaaccatcagcaggtctttcaccggttgcaattaaggaagtatttgaaatagttaaagagataaattcaaaaggggtcgcaattcttttggtagaacaaaatgccaaaagagcattaaattttagtgatcgtggttatgttctagatcaaggaagaaatgcttatcagggcaaaggtcaagagcttttgaatgatccgcgcgtcgtggacttatatttaggaaaactataaa

SEQ ID NO: 269483 - DNA, 754 bp, Unknown
  Bacterial polypeptide expressing nucleotide sequence isolated from the Sargasso Sea
atgaaaaatttaaaatctaaaaatccgttattatctgtcaaaggaatagcaaaatcatatggtcatgtacgagctcttcaaaatattgatattgatattcattctggagaagtattaggtttattaggagacaatggtgctggaaaatctactttaataaaaattctttcaggcattgttcgacctgataagggtcaaatatttcgtgagggtaaagaaattaatattctttcaagaaaagatagtgaagagaaggctggggtacaaacaatctatcaagacattgctttagtcaaatcaatgtctattcttagaaatatttttgcaggtcaggaaagaaaaacaaaacttggttttttaaaacttaatgaaatgagagatacgactatgcaaatactaaatgatcacgttaaaattgcaggtataacttccccagatttactaatagaagaattatcaggtgggcaagctcaagcagttgctattgcaagagctgtacattttcaaagagatattttacttttagatgaaccaacttcagcattgtctgttcgagaaactaataaagtacattctataatgagagaaattgctgatgcaggcaacagttgtgtttttgtaacacataatttgtatcatgcttttcaagtatgtgatcgttttgttgttttttctcatggagaagtagtaaaatcttcaactaaagaaaatacatcattagatgaattgacagatttaattttagccaattgaa

SEQ ID NO: 269484 - DNA, 1030 bp, Unknown
  Bacterial polypeptide expressing nucleotide sequence isolated from the Sargasso Sea
tatgtctgagccagtaatcaaatgtgaaaatgtatataaaatttttggagcaaatgctcagaagatgcttcaagactcaaatggaaatgttgatgctaaagtttttcaagaaaatggttgcattgttggagtgaacaacgcttcttttgaagttgcaaaaggagagatgttagttgttatgggtttatctggctcaggtaaatcaactttattaagatgtatttcaagattgactgatgcaacagatggtaaaattttcatagagggccaggacttattacaattaaataataaagatctaatagatcttagaagaaataaaatgggaatggtttttcaaagctttgctttacttccacacaaaactgttgttgagaacattgcttttccccttcagattaaagggatcaaaactgaggacagcataaataaagcaatggatatggttaaattagttggacttgaaggtagagaaaattattttcctagagaactttcaggaggtcaacaacaaagagtaggtatagcaagatctttagcagttgagccagatatttggtttttagatgagcctttttcagctttggatccattaattagaaaagagatgcaagatgagtttttaagacttcaagataaattacaaaaaacaattatgtttattacacacgattttgacgaggctttaaaacttgctgacagaattgcaattatgaaagatggaataattgagcagttagatacaccagctaatattgttttaaatccagccactgagtatgtcagaaaatttactgaagaagtgccgagagaaaaagttttattgattaaggatgttatggatacatcaaaagataatttaggtgatttaaaagtctctaaaaatgaaatcatagaaaatgttgcagaaaaaattcttacacaggaaaaaatagtcgctgtagttgataacaataatgagattataggctctatcaatccaacaaaaataatcaatacagtttttgggggaagaaaaaataataattaa

SEQ ID NO: 269485 - DNA, 967 bp, Unknown
  Bacterial polypeptide expressing nucleotide sequence isolated from the Sargasso Sea
aatgcttcaagattctaatggtaatgttgatgcaaaaactttccaagaaaatgggtgtattgtaggagtgaacaacgcttcctttgaagttgcaaaaggagaaatgttagttgttatgggtttatcaggatcaggtaaatcaactttattaagatgtatatccagattaactgatgcaacaggtggtaaaatttttatagaaggtcaggacctcttacaactaaataataaagatctaatagatcttagaagaaataaaatgggaatggtttttcaaagctttgctttactcccacataaaactgttgttgagaacattgcgtttcctcttcagattaaagggatcaaaactgaggacagcataaataaagcaatggatatggttaaactagttggtctcgatggaagagaaaactattttccaagagaactttcaggaggacaacaacaaagagtaggtattgcaagatctttagcagttgaaccggatatttggtttttagatgagcctttttcagctttggatccattaattagaaaagagatgcaagatgagtttttaagacttcaagataagttacaaaaaacaattatgtttattacacatgattttgatgaggctttaaaacttgctgacagaattgcaattatgaaagatggaataattgagcagttagatacaccagctaatattgttttaaatccagccactgaatatgtcagaaaatttactgaagaagtaccgagagaaaaagttttattgattaaggatgtaatggatacatctaaagataacttaggtgatttaaaagtctctaaagatgaaatcatagagaatgttgcagaaaaaattcttatacaggaaaaaatagtcgctgtagttgataacaataatgaaattataggctctatcaatccaacaaaaataattaatacagtctttgggggaagaaaaaataataattag

SEQ ID NO: 269486 - DNA, 1048 bp, Unknown
  Bacterial polypeptide expressing nucleotide sequence isolated from the Sargasso Sea
atgattgctgttgaagttaaagatcttactcattcgattaataataaaaaaattttaaataatattaattttaatctcaataaagatagtatctcttgtattttgggaccgtcaggtagtggaaaaactactttattaaagctcatagcaggtcttgaaaaagtacagtcaggtaaaattattattaatggtgaagaagtaagtagtactgcaaaacacttacctacagaaaaaagaaaaattggttttttatttcaagattacgctttattcccacatttgacagtaaaagaaaatttgagatttccaactaatgctaaaaattcaactaataatgttgatgaaattattgaattaataaaattacctaattcactagataaatacccacacgagttaagtggtggtgaacaacaaagagttgcacttgcacgatctataatttcacaacccgatttacttttattagatgagcctttttcaagtttagatttaagccttcgagaagaggtgagggatgatacgctgcatctattacaaaaatcaaatgtgtctgtaattatagtcactcatgatcctttcgaagcaatgtttatctcaaatcatataaatatttttgataaatcaggttcgattgtacagtcaggaactccgaatgatctctataacaatccaaaaaattcatatgttacaggtttttttggtgaaacaaataaatttgaaggtgttgttaaagaatctcacatttacacaccggttgggaaaattaaaacacctggaaatttagaaggtgaaaaagttgtagtacacataagacctcaaggtataaaactcaacaaacaaccaacaccagttaatggaattaagggaaccgttatggcatcaaaattaatggggtcatttagttttatccatttatctgtactagataataataatgaagttgttcacgttcatagccacatgcctgctgactttaatcctaaacaatcgtctgcagtggagatagaaattgataatgatcaggcttacatatttaagaattaag

SEQ ID NO: 269487 - DNA, 484 bp, Unknown
  Bacterial polypeptide expressing nucleotide sequence isolated from the Sargasso Sea
aatggcatactttgaaggagcaaaaatgactgcaggttatggggatggtcctgatattattagttcatgttccataactgccaataggggagagatagtagctattctaggtcccaatggtgctggcaaatcaacagccatgaaagcgatgctcggattattaaaattaaaatcaggctctgtaactttgaatggtgaagatatttcaaaaattaatcctcaagatcgagtaaaaaagggtatttcatttgttccacaaacaagaaatgtatttgccgagttgactgtaagagaaaatttagagattggtggctttttgacagaagggagtttagaaaataaaattgagagtatttatagtttatttccaatcctgagtgaaaaaaaatcccaagtcgtcggacaattatctggtggacaacgtcagcaagtcgcacttggaagagctttaatgagtgatccatcagttcttatgttagatgag

SEQ ID NO: 269488 - DNA, 664 bp, Unknown
  Bacterial polypeptide expressing nucleotide sequence isolated from the Sargasso Sea
aatgatcctagaagtaaataaactaaggaaagaagtttcttcaggtgattctgaattgacgatactcgatgatgtcagctttagcctagaggaaggacagtcgcttgcaataactggtccatctggttcaggaaaatcgacccttctgggtttactggctggcttggatactgcaacaagcggagaaatctatctagataaagtcggcttgcataaactagacgaagaagatcgagcgatcctaagaaaggagaaagtaggatttgtattccagtcatttgaattattaccaagcttaactgctctagaaaatgtcatgctaccttccgaactcaaatcagacgataaccctagagaaaatgccgaatactttcttaatagagttggattaagcgaaagagaacaccattatccaaatcaactttcaggtggtgagcagcaaagggttgccatagctagagcttttgcatgttctgcaaaaatactctttgcagatgaaccaacaggaaatctagatccaaagaatggtcaggttgtatctgatttactttttgaagttaattctgaaactgacaatgcattagtaatagtgactcatgatcttgagctggcaaataggtgtgataaaagaatagaccttaaactgggaagaatagtcgaataa

SEQ ID NO: 269489 - DNA, 766 bp, Unknown
  Bacterial polypeptide expressing nucleotide sequence isolated from the Sargasso Sea
atgaacatcatagaagtaaaagacttaaaaaaagcctatctgctaccaggggataaatcgaaaacattcaatgcagtagatcatatatctcttggaatcatgaaaggagaagtttatggaatactgggccctaatggagcaggcaagaccacaactctagagatgctagagggcctaaaggaaattgatgatggctttgcgatcatcgatggcattgatgtgagtaaagatccttatgcagttaagaaggtgattggtgtgcaacttcaaagtaatgagtattttgataaactggacctcagtgagcttcttaccttattttctaaactctattcaacaaccatcgatcactcgaagctactggatcaagtaaatttattggataaagcaaatgcaaaaacccaacacttgtcaggtggtcaaagacaaaggttttcaattgcctgcgcactggttaataaccccaaaatactctttctggatgagccaacaacaggccttgatccccaagcaaaaaggaatttatggactttggtaaaggatcttaattcttctggtatgacaatcgtattgaccacacacaatatggaagaagcagagtatctgtgtgaccggattgcaatcatggacaagggcaaattgattgctgaggatacaccaaaagcgttaattgagaaatatgcacctgaaccttctgatatcccattaactggaaacattgaagatgtcttcctcaatttaacaggacattctttgagagactgat

SEQ ID NO: 269490 - DNA, 691 bp, Unknown
  Bacterial polypeptide expressing nucleotide sequence isolated from the Sargasso Sea
aatggctaaaattgatttaagcaacatatctcactcatacaatccaaatgatccaaatcctgtctatgctttaaatcctttctcaatgacatgggaaaacggaaatagatatgcaattttaggtccttctggatgtggaaaaactacaatgctaaatattgtatctggcctagtgagaccttccgctggaagaatattattcgatgataaagatgttacagatttaaaaacagaagatagaaatattgctcaagtttttcaatttccagttatttataataccatgactgtttatgaaaatttagcattcccacttaaatgtagagatttttctaaaagtaaaactgatgagagagttaattcagtagctgaaactttaaatttaaattcttttttaaattctccagctagaaaattaacagcagatcaaaagcaactgatatctttaggaagaggccttgtaagagaggacgtggctgctgttctaatggatgaacctttaactgttatcgatccagatttaaaatttagattaagaagaaatcttaaagaaattaatgagcaatacaaaacaacattagtttatgtgacgcacgatcaaaacgaagcgatgacttttgcagataatataatagtcatgagtgaaggagaggtggttcaaactggttccccaaaagaactttttgaaaga

SEQ ID NO: 269491 - DNA, 709 bp, Unknown
  Bacterial polypeptide expressing nucleotide sequence isolated from the Sargasso Sea
atggctttttttgaaggaataaaaatgacagctggttatggagatggaccagatattattagctcatgcaatataaatgttaataggggagagatagtagccatacttggcccaaacggagcaggaaaatctacagcaatgaaggctttgttaggtcttattactctgaaatcaggtagtgtttgtttagatggtgaggatatttcaaaaatatctcctcaagatagagttaagaaaggaatttcttttgtacctcaaactagaaatgtttttgcagagctaacagtaagagaaaatttagaaattggaggctttcttagagaagatgggttagaagaaatgattaaaaatatatatgagctgtttccaatattaaatgaaaaacaatcacaaattgttggtcaattatcaggtggccaaagacaacaagtggcgcttggaagagctttgatgagcgagccatctgtgttgatgttagatgaaccaacagctggagtttcgcctatagtaatggatgaattatttgatcatattataaaagtgaaaaaaactaatgttgccataattatggttgaacagaacgcaaaacaagcacttaatatctcggataggggatatgtacttgttactggaaaaaataaatttgaggggtcaggcaaccaacttctcacagacccagaggtgagaaggtcttttttgggtggatgat

SEQ ID NO: 269492 - DNA, 1735 bp, Unknown
  Bacterial polypeptide expressing nucleotide sequence isolated from the Sargasso Sea
cgtaaactccttggcatgaaaacttccggaagtttgacagtacttttcactgataaaaccggaacattaactcaaggggagttaactgtctctgaatttctggttggagacggcaaacattttcggaattatcaggaaattcctgataatttgcgagaaaatattgcatttgcagtgcgtaacaacactcctgccattattgattcgcaggaacctgaaaatataaaaatagttggagccaacccaaccggaattgcattgttgagattccttggatcagatgcggctgtgcaggatgatgttttaatggaaaaaaatattccatttcaaagtgcaaacaaattttcagcgagccagattaaaggcaacgaaaatataacacttgtcaaaggtgcagctgaaattgttcttgaggagtgtacaaattaccttaatgaaaaaggtgacaaagtaaagcttgatgcaacaaaactcaaagaggaaatgcgggtactctccaaaagagcaatgcgcctcattggcttggcagttacagataaaaatttagaggaggaaaatgtgcttccttcagaactaactctggttggagtttttggactacgggatgaaatgcgtaaggaatcacttacggcagtggaaactgctcataaagcaggaatccaagtggtaatgattaccggtgatgcaaaagatactgctcaagcaattgcaaaagaagtgggtatccttgaaaacgaaaaaggactaatactcacctccacacagcttggtgaattctctgatcaggaaataaaagattttcttccgaatttaagagttgtggcaagagctcttcctacagacaaaagtcgtttggttaaactggccaaatctatggactgggtagtcggtatgacaggggacggagttaatgatgctcctgcagtaaaaaacgcagatgttggtttttcaatgggcaatggtactgacatgactaaggaatccagcgacattgtaatcctggacaataactttaactccctcacaaatgctgtccgttacggtagaacactgctcaaatcgatcagaaaatttttaatatttcagttgacggtaaatgttgcagcagttctagtggcttttttaggccctttttttggtactgatctccctcttacaatgactcaacttttatggataaatattgtgatggataccttagctgcttttgctttttccggggaggcagccttaaggcgctatatgaacgaaaaaccaattcctaagggcgaatcactaatcactggtgatatgtggtcagctattttggttgatggagttttgatggctgcgctatgcctgtattttctaagctctgattttgttgcgggattatttgtttgcgatgtcaaacgttgtgacgaccctgaagtaaatatggtacttctcactgcattctttggcttctttgtttttattaataattttaacaaatttaatgcacggactgaaagtctgaatctatttgagcacataacaaaaaatcgaaactttctaattgtgatattgattattttcctgctacaaaccacatttacttattatggaggagaagttctgaggacagtcggtctaactttgcaggagtggatttatgtgctgacttttgccttcataatcattccgatcgatcttacgcgaaaatttttacgcaatctattttttggcaacccagtcgtacgagaaaattcttgag

SEQ ID NO: 269493 - DNA, 1000 bp, Unknown
  Bacterial polypeptide expressing nucleotide sequence isolated from the Sargasso Sea
gatgacaaacgaggtttcatcccaagggcgggtggcggttaaggccgtcgggctttgcaagcgttatgcgaagtttgaggcactcacggatcttaattttgaacttcatacaggccaaactttagcgctactcggccacaatggcgcgggtaaatcgaccctgattaaaatgatgttggggcttgtctccccaagccatggcgagctatttgtgcaggggcaacctctgcataccaagcgacccaacgctaacctgccattaggctatttacctgaaaacgtgagcttttatgacaatatgacggcgcgggaaattttaagctattttgccaaacttaagggtgtcgcctccaagcgagtatccattttgctggaagagtttggcctaatggcagctaaagataaacgcctaagtaccttttccaagggcatgcgccaacgtttgggattagctcaggcggtattggccgacccaaaagtgttgttgctggatgagccgacagtgggattagacccgctcgcatcggcatttttatatcaaaaaatggcgcaactgaaggcgcagggctgcgccattatcatcagtacccacgagttaggattagtgcaagatcaaatggatagcgcgctgatcttaggccaagctcggctgctcgccgcaggcgatttatcgcagcttagggcaataagtgcgctgccaagcctgcttgagttacatcgcgtttcgcctttgcaatatcagcagcttatcagtctgccgctatttgcctcaatgcggaaccactcaagtgctaatagaatgtgctttagtgtgcccgatgcgcttaaggccaaggttatcgaacaattgcatcttcttaaaatccatgagttttccattgcgccaccgagcttgcaggatattttccatcactttatggcagggctgaatcgccataatgcgtcaacctcacgtccggctgttggagaagagcaagatcaaagggagttagtggcatga

SEQ ID NO: 269494 - DNA, 535 bp, Unknown
  Bacterial polypeptide expressing nucleotide sequence isolated from the Sargasso Sea
atgaataaaccaatattggaatgtaatggtatagcagctggatatgtaaaagggcttaatatcttacaaggcattgatttagttgtttctgaaggagaaatcatttcaataataggcccaaatggtgcgggtaagtcaacattgttaaaagcaattatgggtttaattaatgtgtcagcaggcagattttttattaatggtgctgagaaaacaaacctttcaacacataaaattatcaatgaaggcataggctatgtgccacaagttgaaaatgttttcccttctttaacaattgaagaaaacttagaaataggagcttggtctttagctaaaaacagaaaaagcagtattacaaaggttctcaaagactttccacttttaaatgaaagaaagaaagaaaaagctggaaatctttcaggtggtcagaggcaaatcttagcattagcaagagctttagttacttctcctaacttgcttttattagacgaaccatcagcaggactttcacctgttgcaataaatgaagtttttaaaa

SEQ ID NO: 269495 - DNA, 1063 bp, Unknown
  Bacterial polypeptide expressing nucleotide sequence isolated from the Sargasso Sea
atggattcatcgagttcagctatacaaattcaaaatgtttggaaagtatttggcaatacttctaaagaagctttagatgcaatccaaaataaaaaaatttcaaaaacagaagctttagaaaattacaactcagttattggtgtttcagatgtttcttttgacgttaaacaaggagaaatattctgtgttatggggctttctggaagcggaaagtctacattagtaaggcatattaatagacttttagaaccaacatcaggcaaaattttaattaatggtcaggatgtaatggccctagatagagaaaaccttcaagaattaagaaacaaaaaaataggaatggtttttcaaaactttgcgcttatgcctcatagatctgttattgataacattgcaatgccacttgagataagaggtgtaagtaaaaatgatagattagatgctgcaaataaaattttagaaattgtagagttacaaggttggggtaataagtttgctcacgaattatctggaggtatgcaacaaagggtgggtcttgcaagagcacttgcagcggatcctgaatttcttttaatggatgagccttttagtgcattagatccactgataagaagacagcttcaagctgagtttatcaaactctcaaaacaaatgaaaaaaaccacagtatttattactcatgatttagatgaagcagtaagagtaggacacagaattgcaattatgagagatggaaaagtaatccaaataggtacacctgaggaaatagttgtaagtcctgcagatgaatatgttgctgactttgtaaaaggaatttcaagacttaaagttgttcaagctaaaacaattatgcaatctattgagagttatgaaaatgctaatggaaaattagatgaaaacagcaatagtgttggtgaaaatgaattattaagcaagctcattgagttatcaaaatctagcgaaggaccattaattgttaaagatgataatcaaaataatgttggtgtgttaacacaatcagatcttttaaaagcagttatagagggtggagatggagaataga

SEQ ID NO: 269496 - DNA, 1033 bp, Unknown
  Bacterial polypeptide expressing nucleotide sequence isolated from the Sargasso Sea
atgtctaatccagtaattaaatgtgagtccgtttataaaatttttggagaaaatgcacaaaaaatgcttcaagattcaaatggaaatgtagacgcaaaaacttttcaagaaaatgggtgcatagtaggtgttaacaatgcttcatttgaagtttcaaagggagaaatgctagttgtaatgggtttgtcaggctcgggtaaatcaactttattaagatgtatttctagactaaccgatgcaacaggcggaaaaatttttatagaaggtcaagatttacttcaattgaacaataaagaactaattgaacttagaagaaataaaatgggaatggtttttcagagctttgctcttcttcctcataaaacagttgtagaaaatattgctttcccacttcaaatcaaaggaattaaaaccgaagatagtattagtaaagcaatggacatggttaaacttgttggtcttgatggaagagaaaattattttccacgagaactttctggaggacaacaacaaagagtaggaattgctagatcattagccgttgaacccgatatttggtttttagatgaacctttttctgcattagatccgttaattagaaaagaaatgcaagatgaatttctaagattacaagataaattacaaaaaacaattatgttcattactcacgattttgatgaagcactaaaacttgctgatcgtattgcaattatgaaagatggcataattgaacaactcgatacacctgcaaatattgttttaaatccagcaactgaatatgttaggaaatttactgaagaagtgcctagagaaaaagttttattaatagaggatgtaatggatccatcttccactgaaaatataggtgatttaagagttttaagagatgaaattattgaaaatgttgccgaaaaaattctaactcaggaaaagactgtagcagttattgataaaaataataaaattgtaggctctattaatccgacaaaaataattaatacagtttttgggggaagaaaaaataataattaaa

SEQ ID NO: 269497 - DNA, 730 bp, Unknown
  Bacterial polypeptide expressing nucleotide sequence isolated from the Sargasso Sea
atgactattcctcttgaaataattaatttatcaaaaacttatgactcaaaagaagctgttcgaaatatttcttttaaagtaaataaaaatgaaatcattggaattcttggacctaatggatgtggtaaaactacaactataggtatgatccttggtttgctaaagcctacacaagggagggttcttataaatggtattgaaattgaaaagcagagagttgaattattaaacgaattaaattttatttcaccatatattgagttgccaaaaaaattaactgtaaagcaaaatttagaagtttatggaagactttatgatgtaaaagaacttggaaaaaaaattgattatctttgtgaaaaattaaggcttaatgaatttattaataaaataacaggagaactttcctctggacaaaaaaataaagttagtctggctaaatcaataattaatgatccatcagtccttcttcttgatgagccaaccgcatctttagatcccgaaacaggagattttgtcagaagttttttagaggaataccaaaaagaaaaaagaacttctattctgctagcttcacacaacatggcagaagttgaaagattatgttcttcagttcttatgatgaataaaggatctattattgatcaaggaacccctgaagaattaattaaaaaacatggacggagaaatatggaggaagtttttttaaaacttacaagagatttaatatgaa

SEQ ID NO: 269498 - DNA, 1177 bp, Unknown
  Bacterial polypeptide expressing nucleotide sequence isolated from the Sargasso Sea
catgaataattttggtgatccgattttgaaagttaacaaccttaatgttgaatttgcaaatgaatcttcaacttttaaggcggttaataatttaaattttaacctctctgaaaaagaaactttagccgtcgtaggtgagagtggatcagggaaatcagttacagctttatctattatgcaattacttccttatccaattgcatttcacagcaaagatagttccataaactttcaaggcacagaacttgtaaatcttcccaaaaaagaacttgagaaaatcagaggcaaaagaatatcaatgatattccaagagccaatgacttcattgaatccatttataaaggtcggtaagcaaattatagagtctattcaagtccataataagagaaccaacaaggaggcaaaagaaaaagccatagacctattaaggaaagttgaaataccaaacccagaacaaaaattttcttcatttcctcatcagctctctggagggcagagacaaagggtgatgatcgctatggcattatcaaacaatcctgaaatattgattgcagacgaaccaacaacagccttggatgtgactgtcgaaaaagaactattaattcttttaaataaattaaaagaagaggaaaacctcagcataatttttatcacgcatgatttaaacgttgttaaaagattcgcagatcatgttctggtgatgaatcagggtaatgtgatcgaaaaaggaactactgcagaaattttttctaatccaaaggattcctatacaaaaaggctaatagagtccattcctgaacccaaagagattaatagtgtttcagattccaaaattcttagatgcgaaaaattaaatgtaagctaccaagtaagagaagcttctcttctccaaaaagaagaaagatttgatgcagtcaaagaagtctcattctctttatcagctaattcaactctaggaattgttggagagtcaggatcaggaaaatcaaccattctcaaagcaattctgggcatagaagagtactcaggaaaaattttctttgaaaatgagatattaaagaaagataagctaagtgatttgaggaagaagtgtcaggttgtctttcaagatcctttcagttctctctctcctagaatgagggtggaaagagatcatcaagaagtttggatattcatt

SEQ ID NO: 269499 - DNA, 730 bp, Unknown
  Bacterial polypeptide expressing nucleotide sequence isolated from the Sargasso Sea
atggaaaagataattgtagctaaagatttaacaaagatttatggagaagaaggaacctctgttacagctttaaataatgtaaatcttgatttttatgagaataaatttacagcaatcatgggccaatcagggtcaggaaaatctaccttgcttcattgtcttgctggtttggataaagtaacttctggatcaatatttattaaaggtactgatttaggcaatcttaatgataaagagttaacaaaaatgaggagagattcatttggttttgttttccaggcattcaacttaattccaacattgacagctgaagaaaatataacactcccatcttcaattgcaggcaagaaaccagatgaagattggattaatcaaattgtcaatgctgtagatattggagacagattaaatcatcgacctaatgagctttcaggtggacaacaacaaagagttgctgcagcacgagcaatggcaactaagcctgaagtaatttttgcagacgaaccatctggaaacttagattcaaaatctagcaaagaactactgacttttatgaagtcagtagtaaatgaactgaatcagacgatagtaatggttactcatgatccatacgcagcttcttttgctgaaagagtaataatgcttaaagatggagaagtagcaagtgacatggaggaacctactcaagaagagattatttcaagagttacttctttaagcgatatttaat

SEQ ID NO: 269500 - DNA, 1084 bp, Unknown
  Bacterial polypeptide expressing nucleotide sequence isolated from the Sargasso Sea
tatgtctcaaattaaaatagtaaatttacaaaaatcatttggtgattttactgcagtcaaaaattctaatttaacgattaatgataaagagttctttgttttacttggaccatctggttgtggaaagactacaacacttcgaatgattgcaggattagaattacctacatctggtgagatatatcttggagatgaagaggttggaatgttaagagcatcagaaagagatattgcttttgtttttcaattgtttgccctctatccacacatgaatgtaagaaacaacttatcatttcctctaaaaatgcaaggttataaaaaaagtgatatcaaaagtagagttgaagaagcagcaaaacttttaagaattgatcatattttaaattctaacatttcctctctttcaggtggagatagacaacgggtagctttaggtagagcactagttagaagaccaaaagcttttttaatggacgaaccattgggaactttggatgctgaatttagagaattaatgtgtctagaattaaaaaaactacatttagatataggagcaactacagtttatgtaactcatgatcagttagaagcaatgtcattagctgaccgaattgcagttatggacggaggtgaaatattacaggccgatgagcctaatattatttacaataaacctaaaactaaatttgtagcctcatttataggatctccaggtatgaacttttttgaagttgatgaaggaatttctaaagatcaatcttttgtaaacatcgaaggcactaaatttaatattcccaaacaacttgaagagtcaaaaggaagtaaaaatttttttggtatacgtccagaaaatttaactcttagtaataatgagggtctcagaggctcagtttttggagttgagtatttaggatcaagaaaaataattacggttaaaacaagtttaggtgaaattaaagttaaaacagatatttctgttaacgctaaattgaacgaaaatgtccagattaaaccactaaataataatattattattttcgacggtgaaacggacaaatctttaaacagtgagtttataaaataa

SEQ ID NO: 269501 - DNA, 598 bp, Unknown
  Bacterial polypeptide expressing nucleotide sequence isolated from the Sargasso Sea
aatgttagctttgatattaaagtttataactccaaataatggagacatttttatagatgataaaaatctcaaaatattaaatacaaaagatattagaaaaaacattgcattagtacaacaacagccttttttgttttcaggaacaattattgatgtaataaaaatgggcagaaatttcaccaaagaagaggttatagaatcagcaagaaaagcaaacgcccacaacttcattcaaaagcttcctgagaaatatgaaactgaaatatctgaaagaggatcaaatttctcaggtggtcagatacagagaatagcaattgcaagagcaatacttgggaacccctcaattctccttttagatgaggccacaagtgcgttagatgcagaatctgaatctgaagtacaaaaaggacttaatagagctatgaaagatagaacagttattgtaattgctcatagattagccactactcaagaggctaataaaatagttgttttcgataaaggtgaaattattgaagttggaaaacacattgatttaataaataaacctggaatttataaagaattatgtgaaaaacaattgattaaaaaattatag

SEQ ID NO: 269502 - DNA, 634 bp, Unknown
  Bacterial polypeptide expressing nucleotide sequence isolated from the Sargasso Sea
atgaataatttaatacttgagatcaaggatgtaagtcattcctatgctgacaatgaaacaacattggaaaacataaacttacaagttaataaaggtgagaaagttgcgattttaggaccttcgggttctggtaaaagtacccttctcagattgattgctgggcttgaaaaacctcaaagtggatctattagtatcaaaggagaaattgtttcaaccaaagatcttgtagttgcacctgaaaagagaaaactaggtcttgtggttcaagagaaggctctatttcctcatcttacagtaaaagataatattacttttggtattaaaaagagattagataaaaataaaacagcatctgaactttgttctctttttaaaattgatcatttagccgacaaatatccccatgaaatttctggaggagaacaacagcgtacagctctggctagatctatggcaccaaacccagaactattgatgctagacgaacctttcagtgctttggatcaagaacttaaaagggtactttattctgaattaaaccaaatctttgaagaaagaaaacagacaatccttttagtttctcatgatttgaaggaggcagaagttttaagtcagagacaaatcaatatctaag

SEQ ID NO: 269503 - DNA, 1054 bp, Unknown
  Bacterial polypeptide expressing nucleotide sequence isolated from the Sargasso Sea
atggaaacagccatccaaattcaaaatgtctggaagatttttggaaacaattcaaaagaagctttggatgcgattcaaaataaaaaaatttcaaaacaggatgcgttagaaaaatataactctgtaatcggagtttcagatgtctcttttgatgtaaataagggagaaatattttgtgttatgggactttcaggaagtggaaagtcaacattagtaagacacatcaatagacttcttgaaccaacgtctggaaaaatattaattaataatcaagacgtaatgcagtttgataaagatagtttacaagagttaagaaataaaaaaataggaatggtatttcagaacttcgctctgatgccacacagatcagttttagataatatagcaatgcctttagaaattagaggagtaagtaaaaacgatagattagatgaagcgaacaaaattttaaatattgtagaacttcaaggatggggcaacaagtatgcgcacgagttatctggaggtatgcaacaaagagtaggtttagctagagcgttagcagccgatccagaatttttgttaatggatgaaccttttagtgctttagacccattaatcagaagacaacttcaatcagaatttataaagctttcaaaaaaaatgaaaaaaacaacagtattcattacacatgatttagatgaagctgtaagagtagggcatagaatagctattatgagagatggagctgtggttcaaattggaaccccagaagaaatcgttgttaatccagcagatgaatatgttgctgattttgttaaaggaatttcaagattaaaagttgttcaagcaaaaacaatcatgaaatctataaaagattatgaaagtaaatttggatcattagataatgataacgaaatagttaatgaaaatgaagttttaagcaaattaatagaaacctcaattacaaaagacaaaccaattgttgtaacggataaaaatagtcaaaaaataggagttataagtcaatctgatctcttaaaagctgttgttgaaggaaatgaaaatgagtaaa

SEQ ID NO: 269504 - DNA, 448 bp, Unknown
  Bacterial polypeptide expressing nucleotide sequence isolated from the Sargasso Sea
atgtctcaaaaagatagtttcgtaaaattcgagaaggtagataaaagttatgatggtgaaatactggtcgttaaagatttaaatcttgatgttccaaaaggtgagtttctaactatgttaggaccatctggatcaggtaagacaacagtgttaatgatgttagctggatttgaaactccaacaagtggagaaatatatttggatggaaatccaataagcagtattccgcctaacaaaagaggcataggaatggtttttcaaaattatgctttatttcctcacatgactgtaaaagaaaatttagcattcccacttgaagttagaaaatgcaaaaaactgaaattgatgaaaaagttggaaatgcacttgcgatggttgaattacaagactttggaaatcgtatgccattacaattatctggtggacaacagcaacgtgtcgcattagc

SEQ ID NO: 269505 - DNA, 715 bp, Unknown
  Bacterial polypeptide expressing nucleotide sequence isolated from the Sargasso Sea
tttgggtggaaaagtaattgaggtggaaaatttaaataaagtaatcggagataaacttcttattgaaaatcttagttttaatttacctccaggaggtattgttggcgtgattggtccaaacggtgctgggaaatcaactcttttcaaagttcttactggacaggagagtaaagattcaggttcggtaacctatggtgacactgttcaattatcttatgtagaccaatccagggatgatttaaaagacggtgaaaccgtttgggaagcaatttcaggcggggctgaagttattgaattaggagatgctcaagtaaattcacgagcctattgttcttcatttaattttaaaggcggagaccagcaaaagaaagtttctttgttatccggaggtgaacgcaacagagtacatatggctcgccttttgaaatcaggcggcaatgttttgttattagatgaacctacaaatgatttggatgtcgaaacactccgtgccctcgaagacgcgcttgtagattttgctggctgcgctgttgtaatctcccacgatcgcttcttcctggataggatctgcacacacatactcgcgttcgaaggtgatgcccaggtagaatggttcgaaggtaattttgaagattacgaggaagacaaaaaaaggcggcttggtccagacgcacttgaacctaaaaggataaaacataaaaaattcacacgctaa

SEQ ID NO: 269506 - DNA, 1015 bp, Unknown
  Bacterial polypeptide expressing nucleotide sequence isolated from the Sargasso Sea
actggaaattaaaaatttggtaatagattttgaatcgaaggactctactttcagggcagtcgataacatctctttagaaattgcgagaggaaaaactttatctttggtaggagaatctggatcgggcaagtctgtaacagcactatccgttttgcagcttttaccagagggtacggttagatattcaaaagagtcctccatagagtttgaaggaaggcagataataggtggttctaagaaggatataacctcattaagaggtaataagatttctatgatatttcaggagccaatgacatctctaaatccttatcagaaggtaggttatcagattgacgagtctttaattattcatagaggattcagaaaaaaagaagctagagagaaaactttagatctcttaaagaaagtaaaaattcctgaacccgaagttaaagtaaactcttatcctcatcagctatcaggtggccaaagacaaaggataatgattgctatggctttagcaaatgagcccgaattattaatagctgatgagccaacaacagctctcgatgtgacagttgaaaaagcgcttttggagctattagctgatcttcaaaaagaatttggtatgtcgattcttttcatcactcatgacttaaatatagtaaggaaattttcagatgatgtttgtgtcatgaaagatggtcagattgttgaagctggtcgagtgaaggaattattcgaagatccaaaacatccttataccattaagctactcaattctattccaggcaaaaaagaaaaactaaatactaataatgaattattgctaagcggcagcgaagtagatatcaattaccctgtagctaaaaatttatttggacagacaacagaatttcttaatgctgtaaaaaaagtagatataaaaatttatagcggctcaactacaggacttgttggagaatcaggttctggaaagtcttctcttgcaagagctttactaggaatcgaaaattcagaaggacagattatt

SEQ ID NO: 269507 - DNA, 730 bp, Unknown
  Bacterial polypeptide expressing nucleotide sequence isolated from the Sargasso Sea
ttgaacaagatacataacaatcgagataaacctaataacattcttagtaatttgaagaaagttattactggcacaagtttttcaagattctttgggctgttaagagatgtctttacaaccaatctacttggagcatcatttcttcatgatatttttgtaatttgcttgagaattccaaatttatttagacgtttttttgctgaaggagctttcaatcaagcttttgttccaatatatgcagagtatgaaaaagaaaataaccattttaaaacaaatgagtttttaaattctatcgcaggtacattgttgctttgcttatttgttttcacattattggttttagtttttgcaccaatttttatctttttgtttgctccaggtttctattttgatccaatcaaacaagatatatctgtaaaagttttaagaataatgtttccgtatttagcattgatttcattagtagctttcgctggtggaattcaaaacactcatcaaaaattttcaattccagcatttactccagtagtttttaatttatctttaattattgcagctgtatttattgccccaaaatatgaaattgaaatttttgtactagcttggggggtattacttgctggttttgtacaactattaatacaaatagcgcccctaagaagcataaatagattgcctgtaccaaaattaaattttaagaatgagggagttaaaagttttttattgtaat

SEQ ID NO: 269508 - DNA, 730 bp, Unknown
  Bacterial polypeptide expressing nucleotide sequence isolated from the Sargasso Sea
atgacagattctattcttgaggtaacagatctttcaaaatcttttggttctctaaaagtcattgatgattttgattttcacttggaaaaaggggaagcactagggatcattggccccaatggtgcaggaaaaagtacgctattcaatttaatttctggcaccctgcgggctaactcggggattataaaatttgatggtaaagatataacactactttcatctcattatcgttgccggatgggaattgggaggtcataccaaattccgcacccctttagcggaatgacagtatttgaaaatgttctggttgggggagcttttggcaacgagcaacgtgaagccgattgctatgacaagtgtgtacagatactagaaactacaggcttaataagaaaagcaaatactttagcaggccaattaacacttttagagagaaaaagactggagttggcaagggcaattgcaactggtcctcgagttctattgcttgatgaaattgctggagggttaacggagccagaaatacaagaattaattcacacaataagttcaattaggactgaaaatatttctataatatggatagagcatattgttcacgcacttatgtctattgttgaccgactaatcgtgatcaattttggcaaaaaattagatgatggcaatcctgagacagttattaagagcccagaaatacaggaagtttatatgggaataggtgtaaaatgag

SEQ ID NO: 269509 - DNA, 1759 bp, Unknown
  Bacterial polypeptide expressing nucleotide sequence isolated from the Sargasso Sea
atgaaagaaaataatcttaaaaaattatttttgtattctcaaaaacaagatacaaaaattaaaagaggaataatttactctattttgaataaattatttgatcttgctcctcctgttttgataggaatagctatagatattgttgttgaaggatcagattcatttttagggaatcttggttacgaagatagaagacaacaattaattgtactggctgtactaacgtttgtaatatggggtttagaatctacttttgattatgttgctgccgtaacatggagaaatatttcacaagacattgagcataaactgcgtacagaaacttttaataatgttttagaccttgatttagaattttttgaaaataaatcatctggaaggctgatggcaatattaaatgatgatgtaaaccagcttgaaaagtttttagatacaggagcaaataaacttttacaaacaatgactactgttttggtaattgggggaacatttatttatatctctcctttaattgcaatatttgcttttatacctataccaataattatttttggttcatttaaatttactaaaacaattgcaaaaagatatacaaaaattcgtaacacaattgaatctctaaacgctaacttgtctaattctttaacaggtatattgactgttaaaagtttcaatagagaaggcagggagactgaaagaataactaagtcatctgaagaagttaaggcagcaaactaccatgcaataaaactttctgctgcatttattccaataattagaattgctattttatttggatttacagcaaccttgttaataggaggatttatggctttagatggtcaaataaaagtagcaatgtattcagttctcctctttataactcaaagattgctttggccattaacggaacttggtgatacttttgatttatatcaacgagctatggcatcatttaaaagaattacaacgctaaaagataccaggccaacaataactaatggcaacagtgaattaaagaattttgaaaattctatagtattcaatgatgtaaatttttcttacgttgaagggttttctgttttaaataatgtttcagtggaaattaataaaggccaaacagtagcgattgttggaagcacaggttctggcaaatcgacaatgattaagcttattttaagactttatgatgtgactgaaggagatataaaatttgacaatataaacataaaagatttagaccttacaagcttaagaagcaatattgcgttggttagccaggatatatttctttttgaaggatctgtatttgaaaatattgcatatggaaatctagaagcatctgaagatgaaatttgggaggctgcaaggctatcagagtctgacgattttataaatcaacttccaaataaagaacatacaattgttggagaaagaggacaaaaactttcaggaggtcaacgacaaaggatatctattgcaagagccattttaaagaatcctgaaatattaattttagatgaagctacctcagcagttgataatgaaacagaagctgcaatccagcgttctctagatacccttaaagaagggagaacagttattgcaattgcacatcgtctttcaacaataagaaatgccgacaaaatatacgttctagaagatgggaaaattgttgaaaatgggacccatgatgaacttgttacaatcggaaaagtgtactcaaatctttgggacgtccaaacaggcaatagataac

SEQ ID NO: 269510 - DNA, 736 bp, Unknown
  Bacterial polypeptide expressing nucleotide sequence isolated from the Sargasso Sea
atgattctaagcgcaagagacatatcaaaatcttatagaggaagaaaagtagttaataatatttcaattgaagtaaatcaaggagaaattgttggtttacttggcccaaatggtgctggaaagaccacatcattttatatgattgttggaataataaagcctgaacaaggtaatatttttcttgataaagaagttatctctacataccctatgtatcaaagagctcaaaaaggaataggatatcttgctcaagaagaatcagtcttcagaaagctttctgttgaggataatatactaggtgttttagaattttcagatctctctaaaaatcaacagaaagagaaagctcaacaattgatggaggagtttggattaataaacattagaaaaaatagaggtgatcttttatctggtggtgaaagaagaagaactgagattgctagagctctggcaaataacccaaactttttattattagacgaaccttttgctggtgttgatcctatagcagtagaagatatccaatcgattatatctgtcctaaaaaagaaaaatattggaatccttattacagatcacaatgttcaagaaacacttgcaattacggatcgaacttatttgatgtttgaaggaaaaatattaaaagagggtattccagaagatcttgcaaaagatgaaattgtcagaaaattatacttaggtaaaagttttgaatttaaaagaaaaaaaatatagt

SEQ ID NO: 269511 - DNA, 1039 bp, Unknown
  Bacterial polypeptide expressing nucleotide sequence isolated from the Sargasso Sea
atgtcttctacaccagtaattaaatgtgattctgtttacaaaatttttggaactaatgccaaaaaaatgcttcaaaacgcaaatggtaacgtggatgcaaaatcatttcaggacgcaggatgtattgttggagttaataatgcttcatttgaagtttctaaaggtgaaatgcttgtggttatgggtttatctggttcgggtaaatcaacattgttaagatgcatatctcgtttgactgatgcaactggaggaaaaatatttattgaaggtcaagatcttctcgcaatgaacgagagacaattaattgaattacgaagaaataaaatgggaatggtatttcagagttttgccctacttccccacaaaacagttttggaaaacatagcttttcctttgcaaataaaaggaagtaaaactaacgagagtattcaaaaagcagtcgaaatggttgagcttgttggcttaaaaggtagagaaaattattttccaagagagttatctggaggtcaacaacaaagagtaggtatagctcgttcacttgcagttgaacctgatatttggtttttagatgaacctttttctgctcttgaccctttaattagaaaagaaatgcaagatgaatttctgagacttcaaggagttttaaataaaacaattctatttatcacacatgattttgacgaagcactaaggcttgccgatagaatagcaattatgaaggatggtttaattgaacaattagatactccagcagacatagttttaaatccaaaaactgaatatgtaagaaaattcactcaagaagtgccaagagaaaaagttttaaagattgaagctgtaatggacaaatcttcagcgggacaaaatgctgacaatatcactgtttcaaaagatgctataattgagacagtggctgaaaaaattttaagtcaggataaaccggtgagcgtgatagataaaaataataatgtagttggaagtgtaaaaccctcaaaaataatccaaactgtttttgggcaaggtaaagaaaaaaaataaa

SEQ ID NO: 269512 - DNA, 1030 bp, Unknown
  Bacterial polypeptide expressing nucleotide sequence isolated from the Sargasso Sea
tatgtctaagccagtaatcaaatgcgaaaatgtttacaaaatttttggagcaaatgcaaaaaaaatgcttcaagaagcaaatggcaatgttgatgctaaaacttttcaagaaaatggatgtattgtaggtgttaacaatgcctcatttgaagtttcaaaaggtgaaatgttagtcgtgatgggtttgtctggttcgggcaaatcaacgttattaagatgcatttctagattaacagatgcaacaggtggaaaaattttcattgagggacaagatttattaaaattaaataacaaagaacttattgaccttagaagaaataaaatgggaatggtttttcagagttttgccttgcttccccataaaacagtcgtggagaatatagctttccctctacaaattaagggcatcaaaactgaagatagcattagtaaagctatggatatggttaaactggttggacttgatggtagagagaactattttccaagagaactttcgggaggacagcaacaaagagtaggaattgctagatcgttagctgtagaacctgatatatggtttttagatgaacctttctctgcattagatcctttgatacgaaaagaaatgcaagatgagtttttaagacttcaagataaacttcaaaaaacaattatgtttattacacatgattttgacgaagcattaaagcttgctgaccgtattgcaattatgaaagatggtataattgaacaattagacacacctgccaatattgttttaaatccagcaactgaatatgtaaggaaatttacagaagaagtgcctagagaaaaagttttattaatagaagatgtgatggattcatctactagtaatttaggtgaattgaaagttttaaaagatgaaattattgaaaatgttgctgaaaaaattctaactcaagaaaaatcagtagcagttatagatagtaataataaaattataggttctattaatccgacaaaaataattaatacagttttcggtggaagaaaaaatagtaattaa

SEQ ID NO: 269513 - DNA, 685 bp, Unknown
  Bacterial polypeptide expressing nucleotide sequence isolated from the Sargasso Sea
catgagcagcgccatctcccttgaggggctcaccaaacgctttggcgagcgggtcgccctcaacgccatctcggccaccattccgactggcggtatcaccgggctggtcggccccgacggcgcgggcaagagcactttgctgcgcctgctggccggtctgctgatccccgaagcgggcaccatccgggtgctggggatggacccggtgagcgagggggatctgctgcgtcagcgcctcggctacatgccccagcagtttggcctctacgaggatctcagcgtgctggagaacctcaccctctatgctgacttgcgcggcgtactggagcccgaacgcacacccaccttcgcgcggctgctcgccttcaccgacctcgcccgcttcaccgcacgaccggcgggcaagctctctggcgggatgaaacagaagctcgggttggcctgcgccctgctcggcaccccggatgtgctgctgctcgacgaaccgggggttggggtcgatcccatctcccgccgtgccctctggcagatggtgcgcgagctggcaaaaggggggatgacggtgctctggagtaccgcctatctcgatgaggcggagctgtgcgaccacgtgctgctgatggcagatggcgaggtgcgcaccagcggcacaccagccgacctgatggggggcatggccagccgc

SEQ ID NO: 269514 - DNA, 730 bp, Unknown
  Bacterial polypeptide expressing nucleotide sequence isolated from the Sargasso Sea
aatgaattttgaaataaaaaacgtatttctgactatcgaaggtaaatccatagttaatgatgtgtctataaaggttttcccaggcgaaattgtaggtttaatgggaccaaatggtgcaggtaaaacatctacttttaatcttgcggttggcaatttaaaacctgataagggaaatatattaatgaatagcaaatctataaaaaatttacctttgcctagtagagcaaaacttggtttaggatatttaactcaagaagcaagtatctttagagatctaacagttaaagaaaatattgacttagcattagacaattcattttctagtagagcaatagtaagaaataagagagaaaaaataattaatgaatttaatttgaataaagttgttgataattatggttatcaactatcaggaggggagagaagaaggtgtgaaatagcaagagctctatcagttggtagacaaggacctaaatatttacttttggacgaaccttttgcagggatcgaccccttagcggttaatgatttaaagaaacttattattaaacttagtgagaatggaatgggaattctcataacagaccataatgtaagagagactctattaattacaaataaatcatatgttttaagtgaaggaaagatacttgcgcatggatcatctgatgaactcgcaaataatcaaatagtgaaaaagttttatttgggggatgattttcagctttaa

SEQ ID NO: 269515 - DNA, 724 bp, Unknown
  Bacterial polypeptide expressing nucleotide sequence isolated from the Sargasso Sea
aatggctaaaatagatctatcaaatatttctcatacttataatccaaaagatttagaacctacttatgctctaaatccattttcgatgacatgggaaaatggtaaacgttacgcaatacttggaccatctggttgtggaaaaacaactatgttaaatattgtatcaggcttaataaagcctactcaaggcaggatactgtttgataatgaagatgtaactagccaaaaaactgaaactagaaatatttcgcaagtatttcagtttccggtaatttacaacacaatgtcagtatatgataatttagcgttcccattaaaatgtcgagattttgaaaagaataaaattgaagagagagttcaatctgtatctgaaacattaaatctttcttcatttctaaacatgcccgcaaggaaactcacagcagatcaaaaacaactcatttcattaggaagaggattagtcagggaagatgtagctgctgtattaatggatgaaccattaacagtaattgatccagacttaaaatttagattgagaagaaatttaaaagaaattaatgaagaatataaaacaacattggtttatgttactcatgatcaaaatgaggcaatgacatttgcagataatattattgtaatggatcaaggtgaaatagttcaggttgggcttcccaaagatttatttgaaagacctaaaactacttttgttggctattttattggt

SEQ ID NO: 269516 - DNA, 1075 bp, Unknown
  Bacterial polypeptide expressing nucleotide sequence isolated from the Sargasso Sea
ctggttgcaaaacatttaacttataaacctgatgatcagtatcatcttaatgatgtttcttttaattttgaaaaaggtagactttatactattcttggacgtacattgtctggcaaaacaacacttttaaagacaatagctggtttattaaatccggatagtggaaatataaattttgaagataaaaattttagcaaagtgccagtatgggaaagaaatgttgctatggtttatcagcaatttatcaattacccccatttgagtgtttatgaaaatatttcatttccactaaaacagagaaaattaaatgaggaaaatataaaaaagaacgttgatgatgctttaaaaacggttggtttagtaggttttgaaaatagaaaaatccaagaattgtctggaggacagcaacaaagggtagcattagcaagatcactcgcgaaaaaagcaaaaatcttattattagatgaacctcttgttaaccttgattataaacttcgtgaacaacttagagaggaatttaaaaccatatttaatgagggattggccaatgagactattttaatttactcaaccacggacccacaagaagttatggaattaaatggagaggtaattgtacttgacgagggtaaagttttacaaacaggtccagctaaagatatttttgaaaatccaattaacctcaaagttgccgaaatttcaaatgatcctccgatgaatattataaatggcttaaaaattgatggtaaaattactttcgaaaatatcaacatcaaactaccaaaacatttatctcaattagataataaaaattataattttggaattagatcttcagaaattaagcttagtgatagcggtgaggaatttgaaatagagttagcagaaattagtgggtcagaaacattattacatttaaaaagaggaagtacaaaagttattgcattgattgaagaagttatgaattttaaaattcatgaaaaagtaaaagttgtgttcaattctgataaattttatgtttttgaagaggatggaaaattaatctcatcaccatacaggattaagaatggctaaa

SEQ ID NO: 269517 - DNA, 1594 bp, Unknown
  Bacterial polypeptide expressing nucleotide sequence isolated from the Sargasso Sea
ttgatcactacagcgaatatcaccatgcagtttggctctaagccactgtttgaaaacatctcagttaaattcggcggcggtaaccgttacggtcttatcggtgcgaacggctgcggtaaatcaaccttcatgaagatcctttgcggtgatctagagccgagcagcggtaacgtatccttagacgtcaacgagcgtctgggtaagttaagccagaaccaattcggttatgaggaattcacccttatcgacacagtgatcatgggccaccgtgaactgtggaaggtgaagcaagagcgtgaccgtatttattctctgccagaaatgagcgaagaagacggcattgccgtggcaaaccttgagatggaatttgccgaaatggacggttacaccgccgaatctcgcgcgggtgaactcttgctcggtgtgggtattggtatcgaaagccatttcggcctgatgtctgaaatcgctccaggtttaaaactgcgggtgttattggcgcaggcgctgttctccgatccagacgtactgctgctcgacgaacccaccaacaacttggacatcgacaccatccgctggttacaggacgtactgaaccaacgcgacagcaccatgatcatcatttcgcacgaccgttacttcttaaactcagtctgtacccatatggcagacttagactacggtgaactgcgcgtttacccaggtaactacgacgaatacatgcaagcggcctctcaggcccgtgagcgtctgctggccgacaacgccaagaagaaagcgcaaatctctgagctgcaaaccttcgtggcgcgcttctctgcgaacgcttctaaggcaaaacaagcgacttcgcgcgcgcgtcaaatcgataagatcaagctggaagaagttaaagcctctagccgtgttaacccattcattcgtttcgatcaggaaaagaaactgttccgtaacgcattagtggttgaaaacttagccaaaggttacgacacgccgctgtttaaagatttgaaccttatcgtcgaagtgggtgagcgtatcgccatcctcggtgagaacggtgtgggtaaaaccacactactgcgtaccttaatccatgatattcctcaggatgaaggtctgatccaatggtctgaaaacagcaacatcggttactacgcgcaggaccatgaatcagatttcgaaaacgatatgaccctcttcgagtggatgagccaatggcgtaaaccagaggacgacgaccaagcggttcgcggcattttaggccgtatgctgtttagcgccgacgacatcaaaaagtcagttaaagtgctgtccggtggtgaaaagggtcgtatgttatttggtaagctcatcatgcaaaaaccaaatatcctgatgctcgacgaacctaccaaccacatggacatggaatcgatcgaatcattaaacaacgcgctggaaaaatacgaaggtaccttgctgtttgtgagtcacgaccgtgcattcgtatcgtcactggccaaccgtatccttgaaatcaccccgaatggcgtgaatgacttcaagggcacctacgatgagttcctcgtgagcaaaggtatcgaaggctaat

SEQ ID NO: 269518 - DNA, 625 bp, Unknown
  Bacterial polypeptide expressing nucleotide sequence isolated from the Sargasso Sea
aatgaatttaattgcaaataatttaacttataaacctgataacgaattccatttaaaagatgtttcttttaattttaaaaaaggaaatttgtatactattcttggaagaactctttctggaaaaactacacttttaaaaacaatagctggattgttaaatcctgatagtggcaaaattcaatttgaagaaaaagaatttaataaaataccagtttgggaaagaaatgttgcaatggtataccaacaatttataaactatccacaccttagtgtttatgaaaatatttcatttccattaaaacaaagaaaattagataaagataaaattaaaaatgatgtcaatgaagctttaaaaactgttggtctagttggatttgaaaatagaaaaatacaggaattatccgggggacaacaacagagagtagcattagcaagatcattagcaaaaaaagctaaaattttattattagatgaacctttagttaatttagactataaattgagagaacaacttagagaagagtttaaaagaattttctcaggaggctttgcagaagatacaattttaatttattcaactacagacccacaagaaacaatggaacttaatggagaagttatagtt

SEQ ID NO: 269519 - DNA, 846 bp, Unknown
  Bacterial polypeptide expressing nucleotide sequence isolated from the Sargasso Sea
tatgagtaaattatctcacttcgatggaccgatacttgaaattgataatttatcaatttcattttttactaggctgcgagaaataccagccgttatggatttttcggtagcggttcaacctggagaggctgttggcttagttggcgaatctggctgcgggaaatcaactgtcgctctaggcgttatgcaagatcttggcgtaaacggaaagattgttgacggctcaataaaatttaaaggccaagatttaggaaaactatctcctgaagtccttagagatattcgtggcaatgaaattgcaatgatttatcaggaacccatggcatctttaaatccagctatgaagattgctaatcagttaatggaagttcccatgatccacgaaggaatttcgaaagaagaagcctacaagagagctctagaggttgttaatgacgtcaaactccctgatccagaaagaattttaaaatcttttcctcatcagctttctggaggtcagcagcagcgtatagttatcgcaatggcattaatgtcaaaaccgtcacttttaatattagatgaaccaactaccgctttggatgtaactgtagaggcagcggtcgtcgatctcgtaaaggaccttggaaaaaaatatggtacttcgatgctatttatttcccataatctgggattggtgttggagacttgcgatagaatttgcgttatgtattccggcgaggcggttgaaactggatcgattaaggatgtgtttaatcaaatgcaacacccttacacacaggcattatttcgatcaatcccacttccaggtgccgataaaaatgctcgcccacttatagcaatacccgg

SEQ ID NO: 269520 - DNA, 928 bp, Unknown
  Bacterial polypeptide expressing nucleotide sequence isolated from the Sargasso Sea
tatgcatgcattatcaataaaagatctctcaaaaaaatataaaagcggtgtcgaagcactcaaatccgtcagttttgatgttcaagaaggggatttttttgctcttcttggtccgaatggtgccggaaagacaaccgcgataggaatcatcacttcgcttgtaaacaaatcttcaggatcgatagaggtttttggccatgatcttgacaaagaattggcaaaagcaaaatcttgcatcggcgttgtgccacaagaagtgaatctgaatctttttgattacaactttaatattttggttaatcaggcagggttttatggcatcccaagaagcgaagggaagaagagagctgaacagtatctgaaacagatgcagctttgggaaaaaagaaagacaaatgccagaagcctatcgggaggaatgaagagaagactgatggttgctcgagcattggttaatcgaccaaagctcctcctgcttgatgagccaacagcaggagtcgacattgaaacaaggagaatgatgtgggattttctcagagatctgaatgcaaatggaacaacgataattctaacaactcactaccttgaagaggcggaacagttgtgtaacaaggtcgccattattgatgaggggaagattatagaaaatgactcgatgcaaaatgttttgaaaaaactcaagaccgaagtatttatccttaatacagagaagccactcgacaaagcacctgaaattcatggttatgccactgctttgaaatcaccacaagagattgaaattactgtctctcaagagcaaggcgtgaatgatgcttttagcaccttgcaagcaagcggggtgaaagtactgagcatgagaaataaaaatagcaggctagaggaactttttcttgatcttactaaaggtcaacagggagagggtgaatga

SEQ ID NO: 269521 - DNA, 784 bp, Unknown
  Bacterial polypeptide expressing nucleotide sequence isolated from the Sargasso Sea
atggggcgcgtggtgccgcccggcatcgacacgtcgcacggcacgatcctctacctcgaggatatcgaggtgagcttcgacggcttccgcgcgctgaagaagctgtcgctcgcgatcgacgcgggcgagctgcgctgcgtgatcggcccgaacggcgcaggcaagacgacgatgatggacgtgatcaccggcaagacacgccccgacgcgggcaaggtgtttctcggccagacgatcgacctcgcgcggatgaacgagcccgagatcgcacgcgcgggcatcggccgcaagttccagaagccgaccgtgttcgaacagcatccggtgtgggagaacctcgagcttgcgatgcagaccgacaagggctggctcgcgtcgctgcgcgcgcggctcgaccgcaccgcgcaggcgaagatcgaggagacgctcgcgctgatcggcctcgaaagccaggcctttcgcgcggcaggcgagctgtcgcacgggcagaagcagcggctcgagatcggcatgctgctgatgcagcgccccgcgctgctgctgctcgacgagcccgcggccggcatgaccgaccacgagacgatggaactcgccgagctgctgaacacgttgcgcggtacctgttcgatgatggtcgtcgagcacgacatggaattcgtcgcggcgctcgcgggcgacaccggccgcgtgacggtgatagccgaaggcgcggtgctcgcgcaaggcacgctcgaccaggtcaagcgcgacgacgcggtgatcgagtcttaccttggacgatgat

SEQ ID NO: 269522 - DNA, 718 bp, Unknown
  Bacterial polypeptide expressing nucleotide sequence isolated from the Sargasso Sea
atgaataaaccaatattggaatgtaatggtatagcagctggatatgtaaaagggcttaatatcttacaaggtattgatttagttgtttctgaaggagaaatcatttcaataataggcccaaatggtgcgggtaagtcaacattgttaaaagcaattatgggtttaattaatgtgtcagcaggcagattttttattaatggtgttgagaaaacaaacctttcaacacataaaattatcaatgaaggcataggctatgtgccacaagttgaaaatgttttcccttctttaacaattgaagaaaacttagaaataggagcttggtctttagctaaaaacagaaaaagcagtattacaaaggttctcaaagactttccacttttaaatgaaagaaagaaagaaaaagctggaaatctttcaggtggtcagaggcaaatcttagcattagcaagagctttagttacttctcctaacttgcttttattagacgaaccatcagcaggactttcacctgttgcaataaatgaagtttttaaaacaattaatgaaattaatgaaaacaatgtatcaattttactagtcgaacaaaatgcaaaaagagctctgaaatttagtaatcggggctatgtgctagatcaaggtagaaatgcgtatcaaggtgaaggagaagaacttctaaacgatccaagagttgtagatttgtatttaggaaaactataaa

SEQ ID NO: 269523 - DNA, 1066 bp, Unknown
  Bacterial polypeptide expressing nucleotide sequence isolated from the Sargasso Sea
atggctaaaattaccttaaaagaattaagtcatagttatctatcaaaacaaagtaaagatacagactgggcattgagaggcgtcaatattgattggaaagacggaggagcttacgcgttattaggtccttctggctgtggaaagacgacattattaaatattatttctggtttattaaaaccaactagaggagaaattttatttgatgataaagaagtaacagctttaaacccagttgagagagatattgcccaaatatttcagtttccagttatatatgacacaatgactgtttatgaaaatttagcttttccacttaaaaatagaggtctttctaaaacagaaattgattcaaaagtaaaagaaattggagaaatgttggaactgacatcaactctgaataataaagctgctggattaacagcggatgggaaacaaaaaatttctttaggaagaggattggtgcgatcagatgtgaatgtaattatgtttgatgaacctctaacagttatagatcctcatttaaaatgggttttaaggtcaaagttaaaagaattacatcaaaaaattaatcgtactatgatttatgttacccatgatcaaattgaagctttaacttttgcagacgaagtagtggttatgcacgaggggcaaattgttcaaacgggtactcctgtagaattatttgaaaaaccaaaacatacttttgtaggacattttattggctcaccaggtatgaatattcttccttgtgaaattgcaaatggtcaaatcaattttgaaggaaagataatacctagtaataacagttttaaaaaaacaaattttagtaaaacgcaattgggtattagaccagaatttattaaattttctaatgatggaattaaagtgaagattaaaagagttagcgatacaggtagacataaagtaattgatactgagtgtagtagtggaagtattaaaattttagccaacacctctactgaaataccaagtgacagtgctcatataacttttgaacaaaaatatacatatatatatggagacgattggatagttgaataat

SEQ ID NO: 269524 - DNA, 754 bp, Unknown
  Bacterial polypeptide expressing nucleotide sequence isolated from the Sargasso Sea
gatgacagtaaaaccaaaactaatttcaactaattctggactggaagtgaacaacttaagaaagtcactctctggcaaacaaattgtaagagatatatccataaaagttgaaaaaggaaaagtgataggactgctaggtccaaacggtgcgggaaaaagtacagctctttattgcattatggggctcatagtttgcgatagtggagaaataaaattaaacaataatgatattacgacccttccaatgtggaagagggctcaagcagggcttggttatttaccgcagcaaccaagtatctttagagggttaagtgttgaaaataatataatggcaatattggaaacaaccaaacttaatttagatcaaagaataaatagactcgaggaactattggctgaatttaacttaactcatttaagaaacgctatgccctatcaattatcaggtggtgaaaggcgtaaatgtgaatgcgcaagactgcttggaactaatccttcttatgttttatttgatgaaccattctcagcactggatcctatttctataaatgatatcaagtccgaaattaataggcttaaagaaaaaggtatatctgttataatcacggaccaccaagtcagagaagtgctggatattagtgactacagctatcttctttttagtggtgaaataatagcccatggcacaagtgacaaaatacttggcaacaaagaagcaagaaaattttatttgggtgacactttcaagttctaa

SEQ ID NO: 269525 - DNA, 664 bp, Unknown
  Bacterial polypeptide expressing nucleotide sequence isolated from the Sargasso Sea
atgatcctagaagtaaataaactaaggaaagaagtttcttcaggtgattctgaattaacgatacttgatgatgtgagctttagcctagaggaaggacagtcgttggcaattactggtccatctggttcaggaaaatctactcttttgggtctacttgctggattggataccgcaactagcggagaaatctatctagataaagttggtctacataaactagacgaagaagatagagcaaccctcagaaaggaaaaagtagggtttgtattccagtcatttgaattactaccaagcttaactgctctagaaaatgtcatgctaccttcagaactcaaatcagaagataaccctaaagaaaatgccgaatactttcttaaaagagttggattaagcgaaagagaacaccattatccaaatcaactttcaggcggtgaacagcaaagggttgccatagctagagcttttgcatgttctgcaaaaatactctttgcagatgaaccaacaggaaatctagatccaaagaatggtcaggttgtatctgatttactttttgaagttaattcagaaacagacaatgcattagtaatagtgactcatgatctagagttggcaaataggtgtgataaacgaattgaccttaaacttggaagaatagtcgaataat

SEQ ID NO: 269526 - DNA, 1036 bp, Unknown
  Bacterial polypeptide expressing nucleotide sequence isolated from the Sargasso Sea
aatgtcagataataacaatcttcctgtaattaaatgtgaatcagtttttaaaatttttggcaacaatgcgaaaagacttttagaaaactctaatggaaatgttgatgcaaagacttttcaagaagcaggatgtatcgtaggagtaaataatgcttcattcgatgtaaaaaaaggtgaaatgttggttgtaatgggattgtctggatctggtaaatcaactttacttcgttgcatttcaagattaaccgatgcgacagcaggtaaaatatttatagatggagatgatttactctcaatgaatagtaaagaattaattgaattaagaagaaataaaatgggaatggtttttcaaaactttgctttgttgccacataaaacagtcttagaaaatatagcttttcctcttcaaattaaaggaactaatacgaacgagagtattgctaaagcaatggaaatggttgagttagtaggcctgaaaggtagagaaaattattttccaagagaattaagtggtggtcaacaacaaagagttggtatagcaagatcacttgctgtggagcctgatatatggtttttagatgaaccattttcagctcttgatcctttaattagaaaagaaatgcaagatgaattcttaaggcttcaaggagttcttaaaaaaacaataatgtttgttacacatgattttgatgaagccctaagattagctgatcgaatagcaataatgaaagatggaattattgagcaactagatacacctgataatattgttctaaatccagctactgaatatgttaaaaaatttaccgaagatgttcctagagaaaaagttcttaaaattgaatcaattatggatcctattgattctaatgcatcaagcaatattgaggtatctaaagatgctattattgaaacattagcggagtcaatacttaatagtaaagaaatattgaaagtagttgatgttaacaaaaataatgaaatagtcggatcgcttgatcctgcaaaagtaataaaagttttatttggaaaataa

SEQ ID NO: 269527 - DNA, 733 bp, Unknown
  Bacterial polypeptide expressing nucleotide sequence isolated from the Sargasso Sea
aatgtttatacaaattaaaaatcttacaaaaaaatttaaaaataatttagcagtaaacaatataaattttagtattgaaaaaaataatgttcttgggttgcttgggccgaatggatgtggaaaaactacatctataggtatgatgctaggattaattaaaccaactagtggtcaaataattattgataataaaaatttagagtcctttaagagaaatgatatattggctagaattaactttgcttcaccctatatagaattaccaaaaaaactaactgttagacaaaatttagaagtttatggaaggctatatggaatcaagaaccgaaaagaaagaatagaagaaatttcagaagacttagatataaaagatttttttgacaggcaaactggtgaactatcatccggacaaaaaaatagagtatctttggcaaaatctttgattaataaacctgaaattttgctacttgatgaaccaactgcaagtttagatccagatataggagattttgtaaggacttatattcagtcttatagctcaaaaaataaagtaactatacttcttgcatctcacaatatggcagaggttgaaaggttgtgtgatagcataataatgatgaggagtggtaaaataattgatagaggaacttgtaaagaaattattgataaacacggaagaaataatcttgaagaaacatttttaaaattagccaggagtaaagatgagctttaa

SEQ ID NO: 269528 - DNA, 1279 bp, Unknown
  Bacterial polypeptide expressing nucleotide sequence isolated from the Sargasso Sea
atgcaacaagttgtacaagaaataaaaaatttatctattggtttcactagtaaaaaaggggaacaaatttcaattttaaaaaatattagtacaataattaataaaggtgaaacagttggtatagtaggagagtctggttcaggaaaaagtacactcgcattagcaatgatgggatatgttaagcatggtttatttacaatctctggagaatgtatttatcagtctaatgatattttaaaaatgaaaaacagagaattagaaaatattcgaggaagaaaaatagcaatgatacctcagaatgctgggcagtctttaacaccaaatttaaaaattggttatcaaattgacgaagcattaagattacatacaaattttcaaaaggaagatagagatgtaaaaatttcggagttattaaacaaagttaggttaccttctccagagacaattgcaaaaagatatccccatgaactttctggaggtcaacaacaaagagttgcagttgcaatggctttagctgggagcccggatcttttattattggatgagccaactactgggttggatgttacaactcaggctcacgttttagagctattgaactttatcgcaaaggatacaggtacatcaatggtttatgtaagtcatgatttaggagctatagcgcaggtaagcgatagagtaattgtaatgtattctggtgaaattgttctagatggaccggtaaggactatattaaaaaatccaattcatccttatacttatggattattaaaatctataccaaaattaactttatctggacttcccaattcaatgtcaggtagccagccacaacctggaacaataaaagaaggatgtagtttttacgatagatgtgagtttgctgaagataaatgtaaaataaactcacccgagttagaatttgttagtgacttaaattcaagtgttagatgttttaaccacaaaaaacttcataaaaagaaggacgaggatacaaaatcttcaaaaaaagtattacgaaaattaaccaaaaatgaaattttagatatatcttctgtttcaattagttatgcgaaacaaaaattcatagagcaattgctaaataaaattgatgacacaaatccaactgttaaagacataaatataaaaattgataaaggtgaaaccttggcacttgtcggagagtccgggagtggaaagtcaactattcttaaatctatcgcagggcttatcaaagcaaaagatgggataattaaatttgataaaaataaaataatat

SEQ ID NO: 269529 - DNA, 1435 bp, Unknown
  Bacterial polypeptide expressing nucleotide sequence isolated from the Sargasso Sea
catggaaaaaaataaagaaaaaattattgtagttaaaaatcttactgttaaatatggtctaaaacagcaacctattatcaaaaattttaatttggaaatagatagtggagatcatttggccataataggaccttctggatgtggaaagaccacttttgcaaaaacattagtaaatatattgcctgaaaaggctacttctaaagggtatctatctatctctagtgtagatcctaggaaaataaataataaagatgcacaattatttagaagaaagaattttggatttatttatcaagactctataaaaaaacttaatccgctaatgagagttggagatcatttatatgaattatttaaaacacatgataaaactaaatcatctatagctattaaaaaattagtaagagaagtttttcaaaaagtaggaattgaagaaagtagacttgattctttcccacatcaatttagtggtggaatgagacagagagtttctatagctatggctcttgctttaaaacctaaattattaatagctgatgaacctacaacaagccttgatacaaaaactagttttgaaatcatgaaagaaataattcacttatgtaataattttgataccactttaattttaattagtcatgatattaatcttgcagcaaagtggtgtaaaaaaattgcaataattgacaaaggttcgattgttgaacaaggaaatatattagatatttttcaatcaccaaaatcagatatcggcattaaattagtaaatgcttctaaaatagttttaaaaccaaatactaaaaataatattagaaatgagcttcttttagaggttgataacttaaggcattggtataaattaaattcctcaatttttcggaacaaatggaataaggctttaaatgaagtcagcttcaaattatataaaaatgagacacttggaatagttggatcttcaggaagcggcaaaagtacattatgtagggctttaataggacttatcaatgtaagaggtggcgaaataaaaatttatgataaagatcatgaatcgaaaaaaaataaatcttacaaaaagtacaataatatgcaaattatttttcaagatcctttttcaagtttgaatccaaaaatgacaattaaaaatcttttggaagatattttttttattcaaaaaatttcagataaaagaaaaattgaaaaggaaataaaaacaatttttagaaatttaaatcttcccttaaataatgatttttttaattcttacccaagccaattatctggtggtcaattgcaaagaatttcaatagctagagctctattgttgaaaccaaaaatcttgatttgtgatgaaagcgtaaatatgttagatgcgtcaataaaaatagagatacttgaattattaagattattgcaagaaaaaatgaatttaacgatt

SEQ ID NO: 269530 - DNA, 685 bp, Unknown
  Bacterial polypeptide expressing nucleotide sequence isolated from the Sargasso Sea
atgacaggtggttatggtgatggtccagatattattaattcttgttctattaatgtcgacaaaggggaaattgttgcaatcctaggtccaaatggtgctggaaaatctactgccatgaaagcaatgttaggtttattaaatttaaaatctggaagtgtagttatagaagatcaagacatatccaaattttccccacaagagagagttcaaagaggaatctcttttgtgccacagacaaaaaatgttttttcagaattgacagtaagagaaaatcttgaaataggtggatttcttagaaaagatgatatcgatatagtcattaatcaaatctacgaattatttccaattttagcagaaaaaagagaccaagttgttggacaattatctggtggtcaaagacaacaagtagccttaggaagagctttaatgatacagccatcagttttaatgttagatgaaccaactgctggtgtttcaccaattgtgatggatgaactgttcgaacacatagttaaagttaaaaaaactggagtggcaattattatggtagagcagaatgcaaaacaagcacttagcatatcagaccggggttatgttttagtgactggtgaaaataaatttgaaggttctggaaaggaattgttaaatgatccagaagtaagaaggtcatttttaggagcttaat

SEQ ID NO: 269531 - DNA, 894 bp, Unknown
  Bacterial polypeptide expressing nucleotide sequence isolated from the Sargasso Sea
tatgacaacaacacctgtaattaaatgtgagtctgtctataaaatatttggagcgaatgcagaaaaaatgcttcaaaattcaaatggcaatgtagatgcaaaaatatttcaagatgcaggttgtattgtaggggttaacaatgcttcttttgaagtatcaaaaggagaaatgttagttgtaatgggtttatctggttctggtaaatcaactctactgagatgtatttcacgattaactgatgctacaggtggaaaaatttttatcgaaggtcaagacttgttagcaatgaatgataagcaattaattgagttaagaagaagtaaaatgggtatggtttttcaaagttttgcattacttcctcataaaactgttttagaaaatattgcgtttccacttcaaattaaaggaggtgaaactgatgacagtattaaaaaagctatggagatggttgaattagtaggtttaaagggaagagaaaattattttcctagagaattatctggaggtcaacaacagagagttggtattgcacgatcattagctgttgaaccagatatatggtttttagacgaacctttttctgcattggatccacttataagaaaagagatgcaagatgaatttttaagactccaaggggttttaaataaaacaattctttttattacacatgactttgatgaagcactaagacttgctgatagaatagccattatgaaagatggtttaattgaacaactggatactccagcaaatattgttttgagtccaaaaaccgaatatgtgagaaaatttacagaagaagtgccaagagaaaaagtattaaagatagaagcaataatggataaatctataaatgaaaaagataataaaatgattagtgtttctaaaaa

SEQ ID NO: 269532 - DNA, 885 bp, Unknown
  Bacterial polypeptide expressing nucleotide sequence isolated from the Sargasso Sea
cagcttcaaaacgtagaaaaacattagagcgtgagttggattgggttcgtcaaggagcaaaaggaagacaaaccaaacaaaaagcacgtttgcagaactatgacaaactcttaaatgaagatcaaaaagctttagacgaaaaattagaaatttatattccaaatggtccaagattaggaacaaatgttattgaagctaaaaacgtggccaaagcttttggagataaattattgtacgataacttaaactttacacttcctcaagctggaattgttggaatcattggtccaaatggagcaggaaaatcaacaattttcagaatgattatgaaagaacaagaaccagattcaggttcgtttgaaataggagatactgttaaaattgcttatgtagatcaatcgcatgccaatattaatccagaaaaatctatttgggaaaacttttgtgatgggcaagaattgatcatgatgggtggaagacaagtcaattctagagcatacctttctcgttttaactttggaggtagtgaacaaaataaaaaagtttcaacactttcaggaggagaaagaaaccgtttacacttggccatgactttaaaagaagaaggaaacgttttgcttttagatgagccaactaatgatttagatatcaatacattaagagctttagaagaaggtttagaaaactttgcaggttgtgctgttattatttcgcacgatagatggtttttagatagagtatgtacccatattttagcttttgaaggagattcagaagtatattattttgaaggtagtttctcagaatatgaagaaaacaaacgcaaaagattaggtaaagaagtaacacctactcgtattaaatacaaaaaattaattcgataat

SEQ ID NO: 269533 - DNA, 697 bp, Unknown
  Bacterial polypeptide expressing nucleotide sequence isolated from the Sargasso Sea
atgattgatataagtaatttaaatttttactatggttcttctcaaatattatttgacgtttcactcaaagcgaaaaataaagaaattacttgtttaatgggttcaaacggagttggtaaaacatctttattaaagtttttatcaggaatctatccttcaaagtcaggaaattatctttttgaaggggataatgtaactaactttagctcgcaccaacttgctaagagaggattagggtatgttcctcaaggccgttttatatttccattattatctgtaaaagagaatttagaaactggttttgcatgtttaaaacgtgataaacatttcatacctgatgaaattttcgatctttttccagtattgaagcaaatgataaatagaagaggtggagatttatcaggaggtcaacaacagcaattagcaattgcaagagcaatgatttcaaaaccaaaacttctacttatggatgaaccaaccgaggggatacagccaaacattatccagcaaattggagaagtcataaaatatttaaaagatgagcagggaatgaccatactattggttgagcaatattttgattttgcatttgatttagcagattatgtctatgttatgaaaagaggaaaaattattactgaatcaaagaaagagagcttggataaattgtcgtttaaaaatgaagtatcaatttgaa

SEQ ID NO: 269534 - DNA, 478 bp, Unknown
  Bacterial polypeptide expressing nucleotide sequence isolated from the Sargasso Sea
atggcttttttcgagggaaataaaatgactgctggttatggtgatggaccagacattatatcttcttgttcaataaatgttgatagaggtgagatagttgcaattcttggaccaaatggcgctggaaaatctacagctatgaaagcaatgttgggtctacttaatttgaaatctggttcagtaaacattgatggaaaagatatttccaaattttctccacacgatagaataaaacaagggatttcgtttgttccacaaacaagaaatgtttttgcagaattaacagttagagaaaatttagaagtaggagcttttttaagagaagatgatatcaataaagtgattgaggaaatatacgaattgtttccaatcttaaaagaaaagaaatcgcaagttgtaggacaattgtcaggcggtcaaagacagcaagttgcattaggaagagcgctaatgattaaaccatcagttctaatgttag

SEQ ID NO: 269535 - DNA, 530 bp, Unknown
  Bacterial polypeptide expressing nucleotide sequence isolated from the Sargasso Sea
aatgcttaagatttctaatgttgaaactttttatggaaaaattcaagctctaagaggtgttgaccttgatgtaaatgacggtgaaattgtctctttaattggctctaatggagcaggtaaatcaactttacttatgactataagtggagtgaataaagctagaagaggaaatatagttttcaatggtgaaaatattgagaacaaagaccctcacaaaatagttgatatgggtatttgccaagttccagaaggaagaagaatattttcaagattgactgtagaagaaaatttaagattaggagctcatgctaacgaaaaaggaaagcactttgaaaatgatattaaggaagtttacgatttatttcctgtattaagtgatagaaaaacgcaaagaggcggaacactttctggaggagaacagcaaatgctggcgataggaagagcattaatgagtaaacccaaagtacttttattagatgaaccttcacttggaatagcacctaaactagtaaatcaaattttcgtttcaa

SEQ ID NO: 269536 - DNA, 558 bp, Unknown
  Bacterial polypeptide expressing nucleotide sequence isolated from the Sargasso Sea
aatgactgatgctgtaattaaatgtgaatctgtctacaaaatatttggtgcaaatgccaaaaaaatgctccaagaagcaaatggaaatgtagacgcaaaaaaatttcaagataacggatgtattgtaggagtgaacaacgcttcctttgaagtttcaaaaggagaaatgttggttgtgatgggcttatcgggttcaggaaaatctacattattaagatgtatttctagattaacagatgcaactggtggaaaaatttatatagaaggccaggatttgctttcattaaaagaaaaagaacttattgaacttagaagaaacaaaatgggaatggtttttcaaagttttgctttacttccacataaaacagttttggaaaacattgcttttccacttcaaattaaaggtgtagaaactgagaagagcattaacaaggctatggacatggttaaacttgttggtcttgatggaagagaaaactattttccaagggaactttcaggtggacaacaacaaagagtaggtatcgctcgatcattagctgtagaacctgatatttg

SEQ ID NO: 269537 - DNA, 1003 bp, Unknown
  Bacterial polypeptide expressing nucleotide sequence isolated from the Sargasso Sea
atggaaacagccattcaaattcaaaacgtctggaaaatttttggaaataattcagaagaagctttggatgcaattcaaaataaaaatatctcaaaacaagaagcattagaaaaatataattctgtaataggggtttcaaacgtatcatttgacgtaaataaaggggaaatattttgcgttatgggtctttcaggtagtgggaagtctacattggttagacatataaatagacttcttgaaccaacttctggaaaaatattaattaacgatcaagatgtaatgcagtttgacaaagatagcttacaagaattaagaaataaaaaaataggaatggtatttcagaattttgctttgatgccacatagatcagtcctagataatattgcaatgcctttagaaataagaggtgtaagtaaaaatgatagattagatgcagcaaacaaaattttaaatattgtagaacttcaagggtggggaaacaaatatgctcatgaattatctggaggtatgcagcaaagagttggtttagctagagcactagctgccgatccagagtttttattaatggatgaaccttttagtgcattagatccattgattagaagacaacttcaatcagagtttataaaactttcgaaacaaatgaaaaaaacaacagtgttcatcacgcatgatctagatgaagcggtaagagtagggcatagaatagctataatgagagatggagctgtagttcaaataggaacacctgaggaaattgtaattaacccagcagatgaatatgttgctgattttgttaaaggaatttcaagattaaaggttgtccaagctaaaacaattatgcgatctgtaaaagattatgaaagtaaaattggtccactggacaacgataatgaactagtaagtgaaaacgatgttttaagtaaattaattgagacttcaatttcaaaaaacaaaccaatagttgttattgataaaaataatcaaaaaataggagttataa

SEQ ID NO: 269538 - DNA, 1744 bp, Unknown
  Bacterial polypeptide expressing nucleotide sequence isolated from the Sargasso Sea
agatttatataaatacgctcaacaaaatcaaacaaaagttaaaagaggaatcctctattcaattttaaataaattgttcgatctcgctcctccggtcttgattggtgtagcaattgatattgttgtggagggatctgattctttcattggttcatttgggtttgaagacagacgacaacaattaattattcttgcatttattacttttgtaatttggggtttagaatcaatttttgattatgtcgcagcagttacttggagaaatattgcacaagatctacaacattccttacgtactgaaacttttgaaaaaacactggatttagatttatctttttttgagaataaatcttctggacgcctaatggcaatattgaatgacgatgtaaatcaaatggaacagtttttaaatgaagcagctaatcgtttaattcagacagcaacaaccgttatagtcatcggtggaacctttatttatatatcacctttagttgcagtttttgcatttattccaattccagtaatcatttttggatcttataaatttacacaaagaattgccgaaagatattcaaaaatacgaaataatattgaatccctgaatgctcatctttctaattcaataacaggagtactaacagtaaagagttttaatagaaaggacagagagtataaaagaattgacgaagcatcgaaagaggtaaaaactgcaaattatgaagcaataaaactatctgccgcattcatacccatcataagaattgcaatattatttggctttactgcaacacttctcatcggtggatttcttgctctagacgggcaaataaaagttgctatgtactctgtcatgttatttattactcaaagacttttatggcctttgaccgaattaggaatgatttttgatgtttatcaaaaagcaatggcatcttttagaagaattatcaatttgaaagaaactaaaccactaatcaacgatggaaatacctttatggaggaacttaaagaaagtattagatttgaaaatcttaattttgaatacgtctctgactttcccgtattgaaagatataaacatcgaaattatgaaaggaaaaacaacggcaatcgttggaagtacaggatctggtaaatcaacactaataaaattaattctaagattttatgaaaaaaattctggaaaaatattttttgataacaatgaaattgaatctttagaaattgatagtcttcgaagcaaagtaggacttgtaagccaagatgtatttttgtttgagggaactgtttttgaaaatatagcttatggaaatatagatgcgtcaacagaagacgtatggaatgctgcccgtttatctgaatctgataaatttataagtgaacttcctaatcaagaaaatactattgttggtgagcgagggcagaaactttcgggcggacaaaggcagagaatatctattgcgagagcaatattgaaaaatcctgagattttaatccttgatgaagcaacttcagccgttgataatgaaactgaagctgcaattcaggagtctcttgagacattgaaagaaggaagaacggtaattgctatagcccatagactttctactataagaaatgctgacttaatttatgtattagagtctggtgagatagtcgagtatggtactcatgatgaactactgaacaatcagggtgtgtacgcaaaattatgggatgttcaaacaggaaagataaaaagataa

SEQ ID NO: 269539 - DNA, 1048 bp, Unknown
  Bacterial polypeptide expressing nucleotide sequence isolated from the Sargasso Sea
atgttagctgttgaagttaaagatcttacttattcaattaataataaaaaaattttaaataatattaattttcatcttaataaagatagcatctcttgtattttagggccatcaggtagtggaaaaactactttattaaagttaatagcaggtcttgaaaaagtacaatcaggtaaaattattattaatggcgaagaagtaagtagtacatcaaaacacttacctactgaaaaaagaaaaattggttttttatttcaagactatgctttatttccgcatttgacagtaaaagaaaatttgagatttccaattaatgcgaaaagcacaacaagttatgttgacgaaattattgaattaataaagttaccaaattcattagataaatatccacacgagttaagtggtggtgaacaacaaagagtggcacttgcaagatcaattatttctcaacctgatttactattattagatgagccattttcaagtttggatttaagcctaagagaagaagtgcgggatgatactttgcaccttttacaaaaatcaaatgtttctgttgttatagttactcacgatccttttgaggcaatgttcatttctaatcatataaatatttttgataaatcaggctcaattgtgcagtcaggaactccaaatgatctttataacaagccaaagaattcatatgttacaggtttttttggtgaaacaaataaatttgaaggagttgttaaagaatcacatattttgacaccagttggaaaaataaaaacacctgaaaattttgaaggagaaaatgttgttgttcacattagaccacagggcataaaacttagtaaacaaccaacaccagttaatggaattaagggaaccgttatggcatcaaagttaatggggtcgtttagttttattcatttatctgtgttagataataataatgaaattgttcatgttcatagccatatgcctgctgactttaatccgaaacaatcgtctgcagtggaaatagaaattgataatgatcaggcatacatatttaagaattaaa

SEQ ID NO: 269540 - DNA, 497 bp, Unknown
  Bacterial polypeptide expressing nucleotide sequence isolated from the Sargasso Sea
tatgagtagttttataagattaaaaaaaataaacaaaatttttgatttaaaaaataaagtaagagcacttaaaaatataaatcttgagtttaatcttggaaaaatttattcaatcgttggtccatcaggatcaggtaaatcaactttattaaatatgttatctttaatcgatagcccaacctcaggacatataaaaattaatactaaaaatattattataggaaataacaatgaaaatgataatttaagagcgagcttaattggaataatttaccaaaattataatcttttaaacgattttactgccattgaaaatgttgcactagcaggactcgctttaaacaaaaatagaagacaggtacttttagacgcaaaaaaaattatgagtaatttgggactatcaaaaagatttgatcattttccatcagaactttctggtggagagaatcaaagagttgctattgcaagagcattgataaataaaccaaaaataatat

SEQ ID NO: 269541 - DNA, 433 bp, Unknown
  Bacterial polypeptide expressing nucleotide sequence isolated from the Sargasso Sea
attttcgcgacgctgagcgtcgaggagaacatccagaccggtctcgagaatgcaccgaccaagagggtgccggaggagatctacgccctgttcccggtgctttacgagatgcgcgcccgcaagggcggcaacctgtccggcggccagcagcagcaactggcgattgcccgcgcgctcgtcacgcagcccaaggtgctgttgctcgacgagccgaccgagggcattcagccgtcgatcatcaaggacattgcccgggcattgaacgagatccgcaagctgcgcgatatcacgatcgtcgtgtcggagcaggtgctgagctttgcgctcgacgtcgcggatcgcctgttcgtcatcgaaggcggccggctcgtgcacgagagtccgcgcagcgccgtcgacaccgcgaagattcgtgaatacctgtcggtgtgag

SEQ ID NO: 269542 - DNA, 751 bp, Unknown
  Bacterial polypeptide expressing nucleotide sequence isolated from the Sargasso Sea
gttggaccaacgacaaacaacaacatcacaattacaaaaggactgcaagaaggagaccaaattgtcaaaaattatccaaatgaacaaaataaataaacaagttcagaaagaaaataaaaccatcaacatacttcaagaatgctcattaactgtacaacaaggagacatgattgcaataacaggacaatctggaattggcaagtcaactttattgaacatcataggatgtctggatgagcccagctctgggacatatcatctgaatggccaagacatcacatcattgccaacggaacataaatctaaaattcgcaaagaaatatttggctatatattccaacaatattggttaatcaaacatctcaccatattagaaaacgttgaactggcattacactataaaggcatgaagaacactcgtaaaattgcaacagaaacattagaagcgttaggcctattgcaacatcaacatcaattacccaaccaattgtcaggtggtcaacaacaaaaatctagcattgcacgagccattgctacacaacctaagatcatcattgcagatgagcccaccggcgccctagataaaaaaagtagtcatcaagtgatgtctttacttaaagacattaaccatacaacacaaaccaccatcatagtggtgacccatgatcaagacatggcaaaaatatgcaataaacagatggccatagagtcattattccatacaaacgagatacaaaatgcaaccttataa

SEQ ID NO: 269543 - DNA, 257 bp, Unknown
  Bacterial polypeptide expressing nucleotide sequence isolated from the Sargasso Sea
catgtctgaagctcaacagccctacctaagaattgaagacctcaccaagcattttggggagtttgtcgcggttcgggaactttcgctggaaatcaacggaggagagttcgtctgctttcttggtccttctggatgcggcaagacgaccctgctccgtgcgattgccggactcgatccgcaaaccaccggacgcatcacgcaaaatggacaggacatttccagcctgccaccctccgagcgggattttggcattgtat

SEQ ID NO: 269544 - DNA, 1441 bp, Unknown
  Bacterial polypeptide expressing nucleotide sequence isolated from the Sargasso Sea
actggccgcgcttgctcggcagcgccggcaacacgctgaagctgctcgcgctcggctttgcgtacggcgtcgcggtcggtttcgcggtcggcgtgtcgatcggctggtcgcgccggatcggctactgggtgcatccggtgctgcgcgtgctcggccccgtgcccgccaccgcgctgctgccgctcacgttctacttcttcccgtcgagctattcggcggccgcgttcctgatcgcgctcgctaccggcttcccggtcgcggtgctcacgtggtcgggcgtcgcgagcgtcaacaagcagtattacgacgtcgcgcgcacgctcggcgcgaacgcgcgcttcctcgtgctgcgcgtcgcgattccggccgcgctgccgcacgtgttcgtcggcatcttcatggggctgagcgcatcgttcacggtgctggtcgtcgccgagatgatgggcgtcaagtcggggctcggctggtacctgagctgggcgcagggctgggcatcgtacgtgaacatgtatgcggcgctgatcgtgatggcgctgctgttttccgggctgatcgcgctgctgttcgcggtgcgcgaccgcgtgctcgcctggcagaaaggaaccgtcaaatggtgagcgccgccgtactcgaatcgtccgttgcatcgtccgttgccgctgcgcccgccgtcacggcgccgcgcggcgcgcgcatcgacatccgccgcgtgagccatgcgttcgacggccccggcggcgcgctgccggtgctcgacgacgtcacgctgtcggtcgcggccggcgaattcgtcgcgctgctcggcccgagcggctgcgggaagtcgacgctgctgcgcctcgtcgcgggcctcgacgccgcgcggcacggcacgatcgcgcaggacggcgtgccgatcgagcaaccggatccgtcgcgcatcgtcgtgttccaggacccgacgctgtacccgtggcgacgcgtgcgtgcgaacgtcgcgctcggcctcgaggcgtgcggcgtggcgcgcaccgcgcagcatcgcgtcgacgatgcgctcgcgcgcgtcgggctgcaggaattcgcgaacgtgttcccgcatcagttgtccggcgggatggcgcagcgtgtcgcgctcgcccgcgcgctcgtcaacgatccgcgcctgctgattctcgacgagccgctcggcaagctcgattcgctcacgcggctcacgatgcaggccgagctcaccgcactgtggcaacgcgatggcttctccgcgctgctcgtcacgcacgatgtcgaggaagcgctgttcctcgcgcagcgcgtgatcgtgttcgggccgcgccccgcacggatcatcgccgaattgcacgtcgacctgccctacccgcgccatcgcggcgacccgcgcctcgccgaactgcgtcacgacgcgttgcggcacctcgggctcgatgcgagctggtag

SEQ ID NO: 269545 - DNA, 334 bp, Unknown
  Bacterial polypeptide expressing nucleotide sequence isolated from the Sargasso Sea
tgaagtaaatctaaaaagcttactggatcggtatcctaatcttgatatcaaacaagattggccacgaattctttccttaggcgagcaacaaagattggcttttgcaagactcttactaaattctccaaaattcgcagtacttgatgaagcaacaagtgctttagatattaacactgaaaaaaaactgtatagtttacttaaggaaagagaactttctcttattagtgttggacatagacctagcttaaaagattttcatgagaatattttagaattaaatggacagggagactggaaattattgacctctgataagtataattttaaggattaa

SEQ ID NO: 269546 - DNA, 508 bp, Unknown
  Bacterial polypeptide expressing nucleotide sequence isolated from the Sargasso Sea
atgttgagtctccaaaatatttcgaaaagctttggtggggttaaagcagtgtctgatgtttccttagaaatagagaaaggggatgtgttgggtttaattggcccgaacggagcagggaaatcaacgcttattaatttgatttctggattgctgacccctgataatggtgcaatttatctttctggtaaaaatattacctcgagaaagtcttatgaaagagcgcgtttgggcttagctcggactttccaaaatttgcgaatttatcccaatctcactgttggacaaaatattgaggtggcagaaatctcttctcaatattctgagagaaaggagactaagaatttggatgaaataattcatgtctttgacctttctgacaaggctgatttaccatcagatgaattgtcatatggtcatttaaggagattagagattgtcagagcactggcattaaaccctttggtcctacttctggatgaacctgccgccggaatgaagaaaatgagac

SEQ ID NO: 269547 - DNA, 295 bp, Unknown
  Bacterial polypeptide expressing nucleotide sequence isolated from the Sargasso Sea
aagagcagctttagcgagagcattatgtatggaaccaaaaattatgttatttgatgaacccacttctgctttagaccccgaaatgattaaagaagttttagatgcaatggttagtcttgcaaaaggtggtatgacaatgattgttgttacacatgaaatgggatttgctaaagaagttgctgatgaagtagtttttatggatgagggaatgatagtggaaagagcaaaaactaacgattttttcgctaatccaaaaaacgaaagaacaaaacttttccttagtcagattctttaa

SEQ ID NO: 269548 - DNA, 657 bp, Unknown
  Bacterial polypeptide expressing nucleotide sequence isolated from the Sargasso Sea
aatgaatctaatcggagaaaatataacttacaagccagacgatcagtttcatctaaacgatgtttcatttaattttaaaaaaggaaatttgtatactatcttaggaagaactttatctggaaaaactacatttttaaaaacaattgctggtttgctaaaccctgatagtggaaatttatcatttgaagataatgattttatcaaaatacctgtgtgggaaagaaatgtagcaatggtttatcaacaatttattaattatcctcatctaaatgtttatgagaatataattttccctcttaaacaaaggaaaataagcgaagatcaaataaagaaggatgtagaagaagcgcttaaaactgtaggattagtcggtttcgaaaataggaaaattcaagaactatctggaggacagcaacaaagagttgctttggcaagatccttagcaaaaaaagcaaaaatattactactggatgagcctttggtgaacttagattacaaattaagagagcaattaagagaggaatttaaaagaatattcactcaaggtttgtctgaagatacaattttaatctactctactactgacccacaggaagtcatggaattaaatggtgaggtgatagtgttagatgagggtaaagttttacaaaaaggacc

SEQ ID NO: 269549 - DNA, 1106 bp, Unknown
  Bacterial polypeptide expressing nucleotide sequence isolated from the Sargasso Sea
aaaatatgaagagatcgattggatggcatcaggggccacagcagaaaaaactgataatgttgaaccaggcgatgtgatcctaaaaattgataatcttaaaaaatattatgaagtcgctgcaaacgctctttttgggtcaagtggcagcaaaaaggttgtaaaagctaatgaaactttatcctttgaggccagagaaggtgaaactctggctatagttggagagtcaggctgcggaaaatctaccttagccaaagttttaatggggttggaaaccgctacagatggcgctgtacttttggataataaatcaattggcgatacacctatagaaagccgaaatactcaaacggtagcagatattcaaatggtttttcagaacccttttgatacattaaacccttctatggccgttggtcggcagataattcgtgcattagaaatttttcgatttggtaaaagtgataaagatcgcaacgaacgaatgttagagcttctagatctggtaaaacttcctcgagcttttgccgaaagaatgccaagacaactgtcaggtggtcaaaaacaaagagtgggtatagcaagagcttttgcgggaggcgcaagaatagttgtagctgatgaaccagtttcagctctcgatgtttcagttcaggctgcagtaactgatttgttgatggaaattcaaagaaatgaaaaaacaacccttttatttattagccatgatctttcaatcgttcgatatctttcggaccgagtgatggtgatgtatttggggcatgttgttgaactaggaacgactgatcaggttttttcacccccttatcacccttatactgaggctcttttgtcagcagttcctatagcagatacgagcgtcgaaaaagagcatattgttcttgagggcgatattccatcggcaatggacccaccaagtggttgcccttttcaaacccgctgtcgatggaaaaaagatgtgccaggcgacttatgtgaaaaggaaattccacctcagcgggatatagcaataggtcatcaaataaagtgtcacttgagtgagaccaagctttcgaaaatgacgcccgttataaaacttgcagctgaatgat

SEQ ID NO: 269550 - DNA, 751 bp, Unknown
  Bacterial polypeptide expressing nucleotide sequence isolated from the Sargasso Sea
tatgtctaacgtcgtttcaaaaaatagtgccattaatgtggttaacctcgaaaaatcggtgactactcaggaaggttcgctcactatcctcaagggcattaacttagatgtcaagcagggcgaaagtgttgcgatattaggaccctccggctcgggtaaatcgacgctacttggcttactcgccgcgctcgacaccccaacggcgggggagatttggctcgatggccaggccctatcaccgctcaatgaagaacagaaagccgcgctgcgtaagcaaaaagtgagctttatttttcaatcttttatgttagttgataccttaaccgcccttgaaaatgtgatgctaccggccgagcttgccggggttaaaaatgccaaggagaaggccgaggccatgctggggcgcgtggggttatcccaccgtttgactcatttacctaaacagttatccggcggtgagcagcaaagggttgcgattgcgagggcctttatttgtgaacctaaagtgctatttgccgacgagccaaccggcaatttggacagtgttaacggccataaaattgccgatatgttgtttgagctgaaccaagagagccacaccacgctcatcctcgtcacccatgacttacaactggcgaagcgttgccaaaggcaactggttatggacaacggccacttgcaggaagagttgaattcggctcaatcgcacaatgtgaataacaaccttgaattaagcgccaaggaggcctaa

SEQ ID NO: 269551 - DNA, 622 bp, Unknown
  Bacterial polypeptide expressing nucleotide sequence isolated from the Sargasso Sea
atgagcttaaaagtaaaaaatttagctttctcgataaatgaaagtcttctatttgagaatttagactttgaaatcgggaaaaataaagttggtcttattacaggcactagcggtattggaaaatcatcacttcttaacgttttatctggattacttaaaccagataatggttcaattatttgtaacgatattattttaaataatgaaaatgttttcgtagaacctgaaaatagaaatataggatatgtttttcaggactttgccctttttcctcacataaatgctgaaaaaaatattaaatatgctatatctaaagatcttataaatttttataaagaagtaattattagtcttaaactaaaagatcatttaaaaaaaatgccttttgagttatctggcggtcaaaaacaaagagtttcaattgctagagcaatcctaatgaaaccctcccttctcttattggatgagcctttctcaaatctagattctgaaaatattaaatctgctcaaaatctactcttgttagttttagaaaaattaaaaatcccatgcattcttgtctcgcacgacacaagtaacctagaagctttagatatcgcacaaataattaatctcaattaat

SEQ ID NO: 269552 - DNA, 1048 bp, Unknown
  Bacterial polypeptide expressing nucleotide sequence isolated from the Sargasso Sea
atgattgctgttgaagttaaagatcttactcactctattaataataaaaaaattttaaataatattaattttaatctcaataaagatagtatctcttgtattttgggaccgtcaggtagtggaaaaactactttattaaagcttatagcaggtcttgaaaaagtacagtcaggtaaaattactattaatggtgaagaagtaagtagtattgcaaaacacttacctacagaaaaaagaaaaattggttttttatttcaagattacgctttattcccacatttgacagttaaagaaaatttgaggtttccaactaatgcaaaaaattcaactaataatattgatgaaattattgaattaattaaattaccaaattcactagataaatatccacacgagttaagtggtggtgaacaacagagagtggcactagcacggtctataatttcacaacccgatttacttttattagatgaacctttttcaagtttggatttaagtcttcgagaagaggtgagagatgatacgcttcatcttttacaaaaatcaaatgtgtctgtaattatagtcactcatgatccttttgaagcaatgtttatttcaaatcatataaatatttttgataaatcaggttcgattgtacaatcaggaactccaagtgaactctataacaatccaaaaaattcatatgttacaggtttttttggtgaaacaaataaatttgaaggtgttgttaaagaatctcacatttacacaccggttgggaaaattaaaacacctggaaatttagaaggtgaaaaagttgtagtacacataagacctcaaggtataaaactcaacaaacagccaacaccagttaatggaattaagggaaccgttatggcatcaaaattaatggggtcatttagttttatccatttatctgtgttagataataataatgaagttgttcatgttcatagccacatgcctgctgactttaatccaaaacaatcgtctgcagtggagatagaaattgataatgatcaggcttacatatttaagaattaag

SEQ ID NO: 269553 - DNA, 1033 bp, Unknown
  Bacterial polypeptide expressing nucleotide sequence isolated from the Sargasso Sea
atgtctgaaccagtaattaaatgtgagtctgtttataagatatttggcgaaaatgctgaaactatgcttaaagaagcaaacggcaatgtagatgcaaaaacttttcaggaaaatggatgtatagttggggttaataatgcttcatttgaggtatccaaaggggaaatgttggtggtaatgggactctcaggttcaggtaagtctacactgttaagatgcatatcgagattaacagaagcaacaggtggaaaaatctttattgaaggtcaagatctattaaatttaaataataaagaattgatcgatctaagaagaaataagatgggaatggtttttcaaagttttgcgcttcttccccataaaacagttgttgaaaatatagcttttcctttgcaaattaagggaattaatacgggggagagcatcaataaagcaatggatatggtcaaactagttggtcttgatggaagagaaaactattttccgcgagaattgtctggaggacaacaacagagagtaggtattgctagatcattggcagttgagccagatatttggtttttagatgaacctttttcagcgctggatccgttaatccgaaaagagatgcaagatgaattcttaagactacaagaaaagctacaaaaaacaattatgtttataacccatgattttgatgaagctcttaaacttgctgatcgaattgcaattatgaaagatgggattattgaacaattagatactcctgcaaatatagttttaaatcctgcaacagaatatgtaagaaaatttactgaagaagttcctagagaaaaagttttattaattgaagatgtaatggactcttcaactacaggaaatataggtgatttaaaagttttaagagacgaaataattgaaaatgtggcagaaaaaatattaacacaggaaaagactgtagctgtaatagataacaacaataatattgtaggatctattaatccaacaaaaattattaatacagtttttggaggaagaaaaaataataattaaa

SEQ ID NO: 269554 - DNA, 1054 bp, Unknown
  Bacterial polypeptide expressing nucleotide sequence isolated from the Sargasso Sea
atggaaacagctatccaaattcaaaatgtctggaaaatctttggcaataattcaaaagaagctttagatgctattcaaaataaaaatatttcaaaacaagaagcattagaaaaatataattctgttataggtgtttcagatgtttcttttgacgttaataaaggagaaatattttgtgttatgggtctttcaggaagtggaaaatctacactagttagacatattaatagactccttgaaccgacttctggaaaaatattaattaataatcaagacgtaatgcagtttgataaagatagtttacaagagctaagaaataaaaaaataggaatggtatttcagaactttgctttaatgccacatagatcagttttagataatatagcaatgcctttagaaataagaggtgtaagcaaaaatgatagactagatgaagcaaataaaattttaaatattgtagaacttcaaggttggggaaacaaatatgcacacgaattatctggaggaatgcaacaaagagttggcttagccagagctttagctgctgacccagattttttattaatggatgaaccttttagtgcattagacccattgattagacgacaacttcaatcagagtttattaaactttctaaaaaaatgaaaaaaacaacagtatttattactcatgatttagacgaagctgtaagagttggtcatagaatcgcaataatgagagacggtatggtagttcagataggaacacctgaagaaattgttgttaatccagcggatgaatatgttgctgattttgtaaaaggaatttcgagattaaaagttgttcaagctaaaaccatcatgaaatctataaaagagtatgaaaataaatttggcaaattggataataataatgaattagttaatgaaaatgaagttttaagtaagttaattgaaatatcagttacaaaagacaaaccaattattgtaaccaataaaaataacgaaaaaattgggtttataagtcaatctgatcttctaaaggcagttgttgaaggaaatgaaaatgaataaa

SEQ ID NO: 269555 - DNA, 966 bp, Unknown
  Bacterial polypeptide expressing nucleotide sequence isolated from the Sargasso Sea
ttcaagaagcaaatggaaatgtagacgcaaaaacattccaagacaacggatgtattgtaggtgtgaacaatgcttcttttgaagtttcaaaaggagaaatgttggttgtaatgggtttatcgggctcaggaaaatctacattattaagatgtatttctagattaacagatgctactggtggaaaaatttatatagaaggtcaagatttgctttcattaaaagaaaaagaacttattgaacttagaagaaacaaaatgggaatggtttttcaaagtttcgctttgcttccacataaaacagttttggaaaacattgcttttccacttcaaatcaaaggaatagagactgagaagagtattaataaagctatggatatggttaaacttgttggtcttgatggaagagaaaattattttccaagggaactttcaggtgggcaacaacaaagagtaggcatcgctcgatcattagctgttgaacctgatatttggtttttagatgaacctttttctgcactagacccattgattagaaaagaaatgcaagatgaatttttaagacttcaagaaaaattaaaaaaaacaattatgtttattacacatgattttgatgaagcattaaaacttgctgatcgaatagcgattatgaaagatggaataattgaacaattagacactccagcaaaaattgttttaaatccagcaaccgattatgtaaaaaaatttactgaagaagttccaagagaaaaagttttaataatagaagatgtaatggatgcaccaacctcagataatttaagtgatctaaaagtttcaaaagatgagataatagaaaatgtagctgaaaaaattttatctcaagaaaaatcagtaggtgtaatagacaaaaataataaaattgttgggactgttcatccttcaaaaataattcatactgtttttggaggaagaaaagaaaacagttaaa

SEQ ID NO: 269556 - DNA, 1045 bp, Unknown
  Bacterial polypeptide expressing nucleotide sequence isolated from the Sargasso Sea
ggagattttactgcagttaaaaattctaatttaacgattaatgataaagagttttttgttttacttggaccctctggttgtggaaaaactacaacacttagaatgattgcaggattagaattacctacatctggtgagatatatcttggagatgaagaggttggaatgttaagagcatcagaaagagatattgcttttgtttttcaattatttgctctctatccacacatgaatgtaagaaacaacttatcatttcccctaaaaatgcaaggttataaaagacgtgatatcaaaagtagagttgaagaggcagcaaaacttttaagaattgatcatattttaaattctaacatttcctcgctttcaggtggagatagacaacgggtggctttaggtagagcgcttgttaggagaccaaaagcatttttgatggacgaaccattgggaactttagatgctgaatttagggaattaatgtgcctagaattaaaaaaactgcatttggatattgcagcaactacagtttatgtaactcatgatcagttagaagcaatgtcattagctgaccgaattgcagttatggatggcggtgaaatattacaagctgatgagccaaatattatttataataaacctaaaactaaatttgtagcctcatttataggatctccaggtatgaacttttttgaagttaatgaaggaatttctaaagaccaatctattgtaaatatcgaaggtgctaaatttgatattcccaaacaacttgaagattcaaaaggaagtaaaaatttttttggcatacgtccagaaaatttaactcttaataataatgaaggtcttaaagggtcggtttttggagtagagtacttaggatcaagaaaaataattacaattaaaacaagtttaggtgaaattaaagttaaaacagatatttctgttagtgttaaattgaatgagaatgttcaggttaaacctttaaataataatattattatttttgacggtcaaacagacaaatctttaaacagtgagtttataaaataat

SEQ ID NO: 269557 - DNA, 721 bp, Unknown
  Bacterial polypeptide expressing nucleotide sequence isolated from the Sargasso Sea
gatggtctttatattaaaaagatatcaaaatcatattgggaaaaaacaagttgttagagatatttctttaaaaataaataagggtgaaattgctgggttgttgggtcctaatggagcaggaaagacaacaactttttatatgattgtaggtttaataaaacctgatactggctctatttttcttgataaaactgatgtttcaacttttccaatttatatgagaggaaaaaaaggcatcagttatctgcctcaagagccttcgatttttagaggaatgaatgttgaagataacttaatgtcaataatagaaataattgaagaagataaatctaagcacagtataattatggaaaatttattaaatgaatttgatatatctcatgtaagaaaatctaaatcaatagttctatctggtggagaaagaagaagattagaaatagctagaacattagcatctaaacctcaatatttactattagatgaacctctaacaggaattgatcctgtatcaattgaagaaattaaaatcattataaaaaaattaaaaaataaaaatataggcattctaataactgatcataatgttcgagaaacacttaaaattgtagataaagtatatatattaaatgaaggagctattttttatgaaggcaatccaaaagatgctattaataatgaaaaaattaaaaagttttaccttggtaaaaacttttctttataa

SEQ ID NO: 269558 - DNA, 652 bp, Unknown
  Bacterial polypeptide expressing nucleotide sequence isolated from the Sargasso Sea
catgattgaacctctaattgtttttcgtgggataaaaaaaaaatatgccaatgctactattctaaggaatgtagatattgctttatatcatggcaaatgtattttactttccggaaataatggttctggaaaaacgaccctacttaaaataattgctggacttgaaacaccttcttgtgcagaaatagaattttccggaaaatctctaagttggaaaaaagcaattcagggagttcgtaaagaaattatttacctgcaccaacatccatatttgttaagtggaacagttgagtcaaacgtttcttatggtttacgcttcactcacttaaatcgcaaacaacttcgtgactcagtaaaagaagctttaaactgggctgggctagccgatgtggccaaacaacaggcaaaaacattatctggaggagttcagcaacgagtagcatttactagggcatggatattaaagcctaaagttcttttacttgatgaaccaatggccaatatggatctagaatcccgggaaaaggcctgtgatttattaaaacgtatgaaatctgaaggtatgtcaatagttataacgagtcatgatactaatattacagatggtcttatagacagtcattttagtctttcagatgggaaactagattaa

SEQ ID NO: 269559 - DNA, 775 bp, Unknown
  Bacterial polypeptide expressing nucleotide sequence isolated from the Sargasso Sea
catgaacgcttccttgggcccagataacatccaacccacttctctatcgggtaacaccctactggaagtggaccagatcagcctctccttcgggggggtgaaagcactccaggatgttagtttttctgtggaagaaaagcagatcatggcgatcatcgggccgaacggagcaggcaagacgtccatgctgaatgtgatcaacggattctatcatcctcagcagggacagattcatttcaagggactccatcgaaagcagatgcgtcctcatgaagccgcggttcaggggattgccaggactttccagaatgtcgcgctgtttaaaggaatgtcgactttgaacaacatcatggcgggtaggaacctcaaaatgaaaaaaaaccttttctggcaggccttttattacggaccggccagggatgaggaaatgcggcatcggcttgaagcagaaaaaatcatcgattttctcgaaatccagtcgatccggaaaactccggtcggccgtctaccctacgggctgcaaaaacgggttgaactggggagagccctggctatggaacctgacctgcttttgctggatgaaccgatggcgggaatgaacctcgaagaaaaacaggatatgtgtcgctttgtccttgatatcaatgaacagtatggaaccaccatcgtccttatcgaacatgacatgggagtggtgatggacctctcagaacgtgtggtggtgttggattacggccgcaaaattgctgatggcacccccgatggaagtaaggtc

SEQ ID NO: 269560 - DNA, 787 bp, Unknown
  Bacterial polypeptide expressing nucleotide sequence isolated from the Sargasso Sea
tatgagtttgctggaaattcgtaatcttcaggtcactttcggtggcttagatgcactttcaaatctcgatttctccattgaagagggtgaaatcgtaagtgttattggaccgaacggtgctggaaaaacaacatttttcaacacaatttcaggaatgatccccccaactagtggagaaatcatctttaatggtgaatcggttctgggtcttgatccaaatcaaataacagagatgggaatcgctcgaacatttcagaacgtgagactatttccgaatatgacggttttggagaatgtgatggtttcacaacactgtagaacttcacaactgctgatgggagctttgtttcaaacgaaagcattcaagcaagaagagaaagaaatacgtgaacgttccatagaaattttgggatttttcggaactcgtctcattggttatcgtttagaccaaccagcttttgcattgtcatatgcaaatagacgcagacttgagattgcgcgagcaatggcgacgcaaccacgtttgttgttattagatgagccagttgcgggtatgaaccctatagagacagcggagttgacaggactaattagcagactgcgtgatgaatggggatttacaattgtaatcatcgagcatgatatgaaagtggtccgagatgtatctgatcgtgtagtagttctagaccacggtgtaccaatcgcacaaggagcttacgatgaggtttcaaccaaccctgatgtcatcgaagcttatttaggtcgaccagtagaggctaaatcatga

SEQ ID NO: 269561 - DNA, 697 bp, Unknown
  Bacterial polypeptide expressing nucleotide sequence isolated from the Sargasso Sea
catggccctgaccgcccaccagctgatgatgcgctttggcgagcgcgacctgttccagattgagcagctctccatcgcggccggcgacgccatctggctgcgcggcgcgaacggggtgggcaagaccacattgctcaagatcctggccggcctgctcaccccgacccggggccacaccaacctcccctctggctggcgtggcaagctcggccagtggctcaagcgcgatccggggccgggccgggtcacctacctgcaccagaccccctacctgtttgatcgcagcgtgcacgacaacgtggcctgggccctcggccatcgcgccgccgacgaggtgcgggtgttcgaggcgctgcgccgggttgaactggagagcctggcacgcgagcacatcagcattttgtctggcggcgagcgccagcggctggccatggcccgcgcctgggcactgcagcccgcctttctgctgatggacgagcccaccgccaatctggatgcacattcggttgccctgatggccgccatggcgcaagatctgcgggaacagggcagcggcctggtcatcatcagccaccagagcaacgatctgaccgacctgtgcgagcggcaatggaccctcgcccggggccgactgcacgaacccactcctttgaaaatcatcgagcgacatgacctcaaacagcgaacctcgtactga

SEQ ID NO: 269562 - DNA, 724 bp, Unknown
  Bacterial polypeptide expressing nucleotide sequence isolated from the Sargasso Sea
aatgagtatagaagtaaaaaatttaaataaaacttttaaaaaaatattagcagttcaagatttaaattttgaaattaaaaaaggatcaatagttggacttttaggaccaaatggatgtggaaaaacaactactattggtatgatgttaggtttaattaaaccttcttcaggtggtattttaattgatggtaaaaatattgaaaatgaaaatattagaaccaaaatattagaaaaagttaattttatttccccttatgtggagctaccaaaaaaacttactgttgaagaaaacctaatagtttatggaaaactatatggtgtagagaaattagaagaaaaagttttaagtttaattaaagatttaaatttagaaaactttaaaaaaagaaaaacaggtgaactttcatctggacaaaaaaatagagtttctctcgcgaaagcattaataaatgatcctgatatactcttattagatgaacctactgcaagtcttgaccctgatgtaggagattatatcagaagttatatcgaaaattttgcgtcaaaaaaaggtactacaattcttttggcatcacacaatatgaatgaagttgaaagactttgtagtgaggtaatgatgatgaaaaatggaaaaataatcgataaagggacttgtaaaagtctagttaataaacatggaagaaaaaatttagaagatactttcttaaaaattgttagagaataa

SEQ ID NO: 269563 - DNA, 304 bp, Unknown
  Bacterial polypeptide expressing nucleotide sequence isolated from the Sargasso Sea
acaacaacaacgcgtagcaatgcaaagagctttatgcatggagccaaaaattatgttgtttgatgagccaacatctgcactagaccctgaaatgattaaagaggttctagatgttatggtaaatttagccaatcaaggtatgacgatgattgttgtcacgcatgaaatgggatttgctaaagaagtagcagatagtatgatatttatggatgagggaaagatagtagaaaaggctactacaaaagagttttttgctaatcctaaaaatgagagaactaagctatttttaagtcaaattttataa

SEQ ID NO: 269564 - DNA, 469 bp, Unknown
  Bacterial polypeptide expressing nucleotide sequence isolated from the Sargasso Sea
cagggatgtgttcagggtggatcatattggcttcatctttcaactattcaatcttcttccatatctatcgattgaggataatgtgatgttgcctctaagattctcaagcattcgtgccaagagagctggaagaacaaaacttgatcgaataaacgaagcccgcaggcttttaaaagctctaggtctgaatgaacagcaggcagagaaaagcccggtaattgaactcagtgtaggtcagcagcaaagggtcgctgcagcaagggctctaataggtagtcctgagttgataattgcagacgaaccaacatctgcgttggatacaaaccttcgtcattcttttctagagcttctctttggagaatgcaaaaaatcagggagcaccctactttttgtaagtcatgattctacactgagtggtaatttcaacaggcaagcttcaatggatgaactaaacaacataataaattaa

SEQ ID NO: 269565 - DNA, 1054 bp, Unknown
  Bacterial polypeptide expressing nucleotide sequence isolated from the Sargasso Sea
atggaagctgccatacaaatccaaaatgtttggaaaatatttggaaacacatctaaagatgcgctggacgctattcaaaataaaaaaattacaaaacaacaagctctagaggaatataattcagtaattggagtttcagatgtttcatttgacgtaaaaaaaggtgaaatattttgtgtaatgggactatccggtagtgggaagtctacgttagttagacatattaatagactattagaaccaacatcaggaaaaatattaataaacaatcgagatgtaatgcgatttgataaaaaaaatcttcaagatcttagaaatcaaaaaattggtatggtttttcaaaattttgccttaatgccccacagatcagttttagataatattgctatgccattggaaattagaggagttagtaagaatgatagattagatgcagcaaataacatcttaaatattgtagaattacaaggttggggaaataaatatgctcacgaattatctggaggaatgcaacaaagagtagggttggcaagagcattagctgcagatcctgaattcttgctgatggatgaaccctttagtgcattagatcctcttattagacgtcaacttcaaactgaatttattaaactttcaaaacaaatgaaaaagacaactgtattcataactcatgatcttgacgaagcagtaagagttggtcatagaattgctatcatgagagatggtagcgtagttcaaattggcactccagaggagatagttgtaaatcctgctgatgattatgttgcagattttgtaaaaggtatatctagactaaaagtcgttcaggccaaaactattatgcaaccgttagatgattataagagaaattttggagaaaatgttggcaacaacgaaagagttaatgaaaacgatatattaagtaaacttattgagacatcagtatcagagaataagccaattatagtgcttaataatgacaacaaagaagttggaattattacacagtcagatttgttgaaagcggttgttgaaggaaatgacaatgaataag

SEQ ID NO: 269566 - DNA, 265 bp, Unknown
  Bacterial polypeptide expressing nucleotide sequence isolated from the Sargasso Sea
gtacttttgttggatgagcccactgcttcattagatcctgaaactggtgatttcgtaagatcgtttttagaagactacaaaaaggaaaaaaaaatatcagttttgcttgcctctcataatatggaagaagtaaaaagattatgtagttctgttttaatgatgaaagatggtttaatagtggatagaggaactcctgaagagttaataacaaaatatggaagaagaaatttagaggaagtatttttagaaattgcgagaaaataaa

SEQ ID NO: 269567 - DNA, 733 bp, Unknown
  Bacterial polypeptide expressing nucleotide sequence isolated from the Sargasso Sea
atgaatgggaaattgcttgaaatccgggatctcagtgcgggatacagtgcctcggtgaacatcatcagcgacattacgatgtgggtcgaggatggagaaatcctcaccctgatcggaccgaacggagccgggaaatcgaccctgatcaaatgtctctgcggactgcttcggtattcttccggcagcattcttttcaaacagaaggaaatcaacggactcaaaacccatcagatcatcagtcaatccatcgcctacgtgccccagaccaacaacgtattttcaagactcagtgtggagcacaacctcgatctgggaagtttggcccatccgcaaagccatgatcaaaggctggtccatgtgtttgaactctttccggatctgaaacgttatcttgggaaaaaagccgggattctttccgggggccaacggcaaatgctggcaattgccagggccctgatgtcctctccaaagttgctcttactggatgaaccgtctgcagggctttcccctttgttccgcaggcaggtttttgagcacgtcaccaagatcaaagaaaccggggtgacggtggtgatggtggaacagaatgccaaggccgcccttaagatctcagaccggggaatcatccttgctgaaggcaaactccgcctggaaggaacggcagaggaagtcctgcagagttccgagattggagagatttattttggtgcccaaaacgggagtgacacatgat

SEQ ID NO: 269568 - DNA, 863 bp, Unknown
  Bacterial polypeptide expressing nucleotide sequence isolated from the Sargasso Sea
catgcctaaagcaacagaagttattctaaaacttgaaaatcttaagacttactttcctgtaaaaaagggtatcttcagaagaactgtaggccatgttaaagcagttgatggagtggacttagaaatttatcgtggtgaaactttaggtttagtaggggaaagtggatgtggtaaaacaactttgggtaaatccatccttcaattggttaaatcaacttatgggaagattcttctttacgatggagaaaataaaatcgacttaagacaattggatcattccaatatgaaaccaattaggaagaaactccaaattgtatttcaagatccacactcatctcttaatccagcatttaccgtatttggatcacttcaggacttgctaaaaaattttggaactcgatcaaaaactaaaataagggaaaaaattggagatcttcttgaagcagtcaacatgcgaagagatcaaatggatcattatccccatgaattttctggaggccaaaggcaaagaattggaattgctagagcactttgtgtagaaccggaacttatcgtttgcgatgaggccgtgagtgctcttgatgtatcaattcaggcacaggttctgaaattattaaaggaaatcaaagacaaaagaggcttgacatatattttcattacccatgatttaagcgtagttgagtatattagtgatcgggtagctgtaatgtatcttgggaaaatcatggaattggctgaaagtgatgacctctattcgaacgcccttcatccttatacaaaagcattgctctcagcgattccagtcgctgatttagatagaaagaaagaaagaattattttagaaggtgacgtacctaatcctg

SEQ ID NO: 269569 - DNA, 766 bp, Unknown
  Bacterial polypeptide expressing nucleotide sequence isolated from the Sargasso Sea
ttgactgataaactccttcaaatatccaaccttgatattgtactaccagagggttctgaaagggacttggcagtcaaaaatcttaacattgatctttctaatggtgaaacactttgcatcgttggcgaaagtggctcaggcaaatccctaacggcgcgagcgctcatgggcttactcccagcaccccatgttagggttgaaaaagggataatctctttttgtggtgaagatcttaccaaagcttctgaacccagaatgcgtcaaattcgcggtagtgaaatttctatgatttttcaagaaccgatgacggctctgaaccctgtaatgacaatcggcgttcagatcgatgaagtcttcagataccatgccgatatgtcaaaaagtgaacggcgccagcgcgcaattgagcttcttgaggatgttcaattacctgaccctaagcaaatagttgccgcttacccacacgaactctcagggggacaacgtcaacgggcaatgatcgctatggctttagctttagagcctaaaattttgattgctgatgaaccgacaactgctttggatgtaacaacccaagcacaaattttaaaattaatcagtgaaatgcaagcggttcacaaatcgggtgttttatttatcactcatgattttggcgtagttgctgatattgctgaccgtgttgttgtaatgcaatatggaaatgttgttgaaaccggtacagttgataaagttcttaacaaaccagagcacccctatacaaaagctt

SEQ ID NO: 269570 - DNA, 1066 bp, Unknown
  Bacterial polypeptide expressing nucleotide sequence isolated from the Sargasso Sea
aatggctaaagttacattaaaaagtttaagccatagctatttaaaaattcagtcttcagatgctgactgggcaatcagaggagtagacattgattggaatgacgggggtgcttatgctttattaggcccatcaggttgtggaaagacaacattgttgaatattatttccggattaattaccccaactaaaggcgatatattatttgatgacaaagttgtttcaggcttgaatcccgtagagagaaatatcgcacagatttttcaattcccagttatttatgacacgatgacagtgtatgataatttagcgtttcctttaagaaatagaaaaatcccagaagaagaaatcaaagtaaaagttcatgagatagctgaaatgttggaattatcttcaacaataaacaatagagcttctggtttaactgcagacggaaaacaaaaaatttcattagggcgcggattggtaagatcagatgtgaatgctataatgtttgatgaaccattaacagtaatcgacccgcatttaaaatggattttaagatctaaacttaaagaacttcatcaaaagataaataggacaatgatttatgtaacacacgatcaaacagaggctttaacatttgctgatcaagtagttgtaatgcacgaaggtcaaatagttcaaacaggaactcctgtagatctttttgagaaacctaaacatacatttgtgggatattttattggttcaccaggtatgaatgtacttccttgtcaaattaatggaaatgatgtgatcgtaaatggaaaaaaaatagaaacacatcaacaagttaaaaaaaataattttagcaaaacagaagttggagttagacctgaatttatatcttttagcaaagacggaattccagttaaagttttatcagtaagtaatactggaagacataaaattgtagatactgaaagtgaaagtggaaagattaaaataatcgccaaatctaatgagaatattccatcaggttctgcatttttaaaatttaaaaaagaatatacttatacttatggagatagctggataattgaatga

SEQ ID NO: 269571 - DNA, 2767 bp, Unknown
  Bacterial polypeptide expressing nucleotide sequence isolated from the Sargasso Sea
atgacaacacgacacaacacatcgcaaaagaaacagcgcggcttcatcaaggccggcgccggccagcagaacgacccgcgcatcatgcgcgccgcgcaggaagcggcccggccgctcgaagacacgctgaagtcgctgaacaccagcacgcgcggcctcacctacgaccaggccgccgaccgcctgcagcactacggcccgaacgaaatcgcgcacgacaagccgccgcactggacccgccagttgctgctctcgttccacaacccgttcgtctacgtgctgctggtgctggccgccatcagcttcttcaccgacgtctacttcgcggcgcccgacgatcgcgactacgtcggcatgacgatcctgctgacgatggtcacgatcagcgcgctgctgcgcttcgtgcaggaattccgttcgctgcgcgcggccgagaagctgaaggcgatggtccgcacgaccgccaccgtgcagcgtgccatgaccgacacgtccgaaccgacacgccgcgaagtgccgatgcgcgaaatcgtggcgggcgacatcgtgcacctgtcggccggtgacatgatcccggcggacgtgcgcctgctcgcatcgcgcgacctgttcatcagccaggccgtgctgaccggcgaggcgctgcccgtcgagaagtacgacacgctcggcgcggtcgccggcaaatccgccagcacgcgcgcagccgactccgcgaccgatacgtcggcatcgctgctcgatctcgagaacgtctgcttcatgggcaccaacgtcgtcagcggcacggcgacggccgtcgtcgtcgcgaccggcgaggacacctacttcggctcgctcgcgcgcaacgtcgtgagccacaagcgcatcgagacgagcttcgaccgcggcgtcgcgagcgtgagctggctgctgatcaagttcatgttcgtgatggtgccgatcgtgttcatgatcaacgggctgaccaagggtgactggctgagcgcgctcacgttcgccctcgcggtggccgtgggcctcacgcccgagatgctgccgatgatcgtcagcgcgaacctcgcgcgcggcgcggttgcgatggcgcgccgcaaggtcgtcgtcaagcggctgaactcggtgcagaacttcggcgcgatggacgtactgtgcaccgacaagaccggcacgctcacgcaggacaagatcatcctcgagcatcacctcgacctgtcgggctacaaggacgaggagatcctgcggctcggctggctgaacagcttccaccagagcggccagaagaacctgatcgacatcgcggtcgtcgcgcgtgccgacgagatcggcgagcgcgtgaaaccgcaaggctacaagaagatcgacgaactgccgttcgacttcgtgcggcgccgcctgtcggtcgtcgtcgaggacacgcacggcacgcacctgctgatctgcaagggcgcggtcgaggaaatgctggccgtctccacgcacgtgcaggatgaggacggcgtgcgcccgctcgacttcgtcgcgcgcaagcggctgctcgaacaggccagcgcctacaacgaggacggcttccgcgtgctcgtgctcgcgacgcgcacgatcccgcgcggcgacgagcgccagcaataccgcaccgccgacgaacacgacctcgtcgtgcgcggcttcctgactttcctcgatccgccgaaggaatcggcagcgccggcactcgccgcgctgcgcgagaacggcgtcgcggtgaaggtgctgacgggcgacaacccgatcgtcacgatgaaggtgtgccgccaggtcggcctcgaacccggcaagccgatgctcggcacggaaatcgaggcgctcgacgacgcgacgctcgcggaagtcgtcgaacgcacgaccgtgttcgcgaagctcacgccgctgcagaaggcgcgcatcgtgaaggcgctgcaggcaaacggccacacggtcggctttctcggcgacggcatcaacgatgcgcccgcgctgcgcgacgccgacgtcggcatctcggtcgacagcggcgccgacatcgcgaaggaaaccgccgacatcatcctgctcgaaaagagcctgatggtgctcgaggagggtgtgatcaagggccgcgagacgttcggcaacatcctgaagtacctgaacatgaccgcaagctcgaacttcggcaacgtgttctcggtgctcgtcgccagcgcattcctgccgtgggagccgatgctcgcgacccagctgctcgtgctgaacctgatctacgacacgtcgcagatgctgctgccgtgggacaagatggatcccgagttcctgaagaagccgcgcaagtgggaagccggcaacatcagccgcttcatgctgtgggtcgggccgacgtcgtcggtgttcgacatcaccacgtacatcctgatgtggacggtgttcggcgcgggtgcgatgtatcacctgaacggtggcaccggcggccagatcgtgatgaactcgggctggttcatcgagagcctcgtgtcgcagacgctcgtcgtccacctgctgcgcacgcagaagatcccgttcctgcagagcacggccgcgctgccggtgctgctgtcgacgttcaccgcgatcgcgatcggctgctggctgccgttctcgccgttcgcggagtccctcggcttcatgcacctgccgggcaccttctggctgtggctcgcctcgacgatggtcggctacatcctgctcgcgcagatcgtcaagacgatctacgtgcgacgctacaagcagtggctctgaa

SEQ ID NO: 269572 - DNA, 1033 bp, Unknown
  Bacterial polypeptide expressing nucleotide sequence isolated from the Sargasso Sea
tatgtctgaagcagttattaaatgtgagtcagtttataaaatttttggagaaaatgccgaaaaaatgcttaaaaaagccaatggaaacgttgacgcaaaaacttttcaagaaaatggatgtatagtcggagttaacaatgcttcttttgaagtagcaaaaggagaaatgttggttgttatgggtttatctggatcaggcaaatcaacattacttagatgtatttcaagattgacagatgcaacaggtggaaaaatttttatagagggtcaagatttattagagttaaacaacaaagaattaattgatcttagaagaaataaaatgggaatggtttttcagagctttgcactgttaccacacaaaactgttgtagaaaatatagcatttccactgcaaattaagggaattaatactgacgatagcattagtaaggcaatggatatggttaagttagttggactagatggaagagaaaattattttccaagagaactttcaggcggacaacaacaaagagttggtattgcaagatccttagctgttgaaccagatatttggtttttagatgagcctttttcagcattagatcctttgattcgaaaagaaatgcaggatgaatttttaagacttcaagacaaacttcaaaaaactataatgtttattactcacgattttgatgaggctttaaaactagcagaccgaatagcaattatgaaggatggtataattgaacaattagatacacctgccaaaatagttttaaatcccgcaactgaatatgttaggaaatttactgaagaagttcctagagaaaaggttttattaattgaagatgtaatggaacaatccactggtgataatttaggagatttaagagtttcaaaacatgagattatagaaaacgttgctgaaaaaattctaactcaagataaaactgtaggagtaatagataagaataataaagttataggctctatcaaccccacaaagataatcaatacagtctttggtggaaggaaaaatggaaattaa

SEQ ID NO: 269573 - DNA, 1033 bp, Unknown
  Bacterial polypeptide expressing nucleotide sequence isolated from the Sargasso Sea
atgtctgaaccagtaattaaatgccagtctgtttataaaatctttggagcaaacgctgaaaaaatgcttaaagaagcaaatggtaatgttgatgcaaaaacatttcaagaaaaaggatgtattgtaggagttaacaatgcctcttttgaagtatctaaaggtgaaatgttagttgtaatgggtttatcaggatcaggtaagtcaacactattaaggtgtatatctagattaacagacgcaactggtggaaaaatttttattgaaggtcaagacttgcttaatttaaataacaaggaacttattgatttaagaagaaataaaatgggaatggtttttcaaagttttgcactacttcctcataaaacagttttagaaaatattgcttttcctcttcaaattaagggtattaaaactgaagatagtattaataaagcaatggatatggtcaaacttgttggtcttgatggaagagaaaattattttccaagagagttatctggaggacaacaacaaagggttggaattgctagatcattggcagttgagccagatatatggttcttagacgaacctttctctgcattagatccacttataaggaaagaaatgcaagatgaatttttaagacttcaagaaaaattacaaaaaactataatgtttattactcatgattttgatgaagccttaaaactagctgatcgaattgcaattatgaaagatggaataattgagcaattagatacacctgcgaacattgttttaaatccagctactgaatatgtaagaaaatttacagaagaagtaccgagagaaaaagttttattaattaaagatgtaatggatgaaataacatctgacgacatgggagatataaaagtttcaaaagacgagattattgaaaatgttgctgaaaaaatattaacacaagaaaaaacagtagctgtaatagatagcaaaaataatattgtaggttcaattaatcctgcaaaaattattaatacagtttttgggggaagaaaaaataatcattaaa

SEQ ID NO: 269574 - DNA, 976 bp, Unknown
  Bacterial polypeptide expressing nucleotide sequence isolated from the Sargasso Sea
atgtttcttaaagttgaaaacctacaaaagttttatagtaaaaaacttccgttgatcgagaagttaagcttttctgtaaataagggtgaaataatctcgtttattggagagagtggctcaggtaagacaacatttttaaagtgtttagcaggtttagagggaataaactctggtgttattagcttaaatggagaagtacttaataatgataacacttttgttaagcctcatctaagaaaaataggatttgtttttcaagattatcctctttttccgcatattgatgttattcaaaatataactcttaatctagaagaaaaatttcataataaaattgattattttattgaattgacaggtttaaagaatctggaatcaagatatccacatgaattatctggtggagaacagcaaagagtttgtttagcaagagctcttgtaagagaacctgatcttttacttttagatgaaccatttagtaatcttgactcaaatattaaatcttctattcaagatgaaatccatagaattattaaaaaaactcaaactactacgatacttgttactcatgatataagagatacttttaatatatctgataaaattttaatatttaaggcagggattcttcaacaatatgataaaccaatagagatgtattgtaacccagtaaactgttactgtgcaaaaattttgggtgatttgaatcaaataaatacagataataagacatattatttgagacctgaaaatatgaagctttcaaataattcaaaatttaaagcaataattgagaaatcgctctttgttgggaaagaatataaaataagggcaaaagcagataatcaaatttggcatttttttcatgatcaaccaatatcagttaatgaaaaagtatatatagattttgataaaaaagatttattggaatttgattctacgtgtagtaactattttaccataaatagtaaataag

SEQ ID NO: 269575 - DNA, 1081 bp, Unknown
  Bacterial polypeptide expressing nucleotide sequence isolated from the Sargasso Sea
atgtctcaaattaaaatagcaaatttacaaaaatcatttggagattttactgcagtcaaaaactcaaatttaacaattaatgataaagagttttttgttttgctaggcccatctggatgtggaaaaacaacaactcttagaatgattgctggattagagttaccaacatcaggagaaatttacttaggcgaagaagaagttggaatgttaagagcatctgagagagatattgcatttgtttttcaattgttcgcactttatccacatatgaacgtaaaaaataacttatcttttcctcttaaaatgcagggttatagcagaagtgaaattaaaactagagttgaggaggcagcaaaacttttaagaattgatcatattttaaactccagtatttcatctttatctggtggagatagacaacgtgtagcccttggtagagctttagttagaaggccaaaagcatttttaatggatgagcctttaggtactttggatgctgaatttagagaattaatgtgtttagaactcaagaaattacatatcgatattggcgctaccactgtttatgtaacacatgatcaactagaggcaatgtcattagctgatcgtattgctgtaatggatggtggtgaaatcttacaggctgatgaacctgcagtaatctacaataaaccagcaactaaatttgtagcgtcatttattggctcccctggaatgaatttcataaatattgatcaaggcatttctaatgaacaatcgactttaaatatagagggaacaaactttaacatacctaaacagtatgaaatatcaaaaagtaaaaaaaactcatttggtattcgtcctgaaaatttatctcttaccaacgagggtggtcttaaaggttcggtatttggggttgaatatttaggttcaagaaaaattgtaacggttaaaactaattttggagaaattaaagtaaaaactaatatttcaacaagtgttaaaatcaatgaaaacgttcaaataaaaccttctaataataacataattatttttgatggtgagactgacagatctcttaaaagtgagtttatgaatt

SEQ ID NO: 269576 - DNA, 1084 bp, Unknown
  Bacterial polypeptide expressing nucleotide sequence isolated from the Sargasso Sea
catggcagaaatagaaattaaaaatttacataaatcttttggagatttcgtagcagtgaaaaactccaatcttattattgaaaataaagaattcttcgttttactcggtccttcaggttgtggaaaaactaccactttaagaatgattgctggtttagagctaccaacttctggaaatatatatttggataaggaagatgtgggctatctaagggcctctcagcgagatatagcctttgtttttcagctttttgcactctatccacacatgaatgtaagaaataatctggctttcccactcaaaatgcaaaagctctcacgaagcgaagtagatgctaaagttctggaagccgcaaagcttcttagaattgatcacttattaaaatcaaaagtatcctctttagcaggaggtgatcgccaacgtgttgcactcggaagagcgctagtcagaagacctaaagcatttttaatggatgaacctttgggcacacttgatgcagaatttagagaattgatgtgtttggaattaagaaaacttcacgatgatattgatgcaactacagtttatgtaacgcacgatcaacaagaggcaatgtcgatggctgatcgaatagcagtaatgaatgagggagtggtgttgcaggcagactcaccaaaagttatttataataaacctaaaacaaagtttgttgccaattttattggatcaccaggaatgaactttataccaataaaagaaaaaatttcgccaagtcaatctagtattaagttattagactcatcattaaatatccctgaacaaaaagaaggaacagactcaaatgaaaattttttaggtgtaaggccagagaatttaaaattagtttctgaaaatggagtaaaaggcaatgtctttggtgttgagtatttaggttcaaggaaaattcttacaattgaaactcaacttggaaatataaaaattagagttgatagtgacacacaagttaatattaatgagcaaatccaatttgatactcttaataataatcaaataatttttgatggttcaaatgataaggcacttcaaagtgagtttatgagttaa

SEQ ID NO: 269577 - DNA, 730 bp, Unknown
  Bacterial polypeptide expressing nucleotide sequence isolated from the Sargasso Sea
atgagcctctccctggagacggtgtccatcagcctgggcggcaggcagttggtcaaccgcgtgagtcttgatctctcacccggtgaggtggttggactgctgggacccaacggagctggcaagaccaccaccttcaatctggtgattggtttgctgcggcccgataccggtgtgatcagcctcgatggtgaggttgtatcgaccctgtcgatgccaaaacgggccaggctgggactcggctatctgccgcaggaacccagtgtctttcgtcagttgacggttcgtcagaaccttgaaattgccctcgatcagacggatctgagttcgcagcagcgtcgtgatcgccgcgaccagttaatcgaggactttcacctggtggcgtttgtcgatcgctgcggctaccaactgtcgggtggtgaacggcgccgctgtgaagtggcccgggctctggctgtgggttcggagggcccccgctatctgttgctggacgaacccttcgcgggggtggatcccttggcggtggctgatctgcaggagctgatccaggagttgcgctcgcgcgggatggggatcctggtcaccgatcacaacgtccgggagaccctggcgatcacggatcgggcttacatcctcaacgacggatcgattctggccagtgggcagtccgagaccgtggcgaacgatcctcttgtgcgccgtcactacctcggggaggccttccagctgtgat

SEQ ID NO: 269578 - DNA, 586 bp, Unknown
  Bacterial polypeptide expressing nucleotide sequence isolated from the Sargasso Sea
ataggaatgatattaggtttgttaaaacctacaagcggcgatgtattaattaatggattaaaaatagagcaaaatccaattgaaattctacaaaaaataaattttatttctccttatatagaattaccaaaaaaattaactgtaaaacaaaatctaattgtatacggtaaactttattctgtaaaaaatttaagtgaaaaaattgattatttagtcagcaaattaagattagagaatttacttaacagggttactggagaattgtcatctggacaaaagaacagaataagtctagcgaaagcaataattaatgatcctaatgtattattgcttgatgagcctacagcatcattagatcctgaaataggagattttgttagaacatttttagaaaattataaaaaagaaaaaaaagtatcaattttactagcctctcataacatggacgaggtcactagattgtgttcatcaataatgatgatgaaaaacggcttaataatagatcaaggtagaccaaatgacttaattaaaaagcatggtaggaaaaatttggaggaagtttttttaaagcttgtaagaaattaaa

SEQ ID NO: 269579 - DNA, 751 bp, Unknown
  Bacterial polypeptide expressing nucleotide sequence isolated from the Sargasso Sea
atgaaaaaaattttaaaaattaatgatatatacaaaaactttggtggtattgaagttataaaaaattttagtctatcacttgactcaggttcaaaagtcgctttgatcgggcccaatggggcgggaaagactacgattttcaacttaataagtggtgtttatccaattgatagaggtagtataataattaatgataaagatattacttctctgcctgcatacaaaaggattaggtttggaattgctagaagttttcagaatataaggttaatgccgcatttaagtgtaatagaaaatgttctgatgggccaacatgctttggcatcaaattttgccacattatttagaccaatacattttggggaaggttctaaagataaattagaggcaaaaaacttgctagataagtttggaattaatgttcctcctgaagaaattgtatctaatctcccatatggcttacagaaaaggattgaggtagtaagagctttaatggctaagccttcacttctattattagacgaaccaactgcaggtttgaataaagaagagtctgatcaactatcactgatgcttaaccaaatttctagtgacggaactactatattactagttgagcacaatatgagatttgtaaataattttgtagaacatacggttgtgcttaattttggtgagaaaatttatgagggaccccctcttttagcgcagaaagataagcaagttagagaagcatacttaggaaaatgat

SEQ ID NO: 269580 - DNA, 922 bp, Unknown
  Bacterial polypeptide expressing nucleotide sequence isolated from the Sargasso Sea
agccagacgtccgatcagccagccaatggacgtgggggtgcgtgctattaattcagtgatcaccgtagggcaaggtcagcgtatgggcttatttgcaggctctggtgtaggtaagtctgtactgctaggaatgatgaccaggggcagcgaagccgatgtcattgtagttggtttggttggtgagcgtggtcgtgaggtcaaagagtttattgaagaaattcttggagaagaagggcgtaaacgttctgttgttgttgcagcacccgccgattcatcgccattaatgcgtttaaaaggctgtgaaagtgcagtgaccattgccgaatattttagagaccaaggtttaaatgtgttactgctactcgattcagtaactcgctacgcaatggctcagcgtgaaattgctttagcagttggagaaccaccggcaacaaaaggatacccaccatcggtttttgcaaaactaccagccttagttgaacgagctggtaatgggggggaagggcaaggtgctataacagcctttttcaccgtcttaagtgaaggcgatgatatgcaagacccaattgcagacgctgcacgcgccatactagacggccatattgtactttctcgtgagttagccgacagcggccattatccagcaatagatatcgaaaaatctatatcacgtgttatgccccaagtggtttcagagcctcatatgcaacaagcgcgagtacttaaacaagtgtattcaatgtaccaacaaaataaagacatgatcacattaggcgcctatcaaaagggcactgaccccatgctcgaccaagcaataaatatgatgccaagagtaaacgggtttttacagcaaggtatgcgtgatgtgataagttatgacgatgggctgcaagggctagcccaattattaggtcaagggtaa

SEQ ID NO: 269581 - DNA, 754 bp, Unknown
  Bacterial polypeptide expressing nucleotide sequence isolated from the Sargasso Sea
atcgaaaaactcaccaaatccttcggaggactgcgtgcgatccagcaactttccatggaagttgaagcaggagaaatccatgccgtcatcggtccgaacggagcaggaaaaaccaccctgattgcccagctttccggatccctcaaaccagattccggaagaatactctttgaacatcagaacattactcacgtccctgaataccggcgcagcgccctggggctggctcggtccttccagatcacaagcgttctcaaaaatttttccgccttggacaacgtggcccttgcggttcaggcccacgcaggacactcgttccgtttctggagtaaagccaggaaggctcaggaattgagggaaccggccctcgaaatccttgaaaaaatcggccttacggaccggatcgacatgcctgcctcaagcctcagtcatggtgagcagaggcagttggaactcgccatggctttggcaacacgtccaaagctgctcctgctggatgaaccgatggccgggatgggcgttgaggaaagccaaaaaatggtggagttgctccaggatctcaaaggcacccacaccctggttctgatcgaacatgacatggacgctgtttttgccctggcagaccgtatcaccgtgctggtttatggagagtccatcgcctgcgatacacctgaaaacatccgttccaacccggaagtccgaaaagcctacctcggtgatggcgaagccctcactgaaatcgaagaagtctgaa

SEQ ID NO: 269582 - DNA, 580 bp, Unknown
  Bacterial polypeptide expressing nucleotide sequence isolated from the Sargasso Sea
cttggaagaaggtcaatctttagcaataaccggtccctctggttctggaaaatccacacttttaggattgcttgctggtttagatagtgcgtcaagtggaacaatttttttagataacataccgatccatgaacaagatgaacaagaaagggctttgattagaaaagaaaaagttggatttgtattccagtcttttgaacttcttccaagcttaactgctcttgagaatgtcatgctcccttctgaattaaagtctgaagcagaccccaaaagcaatgccgaatactttctggaaagagttggcttaaaagatagacaacatcactaccctaatcaattatcaggcggtgaacaacaaagggttgctatcgctagggcttttgcatgttcatcgaaaatattatttgccgatgagccgacaggtaatctagattctaagaacggaaagctaatatcagatttattatttgaagtgaattcagaaacagacaatgccttggttgttgttactcatgatcatgatttagcaaaaaaatgtgataaaactataagtcttcaattaggaaaaatagtcgaataa

SEQ ID NO: 269583 - DNA, 739 bp, Unknown
  Bacterial polypeptide expressing nucleotide sequence isolated from the Sargasso Sea
aatgtcaaattcaattgaagtaattaatttatcaaaaaaatacaaatcaaaagaagctgtcaataatattaatttcaaaataaatgaaaatgaaattgttggtttattaggtccaaatggttgtggaaaaactacaacaattggaatgatacttggtctattaaaacctacgagtggtaaagtcttaattaatggaatggatattgaaaaaaataaaatttcacttcttaataaaatgaattttatttctccatatattgagctaccaaaaaaacttactgttagacaaaatttaattgtttatggaaaattatataacattaaaaaaccaaatgaacgaattcgctatttgtcaaacaaattgagattaaatgaacttttagataaaattactggagaactttcttcaggacagaaaaatagagtaagcttagctaaagcattaattaatgatccatcagtacttttacttgatgagcctacagcatctttagatcctgaaactggagattttgtaagaacatttttagaaaattataaaaaagagagaaagatctcagtattactagcttctcataatatggatgaggtcaaaagactatgtagcactgtactgatgatgaaggatggctcaattgttaatagtggtacaccagatcatttaattaaaaaatatggaagaaaaaacttagaagaagtttttttagaaattgcgagaaataaaaatgaatttaattag

SEQ ID NO: 269584 - DNA, 703 bp, Unknown
  Bacterial polypeptide expressing nucleotide sequence isolated from the Sargasso Sea
tatgattgattttcagcaggtcagtaagatttatcctggtggccaaatggcgctggaggaagtgaattttcacctacaaaaaggtgaaatggcattcttaaccggccattcgggcgcgggtaagagtaccctgttgaaattaatcacagtgatcgagcgcgcaaccactggccgtgtggcgattaatggtcacgatattgccaaaatcagccctaaacacgtgccctatttgcgtcgtaatattgggatgattttccaaaaccatcatctattgatggatagaagcgtattcgacaacgtcgccttaccgttagtgattgaaggtttttcccatggcgagatccgcaaacgtgtcgctggcgcgttggatatggtgggtttgtatggcaaagagcgccataaccccatcatgttatccggtggtgagcagcaacgtgttggtatcgcccgcgccattgtgaataaaccgccactattgctggccgacgagccaacgggcaacttggatcctaagttgtcgatggatattttgcgcttattcgaaacctttaacgatgcaggcactagcgtgcttatcgctacccacgatttaggactgatcgcgcggatgaagtatcgcactttcaccctgaaacaagggcgcatgctcggcgcacaggaattacaccatggacacgcgaccgctcgaggtgatgggctatga

SEQ ID NO: 269585 - DNA, 1039 bp, Unknown
  Bacterial polypeptide expressing nucleotide sequence isolated from the Sargasso Sea
atgccaaaaaactccgtaacaatctcttgtaaaaatgtttggaagctttatggatctaatccttcaaaatttctagcaagcaaaaattttagcccttctatagctgaattgaaggaatctcattatattcctgcagtctttgatgcttctattgatgtcattgaaggagaaattctagttattatgggcctaagtggctcaggtaaatcaagtttagttagatgtatgactagacttattgaacctacaagtggtgagatctattttgaggggtctgatttacttaaagcaactgaaaaagaattaattgaaataagacgacataagatgggtatggtttttcagaattttgcattaatgccccatagaaatgtattagacaacatagcttttcctttagaagtccaaggtgttaatagagatcaaagagaaaaaagagcattagaaataatagatttagtaggtcttactggaagagaaaaatactacccaagagaattgtctggtggccagcagcagagagttgggttagcaagatctttggcagttgagccgaatatttggtttttagatgaacctttttctgcacttgatcccttaataagaaaggagatgcagaatgaatttattagacttcaaaatcttctaaataaaacaattgtttttataactcacgattttgatgaagcaattagactcgcggatagaatagcaattatgtatgagggtagaattgtacaaattggtagtgcagaagagttaataacaagtcctgctaatgattatgttgcagaatttactaaagatatacctagagctaagcttttatcagttgggtcaattatgaaaccaacaaaaaaaaataacaaaagtggttttaccataaacaaaaacgataagatttcatcagtggcacccaaaataatctcatcaaattctatagcaactgttgtagatgatagtggcaagatatgtggagaattaactaaggatcaaattatagatatcctttttattgataaacaaaataatgcataat

SEQ ID NO: 269586 - DNA, 695 bp, Unknown
  Bacterial polypeptide expressing nucleotide sequence isolated from the Sargasso Sea
aatgacctctctattatctgtaaataatcttggggtaaaatttcagagcgatggatcagaggttattgctgtcgatggaattgattttgaaattaacaagggagaggtcttagccttagttggagaaagtggatctggcaaatcagtttcggccctctcaatactttcgttgctaccaaataatgcggatgtttctggctcgattaaacttcaaggcaacgaattactgggcattagtcataaagaactcaaaagtgttcgtggtagtgaggtcagttttatttttcaggagcctatgacatctttgaatccacttcacaccattgaaaagcaactacgtgaagcggttgaactgcatagtgctgcgtattttagtaatactagagaatatattgttgagttgttgacgcgagtcggcatagatagtccgagacaaaggctaagtgcttaccctcaccagctatcgggcggtcaacgtcagcgtgtaatgatcgcaatggcactcgcaaataacccgaaaattttgattgcggatgagccaacaacggcgctggatgtcactattgagtcgcaaatattagatttgcttgttgaattgagaaaagataccgagatgggaattctttttattacgcacgatctcgggctagttaaaagattagcaaatcgagtttgtgtgatgaaaaatggaaaaa

SEQ ID NO: 269587 - DNA, 1086 bp, Unknown
  Bacterial polypeptide expressing nucleotide sequence isolated from the Sargasso Sea
aaccaatgtacctgagtcaattttattttatagacaataccttcagtggcttggtggtcttggtattatagttttagctattgcaatattacctactcttggtatcgggggtatgcagctttacaaagcagaggttgcaggcccattaaaaaataaacttactcctagaattactgagaccgcaaaagcattatggttcatttattttcttttaactctaacttgtatgttattgtattggcttgctggaatgtctctttttgacgcaatctgtcatagtttttcaacaatatctattggtggattttctactcacaatgacagctttgaatttttcaataatcactttatagagattgtagcaattgtatttatgttgttagcgtctttaaattttagtcttcattacttagcattttccaaatttagtataaagccttatatacaggataaggaatgcaattatttcttttatataattttgttcataacaagcattagtgttttatatttttttcaaaatacacatatagtcgactataataaaattattaaaaatgttttccaatctgtatctattgtaacaaccacaggatttacaaactcatcttatggccattttattggatttcttccaatatttttaattctatttagctttattggtggttgtgctggttctacagctggtgggatgaaagtaatacggttttctttattaattaaacaaggaaatagagagttgaaaaagctactgcaccctaatggaaagtttaatgtaaggcttggggaaagtcttgtaaatcaaagaatgatggaaactgtttggggtttctttgcagtctatatttctgtatttataattgtgatgatgttgctaatgtattcaggcttggatttagaaacctctttctcagctgttgctgcaacaattaacaatcttggcccgggtcttggagaggttgtaaatggttataataatttgtcagattttaataaatggctattaagcttcagtatgatagttggaagattagaagtatttacattgctagttattctaactcctgagttttggagaaagta

SEQ ID NO: 269588 - DNA, 667 bp, Unknown
  Bacterial polypeptide expressing nucleotide sequence isolated from the Sargasso Sea
tatggaattattgctatcagctaaaggtatttcaaaaagttttcaaggcagaaaagttcttgatgacattgatattgaaataaaaaaatctgaaattattgcaatatcaggtgcttctggtgcaggtaaaactactttattaaatatacttagtacacttgacacacccgatgaaacaactaattcatcactaattattgatggagaaaatatttttaatctaaataatagtgatttgtccaaacttagaaatacaaagattggatttgtatttcagttccatgagttaattccagaactaaatgtcatggaaaatatttgtcttcctggatggattaaaaatgacagtaaagtaactgacaatgcaaatagcctaattagctattttggtttagataaattaaaaaataaaaaaccaaatacactttctggaggagaaaagcaaagagctgcaatagctcgagcaatgataaataacccaaagattatttttgctgatgaacctacaggtaatcttgattcaacaaattcaaagattttatttgatatattttttaaacttagagatgattatgattgttcgattgtaattgtaactcataatccagaaaatgctaaaaagtgtgatagaaaacttcaaatagttgatggtaaaatcaaaatttaa

SEQ ID NO: 269589 - DNA, 734 bp, Unknown
  Bacterial polypeptide expressing nucleotide sequence isolated from the Sargasso Sea
aatgaaactacatgcaattcaaatagaaaaatcttataaatcaagaaaagttgttgatggtgtagatatagaattaaatcaaggagaaattgttggtttattaggtccaaatggagcaggtaaaacaacatgtttttacatgattgtaggattaataaaatctaattctggaaaaattttaattgacgatattgatgtttctgacgacccaatgtataaaagagctataaatgggataggatatcttgctcaagaagcttctgtatttaggaaactaactgttgaggataacataaaagctgttttagaattaggagatctttcaaaagaggagcaaaataagaaacttgaaagtttgatcgatgaatttagcttaaataaagtaagaaaaaatcgtggtgatttactttctggtggagaaagaagacgaactgagattgcaagagcattagctactgaccctaaatttttgttattagatgagccatttgctggagttgatccaatagctgttgaggaaattcaaaaaataatatcacatttaaaaactaagaacataggtgttttaataaccgatcataatgttcaagaaactttagcgataactgacagaacatacttaatgttcgaaggtaaaatattaaaaagcggtaaaccagaattactagctaaagatgaaatagtaagaaaattatatttaggaaaaaactttattttcaggaaaaaaaatatat

SEQ ID NO: 269590 - DNA, 310 bp, Unknown
  Bacterial polypeptide expressing nucleotide sequence isolated from the Sargasso Sea
tatgattgatttagaaataaaagatttaaaaaaaagttttggtagtgagtttatattaaaaggtctttcttttagtgttaattcgcaaagtttattagcaatcatcggttctaatggagcaggtaaatctaccttgctgagatgctgcagccgcttaattgaaccatcgagtggaagtattaaaatttttgacaaggaaataacaactttaaatagtcataagctaggtcaaatacgaagagacgtagcgtttatttttcaacggcataatttagttcctcgactaagtgtgttatcaaatgttattcat

SEQ ID NO: 269591 - DNA, 490 bp, Unknown
  Bacterial polypeptide expressing nucleotide sequence isolated from the Sargasso Sea
tctcttctggcgagttttcctaaataaaattcccttacatgagcttaatgaagaagagagagctaaagtaagaaaagaaaacgttgcctttgtcttccaatcatttgagctgcttccaagcttaactgcgctagaaaacgtaatgctgccttcagaactaaagtccaggaaggaccctgaaagtagtgccgaatactttctagatagagttggtttaaaagatagacaacatcactaccctaatcaattatcgggcggcgaacaacaaagagtagcaatagcaagagcttttgcttgttcttctaaaatattatttgcagatgaaccaacaggaaacttagatccaaaaaatggaaaattgatatcagatttattatttgaagtgaatgccgaatctgataatgcattggttgttgtaacgcatgaccatgatttagcaaaaaaatgtgataaaactttaagcctaaaattaggaaaagtagctcaataa

SEQ ID NO: 269592 - DNA, 659 bp, Unknown
  Bacterial polypeptide expressing nucleotide sequence isolated from the Sargasso Sea
gctgattgacgatctgaccttctcggtaccgaaaggggcaatcgtcgggattatcgggcctaacggcgccggtaaatcgaccctgttccgcatgatgtccggtcaggaacagcctgatgccggttctatcaccctgggtgaaaccgtgaagctggcttccgtcgatcagttccgcgacgcgatggataacagcaaaaccgtctgggaagaagtctccggcgggctggatatcatgaagatcggcaacaccgaaatgcctagccgcgcctacgtcggtcgctttaactttaaaggcgtcgaccagggtaaacgcgtgggcgaactttccggcggtgagcgcggtcgtctgcacctcgctaagctgctgcaggttggcggtaacgtgctgctgctcgatgaaccgaccaacgacctggatatcgaaaccctgcgcgcgttagaaaacgccctgctggagttcccgggatgtgcgatggttatctcgcatgaccgttggttcctcgaccgtatcgcgacccacattctggattaccaggatgaaggtaaagtcgaattcttcgaaggtaacttcaccgagtacgaagagtacaagaaacgcaccctcggcgccgatgcgctggagccaaagcgtatcaagtacaagcgtattgcgaagtaat

SEQ ID NO: 269593 - DNA, 712 bp, Unknown
  Bacterial polypeptide expressing nucleotide sequence isolated from the Sargasso Sea
aatggctaaaattactttaaaagatttaagtcatagttatttagaaaaacaaaatagtaatgctgactgggctcttagagaagtcaatattgactggaaaaatggaggtgcatatgcacttttaggtccctctggatgtggcaagactactttattaaatattgtatcaggattattaaaacccacaaaaggtagcgtgttgtttgatgataaagatataacagcctttagtcctgttgaaagagatattgctcaaatatttcagtttccagttatttatgacactatgacagtttatgataatttagcgtttccattaaaaaatagaggtctttctgactcagaaatagtttctaaagttaaagagatagcagaaatgctagagttaacatccactttaaataatagagcatctggtttaactgctgatggtaaacaaaaaatttcattgggcagaggccttgttagatcagacgtaaacgtaattatgtttgatgagccattaactgttatagatcctcacctaaaatgggttttaagatcaaaattaaaggaattacatcaaaaaattaatcgaactatgatttatgtaactcatgatcaaactgaagcattaacttttgctgatcaagttgtagtaatgcatgaagggcaaattgttcaaacaggaacaccagtagagctctttgaaaaccgaaacatacatttgtag

SEQ ID NO: 269594 - DNA, 652 bp, Unknown
  Bacterial polypeptide expressing nucleotide sequence isolated from the Sargasso Sea
aatggaaaacctcatcttagaaattaaagacttgaatcatgcttatgagaagtctgacttaacaataaaaggtcttaatttaaatatttcaatcggagaaaaagtttcaatattaggtccttcgggatgtggaaaaagtactttattacgacttattgctggtttagaaaaaccaaaaagcggtgaaattattaagaaagccgaagttatgaccagtgacaaaatatttattcctcctgagaaacgaaatgttggactagttgttcaagagaaagctctttttcctcatttgtctgtttatgcaaatatttgctttggtattcagagaaacaaagataaaaacaaaattgtatcggatcttctagagctcttaaaaatagattctcttaagaataagtaccctcatgaaatatctggaggcgaacaacaaagagttgctcttgctcgatctcttgctcctaatccagatttactgatgttagatgaaccttttagcgcactagatgaagagcttagaaaaagtctatatgaggaagtatcgaatgttttttctgatatgaattcaagtattcttttagtaactcatgatgcttatgaagctgaggtcatgactgataaacagttaagaatggaaaaaggtaatttaatttag

SEQ ID NO: 269595 - DNA, 709 bp, Unknown
  Bacterial polypeptide expressing nucleotide sequence isolated from the Sargasso Sea
aatggctttttttgagggaaataaaatgactggtggctatgacgatggaccagatataattaattcatgcacaattaacgcaaataaaggtgaaattgttgcaattttaggtccaaacggagcaggcaaatcgacagcaatgaaagcaatgttgggtttaataaatttgaaatctggaaatattatcattaatggagaagatatctcaaaattatctccacaagacagagttaaaaaaggaatttcatttgtgccgcaaacaagaaatgtattttctgaactaaccgtgcaagaaaatttggaaattggagctttcctaagagaggatgatatatctaaagtgatagaggaaatttatgacttgtttccaatattaagagaaaaaaaaactcaaatagttggacaattatccggaggacaaagacaacaagtcgctttgggaagggcattaatgaccaaaccttctgttttgatgcttgacgaacctacagctggagtttcaccaattgttatggatgaattatttgaacatattcttagagtaaaaaaaacacaagttgcaataataatggttgagcaaaatgccaaacaagcattaagtatttctgatcgcggctatgttttagtaactggagaaaataaatttgaaggttcgggtgaggatttgttaaacgatcaagaagtaagaagatcatttttaggagcataa

SEQ ID NO: 269596 - DNA, 772 bp, Unknown
  Bacterial polypeptide expressing nucleotide sequence isolated from the Sargasso Sea
atgtcaaataaataccttgaagttaaaaatctaaaaaaaagttttggtgggattaaagctgttgatgttgaaagtcttaatttaaacagaaatgaattaacttcaatcattggtccaaatggagctggaaaaacaactttctttgatttaatttctggattccaagacagtgatgaagggaaagtttatctaaacaacaaaaatatcagcaaaagtcagccctacgcaattgctagattaggaatgattagaacttttcaattaacaaaagtttttgatcggatgacagttttagaaaatatgatgttttcagcatcaactgttaataacgattcatttttaaaatccctagctaaattaccaagtcaaaaaacgactgaaaaaaaaattagagacaaatcatttgaaattatgaaagaattaaatattgatcatatggcaaattcttatgcacgagaaatgtccggaggtcaaaaaaagttattagaacttggtagatcaataataaataatccaagtgttttattattggatgaaccacttgctggagtaaatccaaaacttgcagaagagatacttcaaattattctaaatcttgcaggaaaaggaatttcgatattaatggttgagcacaatatcgaagcagtaatgaaaatctctgaacgggtcatagtattagctgagggaaaagttattgctgatagtactccagaaaatataagaactgatgaaaaagtaatcgaagcatatttaggatccgaaaatgaataaa

SEQ ID NO: 269597 - DNA, 1033 bp, Unknown
  Bacterial polypeptide expressing nucleotide sequence isolated from the Sargasso Sea
atgtctgaaccagtaattaaatgccaatctgtttataaaatctttggagcaaatgctgaaagaatgcttaaagaagcaaatggtaatgttgatgcaaaaacatttcaagaaaaaggatgtattgtaggagttaacaatgcctcttttgaggtatctaaaggtgaaatgttagttgtaatgggtttatcaggatcgggtaagtcaacattattaaggtgtatatctagattaacagacgcaactggtggaaaaatttttattgaaggtcaagacttacttaatttaaataacaaggagcttattgatttaagaagaaataaaatgggaatggtttttcaaagttttgcgctacttcctcataaaacagttttagaaaatattgcttttcctcttcaaattaagggtattaaaactgaagatagcataaataaagcaatggatatggtcaaacttgttggtctcgatggaagagaaaattattttccaagagaattatctggaggacaacaacaaagggtaggaattgcaagatcattggcagttgagccagatatatggttcttagacgaacctttctctgcattagatcctcttataaggaaagaaatgcaagatgaatttttaagacttcaagaaaaattacaaaaaactattatgtttattactcatgattttgatgaagccttaaaacttgctgatcgaattgcaattatgaaagatggaataattgagcaattagatacacctgctaacattgttttaaatccagctacagaatatgtaagaaaatttacagaagaagttccaagggaaaaagttttattaattaaagatgtaatggatgaaataacctctgataacatgggtgatataaaagtttcaaaagacgagattattgaaaatgttgctgaaaaaatattaacacaagaaaaaacagtagctgttacagatggcaaaaataatatcgtaggttcaattaatcctgcaaaaattattaatacagtttttgggggaagaaaaaataatcattaaa

SEQ ID NO: 269598 - DNA, 730 bp, Unknown
  Bacterial polypeptide expressing nucleotide sequence isolated from the Sargasso Sea
aatgacaaattctatcgaggtaataaacctatctaaaaaatataaatcaaaaaatgctgtaaataatataaattttaaaattggtgaaaatgaaattgtcggcttattgggtcctaatggttgtggaaagacaaccaccattggaatgatattaggattactaaaaccttctagcggtcaagttttaattaatggaaaaaatatagagacaaacaagatatctctattacataaaatgaattttatatctccttatattgagcttcctaaaaaattaaaagttaaacaaaatttaattgtttatggaaaattatataatgttgatgatttagaaaatcgaattgagtatctttcagatcaacttaggctaactgaccttttggataaaataacaggtgaactttcatcgggacaaaaaaatagggtcagtttggcaaaagctttaataaatgatcctacagtgctgctactagatgagccaacagcttcactagatcctgaaacaggagattttgtaagaacatttttagaaaatttgaaaaaagaaaaaaaaatttcagttttacttgcatcacataatatggatgaagttaaaagattgtgtggttctgttttaatgatgaaagatggaattattgtagatagtggaacgccaaatgatttaatattgaaacatggaagaaaaaatttagaggaagtttttttggaaatagcgaggaataaaaaatga

SEQ ID NO: 269599 - DNA, 622 bp, Unknown
  Bacterial polypeptide expressing nucleotide sequence isolated from the Sargasso Sea
tatgagcttagaagtacagaatctatcgtattcatttaagaataatctcttaataaaagggttaaattttaaaattgaaaaaaacgaggttggcttcgtaagtggctctagtggtgttggaaaatctaccctcttaaatattatctctggcttgaagagaccagactcaggttcaataatttgtaataacaatttttttaatggtgatgggtcgtttgttcaacctgagaaaagaaacattggttatgtttttcaagactttgcattattccctcatatcaatgcagaaaaaaatattaaatatggaatgcatcaagataatataaatttttttgatgaggtggttgatacgcttaacctaaaaaaacatataacaaagatgccacatgaactttctggcggtcaacaacaaagagttgcaattggcagagctattttaataaaaccacaattaatactacttgatgaaccattctctaatcttgataaagcaaatgttaatttggtaaaaagattaatagtaaaggttatagaagatttacaaataccctgccttcttgtaacacatggatcaagtcaatctgatttaggcttaatgtcaaaagagattattatttcttaa

SEQ ID NO: 269600 - DNA, 588 bp, Unknown
  Bacterial polypeptide expressing nucleotide sequence isolated from the Sargasso Sea
catgatcaagcttaatggagtaagcaaacagtataataatcactgcgcgcttaacaatattgatttagaaattgactcgggaaacatggtctttttaacgggccactctggcgctggaaaatcaacactactaaaattaattctcgctaccacccaacctaatcaaggacaaatttgtgtcgacggaaaaaacctctgtcggttgccagaacgacacatcccagagcatcggcgtaaaatagggaccgtatttcaaaaccctcgcctgctcccgaatcgcaccatttatgataatgtcgccctccccctggttatcgctagctactcgccaggagaaattaaacgccgagtgagagcggccttagataaagtcggcttacaaaataaagaaagcttattcccaatcgagttatcctacggcgaacaacaacgtgtgggcattgccagggccgtagtcaataaacctaagatcctgcttgccgatgagcccacaggaaaccttgacccgcatttatcgactgacattctcaatctgttcaccgcctttaatgccgttggcgtaaccgttatcattgctacccacgacct

SEQ ID NO: 269601 - DNA, 1438 bp, Unknown
  Bacterial polypeptide expressing nucleotide sequence isolated from the Sargasso Sea
gttgcaagagcacgaggacgccgccgtggatctcgacatcgagaggcgcgttcgcgagattcacgatgaactcaaagccatcggcgcatcggacgcgcacgaacgtgccaggaaagtgctcagaggactacagtttagtcccaaacaaatggagcgtccagtctccacgttgagcggcggttggcgcgttcgcgtgtcgctcgcgcgggcgctgtacgtgaatccagactgtttactcctcgacgagccgacgaatcacttggacctggaggcgtgtctttggctcgaacagtacgtgtgcgacgcgttcgaaggccgaacgctcgtcgtcgtctcgcatgatcgctcctttttgaacgccgtgtgcacagacattctgtcgatttcaaacaagaagctcaccgcgtacgccggtgactacgccacattcgaagccgtaaggaaggagcaacacgcgaggcagcagaagatgtacgacgagcagcaggcgtcgaagaagaagatggaaaagttcatcgacaagcacttgcacaaaggttcgtcgtccatgtttgacgatggaaacgcgaaaaaggcgaaagagatggcgaagaaaatggaacgcatgggcgccatgggtcacgacggtaagaagtggaaactgtcctacgacggcgcgcagaaggagctcacggctcccgagacggaaacggggagtttcaaattcagttggcccgatcccggtcccatcggcgcaaacgagagcattcaattccgagacgtgtgtttcaagtacgacaccgaagattcgatgacgctcttcaagaagctctcgttccctttcgattgcaacacgagactcgcgctcgtgggtaaaaacggtgcgggaaaatcaacgctcatgaaattagtcgtcggtggtgccggcggtttggaaccgaccgcgggcaacgtgtttcgcagcgccaagctccgcgtcgcctacgtcacccagcaccacgtcgaccaactcgacctcgcgatgacgcctctggaatacgtcctccacgtctccggcgtcgagcgttcgtcctccatgtcgcccgaacacgagcaggacgctcgtcgtcgactcggtcggttcggcatcagcggctcgctgcaaacgcaaaccatcggcttattatccggcggtcaacgctcgagagtcgcgtggacggtcgctacgtgggaccatcctcatctcctcctcctcgacgaaccgaccaaccacttggattacgaatccgtcgacgccctcgtcgacgccgtgaatgcgtttcccggcggtatcgtcttcgtctcccacgatgaatattttgtcaccagcgtccgcgacgtcatcgtcctcgagatcaccggcgacggcgagccgggcgccgtctccttcgacgatgacttcgacgcgtacaagagaaaagcgctgaaaacgctaaaaaag

SEQ ID NO: 269602 - DNA, 735 bp, Unknown
  Bacterial polypeptide expressing nucleotide sequence isolated from the Sargasso Sea
tatgtctgaaccagtaattaaatgtgaagctgtttataaaatttttggagaaaatgccaaaaaaatgcttcaagattcaaatggcaatgtagacgcaaaaacttttcaagaaaatggatgcatagtaggtgttaacaatgcttcatttgaagtttcaaagggagaaatgttagttgtaatgggtttatccggatcaggaaaatcaactttgctaagatgtatttctagattaactgatgcaacaggtggaaaaatttttatagaaggtcaagatttacttcaattaaataataaagaactaatagagcttagaagaaataaaatgggaatggtttttcagagttttgctctacttcctcataaaactgttgtagaaaatattgctttcccactccaaattaagggaattaaaactgaagatagtattagtaaagcaatggatatggttaaacttgttggtcttgatggaagagaaaactattttccaagagaactttctggaggtcaacaacagagagtaggtattgcgagatcattagcagtagagccagatatttggtttttggatgaacctttttctgcattagacccactaattagaaaagaaatgcaggatgagtttttaagacttcaagataaattacaaaaaacaattatgtttattactcatgattttgatgaggctctaaaacttgcggatcgtattgctattatgaaagatgggaataatgaaca

SEQ ID NO: 269603 - DNA, 478 bp, Unknown
  Bacterial polypeptide expressing nucleotide sequence isolated from the Sargasso Sea
atgagccaattaaatccatcagaaatatctagcgttctaaaagagaagatagcaggtttagacttgtctgccgaaagaaaaaatgaagggataattgtaagtgtttcagatggtattgtcagaatccacgggatgggcgatgttatgtatggagaacttattgagtttgaaaatggagttcttgggcttgcgttaaaccttgaacaagattcagtaggcgctgttgttttgggtgattaccttgatttggttgagggccaaaaagttgtttgtacaggcaaaattctagaagtaccggtaggagagtctttattgggaagggttgtaaacgctatcggtgttccgattgacggcaaaggagaaataaaagcagagtcttcatcaccagtagaagttgttgctccaggggttattgcaagacagggtgttgatcagccggtccaaattggtcttaaagctgtagactcaatgggtccta

SEQ ID NO: 269604 - DNA, 373 bp, Unknown
  Bacterial polypeptide expressing nucleotide sequence isolated from the Sargasso Sea
atgaataaaaactttatcgaaataaaaaatgtctcaaaatattttggaaatgtgaaggctgttgatgatgtttctttttcaattaaacaaggagagttcttctcgctgctcggcccctcagggtgtggaaaaacaacgcttctaagattgcttgctggctttgaatatccgaattctgggcaagtatttattgatggatcagatgttacatccctagcgcctaatttccgcgactcttgtatggttttccaggcgtatgcgatttttcctcatttaaacgttagaaaaaatattgaatttggaatgagaaaagaaaatttaagcaaagaagaaatggaagatagagttggtgaggtaatcaatttaacccaag

SEQ ID NO: 269605 - DNA, 705 bp, Unknown
  Bacterial polypeptide expressing nucleotide sequence isolated from the Sargasso Sea
aatgaataaatttaatattttaaatgatgggctttttgtaaacaaagtttcaaaatcatatggaaataaaaaggttattagagatataagtttaaatattaatagtggtcaaattgttggattacttggtccaaatggtgctggcaaaacaaccacattttactctattgttggattaattaaaccagataatggttccatatatttagataaagttgatatttcaaacttgcctatttatgcaagaggaaaaaaaggaattagctatttaccccaagaaccatcaatttttagaggtatgaacgttgaagataatttattagctgtaattgaaatgattgaaaaagataaatctaagcaagaaattatattgaataatttattaaatgaatttgatattcatcatgtgaaaaaatcaaaatcaatagtattatcaggtggggaaagaagaaggctagaaatagctcgtacagtagcttcaaaaccaaaatatttattattagatgagccacttactggtattgatcctgtatctattgaagaaattaaaattataattcaaaaactaaaacttaaaaatattggagtactaataactgatcataatgtaagagagacacttaaaatcgttgataaagtttatatagttaatgaaggggcaattttctttgaaggtcatccaaaagaagcaattcaaaatgataa

SEQ ID NO: 269606 - DNA, 760 bp, Unknown
  Bacterial polypeptide expressing nucleotide sequence isolated from the Sargasso Sea
atgagtttgtttgaagtaaaaaatatcactgtagcatttggaggcgtgaaggctcttaatgatgtatcgttcggtgtcgacaaaggtgaaatatttacaattattggtcctaacggagcaggtaaatcaacactcttcaatgtaataagcagaatctatgagccaagcaaaggcgagatatattttgaaaatcaaaatatctcaaaaactaagcctcacaatatatcaaagcttggaatagccagaacatttcaaaatttagaattatttgaaaatgcaactgttctacagaatttacttcttggacgacacatttataaaaaaacaaatattttatctgaggtattttttacacccagtgcccgtaaacaagaacatgaatacagacttaaagttgaagaagtaattgacttcctagaccttcaacattaccgagatactcttataaacggccttccctacggtgttcgcaaaaatgttgagcttgcaagagccctttgtaccgatccaaaattacttctattagatgaaccgtcatcaggattaacaaatgaggaaacaattgatcttggcttttggataaaagatattcaatctttattaggaattaccataattatgattgaacacgacatgagttttgtaaataaagtatcagaccgtattcttgcacttaattacggtaaaatacttgcatctggtttacctgaagaaattaaaaataacgcagatgttaagcaggcttatatgggtgaataat

SEQ ID NO: 269607 - DNA, 886 bp, Unknown
  Bacterial polypeptide expressing nucleotide sequence isolated from the Sargasso Sea
atggctaaaattgagttgtcaaatatttctcatacttataatccaaatgacactaatccaacttatgcacttaatccgttttctatgacttgggaaaatggaaaaagatatgcaattttaggaccatctggttgtggaaaaaccacaatgttaaatatcgtttcagggttagttaaaccatcgaaaggaaatattttatttgatgaaaatgatgtcacagatcttataacggaagagagaaatatagctcaagtttttcaatttccagttatttataacaccatgacagtttatgataatttagcttttccattaagatgtagaaatttttcagatcaaaaaattgaagaaagggttaaatcagtttcagacactcttagattgtcatcttttctaaagtctccagcaagaaaactgactgctgaccaaaagcaactcatatcccttggaagaggactagtaagagaggatgttgcgggtgttttgatggatgaaccattaaccgtaatagatccagatttaaaatttagattaagaagaaatttaaaagaaattaatgaacaatacaaaacaacattagtttatgtcacccacgatcaaaatgaagcaatgacatttgctgacaacatcattgtgatggatcaaggtgaaatagttcaagtaggacttccaaaagacttatttgaaaaaccaagaaccacgtttgttggatattttataggttccccagctatgaatttgtttaattctgaaattctttcggataattcaataaagtttaataatgatagcattaaaacaaaaactgacttgtcaaaaattaaagacaagaatgtaaaattgggaatacgatcagaattcattaaaattgcaactgatcaaaaag

SEQ ID NO: 269608 - DNA, 840 bp, Unknown
  Bacterial polypeptide expressing nucleotide sequence isolated from the Sargasso Sea
aatgtttgttggtggatgtgtaagaaaacacttaagtgaagaagaaatagacgatatagacattgccaccactttaacaacagagcaaattaaagaaaaatttaaagatactaaaattaatattattgatagtggtattaagcatggaacaattaccctagttgataataaattaaagcttgagatcacaacattaagaaaagatattaaaactgacggaagacatgctgaaatagcatatacagataattggttcgaagattctaagagaagagattttactattaatgcaatttatctagatatcaacggaaaaatatttgatcctcaatcaggaatctcagatttaaaaaatcataatataaaatttattggagatcctcaaaaaagaattgaagaagattatctaagaattattcgatttataagattttctatagaatatgagagtaaagttgagcaatcaactattgaagctattaagtttaacttagatggaattaaaaaaatttctaaggagagaattttaaatgagttattaaaaattttaaaaattaaaaattttataaaattaaattcttataaaaatttaaaacctatattttcattaatttttcctgaatttatgaatatagaaagattaaatcaattagaactaatctcaaatcaaacaaagattgatgaaaaaactttattagcagtattgttaatagatgcaacgaacaattatgagtatttttcccacaaatacaatatttcaaatgatttaaaagagcatcttaaattaatggctaaaaattttaaaaattttcaatcagataaaaaattcttttataaaaa

SEQ ID NO: 269609 - DNA, 730 bp, Unknown
  Bacterial polypeptide expressing nucleotide sequence isolated from the Sargasso Sea
aatgattaattctattgaagtaataaatctttctaaaaaatataaagataaagaggctgtatctaatataaattttaaaattaatgaaaatgaaatggttggtttattaggaccaaatggatgtggtaaaactacaactattggaatgattttaggattattaaaaccaagtagtggagagattttaatcaacggaatgaatatagaaaaaaataaaatttcacttctccataaaatgaactttatttcaccctatattgaattacctaaaaaacttaaggttaaacaaaatttaattgtttacggaaagttatataatattgaaaatttaaatgaccgaatagatcaccttgcaaataaacttagattaaaagaccttttaaacaaaattactggagaactttcctctggacaaaaaaatagggtaagtcttgcaaaggctttaattaatgatccaacagttcttttgttagatgagcctactgcttcattagatcctgaaacaggtgattttgtaagatcttttttagaggattataaaaaagaaaaaaaaatatcagttttgcttgcctctcataatatggaggaagtaaaaagattatgcagttcagttctaatgatgaaagaaggtctaattgttgatagaggaactcctgaagatttaataacaaaatatggacgaagaaatttagaggaagtatttttagaaatagcgagaaaagaaaaatga

SEQ ID NO: 269610 - DNA, 1159 bp, Unknown
  Bacterial polypeptide expressing nucleotide sequence isolated from the Sargasso Sea
ttactttatttgatttttaaaaaaagattagaggaatatggaaaaaaaaataatgaattatcaacagaaaaatttaaaaatttaaaccatggttttaattcttttaaagatattgtaataacaaactcagaaaattttttcttaagaatttttaataatactattagaagaatagctgatattgcttataaaactgaagcaatacactcgctacctaaatcatttgttgaagttaccggtatattaatagttgttgtgcttgtttttttaaatattgaagaaggtaacaataatcttaatgaaattttgcctgctctgagcttatttgcactagcgggctttagaatgatgccttccgttcataaaatacttaatgcaattcatagacttaaatttcataaacctgttacagaatcattaacaaatgaaatcaaaagatttaaaaattctgaggatattaaattaaaagataaagatattgttgaatttaaaaaaagtattgatgtaagcaatttaaacttttcatactcaagttcaaataaagttttaaataatttaaattttaaaattaataaaggagattttatattgattttaggtcgtagtggttgtggaaaaagtactttaataaacgtactattaggattcttaaaacctcaaaatggaaatatattgtgtgatggtaaagagatatataataatttatttcaatggaggaaattagtttcagtagttccacaagatatttacttagctgaagaaactcttttggccaatatagcatttggtattaatgaaagtgaaatagatttgaaaaggataaataaaattattgaaatttgtgaattaaaagattttgtaaattctttgccaaataaaatttatacatctgttggagagaaggcatttaaaatttctggcggtcaaaaacagcgaattgcaattgctagagctctttatcgtgaaaaggatataattttcttagatgaagcaactagtgctttagataaaagcactgaagaaggttttattaaaaatttattagaggcctttaaaggaaaaacaataattatggcatcccatagacagtccataattcaatatgctaataaaatatatcagtttgaaaatgaaaatttagtagaagtgaaaaaatgaa

SEQ ID NO: 269611 - DNA, 1033 bp, Unknown
  Bacterial polypeptide expressing nucleotide sequence isolated from the Sargasso Sea
atgtctgaaccagtaattaaatgtgaagctgtttataaaatttttggagaaaatgccaaaaaaatgcttcaagagtcaaatggtaatgtggatgcaaaaacttttcaagaaaatggatgcatagtaggagttaacaatgcttcatttgatgtttcaaagggagaaatgttagttgtaatgggtttgtcaggatcaggtaaatcaactttgctaagatgtatttctaggttaactgatgcaacaggtggaaaaatttttatagaaggtcaagatttacttcaattgaacaataaagaactgatagagcttagaagaaataaaatgggaatggtttttcagagttttgctctacttcctcataaaacagttgtagaaaatattgctttcccacttcaaattaagggaattaaaactgaagatagtattagtaaagcaatggatatggttaaacttgttggtcttgatggaagagaaaattattttccaagagaactttctggaggtcaacaacaaagagtaggtattgcgagatctttagcagtagagcctgatatttggtttttggatgaacctttttctgcattagacccattaattagaaaagaaatgcaggatgagtttttaagacttcaagacaaattacaaaaaacaattatgtttattactcatgattttgacgaagctctaaaacttgcagatcgtattgccattatgaaagatggaataattgagcagctagactcacctgcaaatattgttttaaatcccgcaactgaatatgtaaggaaatttactgaagaagtacctagagaaaaagttttattaatacaagatgtaatggacccgtctaccactgataatttgggtgatttgaaagttttaaaagatgaaattattgaaaatgttgctgaaaaaattttaactcaagaaaaagcagtagcagtcatagataataacaacaaaattgtaggttctattaatccaacaaaaataattaatactgtttttggaggaagaaaaaatagtaattaaa

SEQ ID NO: 269612 - DNA, 640 bp, Unknown
  Bacterial polypeptide expressing nucleotide sequence isolated from the Sargasso Sea
ctggtagtttttcgtggtatagaaaaaacttttgccgaagcgaaaattcttaggaacgtggatatttctttgtatcctgggaaatgtattttgcttactggaaataatggttctggaaaaactacattacttaagataatagctggacttgaaacaccatctcatgcagaaattgctttttccggtaaaactcaaagctggaaaagtactattcggagtgttcgaaaagaaattatttacttgcaccagcagccatatttgttaagtggtacagttgaatcaaatgtttcttatggcttacgctttactagtttaaatcgtaaacaaatccgtgaattggttaaagaagcccttgaatgggcaggactggcaaatgtagcaaaacatcaggcaaaaaccttatctggaggagttaagcagcgagtagcctttactagggcctggatattaaaccctaaagttctattacttgatgaacctttggccaatatggatattgaatcacgtgaacgggccttggatttattaaaacgcatgaaatcagacggtatgtctatagttataacaagtcatgatgctaatattatagatggtctgatagacagtcattttagtcttttagacggcaaactgaattaaa

SEQ ID NO: 269613 - DNA, 352 bp, Unknown
  Bacterial polypeptide expressing nucleotide sequence isolated from the Sargasso Sea
aaataataacgaattaaatgcgattaatgatgcaaaaaaggtacttagaactttaggtttgaataaaagaattaatcattttccctctgagttatctggtggtgaaactcaaagagtcgcaattgcaagggcactaataaatcaacctaaaattttactagccgatgaacctacaggaagtttagataaaaaaaatgcaaaacaaatatttaaattactcttaaaattaaaaaataaaaatagagttatcatatttgcaacccacaatatgtattttgctaatatggcggattgtaaacttcagttaaataatggtaaaataataaattatcatgggagagtcgttaaataa

SEQ ID NO: 269614 - DNA, 709 bp, Unknown
  Bacterial polypeptide expressing nucleotide sequence isolated from the Sargasso Sea
catgctgaagtttgacaacgtctcgctcgattacggcagcttccgcgcactggacggcatcaatctgcacgcgaacgacggtgaactggtggtgctgcttggcgcaaacggcgcgggcaagagttcgatcttcctcgccacgagcggcctgcggcgcgccgcgagcggcagcctgcgcctgggcacgcgcgagctgctcggcatgacgcccgcgcagatcgtgaagaacggcgtgatccaatgtcccgaaggccgcaagctgttcccgggtatgtcggtactgaagaatctcacgctcggcgcctacgtgcatcgcggcgacaaagccggcaatcagcgcaatctggaccaggtgttcgcactcttcccgctgctcgccgaacgcaaggaccatccggcgggttcgctatcagggggccagcaacagatggtggcgatcggccgcgcgatgatggcgcggcccaaggtgctgttgctcgacgaaccgtcactcggtctcgcaccgctggtggtcaaacaggtattcgaggtcatccagcagatcaatcgcgcgggcacgactgtgctgctcgccgaacagaacgcattcgcggcactgaaaatcgcgcaccgtgcgtacgtgatcgagaacggccgcatcgtgctggaaggcgatcacgcgagtctgatgaataacgaagcgatccggcgcgcttacatcggcggctga

SEQ ID NO: 269615 - DNA, 905 bp, Unknown
  Bacterial polypeptide expressing nucleotide sequence isolated from the Sargasso Sea
aatgactgatgaaataaaaatatcttgccgtaacatttggaaattgtatggagaaaatccagaaaaatttttaaatgttaataataataatccttcaattgaacagattaaaaaagagaattacattcccgcagtaagagatgccactatagatgttaagactagcgaaatactcgtcattatggggttgagcggatctggcaagtcaactttattaagatgtatgtctaaactgatccagccaacttatggtcaagttttttttgaaaataaagatttgctaaaagctagtgataaagaattaattgaaataagaagacataaaatgggcatggtgtttcaacattttgccttactacctcataggacagtacttcaaaatgttgcatttcccctagaagtacaaggattaaatgatgttaaaagagaaaaaagagcaaaagaagtaattaaacttgtaggcttagaaggaagagaaaaatattatccaagagaactttcaggaggtcaacaacaaagagttggccttgcaagatctctcgctgtagaaccagatgtatggttcttagacgaacccttttctgctttagatccattaattagaaaagagatgcagaatgagtttttaagacttcaaaatatgcttaaaaaaactattgtttttataactcatgattttgatgaagcaataagattagccgatagaattgcaataatgtatgaaggtcttatcgttcaagtaggaacacctgaagaactgataacaaaacctgcaactgattatgtagccgaatttacaaaagatgttcctagatctaaattattaaacgtttcaagtattatgaatgatagtgataaaaaatcttataatagcaacattttatttaatgaaaaagttgagaaaa

SEQ ID NO: 269616 - DNA, 724 bp, Unknown
  Bacterial polypeptide expressing nucleotide sequence isolated from the Sargasso Sea
aatggaaaattcaataaaagtaattgatcttaaaaagaattatggaaataaagaagcagttaagaatattaattttgaaattaaagaaaatgagataattgggttgcttggtcctaatggatgtggaaaaactactactataggtatgattttaggtttattaaaacctacaagtgggcaagttttgattaatggctttcaactagaaaaaaatagaattgagattcttcaaaagataaattttatttctccttatattgaattaccaaagaaacttacagttaagcagaatctaattgtttatggaaaactgtattctgtcaaaaacttaaatagtagaatagattatttggtagaagaactgagattacaaaatttgcttgatagagtgactggagaattatcttcagggcaaaaaaatagaataagcttagctaaagcgattatcaataatccatctgtcttattgctcgatgaacctacagcttcacttgatccagaaacgggagattttgtaagaacctttttagaaaattataaaaaagaaaaaaaggtatctatattattagcatcccataacatggatgaagtaactagattgtgttcatcaataatgatgatgaaaaacggtttaataattgatcaaggtaaaccaaatgatctagttaaaaaacatggaagacaaaatctcgaggaagtttttttaaaacttgtaaggaattaa

SEQ ID NO: 269617 - DNA, 778 bp, Unknown
  Bacterial polypeptide expressing nucleotide sequence isolated from the Sargasso Sea
atgaattcaacaagttctgcaataaaaatcaaaaatgtgtggaaagtatttggcaatacttcaaaagaagctttaaatgctattcaaaaccataaaatttctaaaactgaagctttagaaaagtataattctgtaataggtgtttcagatgtttcctttgatgtaaagcaaggtgaaatattttgtgtaatgggactttcaggaagtggaaaatcaactttagtaagacatattaatagacttttagaacctacatctggaaaaattttaattaatgaacaagatgtaatgactcttgatagagagagcttacaagaattaagaaataaaaaaattggtatggtttttcaaaattttgcattgatgcctcatagatctgtagtagacaatatagcgatgcctcttgaaattagaggtataagtaaaaatgataggttagatgcagctaataaaattttagatgtggttgagttgcaaggttggggaaataaatttgcacatgaattatctggtggtatgcagcagagagttggacttgcaagagcacttgcagctgatccagaatttcttttaatggatgaaccttttagtgcattagatcctttaattagacgtcaacttcagtcagagtttattaaactttcaaaacaaatgaaaaaaacaactgtttttattacacatgatttagatgaagcagtaagagttggtcatagaatagcaataatgagagatggtaaagtaattcagattggaacaccccgaagaaattgtagtcaat

SEQ ID NO: 269618 - DNA, 1081 bp, Unknown
  Bacterial polypeptide expressing nucleotide sequence isolated from the Sargasso Sea
aatgaatttagttgcagaaaacttatcttataagccagatgaacagtttcatcttaatgaggtgtcttttaaatttgaaaaaggaaatatttacacaattcttggaagaacattgtctggaaaaacaacgttactaaaaaccattgctggattacttacacctgatacaggcgcaatgcaatttgaggacaaagattttttaaaagttccagtttgggagagaaatatcgcaatggtttatcagcaatttataaattaccctcaccttaatgtatttgagaacgtcgctttccctcttaaacaaagaaaagtagacgatcagttgataaatgatgaagttacaaaatctcttaaatctgtaggtctagagggctatgaaactagaaaaatccaagaattatctggtggtcagcaacagagagtttccctagcaagatctttagttaaaaatgctaaaattttactgttagatgagcccttggttaatttagactacaaactaagagaacaattgagagaagagtttaagaatatattttctcaagggttatctgaggacagcattgttgtattttcaactacagatccaagagaagcaatggagataaatggtgaagttattgttcttgatgagggaaaagtgcttcaagttgggtcagctaaagaaatttttgaaaatcctaaaaccttaaaagttgcagaaatttccaatgatccacctatgaatattcttaaggcatctattgaaacaaataaaataaaatttgaagaaattgaagttgagctacctaatcacctatctaacttaaaagaaaaaaactttaatttaggtattagagcatctgacataaaattaagtgatagtggttttgaatttgaagtagagcttgcagaaattagtggttctgaaacattgcttcatcttaaaagaggtaattctagaattattatatccatagaagaagttttgaattttaatattcatgacaaggtaaaaattagtttcaatattaataaaatttatgcatttaatgaaaatggagttttatcctcttctccttttggaggttcttatgtctaa

SEQ ID NO: 269619 - DNA, 772 bp, Unknown
  Bacterial polypeptide expressing nucleotide sequence isolated from the Sargasso Sea
atgtcaaataatttaataagagttgctaatttaaaaaaaagctttggaggagtaaaggccgtagacatagatgatttaagttttgaaagtaaagaattaacttcaataattggacccaatggagcaggcaaaactacactctttgatttaatttctggatttcaagaagaagataatggagaaatattttacaaagataaaaacataacaaaaagtcagccttacagaattgcaagacttggtatggttagaacttttcaattgacaaaagtatttgacagaatgacagttttagaaaatttaatgtttgctggttccaatgtttcaaatgattctttatttcagtcatttatgcagctatcaaaacaaaaaaaatatgaaaattctcttaaagaagaagcaatgaaagttatgaaagatttaaatattgaacaaatgtcagactcatatgcaagagaactttctggtggtcaaaaaaaattgttagaactaggaaggtccattattaaaaaaccagaagttcttttattagatgaaccactagctggagttaatccaaaattagccgaagatttactagagataattcaaagtttatcgaatcaaggaattactattttgatggttgagcacaacattgaagcagtaatgaaaatatctgaaagagtcgttgttttagcggaaggagccttaatagctgatggcccacctcaagaagtcagagaaaatcaaaaagtaatagaagcctatttaggtactggcgatgaataaa

SEQ ID NO: 269620 - DNA, 796 bp, Unknown
  Bacterial polypeptide expressing nucleotide sequence isolated from the Sargasso Sea
atgaaccaacccatgtcacgcgatacgccggccatcgaaatgcgcaacgtatcgtgccgtttcatttctccggacggcaaggcaaccgtcgcattgcgcgatttcagcatgtcggtggcgcgcggcgaattcgtcgcggtggtcgggccgacgggttgcggcaagtcgaccacactcagcatgatcaccggcttgctgaagccgaccaccggtgaagtgcgcgtgatgggcgcgccggtggacggcatcgatccgcgcatcggcttcgtgtttcaggcagacgccgtgttcccgtggcgctcggtgctcgacaacgtggcggccggcccgctgtatcgcggccgctcgaaatccgccgcctacgacgaagccaacgaatggctgcggcgcgtgggtctcgacaagttcggcaagcactatccgcatcaactgtcgggcggcatgagaaagcgcgtggcgctcgcgcaaaccttcatcaacaagccggaaatcctgctgatggacgagcccttctctgcgctcgacatgcagacgcgcacgctgatgcaggacgaactgctgcaactgtggggcggcgccggttcggtggtgttcgtcacgcacgatctggaagaagcgatcgcgctcgccgaccgcgtattcgtgctgacggcccgcccggccacgctgaagaaagtgtacgaaatcgatttgccgcgtccgcgcgtcacgtcggagattcgctacgaaccgcgtttcatcgaaatctcgcgcgacatctggcatgacctgcgcgaagaagtgcagatcggttaat

SEQ ID NO: 269621 - DNA, 318 bp, Unknown
  Bacterial polypeptide expressing nucleotide sequence isolated from the Sargasso Sea
aatggggactatatcacttaaaaatatttcaaagtcatttgggtctacacaagtacttaataatttgaatgttgatataaatgatggagaattcttaacattagttggtccatctggttgtggtaaatctacgttacttagaataattgcaggattggaacaacaaacttcaggcgatgtattaatagataataaaaatgtaaatagagttagagccagtgaaagagatttggcaatggtattccagtcatatgctctttatcctcatcttacagtaagaagaaatttagaaactccattaagacttagagattataa

SEQ ID NO: 269622 - DNA, 728 bp, Unknown
  Bacterial polypeptide expressing nucleotide sequence isolated from the Sargasso Sea
aatgtcagataataaccaaccttctgtaataaaatgtgaatcagtttttaaaatttttggcaacaatgctaaaagacttttagaagactctagcggaaatgttgacgcaaaaacttttcaagatgcaggatgtatcgtgggagtaaataatgcttcattcgatgtaaaaaaaggtgaaatgttagttgtcatgggtttatctggctctggtaaatcaactttgcttcgctgtatttcaagattaaccgaagcaactgcaggaaaaatatttatagacggagatgatttactcgcaatgaataataaagaattaattgaattgagaagaaataaaatgggaatggtttttcaaaactttgcattattgccacataaaactgtattagaaaatatagcttttcctcttcaaattaaaggcactaatactaacgagagtattgctaaagcaatggaaatggttgaattagtaggtttaaagggtagagaaaattattttccaagagaattaagcggtggtcaacaacaaagagttggtatagcaagatcacttgctgtggaaccagatatttggtttttagatgaacctttttcagctcttgatcctttaattaggaaagaaatgcaagatgagttcttaagacttcaaggagttcttaagaaaacaataatgtttgttactcatgattttgatgaagctctaagattggctgatcgaatagcaataatga

SEQ ID NO: 269623 - DNA, 733 bp, Unknown
  Bacterial polypeptide expressing nucleotide sequence isolated from the Sargasso Sea
aaaaattatagaagtaaagaaacttaaaaaattatatggttctaaagaggcagtacaaaacatttcatttaatataatggagaatgaaattttgggactactcggacccaatggttcaggtaagacaacaactatcggtatgttattaggcttgctaaaaccaacaagtggggaaattttaattgaaggaaaaaaaattgaagaaaatagaattgaaattttagagagaataaatttcatatcgccctatattgaattaccaaaaaaacttactgtaaaacaaaatctaattgtatatggtaaactttataaaattaaaaatttacataaaactatagattatttaactgaaaaactaagactagaaaatctactcgatagagttaccggtgaactttcatctggacaaaaaaatagagttggcctagctaaggcacttattaatgaaccaaacattttattattagatgaaccaacggcatctctagatcctgaagttggtgattttgtaagaacttttctagaaaactacaaaaaagaaaaaaaaatttcaattttgcttgcttctcataacatgaatgaggttacgagattatgtaagtccgtaatgatgatgaaagaaggaaaaataatagatgaaggaactcctcaagatttgataaataaacatggtagaaaaaatctagaagaagtttttttaaagctttcaaggagtaataatgagttttactag

SEQ ID NO: 269624 - DNA, 769 bp, Unknown
  Bacterial polypeptide expressing nucleotide sequence isolated from the Sargasso Sea
atggcagaaggattgttagaagtcgaaggaatctcaatccaatttggtggtatcactgctctcgataacctcacgttcactgtcgatccgacgcaaatatgtggcctcatagggccaaatggggctggaaagacaacgctatttaatgtcatcagcagaatctacgacccgtcacaagggcgcataaagttcaatggagtcgaccttcttagtctttcaccgcacgaaatctcacaaacagggatcgcccgaacattccaaaatcttgccttatggccaaggatgactgttgcagaaaatgtcatggcaggagctcatatcaaaggtaagcagaacttcttttcagcgatgacacgcatagggctgcaaacagaagaacgagaacttcggcataaagcctatgaaaccttggaaatgctgaatctcctcgagcacgcagaaaaaccttgcgatggcttgccattcggaactatgaaacggatagagctagcacgcgctttagtaagtaaccctaaactgcttcttctagatgaaccagctacagggttaacccactcagaagtaactgaactttcagaagttatcacctcaatccgcaaacactttgagctaacaatcctgctagtagaacatcacatgggcatggttatgagcatgtctgaaaaagtcgttgtcctcgactttggagaaaagatagccgaaggtacaccttccgaaattcagaataattcgctagttgtctctgcttatcttggagcgcccaaataat

SEQ ID NO: 269625 - DNA, 487 bp, Unknown
  Bacterial polypeptide expressing nucleotide sequence isolated from the Sargasso Sea
aactttatatctccctatgtcgagcttccaaaaaaactatcagttaaagaaaacttgattgtttatggaaagatgtatgaggtaaaaaatcttcaaaatagaattaatacattaagtaatgatttgaaccttgtggactttttaaataaaaaaactggtgagttatcctcgggtcagaaaaatagagtttctttggcgaaatccttaattaataatccagaaattttgttgttagatgaacctacagcaagcctagatccagatacaggcgactatgtaagatcatacattgaaaattatgcaaaaacaaataatacaacaatactgctggcatcccataacatgagtgaagtggaaagattatgtgagaatattatgatgatgaaacaaggaaaaataattgatgagggtacatgtgaggaattgatttctaaacatggtagagtaaatcttgaggaaacttttttaaagctagtaagagaataat

SEQ ID NO: 269626 - DNA, 1633 bp, Unknown
  Bacterial polypeptide expressing nucleotide sequence isolated from the Sargasso Sea
tatggaaccactgttagctatccgcgagctcgagacccaatttggagtgggagaacaggcatcattagcggttcgagggatttctttcgagttatatccaggagaaacttattgtttagtgggtgagtctggttcaggtaagagtgttacgggcttatccatggtcggcttgttgcctgatttagcgaatcatccttctggggcgattactttctattcaagtgttgaggaagctgatgcgggcatatcgattcttaattccgaaaaatctgtgctggaaaaattgcgagggtctcgcatctcgatgatttttcaggaaccgatgactgcgcttaatccggtgcagacgatcggtgagcaaataatggaaactatgtcattacacttgggactagaaggagaatcagcgaaggcgaaagctctggacctattagcccaggttgagctaccagatccagaagtacgcatttccgagtatccacacaggctatcaggaggccaaaggcaaagggttatgatagcaatcgcgttggcttgtgagcctgatttgttgatagccgatgaacccactacagcgcttgatgtaacgatacaggcgcaaattttaaaacttctcaagaaactgcaggaagagcggaacaccacgttactattcattacccatgaccttagtgtagtcgctcaaatagccgatcgcgtcggagtgatgcaacaagggcagctcgtggaacagggcacaaaggatgaggtcctttataatcccaaacatgaatataccaaagaactgattgcgtcattgcctcagaaaatgacgcgtcttaccaccaatgcgttggttacggaatcccccctgctcagcatcgaacaattaaaggtgtatttccctattagaaaagggttgctgcaacgacatgtggatgatgtgaaggccgtagatggagtgaacttgaaaatttatccaggccgggccatggccgtcgtcggcgaatcaggctctggtaagacgacgctcgggagagcaattctaggattaattggagcaaccgagggcgcagtcaattatcaaggaagtgacttgaccaagctcaatcggaaagaaatgaaaccgtttcgaagagacttgcagtttgtctttcaggatccgcagtcatccctgaaccccagactgacaatagcgaccatattgactgagccgatgcaatcgcatgggattggggaaagtcatcttgaccggcttgagctcgcttcgcagactctcgaacaggtcggcctagatcggtcgatgctaactcgattcccccatgaattttcaggaggtcagcggcagcgaattggtatcgccagagcattagtcttaaacccaaaattcattgtttgtgatgaggtcacgagcgctctggatgttcgagttcaggcccaggtgctaaaactgctggatgagttgcgacagcaaatggacttaacctatcttttcataagccacaatatcgaagtggtgaggtttttttgcgatgacgttactgtgatgcaccagggcaaaatcgttgagaccggcttagctgaacaagtttgtgaagcccctcaggattcttacacaaagagattactcgatgcggtcccgaagttcgattag

SEQ ID NO: 269627 - DNA, 823 bp, Unknown
  Bacterial polypeptide expressing nucleotide sequence isolated from the Sargasso Sea
atgaagagttatctgcagttaagcgacgtcggcatctcgttcgagacggagcaggggcgcttcgaggccctcagccgggtcaacctgcgcatcgagcggggggagttcgtctccctcatcggtcactccggttgcggcaagagcactgtgctcaatctggtggccgggctgctggagcccaccacggggggcatcatcctcgacgggcgtgaggtggcggggccgggcccggagcgggccatggtgttccagaaccatgccctgctgccctggctcagcgtccagcagaacgtggcgctggcggtggggcaggtggagccgaaccggcgggcggtggcggagcgggtggactactacctctccctggtgcagatggagcacgccagccagaagatgccccacgagctgtcgggggggatgaagcagcgggtcggcatcgcccgtgccctgtcgctctcccccaaggtgctgctgatggacgagccgttcggtgccctcgatgccctgacccgtgcccatctgcaggacgcgctgatggccatccaggccgagctcggcaataccgtcatcatgatcacccacgacgtggacgaggcggtgctgctctccgatcgcatcgtcatgatgaccaatggccccgccgccaccgtcggcgagatcctgaccgtggatttgccaaggcccagggacagggtggccctggcggacgatggtcactatcacaagctgcgccagcaggtgctgcgcttcctctacgagaagcagcgcaaggtgacgcccctcaaggtggccgagccagttcgtagccagcgccgggcctgag

SEQ ID NO: 269628 - DNA, 661 bp, Unknown
  Bacterial polypeptide expressing nucleotide sequence isolated from the Sargasso Sea
tatgattattgatataaaacaacttacaaaaacgtttattgacggaaataaaaaacttaatgttttgaaggatattaatcttcaaatagaggaaggtagtattataacaatcaaaggaccttcaggctcagggaaatcaacattattaagtatcattggaactcttgatagcgcagacagtggagaaattttaattaatggtaaaaaaattcaagatgaattaaatattgataagcttagaaacaagagtattggatttatttttcaatttcataatctaattgcagaattaacacttgaggaaaatgtttgtttaccaaaaatgattgctaaagaaaaaattgataaaaatcaaattaataaactctttgaatattttgatcttaaagatagaatgaaatcttttcctaatgatttatcaggaggggaaaagcagagagtagctgtaatgcgggcaattattaataatccatcagttattattgctgatgaacctacaggcaatcttgataaagaaaatgtattaaaaatgatatccctctttcaaaaattgaatacagaaaaaaaactaacaattatcattgcaacacatgacgaaaatgtttttgatatcgggcacaaaaaatatcaattggtcgatggatctttagaaataaattaa

SEQ ID NO: 269629 - DNA, 1030 bp, Unknown
  Bacterial polypeptide expressing nucleotide sequence isolated from the Sargasso Sea
tatgtctgagccagtaatcaaatgtgaaaatgtttataaaatttttggggcaaatgcacaaaagatgcttcaagattctaatggtaatgtagatgctaaaacctttcaagagaacggatgtattgtgggtgtaaataatgcatcattcgaggtttcaaaaggggaaatgttggttgttatgggtttatctggatcaggaaaatcaactttgttaagatgtatttcaagattaaccgatgcaacaggcggaaaaatttttattgaaggtcaagatttattacaactaaaaaacaaagatctaattgatcttagaagaaataaaatgggaatggtttttcaaagttttgctttgcttccacacaaaactgtagttgagaatatagcttttccacttcaaattaaaggagtgaaaactgaagaaagtattagcaaagcaatggacatggttaagttggttggacttgatggaagggaaaattattttccaagagagttatcaggagggcaacaacaaagagtaggtatagcaagatcattagctgtagaaccagatatatggtttttagatgaacctttctctgctttagatccgttaattagaaaagaaatgcaagatgagtttttaagacttcaggacaaattacaaaaaacaattatgtttattactcatgattttgatgaggctttaaaacttgctgatcgtattgcaattatgaaggatggtataattgagcagttagatactccagctaatattgtattaaatccagcaactgaatatgtaagaaaattcactgaagaagtacctagagaaaaagttttattaattgaagatgtaatggataaaactaaagataaccttggcgatttaaaagtttcaaaagatgaaattatagagaatgtagctgaaaaaattcttactcaagaaaaatcagtagctgtagtagacaataataataacattattggttctataaacccagctaaaataatcaatacagtttttggaggaagaaaaaataataattaa

SEQ ID NO: 269630 - DNA, 466 bp, Unknown
  Bacterial polypeptide expressing nucleotide sequence isolated from the Sargasso Sea
aatggcttctattattttacaaaatatctcaaaatggttttccagtaatcaagtaataaaaaatgttgacctaaacattaaagatggagagttcattgtttttgtaggtccctcaggatgtggaaaatcaacacttttaagaatcatctccggtcttgaagatttaaatgaaggaacagttttaattgatgatttggatgtaacagataaaattccatacgaccgcggcttatcaatggtttttcaatcttacgcactatatccccatatgaatgtatttgataacataggtttttctttgaaaacctcaggcgtaaaaagtgaaattttaaaaaaaaaagttggagaagttgcaaaaattcttcaattagaagatctgttacacagacttcctaaacaactatctggaggacaaaaacaaagagttgcaattggaagagcaattattaggaaacccaaagctttc

SEQ ID NO: 269631 - DNA, 549 bp, Unknown
  Bacterial polypeptide expressing nucleotide sequence isolated from the Sargasso Sea
ttatagatgataaaaatctcaaaatattaaatacaaaagatattagaaaaaacattgcattagtacaacaacagccttttttattttcaggaaccattattgatgtaataagaatgggcagagattttaccaaagaagaagttatagaatcagcaagaaaagcaaacgctcacaacttcattcaaaagcttcctgagaaatatgaaactgagataactgaaagaggatcaaatttctcaggtggtcagatccagaggatagcaattgcaagagcaatactcgggaacccctcaattcttcttttagatgaggccacaagtgcgttagatgcagaatcagaatctgaagtacaaaaaggtcttaatagagctatgaaaaatagaacagtcattgtaattgctcatagattagctactactcaagaggccaataaaatagttgtttttgataaaggtgaaattattgaagtcggaaaacatattgatttaataaataaaccaggaatttataaagaattatgtgaaaaacaatttattaaaaaattatagt

SEQ ID NO: 269632 - DNA, 1063 bp, Unknown
  Bacterial polypeptide expressing nucleotide sequence isolated from the Sargasso Sea
catgggatcattgggctcagcaataaaaattgaaaatgtttggaaggtatttggaaacaactccaatgaagctttagatgcaatccaaaatcacggtatttcgaaaacagaggctctagaaaaatataattcagtcattggtgtatcagatgtttcttttgatgttaagcagggagaaattttttgtgtaatgggtttatctggaagtggaaaatcaactttagttagacacattaatagacttttagaaccaacttcaggaaaaatattaattaatgatcaagatgtaatggaacttgatcgtgaaaacttacaagagttaagaaataaaaaaataggtatggtatttcaaaactttgcattaatgcctcatagatcggtagtagacaacattgctatgccattagaaattagaggggtaagtaaaaatgatcgactagatgccgcaaataaaattttagagatagtagaattacagggatggggaaataaattcgcacatgaattatcaggaggtatgcagcaaagggttgggttagcaagagcgttagctgctgatcctgaatttcttctaatggatgaaccttttagcgctttagatccattaattagaagacaattacaaacagagtttattaaactttccaaacaaatgaaaaaaactacagtatttattactcatgatttagatgaagcagtaagggtaggtcatcgaattgctataatgagagatggtaaagttattcaaattggcaccccagagcaaatagttgttagtccagcagatgattacgttgcagattttgtaaaaggaatatcgagacttaaagtggttcaagctaaatctattatgcaaacaattcaagattatgagaaaaaaaatagtgctttatctgatgatttagaaactgttcatgaacatgatctattaagtaggctgatagaaatctcaaaatcaaaacaaaaacccttggttgttaaagatgaaaacaaaaagtcagtaggagtgataacacaatcagaccttttaagagcagtggttgagggtggcgatggagaataa

SEQ ID NO: 269633 - DNA, 937 bp, Unknown
  Bacterial polypeptide expressing nucleotide sequence isolated from the Sargasso Sea
aatgacgacaaacaattttagaccccagcaacgccctgattctggcagcaatgaacgaataaatgctagtgagcaagacaccataattactaaccctaaggaaaacgttagcgttaaagatgacgttgctgattgcaatagcccagcgaatagccataacctagcagatagtcgtaccgttttaagcttacagaatgtaaaagtggcatcgcgactttcggtggaaggtttacgtgcaaaaaaaggcgagtgcgttcacattataggaccaaatggggcagggaaatcaacactgttgcttattcttgcgggccttattgacgctgatgagggcaccgtcatgctgctaggcaaaccaatgaacgattggtcgctggcaacacttgcgagtgtgcgcaccttattagcgcaacaaagcgaaagtggttttcacttgtcggtaaaagaatacctaagcttttatgcaacagcacagcaagatgaactaattcctccggttttagaaaaagcactcgaaatatcgggtttcttgaaccaaattgtcacccagctttctggcggcgagcgtcagcgagttgagatttgtcgttcgcttttgcaaatttggccgcagctagagcgcggagagggggtagtgcttttagacgagccattgcaaggacttgatataaggcatcaatatgcactggctagtttggtaaaattcctttgcgataaagggaataccctacttatgacgtctcacgatatcgcgcttagtgccaactattgcgatagtttatggcttatgcaaaaaggtcgcatggtagcgttcggtaagccacaagaggtggccacgcaaacaaacttagaaagtgtgtttgaatgccattttgctataagcaagcacgataactttctagaaattcaagtttgcgcacctatttccctagaataa

SEQ ID NO: 269634 - DNA, 248 bp, Unknown
  Bacterial polypeptide expressing nucleotide sequence isolated from the Sargasso Sea
tactcaacttagtggtggtgaaaagcaacgcgttgctattgcaagatctattgtgaataagccaaaaattttatttgctgatgagccaaccggaaacttagataaaaaaagttcagactcaattagcgaccttttattttcactaaatgaaataattcaaacaactttggttttagtaactcatgatttatttttggcagaaaaatgtaaggaagtttatgagctctctgaagggcagatattatgag

SEQ ID NO: 269635 - DNA, 685 bp, Unknown
  Bacterial polypeptide expressing nucleotide sequence isolated from the Sargasso Sea
attgcagccgcaaagccgattcattgggattaccggtccatcaggtgcgggaaaaagcagcttgtttcgcgccctagctggcgtagaaaaaagcgcaagtgtgcaaatgccgtggacctctcaaaaggtcggtatcgtttttcagcagcccatgctatttccccataccgatgtgcgcggtaatttagccttggcgcagcgtcacgcaagccctaatgcaatgtctatcgacgcctgcttgcgcggctgttattgcgaacatttaatcgataagcctgttcaggcgctttctggtggagaagcgcagcgggtcgcgattgcgcgtgccttggtcaatgggccagatgtgttgttgctagatgaatcgttaagcgccattgatatcttcacccgccgcaaaatttaccagttcttgaacaacttgtgtgtgtcggggcagctcatatgccttgtgatttctcacgatttagatgaccttgccttgtttagcgatgagttggtttttattgaccaaggccgcaccgagctttgtggaaaaacgcgcgatgttttgactcaagtattcgaaaaagaaggatttgcgacaccgtctagcgtacttgagggatttaaagttactgcgcaaagcggacgcacacgacagcaaccagtcacaaaacgccgttgtcagctacaaacacggtag

SEQ ID NO: 269636 - DNA, 508 bp, Unknown
  Bacterial polypeptide expressing nucleotide sequence isolated from the Sargasso Sea
tatgattgctgttgaagttaaagatcttactcattcaattaataataaaaaaattttaaataatattaattttaatctcaataaagatagtatctcttgtattttgggaccgtcaggtagtggaaaaactactttattaaagctcatagcaggtcttgaaaaagtacaatcaggtaaaattattattaatggtgaagaagtaagcagtactgcaaaacacttacctacagaaaaaagaaaaattggttttttatttcaagattacgctctattcccacatttgacagtaaaagaaaatttgagatttccaactaatgcaaaaaattcaactaataatgttgatgaaattattgaattaattaaattaccaaattcactagataaatatccacacgagttaagtggtggtgaacaacagagagttgctcttgcacgatctataatttcacaacccgatttacttttattagatgagcctttttcaagtttggatttaagtcttcgagaa

SEQ ID NO: 269637 - DNA, 913 bp, Unknown
  Bacterial polypeptide expressing nucleotide sequence isolated from the Sargasso Sea
aatgacccgcgtcgatctgcgttcctccacgccgaagtacgacggcccgcttctgcgcctggacggcctctgcgtgcatttcgaatccgagcacggcgaggtgacggaagccgtcaagcatgtctcgctcgacttgcacgtcggcgagcggttcgcgttggtgggcgaatcgggctcgggcaagtccgtgaccgcactatcgatcatgcgattgctggccgatgcgcaatacagcggccgtatcctgctcgaaggccgcgatctgctggccgccagcgagcgcgagatgcgcggcctgcgtggcgctgacgtcgccatggtgttccaggaaccgatgacagcgctcaacccgctgtacacgatcggcaaccagatcgtcgaaacgctggaattgcacgagggactggacaagcgcgctgccaaggcacgtgcgattgcgctgttggagcgcaccggcattgcggaggcgccgcgccggtttgacgccttcccgcaccaactgtcgggcggtcagcgccagcgcgcgatgattgccatggcgctggcatgttcgcccaagctcctgttggctgacgagccgaccaccgcgctcgacgtgacggtgcgcatgcagatcctgcaattgctgcgcgagctgcaggctgaattcggcatggccatcatgctgatcacgcacgacctgaacatggtccgtgcctttgctgagcgcgttggcgtgatggagcggggcgtcctggtcgagaccggcaacacagccgacgtatttgccgcgcctcagcacccgtacacggtgcgcttgcttgagagccgcccgcagcgcgacgtgctgccgctggtgccgcttgcaccggtgctgctcgaagccgacaagctaacggtcacctacgaacgccatcgccctggatttgccggc

SEQ ID NO: 269638 - DNA, 745 bp, Unknown
  Bacterial polypeptide expressing nucleotide sequence isolated from the Sargasso Sea
atgagtaaattcaatattttagataatggtttatcaattaaaaaaatttccaaaacctatggtaataagcaaattgtaagagatattagtatttcaataaataggaatgaaattgtgggattattgggtcctaacggtgccggaaaaactacaacattttacataatagttggtttagttaaaccagatagtggtagtattatattagacaaattagatgtttcaaatttaccaatctatctaaggggaaaactaggtataagttatctccctcaagaagcatcaatttttagaggcatgaatgtagaagataaccttctatcaataattgaaattcaggagaaagataaaagtaaacaaaacatactattacaaaatcttttaaatgaattcgatattaatcatgtaagaaaatcaaaatcaattgtgttatctggaggtgagagacgtagacttgaaattgcaagaacacttgcaacaaatccaaaatatttgcttcttgatgaacctttaacagggattgatcctgtatcgatagaagagattaaaataataataaaaaaattaaaacaaagaaatataggaatattaattactgatcataatgtaagagaaactcttaaaattgttgataaagtttatattgttaatgaaggtgcaatattttatgaaggtgatccaatatcagctgtaaaagatgaaaaaataaaaaagttttatttaggttcaaactttcaactataaa

SEQ ID NO: 269639 - DNA, 808 bp, Unknown
  Bacterial polypeptide expressing nucleotide sequence isolated from the Sargasso Sea
atgtccggcgcgcaaaaccgactgaacgtcacgccgacggtgacgacgctcgcggtgatcaaatccagactctcgggcgccgtgcgcgggcacaaattgttaaagaagaaggcggacgcgctgacgatgcggtaccggcagattttgcgagagatcgtcgaggcgaagcgcgcgctcaaggatgcgatgcgggacgcgcacttcgcgtggacgcgcgccaagtacgcgggcggggacgcggtgcggttttccatcttggacggggtggaacgggcgagcgtgcgcgtgctcgcgcacgaggataacgtggcgggggtgaagattccaaagtttaccatgacgaattctggcgcggagtcgcgaaggatggaactgacgggattggggagaggcggcgcgcgcgtgcaggaggccaaggcgagttataccggggcgattaaactgttgagcgagttggcgtcgttgcagacggcgttcgtgacgctggatgaggcgataaagacgacgaatagacgcgtcaacgcgttggagaattacgtgacgccgcgattgcaaaatacggtcaagtacattttgagcgagttggacgagctggagagagaggaattttttagattgaaaaaggtgcaggcgaagaagaagaaggacatcgaggagatggaagaaacggaggcgagtgagagggcggcgatgcaagcggtggacgcggagttggaggcgttcgaggacgtcgtgggaggtgaggggggccgcggcgcgggagggaatttgatcgaggcggaacgcgacgaggatttgttgttttgaa

SEQ ID NO: 269640 - DNA, 1033 bp, Unknown
  Bacterial polypeptide expressing nucleotide sequence isolated from the Sargasso Sea
tatgtctgagaccgttattaagtgtgagtcagtttataaaatttttggtgagaatgccaaaaaaatgcttgaagagtctaacggtaatgttgatgcaaaaacatttcaagaaaagggctgtatagttggagtgaacaacgcttcatttgaagttgcaaagggagaaatgctagtagtgatgggtttgtctggatcaggtaaatcaacattactaagatgtatttcaaggttaacagatgcaacaggaggaaaaatttttatagaaggccaagacttgcttcaattgaacaacaaagagttaattgaacttagaagaaataaaatgggaatggtttttcaaagctttgccttgttacctcacaaaacagttgtggaaaatattgctttcccacttcagataaaaggtatcaagactgaagatagtattagtagagcaatggaaatggttaaacttgttggactagatggaagagaaaattattttccaagagaactttcaggaggtcaacaacagagagttgggattgctcgatccttagcagtggaacctgatatttggttcttagatgaaccattttcagcattagacccattaataagaaaagaaatgcaagatgagtttttaagactgcaagaaaaattacaaaaaactattatgtttattactcacgattttgatgaagctttaaaattagcggatagaattgctataatgaaagatggaataatagagcaattagattcacctgctaatattgttttaaatcctgcaaccgaatatgtacgaaaatttactgaggaagttccaagagaaaaagttttagtcattgaagatgtaatggatagttcaaataaagataatttaggagatattaaagtttcaaaagacgacattatagaaaatgttgcagaaaaaattcttactcaagaaaaaattgtgggagtggttgactcaaataacaatattattggctcaataaaaccttcaacaattattgatacagtttttggaggaagaaaaaataatagctaa

SEQ ID NO: 269641 - DNA, 1054 bp, Unknown
  Bacterial polypeptide expressing nucleotide sequence isolated from the Sargasso Sea
tatggaagctgctatacagatccaaaacgtttggaaaatattcggaaatacatccagtgatgcattggacgccatacaaaataagaaaatttcaaaacaagaacctttagaaaaatacaattcagtgattggtgtttccgatgtttcatttgatgttaataaaggagaaatcttttgtgttatgggattatctggaagcggtaagtcaacacttgtaaggcatattaatagattattagagccaacatctggaaaaattttaataaacaaccaggatgtaatgcaatttaataaagaaaatttacaagaacttagaaataaaaaaattggtatggtttttcaaaattttgcattgatgccccacagatctgttttagataatattgcaatgcctttagaaataagaggagtaagtaaaaacgataggttagatgcagcaaataacatcttaaatattgttgaattacaagggtggggtaataaatacgcacatgaattatctggaggaatgcaacaaagagtagggttggcaagagcattagctgctgatcctgaatttttactcatggatgagccttttagtgcacttgatccgcttataagacgccaacttcaaacagagtttattaaactttcaaaacaaatgaaaaagacaactgtatttataactcatgatcttgatgaagctgtaagagttggacatagaatagcaataatgcgagatggaagagtagttcaaattggaacccctgaagaaatagttgtaaatccatctgatgattatgttgcagattttgtaaaaggaatttcaagattaaaagttgttcaggctaaaactattatgcaacctttagagcaatataaaaaaaacttcggggaaaatttaagtaataatgaaaaagtaaatgaaaacgacatattaagcaaacttattgaaacttctgtttctaaagataaaccaattgtagttgtaaatgatcataatacggaagttggaattattactcaatcagacctattaaaggcagttgttgaaggaaatgagaatgagtaa

SEQ ID NO: 269642 - DNA, 1915 bp, Unknown
  Bacterial polypeptide expressing nucleotide sequence isolated from the Sargasso Sea
atgatcagcatcaaccaagcacaattaatccgtggtagcaaaaccctgctcgacgaagcctctctgaccatttatcccggccataaggtcggcctagtgggcgccaacggcacgggtaaatcctcactgctcgcattaattatgggtcacctgagcttagataaaggcgagtttagtatgccttcgggttggcagattgccagcgtcgcccaggaaacccctgcactcgaaatgtctgcacttgaatatgtgcttgatggcgataaagaatatcgccagcttgaggctgatctgcatattgcacaggaacataatgatggccatgcgatcgccaccttgcacggtaaaatcgatgccattggcggttatgctattcgcgcccgcgccggagccctgcttgcaggtttaggctttagcgaagcagagcaaaataacccagtgaaaagcttttcgggcggttggcggatgcgcctcaacctagcccaagcactactgtgccgctccgacttactgctgctcgacgaaccgaccaaccacttagacttagataccatgtactggctcgaaggttggattaagtcctatcaaggcacgctgattttaatcagccacgatagggattttatcgatgaaatcgttgatgaaatcgtccatgtcgaaaatcaaaaactcaatttttacaaaggcaactacagtgcctttgaacgcatccgtgctgaacgtatggcacagcaacaagtcgcctttgagcgccaacaaaaagaacgggcgcatatgcagtcttttgttgaccgcttccgctataaggccagtaaagccaaacaagcgcagagccgcttaaaggcgctggagcggatgactgagctgttaccatctcaagcagatagcccgttttatatggagtttcgcccgcctgaggccctgcctaatccgctgattaagatggagcaagtggctgttggctatggcgataagcaaatcctcagcaaagtgcatttaaacttagtgcctggagcgcgcattgggttgctcggccgtaacggtgcgggtaaatcaaccctaatcaagctgttatcaggccagttatcaccgatgaccggattgtatgagcccaatcccggcctgaatatcggttactttgcccagcatcaaattgaatttttacgcttagacgatacgccgctgcaacatttagtgcgccttgcgcccaatgcccgcgagcaggaattgcgtaacttcctcggtggttttggctttaatggcgatatggcactctcgccagtgcgccccttctctggtggtgaaaaagcccgtttagtgttggcattattggtatggcaacggcccaatctgttgctgcttgacgaaccaaccaaccatttagatttagagatgcgccatgcgctcactatggcattgcaaacctttgaaggtgcaatggtgattgtatcgcacgaccgccatttattgcgcttaacctgtagcgactactatttggttgaccaaggtgaagtacaagcctttgatggcgatcttgacgattaccaccaatggttactcgatgccgcaaaagccgccagtgccaaccaaacggccaacagcgatgacaccaaacccgctgtcgataagaagcagcaaaagcgcttagaagcagagctacgccaaaaggtgtcaccacttaaacgcaaacaggcgaagcttgaaaccgatcagcaaaagctcagtgagcggctcgccgaactggagcatttgctggccgatagcgaattatatgatcaagacaataaagccaagctcacctcggtactcagtgagcgcaccagcttgacacaaacgctagaagaaagtgaaatgcaatggcttgagctacaagaagaaattgatgcaatggaacttgagttaatgggccaataat

SEQ ID NO: 269643 - DNA, 1009 bp, Unknown
  Bacterial polypeptide expressing nucleotide sequence isolated from the Sargasso Sea
aatgaaaaaagagattcttaaattacgcgacgttaaagtctactttcccgtaaaagcaggcgtctttaatcgaacagtcggacatgtaatggcggttgatggtgttgatttagatatttatcgcggtgaagtgttaggtctggctggagaaagtggttgtggtaaaactactctcggtaaagcaatcttaagattggttgaacctacaaatggtgaagttacatatgtttcaaaagaagaagatgaaacagaattaacatctttagagaaaaaggatatggatccttttcgaaaaaaacttcagattgtctttcaagatccacattcctctctcaatccttcttttactatttttggatctcttcaagatcctttaaaaaaatttggagttaattcaaaagaagaaagaagaaaaataataggtgatctattagaagcagtaaatatgcgtagagaatatatggatcgatatcctcatgagttttcgggaggtcaaagacaacgaattggaattgtaagagctttgtgtttagatcctgaattgattgtatgtgatgaggccgtcagtgcattagatgtttcaattcaggctcaagttttacaattattaatgcagctaaaaaaagataataatttaacttatctatttattacgcacgatctaagtgtgactgaatatttatgtgatagaattgcagtaatgtatttaggtagaattgttgaactttgtgattctgaagatctttataaaaatactcttcatccctactctgaagctttaatatcagcaataccagtcgcagaccttgataagaaaactaagagaattgttttagaaggagatgtaccaagtccagtgaatccacctaagggttgtccttttcatcctcgttgccctaaagcaaaagatatatgtaaaactgaagtaccaacattaaaaaaatattctacaaatggtaatgaacattatgcatcctgccatttgatcgatttacctgaaataagttag

SEQ ID NO: 269644 - DNA, 1030 bp, Unknown
  Bacterial polypeptide expressing nucleotide sequence isolated from the Sargasso Sea
tatgattaagttagccctttataaatcgctaaatagctttgatttagacataaaccttcaccttgaatcttttactattgcgggaatttttggcccatcgggctccggtaagtccaccttgctacgttgtatcagtggccttgaaggtgagcagagtgtttatataaatgataaatcggtacatcatttaccaactgaacaacgcggtgttacgttgcaagttcaatcttgcccattatttccgcatttggatgtagcaggtaatttagcgtttacacaaaagcattgttttaataggcaaactgacttaactgaacaaaaagttattgatgtacttgagttacaccccttacttaaacgcaacgttcaaagcttgtctggcggggagcgccaacgggtggtgtttgcacgtacgttgttggcaggtcaaaaattaattattttagatgagccatttagcgctcttgattggccgctgcgctttaaaatactctcaacattaagtgaattggcggcaacgtttactattaaatttattatagtgagccactcgttaaaagaactattattttgttgcgataccctggtgcagctcaataacggtaaagtaattaaccatggcccgagtgcgcaggtggctaaagctatttacgctaataataaacaagcaccgctgagcttaattaactttaaaatcattacatttgatgaaaaatacggtgtgtatttgcttaaactacacaaaagcgagcagcagctatttgcattacccagcgctgtagagcaaggaaataaacttatattagagtgtgagcaaatatcagtaagtgcagaaatgccattaaacaaaaataacagcaatgttttaatatgtacgctacacagtgcagagcttatagataaaacatggcaacttacgctagatgtagacgggcaaagcctgtactgctttctttcaccaagagtgtgggatcaaaataactacaaagtaggcgatacactttatgcgactattcataatctagagtaa

SEQ ID NO: 269645 - DNA, 370 bp, Unknown
  Bacterial polypeptide expressing nucleotide sequence isolated from the Sargasso Sea
cggggatgtcaaacgcgttgaactggcgatcgcgctggccaatcggccgaagttgcttctgatggacgagcccaccgccggcatggcgcccagggagcgcaacgagctgatggcgctaacgaggcgtctcgtcacggagtacaagatcggcgtgctctttaccgaacacagcatggacgttgtattcgcttacgccgatcgcatgatcgtgctcgcgcgcgggaagctgattgccgagggcgacggcgaaacgatccgcaacgacgcacgcgttcaggaagtctatttcggcaccggcaagaccttccagccacgcgcgccgctgcatgaagcggcaggcggccatccgggacaaggagcgctgcaatga

SEQ ID NO: 269646 - DNA, 724 bp, Unknown
  Bacterial polypeptide expressing nucleotide sequence isolated from the Sargasso Sea
atgacaaattctattgaagtaatcaatctttcaaaaaaatataaagataaagaagcagtagctaatataaattttaaaattaatgaaaatgaaatggttggtttattaggacctaatggatgtggaaaaactacaactattgggatgattttaggattattaaaaccaagtagtggtaaggttttaatcaacgaagagaatattgaaaaaaataaaatctctcttctacataaaatgaattttatttcaccatatattgaattacctaaaaaacttaaagttaaacaaaatttaattgtttatggaaaattatataacattcaaaatttaaatgaccgaatagattaccttgcaaataaacttagattaaaagaccttttaagcaaaattactggagaactttcttctggacaaaaaaacagggtaagtcttgctaaagctttaataaatgatccaacggtacttttattggatgagcccactgcttcactagaccctgaaactggtgattttgtaagatcgtttttggaagattacaaaaaggaaaaaaaaatatcagttttgcttgcctcccacaatatggaagaagtaaaaagattatgtagttctgttttaatgatgaaagatggtttaatagtggatagaggaactcctgaagagttaataacaaaatatgggagaagaaacttagaagaagtatttttagaaattgcgagaaaataaa

SEQ ID NO: 269647 - DNA, 290 bp, Unknown
  Bacterial polypeptide expressing nucleotide sequence isolated from the Sargasso Sea
aatcttaaacccgaaattcatgatccttgatgagccaacttcagcgcttgatagatctattcagattcaagtaatagatgttttaaaaagattgcaagacaaatataaattaacatatttatttattagccatgatctcaaagtaataagatctatgtgtgatcagatttttgttatgagtgagggaaagctagtagagtttggtaaggctgatgaggtttttgaaaatcctcaacaggaatatactcaaaaacttttaagagcagcactcaaatattcatcaaattaag

SEQ ID NO: 269648 - DNA, 853 bp, Unknown
  Bacterial polypeptide expressing nucleotide sequence isolated from the Sargasso Sea
tatggctaatctaaaagacatacgagatcggatcaaatcagttaggagtatccagaaagtaaccaaagctatgaaaatggttgctgcagcaaaaatgcgtaaggctcaagagcggatggaacaagcacgtccctatagtaattcactgtctgaagtcatagaacatttattgccagatattgatagggaacgacttccattactgaacctaagagagataaaacgaaaagcctatgttgttgtttgtgctgatagagggcttgcaggtgcctttaatactaatttgcttaaaattgcccaaaaagagatcgatgaatttggaaaagatcaggtggatattttttgtattggtaaaaaagcccgggatcattttacatacaggaattataacattgtagaaagccatgtggatttttgggcagagatggaatttgagaatgctatgatgatcgggagaagtgccattgaccattttacaaacggtacagtagatgagatacatgttgtgtataactattttgtaaatgttgcacaacaagaagtaaggtcagaaaccctacttccattaaattatgaaacaaatgaaagtggcccttcggataggttatatgaaccttcaaaagaagaattggtcaatacgttgattcccaggcatcttaatgttcagatgtggaaatatttactagagtcctatgcaagtgagcaggcagcacgtatgctatctatggagaatgcaacatcaaatgcacaggacatgatcaaagatcttactttacaattcaataaggcacgccaagcagcgatcacaacagaaatgctagagatcgtaggcggggctgaggccttagattaa

SEQ ID NO: 269649 - DNA, 604 bp, Unknown
  Bacterial polypeptide expressing nucleotide sequence isolated from the Sargasso Sea
ctcactgaaatcaataaaaaagagctaaaagagattcgtaaaaaaatgcaagtcgtctttcaagacccattctcatcgcttaacccaaggatgacagtctttgagattttaaaagaaccactggattcattctttccctcaatgacaaaagagtcagcacaaaaagacatagaggatggcctaatggaggttggattgacgtcagattatttgggtaggtacccacatgaactctcaggtggacagtgccaacgagttgctattgcaagagcactgatgcctaaaccacaactattgatatgtgacgaggcagtcagcgcacttgatgcatctatcaggggcgaaataatagacctactactaagaataaaaagcgagaaaaaactaacaatgatatttattgcccacgaccttgctgtggttagaaagatatgtgaccgagttatagtgatgcaatcaggcaagatagtcgagcagggtccaacagagaaggtattttttgagccagaaaaggaatacactgcaaacctattaagcgcagtaccggttcccgacccaagaaaagagaaggaaaaatatattcaaagaactcaagcggattaaa

SEQ ID NO: 269650 - DNA, 712 bp, Unknown
  Bacterial polypeptide expressing nucleotide sequence isolated from the Sargasso Sea
aaatccattcgatactttaaatccaagtcactctgtagggaatcaaatcatcagaacgctggaaaaagttggtgttggttcaactgttgaagaaagaaaacagagaatgtacgagctcctcgatttggtaaaattacctagagaattcgaaaagagaatgcctaggcaattatcaggaggacagaaacaaaggattggaattgcaagagcttttgctggttctcctaaaatagttgtagcagacgaaccagtttcagctctagacgtttccgttcaagctgcagtaattgagttattaattgatatacaagaaaaatttgatactaccatgctttttataagtcatgacctttcagttgttcgctatgttgctgatagagttgttgtaatgtacctaggcaaaatagcagaaacaggaactacagaacaaattttttcaccaccctaccacccttatacagaagctcttttatcagctgtgccaattgctgatccagacattaaaaaaagacaaattttattagaaggagcattacccagcccactaaaccctccaaaagggtgtgtatttaatacaagatgtccaagtgctatttctggtaaatgcaatgttattgagccacctattcaaaaattaaaaaatggtcacactatttcatgtcatatagatattaaagagttaagtaaaaaagataatgtctttgcacaatga

SEQ ID NO: 269651 - DNA, 449 bp, Unknown
  Bacterial polypeptide expressing nucleotide sequence isolated from the Sargasso Sea
cttgttagaaatcaaaaaaatatctaaattaataaaagataaaactattttgaatcaaattaatattgaagttaaatctggtgatatatttgggttgcttgggccgaatggtgctggcaaaacaaccacattctatatagttgctggtttaattaattttgatggcggagaaattaatttcttaggtcaagatatctcaaaattacctatgcataaaaggtctcaattaggaataaagtatttacctcaagagccatcaatttttcaaaatctttctgtatatgaaaatttgttgggccttgctgaaataacatttaataacaatcaggatattaaagattttattgaaaaatcaatagaagaatttgatttatctaatatatctactctgaaaggaagacagttatctggtggccaaaggagaaaagttgaaattgcaagaacacttg

SEQ ID NO: 269652 - DNA, 1027 bp, Unknown
  Bacterial polypeptide expressing nucleotide sequence isolated from the Sargasso Sea
tatggaacgtgaaaattcagttataaaatgtgactcagtttacaaaatttttggatccaatcctgaaaaaatgcttgagggcaatctaggaaatgttgatacaaaaaatttccaagaaaaaggttatatagttggagtaaataatgcttcctttgaagtttcaaaaggtgagatattagttgttatgggtctatctggatcaggtaaatcaacattactgagatgtatttcaagattaactgaagctacagcaggaaaaatttatattgatggacaagatttactctctttaaaaaataaagaattaattgaattaagaagaagtaaaatgggaatggtttttcagagttttgcacttttaccgcacaaaacagttatagagaatattgcttttcctcttctaatcaaaggaattaagactaatgaaagtatatctaaagctttagagatggtgaaattagttggcttagaaggaagggaaaattattttccaagggagttatctggtggtcaacaacaaagagtaggtatagcaagatctcttgctgttgaaccagacatatggtttttagatgaacctttctcagcactcgaccctttaataagaaaagaaatgcaagatgaatttttaagactccaaagttctttaaaaaagaccattatgtttgttacacatgattttgatgaagcattaaaacttgcagacagaattgctataatgaaagatggaatcatagagcaattagactctccaggtaaaatagtcttaaatccagcaactgaatatgtgaaaaaatttactcaagaagttccaagggaaaaagttttaaaaatagaatcagtgatggatgaagcaggtgaagaaaaaaacttaagtgattttactgttccaaaagatgcaattatagaaactgttgcagaaaaaatcttaggtcaagaaaaaagcgttgctgttactgataatgaaaaaattgttggcgttgtaaaacctgcaaaaattattcgaattctttttggagaaaattaa

SEQ ID NO: 269653 - DNA, 688 bp, Unknown
  Bacterial polypeptide expressing nucleotide sequence isolated from the Sargasso Sea
gggtgaggtgctggtggtgttgggtactaacggtgcgggcaagagtaccctgctggcgaccctgaccggtgagctggcgcccagcgccgggcaggtgttgctggatcagcgcccattggcaagctggacggcgcaggagcgcgcgcggcgtatggcggtgttaccgcagagttcggtattggcttttgcctttcaggtcgaggaagtggtggccatggggcgcatgccccacgccagcggtcaacggcgcgatgccgagattctgcgcgaggctatggcggcggcggatgtcagtcacctggctgcgcgcagctacttgtcgctgtctggcggcgagcgtcagcgcgtacacctggcgcgggtgctggcgcaggtgtgggacagcgccgagcagggttgtctgctgctggacgagccgaccgcatcgctggatctggcccaccagcatctgaccctgcaacaggcgcgcgagatggccgcccgcgggttggcggtgctggtggtgctgcacgacctgaatctggccgcgcgttacgctgatcgcttgctgttgttgcatgaggggcgggtgtgcgcccaaggctcgccctgggaggtgttgcaggtcgagcggctggagcaggtcttcaaggtgccggtcagggtgcagccgcatccgctgcacgattgtccgctggtattgagttga

SEQ ID NO: 269654 - DNA, 1348 bp, Unknown
  Bacterial polypeptide expressing nucleotide sequence isolated from the Sargasso Sea
gatgcaaaatcctaaagctgccgtaaccgccgcgccggtccagatgccgccgaagcctccgcgcctgggtgaggaaattctgtgcgtcaaggacgtgtgccgcgggttcaacaagacccaaggcgagctgcttgtcctcgacgatgtgaacctgtcgctgcgcgaaggtgagattgtcggcatgctgggtcgttcgggctcgggcaagtcgaccctgctgcgtatcattgccggcctgatcgaaccgaccgacggcgaagtgacgtacctcggcaagccgctcgaaggtccggccaagggtgtcgcgatggtattccagaccttcgcgctgttcccgtggctgaccgtgctgcaaaacgtggaagcgggcctcgaagcgcaaggcgtgggcgcgcgcgagcggcgcgagcgcgcgctggccgcgatcgacctgatcggtctcgacggttttgaaaacgcgtatccgcgcgaattgtcgggcggcatgcgccagcgcgttggttttgcgcgcgcgctggtggtcgatccgacgctgctgctgatggacgagccgttttccgccctcgacgtgctgaccgccgaaaccttgcgtaccgacctgctcgatctgtggacgcaaggccgtatgccgatcaaatcggtgctgatcgtcacgcacaacatcgaggaagcggtgttcatgtgcgaccgcattctggtgctgtcgtcgaacccgggccgcgtgatcgccgagatcaaggtgccgttcaagcatccgcgtaaccggctggacccggcgttccgccgtctggtcgacgacatctacgccaagatgaccgcacgccagaccgacgaagcgaccaggaaggggctcgaactcggtagctggctgccgcacgtgtcgaccaacctgatggccggtctgatcgaaacgctggccgccgcgccgtaccacggccgcgccgacatgccggaaatcgcccgctcgctgcatctggaggtggacgatctgttcccggttgccgaagtgctgcaacacctgggcttcgccgatgtgcgtgaaggcgatattttcctgacgccgccggcgcgtgtgttcgcggaattcggcacgcaggaacgcaagatgatgttcgccgaacacctgctgcgccacgtgccgctcgccgcgcggatcaagaaggtgttgaatgaacggccggggcatcgcgcgccgcgtgtgcgcttcgagcaggagctggaggattttctgtcggacagcgccgcggaagagacgctcgacgcagtgatcaactggggccgttatggcgagatcttctcgtataacgaccagacggaaattttcagtctggaagacgtggagtcttaa

SEQ ID NO: 269655 - DNA, 1115 bp, Unknown
  Bacterial polypeptide expressing nucleotide sequence isolated from the Sargasso Sea
tggttcgcggtattggtttaccttggaagcggttggatgccaacttcccgttggaagccaatgcctggtgcaaaccattgaaggcgaaattgaagcggaagtagtcgggtttggcgatgacattacgtatttaatgcccaccgaagcggtaagaggtattgttcctggcagtagagtgatgccattaagtcgacagggcggtttacccgtgggaatggggctattaggcagagtggtagatggcaacggccagccactagatggccttggtgaaattgaggctgaacatcgcgcacctactacccgtccgccgatgaacccactcattaggcgacctattaatgctgctatggatgtgggcgttcgcgccattaatgcgcttaatactgtgggagtggggcaacgcatggggctgtttgccggcagtggtgtaggcaaaagtgtgttgttaggaatgatgacaagaggctgtgaagcggacgttgttgttgttggcctcgtaggagagcgtgggcgagaagtaaaagaatttattcatgacatcctgacagaagaagaacgtcagcgcgcagtggtagtcgcagcgccagcagatacgtcaccgttaatgcgactaaaaggctgtgaaactgcagtgactattgcggagtattttcgcgacaagggaatgaaagtactgcttttgattgattctctcacgcgttatgccatggcgcagcgcgaaatagcgttagccgtgggagagccgcctgcaacaagagggtatccaccttcggtgttcgcgcggttgccagcactggtagagcgtgcaggtaatgggagtgaaaagcagggttcaatcacggcgttttatacggtgttaacagaaggcgatgacttacaagatccggtagcagatgcggcaagagctatcctcgatggccatgtggtgctatctcgtacattggcagacagtggccattatcccgctattgatattgaatcgtccattagtcgagtaatgccgccagtggtgagtgaagagcatcaattgatggcacggcgtattcgccaagtctattccccaatacaacaaaccaagatcttatctcaattggtgcatatgcaaaaagctc

SEQ ID NO: 269656 - DNA, 754 bp, Unknown
  Bacterial polypeptide expressing nucleotide sequence isolated from the Sargasso Sea
attggaagtggaccagatcagcctctccttcgggggggtgaaagcactccaggatgttagtttttctgtggaagaaaagcagatcatggcgatcatcgggccaaacggtgcaggcaagacatccatgctgaatgtgatcaacggattctaccatcctcagcagggacagattcatttcaagggactccatcgaaagcagttgcgtccccatgaagccgcggttcaggggattgccaggactttccagaatgtcgccctgttcaaaggcatgtcgactttgaacaacatcatggcgggcaggaacctcaaaatgaaaaaaaaccttttctggcaggcactctattacggaccggccagggatgaggaaatgcggcatcgtcttgaagcggaaaaaatcatcgattttctcgaaatccagtcgatccggaaaactccggtcggccgtcttccctacggtctgcaaaaacgggttgaactggggagagccctggccatggagccggacctgcttttgctggatgaaccgatggcgggaatgaacctcgaagaaaaacaggacatgtgccgctttgtcctcgatatcaatgaacagtatggaaccaccatcgtccttatcgaacatgacatgggagtggtgatggacctctcagaacgtgtggtggttttggattacggatgcaaaattgccgatggcacccccgatgaagtaaggtccaatcaaaccgtgattgatgcttatttaggaaacaattaa

SEQ ID NO: 269657 - DNA, 613 bp, Unknown
  Bacterial polypeptide expressing nucleotide sequence isolated from the Sargasso Sea
aatgtctacaattgaattacagcatttaactaaagcatttggtgatttaattgctgtagataatgtctcacttaaagttgaagaaaatgaggtactttgcttattaggcccttccggatgtggtaaaacaactactttaagaatggttgctggacttgaggtagcaacttctggagatatatttattggtaataaaaatgttaataatcttgacacacgtgatagaaatttagcaatggcttttcaattttatgctctttatcctagtttaacagtagcagaaaatttagctaatcctctttttgcagagaacctatcaagtgaagaagttaaaaaaaaaatattagaagttgctgatattcttcaattaagagacattgtaaatagaaaacctcatcaactagctgagggtgaaaaacaaagagttgctgtaggaagagcaattattagagatcctgaatgctttttatttgacgaaccattaagtagactagatgtgcaattgcgagaacaaatgagaggccaaataaaagaagttttatcagatttaaaaaaagcaactgtcatcgtaacacatgatcaattagaagctcttacaatggcaacaaaaatt

SEQ ID NO: 269658 - DNA, 730 bp, Unknown
  Bacterial polypeptide expressing nucleotide sequence isolated from the Sargasso Sea
aatgacaaattctatcgaggtaataaacctatctaaaaaatataaatcaaagaatgctgtcagtaatataaattttaaaattggtgaaaatgaaattgtaggcttattgggtcctaatggatgtggaaagacaaccaccattggaatgatattaggattactaaaaccttctagcggtcaagttttaattaatggaaaaaatatagagacaaacaagatatctctattacataaaatgaattttatatctccttatattgagcttcctaaaaaattaaaagttaaacaaaatttaactgtttatggaaaattatataatgttgatgatttagaaaatcgaattgattatctttcagatcaacttaggctaactgaccttttggataaaataacaggtgaactttcatcgggacaaaaaaatagggtcagtttggcaaaagctttaataaatgatcctacagtactgctactagatgagccaacagcttctttggatcctgaaacaggagattttgtaagaacatttttagaaaattttaaaaaagaaaaaaaaatttcagttttacttgcttcgcataatatggatgaagttaaaagattgtgtggttctgttttaatgatgaaagatggaattattgtagatagtggaacgccaaatgatttaatattgaaacatggaagaaaaaatttagaagaggtttttttggaaatagcgaggaataaaaaatga

SEQ ID NO: 269659 - DNA, 766 bp, Unknown
  Bacterial polypeptide expressing nucleotide sequence isolated from the Sargasso Sea
tatgaacatcatagaagtaaaagacttaaagaaagcctatctgctaccaggagataaatcgaaaacattcaatgcagtcgatcatatctctcttggaatcaagaaaggagaggtttatggaatactcggtccaaatggagcaggcaagaccacaacactagagatgttagagggtcttaaagaaattgatgatggctttgcgatcatcgatggcattgatgtgagcaaagatccttatgcagtcaagaaggtgatcggtgtgcaacttcaaagcaatgagtattttgataaattggacctcagcgagcttcttaccttattttctaaactttattcaacaactatcgatcactcgaagctactgaataaagtaaatttgttggataaagcaaatgctaaaacccaacacttatcaggtggtcaaagacaaagattctcaattgcatgcgcgctggttaataaccccaaaatactctttctggatgagccaacaacaggcctcgatccgcaagcaaagaggaatttatggaatttagtaaaggatctcaatgcttctggcatgacaatcgtattgaccacacacaatatggaagaagcagagtatctgtgtgaccggattgcaatcatggacaagggcaaattgattgcagaggatacaccaaaagcattaattgaaaaatacgcacctgagccttctgatattccattaactggaaacattgaagatgtcttcctcaatttaacaggacactctttgagagactaa

SEQ ID NO: 269660 - DNA, 769 bp, Unknown
  Bacterial polypeptide expressing nucleotide sequence isolated from the Sargasso Sea
ttgcaggtcaggggcctgtgcaagacctatcagaaccgcaccggcctgtttcgacgccgggcggtggaagccatcaagccgctctcctttgatctcgaggtgggccaaaccctggccatcgtcggcgaggccggctccggcaagagcaccctggcccgcattctggcgggcatgatagagccgagcggtggcgagatcgccatcgaggggcagccgatgatccacggcgactatcagacccgctgcaagctgctgcggatgatcttccaggaccccaactcctccctcaaccgcaagatccgggtcggccagatcctagagacgccgctgcgcctcaacaccgagatgaccgaggaggagcgccgcgacaaggtggtgcagaccctgcgcatggtgggcatgctggcggaccacgccctcttctatccgcagatgctctccgccggtcagcagcagcgggtggcgttggcacgggcgctgatcctcaaccccaagattgtggtggccgacgaggcgctctctaccctggatatctcggtgcgctcccagatcatcaacctgctgctggagatgcaggagaccatggggctgagctatgtgctggtagccaacgatctgggggtggtgagccacatcagcgacgaggtgctggtgatgcacgaaggacgggtggtggagcgcggcaagaccctcaaggtgttcgccgatccccagcacgaggtgacccggcgccttatccagaactacaacaacgaataccgccgttgat

SEQ ID NO: 269661 - DNA, 742 bp, Unknown
  Bacterial polypeptide expressing nucleotide sequence isolated from the Sargasso Sea
tatgaatcagcttaattattacgaatgcaaaaatgtttcaaaaagatacggtaatttaaccgcattagataatgttgattttcatattggtaaaaatgaagttgttggattactaggagacaatggcgcaggtaaatcaactttaattaaaatgatgtcaggtgttgttgctccagatacaggaaatgtatttgtagatggtaaagaaacaaaaatttctacaagaaaacagtcggaagaaattgctggtattgaaacgatttatcagaattctgctctttgtgatgatatgacaattattcgaaatatttttatgggtagagaaattactaatttttttggatttatggatcacaaaaaaatggaagatttatctttagaagttttagaatcaggtgttcatatttcaggtatagattcacctcttaaagaaattggagccttatctggtggtcaaaaacaggcagtggctattgcaagggcggtgtattttaagagaaaaatattattacttgatgaaccaacttcagcattatctgttcgtgaaactgaaagagtgttgaaatatgtaactgaattaaaaagtgaaaatgtgtccagtgttattgtaacacataatttataccatgcttttcaggtttgtgaccgttttgttgtaatgagccatggcaaagtaatttttgaaaaaaataaatctgagacaaatcttgaagaggtaacggagcaagttattaaagtataa

SEQ ID NO: 269662 - DNA, 691 bp, Unknown
  Bacterial polypeptide expressing nucleotide sequence isolated from the Sargasso Sea
aatgattcaaatcagcaaccttcataaatcctataaaatgggttctaactccttacatgtattgaagggaattaattttaaaattgatgagggggaattggttgccataatgggctcttcaggatcaggaaagtcaactttacttaatatacttgggatgctagatattgctgatgaaggaaattacttgcttgataatgtattaataaaagacttaacagaaacaattgctgccaattaccgcaaccgatttttaggcttcgttttccaatcttttaatctgatcaattataaaaatgcattggaaaatgttgctttgccactatactatcagggtttaagaagaaaaacccgacaacaaaaagctttagagtacctcaaaaaagttggcttattagattgggctaagcatttacccagtgagctttctggaggccaaaagcaacgcgttgctattgccagagcaatggcatcagaaccgaaagtacttcttgctgatgagccaacgggtgcattggactccaatacttctcgtgaggtaatgagtctcattcaaaaaatcaatgacgagggaaagaccattttagttgtaacccatgaaattgatattgctaagatgtgtaaaagaatcataacccttaaagatggggtcattatagaagataaaaaaacagatcaaattttattataa

SEQ ID NO: 269663 - DNA, 751 bp, Unknown
  Bacterial polypeptide expressing nucleotide sequence isolated from the Sargasso Sea
tatgtctaacgtcgtttcaaaaaacagtgccatcaatgttgttaacctcgaaaaatcggtgactactcaggaaggttcgctcactatcctcaagggcattaacttagatgtcaagcagggggaaagtgtggcgatattaggcccctctggctcgggcaaatcgacactgcttggcttactcgccgcgctagatacccccacgtcgggggagatttggctcgatggccaagccctatcaccgctcaatgaagaacagaaagccgcgctgcgtaagcagaaagtgagctttatttttcaatcttttatgttagttgataccttaaccgccctcgaaaatgtgatgttacctgccgagctagctggggtaaaaaatgccaaggagaaggcagaggctatgttggggcgcgtggggttatcacaccgtttgacccatttacctaagcagttatccggcggtgagcagcaaagggtggctattgcccgcgcctttatctgtgaacctaaagtattatttgccgacgagccaaccggcaatttggacagtgttaacggccataaaattgccgatatgttgtttgagctgaaccaagagagccacaccacgctcatcctcgtcacccacgacttgcaactggcgaaacgctgccagcggcaactggttatggataacggtcacttacaggaagagttagcttcggcctcatcgcacagcgtgaatgacagccttgaattaagcgccaaggaggcctaa

SEQ ID NO: 269664 - DNA, 1000 bp, Unknown
  Bacterial polypeptide expressing nucleotide sequence isolated from the Sargasso Sea
atgacaaagcaaactgctgcccaagggcaagtggctgttaaggccgtgggattgagtaagcggtatgctgagtttgaagcggtaaaagatcttaattttgaggtgtgtacaggccaaaccttagcgctgctaggccataatggtgctggtaaatctacgctgatcaaaatgattttaggcttggtatccccaagcgcgggccagttatttgtgcaggggcaagaggtacaagccaagcgggtcaatgcgagtttatctttaggctatttgcctgaaaatgtaagcttttatgacaatatgacggcgcatgaactcttaagctactttgccaagcttaagggcgttgcacctgtgcgagtcaaccttttactggaagagtttggcctgatggcggctaaggataaacggctgcgcaccttttccaaggggatgcgccaacgtttaggcttagcccaagcggtgcttgctgatcctaaagtgttgctgctggacgaaccgacagtcgggctcgaccctctggcatcggcctttttgtatcaaaaaatggcgcaacttaaggcccaaggctgtgcgattattatcagtacccacgagttaggtttagtgcaagatcaaatggatagcgcgctgattttaggccaaggccagatgcttgcctcagggaatttgctcagtcttagggctgcaacctcgctacccagcctgattgaattgcatcactttacgccgctgcaatatcagcagttgctaagccaagcgttgttcgcctcactgttagaaccctcagcctcagaccgagtgtgcttaagggtgcctgatgcgctaaaagccaaggtgatacagcaattacactccctgaagatccatgagttttctattgtgccgccgagtttacaggatatttttcattgttatatggcgaatcttcacccccagagcgcgtccagttgcaacacctttgctggtacagaaaaccttaattcggagttagtggcatgag

SEQ ID NO: 269665 - DNA, 802 bp, Unknown
  Bacterial polypeptide expressing nucleotide sequence isolated from the Sargasso Sea
gctgtcgcccagtaccagcagggtctgggcctgcaccgatgacaccaggcagcacaaggcaaacaggaaacgcgtcatgaattcaactcccattatcaacgtcaagggcctgggcaagacagtgcgcctgggccaggaaagcctcaccatccttgaagggatcgacctgcaagtcaatagcggcgaaacagtggcgctggtcggcgcctccggctccggcaaatccaccctgctgggactgctggccgggctggatctgccgagccagggggatatcgagatcctcggccagtcgctgctgcagctggacgaggaggggcgtgcccggctgcgggccgagcaggtcggctttgtgttccagtccttcctgctgctgcccaccctgagcgcgctggaaaacgtcatgctgcctgccgagctgcgtggcgagacccgctgcgagccgcgggctcgcgagctgctggcggcggtcggcctcggcgagcggctgcaccatctgccgccgcgcctctccggcggtgaacagcagcgggtcgccatcgcccgggccttcatgacccggcccagcctgctgctggccgatgaacccaccggcaacctcgatagcaagaccggggagcgggtgatcgagctattgttcgagctcaaccgcgagcatggcaccacgctcgtggtggtgacccatgatcatgagctggctcagcgttgccagcggcagctggtgatggcggcgggacgactggcggcggatgcgtcagcatccgaagccgcctctgcagcaagagtcagggagctgtcatga

SEQ ID NO: 269666 - DNA, 1198 bp, Unknown
  Bacterial polypeptide expressing nucleotide sequence isolated from the Sargasso Sea
tgaagaaggcttattctttctgaccaactttgaagcacctaattatcgcttggtaaaaattctttacactggcgaagttgttgaaataattccagaaacagatcttgcattaaaaagtatcagtattttagacgacttcattattactaattctatcaacactgatatgaattctatggtcgaattttattctaagggtggagagcttttagatttcaaaataccagatgatattgaaggtacgctcagttccttcagcatgcacaaagacaagttgcgattttctgtctctaatttcatcaatccaacacgatatattgacctggatcttaacactctcgactatacgatagtttggcaagataaagtttctaatttcaatccggcaaattatgaaaaaacctttacatattatgaaagcaaagatggcaccatggtgcctttaacttattttcacagaaaggatcttgaaatcaattctgaaactccaatttttttatacggctatggaggttataacatttctatcagaccgtcttttagtcggaagtatgtaggctggcttgaacttggaggtgtagttgcaattgcaaacttaagaggcggtggtgagctcggaaagaaatggcataatgctggtcgcttaaaagaaaaacaaaacgttttcgacgactttttatatgcttcaaaataccttgaagccaacaacataggtaatcgtaaatccactgtgattagcggtcgatccaatggtggcttgctggtaggcacatcacttgttcagaacccaaattattttggagcaactctgccagcggttggagtgcttgatatgttacgcttcacagaattcactgaaggctggggttggcgtggcgattatggaagtccgttgttgagtaaagaagattttgattttaattttgagatatcaccctatcatcaacttaaagaaggtgaatgttactcaccaaccctcgtaactacagggcgtcgagacgatagagtagtaccatcacactcttataaatttacggccaggatacaggagttccaaggttgcaacaatccagtgatgctaattgatactgtcagagcaggacatggttcgggaggcggtgcggctatgccaaaatggaagagaatagaactctttacttcagagcaagcctttgctttgaagcatgttagcagttaa

SEQ ID NO: 269667 - DNA, 2263 bp, Unknown
  Bacterial polypeptide expressing nucleotide sequence isolated from the Sargasso Sea
atgtcgttgtttcgcgcgtttaaagctaaattatttaataccaaagaaaaaagctgcgcccatcaagacatacctcttcaaacttcttccaatccactcccatccagtacctttaaaccctattttagtcttgccattcaagcgactccggcgcaagccactcattcagaaactcacgaggaatttacccgccacgacttcgacagcccgcaaacgatcgaactgctaggttgggaacgagagcatgaatcctgcacctttcacgagacccaatttgaccgcatcgagatacacggccctgtgcaagatttttatctcggtcaggataagacctgtagcctagcgctggattctgatgcagcgacaactcaagcccgctggcaagtggcactggtaaacccgcaggaattagtgatctgccgtttttatatcgatgcagggtacagagtacaaggcgatatgcaggacttcggcagtctcactggcaaactgcagcggacatttcatcagattgagactgagcaaggtcagaatctactgagaattgtcacccaatcccccaacctcactcaggccgtcgattgcaattactttggtgagcgcaacggcatcactcgccaattcaatgccttaggtgtattgcagttcgaagggcattttattgaggagcaacagctcgggcgccagacttggtatgacaatgagggcaaaatcaatcaagtcgaggagcgccacgccgagggaatgttgctgacccgctactatagcaatggtcagataaaagaaaccgccgaaaaggatagcgaagataattatatcaatccgttaactcgctattatgaatcaggcgccctgtggctaatacgccccatgcaggcgggaaaaatccatggcacagagcatatctactatgaagatggcaagctacaggccgaattaagctatgacatgggggaattggttaaagagctttggtaccataccaacggcaatcttaagcaagaagtccatctcgatgcagcgggcaaaagcctcgaaacctattacgaagatggccaactcgcctggcgagaacgcctcaatccacaagggttaaattgcggtctacgccaggaatggcaccccaatggcgtgctggcaaatcaactcaattttgttgatggtgttgcccatggcaacagcgagaaatggtatccgaacggacagcttgaacaatgcatcccctttgagaatggccatgagcaggggcttgccacttggtaccatgaaaatggtcaactctcccttgagatctaccttgaaaagggtctaagagagggccttttccgcagctattatgcaagcggcgtattgtcagccgagggccaatatcagcgtaacctctccgtcgcgccctttatcgaatactatgaaaaccagcaaattcaaatgtatctgccccacactcaaggcaatcgcgatggcacggcccgctggttttatgaagacggtactatcaagacgattgctgaatattttgtccgagacggccaaggttaccttaaggaaagctcctcctataacaagcaaggggttctcgaatcctttgagagccactccaatacccgttgtggctatcaacttgaggataatcaacgggaatattatcaaacgggccaccctgacactcgcatcgaatactatgaggatggggccatccgttggctgctcactcgcctagatgagaacctattcagctcaaaagccttttcaaaacaaggcgaattgctagagtctggctttgtaaaagtgatagataacgattatcaggatgtcggccactggcaacgttttacaccgcaaggccaactgcagcgcgaagcctggctcagtgacgatggcaggctcaatgaaacccgtcactattttgatgccgccgagcagcaacagacgatggcagcagaaactaaggtcgatgacaataacattgtcgaggcggtggctaagtctaacgatactcaggagccacaaacgtcggcgcctatccttagttaccatttgaaatttgacccagatagccaactctatgccatgaaacgctatcatccgaatcgtcaaatcgccgaagaaggcaacttactttttcaggggcaagaacacttgtgggtggggatccacaatcagtacgataaacaaggccagctcgaactatctgaaacctatactatgaatggtgagccgatagaacagtccagcggttcaaaccatagagtcttgaattgat

SEQ ID NO: 269668 - DNA, 436 bp, Unknown
  Bacterial polypeptide expressing nucleotide sequence isolated from the Sargasso Sea
gctgagatggaatttgaaaatgcaatgatgataggaagaagcatcattgaccattttacaagtggatctgttgatgagattcacgtagtctataattactttacaaatattgcacagcaggaagtcaaatctgagacgcttctacctttatcatatgataagggcgagtatactgtttctgaccgcctatatgagccttcaaaagaggaactggttgaagctctgattccaagacaccttaatgttcagatgtggaaatatttactagaatcatatgcaagtgagcaagctgcacgcatgctgtctatggagaatgctacttcaaatgctcaggatatgatcaaagatttaacgttgcaattcaataaggcaaggcaggctgcgataacaacagaaatgttagaaatcgtcggtggagctgaggccttaggataat

SEQ ID NO: 269669 - DNA, 1122 bp, Unknown
  Bacterial polypeptide expressing nucleotide sequence isolated from the Sargasso Sea
tttgaacgaagaagaaatgaatgaactccttgaaaagcaggggactcttcaaaatgaaatcgatgccgttgacggatggcaaatagagcggactcttgagatagcagccgatgcgctgcgtcttcccccatgggaagatgacgtaaatcatctttccgggggtgagaaacgtcgtgtggcattgtgcagattattactatcaaaacccgatatgctcttgttggatgagcctacaaatcatcttgatgccgaaagtgttgcatggctcgaaagataccttcaggattattctggcactgttgttgccataactcatgatcggtacttcctcgacaatgcggccggctggatattggagcttgatcggggtcacggaattccatatgaaggtaattacagcgcatggctggaggcaaaagagaaaagactcgccgttgaggaaaagcaacagtctgctcatgagaagacgattaagtcggagctggagtggatccgcgccaaccctaaaggcaggcagtccaagagtaaagcgagaattgcccgttttgaagagttgaattctcaaagctttcaatctcgtaacgagacccaagaactttatatacctccaggcactcgactcggcgataaggtgcttgaggttaaaaatcttagcaagggatttggatctaaatctctaatcgaaaatctcaatttttcactacctaaaggcagtatcctggggattgtcggtggcaacggtgctggaaagacaactttccttagaatgttagtttcctctgaaaaacccgattccgggaccatcgagttaggagaaacggtaaaactcgcttatgtcgatcaaagtcgagacgaattagatggtgaaaaaactgtttggcaagaaatttcagatggacaagataaccttgtaatcggtaattatgaaatcgcatcccgcgcatacgctagccgatttaactttcgtggtggggaccaacaaaaatttgtaaaagatctctctggtggtgagagaaacaggcttcatatggccaagcttttgaaaaaagggggcaatgttcttcttttagatgagcctacaaacgatttggatgtagaaacattgagggcattagaagaagg

SEQ ID NO: 269670 - DNA, 1048 bp, Unknown
  Bacterial polypeptide expressing nucleotide sequence isolated from the Sargasso Sea
tatgcacgcagtaaaaattgaaaatttaagccataaaattcaaaaaaaaaatattttgaataatattaatttggaactaaaaaaagataaaattgcatgtcttcttggtccttctggaagtggaaaaaccactcttttaaaattaattgctggtttagaaaaggtacaagaaggcaaaatttttttaaataatgttgaagttagttcttctaaaaaacatttaaaaactgaaaaaaggaaaattggttttttatttcaggattatgctcttttccctcatcttactgtagaagaaaatataaagtatccgattaatttcaaaaattctaactatacaattgaagatataattgatttaattaaacttcctaattctctaaataaatatccacatgaattaagtggtggtgaacaacagagagttgcattagccagatcgattattgctcaaccagatttattgcttttggatgagccgttttctagtttagatttaaatcttagagaagaggtaagagatgatacattgcactttcttcaaaaatcaaatgtttcatcaattattgtcacacatgatccatttgaagctatgtttatttctaaccaaattagtattataaacaatactggtgaaatagttcaaactgggtctccaaatgaattatacaatcaacctataaattcatatgttacagaattctttggtgaaacaaatttatttacaggaagggtaacgaattcttttgtggatacacctataggaaaagttaagactaaagtagaattagaaaataaagaggttactgttcacgtaaggccaaagggtattaaattaagcaaaaaaccaacacctgtaaatggtgtcaaaggcacagttatggcatcaaaaatgatgggttcatttagctttatacacatttcagtattaaataataataacgaaatagtacatgttcatagtcatatgccatcaaattttattccagatgaatcttcagctgtagaaattgaaattgacgaaagtcaaacatttgtatttcaaaattaa

SEQ ID NO: 269671 - DNA, 928 bp, Unknown
  Bacterial polypeptide expressing nucleotide sequence isolated from the Sargasso Sea
tatgcatgcattatcaataaaagatctctcaaaaaaatataaaagcggtgttgaagcactcaaaagcgttagttttgatgttcaagaaggagatttttttgctcttcttggcccgaatggtgcaggaaagacaactgcgataggaatcatcacatctcttgtaaataaatcttctggatctatagaggtttttggtcatgatcttgataaagaattggcaaaagcaaaatcttgcatcggtgttgtgccgcaagaagtcaatctgaatctttttgattacaattttaatattttggttaatcaggcaggattttatggcattccaagaagtgaaggaaagaaaagagctgaacagtatttgaaacagatgcagctctgggataaaagaaagacaaacgccagaagcctatcgggaggaatgaaaagaaggctgatggttgctcgagcattggttaatcgaccaaaactcctattgcttgatgagccaacagcaggagtcgacattgaaacaaggagaatgatgtgggattttctcagagatctgaattctaacggaacaacgatcattctaacaactcactaccttgaagaggcggaacagttgtgtaataaggtcgccattatcgatgaagggaaaatcatagaaaatgactcgatgcaaaatgttttaaaaaaactcaagaccgaagtattcatccttaatacagagaagccaatcgataaagcacctgaaattgatggctatgccactgctttgaaatcaccacaagagattgaaattactgtttctcaggagcagggcgtgaacgatgcttttagtaccttgcaagaaagaggagtgaaggtactgagcatgagaaataaaaatagcagactagaggaactttttcttgatcttacaaaaggtcaacagggagagggcgaatga

SEQ ID NO: 269672 - DNA, 283 bp, Unknown
  Bacterial polypeptide expressing nucleotide sequence isolated from the Sargasso Sea
tatgagtactaaaaattatatcaaaattaaaaatttatctaaaagttttggagatgttgaagttttaaaaaacattaatcttgaagtagaagagggtgaatttttctcactacttgggccatctggatgcggaaaaactactttactgagaatattagctggatttgaatatccatcagaaggtgaagtattttttgatgatgctaatgtgacatctcttccacccaaccttcgaccttcaaatatggtatttcaaaactatgctatttttccccacattaat

SEQ ID NO: 269673 - DNA, 1153 bp, Unknown
  Bacterial polypeptide expressing nucleotide sequence isolated from the Sargasso Sea
cttggttcttgagtctaccggcatcgtccctttgatgaaatcatcaccaatttctgtgatttttatatccaatgtttcaacaagggtattttcatgtgctttatcaataatcgcttgcctatcaagtcctgttttatgccaaatctctgccattgtttatttgaatagaattaaattaaagcaacattattgctttattttcattaaggtgcaaaatgcatttggtatgcatgctttatcgataaaaaatctctctaagaaatataaaagcggtgttgaagcactaaaatctgtaagttttgatgtacagcagggagatttctttgctttactcggtccaaatggtgcaggtaagacaactgctataggaatcattacatcacttgtgaataagtcatcaggatcaatagaagtttttggtcatgacctagacaaagaattagcaaaagcaaaatcatgcatcggtgtcgtaccccaagaggtcaacttgaaccttttcgatttcaacttcaatattctagtaaatcaggctggtttctatggcatccagagaagtgaaggcaagaagagggctgagcagtatttaaaaaaaatgcaactttgggaaaaaagaaacaccgacgccagaagtttatcgggaggaatgaaaagaagactgatggtcgctcgggcattggttaatcgaccgaaactcctgttgcttgatgagccaactgcaggcgttgatattgaaacaaggagaatgatgtgggattttcttagagacttgaatgcaagtggcacaacaattattttgacaacgcactacctagaagaggcggaacagttgtgcaataaagttgccattattgatcaaggcaaaattatagaaaatgaatcgatgcaaaatgttttgaaaaaactaaaaaccgaagtctttattctcaacactgaaaagccactcgatgaagccccagaaattgatggatatatcactgctttaaaatcaccacaagagattgaaattactgtgtcgcaagaacaaggcgtgaatgatgcttttggctctttacaagaaagaggggtcaaagtacttagcatgagaaacaaaaatagtaggcttgaagagctttttcttgatcttaccaaaagccagtcaggcaacgaatcatga

SEQ ID NO: 269674 - DNA, 1054 bp, Unknown
  Bacterial polypeptide expressing nucleotide sequence isolated from the Sargasso Sea
tatggaagctgctatacagatccaaaacgtttggaaaatattcggaaatacatccaatgatgcattagatgcaatccaaaataagaaaatttcaaaacaagaagctttagaaaagtataattcagtaattggagtttccgatgtttcgtttgatgttaataaaggtgaaatcttttgtgttatgggattatctggaagcggtaagtcaacacttgtaaggcatattaatagattactagagccaacatctggaaaaattttaataaacaatcaggatgtaatgcaatttaataaagaaaatttacaagaacttagaaataaaaaaattggtatggtttttcaaaattttgcattgatgcctcacagatctgttttagataatattgcaatgcctttagaaataagaggagtaagtaaaaatgataggttagatgcagcaaataacatcttaaatattgttgaattacaagggtggggtaataaatatgctcatgaattatctggaggaatgcaacaaagagtagggttagctagagcattagctgccgatcctgaatttttactcatggatgagccttttagtgcacttgatccgcttataagacgtcaacttcaaacagagtttattaaactttcaaaacaaatgaaaaagacaactgtatttataacccatgatcttgatgaagctgtaagagttgggcatagaatagcaataatgcgagatggaggagtggttcaaatcggaactcctgaagaaatagttgtaaatccttctgacgagtatgttgcagattttgtaaaaggaatttcaagattaaaagttgttcaggctaaaactattatgcaatctttagagcaatataaaaaaaacttcggggaaaattttagtaacaatgaaaaagtaaatgaaaacgatatattaagcaaacttattgaaacttctgtttctaaagataaaccaattgtagttgcaaatgaccataataaggaagttggaattattactcaatcagacctattaaaggcagttgttgaaggaaatgagaatgagtaa

SEQ ID NO: 269675 - DNA, 739 bp, Unknown; identical to SEQ ID NO: 268782
  Bacterial polypeptide expressing nucleotide sequence isolated from the Sargasso Sea

SEQ ID NO: 269676 - DNA, 1008 bp, Unknown
  Bacterial polypeptide expressing nucleotide sequence isolated from the Sargasso Sea
aaaatacttctgccgaggtgctcgacgcagtaacgaagcagaaaatttccaagcaggaggcgctcgagagatataacgccgttattggggttttcgatgtttcatttaatgttaatcccggtgaaatattctgtgtcatgggtctgtcggggagtggcaagtcaaccctcgtccgacacataaaccgtcttctcgagccaacgctcggaaagattctggtcgacgggcaggatgtcatggcgcttgagcgtgaggcgttacagacatttcgcaacaaaaagatcgggatggtgttccagaacttcgctctaatgcctcatcgatctgtcatcgacaatatcgctctgcctctcgaaatcagaggcataaataagaatcaacggtataaaaaagcaaacgatattcttaatatcgtcgaactcggcggatggggtagcaaatttgcccatgaactctccgggggtatgcagcaaagagtgggtctagccagagccctcgccgcagatccagagatattgttgatggatgagccgttcagcgcgctggatcctctaatccgaaggcagcttcaggtagagttcattaagttgtctcggcagttgaaaaagacgaccgtctttatcacgcatgaccttgatgaagcggtcaaggttggccatcgtatcgccattatgcgcgatgggaaggtgatccaggtggggactccggaagaaattattatggatccggaagacgactatgttgcggattttgtgaagggaatttcaagactagaggtcgtgaaagcgggctctatcatgacgcccattaatatgtttaagagccttaatgggccgatcccgcaaaattgtgtccgcatgagagaagacgatgttctgagtcgactcgtggatagtcttgtttctagcaaacagcccgtagtgatcgtggatggagggggtcagactgttggcgtagtcagtcagcacgatgtccttgcctcaattgttgaaaatcgtgatgactgac

SEQ ID NO: 269677 - DNA, 676 bp, Unknown
  Bacterial polypeptide expressing nucleotide sequence isolated from the Sargasso Sea
catgttagaaatcacccaagtatccaagacatttcatcttcacacacagcagcaggccgaaattcccgttgtgactaatgtgggttttgccgtgcagccaggtgaatgcgtcgccctaactggcgagagtgggtcgggaaaatcgactgtgctgcggttgatctatggtaattatctggccaagactggcagcattactgtaggtggcaccgagattgttgccgccgacccacgtaccatccttgatttgcggcggacaacgctcggttatgtaacgcagtttttgcgggtgctgcctcgcgtgccaacgacgcgggttgttgctgaaccgatgatccaagctggccatgatgccactgctgcggatacacatgcccgtgatttgttgcggcggttacggattcccgaaacattgtgggatttgtcgcccctgaccttttctggcggtgaacagcaacgcgtgaatattgcgcggggatttgcctatgattatccggctctgctacttgatgagccgacggcaagcctcgatgcgacgaaccggaaaaccgttctcgatatgatcgacgccgcaaaacagcgaggctgtgccatcctcgggatttttcatgattacgctgcccgagaggcggtttgtgacagggaaattgacgttagtcagttcgctgtcgaatga

SEQ ID NO: 269678 - DNA, 643 bp, Unknown
  Bacterial polypeptide expressing nucleotide sequence isolated from the Sargasso Sea
atgggtgattcaatacttgaactaaaagacttaagtcattcttatgacggaagtgagatttctttaaagaatataagcttaatagtaaataaagctgagaaagtttctgtcttgggcccatctggttctggaaaaagcaccctacttagacttatcgcaggtcttgaaaagccatatagcggaactataactattcaaggaaaaattgtttcagatcaagatcatatggttgctcctgaaaaaagaaatgtgggtcttgtagttcaaaataaagcgttattccctcatttaaccgtggaaaagaatattggatttggaatcagaaaaaaccaagagaaaactaaaattattgctgatctcctaagtctttttaagatagagcatttatcaaataaatatcctcatgaaatatcaggtggagaacaacaaagaactgctatagcgagatccatggctcctagccctgaattgttaatgctggatgaaccttttagtgccttagaccgagagcttaaagaagagttgtatgcagagttaaatcatatatttaaggaaaggcaacagaccatcatgcttgtgactcacgatttagatgaagctaaggttctaagcgacaagcaaattaatttagaaaatacttaat

SEQ ID NO: 269679 - DNA, 679 bp, Unknown
  Bacterial polypeptide expressing nucleotide sequence isolated from the Sargasso Sea
atgtcagaaattgttatatcaacctcaaatttatgtaaaacttacgttagtgctgcacttgatcctgtacacgctctcaaaagcgtagaaattgcaattgaagaaggtgaaattgtaggaattatgggtccaagtggttgtgggaagacaacattactaaattgcttgtccggtttagacacaatagatgacggtgatatcttaattcaaggtaaatcattaagtgatctaaatgatgatcaactcagtgagttccgtgcaaaaaaaatgggttttgtatttcaaacttataatcttctccccgttctaaatgctgtagagaatgtagaattacctctcctagtctctggtatgtcagctaaagctgcaagaaataaagctatagaaaaattagatgaagttgatttagttaaacaaattcaccaattaccaggtgaactttcaggtggacaaagacaaagagttactatcgcaagggctttggtcaatgatcctgctattgtttgggcagatgaaccaactggaaatctagatagtgaaaatgaaattgaaattatgaatctacttactcaaatgaataaggaaaacaatcagacatttgttattgttacccactcagattatgttggcggaagggctaacagaataataaatatgaaagatggagaagtagtatagc

SEQ ID NO: 269680 - DNA, 745 bp, Unknown
  Bacterial polypeptide expressing nucleotide sequence isolated from the Sargasso Sea
tatgagaacggcattggcatttgaaaatttgacacttggctatgatagccaggcggcagttaataaccttgaggcagatattgcggaggggagcctaacagccgttgtcggtccgaatggagcaggcaaatctaccctgcttaggggggtagtgggagcactctcgccgttagagggtagggtagccttcggcacgttgagccgcgatgatatagcttatctgcctcaacaatcagaaatagactggacatttccgatgttggtgattgatcttgttgcaatgggcctttggcgtgagattggtccttttggccaactcaaaggagaccgtctggctcgtgtcgaagcggcggtggcaacaatgggtttgaagggctttgaaaaccgtcccatcgggtcactatcaggtggccagatgcaacgtacacttttcgcacgactattattgcaggatgctagcctgatcctgttggatgagcctttttcggcggtcgatgccagcactataggggttctgcttgatttaattcaacgatggcatgaagaaggccgcacggtacttactgttttgcatgatcatgagacggttcgcacacatttccccaagacacttatgctcgcacgggagctagtggcccacggtccgacggaacaggttttgacagctgaaaatcattctcgagctcttcaaatgtgcgaggcttgcgatggcccgccacatgtttgtggacgacctgtggcatga

SEQ ID NO: 269681 - DNA, 1099 bp, Unknown
  Bacterial polypeptide expressing nucleotide sequence isolated from the Sargasso Sea
tatggctaatgttcaatttgaaaatctatttaaaaattatggtgatgtaaaagctgtagaagacttcaatctaaaaattgcagatggagaatttattgtattagtaggcccttctggatgtggaaaatctacaacacttcgaatgatagctgggttagaagatataactgctggtaatatttacattgatgatagcctaatcaataaagtccatcctaaagaccgcgatatagcaatggtttttcaaaactatgcattatatccacatttatcagttaaagataatatttcatttggacttagggcacaaaagttacccaaaatggaggtagaaaatagagttttagaggcttcggaaacattaggtttgcaagggcttttgtcaagaagaccaggagaactatcaggaggtcaaaagcaacgtgtagctatgggaagagccatcgttagaaatcctaaggtttttttattcgatgagccattgtcaaatttagatgccaaactgaggcataaaatgagagctgaaatgaaaaagcttcataagcaggttggtacaactacaatttatgtcactcatgatcaaattgaggcaatgactttagcagacaggattgttattatgaaagatggagtaattgagcaagtaggcacgccaaacgaagtatataaaaaaccaaataacatttttgttgcaagttttataggaacacctgctatgaacttttttgaaggaaaagtaaagagttgttcaaaatcattaactacaattactttaaaagatcaaaaagaaataaaacttagcagtaatatatatgaaaaagatcaagatattatatttgggataagaccagaggacataagtgtaaatcttgataaaaaaagtaaaatgaaagattcaattgaattagatgcagaaatttcagttattgagccaatgggtcacgaaacggttgtaatatgtgacagtaattatggagaacttacaggcaaagtagaaagtagccacagcctaaaagaaaacatgaacgtcaaacttattataaaagaggaaaagatatatcaatttgataaaatgtcagaaaaaaatttattattataa

SEQ ID NO: 269682 - DNA, 1518 bp, Unknown
  Bacterial polypeptide expressing nucleotide sequence isolated from the Sargasso Sea
taagagatgctctgtttagccgtgtcactgaacatgccatgcgtaaagtcggtcttcgggtatttaaccatctacaccagttagaactgagttttcatttagaccgccaaaccggcggtatcagccgggatatagaaagaggcaccaacggcatcagttttctgatgcggtttttaatgtttaatattgtgcctaccctgctggaaattctgatggtggcggtgatttttgcgctgctgttttcctactggtatgcggtactgacttttattgctgtggctttgtatgtggccttcactttttatgtcacagagtggcgtaataaatacatccgtgaagccaatcaggcagattctgccaccaacagcagagcagtggacagcctgctgaactatgagacagttaaatactttaataacgaagcttatgaagagcgcacctacgatcagtttttagccaactgggaaagcgccaagctaaaaaaccgtatgtctttgttagcattaaactcaggtcaggcattgattattgccctcgctattacgctaatgatgtggatggctgccaaaggcgtgctcgacaaagagctgactttgggtgatttggcgatggtgaatgcttatatgctgcagctatttatcccactgaatttcttaggctttgtttaccgtgaaatccgccgctctttaaccgatctggaaaatatgctcgggcttttgaaaaaagaagcgcagatcaaagacaaaacagatgcgccagagctgcagttacagcaaggccgcattgagtttaagcaggtgcattttagttatcagcctggccgccctattctgaatggcttaagttttgtggtagagccaggtcagaaactagcgattgtcggcgcttcaggcgcaggtaaaagcaccatagccaggcttttataccgtttttacgacattcaaagcggcagcatttgcatcgatggtcaggatttgcgtgatgtcactcaaagctcattacgccagagtattgccatagtgccgcaggatactgtgttgtttaacaccagcatcagagaaaacattcgttacggtaaacctgatgccagcgaggcagaagtcgatcaagtgattaaactggctcatctggacagctttattcaaagcttgcctcaaggggatcaaaccttagtgggtgagcgtggtttaaaagtatcaggcggcgaaaaacaacgtattgctatagctcgcgtgctgttaaaaggctcccctattctgatttttgatgaagcaacttcagccttggattcccactcagaagccgctattttaaaggcgttgcgtgaactggcgaaacatcatacctctgtggttattgcacatcgtctgtctactattactgatgccgacgccattttagtactgcaacaaggtgaagtggccgaagcaggtactcaccagcaattgctggcccagcaaggactttatgcacagttgtgggctaaacaacaagaggctaaaaccaaagctgagtaaa

SEQ ID NO: 269683 - DNA, 1318 bp, Unknown
  Bacterial polypeptide expressing nucleotide sequence isolated from the Sargasso Sea
aatgtacggcgacgtcgaggacgaggaggacgacgacgacaccgccgacgttctcgcggattgtcaattcaccctcgcgtacggctccaaggtgttgctccacaacactaagctcaagctcaagcgcggtcacaagtacgccctcctcggaggcaacgacagcggcaagacgtcgctcatgcgcgccatcgccaacgaacaagtcgagggcttcccgcccgcgagcgagcttcgcacggtgttcgtcgaggcggacatcatcggcgaactctccgatttgccgtgcgtcgattacatcttggccgatcctcgcattaaagatgcgggcatcaccgaagaaaccgtcgaaaagatgctcttaaacgtcggctttggcgaaatgcaaaacggcgcgcgcaacttggtcacctttctctccggtggttggcgcatgaagctcgcgctcgcgcgcgccatgtgcctgaacgcggacattttgctcatggacgaaccgaccaaccacttggacgtcatgaacgtcaagtgggtcgaggaatacctcaagtcgctcaccgacgtcaccgccgtcttggtgtcgcacgacacgggcttcgtcgatcgcgtgtgcaacaacatcatctccatcgagaacttaaagctgaagcagttccgaggcaccctgacggaattcgtcgaaaagaaccccaaggcgcgatccttcttcgaactcaagagctcgagcggtttcgtcatgcgcttcccgcaaccggggttcatcgacggcgtcaagtccaagggcaagccgctcatgaagatggccaactgtacgtacacgtacccggtgaacgaagtgccgaccgtcaaggacgtcaccgttcaagtctcgctcgcgtctcgcgtcgcgtgcgtcggcccgaacggcgtggggaaatccaccatgatcaaattgctcaccggcgaaatcgttccgcaagagggcacggtgtggaagcacccgaacgcgcgcgtcgcgtacgtcgcgcagcacgcgttccatcacatcgaacaacacctcgaaaagacgccgaacgagtacattcgctggcgataccaacacggcgacgacaaggaagccttggtcaaggacaccatggtgctcaccgacgaggaaaaggagcggtgcaagcaacccgtcaagattgacatcggcaaggacgaaaagggtaaccagatgacgctcaagatggcgatcgaaaagctcaccggcggtcgcaagcaggtgaagaaggagtacgagtacgaggttcaattcgtcggccgcgattacaactccaaccgatacattcaagcgaccaagctc

SEQ ID NO: 269684 - DNA, 1834 bp, Unknown
  Bacterial polypeptide expressing nucleotide sequence isolated from the Sargasso Sea
ctgctgagcggcgtcagcagtggtgactggatgtcggcgctcaccttcgcgctggcggtggcggtggggctcacccccgagatgctgccgatgatcgtctccgccaacctggcgcgcggtgccgtggcgatggccaaacgcaaggtggtggtgaagcggctcaactcggtgcagaacttcggcgccatggacgtgctctgcaccgacaagaccggcaccctgacccaggacaagatcatcctcgagcaccactacgatgtgcgtggcaagcgggacgaccggatcctgcagctggcctggctcaacagctttcatcagagcggcatgaagaacctgatggacatcgcggtggtcgagcacgccgatgcgctgggggagagctgcaagccggccaactaccgcaaggtggacgagctgccgttcgacttcgtgcgccggcgcctgtcggtgattgtgcaggacgatctgggccagcagttgatggtttccaagggggcggtggaagagatgctggccgtctccagccagatcgcggatggccaggaggttagggagctgaccgacgccgatcgccgcgccctgctgcgccagagcgaggagttcaacgccgagggctatcgggtgctgatcgtggcgacccgcgagatcccggctaccgagtacaagcagagctatcgcaccagcgatgaggtcaagctggtggtgcgcggcttcctcaccttcttcgatccgcccaaggattccgccgcaccggccatccgcgccctgaacgactacggggtggcggtcaaggtgctgaccggtgacaaccccatcatcaccagcaaggtgtgtcgcgatgtggggctggagcccggcgtgccgctgcttggcaaggatatcgaggtgatggacgacgtggctctgtgcaccgtggtcaagcacaccaccatcttcgccaagctcaccccgctgcagaagtcgcgggtggtgaaggcgctgcaggccaacggcaataccgtcggtttcctcggcgacggcatcaacgatgcgccggcgctgcgggatgcggacgtggggatctcggtggacagcggtgccgacatcgccaaggagactgccgacatcatcctgctggagaagagcctgatggtgctggaggagggggtgatcaaggggcgcgagacctttggcaacatcttgaagtacctcaacatgaccgccagctccaacttcggcaacgtcttctcggtgctggtggcctccgcctggctgccctgggcgcccatgctggcgatgcagatgttgatccagaacctggtgtacgacgtctcccagatgctgctgccgtgggacaagatggaccccgagttcctcaagcggccgcgcaagtgggaggcgagcaacatcaagcgcttcatgctgtggctcggcccgacctcgtcggtgttcgacatcagcacctactgcctgatgtggttcgtgttcggtgccggcgccctctatgccaccgccaacggcagcatggatcccctggtcaacggtcaggccatcatgaactccggctggttcatcgaggggctggtgtcgcagaccctggtggtgcacatgctgcgtacccgcaagatccccttcctgcagagtaccgccaccctgccggtgctgctctccacctcgatcgccatcgccatcggctgctacctgccgttctcgccgctggctgagcacttcggcttcatcaccctggatgggcccaagtacttcatgtggctggtgatcaccatgctggcctacatggggctgacccagaccgtcaagagcatctacatcaagcgccacggccagtggttctgat

SEQ ID NO: 269685 - DNA, 1525 bp, Unknown
  Bacterial polypeptide expressing nucleotide sequence isolated from the Sargasso Sea
atgatttccgtccgtaatgtcaccctgcgccgcggcgtcaatgtcgtactcgataacgcgtccgtcaccttcacccccggcgaaaaggtcggcctggtcggccgcaatggcgccggcaagtcctccttcttcggccttctcaacggcacgctgcacgaagacagcggcgagttctcgattcccgctgcatggaggatgggccaggttgcgcaggaaatgccggagaccgagcaaagcgcgaccgacttcgtaatcgaaggtgacacggtcctgctggccgcgcaggccgaagtggccgccgccgaggccagcgacgacggcatgcgcatggcgcacgcctacatggccttgcacgacgccggcgcacatgatgcccccgcacgtgcccaggcgctgatccagggccttggctttagcgctgcgcagctcgaccagcccgtcaacagtttctccggcggctggcgtatgcgactgcaactggcgcgcgcgctcatgtgtccgtccgatttgctgttgctcgacgaaccgaccaatcacctcgacctcgacgcgttggtctggctggaagcgtggctcaagcgctatcagggaaccatggtggtgatcagccacgatcgcgaattcctcgacgcggtgacgcaggtgacagtgcacgtcgacaacgccaaactcgtgcgttacggcggcaactacagcaagttcgaagaaatgcgcgccgagcaactggtgttgcagcaggccgcggtggcgaggcaagcggacaagatcgctcacctgcagaaattcatcgaccgtttcaaggccaaggcctcgaaggcgaagcaggcgcagagccgggtcaaggcgctcgaacgcatggagaagatcgcaccggtgctggccgatgccgagttcaccttcgagttcaaggagccgctcaacgtcccgaacccgctgttgtcgatgctggacgcgagtttcggctatccggcgccggacgacgcaccgctcggcacgccgccgacggtcatcgtgcggggcatcaaccgatccgtgctggccggccagcgcatcggcattcttggcgccaacggccagggcaagtccactctggtgaagacggtggcgcatgagctggcgccgattgccggcgaaatcagcgaaggcaaaggcctgaacatcggctacttcgcacagcaggagctcgatgtgctgcgtcctctggacacgccgctggaacacatgatccgccttgccagggacacgccggcgcacctgcgtgcgcctggccagagcggcaccgaacaatcgctgcgaaccttcctcggcaccttcaacttcagtggcgacatggtccatcaggcggtcggcacgatgagcgggggcgaaaaggcgcggctcgtgttgtgcatgatcgtgtggcagcgtcccaacctgctgctgctcgatgagccgaccaaccacctcgacctggccacacgcgaagcgctaggcatggcgctcaacgaattcgaaggcacggtgatgctggtcagtcacgaccggt

SEQ ID NO: 269686 - DNA, 1033 bp, Unknown
  Bacterial polypeptide expressing nucleotide sequence isolated from the Sargasso Sea
atgactgatgctgtaattaaatgtgagtctgtctataaaatatttggtgcaaacgccaaaaaaatgctccaagaagcaaatggaaatgtagacgcaaaaacattccaaaaaaatggatgtatcgtaggagtgaataatgcttcctttgaagtttcaaaaggagaaatgttagttgtcatgggtttatcaggttctggaaaatcaacattattaagatgcatttcaagattaacagatgcaactggtggaaaaatttttatagaaggtcaagatttactttcgttaaaagaaaaagaattaattgaactcagaagaaacaaaatggggatggttttccaaagttttgctttactaccacataaaactgttttggaaaatattgcttttccacttttaattaaaggtgttgagactgagaatagtattaataaggccatggacatggttaagcttgttggtcttgatggaagagaaaattattttccaagagaactttcgggtggacagcaacaaagagtaggtattgctagatcattagctgtagaacctgatatttggtttttagatgaacctttttcagcactagacccattgattagaaaagaaatgcaagatgaatttttaagacttcaagaaaaattaaaaaaaacaatcatgttcattactcatgactttgacgaagcattaaaacttgctgatcgtatagcaattatgaaagatggaataattgaacagttagatacaccagcaaaaatcgtactaaatccagccactgaatatgtaaaaaaatttactgaagaagtgccgagagaaaaagttttaattatagaagatgtaatggatgcaccaacctcagataatttaagcaatctaaaagtttcgaaagacgagataatagaaaatgtagctgaaaaaattttatctcaagaaaaatcagtaggtgtaatagataaaaataataaaattgttgggactgttcatccttccaaaataattcatactgtttttggaggaagaaaagaaaacagttaaa

SEQ ID NO: 269687 - DNA, 1084 bp, Unknown
  Bacterial polypeptide expressing nucleotide sequence isolated from the Sargasso Sea
tatgtctcaaattaaaatagcaaatttacaaaaatcatttggagattttactgcagtcaaaaattcaaatttaacaattaatgataaagagttttttgttttgctaggcccatctggttgtggaaaaacaacaactcttagaatgattgctggattagagttaccaacatcaggagaaatttacttaggcgaagaagaagttggaatgttaagagcatctgagagagatatcgcattcgtttttcaattgttcgcactttatccacatatgaacgtaaaaaataacttatcttttccgctaaaaatgcagggttatagcagaagtgaaattaaaactagagttgaggaggcagcaaaacttttaagaattgatcatattttaaactccagtatttcatcattatctggtggagatagacaacgtgtagcccttggcagagctttagttagaaggccaaaagcatttttaatggatgagcctttaggtactttggatgcagaatttagagaattaatgtgtttagaacttaaaaaattacatatcgatattggcgctaccactgtttatgtaacacatgatcaactagaggcaatgtcattagctgatcgtattgctgtaatggatggtggtgaaatcttacaagctgatgaacctgcagtaatctacaataaaccagcaactaaatttgtagcgtcatttattggctcacctggaatgaattttataaatattgatcaaggcatttctaatgaacaatcgactttaaatatagagggaacaaactttaacatacctaaacagtatgaaatatcaaaaagtaaaaataactcatttggtattcgtcctgaaaatttatctcttactaacgagggtggtcttaaaggttcagtatttggggttgaatatttaggttcaagaaaaattgtaacggttaaaactaattttggagaaatcaaagtaaaaactaatatttcaacaagtgttaaaatcaatgaaaacgttcaagtaaaaccttctaataataacataattatttttgatggtgagactgacagatctcttaaaagtgagtttatgaattaa

SEQ ID NO: 269688 - DNA, 1003 bp, Unknown
  Bacterial polypeptide expressing nucleotide sequence isolated from the Sargasso Sea
atgaagacgcttttatcggtgcgcgacgtgaagcagcatttccagctgggcggtggcttgttgcgcaaaaagtatcatgtttacgcggtggacggcatcagcttcgatctcaagcagggggagacgctggggctggtgggcgagtccggctgcggcaagtcgaccctggggcgcaccctgctcaagctgttcgagccgaccgccggcaccatcaccttcgaggggcgtgacatcacccacctcccgcccaaagagatgcgatctttgcgccaggagatgcagatcgtgtttcaggatcctgcggaatccctcaacagccgccacacggtggggcagatcctggaggagcccttcgtcatccacggcaagggcaacgccgagcagcggcgtgtctgggtgcaggagctgctggagaaagtggggctgcccggcagtacggtggagcgctatccccatgagttttctggcggccagcgccagcgcatcggcattgcccgggccatcgccctcaagcccaagctgctggtctgtgacgaggcggtatcggcgctggatgtgtcggtgcagtcccaaatagtcaacctgctgctcaccctgcagcgggagatgaacctcgccatcatcttcatcgcccacgacctgtcggtggtcaagcacatctcggatcggattgcggtgatgtatctgggcaggatcgtcgaactggccgaggcccagtcgctctacctggcgcctcgccatccctatacccaggcgctgatttcggccattccggtgccggacccgcgccggcgcagccagcgcatcctgctgacgggggatgtgccgtctcccatctcgccgccgagcggctgccactttcaccagcgctgcccttacgccggcgagctgtgccgcaccaaggcgccgagcctgcagccgtgcgacggggccgatcatcaggtggcctgccacacgccgttgccgctggccgaggcgatccccctgggaaaggcggtatgat

SEQ ID NO: 269689 - DNA, 985 bp, Unknown
  Bacterial polypeptide expressing nucleotide sequence isolated from the Sargasso Sea
tttgttagaatttttaaatatatctcactcatataataatcaaaaaattttgaatgatttttcgatgaagcttgaaacaggtgaagtagtttctttattaggaccatctggatgcggtaaaaccaccttgcttaaattagccagtggtattgaaaaacttcagaatggcgagattaaattaaataacgaaatagtatcatctcctaatattcatcttaattcagaaaaaagagatgttggttatgtttttcaagactgcgctttgttcccacatttaacaatattacagaatatcttttttggaatgaaatcaattgaaatagaaaaacagaaaaataagatacaaagcttgatgaaagaaattaatatttcaagtttgtcagaaaaatacccacatgaattgtcaggagggcaacaacagcaagtagctcttgttagagcaatggctagtgatccaaaaattatttttttagatgaaccttattcaaaccttgattcaaggttgaaagagaaaattagggaccaaatgctacacatactaagtgagtataatatttctgcattacttgtaactcatgacccagaagaggcgatgtttatgtcagataaaattggtattttaaataatggttctattgaacagtttggaagtccgatagatttgtatttgcgtcccaaatctgcgttcattgcagagttttttggagagattaatgtttttgaaggcttagtcgaggatggatctgtaaatactgttttaggtacttttaaatgttcaaataaatttaataaaaaaaaggtaaagattgttataagaaacgaagcaattaatgtttttgcagaaaataaattaaatttaaagaagtacaaacaccctaaatttgttacttcaccctattttggtcatgtaatggaagctagattattggctggctcaacattagttcacttatctttaaaggttaaccaatcaaattttcatatt

SEQ ID NO: 269690 - DNA, 679 bp, Unknown
  Bacterial polypeptide expressing nucleotide sequence isolated from the Sargasso Sea
aaaaaatatttctttccaagtaaatcaaaatgaaattattggtattctcggtccaaatggttgtggaaaaactactactattggaatgatcttaggattattaaaacctacaaaaggtaaaatattaataaatggactagaaattgaaaaacaaagggtaaacttactgaataacttaaatttcatttccccttatatagaattaccaaaaaaattaactgttagacaaaatcttgacgtttatggcagactttatgatgtaaaaaatctaaaagagaaaattgaatatctaacagaaaaattaaggctaaatgaaattataaataaaattacaggagaactttcctcgggtcaaaaaaatagagtaagtcttgctaagtcgataataaatgatccaatcgttcttcttttagatgaaccaacagcgtctctagatccagagactggggattttgttagaacttttttagaggattatcaaaaagagaggaagacctctattcttcttgcatcacataatatgagcgaagtagaaagattatgttcatctgtacttatgatgaataatggaattattattgaccaaggaaatcctaaagatttaataaaaaaacatggtcgaaaaaatatggaagaagtttttttaaaacttacaagaggtaaatatgaatctaaataa

SEQ ID NO: 269691 - DNA, 709 bp, Unknown
  Bacterial polypeptide expressing nucleotide sequence isolated from the Sargasso Sea
atggcattttttgagggaaataaaatgacaggaggatacgatgacggtcctgatattattagctcatgtaccattaatgtcaataggggtgagatagttgcaatacttggaccaaatggagctggcaaatctacagcaatgaaagcaatgcttggattattaaatcttaaatcaggcaatatttcaattgatggagaagatatttctaaactaactcctcaagaaagagttaaaaagggaatatcatttgtaccacaaactagaaatgtttttgcagaacttactgtaaaagaaaatttagaggttggtgcttttttaagaacagataatataaataatgttatcgaagaaatatatgatctatttccaattttaagagaaaaaaaagatcaagtagttggacaattatcaggagggcaaagacaacaagtagctttgggacgtgctctaatgattaaaccatcagttcttatgttagatgagcttacagcaggagtttcaccaatagttatggatgaattattcgaacatattattagagttaaaaatacaaaagtagcaatcattatggtcgaacaaaatgcaaaacaggctttaagtatttctgatcgaggatatgtgcttgtaactggtgaaaataaatttgaggggtctggcatggaattattaaatgatccagaagttaggagatctttcttaggagcttagt

SEQ ID NO: 269692 - DNA, 385 bp, Unknown
  Bacterial polypeptide expressing nucleotide sequence isolated from the Sargasso Sea
aatgggcacaatatcacttaaaaatatttcaaaatcatttggatctacccaggtattaaaagatctaaacgtagatataatagaaggtgaatttttaacattagttggtccatctggttgtggcaaatctaccttgcttcgaattatagcaggtcttgagcaacaaacttctggtgatgttttaattgataataaaaatgtaaacagaattagagctagtgaaagagacctagcaatggtatttcaatcttatgctctgtatcctcatcttacagtaagaagaaatttagaaacccctcttagacttagagattatagttcatttgaaagattacctttaattggaaatttgtctccaaataagaaacaaaaaacagagtctata

SEQ ID NO: 269693 - DNA, 715 bp, Unknown
  Bacterial polypeptide expressing nucleotide sequence isolated from the Sargasso Sea
aatgttaaaagtagattccgtttcaaaaattattaaagacaagaaaattctaaatggaatttcatttagcttaaattttggtcaaatatgtggtttattgggtccgaatggagccggaaaaacaacttcattttatattattgcaggcttaacaaaatctgattctggtcagattgaatttatcgatcaagatattacaaatatgcctatgcataagagatcaaatttaggtataaagtatctcccccaagaaccatctatttttcaaaatctcactgtttatgaaaatctttatggattagcagaattaacatttaaaaataataataatattaaaacctctgtaaaaaaattacttgatgaatttgatttaatagaaatcaaagatctcaatggaagacaactttctggaggtcaaagaagaaaagttgaaatcgcaagaactctcgtatctaatccaaaaatgattctactcgacgagccatttgcaggcatagatccaatagcaattgaagagattaagaaagttttaaatactcttaaaaataaggggattggcatattaataactgaccataatgttagagaaacattagagatatgtgatcatgcagcaatcataaataatggggaaattatcgctcatggtacaaaagaaaatttaatttcaaatcaagttgttaaagatgtctatttagggaatatgtataactaa

SEQ ID NO: 269694 - DNA, 718 bp, Unknown
  Bacterial polypeptide expressing nucleotide sequence isolated from the Sargasso Sea
tatgctgagaacagaaaacataacttcattttacggagaaattcaggctttacatggactgaacctcgaggctcggaaaggtgaaataacttgtgtgcttggaccaaacggagcaggaaaaactacaaccatgttcacaatagctggtattttgaagtcacgtaccggttcaatatttcttgaagacgaagagctcactcgtcagtcagcccagacaatcgtccgtaaaggtatagctcttgtgccagaaaatcgattgattttcccacagatgtctgttgaggaaaacctaaatgctggagcctttacacgatcatctaatgatccatcgatagaaaatgatatctttaaaatgtatcaacgctttcctccactggaaggacgccgtaatcagcttgcaggaacactttcaggaggtgaacaacaaatgcttgctattgcacgtgcactgatggcaaaaccaaaaattcttctcatggatgaaccttctctaggtcttgctcccctagttgtaaaagaaatattttacattataagacaacttcatgaagaaggcgttacaatccttcttgtggagcaaaatgctaggatggcacttaaagttgcaaacatggtttaccttctcgaaaaaggcaaggtgagctttagtggcagtccagaagaaatccaccaagacgaggttataaagcgtgcctatttaggtaccgaaataaaatga

SEQ ID NO: 269695 - DNA, 1373 bp, Unknown
  Bacterial polypeptide expressing nucleotide sequence isolated from the Sargasso Sea
cttggccttggcctccgcgcttgtagcagaaccggatggactgctgctctttgagcccaccaaccatctcgatgccctagccaccgagtggtttcagggttttctgcagcgcttcaagggcgctctggtgttaattacccacgaccgctacttccttgaacgtgtcaccgacacgattattgagctcgacgctggacaacttcgccgctacccggggaactatggggcctatttgcagaagaaagacgaggaagaggtggccgatgcagcacggcagcgggcctaccgctccgtgatgcgacgcgaaattgaatggctcaggcgtggtcctaaggctcgaagcaccaagcaaaaagcacgcatacaacgcatcgctgagatgcagcagcaaagcttcaaacctgccaagcaaaacgtggcgatggaaagtgcaagcaggcgcctcggtaagaccgtcatcgaggtggagtccttgcagcgcaaacttggcgaacgatggctaatccgggacttcagctactccttctctccggaggatcgcgtcggctttatcggcccaaatgggatggggaaatccaccttgctggacttgctcagcggtcggcagcaagccgatggcggaaacgtcgtgcgtggtgaaacggtcgtgatcggccgctttgatcagcactcagaagacttaaaacccgagctcaaggtaattgaagtcatccaagacgtcgccgaacgcattgatctggggaatggcagcagcctcagtgcatcgcaactactcgaacgctttctctttccaccagcccagcaacacagtcctgtagcaaggctctctggtggggaacggaggcgactgcatctctgccgattgttgatggcagcgcccaatgtgctgctgctcgatgagccaaccaatgacctcgacgtgcagacacttgctgtccttgaggactacatcgaagatttccgcggctgcgtagtgatcgtctcccacgatcgatacttccttgatcgcaccgtggatcgcctcttctgcttccaacccggcggcctactggagcgctttgaaggcaactacagcgaatggctcgatcaacaaccaacacgtcaaaacgcggtcgcgaccaaaaccaagccaagcgctgccaagcccaagcgggagaagcccaggcgacgcagctacaaggaacaacgtgagctcaccgagctagataccaagctgccgcaactggaagagcagaaagcgcaactggagtccaggcttgccggagctgaatacgacaccctcgaagctctcacccaagagcttgctgggctctgcgagcaaatcagtacggctgaagatcgttggcttgaactcagtgctttaccggaatagc

SEQ ID NO: 269696 - DNA, 431 bp, Unknown
  Bacterial polypeptide expressing nucleotide sequence isolated from the Sargasso Sea
aatgaaaaatataattgaatttgataaggtatcaaaatcttttggtgatttaaaagttttaaataatttatctttaaaggttaaagatggtgaaaaacttgcattaattggtccgagcggttctggtaaaactacgattttaagaattttaatgactttagaaaaaattgatgatggttttgtttcagttaatggagaatatttatggcatgaaaaaattaataacaaattggagcatgcctcagacaatcatttagaaaagatgagaaatcaaattggaatggtctttcaacagtttaatcttttcccccatttgactgcaatagaaaatgttaaacagccccaaatattggttaaaaagaaaaaaaatagtgaagctaaagataaagccgaggaactttttaagatgataggtttaagtgataaaatag

SEQ ID NO: 269697 - DNA, 544 bp, Unknown
  Bacterial polypeptide expressing nucleotide sequence isolated from the Sargasso Sea
atgtctttttttcaaggaaacaagatgaccgcaggatatggcgatggtccagatattataacttcttgctcaataaatgttagcagaggagagatagtagcaatacttggtccaaatggtgctggaaaatctaccgcaatgaaagccatgttgggattactaaaattaaaatctggatcagtatcaattgatggagatgatatatctagtttatctccacaagatagagttaaaaagggaatttcatttgtaccacaaacgagaaatgtttttgcagaattaacagtaagagaaaatttggagattggagcttttttaagagaagacgacattaataaagtaatagaggaaatttatgaattatttccaatattaaaagaaaaaagatcccaaatagttggtcaattgtcaggtgggcaaagacagcaagtggcattgggtagagcactaatgattagaccttcggtgttaatgttggatgaacctacagcaggagtttctccaatcgtgatggatgagttatttgaacatataataaaagtta

SEQ ID NO: 269698 - DNA, 640 bp, Unknown
  Bacterial polypeptide expressing nucleotide sequence isolated from the Sargasso Sea
atgaccgatataattcaaaaagtaaaaaacttatctattggatttagaagtaaaaaaggcgaagaaatcttaattttaaaaaatataaacacaaatattaaaaagggtgaaacagttggaatagtaggagaatctgggtcaggaaaaagcacattagcattagcaatgatgggatatgttaagcatggactttatactattggaggggaatgtcagtttaactcatcaaatctactgaaaatgaaaagtaaagatttagaaaaaatcagaggtagaaagatagcaatgattccacaaaatgcaggccaagcattgacaccaaacttaaagataggatatcaaattgatgaagctttacaattgcactcagattttgatgaaaaagaaagagaaaaaaagatttcagaactattaaataaagttagacttccttcaccagaaacaattgcccttagataccctcatgaactctcaggaggacaacaacagagagttgctgttgccatggcattagctggaacaccagatttacttcttttagatgaaccaacaactggactagatgtaacaacacaagctcatgttttggaacttctaaattttattgcaaaaagatactggaacatcgatggtttatgtt

SEQ ID NO: 269699 - DNA, 1012 bp, Unknown
  Bacterial polypeptide expressing nucleotide sequence isolated from the Sargasso Sea
atgaataagtcacctaaacttgtatgtaaaaatgtttggaaactatatggagacaagccgaaagaatttttacaaagtcataattataaccctgataaaaaaacaatagaagaaaatggttatattcaggcaattagaaatgctactttagaagtttatgaaaatgagattcttgtaataatgggtctaagcggttcaggaaaatcaactctagtaagatgtatgtcaagattagttgatccgactgttggagaaattttttttgaaaatattgacatgggaagattaacaaaaaacgaattaattgaaattagaagacataaaatgggtatggtattccaacactttgccctattccctcatagaacagtaatagaaaatattgcgtttcctttagaagtacagggcataaatagggcagaaagagagaagtctgctatggaaatcattgatctagtaggacttcaaggaagagaaaattattttccaaaagaactatcaggaggccaacaacaaagagtaggtattggccgctctttagctgtcaaacctgaattatggtttctagatgaaccattttctgcattagatccattaataagaaaagaaatgcaaaatgagtttttaaaaattcaaaactcacttaaaaaaactattatttttattactcatgattttgatgaagcaattaaattagcagatagaattattattatgaatgaaggaagaatagtacaaattggaagtcctgaagatttaattatgaagcctgcagatgattatgtaaaagaatttactgaagaccttccaagagagaggttgttatctgtaaaaagcataatgaataatcaaaaacaaccaagtaatgctttaacagtttatgaagatgagaaaatattttcaattcttgaaaaagttctttctgaaggctcagtttcagttattgatagatcaaataatattgttggttctctcaatagagaaacagtatctagatttatcaacaattaag

SEQ ID NO: 269700 - DNA, 555 bp, Unknown
  Bacterial polypeptide expressing nucleotide sequence isolated from the Sargasso Sea
catgatactttcaactaagaatttaagaaaagaagtatcttcaggaaattcgaacttagttattcttgaagatatcaatttaaatgttgaggaaggtgaatccctggctataactggaccttctggttctggaaaatctaccttgttaggtttgttagctggtttagacaacccttcttctggccacattttcctaaataaaattcccttacatgaacttaatgaagaggagagagctagagtaagaaaagaaaacgtggcctttgtctttcaatcctttgaattgcttccaagcttaactgccttggaaaatgtaatgctaccttcagaacttaagtccaagaaagaccctgaaagcaatgccaaatactttctagacagagttggcttaaaagatagacaacatcactaccctaatcaattatcagggggtgagcaacaaagagtagctattgcaagagcatttgcctgttcttctaaaatattatttgcagatgaaccgacaggcaacttagatccaaaaaatggaaaattgatatcggatttattatttga

SEQ ID NO: 269701 - DNA, 472 bp, Unknown
  Bacterial polypeptide expressing nucleotide sequence isolated from the Sargasso Sea
agaacaaattattgaaccattaaaaattaaaaaattgtacaacaaatctataaaaaatttatctggaggtgaactacaaaaagttgcagtgacatcatgccttttgcaaaaagttgacttgtacgcattggacgaaccatccgcatttttagatgtagaagatagaattgcagtaggaaaatttctacagaaatttgttcgatcttttggaaagtcagctataatcatagaccatgatctacagttaatggatttagtttctgattcaatggttatttttgagggaacgtcaggaatagagggtaaagctacaaaaccaatgccaaaacagactgcaatgaatcaattcctaagatctcttgatattacatttcgtcgtgatgagaaaagtagtagacctagggtaaataaagacggaagtagattagataagacacaaaaggattcatcaaattattattacaaactatga

SEQ ID NO: 269702 - DNA, 188 bp, Unknown
  Bacterial polypeptide expressing nucleotide sequence isolated from the Sargasso Sea
tttgaataagaagaacttagtgaagaatgatgccttaataattgatgatttgcatcataaatatgataagcgagaatgttcaaattggatattaaacgaaattaatctgaaaattgaaaatggcgaattgttaggcttgcttgggccttctggttgcggaaaaactactcttttaagattaattgcgg

SEQ ID NO: 269703 - DNA, 1432 bp, Unknown
  Bacterial polypeptide expressing nucleotide sequence isolated from the Sargasso Sea
gccgctgcccgcctggctgcacctgtggcactgctacaagaacccgttcaacgtgctgctcacggtgctggcactgatctcgtacctcaccgaagaccacgaggccaccgtcgtgatcctggccatggtggtgctctccacgctgctgcggttcgtgcaggagggccgctccaaccgcgcggccgagcgcctcaagtcgctggtcagcaacaccgccacggtgctgcgccgcagcgacatgggtggcgtagccacaccgcgcgagctgcccatccaccagctggtgccgggcgaccacatcgtgctgtcggcaggcgacatgatcccgtcggattgccgcgtgctcacggccaaggacttgttcgtgagccagtcggccatgacgggcgaatcgctgccggtcgaaaaatttgccgagcgcagccggcccggcaccagcgcgctcgacgcgaccaacctgctgttcatgggcaccaacgtggtctcgggctcggccacggcgctggtggtggccacgggcaaccacacctactttggcacgctggccacgcgcgtcacagccaccgaccgcacgcccaccgcgttccaggcaggcgtcaacagcgtgagctggctgctgatccgctttgcactggtcatggtgcccatcgtgctggtcgtcaacggctttaccaagggcgactggctggaggcctttttgttcgcgctgtcggtggccgtgggcctcacgcccgagatgctgcccatgatcgtgaccagcacactggccaagggggccgtgctgctgtcgcgcaagaaggtggtggtcaagcggctggacgcgatccagaactttggcgcgatggacgtgctgtgcaccgacaagaccggcacgctcacgcaggacaagatctttctggagcgccacaccgacgtgttgggccacaacagcgacgaggtgctggcctttgcctacctcaacagccactaccagagcggcctcaagaacctgctggaccatgcggtgctggagcatgtggagctgcagaccgacctgcgcctggcgcaggactaccgcaaggttgatgaggtgccgttcgactttgtgcgccggcgcatgtcggtcatcgtcagcgagcgcaacgaccaccacgagctgatctgcaagggcgcggtggaagagatgctggacgtgtgcacccaggtgcgtgtggtggaagacaccggcgtgcaagacctgccgctggacgccaccctgcgcgcacgggtgctggaggtgacgcgcggcctgaacaacgagggcctgcgcgtggtggccgtggccatgaaggagacgccgccccaccagacggtgtacagcgtggccgatgaatcaggcctcacgctgattggctacgtggcgtttctggatccaccgaaggagtccaccgcccccgcgctcaaggcgcggccg

SEQ ID NO: 269704 - DNA, 709 bp, Unknown
  Bacterial polypeptide expressing nucleotide sequence isolated from the Sargasso Sea
aatggcattttttgaaggaaataaaatgacaggtggttatggagatggtccagacataataagttcttgcactattaatgttaataaaggagaaattgtagctatcttaggacctaatggggctggaaaatcaaccgcgatgaaagcaatgcttgggttgcttaatcttaaatctggaaatgttttaattgaaggagaagatatttcaaaattgtctcctcaagaaagagtgaaaaaaggtatttcatttgtccctcaaacaagaaatgtatttgcagaattaactgtcagagaaaacttagaagttggagcgtttttaagagaagacgatgtattaaaagtaattgaagaaatatatgatttatttccaattttaagagataaaaaagaccaagtagttggacaattatctggaggtcaaagacagcaagtagcactaggaagagctttgatgataagaccatcagtcttaatgttagatgagccaacagcaggagtatcgccaatagtaatggatgagctttttgatcacatagttaaagttaaaaaaaatgatgttgcaataattatggttgagcaaaatgctaaacaagctctcagcatttctgatcgtggttacgttttagtaactggagaaaataaatttgaaggatcaggcaaagaacttttaaatgatcctgaagttagaaggtcatttttaggagcataa

SEQ ID NO: 269705 - DNA, 301 bp, Unknown
  Bacterial polypeptide expressing nucleotide sequence isolated from the Sargasso Sea
atgtcaaaagattcaataatatcattacaaaatgtcaataagtggtttggtgactttcatgttttacaagatgtaaatttagaagttaaaaaaaaggaaagaattgtagtatgtggaccttcaggctctggaaaatctactatgatcaggtgcattaaccgtttagaagagcatcaagagggaacaattattgtcgacggtattgaacttactggtaacttaaaaaatattgatagtgtaagaaaagaagtaggaatggtttttcagcaatttaatttatttccacatttatcagtaaaag

SEQ ID NO: 269706 - DNA, 648 bp, Unknown
  Bacterial polypeptide expressing nucleotide sequence isolated from the Sargasso Sea
cgattggattactcggtcctaatggttgcggcaaaactacatcgataggaatgatgctcggattaattaagccaactacaggcgatattattatacaaaataaaaatataaatacatttgagagaaataaacttttaagcataatgaattttgcttcgccctacgtagaattacctaaaaaacttagtgtaaaacaaaatcttcaaatctacggtaggctttacggggtaaaagatttatctcttagaatagatgaattagctgaagacttaaatttaaaagattttattaataaaaaaactggtgagttatcctcgggacaaaaaaatagagtatcacttgctaagtcgctaattaacaaacctgaaattcttctattagatgaaccgactgcaagtcttgatccagatattggtgattatgttagatcttatgtgcaatcatacaaatctaaaaataaagtaactatacttttagcttctcataacatggctgaagtagaaaggctttgtgacagtgttataatgatgaaaaaagggaaaattattgatcaaggaactagtaaagagataataaatagacatggtcgaacaaatctagaagaaacatttttaaaaatagtaaggagtaaagatgaggtggcataaa

SEQ ID NO: 269707 - DNA, 1384 bp, Unknown
  Bacterial polypeptide expressing nucleotide sequence isolated from the Sargasso Sea
tctaatggcgcaggtaaatcaacccaatttaaaattttaataggagaggaagagcaaacaagtggaacgatcatcaaagagggaaatcctaaaattgcccatttaaagcaagagtttgattgtaatttgaatttttcagtgagacaggaattagaaagttcttttaaagatatacaaattgttgccattaaacttttagaaattgagaataaaatgaaatctttggatataaaaaaaaattccgatgaacttgaaatatttgtaaatcaactcgcaaaatatcaagcaaaatttgaagctttaggtggttataaaatgcaatctgatgtagaaaaaatattaccaaaattaggcttttctatagaagatgctgataaattagttggcaatttctcaggtggttggcagatgaaagttgcacttggaaaaataatcttacaaaaacctgatttacttttactggatgaaccaaccaatcatttagatttagaaactattttttggttggaagaatatctatcatcgcttaaaattgcagttataataatcagccatgatagatatttcttagataaattatgtaaaaaaataatttttgtagatagaggaacatctgaaacatataatgggaactattctttttttgttgaacagaaatctttgaatgaagaatcacaaaataaggcatatcaattacaacaaaaagaaattgagttacagaagaggtatatagatagatttagagctagtgcaactagaagttctcaagcaaagagtagagaaaaacaattaaaaaagatttctaaaattgaggctcccatagcaaaatcaaaaagtcctgtttttaattttccagagtgccctcgctcaggaaaattagttctaaatatcaaaaatttgtctcatagtttcgaggataaaattctttttttagatattaatttaaagatttcttctggggagaaaatagcaatattgggacctaatggctgcggcaaatctacattgcttaaaattattatgaaaaaaatatctcctgaaattggagaaattaatcttggtaaacataatataattactagctattatgaacagaatcaggctgaagcactttcacttgacgaaagggttattgatttaatatgtaataagtctccagaatggtcccaaaaaaaagttagaacatttttagggggttttggctttcaaaatgaaactgtttttaaatttattaaacaactcagtgggggagaaaaagcaagattagcattggcgctcatgattattaatcctagtaatttccttcttttggacgaaccaactaatcatttggatttacaatctaaggaaaacttagaattagcaattaaaaaatataaaggtt

SEQ ID NO: 269708 - DNA, 1558 bp, Unknown
  Bacterial polypeptide expressing nucleotide sequence isolated from the Sargasso Sea
tttgggaatcgttggagagtctggttctggaaagagccaaaccgtcctctccatcatgggcctacttgaaacgaatggaagcgccacaggcagctgtgtttttaccaataaagaattaatcaaccttccttccggcgagctgaataaaatcagaggcaatgagattgctatgatctttcaggacccgatgagctcgctgaacccatatattacagttggcaaacaaatgtcaggggttctcaaaagacacacaaaaatgaacaataaagaaataaaagaaagatgcatagatatgctcgattctgttggtatcagcaaaccccaagaaaggttcgacggatactcttttgaactttctggaggcatgagacaaagagtgatgattgcatcagcactcctaacaaacccaaaactgctgatagcagacgagccaaccactgctttagatgtgaccgtacaggaaaaaatattggaccttattttagatgtgaaagaacgattcaaaatgtcggtgatcatgattactcatgatctaggcgttgtcgcaaggacatgtgatcaggtattggtaatgaagaatggcgaattacaagaaagcggaaatgttgaagccatattttattctccacaagccgactacacaaaagaactgcttgaaaaatcaaaagaaataaacctagatgaacagcaaaaatactcagaaacccaagatgccaacattaagaacagtttggttaagtcgacaaaggcaaaggtgaattttgttctgcctaaaaaggcgcttttttcagcagaaaacatattaactgcagtgaatgaaatatcaatggaaactcttgagggcgaggttttgggggtggttggggagtctggaagcggaaaatcaacgctggcaaaaacaatactggggcttcaaaagctatcctctggtcaggtcgaagtttttggtcaaaggcttacagaaatcaacaaaaaagaactcaaagaaattcgaaaaaaaatgcaagttgttttccaggaccctttttcttctcttaacccaagaatgactgtttttgagatcctaaaagaaccccttgattcattttttccttcaatgaccaaagagtctgcgcagaaagatatagaagacggcctaatggaggttggtctaacaaatgaatacttaggtagatacccccatgagctttcaggggggcaatgtcaacgagttgcaattgcaagagcccttatgccaaagcctcaactattgatatgcgatgaagctgtcagcgccctagacgcatcaattaggggggagatcattgatcttctgctcagaattaaagcagagaaaaaactgaccatgatttttattgcccatgaccttgcggtggtgagaaagatatgcgacagggtaatcgttatgcaatcaggaaagatagttgagcaaggcccaacagagaaagtattttttgagccagaaaaagaatacactgctaacctattaagcgcagttcccgttccagacccaaaaatggaaagagaaaaacacacaaaaagagttcaagcaaaatag

SEQ ID NO: 269709 - DNA, 745 bp, Unknown
  Bacterial polypeptide expressing nucleotide sequence isolated from the Sargasso Sea
atgaacaaaatcattcaagtcagggatgtaaataaatctttcggaggtgtgattgccaaccgtgatatttccatagatgtagaggaaggaaaaatcacaggccttatagggccaaacgggtcagggaaaaccaccctattcaattcaattgtcgggtatcatccaattgattcgggaacaatcctttttgaaaatcatgaaatatcaaagcttcgcgttcagaaaattgctaggctaggagttttgcgtacttttcagcagacaaggatttactcaaagatgaactgtgttaaaaacatgcttatttcggcggcacaccacaataccaaatggatggatatgtttacacaatatcctcaggaattgactgaaagagcagaaaaattgctggaatttgttggtttgtatggaaagcggtttttaatttcgggagacctttcatttggtcagcaaaagcttcttgagtttgccatggcccttatgaatgaacctaaggtactcctacttgatgaacctactgctggaattaatccaactttgattaatgggcttattgacagattaaagagagccaaccatgaatttggtattactctttttgtgatcgagcacaacatgagagtagtcatgaatttggcagatagtatatactgcctggctcacggagagatgcttgcacacggcactcctgaaaagattaaacaggatcagaaagtaattgacgcatatctcggagctcattaat

SEQ ID NO: 269710 - DNA, 685 bp, Unknown
  Bacterial polypeptide expressing nucleotide sequence isolated from the Sargasso Sea
tatgacagctggatatggtgatggaccagatattattagttcttgtacgattaaagttaataaaggagaaatagttgcaattttaggacctaatggagctggcaaatcaactgcaatgaaagcaatgcttggactacttaatttaaagtctgggaatatatcaattgaaggtgaagatatcggaaaactttcaccccaagaaagggtgaagaaaggaatctcatttgttccacaaactagaaacgtttttgctgaactaactgttagagaaaatttagaagtaggagcttttttaagaacaaataatgtatcaaatgttattgaagaaatttatgatttatttcctgttttgagagaaaaaaaagaacaagtcgtaggccaattatctgggggacaaagacaacaagtagcattaggtagagctttaatgattaaaccctcggtattaatgttagacgaacctaccgcaggtgtatccccaattgtaatggatgagctatttgaacatattttaaaagtaaaaaaaactaatgtagcaataattatggttgaacaaaatgccaaacaagctttaagcatttccgatcgaggatatgtcttagtaactggtgaaaataaatttgaaggaacaggaaaagaactattgaacgacccagaagtaagaagatcttttttaggagtataa

SEQ ID NO: 269711 - DNA, 848 bp, Unknown
  Bacterial polypeptide expressing nucleotide sequence isolated from the Sargasso Sea
gtttgtctggttcgggaaatcaactttattacgatgtatttctagattaactgatgcaacaggtggaaaaatttttatagaaggccaagatttattacaattaaacaataaggacctcattgatcttagaagaaataaaatgggaatggtttttcaaagttttgctttgcttccacacaaaaccgtagttgaaaatatagcttttccacttcaaattaaaggtgtcaaaactgaggatagtataagtaaagcaatggacatggttaagttagttggcctcgatggaagagaaaattattttccaagagagctatccggaggacaacaacaaagagtaggaatagcgagatcattagcagttgaaccagatatatggtttttagatgagcctttttctgctttagatccattaattagaaaagaaatgcaagatgagtttttaagacttcaggaaaaattacaaaaaacaattatgtttatcactcatgattttgatgaggctttaaaacttgctgatcgtattgcaattatgaaggatggtataattgaacagctggatacacctgctaatattgttttaaatccagccactgaatatgtaaggaagtttactgaggaagtacctagagagaaagttttattaattgaagatataatggataaaactaaagataatcttggtgatttaaaagtttcaaaagatgaaattatagagaatgtagctgaaaaaattcttactcaagaaaaatcagtagctgtgatagataatgataacaacattattggttctataaacccagctaaaataatcaatacagtttttggagggagaaaaaataatatttaat

SEQ ID NO: 269712 - DNA, 298 bp, Unknown
  Bacterial polypeptide expressing nucleotide sequence isolated from the Sargasso Sea
cttgagtgcagcatcgacctctgtggaggcaaacgccgttgaagccaaaaacctggatttggtgttccaaaccagggacagtcctgtccacgctctttccgaaattaatcttgaaatccgtcgtggagatttcatcagtttcattgggccttcgggatgcggaaaaaccacccttttaagggtcatcgccgatcttgaaaaaccgaccggtggcagcattgtcgtcaacggggtcagccccgaacaggcacgtcttcagagggcttacggatatgtgttccagtccccagctttattt

SEQ ID NO: 269713 - DNA, 1687 bp, Unknown
  Bacterial polypeptide expressing nucleotide sequence isolated from the Sargasso Sea
ctgccaggcccaccacttaagggaatttttatgtcgtcttatcaatatattttctcattggaaaatttgtctaaaacttggtccgggggaaagacgctttttgaaaatattaatctttcttttttaccaaacgcaaagataggtattgtaggtgtaaatggttctggaaaatcgacctttcttaaaattttatcaggtattgataaggagtataatggtgaaataattgctgcaaaaggtattaaagttggctatttagcgcaagaacctgaattagatattacaaagaatgtttttgaaaatgtttctgaaggagctaaagaaaaactttcattgatagagaaatataatgaattgtccatgaactattctgaagaaatagctgatgatctagcaaaattacaggatgagattgaagctagagatttatgggatcttgactcaaaaattgaacaagccatggacgcacttagatgtccagataagtcaaaagatatcaatacgttatctggtggagaaaaaagaagagtagcgatatgtaaattgcttctagaggagcctgatttacttttattagatgagccaactaatcatcttgatccagaaactgtagcatggcttgaaaattatctaaaaaactataagggtacagttatattaataactcatgacagattctttctagataatattacagagtggatacttgaactagatagaggaaaagcaattccatatgagggaaattatagtagatggttgattcaaaaacaaaaaagaattgaactcgaaactaaacaagaaaatgcaagattaagaagattaaaaagtgaggttaattggatttcatcttctccaaaagcccgtcaatcaaaatctaaagctagaatcaataattacgagactcttttaaataaagaaaatattcaatctattgatgatccgcaaattattattcctaatgcacctcgtcttggtgatttggtgatagagttaaataatctcaagaaggtaattgaagataaagttctttttgaggatctttctttcaaggttccgaaaggagctatagttgggataattggagctaatggcgctggaaaaactactctttttaatattatttcagataaattagatgcaactgatgggttggtcaggttgggagaaacagtaaacttaagttatgtagatcaatcaagagaaactcttgattctgttaaaacagtatgggaagagatttctgagggaaatgatattgtagaaattaattcaactacgattaatacaagagcatacactagtgcttttaattttaaaggctcagatcaacaaaaaaaagtaggtcaattatctggtggggagaggaatagagttcaccttgctaaagtattaaaatctggcgcaaacgtattacttcttgatgagccaacaaatgatttagatgtcgagactttatatgctttagaatatgctttggataaattttctggatgcgcaatgataataagccatgatagatggtttctggatagagtatgtactcatatacttgcatttgagggaaacagtaatgttgaatggtttgagggaagttattcagagtattctgaggatagaaaaagacgattaggtgatgaaggtgaaattccttcacggataaaatacaaaaagttttctagataat

SEQ ID NO: 269714 - DNA, 691 bp, Unknown
  Bacterial polypeptide expressing nucleotide sequence isolated from the Sargasso Sea
atgagtgaaaacaataataatgaaattttgaatgtcgataacatttctttttcatattataagggtgtaaacgaattacatgttctaaaaaatgtatcctttaatttgaaaaaaggagaaatggttgccttggttggtccaagtggatctggaaaatctactttgttaaatttgataggtttattagaagaattaaaaaaaggcaaaatatttttgaatcaaaaattaattaatccaacatctgtaaaagacagaaataagattagattaaatgaaattggctttgtttttcaatttcacagattattacatgaatttacagcaattgaaaatgtagcaattccacaaatgttaactggattgaataaagagctttcaattaagagggctgacgaattactaaatatgatgaatttaaatgatagaatgcataacaaaccaggtcaactttctggtggtgagcaacaaagggtggcaatagctagaagtctctcaaacgctcctagacttttacttgcagatgaaccaactggtaatcttgatccaaaaactgctattgaagttattaatcacttgcgtctaatagtaaatgaaacaaatttgacctgtttaattgtaacccataatatagaaattgcttctttgatggacagagttttgaaattacaatttggaactatagttgagtaat

SEQ ID NO: 269715 - DNA, 829 bp, Unknown
  Bacterial polypeptide expressing nucleotide sequence isolated from the Sargasso Sea
aaaaattcttagtccagagaaaagaaatattggtatggtttttcaagactatgcactgttccctcacttaaacgttttagagaatgtgatgtttggtttgaaaaacaaaaaagatagatctagagttgactatctattaaatgttgttggtcttgatagttttattagaagatacccacatgaattatctggaggtcaaaaacaaagattagcaattgcgagagctcttgctcctggtactgattttattttattagatgaaccattttgtagtcttgatatgcatgtcaaactaaaattgcgaggtgaacttccaaatatcctaaaaggttgtaatgcaagtggattgatggttacgcatgatccggaagaggccatgtcaatttgcgataaagttgccgtcatgaatgaagggaaaatacatcaaattgatacaccaattaaccttcttaataatcccaagactttatttgttagtagttttattttgggtaacaatattattaatcttcaaaaaaatggtaattcatatagttcttgttttggtgaaataaatagttcaactgttttacaaaatggaaatattaaaagtatgtctatttcgcctaaatttatttcaattaaaagatcagaatctggtaatgcgaatgtaatatctaaagaatttcttggagaatttcttatatataaagtaactattaatggaaacatattaagggttagaactgatattaataatcttctaaataatggtgataaatgttttctttcattaaacaaaaatagttattattttttatatcctggagcacataaggtatatatatag

SEQ ID NO: 269716 - DNA, 1135 bp, Unknown
  Bacterial polypeptide expressing nucleotide sequence isolated from the Sargasso Sea
aatgagtaaagttttagaacttacaagagagctaatatcaaagaaatctgtgacacccgatgatgctggatgccaaagcattatttctacaagattggaaaaaattggtttttcagtcgagcaccttaggtatggagatgtagacaacctttgggctacttatggagatgccggccctatttttgcttttctaggtcatactgatgtagttcctacaggtccactggaagattgggagagtgatcctttcgtagcaactgataaagactctttactagttggaagaggagcagcagatatgaaaggaagcgttgctgcttttgtcacttctattgaagaatttttagctgaagaaccgatcttatcaggaagaattgctattctattgaccagcgacgaagagggtcctgctgtggatggagtaactaaagttgttgattatcttgaagaaaagaacgaaaaaattgaatggtgtcttgttggagagcccacagctgataataatgtgggagacgttatcaaaataggaagaagaggttcagtttcagcgaaggttatagtcaaaggaactcagggtcacgtggcctatccagaaaaagcgagtaaccctatacataatttctcctctcctcttgctgaactatctaagctcagctgggaagatgaaacaggtaagtttcaagatagtgttttacaaatatctaatctcaactctggtaccggagcaacaaatgttataccaggaagcttagaattaagtttaaatgtacgtcactcaccctcaacttctgtgcagcaaataaaagatgatgttgagtccataatcaataagtacaatgttgaatgtgagattttttgggaagttggaggaaagccatttcttactactcaagaagagcttatctcagcagtgaaaagctcaataaaagaagtgacagggtcagaacccaaatgcactactgatggaggcacatcagatggcagatttattgcacctaccggatcacaagttgttgagcttgggccaggtaatgcatctattcataaagtaaatgaaagcgtaaaaaaagaagatctcgaggaattgcataaaatatacaaaacaatactaagcaaactcctcactaatttatag

SEQ ID NO: 269717 - DNA, 709 bp, Unknown
  Bacterial polypeptide expressing nucleotide sequence isolated from the Sargasso Sea
atggcattttttgaaggaaacaaaatgactggaggttatggagatggacctgacattataaattcatgtactataaatgttaataaaggtgaaatagtagcaatactaggacccaatggtgctggtaaatcaaccgcgatgaaagctatgcttggattacttaaccttaaatctggaaatgtattaattgaaggacaagatatctcaaaattatctcctcaagaaagagtgaaaaagggaatttcgtttgttccacagacaagaaatgtttttgcagaattaactgtcagagaaaatttagaagttggagcatttttaagagaagacgatgtattaaaagtaattgaagaaatatatgatttattcccaatcttaagagataaaaaagatcaaatagtaggacagttatctggaggtcaaaggcagcaagttgcattaggaagggccttaatgattagaccttcagttctaatgttagatgagccaaccgctggagtatccccaatagtgatggatgaactttttgaacatatagttaaagtaaaaaaaactgatgttgcaattattatggttgaacaaaatgctaaacaagcacttagcatttctgaccgtggttatgttttagttactggagaaaataaatttgagggatctggcaaggaattattgaatgatcctgaagttagaagatcgtttttaggagcataaa

SEQ ID NO: 269718 - DNA, 619 bp, Unknown
  Bacterial polypeptide expressing nucleotide sequence isolated from the Sargasso Sea
tatggcaactaaaaagaaaaaaacaacaaccaagtcatcggtaaatacgaaaaaaacaaaaactaaaacagataaaaaaaagatagtttcttctaaaaagaagagtcccgttgtaattacatctagtggtgtagttaaaatatacaaaagtactaatgtagaagtgaccgcattagatggtgttgatataagtattactgaaggtgaaatggttgccattatgggccctagtgggtgtggaaagactactcttttaaattgtctttctggattagattcgattaattctggaagtataaaactacaagatatggagctagaaagcttatctgatgacaagctaagtgaatttagagcaaaaaacatgggatttgtttttcagagttataatcttttgcctgtactaactactgtagaaaatgttgaacttcctttgttggtttctggaacgtctgctaaagatgctagaaaaaaatcagaagccaaacttgatgatgttggacttcttgaatggaaacaacatcttcctggggagctttctggtggccagagacaaagagttaccttggctagagctcttgtgaatgaacctgccattgtatgggctgatgagccaacc

SEQ ID NO: 269719 - DNA, 670 bp, Unknown
  Bacterial polypeptide expressing nucleotide sequence isolated from the Sargasso Sea
gatgaacaaaatcaaatttgagaatgtgtccaaggcttattcgggtgggcgacaagctctatccgacgtgtcactggaacttattgagggagaagttacctttcttacgggacattcgggtgcaggcaagagctccttgttgaaacttatcatgcgtgaccagttagcaaccgatggagtggtttccgtaaatggggttgatctgacgagtataaaggatcgcaacataccttattatcgaagagggcttggaatcgtcttccaagatcactatctcctaatgaaccgtacagtctttgaaaatgtagctatcccgcttagtttaatcgggctaagtgacgaggtgatggcgcggcgagtaagagcagcattgacgattgttggtttagaggcgttgtctggaagcaaaccgacagagctttcagcgggagagagacaaagggtaggcatcgcaagagcggtggttatgcggcctagaattcttctggcagacgagcctacaggtaatttagatcctgaactatctcttagagcaatggagctttttgcgcaatttacggaaatcggttcaatagtcgttgtcgccagccatgatcagtttttgattgagcaaatgaaagcgagggttgttgagttgcgagagggacgagtagttcatgattctcgttag

SEQ ID NO: 269720 - DNA, 1339 bp, Unknown
  Bacterial polypeptide expressing nucleotide sequence isolated from the Sargasso Sea
gatgcacaatccgaatgctgtaaacgcccccgtccagacgaaccaaccgccgcgccttggtgaggaaatcctgcgcgtcgatcatgtctgtcgcggcttcaacaagacgcagggcgaattgctcgtgctcgacgatgcgaacctgtcgctgcgcgagggcgagatcgtcggcctgctcggccgttccggctcgggcaagtcgacgctgttgcgcatcatcgcagggctgatcgagccgaccggcggggaagtgacctatctcggcaagccgctgaccggccccgccgaaggcgtcgcgatggtgttccagaccttcgcgctgttcccgtggctcaccgtgctgcagaacgtggaagcgggcctcgaggcgctcggcgtcggcgcgcgcgagcgccgcgagcgcgcgctggccgcgatcgacctgatcggtctcgacggtttcgagaacgcgtacccgcgcgagctgtcgggcggcatgcgccagcgcgtcggcttcgcgcgtgcgctcgtcgtcgaccccacgatcctgctgatggacgagccgttctccgcactcgacgtgctgacggccgagacgctgcgtaccgacctgctcgatctctggacgcaaggccggatgccgatcaagtcggtgctgatcgtcacgcacaacatcgaggaagcggtgttcatgtgcgaccggattctcgtgttgtcgtcgaacccgggccgcgtgatcgccgaaatcaaggtgccgttcaagcatccgcgcaaccggctcgacccggcgttccgcaagctcgtcgacgacatctacgcgaagatgacggcccgccagaccggcgaagcgacgaagaaggggctggagctcggcagctggctgccgcaggtgtcgaccaacctgatggccggcctgatcgagacgcttgcgatggcgccgtaccacggccgtgcggacatgccggaaatcgcgcgtacgctgcatctggaagtcgacgatctgttcccgatcgccgaagtgctgcagtacctcggcttcgcggacgtgcgggaaggggacgtgttcctgacgccgccggggcgcgtgtttgcggaattcggcacgcaggagcgcaagctgatgttcgcggatcacctgctgaagcacgtgccgctcgcggcgcggatcaagaaggtgctgaacgagcgcccgggccatcgcgcgccgcgcgtgcgcttcgagcaggagctggaggatttcctgtcggacggcgccgccgaggagacgctcgacgcggtgatcgactggggccgttatggcgagatcttctcgtacaacgaccagaccgagattttcagcctcgaggacgtcgagtcctga

SEQ ID NO: 269721 - DNA, 757 bp, Unknown
  Bacterial polypeptide expressing nucleotide sequence isolated from the Sargasso Sea
atgatagaaattaaaaatttcaataaaacaaagctcgttaaagacataaattgtttagaggtaaataatctgagttctttttataaaaaaaagaaaattctaaatgatataagtattaatgtaaaggaaggcgagattgttggtctcttaggacctaatggagcaggtaaaacaacctgttttcagtgtattgctggactacaaaatataagtcatggtaatataaaacttaatgattttaacataaacaacttacctatctataaaagagcaaaacttggattaaattacctcccacaagaaacatcaatttttcgcggtttatcagttgaacaaaatattttatcaataatacaattaaacaactcaaataatgataaacaaaatattgaatttttaaatgaattactaaatgaattttctttagaccatataaggaatgcatctgccttaactttgtcaggtggtgaaagaagaagagttgaaattgcaagagctttggcatctaaaccaaaatttttacttttggatgaaccacttgctggaattgaccctattgctctaatcgaaataaagaatattatttttaaacttaaagaaaaaaatattggtatattaattactgaccacaatgtaagggaaactttaaatacagttgatagaagctacatacttcatgatggaaaaataatttcatctggttcttctgaacttttactaaatgatagtgatgtaagaagagtttacttgggcgaaa

SEQ ID NO: 269722 - DNA, 328 bp, Unknown
  Bacterial polypeptide expressing nucleotide sequence isolated from the Sargasso Sea
tttgctcagtttggatcagacttagatgcttccacacagaaacttttaaatagaggctcaaagttaacggaacttcaaaaacaaaaacaatactcaccaatgacggtagccgaacaagtaatttcagttttttgtggagtaaaaggctatttagatgatgttgatcaaaaaaatatcgctgaatttgaaaataaaattattgaaaaatgcagatctgaaaaaccagaaattttagaatcaatagcaagctctggtaaactcgaagaggattctgaaaaatctttaactgaagttattactgaacttaaaaaaaattttaattcataaa

SEQ ID NO: 269723 - DNA, 1284 bp, Unknown
  Bacterial polypeptide expressing nucleotide sequence isolated from the Sargasso Sea
aatggaaaaaataatatcaattaataatttaagtatagcttttagtaaatatgctgaagtagttaaaaaagtaaatattgatgtagtgaaaggtaaaactacggcaatagttggggaatctggatcaggtaaaacattatcagcacttagcatactaaaattactgcctaatggggcgaacattaagacaggaaaaataatatataataataaaaatttattaaatttaagtcaaaaagaaattcaaaatatacgaggaaataaaatttcaacaatatttcaggaaccaatgacaagcttgaatcctcttcatacaataaacaagcaaattgaagaaattatcactactcataatacgataagtaaaaaagaagctgaagaaagaactattaaattgctaaatgaagttggtcttaatgatatttcatcaagaccaaaaatatatccatatgaactgtctggtggacaaagacaaagggctatgattgcaatgagcattgcgaatgaaccagatgtattaatagcagatgagccgactacagctttagatgtaacaatacaattacaaattttagacttattacaaaatattcaaagaaaaatgggaatgtctttgatttttataagccatgatcttgcggttgtaaaaaaattatcggattacatatatgttatgaaagatggtaaaatcattgaatttggtacaagtgaaaaaatttttaatactcctaaacatgaatatactaaagaattagtatcaaatcaaaataatataaaagaaaataacagtagtaatagtaaatctattataaatattaaaaatctagatgtttggtatccaataaaaaaaggattgcttaaaaggacaatagattatgtaaaagcaattaaaaacgttagttttaatttaaatgttggtgaaactattggaattgtaggagaatctggctctgggaaaacttcattaattttagcaattcttaatttagttaaatccaaaggagaaatagttattaatgataaaaatttaaataatttaagtaaaaaagaaattttagatttaagaaaagatattcaagttgtgtttcaagatccattttcatcactaagtccaaggatgaacattgaggatattatctctgagggtttgatggttcattatccagcaataagtttgaaagaaaaaaaacaaaaggtaaaaaatattttaaaaaaagtcggtttagaatatgaatatacaattgaaaaataccctcatgaattttctggaggacaacgtcaacg

SEQ ID NO: 269724 - DNA, 523 bp, Unknown
  Bacterial polypeptide expressing nucleotide sequence isolated from the Sargasso Sea
atgccaagcttaaaagatattaagacgcagattaactctgttggttctacaaaaaaaataacttcagccatgaagatggttgcggctagtaaattacgtagatcacaagaaaaggcagaagctgcaagaccctattcttcgcgcctcgaagaaatgcttgcctcactagcatcatcagcctcttctggagaggggattattaagcttcttactggcactggtaacgatcaaaattatatcgttgttcctgtaagtgcagatagaggtttatgtggtggatttaatagtagtattaatagggagacctttaagcttgttaaatcacttgaaggtgatggcaaaaatgttcaaattatgcctgtgggaaaaaagagtagagatttctttaatcgtgtaatgaaagatcaaatcacagaaagttttgttgatttgaatatttcaaatactggatacgagtctgctctacaagtatctaacaaacttcaggaattatattttgagggaaaatttgataagtgcattt

SEQ ID NO: 269725 - DNA, 928 bp, Unknown
  Bacterial polypeptide expressing nucleotide sequence isolated from the Sargasso Sea
tatgcatgctctatcgataaaaaatctatctaagaaatataaaagcggtgttgaagcactaaaatctgtaagttttgatgtacagcaaggagatttctttgctttactcggcccaaatggtgcagggaagacaaccgcaataggaatcattacatcgcttgtgaataagtcatcaggatcaatcgaggtttttggtcataacttagataaagaattagcaaaagctaaatcttgcatcggcgttgtaccgcaagaggttaatctaaatctattcgatttcaacttcaatattctagtgaatcaggctggtttctatggcatcccaagaagcgagggcatgaagagagctgagcagtatttgaaaaaaatgcaactttgggaaaaaagaaagaccgatgcaagaagtttatcaggaggaatgaaaaggagactgatggtcgctcgggcattggttaatcggccaaaacttttgttgcttgatgaaccaactgctggcgttgatattgaaaccagaaggatgatgtgggagtttctgagagaattgaatgcaagcggcactacaatcattctgacaacacactaccttgaagaggcagaacaattatgtaacaaagttgccattattgatgaagggaaaatcatagaaaatgattctatgcaaaatgttttgaaaaaactcaaaacagaagtttttattcttaacaccgagaagccacttgatgaagctccagaaattgatggatatgcaactgctctaaaatcacctcaagaaattgaaattaccgtgtcacaagaacaaggagtaaacaatgcttttggttctttgcaagaaagaggagtcaaagtgcttagcatgcgaaataaaaatagcagacttgaagaactctttcttgatcttactagaagccagtcaggaaaagaatcatga

SEQ ID NO: 269726 - DNA, 685 bp, Unknown
  Bacterial polypeptide expressing nucleotide sequence isolated from the Sargasso Sea
atgtctcaaataaaaatagcaaatttacaaaaatcatttggagattttactgcagttaaaaattctaatttaacaattaatgacaaagagttttttgttttgctaggcccatctggatgtggaaaaacaacaactctaagaatgattgctggattagagttaccaacatcaggagaaatttacttaggcgaagaagaagttggaatgttaagagcatctgagagagatattgcattcgtttttcaattgttcgctctttatccacatatgaacgttaaaaataacttatcttttccccttaaaatgcaaggttatagcagaagtgaaattaaaactagagttgaggaggcagcaaaacttttaagaattgatcatattttaaactccagtatttcatcattatctggtggagatagacaacgtgtagcccttggtagagctttagtaagaaggccaaaagcatttttaatggatgagcctttaggtactttggatgctgaatttagagaattaatgtgcttggaactcaagaaattgcatgtcgatattggagctacgactgtttacgtaacacatgatcaattagaggcaatgtctttagctgatcgtattgctgtaatggatggtggtgaaatcttacaagctgatgaacctgcagtaatctacaataaaccagcaactaaat

SEQ ID NO: 269727 - DNA, 1333 bp, Unknown
  Bacterial polypeptide expressing nucleotide sequence isolated from the Sargasso Sea
atgtcaggggttctcaaaagacacacaaaaatgagcaataaagaaataaaagaaagatgcatagatatgctcgattctgttggtatcagcaaaccccaagaaaggttcgacggatactcttttgaactttcaggaggcatgaggcaaagagtgatgattgcatcagcactcctaacaaacccaaaactgctgatagcagacgagccaaccactgctttagatgtgaccgtacaggaaaaaatattggaccttattttagatgtgaaagaacgattcaaaatgtcggtcataatgattactcatgatctaggcgttgttgcaaggacatgtgatcaggtattggtaatgaagaatggcgaattacaagaaagcggaaatgttgaatccatattttattctccacaagccgactacacaaaagaactgcttgaaaaatcaaaagaaataaacctagacgaacagcaaaaatactcagaaacccaagacgccaacattaagaacagtttggttaagtcgacaaaggcaaaggtgaactttgttcttcctaaaaaggcgcttttttcagcagaaaacatattaactgcagtgaatgaaatatcaatggaaactcttgagggtgaggttttgggagtggttggagagtctggaagcggaaaatcaacgcttgcaaaaacaatactagggcttcaaaagctatcctctggtcaggtcgaagtatttggtcaaaggcttacagaaatcaacaaaaaagaactcaaagaaattcgaaaaaaaatgcaagttgttttccaagaccctttttcgtctcttaacccaagaatgactgtttttgagatcctaaaagaaccccttgattccttttttccttcaatgaccaaagagtctgcgcagaaagatatagaagacggcctaatggaggttggcctgacacctgaatacttaggcagataccctcatgaactttcaggggggcaatgtcaacgagttgcaattgcaagagcccttatgccaaagcctcaactattgatatgcgatgaagctgtcagcgccctagacgcatcaattaggggggagatcattgatcttctgctcagaattaaagcagagaaaaaactgaccatgatttttattgcccatgaccttgcggtggttagaaagatatgcgacagggtaatcgtcatgcaatcaggaaagatagttgagcaaggcccaacagagaaagtgttttttgagccggaaaaggaatacactgctaacctattaagcgcagtgcccgttccagacccaaaaatggaaagagaaaaacacactaaaagagttcaagcaaaataga

SEQ ID NO: 269728 - DNA, 1261 bp, Unknown
  Bacterial polypeptide expressing nucleotide sequence isolated from the Sargasso Sea
aatgaaatctttacttgagattagaaaccttggaattacctttgagtttaatggacaaactgttcaggcagttcgtgatagcagttttaaaataaataaaggtgaatgtctagcaattgttggtgaaagtggatctggaaaatcagttactgctttagcaataatgcgattaataaggtcaaactcacaacttagaatcacgggaagtgcgacatatgaaaaaaaaaatctcttaaatttagatgaatcaagtttacaaaatataagaggaaaaaaaatttcaatgatttttcaagagcctatgacatctcttaatccacttcataatattgaaaaacaaattacagagtgtcttgcatttaaccaaaaatcaaataaatcaaaatgtatagaattacttaaagaagttggtatagaaaacccagagcaaagactgtctcacttcccacatcaactatcagggggacaaagacaaagagttatgattgcaatggctatagctaacaatcctgatttgctaattgcggacgaaccgacaaccgctcttgatgttacaattcaaaaacaaatattagacctcttagataaattaagaaaaaaatataaaatgtctcttttactaattacccatgatcttggaattgtaaaaaaaatttccgatagagtatgtgttatggaaaaaggtaagattgtagaacaaaatacaacctctaaagtctttagcaaaccaaaacacacttacacgaaaaagcttattaatgcaaaacccagagagaaaaaactaaaaaaaaaaaataatgaaatcatcttatctgtaaaaaatctcagtgtttattacaaaaatacaaatagttttttctttaaaaacgaagacgatgattttcaagctgtaaaaaaccttagctttgagatcgccaaaggtgaaactcttggaattgttggggaaagtggttctggaaaaagttctattgcccaagctttaattaaacttatagattctaagggaaactttttttttaaagataaaaatatttcaaatcttaccgaaaaaaactttaggtcttacagaaaaaatattcagataatttttcaggatccttttgcttctcttagtccacgtctcactgttcaggatattgtaagcgaggggctagaggtacatgataaagaaaagtcaaaaaaagaaatggaaagtttaacacaaaaaataatcagcgatgttggtcttgattcttcaatgctttctaggtaccccccatga

SEQ ID NO: 269729 - DNA, 490 bp, Unknown
  Bacterial polypeptide expressing nucleotide sequence isolated from the Sargasso Sea
aatgaattttatttcaccatatattgaattaccaaagaaattaactgtggaagaaaatttaaaagtatatgggagattatatggagttaaaaatttaaatgaaaaaatatttaatttaatggaaaaactaaaattaactgaatttaggtcaagaaagacaggcgaactttcatctggtcaaaaaaatagagtttccttggccaaagctttaattaatgatcccgaagtcctacttcttgatgagccgactgcaagccttgaccctgatgtaggagataatattagaagttttattgaagaatttgcagccaatagaaacgcaactattttgttagcatctcataatatgaatgaagttgagagactttgcaatgaggtaatgatgatgaaaaatggtgaaataattgatagaggcgaaattaaaaatttaattaaaaaacatggaagagaaaatctggaagaagtttttttaaaaatagtaagggaataa

SEQ ID NO: 269730 - DNA, 1120 bp, Unknown
  Bacterial polypeptide expressing nucleotide sequence isolated from the Sargasso Sea
atgactactacagaaaaaagagattattcaacagttccatctgctatagggtgttctaatgatggagatcctataattcaggtgagaaatattagaaagtggtatcaagtcaataaaggccttccaataataggaagctttgattggttgaaagccgttgatgatgtttcattcgatgtacctgctggtaaaacaattggactggtaggtgagtctggttgtggtaaaacaactacagcaaaaatggtattaggacttgaaaatccatcaacagatggtgaagttcctgtaggaagcatttattttcaaggagaagatgttactcaattaagtggtgctggtaaaagggaaatgagaaggtctgttcaagctgtttttcaagacccttggtcctcacttaatcctagaatgagagttaatactataatttctgaaccgcttgaaattaatacaactatgacaaaaaaagagcgagatactagagctggggacttacttgctgaagttggattaaatccatatcaaggtaacctttatcctcatgaattttctggaggtcaaagacaaagaattggtattgcaagagctttagctctgaatcctaaattaattgttcttgatgaaccagtttcagctcttgatgtttcaattagagcgcaaataatgaatcttttagttgatcttcagaatgaacatgatctagcttatattctaattgctcataatttggcaacagtaagatatatgtgccatagaacggctgttatgtacttaggagttattcaagaatatggtgatactgaggaaatatttgctgagcctacccatttatacacaaatgctttaatttcagcagctcttccatctcaccctgatattcaacgagatgaaattgttttacctggtgaagttgtttcacctgtaaatccccctgttggtgatgtattcatgactagaacacctcttcctgtaagaaagaatcataaatacactaaagaaagaccacctcttgttgaggttggaaaagatcactatgtggttgaaactccatggagtaccgtaacagggcatgatctgtcagaatttaaattatctgtagatcaagaaatgcaagaataaa

SEQ ID NO: 269731 - DNA, 1915 bp, Unknown
  Bacterial polypeptide expressing nucleotide sequence isolated from the Sargasso Sea
aatgatcagcatcaaccaagcgcaattaatccgtggcagcaaaaccctgctcgacgaagcctctttgaccatctatcccggccataaggtcggcctagtcggcgccaatggcacgggtaagtcctcactgctggcattaattatgggtcacctgagcttagacaaaggcgagtttagtatgccttcgggttggcaaatcgccaccgtagctcaagaaacgcccgcgctggaagtctctgcacttgagtatgtacttgatggtgataaagaatatcgtcaacttgaggccgatttgcatatcgcgcaggaacacaatgatggccatgccattgccactttgcacggaaaaatcgatgccattggcggctacgccattcgcgcccgcgcaggtgccttgctggcaggtttaggctttagcgaagccgagcaaaataacccagtgaaaagcttttcgggcggttggcggatgcgcctcaaccttgcccaagcgctactgtgccgctccgacttactgctgctcgacgaaccgaccaaccacttagacttagataccatgtactggctcgaagggtggattaagtcctatcaaggcacgctgattttaatcagccacgatagggattttatcgacgagattgtcgatgaaatcgtccatgtcgagaatcaaaaactcaattattacaaaggtaactacagtgcctttgagcgcatccgtgccgaacgtatggcgcagcaacaggtcgcctatgagcgccagcaaaaagaacgggcgcatatgcagtccttcgtcgaccgtttccgctacaaggccagtaaagccaagcaagcgcagagccgcttaaaggcgctggagcggatgactgagctattgccatctcaggctgatagcccgttttatatggagtttcgcccgccagaagccctgcccaacccattgattaaaatggagcaagtggctgtaggttatggcgataagcaaatcttaagccgtgtgcatttgaacttagtccccggtgcccgtattggcctcttaggacgcaacggtgcgggtaagtcgacattaatcaaattgttatcggggcaactgtcagcgatgaccggattgtatgagccgaatcccggcctgaatatcggttactttgcccagcaccaaatcgaatttttacgcctagacgatacgccgctgcaacatctggtgcgcctcgcgccaaatgcccgcgagcaggaattacgtaacttcctcggcggttttggcttccatggcgatatggcgctctcgccagttcgtcccttctcgggtggcgagaaagcgcgtttagtgttggccttattagtgtggcagcgccctaatctgttactgctcgacgaaccgaccaaccacttagatctagagatgcgccatgctctcactatggcattgcaaacctttgaaggcgcaatggttatcgtatcgcacgaccgtcacttactgcgcttaacctgtagtgactactatctggttgatcaaggccaagtgcaagccttcgatggcgatttagaggattaccatcaatggttactcgatgccgctaaggccgccagtgcgaattccaccgttaacggtgacgatgccaaacccgccgtcgataagaaacagcaaaagcggttagaagcagagctgcgccaaaaggtgtcgccactaaaacgtaagcaggcgaagcttgaaaccgatcagcaaaagctcagtgaacgcctcgccgagttagagcatctgctggccgatagcgagctctacgatcaggacaataaagccaaactcacatcggtactcagtgagcgcaccagcttgacacaaacgctggaagaaagtgaaatgcaatggcttgagctgcaagaagaaattgattcaatggaacttgagctgatgggccaataa

SEQ ID NO: 269732 - DNA, 865 bp, Unknown
  Bacterial polypeptide expressing nucleotide sequence isolated from the Sargasso Sea
atgaacgaaaacccgatggttcctgatcttgcgttacctgaagagcctgccgaacgctcgttgagcggcgtcgcgagtatggggcacgccgtagtgccaggcgagatcgatgtttcgcatgggacgattctgtaccttgaagacgtgaccgtgagtttcgacgggtttcgcgcgttgaatgcgttgagccttgcgatcgatgcgggcgagctgcgttgcattatcgggccgaatggcgctggcaagacgacgatgatggatgtcatcacggggaagacggagccggattccggcaaggtttttctggggcagtcgatcgatctgacgcggatgaacgagccgtctattgcccgtgccgggattgggcggaagtttcagaagcctacggtttttgagcaacatcctgtgtgggagaaccttgagttggcgatgaaggctgacaaggggtggtgggcttccctgcgtgcacgattggatcgtgaggcgcaggcgcggattgaagagacgttggcgttgattgggttggagagcgaggctcggcggctcgccggcgagttatcgcatgggcagaagcaacggcttgagattgggatgttgctgatgcagcagccggcgctgcttttgcttgatgaacctgcggctggtatgactgatgacgagaccatgcagttggctgagttgctgaatcatttgcgtgggacgtgttcgatgatggttgttgaacacgatatggaatttgtggctgcgttgtcggggaacgccgggaaggtgacggtgatggccgaaggacgggttcttgcgcatggcactttggatgaggttaagcgtgatgagatggtggttgagtcttatcttgggcggtaat

SEQ ID NO: 269733 - DNA, 1066 bp, Unknown
  Bacterial polypeptide expressing nucleotide sequence isolated from the Sargasso Sea
atgtctaagatttcactcaaaaatttaagccatagttatttaagttctcaagttaataaagaggactgggcacttcgtaatgtaaatattgattggaacgacggcggagcctatgcccttttaggtccatctggttgtggaaaaacaactttgttaaatataatttcaggattaattaatccaacagaaggtcaaatattatttaatggtgaggatgttacaaataaaaatcctgttgaaagaaatattgctcaaattttccaatttccagttatctacgacactatgactgtttttgataatcttgcattcccattgaaaaatagaggtatatctgaacaagaaatcaaaaataaggtagaggaaattgcagagatgcttgaacttacctcaacacttcataacagagcatctggtttaacagctgatggtaaacaaaaaatttctcttggaagaggtcttgtgagatcagatgtgaatgtaattatgtttgatgaaccactaacagtgattgatccacatttaaaatggatcttaagatctaaattaaaagaacttcatcaaaagattaatagtacaatgatttatgtcacacatgatcagacagaggcacttacatttgctgatcaagttgtagtaatgcatgaggcagaaattgttcaaattggaacacctgtagaattatttgagaaacctcgacatacttttgttggtcattttataggatctccaggcatgaatattctgccatgtaaaatagataatggtgcaatttctataaatggtaataaaattgaaaccaaaatagacattaaagataaaagtttttctaaaactgaagttggaattagaccagaatttattgaatttaatgaaaaaggtttgccagtaaagatacttaaggtaagtaacacaggaagacataagataattgatactgaaagtgaaagtggaaaaataaaagtaatagcaaaaagttcagataatattccaactggatctgcatttttaaactttaaaaaagattatacatacgtgtacggagataattggataattgaataat

SEQ ID NO: 269734 - DNA, 817 bp, Unknown
  Bacterial polypeptide expressing nucleotide sequence isolated from the Sargasso Sea
catgaacgcttccttggccccggataacatccaacccacttctccatcgggaaacacccttctggaagtggatcagatcagcctctccttcgggggggtgaaagccctccaggatgttagtttttctgtggaagaaaagcagatcatggcgatcatcgggccgaacggtgcaggcaagacgtccatgctgaatgtgatcaacggattctaccatcctcagcagggtcagatccatttcaagggactccatcgaaagcagatgcgtccccatgaagccgcggttcaggggattgccaggactttccagaatgtcgccctgtttaaaggaatgtcgactttgaacaacatcatggcgggcaggaacctcaaaatgaaaaaaaatcttttctggcaggccctttattacggaccggccagggatgaggaaatgaagcatcggcttgaagcggaaaaaatcatcgattttctcgaaatccagtcgatccggaaaactccggtcggccgtctaccctacggtctgcaaaaacgggttgaactggggagagccctagccatggaaccggaactgcttttgcttgatgaaccgatggcgggtatgaacctcgaagaaaaacaggacatgtgccgctttgtcctcgatatcaatgaacagtatggaaccaccatcgtcctcatcgaacatgacatgggagtggtgatggacctctctgaacgagtggtggtgttggattacggacgaaaaattgccgatggcactccggatcaagtaaggtccaatcaaaacgtgattgatgcttatttaggggtaactaaatag

SEQ ID NO: 269735 - DNA, 1777 bp, Unknown
  Bacterial polypeptide expressing nucleotide sequence isolated from the Sargasso Sea
aatggcctcgtctcgcgccgttgaaacggccctccaggttgccacggcggcgattcttctgagcttgccgctgtgggccggtgactacagcgcaaaccagatcgggcttctgttgctgtatggaatggcaacgcaaagcgttgctttgtgctgggggaattcgggctttttgccgctcggccaaagcctgttcttcgggctgggcgcgtatgtcagcgccttcgtattgcgctccgccgccgcggccggcggcgaatggcagatcattctgcttccgtttgcaatcgcggtaccggcggctctggcctatgccatcggattcatcgtctttgcgcgccggatcgacagcgggccgtttttttcgctgattacacttgcgttgtgcatgttggggtttctgctggccaatcaatggagcagcgtaaccggcggcttcaatggcttgaccgatatcccggacctgccgatgaccgacaggtatggaaatctctattacgtgatcgcggcggctgcggtggtcgtcaccgcactgatcacctggttgaaccgcaggccgatcgggacgctctggacagccatctcggagaacgaagatcgcctccagttctttggattcgcgacgcacaagctgaaggctgccgccttcggcctctcgggcgcgatcgcgggtttgggtggcgccctgtatgcacctcacgagggtctggtcggtccgcaagccgtcggcgtggcgttgtcggcgcagttcgtcatctgggcggccgtcggcgggaagcgcagtccgttgggcgcgcaactcggcgcagtcgtgatcgggctcctcgcggcgacgtggcgtgatctgttcacctattgggaagtgctggttgcgctgattttcatcggcgtggtgcggctctttcccgacggtctggccggtgccgccgctgcgcttgcccgaatggcgggtctacgcgtcgcgaacagcattccggagaaacggatagaggctcacgacatcgcgatgatcgacctacgaccggctgagtccacgttgctcagcttcaggaaggtggaggtcagccagggcggcgtcaacattctcaacgggctcgatctcgaagtcggggcaggggtcgtcaattgtttcattgggccgaatggcgccggcaagacgtcgacattcaacgcaatgacgggccgcttgcccgtccgttcaggtgaaatccgctttcgcggggccgagatttcgtcctctcaggcgtggcaggtctcccgactgggcgtcggccgcaagtttcagattcccacggtttttgcgcagttgtccgtcaacgagaatcttcagatcgcgctgtgggcaaatcggatacgccctcgagagatgctgactgcggcgccgctgcattggaattcgcttcaacgcgttcgcacgcttgaaaaattcgggtttcttgaatcgaatatggcggctcgtgcgggcgatctttctcaagggatgcgccagatgctggagttcgcgatggtggcgatcaccgagccgcgtctgttgctcctcgacgaaccgtgcgccggcctgtcggcacacgaaacccgtcacatgatggacgcgatcacgtcgaccgtgagcgaactggacgcgtcagccatcgtgatcgagcacgacatgagcgcgctcgaaaagatcgccgacaacgtggtggtcctgcatcagggaagaagcctcgcggtcggatctttggcgcaaatcaagatgtcggaagacgtcaaggccgtctactcgggaggaagaaagtga

SEQ ID NO: 269736 - DNA, 2146 bp, Unknown
  Bacterial polypeptide expressing nucleotide sequence isolated from the Sargasso Sea
atgcaagcagaaactaaccgtattgacgagttgttggagtgcctggtctttctgacccgcttttatggggtgcccaacagcaaggatgccctgacgaccggtttgccactggtgtccggcctgctgacgcccaacctgtttggccgtgccgccgagcggggtgggctgtctgcccgggaagtgatccagccgcttgccgaaatctcccccttgttgctgccttgcgtactgcagatgcgcaatggtggcgcctgcattctgctggagtggaatgaagacaggagtcaaggcaaggtcatctttcctcaagcgggagatgcggcccagtggctcagtgcggcccagctgggtgatgagtatctgggtcgactgtttttcgtcaaaaagcagttcaaatttgatgagcgctcccccaaggtgctggagacccgtgacgggcactggttctggagcactctgtttgaatcccgtggcatctatcgggacgtactgatcgcgtccatcctgatcaacctgtttgccatcgccagcccgctgttcaccatgaacgtctacgacaagatagtgcccaatctggcattcgattccctttgggtgcttgcggtcggggccatggtggtgttcaccttcgatttcgtgatgcgccagctgcgcagctatttcatcgacatcgccggtaagaaatcggatgtgctgttgtcggccaagatcttcgccaaggtgatgggcatgcggatggagtcgcgaccggcctcgaccggtgcgtttgccaaacatttgcaggagttcgagtcggtacgggagttttttacctccgctactgtctctaccctcatcgacctgccgttcgcggtcttcttcctgttcatcatctggatttttgccggtgtcatggtcgtggtaccgatcgtcgccatgctgatcctcattatttacagcttctatattcaggcgccgctcaagcagtccatcgaagagggatcgcggcttgcctcccagaagaatgccaatctgatcgagagcatttcaggccttgagaccgtcaagattttcggggccgagagcatgttccagcatcgctgggagcaggccgtctcccatatctcgacctggggcgtacagacccgccgcatcaccaactccatgtcctcgctggccagttacatccagcaggtggtgacggtggcattggtgattgtcggtgtttatcagatttcggaagggttggtcaccatgggtggcatgattgccgccgtcatgctgtcaagccgtgccattgcgcccatggtgcagttgtcagtgctctccacccgctacaaccaggccaagtccgcactggaaatcctggaaaaaatcatggtgacaccgggtgagcaggaagagggcaaacagtatatccaccatcccgtgatctccggtcggatcgagtttgacaatgtatcgttcaagtacccggggatggaaaccagcaccctgcacaacatcaatctgcggatcgagccaggcgagaaggttgccatcataggccggatcggggcgggtaaaaccacgctcgagaagatcttgatgggcttgtatcggcccaccgatggttcggtgcgactcgatggattcgagctggatcagttgccggcctcggtgatccggcgcaacataggttgtgtcccgcaggacgtgaccctgttttttggctcggtacgcgacaacatcatgctgggcaatccgctggtggacgatgtgcgggtcatgcgggccgccaaacgggccggtgtcaccaattttaccaatcgggatcccaacgggctggatcggcagatcggtgaggggggccgccagctttcgggtggtcagcgtcaggccattctgctggcgcgagccttgctcaacgacccccccattctggtgatggacgaacccacctccaacatggataaccagtccgagatgcaggtaaagcatgagttggcacgattggggccggaaacgaccctgatcctgatcactcacaaaacctccatgctcgatgtcgcttcacgggtcatcgtggttgagcaggggcaggtggtggccgatgggcctaaagaggctgtgctgcaacagttgaaagagggcaaggtgcgtgtgcaggaggcgtccaatggctaag

SEQ ID NO: 269737 - DNA, 334 bp, Unknown
  Bacterial polypeptide expressing nucleotide sequence isolated from the Sargasso Sea
ctgcctttcgcacaatttggttcagacctcgatgcatctactcagaaattacttaacagaggatcaaagttaaccgaacttttaaagcaaaatcaatattctcctatgacagttgcagaacaagtcatttctgtattttgtggagttagaggacatcttgatgatattgaacaaaaggatattgcaagtttcgagaataaaattattgaaaaatgcaaagctgaaaagccagatataattgagtcaatcactgcttcaggaaaacttgaagatgataaagagaaagaattaaatgaaattattttacaacttaagaaagattttaacgcataaa

SEQ ID NO: 269738 - DNA, 1033 bp, Unknown
  Bacterial polypeptide expressing nucleotide sequence isolated from the Sargasso Sea
atgtctgatacagttattaaatgtgaatctgtttacaaaatttttggagaaaatgccaaaaaaatgctccaagaagctaatggaaacgtagatgcaaaaacttttcaagaaaatggatgtatagttggagttaacaatgcttcctttgaagtagcaaaaggagaaatgttggttgtgatgggtttatctggatcaggtaaatcaacattgcttagatgtatttcaagactaacagatgcaacaggtggaaaaatttttatagaaggtcaagatttattggagctaaacaacaaagaacttattgatcttagaagaaataaaatgggaatggtttttcaaagctttgcgttgttgccgcacaaaactgtagttgaaaatatagcatttccattacagattaagggaattaatactgatgaaagcattagtaaggcaatggatatggttaagttggttggattagatggaagggaaaattattttccaagagaactttcaggtggacaacagcaaagagtaggtattgcaagatccttagctgtagagccggatatttggtttttagatgagcctttttcagcattagatcctttgatccgaaaagaaatgcaggatgagtttttaagacttcaagataaattgcaaaaaactataatgtttatcactcatgattttgacgaagctttaaagctagctgatcgaatagcaattatgaaggatggtataattgaacaattagatacacctgctaaaatagttttaaatcctgcaactgaatatgtgagaaaatttactgaagaagtcccaagggaaaaagttttgttaattgaagatgtaatggatcaatcttcaagtgataatttaggagatttaagagtttcaaaagatgagattattgaaaatgttgctgaaaaaattctaactcaagaaaaaactgtaggagttatagatagtaataataaaatcataggctctattaatcctacaaaaataataaatacagtttttggtggaaggaaaaatggaaattaaa

SEQ ID NO: 269739 - DNA, 1539 bp, Unknown
  Bacterial polypeptide expressing nucleotide sequence isolated from the Sargasso Sea
gccagctgagccagcgcatggacgatgaggaggcctggagcctcgagcagcaatgccgtgaagtcctgcagaagctgggcatcagtgacctgcaacgtccggtggcggatctgtctgggggctatcggaagcgggttggattggcctccgccctggtggcttgcccggatgtgctgctgctggatgagcccaccaaccatctcgatgccgccgccgtggagtggctgcagagctggttggaccgctacccaggggccctggtgctggtcacccacgaccgctatgtgctcgatcgggtcaccacccgcatggtggaagtggaccgcggccgggcccgcacgtaccaggggaactacagcacgtttctgcagcacaaggcagatgaggaggcctcggaagcgtcctccgccgccaagttccgtggtgttctgcggcgggagctggcctggctccggcagggacccaaagcccgcagcaccaaacagaaagcacgcatccagcgcatcgaggccatgcgcgaggcacccgtccaacaggggcgcaaaaccctggagatggccagcgtcagccgccgcatcggcaagctcgtgatcgaggccgaagccgtgggggtgaccgccgatggtcggcccgaaggacgatcgcttctgcgggacttcagctacagctttagcccggaggatcgcatcggcatcatcgggccgaacggcagtggcaaatcgactctgttggatctgatcgccggtcggcgccagaccaactctgggatgttgcggctcggagagaccgtccacatcggctacctcgaccagcacaccgaggctttcaccgcggggaagggacttcaacgcaaggtgatcgaattcgttgaggaagccgccagccgcatcgaagttggcggtgagcagatcaccgcgtcccaactgctggaacggttcctgttccccccggcccagcagcacagccccctggcgaagctctccggcggtgagcgtcggcgtctgaccctgtgtcggatgctgatccaggccccgaatgtcctgcttctggatgagcccaccaacgacctcgacgttcgcaccctgagcgttctggaggactttctcgaggacttccggggctgcgtgatcgtggtgtcccacgaccgttactttctcgaccgcaccgtcgaccgtctgttctgtttcgaggagggtcgcctccaacgattcgaaggcaactacagcgcgttcctcgaacagcagcgtcagctggaacggcaacgaacgtcagcgacggctccagctgccaggggagacgcccgccaaaccaaggcaaaagcagcaggtccgagacgtcgcagcttcaaggaaaccaaggaactgcagcaactggatcagcgcttacctcaactggaacagcacagagccgctctggaggagaagatggcttccaatggaacggatctctctgagctcagtgtggaactggcggagctgattgccaccattcaggccgctgaagagcgatggctggaactcagcgagcttcaagactgat

SEQ ID NO: 269740 - DNA, 386 bp, Unknown
  Bacterial polypeptide expressing nucleotide sequence isolated from the Sargasso Sea
aattgattatttagttaataaattaagattagaaaaccttctaaatagaataactggtgaattatcttctggacagaaaaatagaataagtttggcaaaagcaataatcaatgatccaactgtactactcttagacgaacctacggcatccttagatcctgaaataggagattttgttagaacttttttagaaaactacaagaaagaaaataaagtatctattttattagcttctcacaacatggatgaagtgacaaggctatgctcctcaattatgatgatgaaaaatggttcaattattgatgagggtaaaccaaaagatttaatcaaaaaacatggaagacaaaacttagaggaagtttttttaaaacttgtaaggaattaaa

SEQ ID NO: 269741 - DNA, 811 bp, Unknown
  Bacterial polypeptide expressing nucleotide sequence isolated from the Sargasso Sea
aatgaccccatcaaacggccttgattccattcacgcgagtaataaaaatattctttgtgttgaggacataagtctctcctttggcggaatcacagcgctaagcgacgtaagtttcgacgtccttaatggggaaattagggccattatcggtccaaatggagcaggaaaatcctccatgctaaattgcataaatgggttttatcacccacaaaaaggtcaaattacatttaaaggcaaaactagaaaacaaatgcaaacccatgaagcggctgaacaaggaatagcaaggacgtttcaaaacatagccctatttaaaggcatgagcacccttgataacattatgacaggccgcaacctgaaaatgaaaaaaaatttcctatggcaagcgctttacattggccccgcagtaacagaagaactcgagcatagggcagtggcagaaagagttatagattttctggagattgagtctatccgaaagacgcccgtcgggcggctcccttatgggctgcaaaaaagagtagaattggggcgagcattggcggcagaaccagatcttttattgctggacgaaccgatggctggaatgaactacgaagaaaaggaagacatgtgcagattcattcttgacgttaatcagcagtttgataccacaatagttctcattgaacatgatatgagtgttgttatggatatttccgatcgagtggttgtcctagactatggaaagaagattgccgatgacacccccaataacgtgcgaactaatcaaaatgtaatcgatgcatacttaggaatttcgcatgaatag

SEQ ID NO: 269742 - DNA, 655 bp, Unknown
  Bacterial polypeptide expressing nucleotide sequence isolated from the Sargasso Sea
atggaaacagccattcaaattcagaacgtctggaaagtatttggaaacaattcaaaagaagctttggatgcaattcaaaataaaaatatttcaaaacaagaagcattagaaaaatacaattctgtaataggagtttcgaatgtctcatttaatgtcaataaaggagaaatattctgtgttatggggctttcgggtagtggaaaatctacattagtaaggcatatcaatagacttcttgaaccaacttctggaaaaatattaattaacgatcaagacgtaatgcaatttgataaaaatagcttgcaagatttaagaaataaaaaaataggaatggtatttcagaattttgctttgatgccacatagatcagtcctagataatatcgcaatgcctctagaaatacgaggtgtaagtaaaaatgatagattagatgcagcaaacaaaattttaaatattgttgaacttcaaggatggggaaataaatatgctcatgaactatctggaggtatgcagcaaagagtaggtttagcaagagcgttagcagccgatccagagtttttattaatggatgaaccttttagcgcattagatccattgattagaagacaacttcaatcagaatttataaagctttcaaaacaaagaaaaaaacaac

SEQ ID NO: 269743 - DNA, 1066 bp, Unknown
  Bacterial polypeptide expressing nucleotide sequence isolated from the Sargasso Sea
catgtctaaaataactttagaaggtttaagtcatagttatcttgacaaacaaagctctgacacagattgggcacttagaaatatagatcttgattggaaagatggaggtgcttacgcattacttggtccctctggttgtggaaaaaccaccttattaaatattatatcaggtctcttaaaacctactaaaggtagaattttatttgatggaaaagatataactacattatcacccgttgaaagaaatattgctcaaatatttcaattcccagtaatttacgacacgatgagtgtttacgataatttagcttttcctttgaagaatagaggaatgtccgacggtgagattgatacaagagtaaaagaaatagctgaaatgttggagctaacgagcactcttaacaatagggctgcagggctaacagcagatggaaaacagaaaatctcattaggaagaggtttagtaagagccaatgtaaatgtaattatgtttgatgagcctctaacagttatagacccacacttaaaatgggtacttcgttcaaaacttaaggaactacatcaaaaaattaatagaacaatgatttatgtaacgcatgatcaaaccgaagctctaacatttgctgatcaagttgttgtaatgcacgaaggacagattgttcaaactggtacaccggtcgagttatttgaaaaaccaaaacatacctttgtcggacattttattgggtctccaggtatgaatattcttccatgtgaattacacgatggttccgcagcaattgatggaattaaaattgaaactggatcgcaaattaaaaaaaccagtttcacaaaaacagaaattggtattaggccagaatttgtatcttttagcaaagatggaatacctgtaaaaattttaaaagtaagtaacactggaaggcataaaattattgataccgaatgcaaaagtggaaaaatcaaagttctttctcattcatcacaggatattccaagtggcacagcacatctaacttttgataaaaaatttacttacacttatggagatagttggataatagaatga

SEQ ID NO: 269744 - DNA, 520 bp, Unknown
  Bacterial polypeptide expressing nucleotide sequence isolated from the Sargasso Sea
ttgaacttattagaagcaaaaaacttatacaagtcatttggtaatattaatgctgtttcagatattagcatttcactaaatgttggagaggttatcggttttctaggaccaaacggcgccggtaaatcgacaacaatgaaaatgcttactggatttcttgaagctgattcaggatcaattgaaattaaaaaaattgatctttctaaagatccaataaatgcaaaatctattatcggctatctaccagaaggtgctccatcctattcagatatgactgttaaatcatttttatattttgttggtaaaatgagaggtttaaaagatgaacttcttgaaaaacgattagaaataatgcttaaagatataaacctttcagatgttcaaaatcaaataattgaaacattatctaaagggtacaaaagaagagttggaattgcacaagccttaattcatgatcccgatatcttgatattagatgagccaacggatggattagatccaaatcaaaaattgaaataga

SEQ ID NO: 269745 - DNA, 1024 bp, Unknown
  Bacterial polypeptide expressing nucleotide sequence isolated from the Sargasso Sea
aatggattcatcgagttcagcaatacaaattcaaaatgtttggaaagtatttggaaatacttctaaagaagcattagatgcaatccaaaataaaaaaatttcaaaaacagaagctttagaaaattacaactcagttattggagtttctgatgtttcttttgacgttaaacaaggagaaatattttgtgttatggggctttctggaagtggaaaatccacattagtaagacatatcaatagacttttggagccaacatcaggaaaaattttaattaatggtcaggacgtaatggccttagatagagaaaatcttcaagaattaagaaataaaaaaataggaatggtttttcaaaattttgcgcttatgcctcacagatcagttgttgacaatattgcaatgccgcttgagataagaggtgtaagtaaaaatgatagattggatgctgcaaataaaattttagaaattgtagaattacaaggttggggcaataagtttgcccacgaattatctggaggaatgcaacaaagggtaggacttgcaagagcgctggcagcagatcctgaatttcttttaatggacgaaccttttagtgcattagatccattgattagaagacagcttcaggctgagttcattaaactttcaaaacaaatgaaaaaaactacagtatttatcactcatgatttagatgaagcagtaagagtaggtcacagaattgcaattatgagggatggaaaagtaattcaaataggtacaccagaagaaatagttgtaagtcctgcagatgaatatgttgctgactttgtaaaaggaatttcaagacttaaagttgttcaagccaaaacaatcatgcaacccatagaaaattacaaaagtgctaacggaaaactagatgaaaacaatctaagtgttggtgaaaatgaattattaagtaagctcattgaattatcaaaatctagcgaaggaccactggttgttaaagataacaatcaaaataatgtgggtgtgttaacacaatcagat

SEQ ID NO: 269746 - DNA, 1075 bp, Unknown
  Bacterial polypeptide expressing nucleotide sequence isolated from the Sargasso Sea
aatggctaaaattgatttatctaatatttctcatacttataatcctctagatccaaaaccaacatatgcccttaatccgttttcaatgacatgggaaaatggcaagcggtatgcaattttgggaccttctgggtgtggaaaaaccacaatgttaaacattgtttctggactagtgaggccatccaaaggtgaaatattattcgatgaaacacctgtaaccgatttaaaaacagaagatagaaatattgcacaggttttccaattcccagtaatttacaatacaatgactgtttatgataatttagcgtttccactaagatgcagggaatttacaaaagaaaaaattgaagaaagagtaaaagcagtttcagatactttaaatttatcttcatttttaaactcaccagcaagaaaattaacggctgatcaaaaacaacttatctctttaggcagaggtttagttcgagaagacgttgctgctgttttaatggacgaacctcttacagttatagacccagatttaaaatttagacttcgaagaaacttaaaagaaatcaatgaacaatataaaacaacattggtttatgtaactcatgatcaaaacgaagctatgacttttgccgaaaatataattgttatggatcaaggtgaaatcgtgcaagttggattgccaaaagatttatttgaaaaacctaaaacaacttttgtcggttattttattggctctcctgcgatgaatatttttcattcaactgtatcctctgatcatgaagtaaaaattaatgataccactattaagacaaattcaaatttaggaaatttaaaagataaaaatgttaaactgggaattagatctgagttcatagaattggctgaaaaagaaaaaagtaatacagttaaaattaaactcacaagagttgaggactttggtaattttaagctccttacaggaaaaatgggtgatttagtgattaagtcaaaagtagaaagagaaaaacccattccagacggagaattaaatttatattttccaccagagaaatgttgcgtttattctgatgaaaaattagtttaa

SEQ ID NO: 269747 - DNA, 1081 bp, Unknown
  Bacterial polypeptide expressing nucleotide sequence isolated from the Sargasso Sea
aatgaatttaattggagagaaaatttcttataaacctgatgagcaatttcatttaaacgatgtctcgtttaattttaaaaaaggtaatttgtataccattttaggcagaactttatctggcaaaacgactcttttaaaaacaattgcaggattattaaatccagatcaaggctcaatttcttttgaggaaaaagactttattaaaataccagtttgggaaagaaatgttgctatggtctatcaacaatttattaattaccctcatttaaatgtctatgaaaacataacttttccattagaacaaagaaaattaagtccagagcaaataaaaaaagatgtagatgaagctctaaaaactgttggattagttggatttgaaaatagaaaaattcaggaattatctggcggacagcaacaaagagttgcgcttgcaagatcacttgcaaaaaaagcaaaaattttattgctagacgaaccgttagttaatttagattataaacttagagagcaattaagagaagaatttaaaagaattttctcagaaggactgtcccaagatacaattttaatttattcaacaacagatccccaagaagtaatggaactaaatggagaagtaattgttttagatgaagggaaggtattacaaaaagggcctgccaaagagatttttgaaaatccatctaatttaaaagttgcagaaatatcaaatgatccaccaatgaatgttctgaagggttcaaaaaattcaaaaaatctgaattttgagaatatttctttagaaattccaaatcattttaagaatttagaagataaagattataattttggaattagagcttcagaaattaaacttgatgaaaatggtgaagaatttgaaatagaattagcagaaattagtgggtcagaaacattgctccacctaaaaagaggaaactcaaaaataattgctttaatcgaggaagtaatgaattttaaaatacatgagaaagtaaaaataaattttaatgcaaataagttttatgcttttggagaagatgaaaaattagtttcatcgccatatggaggaacaaatggctaa

SEQ ID NO: 269748 - DNA, 1078 bp, Unknown
  Bacterial polypeptide expressing nucleotide sequence isolated from the Sargasso Sea
atggctaaaattgagttgtcaaatatttctcatacttacaatccaaacgacactaatccaacttatgcacttaatccgttttctatgacttgggaaaacggaaagaggtatgcaattttagggccatctggttgtggaaaaaccacaatgttaaatatcgtttcaggattagttagaccatcaaaaggaaaaattttatttgatgaaaatgatgttacagaccttataacggaagagagaaatatagctcaagtctttcaatttccagtcatttataacaccatgacagtttatgataatttagctttcccattaagatgtagaaattttacagatcaaaaaattgaagaaagggtaaaatcagtttcagacactcttagattgtcgccttttttaaattcaccagcaagaaaactaactgccgaccaaaagcaactcatatctcttggaagaggattagtaagagaggatgttgcgggtgtcttaatggatgaaccactaactgtaattgatccagatttaaaatttagattaagaagaaatttaaaagaaataaacgaacaatacaaaactacattagtttatgtaacccacgatcaaaatgaggcaatgacatttgctgacaatatcattgtgatggatcaaggtgaaatcgttcaagtaggacttccaaaagacttatttgaaaaaccaagaaccacgtttgttggatattttataggttcccctgctatgaatttatttaattctgaaattctttctgataattcaataatgtttaataatgataccattaaaacaaaaactgacttgtcaaaaattaaagacaagaatgtaaaattgggaatacgatcagaattcattaaaattgcaacagatcaaaaagaaaatattgttagtgttaaagtaaccagagttgaggattttggaaattttaaactcataactggtaaagctggcgatttagagattaagtctaaagttgagagagaaattccaatatcaaccgaggaactaaaacttcatttacctgcagaaaaatgttgtatttactctaacgaaatgcttgttaattaaa

SEQ ID NO: 269749 - DNA, 1081 bp, Unknown
  Bacterial polypeptide expressing nucleotide sequence isolated from the Sargasso Sea
atgaatttaatcggagaaaatataacttacaaaccagacgatcagtttcatttaaacgatgtttcatttaattttaaaaaaggaaatttgtatacgatcttaggaagaactttatctggaaaaactacatttttaaaaacaatcgctggtctattaaaccccgacagtggaaatttatcatttgaagataatgattttattaaaatacctgtgtgggaaagaaatgtagctatggtttatcaacaatttatcaattatcctcatttaaatgtttatgagaatataatttttccgcttaaacaaaggaaaataagcgaagatcaaataaagaaggatgtagaagaagcgcttaaaactgtaggactagttggtttcgaaaataggaagatacaagaattatctggaggacagcaacaaagagttgctttagcaagatcattagcaaaaaaagcaaaaatattattactggatgaacctttggtgaatttagattacaaattaagagaacaattaagagaagaatttaaaagaatattcacacaaggtctatctgaagatactattttaatctactctactactgacccacaggaagttatggaattaaatggtgaggtgatagttttagatgagggtaaagttttacaaaaaggacctgcaaaagaaatttttgaaaatcctagaactttaagggtggctgaaatttcaaatgatccaccaatgaatattttaaagggaacaaaaagttctgaaaaattaagttttgaaaatattttaattaattctccttcccattttaaaaatttaagtgatcaaggttataattttgggattagggcctcagaaataaagttagatgatcaaggtgaagagtttgaaattgaacttgctgaaataagtgggtcggaaactttattacatttaaaaaagggagagtccaaggtgatagcccttatcgaagaagttatgaattttaaaattcacgaaaaagtaaaaattaaatttaatgaaaataaattatatgcctttgatcaaaatgaagaattagtctcttcaccttatggagtatcccatggctaaa

SEQ ID NO: 269750 - DNA, 730 bp, Unknown
  Bacterial polypeptide expressing nucleotide sequence isolated from the Sargasso Sea
atgagcctctcgctggacacggtgtccatcagcctcggcggccggcagttggtcaaccgggtgagccttgatctgtcggccggtgaggtggtcggtctgctggggcccaacggtgctggtaagaccaccacgttcaatctggtgaatgggttgctgcgccctgatgccggagtgatcagcctggatggtcaggtggtgtcgaccctgtcgatgccgaaacgggctcggcttggacttggttatctgccgcaggagcccagtgtcttccgtcagttgacggttcgccagaatctcgaaatcgctcttgaccagacggatctcagtccgcaacaccgtcgtgatcgccgtgaccagttgatcgaggactttcatctcgtggcgtttgctgaccgctgcggttatcagctttcaggtggcgagcgacgccgctgtgaagtggcccgggccctggctgtgggagcggaaggtccccgctacctgctcctggatgaacccttcgcaggggttgatcccctggcggtggctgatctccaggacctgatccaggcgctgcgctctcgggggatggggatcctggtgaccgatcacaacgtccgcgaaaccctggcgatcacggatcgcgcgtacatcctcaacgacggcgcgattctggccagcggtcaatcccagaccgtggccgatgaccctctggtgcgccgctactacctcggggaggccttccagctgtgat

SEQ ID NO: 269751 - DNA, 709 bp, Unknown
  Bacterial polypeptide expressing nucleotide sequence isolated from the Sargasso Sea
atggcattttttgaaggaaataaaatgactggcggttatggagatggtcctgacataatcacctcctgtactattaatgttaataaaggtgaaattgtagcaatcttaggacctaatggagcagggaaatcaactgcgatgaaagctatgcttggattgcttaatcttaaatctggaaaagttttaatagaaggagaagatatttcaaaattgtcccctcaagaaagagtgaaaaaaggtgtttcatttgtccctcaaacaagaaatgtatttgcagaattaactgtcagagaaaacttagaagttggagcatttttaagagaagacgatgtattaaaggtgattgaagaaatatatgatttatttccaattttaagagataaaaaagatcaagtagttgggcaattatctggaggccaaagacagcaagtagcactaggaagagctttgatgataagaccatcagttttaatgctagacgagccaacagctggagtttcaccaatagtaatggatgagctttttgaacatataattaaagttaaaaaaactgatgttgcaataattatggttgaacaaaatgctaaacaagcactcagtatttctgatcgtgggtacgttttagtaacaggagaaaataaatttgaaggatcaggcaaagaattattaaatgatcctgaagtaagaaggtcatttttaggagcctaaa

SEQ ID NO: 269752 - DNA, 526 bp, Unknown
  Bacterial polypeptide expressing nucleotide sequence isolated from the Sargasso Sea
gatgaataaatcacctaaacttgtatgtaaaaatgtttggaaattatatggagataagccaaaagaatttttacaaattcataataataaccctgataaaaaaacaatagaagcaggtggctatatacaggcaattagaaatgcttctttggaagtttatgaaaatgagattcttgtaataatgggtctaagtggttcaggaaaatcaactttagtaagatgtatgtctagattagttgatccaacaattggagaaattttttttgaaaatattgacatgggaaaattaacagaaaatgaattaattgaaattagaagacataaaatgggcatggtgtttcaacattttgctctttttcctcatagaacagtaatagaaaatatagcgtttcctcttgaagtacagggcatcaacaggaaagaaagagaaaagtctgcttttgaaattattgatctagtaggacttcaaggaagagaaaactattttcctaaagagctttcaggaggtcaacaacaaagagttggg

SEQ ID NO: 269753 - DNA, 316 bp, Unknown
  Bacterial polypeptide expressing nucleotide sequence isolated from the Sargasso Sea
caacaacaaagagttgctatagcaagagctcttgccatgagacctaaagttatgcttttagatgaaataacttctgcgctcgatcctgaggtagtaggggaagttttaaatgttatacgttcattaaataaagagcataatttgactatgataatggtcactcaccaaatgggttttgctcgtgagatttcagatagagtttgtttttttaacgaaggtaaaatatttgaggaaggacccccagaaaaattatttggagatcctcaaaatgagagaactaaacaatttcttcatgcagtactagactcgcattaat

SEQ ID NO: 269754 - DNA, 742 bp, Unknown
  Bacterial polypeptide expressing nucleotide sequence isolated from the Sargasso Sea
tatgagccaactcaattattatgaatgtaaaaatgtttcaaaaagatacggtaatttgacagctttagataatgtggatttccacattggaaaaaatgaagttgttggattattgggagataatggtgcaggaaaatccacattaattaaaatgatgtctggtgttgttgctccagataccggaaatgtgtttgttgatggtaaagaaacaaaaatttctacaagaaaacaatctgaagaagttgcaggaattgaaacaatttatcaaaattctgctttatgtgatgatatgacaattattcgaaacatttttatgggtagagaaatcactaatttatttggttttatggatcataaaaaaatggaagatttgtctttagaagttttggaatctggtgtccatatttcaggtattgattcacctcttaaagaaattggagccttatctggtggtcaaaaacaggcagtggctattgcaagggcagtttattttaagagaaaaatattgttacttgatgagccaacttcagcattatctgttcgtgaaacagaaagagtgttgaagtatgtaactgaattaaaaagtgaaaatgtttccagcgtaattgtaacacataatttataccatgcttttcaggtatgtgaccgttttgttgtaatgagtcacggcaaagtaatatttgaaaaaaataaatctgatacaaatcttgatgaagtaacggagcaagttattaaagtttaa

SEQ ID NO: 269755 - DNA, 936 bp, Unknown
  Bacterial polypeptide expressing nucleotide sequence isolated from the Sargasso Sea
gtcacaataataatcctgataaagaaataataaaaaaaagtggttacattcaagcaattcgaaatgcctcattagaagtttatgaaaatgaaattctagtaataatgggtctaagtggttcaggaaaatctactttggttagatgtatgtcaagattagttgatcctacaataggagaaattttttttgaaaatattgatatgggaaagttatcaaaaaatgaattaatagaaattagaagacataaaatgggtatggtgttccaacactttgcactttttcctcaccgaactgttatagaaaatattgcttttcctttagaagttcaagggatcaaaagaaaagaaagagaaaagtctgctttagaaataattgatctagtaggattacaaggaagagagaattattttccaaaagaactttcgggaggtcaacaacaaagagttggtataggtcgttcattagctgttaaaccagagttatggtttttagatgaaccattttctgccttagacccactaataaggaaagagatgcaaaatgagtttttaaaaattcaaaactcacttaaaaaaactattatttttataactcatgattttgatgaagcgattaaattagcagatagaatcattattatgaatgaaggaagaatagtgcaaattggaagccctgaagatttaattatgaagcctgcagatgattatgtaaaagaatttactgaagatcttccaagagagaggttgttatctgtaaaaagtataatggacactaaaaaagagccgaataattcttcaacagtttatgaggatgaaaaaatattttcaattcttgaaaaagttctctctgagggttctgtttcagttcttgataaatcaaataatattattggctcacttaataaagaaacagtctcaaaatttattaataattaaa

SEQ ID NO: 269756 - DNA, 3625 bp, Unknown
  Bacterial polypeptide expressing nucleotide sequence isolated from the Sargasso Sea
tcgttttctatcgcttctactgattctaccgatctaaatggtattataagtaatcagtatgttacgagctcggtctctggtagttataattcatttactgcatctgctgatgatgcatcctctacctctggattttatttggtagagccaggagcgccagattctgtagaagttgcttctcttacaaacacaaccatgacgcaattggacagccttacctttgctgcaaatgtatatgatcaattctcaaacctagttcgattaggagaaaatgtggtatggagtattaactctgtaacaggatcaggagatgggtatcgtttaagttctgatactactgcaacagatgcgtctgggaatacaaccgttatgttatatacagaccctacagataattcactaagcgttggagatcaagtgacgcttactgctacatcgggctctggttcccatgtgagttctgtggtaacaattattccatccgatatatataacttaactcttgatgacggcttaacaactgaagagctgggcgtttctgcagatacagcatacatagatttttatacagcactcatagacacctttgataatccattacaaaatgtggaagtatcctgggaagtagttacgggttctggaagtggtgaaagcttaagcgctggaaccagtaatactaatgcgcaaggtattgcaagtacacgattaaatacaaatacagtagcagatacagaatatcaggttcgttgctgggtgacagaaagctctttattgaatgctttcggtagctttgaagcgttatcaaataattcgtctaataattcatcaactgcatcagtaacaagtagtataataagctcatcttccattcgttctttttctaaagcagggaagaaaggtgcttcggacagattaacactcattgctagagatgaagaaagcagtctaaggccaagtcaatttgttccggttcaaattagtgggtcatcgagtttagatcgaagcattaaccgtgttgaagcctatgatttagatgatacctcagcagtggttattgtgtggcctggtgtaacggcatctctaagcggcgttccgcaagaagatgaagacttagagttagatcagcagtttggatttactctggacgcccatgatcaatttggaaatcttgtacgtgataatactgcagttgcgtgggaaataattccatcttctgcaaatatttctattaacagccaagatgatgtaacctcaagcggtcaagcagcaattagtctacaggtggcaagtagcgcagcatgggatttttcatttaaaattattgctacggtagaaggaataagtgattccactggatcgtaccgaattgatgatgtaacggccccggcttcggtttctgcgctgagcatcagtccttctgtttggacatccactaatgattttacattgtcatggacaaatccatcggaacattctggtgtagctggcgcctattataaaattgatgcaggatcttcacaatatgttgctggttcaaatattcaaacattgagttttactatgactgctaataattccagtagcgtaaaattatggttacaggataatgcagaaaatcaagatgagtctaccgcaatgacggttactgcaaaatgggatgatactgctccttctacgtttagcgtaacgcagcctttagcaggttggtacaatcaaacagaatatcgttttgaatgggaagcttccagcgatggtacttctggtctcagtcactatattttctcattaaacgatggaagtgaaacagctgaaatttcacctgactcaacagggttttcaccagcatttggtcttgcgcaaggatcacatagttggaccgtaactgcatatgatagtgcagggaatgccatggagacatcgaatccacaaacaattagcgtagatcatactcctcctggaattacacataatcctgttcaagaagctacagaaaatacggctgttgtaattaatgcagtatttacggaagatggatctggtcagtcaggtattgataaagcagaattatattatcgtcgtggaggagaatcaaactggcagccacctgtagatatgtcaacattaagctcgtatcaaattgcaagtgcatattctacatcatctggaattgagtattacttatatgcggaagatgttgccgggaatataaccaaaaaacctgtggatggttttacatcagtctctgttacaataccaaatggtcttgcaagcacagatcgttggccaactggagttcctaatggttcagatgcaagcagttatcaattgtggtctttccctggaaacccaacaagttcttctcctgtgaatcttatcgtagatgatatgcctgatgctgcatttgataatacaaaatggagagcctttgcatacgcaggttctggagcatggacagagtttgagcagttatcttcattaaatagcggagaaagctattttattttgataaaagatcctgggtttagtattaacacaggtcaaacatatacgattgaaaccaatcaaccgtatcaaattaacttaaccagtggagattggacatttattggaaacccatttgatttttctgtaccattaagtagtgtgctaacacaagattcaacatcgttatctggcgatccaaatttttacacctatgatggtggtagctggacaaatgcttcctcacttgaaccatgggggggatatatctacaaatcttccagcgcatctagtatctttattaatccaggtaatggaggaggattattaggaagaagcgtggctgattcagaaattattttggaagataatgaatggttaataaatatatctgctcgaaatggattaggtagagatccgtttaatgaagttggtttactacaaggggcaatggacacatatgacaatcatgatgcgtttgaaccgccattagtcccaggtggaatatctgttcgaataaataatagagactggccagaacatggtgatacctatacacgtgacattcggatgccgaaagaagaaggagaatactgggacttagaagttatagcgcaagatgatgaacataatgtatatcttacatttgaggatttagacttgataccagaaaacctagatgtgtttgcgattgatattacgcttggaacagctcaagacttgcgttggagacatgtgtataagtatgcagtaacaaatccatcgcaaaagcatgaagtccgttttattgcaggtacgagagattttttacagaagaataatgctggtgttgaactattcccagaccgttatgctttaagtcagaattatccaaatccgtttaatcctcagacatctatattacttacaatgcaagatgaagcgactataagcctagtagtatataacctattaggagaagaggttgcggtgttggcaaacaatgagtatcgacctgcaggctatcataattttatctggaaaggtttaaacaaggataatgagagggtagccagtggtgtatacttctacatggcaagagtgatttcaccgaaaggggagttactcatcagtgatacccataagatgattcttgtaaaataag

SEQ ID NO: 269757 - DNA, 1342 bp, Unknown
  Bacterial polypeptide expressing nucleotide sequence isolated from the Sargasso Sea
tatgagtaatttattagaagtaaaaaatcttaccgttggttttaaagtaagagattctattttcacagctgtagaagatgcttcttttgaaataaataaaaatgagactatggcactggttggagaatcaggatctggaaagtcagtctcagcgatgtcaatattgcaacttttgccagagggtaaaacaatctttagtgaggattcatctattaaatttcatcattctgaaatattggaaatgtctaataaacaacttcaatcaatccgcggaaagaaaatatctatgattttccaagagccaatgacatcccttaacccttatcacagagtaggcaatcaaattactgaatccattttaagccatgaagatatttcaagaaaagatgcagaaaaaaaagcaaaagagttaatggagcttgttgagattcctgatctagaaagaagatataaatcctatcctcatgagctctctggaggacagcgccaaagaataatgatcgcaatgtcattaattaatgagcctgagcttctaattgctgatgaaccaacaacagccttagatgtaactattcaagcccaaattcttgatttaatgaataggcttaaagagaagctaggaatgtcaatcctattcataacacatgatttaggactagttgagaagtttagtgacagagtttgtgttatgaaagagggtaaaattgttgaacaaggtgttacaacggaaattttctctaatccaaaacatgaatacacgatcaagcttttaaaatcagagcctaaagaaaaggataatttgcatgtttcagaggataatattttagatatttcaaacctcagtgttttttacaaaataccatcaaaacagctatttaaaactgatagattctgtgcggtttctgacatttctttaaaaattccaagaaattcaacagttggcgtggtaggagagtcaggatctggtaaatcaacactaggaaaagcgattataaatcttcttgattttgaaggatcaattaaatttaatgataaatcaattaaagatctcagttcagctgaaaagaaattattaaaaaaagatattcaaatagtttttcaagatccttatgggtctctttcgccgagaatgacagttggtgaaatcattggagagggattagatatacattttgacttttccaatgaagaaaagatagaaaaaatatcaaatgtaatgaaagatgttggattagacgatagcctcatttttaaatatccacatgaattttctggtggtcaaagacaaagaatcgcaattgctagatcaataattcttaaacccgaaatttatgatccttga

SEQ ID NO: 269758 - DNA, 523 bp, Unknown
  Bacterial polypeptide expressing nucleotide sequence isolated from the Sargasso Sea
aatgaatttaattattaaatcactaaatttttcttatcagagtgaagaagtttttaaagatttaaatctcaattttaattctgggattttaaatcttgtctcaggtccaagcggttctggaaaaactacattgctaaatttgattgctggattagaaaagccctcctctggcttgattatgcttgatgatgatgttcaatctagtaatgataaatttatcgagcctgaaaataggaatatcggcttcatttttcaggattttgctttatttcctcacttaaatattaagcaaaatattgaattttcaggtaatcggaatgaagaattattaaataaattaattaataagctttctattgcaaaccatctttctaaatacccgcacgaactctcaggaggacagcagcaaagggtttcaatagcaagagccttattctcagaaccaaaaattcttttaattgatgagcctatttcaaatcaagataaaaacaataaaactgaaataataagaattattttctga

SEQ ID NO: 269759 - DNA, 558 bp, Unknown
  Bacterial polypeptide expressing nucleotide sequence isolated from the Sargasso Sea
aatgacaaactctatcgaagtaataaacctctctaaaaaatataaatcaaagaatgctgtcagtaatataaattttaaaattggtgaaaatgaaattgtaggcttattaggtcctaatggatgtggaaagacaaccaccataggaatgatattaggattattaaaaccttctcacggccaggttttaattaatggagaaaatatagagacaaacaaaatatctctactacataaaatgaattttatatctccttacattgaacttcctaaaaaattaacagttaaacaaaatttaattgtttatggcaaattatataatattcacgatttagaaaatcgaattaattatctttcagataaacttagactgtctgatcttttagataaaataacaggtgagctttcatcaggacaaaaaaatagagtcagtttagcaaaagctttaataaatgatccgactgtgctgctactagatgagccaacagcttcattggatcctgaaacaggagattatgtgagaacatttttagaaaattataaaaaagaaaaaaaaatttc

SEQ ID NO: 269760 - DNA, 517 bp, Unknown
  Bacterial polypeptide expressing nucleotide sequence isolated from the Sargasso Sea
attgaacggcccagcgccgggaaaatctactttagcgggcatgacatcagccgttgaaaaaccgcgaagtgccgtttctgcgtcgtcagattggcatgattttcaggatcaccacctgctaatggatagaaccgtgtttgacaacgtggcaatcccactgatcatcgcgggcgccagcggggacgatattcgtcgtcgcgtgtcagcggcgctggataaggtcgggctgttggacaaagcgaaaaacttcccgattcagctctctggcggtgaacaacagcgcgtcggcattgcccgtgcggtggtgaataaaccagcggtgctgctggcggatgaaccaacggggaacctggatgacgcgctgtcggaagggatcctgcgcctgttcgaagagtttaaccgcgtcggggtcacggtattaatggccacgcacgatattggcctgatctcccgtcgctcctatcgccaaatggttctgagcgatggacatctgcatggaggcctggcgcatgaatag

SEQ ID NO: 269761 - DNA, 1789 bp, Unknown
  Bacterial polypeptide expressing nucleotide sequence isolated from the Sargasso Sea
aattataaaagaacttttaatcttcttaccccaagtcagcgtaaacggttttatgtgctcaaaattctggtagcaattatggctgttttagaaatttttggtgttgcttccatgattccatttatggctgttgttggtgacatgagccaactacaagaagataccccaatcgctcaaatttacaaatcaagtggcataacttcggaatcacaatttgtatttatacttggcgtatttgttttattagcattatcaatttcaacaataatttcaatgtttactgtttggaaattatcaatatttgcacatcaaattggtacagagctagctgatagactctatactcattacctaaaacagggttggttatttcatgcatctggaagtagcgcgcaattaacaaaaaaaattgcaactgagacgaccagagtaacagcaaatattttagtgccactgatgcatatgaattcaaagattttacttgtttttctattgagcttaagcattattatctataacccaaaagttgcaataattggaattagtatttttgtagctacttatcttattctttttagaattgtgagaacgcgtttggctagttttggaaaagctacatcagatgtaactgaacagcgcttccgtctaatgaatgaaggttttggaggcattaaagatgtattgttattaggtagagatgctgattttattggacgctttaataaaacaggaaatattctagcttatagtctaggaacaaccaatgcaataattcaaatacctcgctatcttgtagaattaattgcttttggttctattatattgctcatcctatacttaatggtcagttatgaagcaaaccttgggattatattaccaatactctctatttatgcggtcggagctataaagcttttaccagcttttcaacaaatttacggcagtattggagtgattaaagcaaatttagctgcttttgattctatacgagatgacttaaataactcatttcgagtggagccgaaaaagcaaataattgaaaaaaaatatctcaatcccaaacaacagatatcccttgaaaacattgcctttacatatcccaacaaagaagaaccaaccctaaatcaattaagcatgacaatacctgcaaatagtgtgattggtgtagtcggtccctctggagcaggaaaatccacactaatagatatttttcttggccttattgaacctcaagaaggacagctaattgttgatcatacaattatcaatggtcaaaatctaagatcatggcaaaactctattggttttgtagctcaaagtatttttttatcagagggaaccattgctgaaaatattgcatttggtatttctcatgatcaaatagatctagagcaagttcaaaaagtcattaaacttgcttatctcgatgaatttatccagactcttaatgatggcgtcgatacaagggttggggaacgaggagtgcaactttccggtggccaacgtcagcgtataggaattgctagagctttatatcataaagcagaagtaatagtatttgatgaagcaacaagctctcttgatggcgttgctgaaaaaatgattatggatgccattcatgattttagtgggcaaaaaactataatcttgattgctcaccgtctaaaaactgtacaaaaatgcgacaagatattttttgttaataatggaaaagttgatgatcaaggcacttatcaagaactcttagaaaataatgagcactttaaaaatatggcaatgcatgcatgag

SEQ ID NO: 269762 - DNA, 1033 bp, Unknown
  Bacterial polypeptide expressing nucleotide sequence isolated from the Sargasso Sea
atgtctgagaccgttattaagtgtgagtcagtttataaaatttttggtgagagtgccaaaaaaatgcttgaagagtcgaacggcaatgtggatgcaaaaacatttcaagaaaatggttgcatagttggagttaacaacgcttcgtttgaagttgcaaaaggagaaatgcttgtggtgatgggtttatctggttcaggcaaatcaacattactaagatgtatttcaagattaacagatgcaactggaggaaaaatttttatagaaggccaagacctgcttcaattaaacaataaggaattaattgagcttagaagaaataaaatgggtatggttttccaaagctttgccttgttacctcataaaacagttgtagaaaatattgcttttccacttcagataaaaggtactaagaccgaagatagtattagtagagcaatggaaatggttaaactagtcggacttgatggaagagaaaattattttccaagagaactttcaggaggtcagcaacaaagagtggggattgcacgatctttagcagtggaacctgatatttggtttttagatgaaccattttcagcattagacccattaataagaaaagaaatgcaagatgagtttttaagactgcaagaaaaattacaaaaaactattatgtttattacccatgattttgatgaagctttaaaattagcagatcgaattgctattatgaaagatggaataatagagcagttagatacacctgctaatatagttttaaatcctgcaaccgaatatgtacgaaaatttactgaggaagttccaagagagaaagttttagtcattgaagatgtaatggatagttccaataaagacaatttaggagatattaaagtttcaaaagacgacattatagaaaacgttgcagaaaaaattctcactcaagaaaaaattgtaggagtggttgactcaaataacaatattattggctcaataaaaccttcaacaattattgatacagtttttggaggaagaaaaaatattagctaaa

SEQ ID NO: 269763 - DNA, 709 bp, Unknown
  Bacterial polypeptide expressing nucleotide sequence isolated from the Sargasso Sea
atggcattttttgaaggaaataaaatgacaggcggatacggtgatggtcctgatattatcagctcgtgcactattaatgttaataggggtgagatagttgcgatccttggaccaaatggagctggtaaatctacagcaatgaaggcaatgcttggcttgttaaatctaaaatcaggcaatatatcaattgatggagaagatatttctaaactatctcctcaagaaagagttaaaaagggaatatcatttgtaccacaaactagaaatgtttttgcagaacttactgttaaagaaaatttagaggttggtgcttttttaagaacggataatgtaaacaatgttatcgaagaaatatatgatctatttccaatcttaagagaaaaaaaagatcaagttgttggacaattatcaggagggcaaagacaacaagtagctttgggacgagctctaatgataaaaccgtctgttcttatgttagatgagcctacagcaggagtttctccaatagttatggatgaattatttgaacacattattagagttaaaaatacaaaagtagcaatcattatggtcgaacaaaatgcaaaacaggctttgagtatttccgatagaggatatgtgcttgtaactggcgagaataaatttgaggggtctggcaaggaattattaaatgatccagaagttaggagatctttcttaggagcttagt

SEQ ID NO: 269764 - DNA, 565 bp, Unknown
  Bacterial polypeptide expressing nucleotide sequence isolated from the Sargasso Sea
agcgtagctatagtgggcgcttccggttctggaaagaccacgctgttgggaatccttgccgggttagatacagcaacttcaggtttggtgaagttgatggatagtgaaattagtggcatggacgaagaggccagagcggtattaagaggacagcatgttgggtttgttttccagtcctttcagttgctgacgagtttaaccgcactagagaatgtgatgttgcctgtggaactaagaggagacgcgttagcgcaagatcaagcggtagagttgctcgaaaaggtagggttggctgaccgactggatcattatccgcgtcagctttctggaggagagcaacagcgtgtagctattgcaagagcatttgcttctcgtccgactattctgtttgctgatgagcctactggaaatcttgatactgccaatggagaaaaaattatagacctcttatttgatttgaactctgaatttggaacaaccgttgtcctggttacgcacgaaagtcggttggcggataggtgctcgcggacgatcaaattgacagcagggaaggtagaccggtgaa

SEQ ID NO: 269765 - DNA, 577 bp, Unknown
  Bacterial polypeptide expressing nucleotide sequence isolated from the Sargasso Sea
aatgcctgccgaaaataatagagctgacatccttttaggcgttgatcaaatcagcctttcatttggcggagttagggcacttgaagatattaatttcgatattgtaaagaaagagatcttcgccattataggcccaaacggtgccggtaagacttcgatgttgaatgttataaatggtttctaccatcctcaacagggaaaaatccaatttaagggactccaccgcacacaaatgcgcccgcatgaagctgctttgcaggggattgcacgtacctttcagaatgtcgcacttttcaaaggaatgtcgactctaaataatataatgtcgggcaggaacttgaagatgaagtccaaccttttctggcaggcattatattatggtcctgcaagaaaagaggagatggaaaatcgggaagttgtggaggacattattgatttcctagaaatacagtcaattcgtcgaacacctgttggtaaactaccatatggacttcaaaagagagttgaactaggacgtgcacttgctatggagcctgatctacttttgcttgacgaaccaatggccgggatgaatatt

SEQ ID NO: 269766 - DNA, 730 bp, Unknown
  Bacterial polypeptide expressing nucleotide sequence isolated from the Sargasso Sea
aatgaacctaaatattcataatgtatccctttcaattaaaggaagattaattgtagatgatgtttccataactgttaatccaggggaagttgtaggtttgatgggacctaatggtgctgggaaaactacaacttttaatcttgcagttgggaatataaaaccagaaaaaggtgaaatcttaatgaatggaaaaaatataaccaatcttcctctacctattagatcaagacttgggttaggttacttaactcaggaagcgagtatatttagagacctcactgttaaggacaatatagatttggctttacaaaattcatcttatagtagagcagctataagaaatagaagagaacaattaattaatgaatttaatttgaataattttgtagataattatggttatcaactttcaggaggagagaggaggaggtgtgaaatagctagggctctcactgtaggcagaaaaggacctaaatatttgttattagacgaaccttttgctgggatcgatcctctagctgttaatgatctaaagaaactaattcttaaattaagtagtgatggggtggggattctcattacagaccataatgtgagggaaacccttttaattactaacaaatcatatgtattaagtgaaggaaaaattttagctaacggttcatcaagagaattggctgataatccaatagtcaagaagtattatctaggagataatttcaaactttga

SEQ ID NO: 269767 - DNA, 682 bp, Unknown
  Bacterial polypeptide expressing nucleotide sequence isolated from the Sargasso Sea
aatgactggaggttatggaggagcagatattattacttcttgctcaataaatgttaaccaaggtgagattgttgcaattttaggaccaaatggcgctggaaaatccacagccatgaaagcaatgcttgggttacttaaattaaaatctggtaccgtaactattgatggaaaggatatatcaaatttatctccccaagatagagttaaacaaggaatttcttttgttccacaaacaagaaatgtatttacaggattaactgtaagagaaaatttggagatgggagcattcttaagaagtgaagatctagacaaaataataaaagaaatttatgagctatttccaatcttaaacgaaaaaaaatctcaaactgtaggtgagctctcaggagggcaaagacaacaagttgcgctaggcagagctttaatgaccaagccatctgttttgatgttagatgaacctactgctggggtttccccaatagttatggatgaattatttgatcatattctaaaagttaaagcgacaaatgttgcaattataatggtcgaacaaaatgcaaaacaagcacttagcatatctgatcgtggatatgttttggttactggagaaaataaatttgaaggctcaggcaaagaattacttaatgatcctgaagttagaaggtcgtttttaggagcttaa

SEQ ID NO: 269768 - DNA, 593 bp, Unknown
  Bacterial polypeptide expressing nucleotide sequence isolated from the Sargasso Sea
gcgcgcgacgtctggaaccgtcgttcgaccggcggagggactcgagacgacggcggacggtgaggcggccatattttacgtcccgcagaggccgtacttggtctccggtacgcttcgcgatcaggtgatgtatccgttacccggcgacgccgcgcgcgacgacgaagtcatggagtgtttgcaactcgccaatctcaccaaggtcgtcgattcgagcgccgatggattgggtcgctccgaacacgattggaccgacgttctcagtggcggcgaaaagcaacgcgtcggtttagcgagactgtactttcaccgtcccacctttgccatcttggacgaggcgacgagcgccatcaatccggacgaagagggtttactctacgcccacatagaaaccttaggaatcaccgcgttcagcatcgcccatcgcatggagctcaagcggttccacgccctccacttgcacttacaagccgacggcacgggtcggtactcggtgacgaatctccgccgcgcgagttggaacatccaatccctccccggcgcgagttcgcttcgtcgatcgttcgacaggacgacgacgacggagcgatgac

SEQ ID NO: 269769 - DNA, 709 bp, Unknown
  Bacterial polypeptide expressing nucleotide sequence isolated from the Sargasso Sea
atgcttaaacttcaaaacatatcttcttattatggtgaaagtgtagttgtaaaaggtataagcatggagattgctgaaggatcattctacggaatactcggaaaaaatggaatggggaaaacaactttattgaagactatgatgggcctaatgaacaaaacagaaggaaatatatcgttaggagaaaaagatcttactaaattatcaacaagtgatagagccaaagctggtttaggatatgtgccgcaaggaagaggaataatgccacagtttactgttgaagaaaatatggttttaggaacttttgctagaaataaaaatgaaactaatgatgtaaaaaatgattttgattttgcattagaattatttcctattttaaaagagtttctaagtagaagaggtggagacttgtcgggaggacaacaacagcagcttgctatagctagagcgttattgacaaaaccaaaagtacttcttttagatgaaccaacagaaggtattcagccaaatattgttgaagagattgaaaaggtactagtaaaattaaataaagaactaaatttaacaatcgttattgttgagcaaagtgtaggatttataaaagaagcagcaaatgattttgtgatacttgaaagaggaacaattgttgaaaagggagctgcttccacaatttctgacgaaatggttaataagtatctaactatataat

SEQ ID NO: 269770 - DNA, 241 bp, Unknown
  Bacterial polypeptide expressing nucleotide sequence isolated from the Sargasso Sea
caagcaattgcatcggaaacttggtgttaccacggtgtatgtgactcatgatcaacgtgaagcgttgactatgtcagaccgtattgcggtcataaatcatgggaaatttgaacagatagaaactccccagtccatatacaacaaacctgcaaacccctttgttgccgacttcataggtgaatcagccatgttgcctatgaaaaaaaattcatcaggggatttttttttcaggacattttga

SEQ ID NO: 269771 - DNA, 649 bp, Unknown
  Bacterial polypeptide expressing nucleotide sequence isolated from the Sargasso Sea
tatgagtaatgcagtaattaaatgtcagtctgtttacaaaatttttggtgcaaatgcgaaaaagatgctccaagaagcaaatggaaatgtagacgcaaaaaaatttcaagaaaatggatgtatagttggcgtgaacaacgcttcttttgaagtttctaaaggagagatgctggttgtaatgggtttatcaggatcgggtaaatcaacactgctaagatgtatttccagattaacagatgctacagacggaaaaatttttatagaaggtcaagatttactctcattaaacaataaagaactaattgagcttagaagaaacaaaatgggaatggtttttcagagctttgctctacttccccataaaacagttgtagaaaatattgcttttccacttcaaatcaagggaattaaaactgaagacagcattagcaaagcaatggacatggttaaactagttggacttgatggaagagaaaattattttccaagagaactttccggtggacaacaacaaagagtaggtattgctcgatcattagctgttgaaccagatatttggtttttagacgaaccattttctgcactagatccattaattagaaaagaaatgcaggacgaatttttaaggttacaagagaaatgcaaaaaa

SEQ ID NO: 269772 - DNA, 1010 bp, Unknown
  Bacterial polypeptide expressing nucleotide sequence isolated from the Sargasso Sea
tgcaaaaaataatatttatgctgatctaataagaacgcagccaaaacacattattgagttgatatttgtaattgcttttactttggcagttgtgttctttactccattacaaaacgattttcagagcttaatacccacgcttggagtatttctctttgcagcaattaggttaatgcctacccttaatcaaatgcttgcttctgtaaatgttcttagaataggctactatcccactacccttctttttgaggacatgacaacaaaacaagaccttgaagaagatgattataaagcaaatatcttaaaagatggcttcacctccatgcttttgaaaaatgtatttttctcatataaaaatgataaagagcatcaattaaatggtatttcattacaggttgataaaaataaatcgataggtctttttggtcaatctggatcaggaaaaacaactcttgtcgacgtgatgttaggtctactagagccaagtaaaggcgagattcatttaaataacaaaattgtaaaaaataataaagaatttagaaatttagtggcatatattccacaagatattttcataattaacgactcagtaaaaaacaatataactttaactgggagggatgaagttattgatgatgttttattagaagatgtagtgttgagatcaagacttaaagaggttatcaataatctccctgagggaattaatacaaatattggagaaagaggagtaaagctttctggaggtcaaaaacaaagaattgctatagctcgagcactctataacaaaagagaagttcttattatggatgaggcaactagtgctttggataataatacggaaaaagaaataattgatgaaataagaaagctaaaaggtaaagttactatggtagtaatagcccataggcttacaacactacagcactgtgatgaaatttatgaaattagtaatggaagaattagtgaaaaatataactatgaagacataagtaaaagtaaaaaataat

SEQ ID NO: 269773 - DNA, 292 bp, Unknown
  Bacterial polypeptide expressing nucleotide sequence isolated from the Sargasso Sea
ttggatagagttggattaaaggaaagagaacatcactacccaaatcaattatccggtggagagcagcaaagggttgctatcgcaagagcattcgcttgctctgcgaaaatattatttgctgatgaaccgaccggtaacctagatccaaagaatggagaaatgatttctgaccttctttttgaagttaattcagaaactgacaatgcattagttgttgtcacgcatgatcatgatctagcagataggtgcgataaaaagataaatcttaaattaggaaaaatagttgaataat

SEQ ID NO: 269774 - DNA, 628 bp, Unknown
  Bacterial polypeptide expressing nucleotide sequence isolated from the Sargasso Sea
tatgcatgctttatcgataaaaaatctctctaagaaatataaaagcggtgttgaagcactaaaatctgtaagttttgatgtgcagcaaggagatttctttgctttactaggcccgaatggggcgggtaagacaactgcaataggaatcattacatcccttgtgaataagtcatcagggtcaatcgaagtttttggccataacttagacaaagaattagcaaaagctaaatcttgcatcggcgttgtaccgcaagaggttaatctaaacctgttcgatttcaacttcaatattctagtgaatcaggctggtttctatggcatcccaagaagcgagggcatgaagagggctgagcagtatttgaaaaaaatgcaactttgggaaaaaagaaagaccgatgcaagaagtttatcaggaggaatgaaaaggagactgatggtcgctcgggcattggttaatcggccaaaacttttgttgcttgatgaaccaactgctggcgttgatattgaaaccagaaggatgatgtgggagtttctgagagaattgaatgcaagcggcactacaatcattctgacaacacactaccttgaagaggcagaacaattatgtaacaaaggttgccattattga

SEQ ID NO: 269775 - DNA, 1084 bp, Unknown
  Bacterial polypeptide expressing nucleotide sequence isolated from the Sargasso Sea
tatggcagagatagaaattaaaaatttacataaatcttttggtgactttgttgcagtaaaaaactctaatcttttaattgaaaataaagaattctttgtgcttctaggtccctcaggttgtggtaaaacgacaactttaaggatgatagcaggattagaactaccaacctcagggaacatattacttgataaagaggatgtaggttatttgagagcctctcaacgtgatatagcttttgtttttcagctttttgccttatatccacacatgaacgttagaaacaatttagcttttcctcttaaaatgcaaaagttttccaaaacagaggttgatgctaaggttatggaagccgcaaagctattaagaattgaccatttattaaaatcaaaagtatcctcattagctggaggagatcgtcaacgagttgctttaggtagagcgcttgttcgaagacctaaagcatttttaatggatgaacccttaggcacacttgatgctgaatttagagaattaatgtgtttagaactaagaaaacttcatgatgatatagatgccactacagtttacgtaacccatgaccaacaagaagcaatgtcaatggcagatcgaatagcagtaatgaatgaaggagaggttttacaagctgactccccaaaaattatttataataagccaaaaactaaatttgtagccaattttataggatcaccgggtatgaattttatcccaattaaagaaaaaattactccaaatcaatcaagtatcaaattactagactcatctttaaaaatacctgaacaaagagaaggcacaaattcaaatgagaattttttaggagtaagaccagaaaatttaaggttagtatccgaaaatggagtaaaaggaaatatctttggtgttgagtatttaggttctagaaaaatacttactgttgaaactcaactaggaaatataaagataagagtagatagtgacacgaaagttaaaattaatgagcaaattcaatttgatacattgaataataatcaaataatttttgatggttcaaatgatatggcacttcaaagtgagtttatgagttaa

SEQ ID NO: 269776 - DNA, 435 bp, Unknown
  Bacterial polypeptide expressing nucleotide sequence isolated from the Sargasso Sea
gaaacctttatagtgtaaaaaaaataaatgaacgaatagaatatttgtctcataaattaagattaaatgaatttatcaataatcaaactggagaactttcgtctggacaaaaaaatagagtaagtttagcaaaagcgttaattaatgagcctactgttttattattagatgaacctaccgcatctttagatcctgagactggagatttcgtaagaaaatttattgaaaatatttcaaaagagaaaaaaatgtcaattttattagcttctcataatatggatgaggttaaacgtttgtgtaaaaatgttttaatgatgaacaatggagtaataattgataaaggcacaccagatgatctaattgcaaaacatggtaaaaaaaatctagaagaggtatttttaaaactaaataggaaagaaaatgagttacaataga

SEQ ID NO: 269777 - DNA, 655 bp, Unknown
  Bacterial polypeptide expressing nucleotide sequence isolated from the Sargasso Sea
atgactgaaccagtaattaaatgtgaagctgtttataaaatttttggagaaaatgctaaaaaaatgctccaagaatcaaatggcaatgtagacgcaaaaacttttcaagaaaatggatgcatagtaggcgttaacaatgcttcatttgaagtttcaaagggagaaatgttagttgtaatgggtttgtctggatcaggtaaatcaactttactaagatgtatttctagattaactgatgcaacaggaggaaaaatttttatagaaggtcaagatttacttcagctgaacaataaagaactaattgagcttagaagaaataaaatgggaatggtttttcagagttttgctctacttcctcataaaacagttgtagaaaatattgctttcccgctccaaattaagggaattaaaactgaagatagtattagtaaagcaatggatatggttaaacttgttggtcttgatggaagagaaaactattttccaagagaactttctggaggtcaacaacaaagagtaggtattgcgagatcattagcagtagagccagatatttggtttttggatgaacctttttctgcattagacccgttaattagaaaagaaatgcaggatgagtgtttaagacttcaagataaattacaaaaaacaatta

SEQ ID NO: 269778 - DNA, 1000 bp, Unknown
  Bacterial polypeptide expressing nucleotide sequence isolated from the Sargasso Sea
atgaacaaagaagcaaaaatatcctgcaaaaatatctggaaattatatggtgaagctccagaaaagtttctaaagaatacaaataacaaccctacaacagaagagattaaaaaaaataattatatacctgctgtaagagatgcatcaatagatgttaatacaggtgaaatactagttattatgggactaagtggttcaggaaaatcaacattgcttagatgtatgtcaaaattaattgaaccaacccatggccaggtattttttgagggaagtgatttgttaaaagcttctgaaaaagaattaatagatataagacggcataagatgggtatggtattccaacactttgcacttttacctcaccgaacagttttgcaaaatgttgcatttccacttgaggttcaaggacaagaaattcaaaaaagagaggaaagagcaaaagatgtaataaagctagtaggtttagaaggaagagaaaaatattatccaagggaattatcgggaggacaacaacaaagagttggtcttgcgagatctttagcagttgaaccagatgtttggtttttagatgaacctttttctgcattagatccattaataagaaaagaaatgcaaaacgagtttttaagacttcaaagtatgttaaagaaaacgattgtttttattacccatgattttgacgaggcaattagattagcagataggatagcaataatgtatgagggattaattgtccaagtaggaacccccgaagaattgattacaaaaccagctactgattatgttgcagaatttacaaaagatataccaagatcaaaattattaaatgcagaaagtattatgaatgaaaaagataaaaaaccttacgaaaacacagttaattatagtgataaaattgaaaaaattgcatcaaaagttttaaagtcagaaagtattttttctgtagttgatgacaacaaagaggttataggttcagtgagtaaaaaaagaattaattaaa

SEQ ID NO: 269779 - DNA, 835 bp, Unknown
  Bacterial polypeptide expressing nucleotide sequence isolated from the Sargasso Sea
atgacaagaaattcgattgtcttcgataatgtctcttacaattttggcaaaaaagagatttttaagaatctttcttttgaagtgccggcaggccagaccgtaggaatcatggggccaagtggtactgggaaaacgaccttgcttcggcttatgggagggcagattcaacctgataccggaacggtttttgtcgagggcaaggatttaaagaaaataaagagaaccgaattgttcgagcttagaaaatgtttaggaatgttgtttcaaagcggagccttattttcggatttaacggtttttgaaaatgttgctttcccattaaaagagcacactaggttaaatggggaaatgattagatatctcgtcttgataaaattaaactctgttggactaagaggtgcggcgcatctcttccctagagaattatcgggtggtatgcaacgcagagtagcgttagcaagagcaatggccttagatccgaagcttattatgtatgatgaaccttttacaggtttagatcctattgctttgggcgtcatttcaaacttgattaaggatgttggttcagtgtatgaatgcacaaacgtaatcgtttcacacgatattgaagaaactgcaaggatttctaatcttctttacgtgttatcggaaggcgagataatagggcaaggctccccgcaagacctaaaaaaagacgactctccaagattgaggcaatttctaaacggacttccagatgggccagttccttttcattaccctgcgccggaatatatggatagcctgatcggagtgaaaaacaccaagagaaccataattaagagggacgattaat

SEQ ID NO: 269780 - DNA, 1048 bp, Unknown
  Bacterial polypeptide expressing nucleotide sequence isolated from the Sargasso Sea
aatgttggccgtaagtataaaaaacctcagtcacaaaattaatactaaaccaattttacatgatgttaattttgaattaaaaaaagattctattgcgtgtattcttggcccttcaggtagtggtaaaacgacattattaaagttaattgcaggtttggataaagtccaaaatggagaaatttctataaatgatcaattagtaagctcagcaaaaacacatttagcaactgagaaaagaaaaattggttttctttttcaagactatgcactttttccccacttaacagtgaaagaaaaccttaaatatccaatcaatttcaaaaattctatatacaaaatagatgacattatagatgttgttaaactgcctcattcactagataaatatccacacgaattaagtggtggtgaacaacaacgagttgctttagcaagatcaatcatttcacatcctgatttattattgttagatgaaccattctcaagtcttgacctaaacctcagagaagaaataagagatgacacactccacttattacaaaaatctaatgtttctactattattgttactcacgatccttttgaggcgatgtttatctcaaatcaaataaatataatggataatacaggcagtatagtgcagtcaggtgcgccagcggaactttacaataatccaaaaaatcaatacgtaacaagattttttggagaaactaatatttttcatggtgaagtaaataatgcttgtgtctcaacacctgttggtcaagtaagagtcaatcaaaagtacgaaaacaaaaatgtaacaattcatataagaccgcaaggaataaaattaagtgaacaaccaacacctgtgaatggaattaaaggaacagttatggcatccaaattaatgggtgcttttagttttattcatttatcagttttaaataataaaaatgaagtaattcatgttcatagtcacatgcctcctgaatttaaccctaaacaatcttcagctgtagaaatatcagtcgatgaaaaacatacttttgtttttgaaaattaa

SEQ ID NO: 269781 - DNA, 1066 bp, Unknown
  Bacterial polypeptide expressing nucleotide sequence isolated from the Sargasso Sea
aatggctaaaataactttaaaagatttaagtcacagctatttagagcaacagaataataattctgactgggctttaagagatgtaaatattgattggaaagatggcggagcttatgctcttttaggaccatctggttgcggtaagacaactttattaaatattgtttcaggattattaaaaccaacaaagggcagtgttttatttgatgataaagatatgacatcactcaaccctgttgaaagagatattgctcaaatatttcagttcccagttatttatgacaccatgactgtatatgaaaacttagcttttccattaaaaaatagaggtctttcagactcagaagttgcatctaaagttaaagaaattgctgagatgcttgaattgacaactacattgaataacagagcatcaggtttaacagctgatggtaagcaaaaaatctcattaggtagaggacttgtcagatcagatgtaaatgtaattatgtttgatgaaccattaactgttatagatccacatttaaaatgggttttaagatctaaattaaaagaactacatcaaaaaattaatcgtactatgatttatgtgacacatgatcaaacagaagctttaacttttgcagatcaagttgtagtcatgcatgaaggtcaaatcgtccaaactggaacacccgttgaattatttgagaaacccaaacatacttttgttggacattttattggttcacctggaatgaatatacttccttgtgaaattaaaaatggtgaaataaattttagcggtcaaaaaatacaaagtcataaagctataaaaaaatcaaattttagtaaaactcaaataggcataagacctgaatttataaatttttcaaaagatggaattccagttaaaattaaaagagtaagtaatactggaagacataaaattgttgatacagaatgtaatggaggaaacatcaaaatattatctaacgcttctaccgaaattccaagtgaaagcgcccatataactttcaatcaaaaatatacttatgtttatggagacaactggattattgaataa

SEQ ID NO: 269782 - DNA, 913 bp, Unknown
  Bacterial polypeptide expressing nucleotide sequence isolated from the Sargasso Sea
aatgactgatgctgtaattaaatgtgaatctgtttacaaaatatttggtgcaaatgccaaaaaaatgcttgaagaagcaaatggaaacgtagatgcaaaaacattccaagaaaacggatgcattgtaggcgtgaacaatgcttcttttaaagtctcaaaaggagaaatgttggtcgtaatggggttatctggttccggaaaatctacattattaagatgtatctctagattaacagatgcgacgggtggaaaaatttatatagaaggccaagatttactttcattaaaagataaagagttgattgaactaagaagaaataaaatgggaatggtttttcaaagttttgctttacttccacataaaacagtcttggaaaatattgcttttccattgcaaatcaaaggtatagagactgagaaaagtatcaataaagccatggacatggtaaaacttgttggtcttgatggaagagaaaattatttcccaagagaactttcaggaggacaacaacaaagagtaggtatcgctcgatcattagctgttgaacctgatatttggtttttagacgaacctttttctgcattagatccattgattagaaaagaaatgcaagatgaatttttaagacttcaagaaaagctaaaaaagacaattatgttcattactcatgattttgacgaagcattaaaacttgctgatcgaatagcaatcatgaaagatggaataattgaacagttagatacacctgcgaaaattgtactaagtccagccacagactatgtgaaaaaatttactgaagaagtaccaagggaaaaagttttaataatagaagatgtaatggatgcgccaacatcagataatttaagtgatctaaaagtttcaaaagacgagataatagaaaaatgtagctga

SEQ ID NO: 269783 - DNA, 283 bp, Unknown
  Bacterial polypeptide expressing nucleotide sequence isolated from the Sargasso Sea
gccatagccagagcattgctaaaagatgcacctatattgattctagatgaggcaacttctgcacttgattcagagagtgagaaactcattcagaaggcttttgaccgattgatggaaaataggacaacttttgtcattgcccatagactaagtacaattgagaaagcagatcgaatattggttctctcagatggaaaaatcgttgaagagggtactcatcaagatttattaggccaagatggagaatattctcttttgtataaaatgcagttcaatgactaga

SEQ ID NO: 269784 - DNA, 871 bp, Unknown
  Bacterial polypeptide expressing nucleotide sequence isolated from the Sargasso Sea
ttgattagagtcgaacatttctataaaaattacgggccctaccctgctgtaatagatgtctcttttgaagttttaaaaggagagatagtaggattcttaggaccaaatggtgctggtaagacaactacgatgagaactataacaggttacttacctcctacttcaggggaaatcactgtgagtggatatgactctgtgaagtattctcttgaagctagaaggcacattggatatctgccagaaactgttcctttatatttagatatgactgttacagattacctaagctttatgggcaaaatcagaggaatgaatcaaaagtggattaatgaaagaattaataaagttattgatcatgtgagacttggtgactatagaaatacccatataggtaaattgtcaaaaggttacagacaaagaacaggaatagctcaagctatactgcatgagccagatgtattaataatggatgagccaactattggaattgatccaattcaagtagttgaaactagagaattaataagtgaacttggagaatctcacactttattaatttcttcacatattcttcctgaagtttctgctatatgcccaagagttttagttatatcagatggaagaattgttgctgatgataaacctaataatttatcccaaagattatcaggcactgaaagaatagaacttggtgtatccggttcaaaatctacagatattatttctaaaatcagaacaatagattctgtaattgacgttagatcagattctagagctgaacaaattgaccaagctaataaggaaaattacattccaatagtagtagatgcaaaaacaaatgaaaattcttctgaaaaaatgccaaaataat

SEQ ID NO: 269785 - DNA, 721 bp, Unknown
  Bacterial polypeptide expressing nucleotide sequence isolated from the Sargasso Sea
aatgcttaaaatttcaaacgtcgaaacattctatggaaaaatacaagccctgagaggagttgacatagacgtaaacgatggggaaatagtttctctaataggttcaaatggcgccggtaagtccactttattaatgaccataagcggtgttaataaagctagaaatggaaatataacttttaacggtgagagaattgaaaacagagatccacataaaatagttgatctggggatatgccaagtccctgaaggaagaagaatattttcaagattaactgttgaagaaaatttaagattgggtgcttatacaaatgatcaaggcaagcattttgagacagatattaaagaagtgtatgacttatttccagtattaagtgatagaaaaacacaaagaggaggaacattatctggaggagagcaacaaatgctggcaataggtagagcgctaatgagtaaaccaaaagtattactcttagatgaaccttctttagggatagccccaaaactggtaaatcaaatatttgcctcaataaaaaatataaataaagaaaaaaatgttactatttttctagttgagcaaaatgcaaaaaaagcattagagttagcagatcgtgcatatgttttagtaaatggcaaagttaccattatgggttctggtcaagacctacttaaaaacaaagatattcaagcagcttacctcgagggtgggacaaaaaattaa

SEQ ID NO: 269786 - DNA, 776 bp, Unknown
  Bacterial polypeptide expressing nucleotide sequence isolated from the Sargasso Sea
tatgcaatttaataaagaaaatttacaagaacttagaaataaaaaaattggtatggtttttcaaaattttgcattgatgccccacagatctgttttagataatattgcaatgcctttagaaataagaggagtaagtaaaaacgataggttagatgcagcaaataacatcctaaatattgttgaattacaaggatggggtaataaatacgcacatgaattatctggaggaatgcaacaaagagtagggttggccagagcattagctgctgatcctgaatttttactcatggatgaacctttcagtgcacttgatccgcttataagacgccaacttcaaacagagtttattaaactttcaaaacaaatgaaaaagacaactgtatttataactcatgatcttgatgaagctgtaagagttggacatagaatagcaataatgcgagatggaagagtagttcaaatcggaacccctgaagaaatagttgtaaatccatctgatgattatgttgcagattttgtaaaaggaatttcaagattaaaagttgttcaggctaaaactattatgcaacctttagagcaatataaaaaaaactttggggaaaatttaagtaataatgaaaaagtaaatgaaaacgacatattaagcaaacttattgaaacttctgtttctaaagataaaccaattgtagttataaatgaccataatatagaagttggaattattactcaatcagacctattaaaggcagttgttgaaggaaatgacaatgagtaag

SEQ ID NO: 269787 - DNA, 268 bp, Unknown
  Bacterial polypeptide expressing nucleotide sequence isolated from the Sargasso Sea
catggaaccaaaaattatgctttttgatgaaccaacatcagctttagaccctgaaatgattaaagaagttttagacgcaatggtaaatcttgcaaaagctggtatgacaatgatcgtggtcactcatgaaatgggttttgccaaagaagttgccgatgaagtagtttttatggatgaaggaatgatagtagaaagagcaaaaacaaaagattttttcgcaaatccaaaaaatgaaagaacgaaacttttcttaagccaaatactttaa

SEQ ID NO: 269788 - DNA, 745 bp, Unknown
  Bacterial polypeptide expressing nucleotide sequence isolated from the Sargasso Sea
catgaatcaaatcattgaggttcactcggtttccaaatcttttggtggagtccaggctaatcaggacatctccctttcagtcaaggaaggtatcatcaccgggctaatcggtcccaacggatctgggaaaaccaccctctttaattccatagtgggacaacatcccatcgataatggaaacatcctctttcaggggaaagaaatttcaaaactcagggttggagaaatagcaagattggggcttttaagaaccttccaacagacacggatttacaacaaaatgaattgtgtggacaacatggaaatttccgtgagtcaccgagggagaaggtttggatccatgttttccagtcgtaagggtgaaatcctcgaccgtgcagaagaacttctggactttgtgggtttatacagtaaaaggtttttaatttccggagatttttcttttggtcaacaaaaactcctggaattcgccatggctttgatgaatgacccaaaagttcttcttctggacgagccaactgcagggatcaatccgaccctcatcaatggactgattgaccgactgaaacgagcgaatgaggaaatgggggtaactctatttgtgatcgaacacaacatgcgagtcgtgatgaatctggcaagtcatgtattttgccttgcccacggcaaactccttgccggcggtcctccctctgaaatacaaaacgatcaaaaagtgatcgatgcctaccttggagcgcattga

SEQ ID NO: 269789 - DNA, 676 bp, Unknown
  Bacterial polypeptide expressing nucleotide sequence isolated from the Sargasso Sea
atgcaaattgaagtttcgggtctccataaaagttttctggatggtgaagggcatcaacttcacatcctcaaggggcttaatttcaaacttgaagcgggggctagtgcttccatcgtgggtgcctcaggaacaggcaaaagcacttttcttcatattttagggactcttgatgaaggagactccggcagaatctgttttgaaaacacagatctgatgcagatgaaaagggaggaatcctctgcattccgaaataaaacaatcggattcatcttccagtttcaccagttactccaggacttcaatgcattggagaatgtcatgatcccggctctgattttgggaaactcccgaacaactgccatggaacgttctaaaatgctgctggatcaagtggggctttttgatcggatgcatcacaaaccctctcaactttcaggtggtgagcaacagagggtcgcaattgccagggctttaacgaacagtcctaagcttcttttggcagatgaaccaaccgggaatcttgatgaagaaactggcagacaggtgatggaacttttgctgaaactcaatcaggaaaatcgtaccactctggttatgatcacccacaatcaaaaactggcgatggagaccaattctaagttccgtcttgaaaacggattattgaaccaggagtagc

SEQ ID NO: 269790 - DNA, 1033 bp, Unknown
  Bacterial polypeptide expressing nucleotide sequence isolated from the Sargasso Sea
tatgtctgatgcagttattaaatgtgagtctgtttataaaatttttggagaaaatgccgaaaaaatgcttcaagaagccaatggaaacgttgacgcaaaaacttttcaagaaaatggatgtatagtcggagttaacaatgcttcttttgaagtagcaaaaggagaaatgttggttgtgatgggtttatctggatcaggtaaatcaacattacttagatgtatttcaagattgacagatgcaacaggtggaaaaatttttattgaaggtcaagatttattgcagctgaataacaaagaactcatagatcttagaagaaataaaatggggatggttttccaaagctttgcgctgttgccacataaaactgttgtagaaaatatagcatttccactacaaattaagggaattgatactgacgatagtattagtaaggcaatggatatggttaagttagttggactagatggaagagaaaattattttccaagagaactttctggcggacaacagcaaagagtaggtattgcaagatccttagctgttgagccagacatttggtttttagatgagcctttttctgctttagatcctttgatccgaaaagaaatgcaggatgaatttttaagacttcaagacaaacttcaaaaaactataatgtttattactcacgattttgatgaggctttaaaactagcagaccgaatagcaattatgaaggatggtataattgaacaattagatacacctgccaaaatagttttaaatcccgcaactgaatatgttaggaaatttactgaagaagttcctagagaaaaggttttattaattgaagatgtaatggaacaatccactggtgataatttaggagatttaagagtttcaaaacatgagattatagaaaacgttgctgaaaaaattctaactcaagataaaactgtaggagtaatagataagaataataaagttataggctctatcaaccccacaaagataatcaatacagtctttggtggaaggaaaaatggaaattaa

SEQ ID NO: 269791 - DNA, 623 bp, Unknown
  Bacterial polypeptide expressing nucleotide sequence isolated from the Sargasso Sea
cgttgttgtgacctctgatagggggctagccggatcatttaacactagcattttaagaaaagcacataatgatattgatgactttggtaaagaaaatgtagatattttttgtattggtaaaaaagccaatgattattttaaatctagaaaatataatatagttggttcatattttgatttttggaatgagctaaattttaatcaatctatgaaaattggcagtacaataatcaatcatttcttagatcaatcagttgatgaaattcgagttgtttttaatgaatttgtaaatgttgcaacccaggcagttattacggaaaagttgttaccaattgaattggatgaagatgaattaaccaacattgattatctttatgaaccatctaagaagaaaattgtcaaatcattgattccacgctacttaaatgctcaagtatggaaatacttattggaatcgtacgccagcgagcaagctgcaaggatgattgctatggaaaatgcgaccagcaactctgaagatatgataaaaagtttaacattagaatttaacaaagcacgccaagctgccataacaacagagatgttagagattgttagtggagctgaggcgctaaaagaataag

SEQ ID NO: 269792 - DNA, 549 bp, Unknown
  Bacterial polypeptide expressing nucleotide sequence isolated from the Sargasso Sea
tgattgctggtatcgatctgcctgatcaaggtgaagttcgaattgatggaaaaagtcttggacaaatgtccgaaaagaacagaactttgttgagacgcagaactatgggatttgtttttcagtccttcaatttgatcccaacactgaacgtttatgaaaacttaatgcttcctctcgaactgaaccaaatattaaaaaattcgggaattatttcacaaatgcttgaagccttgggtcttaaagggcgtgaagaaagtcatccggacaggctttccggaggagaacagcaacgtgttgccattgcacgagctttgatgcatcaaccgtccctcctccttgccgatgaaccaacaggcaatttggatgcggagaccagcaaagaaacgcttaaactcatcaatcatttagtccatcgttcaagaacgaccatgatcatggcaactcatagtcaggaggttattgaatgggtggaccgcgttttgggtattgaggatgggaaattgattgaacttaaaacttctgaagcgatccaaaaactcgcctcatgag

SEQ ID NO: 269793 - DNA, 757 bp, Unknown
  Bacterial polypeptide expressing nucleotide sequence isolated from the Sargasso Sea
atgaacgaattggtcctgcagcttgaaggcttggagaaatcctttggggcgctgcgcgcaacacgcgatgtgtcgcttgatgtcgagcatggcgaaatacacgcgctgattggcccgaacggagccggcaaaacaactcttgtgcgccagatctacggatctgaaacgtccgatgcgggtgttgtcaaactccgtggcgaggttgtgaacggccttactgtgcctcaaagggttgcgcgtggcattggccgttccttccagatcagcaatgtgctgatggacttcacggtgcttcagaacgccatccttgctgagcaggcacggcttggtgaatccttccggtttttcaggcctgccttcgatgatcaagcgctgatcgacggtgcgagcgtgatgcttgatagggttggccttggcgatcgcgcggcaactcctgtcgccgatctggcgcatggtgagcgccgccttctggaactagcgctggcgcttgcagcggagcctgccctgctgcttctcgacgagccgatggctggtgccggttcggaggaaacaaagcatatgatcgagatcattgctggcttaaaatcacgcgccggcatcctgctaatcgagcatgacatggatgcagttttccagcttgctgatcgggtcacggtaattgtagagggtggggttattgcctctggtccaccagatgctatcagtgccgacagcgcggtacgcgaagcctatcttgggagcgaggagcatgcttagg

SEQ ID NO: 269794 - DNA, 1213 bp, Unknown
  Bacterial polypeptide expressing nucleotide sequence isolated from the Sargasso Sea
ctgatatcgaaggtgaagctcgccccacagcctggcattaaaatcggttacctgccacaggaaccaaaactgaacccggaacataccgttcgtgaatccgtggaagaagcggttgccgaagtggttaacgcgctgaaaggtctggatgaagtgtacgccaagtacgccgaaccggacgctgacttcgataagctggccgcgcaacagggcaagtttgaagagatcattcaggcgcacgacggtcataacctgaacgtgcagcttgagcgtgccgctgacgccctgcgtctgccggactgggacgctaaaattgagaatctctccggtggtgaacgccgccgcgtcgcgctgtgccgcctgctgctggaaaaaccagacatgctgctgctcgacgaaccgactaaccacctggacgccgaatccgtcgcgtggctggaacgcttcctgcacgacttcgaaggtaccgtggtggcgattacccacgaccgttacttcctcgacaacgttgccggctggatcctggagctggaccgtggtgaaggtattccatgggaaggtaactactcttcctggctggagcagaaagatcagcgtctggcccaggaagcctctcaggaagcggctcgccgtaaatccattgagaaagagctggagtgggttcgtcagggcgcgaaaggccgtcagtctaagggcaaagcccgtctggcacgctttgaagagctgaacaacactgaataccagaaacgtaacgaaaccaacgaattgtttatcccacctggagcacgtctgggcgataaagttgttgaagtcaccaatctgcgtaaatcctacggggatcgcgtgctgattgacgacctgagcttctcggtaccgaaaggcgctatcgtcggcatcatcggtccgaacggcgcgggtaaatcaaccctgttccgtatgatgtccggccaggaacagcctgacagcggtaccatcacgctgggtgaaaccgtcaaactggcctccgttgaccagttccgtgacgccatggacaacagcaaaaccgtgtgggaagaagtgtccggcgggctggatatcatgaagatcggcaacaccgaaatgccaagccgtgcctacgtgggccgcttcaacttcaaaggtgtggatcagggtaaacgcgtcggcgagctgtccggcggtgagcgtggtcgtctgcacctggcgaagctgctgcagg

SEQ ID NO: 269795 - DNA, 544 bp, Unknown
  Bacterial polypeptide expressing nucleotide sequence isolated from the Sargasso Sea
atgtccatagaaattaaaaatttatcaaaaaaatttaatgaagtttatgcagtaaaaaatatcaatttcaccataggtgtaaataaaacaattggattacttggtcctaatggttgtggaaaaactacatcaataggaatgatgcttggattaataaagccaacgacaggcgatattattatacaaaataaaaatataaatacatttgaaagaaataaacttttaagcattatgaattttgcatcgccctacgtagaactacctaagaaacttagtgtaaaacaaaatctccaaatctatggtaggctttacggggtaaacgacttatctcttagaatagatgaattggctgaagacttaaatcttaaagattttataaataaaaaaactggtgagttatcctcaggacaaaaaaatagagtgtcacttgctaagtcacttattaacaaacctgaaattcttctattagatgagccgaccgcaagtcttgatccagatattggtgattatgttagatcttatgttcaaacatacaaatctaaaa

SEQ ID NO: 269796 - DNA, 1813 bp, Unknown
  Bacterial polypeptide expressing nucleotide sequence isolated from the Sargasso Sea
aatggtaagtgatttaattttttctttaagagaaacttcagttagttttggcaaaaaaattatttttgataatcttgatgttaatatacatagaaaagatttaatagcactaattggaaaaaatggagttgggaaatcaactcttatgagaataattagtgataaacaagatttagatcaaggcgaagtttggaagttaaataatatacgggtaagtttttttagtcaaaaatttgaattagaggaatcttattctattgaaaatgaattgctaaatattttagataataaagaagactcgtttaaaatagatattttttgtaataatttacaattaaataaaaaagatattattaaaaatttatcaggaggtcaaaaaagaagagttggattaattaaatctctaattaatgaatcagatatactattattagatgaacctactaatcatttagatttagaatgcattatttggttagaaaattatttaaaaaccttcaaaggatctataatttgtgtaagtcatgatagaacttttttaagtaattttactaataaagttttttggttagatagaggaaatttaagagtaagcccctcaggatttaaaaattttgatcgatggtcgcaagaaatgtttgaacaagaagcaagagaactaaaaaatagaaaacaatttgttaatattgaagttgaatgggccaataaaggagtaaaagctagagttaaaagaaatgttaaaagattagaaagggctaaagaattaaaagatcaacttgaaaaagatgagtcatcatatcgtaaagctattcaaactgttaaaataaataagattatcccaggtttagataattctaaatttatagctgagtttcataaagtaagtattggttatgaaattccaaaaaaaacaattctaaaagatattaatttaaaaattaataaaaaagatagaataggtcttattggcaagaatggaacaggcaaatctacatttttaaaagctttgttgggagaaattaaaagtcaaaaaggtacaattaaattaaaaaagaatatgaacttttcttattttgatcaactccgcaatgatcttaatactgataattcgctaaaaaaaatattagtgcctagtggaggtgattatttaaaggttcaaggaaaagatagacatgtgtgctcttatttaaaggattttatgtttgatccatctaaagccactgatagtattagtactttatctggtggtcaacaaaatagattactacttgcaaaagtgctcgctaatcctcaaacaggattgatacttgatgaacctacgaatgatttagatttagaaactatggatttattaactgaaatgttatcaaattattcaggtactttgcttattgtgtctcatgatagagattttttagatcaaactgttaataagatattatattttgatgaaaaagggcaagtctccatttttcttggaggatacagtgactttcttaaaagtcagcaaaatgaaaaaataattaaatcaatctcaaagaaaaaaaataattataaagttgtttcttcaaaaaataataagaaactatcctttaaatataaatatgaattagaaaatttgccaaaagagattgaagatcttgaaaataaaataaacgatattactaaagaattaaaaaattcaaatttatatttgagtgatgcaaatagatttaatgaaatcaccagtgaaatgttagaattaaaaaaagtattatcaattaaagaagaaagatggttatttttattagaaatggaagaaaaaaatgaataa

SEQ ID NO: 269797 - DNA, 305 bp, Unknown
  Bacterial polypeptide expressing nucleotide sequence isolated from the Sargasso Sea
aatgaatttaattattaaatcgctaaatttttcttatcagagtgagggtgttttcaaagatttaaatctcaattttaattctggaatcttaaatctagtctcaggaccgagcggctctggaaaaactacattgttaaatctaatcgctggattagaaaaaccctcatctggtttaataatgcttgatgataatattcaatcaagtatcgataaatttgttgagcctgaaaatagaaatatcggctttgtttttcaagattttgctttatttccgcatttaaatgtgaaacaaaatattgaattct

SEQ ID NO: 269798 - DNA, 310 bp, Unknown
  Bacterial polypeptide expressing nucleotide sequence isolated from the Sargasso Sea
tatgccaagtttaaaagatattaaaactcaaataaattctgtaggttcaactaaaaaaattacctctgcaatgaagatggttgctgcgagtaagctgcgtagatctcaagaaaaggcagaagccgcaagaccttattcttcaagattagaagaaatgttatcttctctggccacttctgcatcttcaggagaagggattataaaacttttaactggtactggggaagatcaaaattatattgttgtacctgttagtgcagatcgaggtttatgtggtggttttaatagtagtataaatagagaaacattt

SEQ ID NO: 269799 - DNA, 1030 bp, Unknown
  Bacterial polypeptide expressing nucleotide sequence isolated from the Sargasso Sea
atgtctgagccagttatcaaatgtgaaaatgtatataaaatatttggagcaaatgctcaaaaaatgcttcaagattctaatggtaatgttgatgctaaaactttccaagaaaatgggtgtattgtaggtgtaaacaatgcttcttttgaagtttcaaaaggagagatgttagttgttatgggcttatcaggctcaggtaaatcaactttattaagatgcatctctcgattaacagatgctacaggtggtaaaatttttatagagggccaagacttgttacaattaaacaataaagacctcatagatcttagaagaaataaaatgggaatggttttccaaagctttgctttacttcctcataaaactgttgttgaaaatatagcctttccacttcagattaaaggaatcaaaactgaggacagtattagtaaagcaatggacatggttaaactagttggtcttgatggtagagaaaactattttccaagagaactttcaggaggacaacaacaaagagtgggtattgcaagatcattagcagttgagccagatatttggtttttagatgagcctttttcagctttagacccattaattagaaaagaaatgcaagatgagtttttaagacttcaagataagttacaaaaaacaattatgtttattacacatgattttgacgaggctctaaaacttgcagaccgaattgcaattatgaaggatggtataattgagcagttagatacacctgctaatattgttttaaacccagctacagaatatgtaagaaaatttactgaagaagtaccaagagaaaaagttttgttgattgaagatgttatggaggtatctaaagataatttaggtgacttaaaagtctcaaaagatgaaatcatagagaatgttgcagaaaaaattctcactcaagagaaatcagtagcagtagtagacaataacaacaatattattggttcgattaatccaactaaaataatcaatacagtttttggaggaagaaaaaataataattaaa

SEQ ID NO: 269800 - DNA, 604 bp, Unknown
  Bacterial polypeptide expressing nucleotide sequence isolated from the Sargasso Sea
actggcgcgcgcgctggccgtgcaaccgcgcgtgctgctgctcgacgaaccgctgaccgcgctagatgcgcgcttgcgcgacaccttgcgcagcgagatgaatacgctgctgcgcgagttgggcatcacgaccgtctacgtgacccacgaccaggccgaagcaatggaactcggcgaccgtatcgtcgtgatgagcgccgggcgcatcgagcagatcggttcgccgcgcgatatttactaccgtccggcaaatcgcacggtcgcgcaatttgtcggcacgatcaaccggctggcgggcgagcggcgcgaaggcctcctgaccacgaccggcggaaccgtcccgttgccgtcgggccccgggcatgcaagcgcggcacacgaattcttcttccggcccgaagatgcatatctggccgacccagccacggcgcaattgcgcggtaacatcgaaagcaccgcgtttctcggcgagcgcacccgcttgacgatcggcggcgccgcaccggacgccttgctgatcgacgtcgcgggccgggtagaactcgcacgcggcacaccggtcgggatttcgatcgcgcaagacgcgctgattgcgctatcgtaa

SEQ ID NO: 269801 - DNA, 1321 bp, Unknown
  Bacterial polypeptide expressing nucleotide sequence isolated from the Sargasso Sea
cttatgcaaagtcttggtgcgcaaactccttggcattgaaacttccggaattttgacagtacttttcactgataaaaccggaacattgacacaaggagagctaaatgtgtctgaatttttgttaggagacgggaaacatttcctgaattatcaggatatttcttcgactttgcgtgaaactatagcatttgcaatacgaaataatactcctgccattattgactctaaggatccgaaaaatctaaaaatagttggagccaaccccaccggaattgcgttgttgagatttcttggtttagatgcggctgtgcaagacgatgttaaaatggaaaaaaatatcccatttcaaagtgcaaacaaattttctgctagccagattaaaggcgaacaaaatgtaacacttatcaaaggtgcagctgaaattgtacttaaggggtgtacgcatttcctaaatcaaaaaggtgaaaaagtaaaacttgatgacacaaaactcaaagaggaaatgcggggactctcagaacgggcaatgaggcttattggcctggcagtttcagataaagatttaggtggtgagaatattcttccttcagaacttactctggttggagtttttggacttagggatgaaatgcgaaaggaatcgcttaccgcagtggaaactgcccagaaagcagggatccaagtagtgatgattacaggtgatgcaaaggatactgctgaggcaattgccaaagaggtgggtatccttgaaaccgaaaaaggactaattctctcttcctatcagcttggtgaattttcagatcaggaaataaaagacatgcttcctgatttaagagttgttgctagagctcttcctacagataaaagccgactggttaaactggctaaatctatggattgggtagtcggcatgacaggagacggagttaatgatgctcccgcagtgaaaaacgcagatgttggtttttcaatgggcaatggtactgacatgactaaggaatctagtgacattgttattctggataataattttaactcactcacaaatgctgtccgttacggcagaacactgctcaaatccatcagaaaatttttaatatttcagttgacagtaaatgttgccgcagttttggtggcctttttaggacccttttttggcactgatttacctctaaccatgacacaacttttatggatcaacatagtgatggatactctggctgctttcgctttttccggagaagcagctttgaaacgttatatgaacgagaagccaattcctaagggagaatctcttatcaccggtgacatgtggtcagct

SEQ ID NO: 269802 - DNA, 724 bp, Unknown
  Bacterial polypeptide expressing nucleotide sequence isolated from the Sargasso Sea
aatgacaaattctattgaagtaatcaatctatcaaaaaaatataaagataaagaagcagtagctaatataaattttaaaattaatgaaaatgaaatggttggtctattgggccctaatggatgtggaaaaactacaactattggaatgattttagggttattaaaaccaagtagtggtgaggttttaatcaacggagaaaatattgaaaaaaataaaatttcgcttcttcataaaatgaattttatttcaccatatattgaattgcctaaaaaactcaaagttaaacaaaatttaattgtttatggaaaattatataacattcaaaatttaaatgacagaatagatcaccttgcaaataaacttagattaaaagaccttttaaacaaaattactggagaactttcttcgggacaaaaaaacagggtaagtcttgctaaagctttaataaatgatccaacagtacttttgttggatgaacccactgcttcattagatcctgaaactggtgattttgtaagatcgtttttagaagattataaaaaggaaaaaaaaatatcagttttgctcgcctctcataatatggaagaagtaaaaagattatgtagttctgttttaatgatgaaagatggtttaatagtggatagaggaactcctgaagagttaataacaaaatatggaagaagaaatttagaggaagtatttttagaaattgtgagaaaataa

SEQ ID NO: 269803 - DNA, 601 bp, Unknown
  Bacterial polypeptide expressing nucleotide sequence isolated from the Sargasso Sea
aatgctgtataatgaaattttattatcttgtgaaaatataacaaaaatttttggtgattttaaagctaatgataatgttaacttttcaatttctaaaggtgaaatacatgctttattaggtgaaaatggagctggcaaatcaacatttgtaaagattatttacggtttgttaaagccagatagtggtaacgttatttggaaaaataaaataattgaaatcaatggaccaaagcatgctagggagttgggtattggaatggttttccaacacttttcattgtttgaagcattaactgtattagaaaacatatctcttgcacttcctgaaaagaaccaatctgatgatttagaaaacagaattgaaacaatttctaatgagtatggattgcaaattgaccctagatcaagggtttttaatctctcagtaggagagcagcaaagggtcgaaatcataaggtgcttactgcaaaatcctgagttattaataatggatgagccaacatcagtgttgacaccacaggaaatctctaaattatttgaagttttggagaagttatcaaaaagtgggtgttcaattttattcattactcacaaggcttga

SEQ ID NO: 269804 - DNA, 572 bp, Unknown
  Bacterial polypeptide expressing nucleotide sequence isolated from the Sargasso Sea
aatgaaaaagactgtgcatttgtcatgcgaaggcttaacaaaaaagtatactgacaaaacagttgtatctgaggtttccattaaagtagatacaggaaaagtagttggattacttggacctaatggagccggaaaaactactacattctatatgttggttggcttaataaggtgtgaccaaggccaaatttatatgggcgatgaaaatataactaactcaccaatgcacattcgttctgatcttgggatcagctaccttcctcaagaagcatcgatatttagaaatctcagtgttgaggataatataatggctatattacaaacgagaaagtcattgtcagatattcaaattaaaaataaatttgactatttgattaacattttacagattgaaaatatacttgataatacaggtgcaagcctatcgggtggtgagagaaggagggttgaaatagctagagctttatccattgaaccaaaatttctcttgctagatgagccatttgctggtatagatccaatatcagtaatagaaatacaaaagattataaagtcgctaacaagttctagta

SEQ ID NO: 269805 - DNA, 703 bp, Unknown
  Bacterial polypeptide expressing nucleotide sequence isolated from the Sargasso Sea
atgattgattttcagcaggtcagtaagatttatcctggtggccaaatggcgctggaggaagtgaattttcatctacaaaaaggtgaaatggcattcttaaccggccattcgggcgcgggtaagagtaccctgttgaaattaatcacagtgatcgagcgtgcaactaccggccgtgtggcgattaatggccacgatattgccaaaatcagccccaaacacgtgccctatttgcgtcgcaatattgggatgattttccaaaaccatcatctattgatggacagaagcgtattcgacaacgttgccttaccattagtgattgaaggcttctcccacggcgagatccgcaaacgggtcgctggcgcgttggatatggtgggtttatatggcaaagagcgccataaccccatcatgttatccggtggtgagcagcaacgtgtcggtatcgcccgcgcgatcgttaataaaccgccactattgctggccgacgaaccgacgggcaacttggaccctaaattgtcgatggatattttgcgcctattcgaaacctttaacgatgctggcacgagcgtgctcattgccacccacgatctgggactgatcgcgcggatgaaataccgcacttttaccttgaagcaagggcgtatgctcggtgcccaggaattgcatcatggacacgcgactgctcgaggtaatgcgctatgag

SEQ ID NO: 269806 - DNA, 1039 bp, Unknown
  Bacterial polypeptide expressing nucleotide sequence isolated from the Sargasso Sea
atgtcatctcaaccagtaataaaatgcgagtctgtctataaaatttttggagtaaatgctgaaaaaatgctccaagaatctaatggaaatgttgatgcgcaaacttttcaagaagccggctgtatcgtaggagttaacaatgcttcttttgaagtttcaaaaggagaaatgttggtagtgatgggattatccggatctgggaaatccactctgcttagatgcatttcaagattgacagatgcaacaggggggaaaatttttgttgaaggccaagatttattatctttgaaaaacaaggaattaattgatttaaggagaaataaaatgggaatggttttccaaagttttgctcttcttcctcacaaaacagttttagaaaatattgcttttccattacaaataaaaggaataaaaactgaagatagtatttcgaaagcaatggatatggttaaacttgttggtcttgatggaagggaaaattattttcccagagaattgtctggtggtcaacaacagcgtgtaggtattgcaagatccttggccgttgagcctgatatttggtttttagatgaaccattttccgctctagaccctttaataagaaaagagatgcaggatgaatttttaagactgcaaggtgttttaaaaaaaacaattatgttcattacacatgattttgacgaagcccttagacttgcagatagaattgcaataatgaaggacggcataattgagcaattagatacttcagacaacatagtattaaatccagcaacagaatatgtcagaaaatttactcaagaagtcccaagagagaaagtcttaaaaatagaagctgtaatggacccgattagcgatgatcaaaatttaagtgatttaatagtttctcaagatgtgatcattgaagaggttgctgaacaaattttaagtcaggaaaagcctgtacaagttatcgattctaataacaaaactgtaggaatagtgaaaccttctaaaataattcacactgtatttggtgcaagaaaagagaattcataaa

SEQ ID NO: 269807 - DNA, 433 bp, Unknown
  Bacterial polypeptide expressing nucleotide sequence isolated from the Sargasso Sea
tatgtctgacccaataataaaaattcaaaatatgaataaatggttcggtgattttcaagttttaaaaaatataaatcttgaggttgaggcaaataaaaaaattgtagtatgtggaccatcaggatcaggtaaatctacattgattagatgtatcaatagattagaagagcatcaagagggagatataattgttgatggaaatgaactatcagaaaaaacaaaagatattgaaaaaattagagctgaagttggaatggtttttcaacaatttaatttatttccacacttatcaattttagacaattgtactcttgcaccaatttgggtgaaaaaaatgccaaaaaaagaagctcaagaacttgcattagatcaacttaaaaaagtacaaatagatgatcaggccaataagttccctggacaactctctggaggt

SEQ ID NO: 269808 - DNA, 1245 bp, Unknown
  Bacterial polypeptide expressing nucleotide sequence isolated from the Sargasso Sea
atttttctttatttgattctttatcagtaaaagaaaatttaattttaggaattgatgaaaagatgtcttattcagatttagaaaataagctagaaaatataagctcaagatataatcttcccttagatttagatgctccaattactgctttatcagctggagaaaagcagcgtgttgaaatcgtaagaattttattacaagaccctcagatacttattatggatgaaccaacttcagtcttaacaccacaagaagttgaaaatttatttgtaacattaaatgcactcgtcaaagaaggtcgtacgattttatatatcactcataaactcgaagaagtaatatcaatatgtgatacagttacaataatgagaagtggtgaaattatagacacttcaagtacttccaatcaaactgcaaaaacactggcaacaaaaatgctaggacaaaaactagatgatttaaaaactaattatacgcatataaaagatgaagttaactttgaagttaaaaatatttcatgttattttaatgatccatttttaacagaccttaaaaatatttcttttcaagttagagtgggtgaaatttatggcattgctggtgttgctggtaatggacaatcagaattaatggatattttaacaggagaaaatataaatattaaatccggatcaattacttttgatagtaaaaaaatcgaaaagtatggaccacaaaaaagaagagatttatctatttcgtttgttcccgagaatagattaggtcatagtgcagtacctgagttaagtttgtctgaaaatattcttttaagtcagtttccaaaaaataattttataaaaaatggtataatattgaaaaataacgtcgatgatttcgccaataatgtaattaatgaatttaaagttattactcctgggaatgacgccaaagcttcaagtttatctggaggaaatttacaaaaatacgtcattggtagagaaatatcatccaagccaaaaatattaattatttcacatccaacttgggggatagatgccggtgctgagcattctatcagagagtctttgatagaattatctcaaaatggcacatcaataattgttatttctcaagatttagatgaattgattgaaattactcataaaatatctgttatttatgatggaaaattatccaaacctttcagaactaatgaagtagaaatagaaaaattaggattattgatgggtggaaataatgaatagt

SEQ ID NO: 269809 - DNA, 766 bp, Unknown
  Bacterial polypeptide expressing nucleotide sequence isolated from the Sargasso Sea
ccaagataaaattaagaccgatgttgaagtagctcttaagactgtagggttaattggttttgaaaatagaaaaattcaagaattatcaggaggtcagcaacaaagagtagctcttgctagatctttagctaagaaagctaagatattacttctggacgagccattagtaaaccttgattacaagcttagagaacaattaagagaagaatttaaaaaaattttctctgaaggtatgtcacaagaaacgattttgatttattcaacaacagatccacaagaagtgatggagttaaatggagaagtaattgttcttgatgagggaaaagttttacaaaaaggacctgcaaaagaaatttttgaaaacccattaaatttgaaagttgcagagatttcaaatgaccctccaatgaatattttaaaaggactaaaaaattcagacaatttaaattttgaaaatatttctattaaatctcctaaacatttcaaaaaccttgaaaatcaaaactataattttggaattagagcgtcagaaataaaattagatgataatggtgaagaatttgaaattgaacttgcagaaattagtggatcagaaactttacttcatttaaaaaaaggtaattcaaaattgatagcattaattgaagaagtaatgaattataagattcatcaaaaagtaaaaataatttttaattcaaataaattttatgcatttaatcagagcggagagttagtatcttcaccatatagaataaacaatggctaa

SEQ ID NO: 269810 - DNA, 730 bp, Unknown
  Bacterial polypeptide expressing nucleotide sequence isolated from the Sargasso Sea
gatgacaaattctattgaagtaataaatctatcaaaaaaatataaagataaagtagcagtaactaatataaattttaaaattaatgaaaatgaaatggttggtttattgggacctaatggatgtggaaaaactacaactattggaatgattttaggattattaaaaccaagtagtggtgaggttttaatcaacggagaaaatattgaaaaaaataaaatctcacttcttcacaaaatgaattttatttcaccatatattgaattacctaaaaaacttaaagttaaacaaaatttaattgtttatggaaaattatataatattcaaaatttaaatgaccgaatagatcaccttgcaaataaacttagattaaaagaccttttaaacaaaattacaggagaactttcctctggacaaaaaaacagggtaagtcttggtaaagctttaataaatgatccaacggtacttttgttggatgaacccactgcttcattagatcctgaaattggtgattttgtaagatcgtttttagaagaatacaaaaaggaaaaaaaaatatcagttttgcttgcctctcataatatggaagaagtaaaaagattatgtagttctgttttaatgatgaaagatggtttaatagtggatagaggaactcctgaagagttaataacaaagtatggaagaagaaatttagaagaagtatttttagaaattgcgagaaaaaaaaagtga

SEQ ID NO: 269811 - DNA, 678 bp, Unknown
  Bacterial polypeptide expressing nucleotide sequence isolated from the Sargasso Sea
gatgttaaaagttcataatttaaagaaaagctttggtggggtaaaagctgttgatattgatgaaatattctttgaacaaaatcaattaacatcgataattggtccaaatggtgcaggaaaaacaacattttttgatttaatttctggatttacagaaggagacaagggcaaagtttttctcaatgataagaatataacaaacagccaaccatatacaattgctcgagaaggtatggttcgaacatttcaattaactaaagtttttgacagaatgacagtagttgaaaatatgatgttttcaggctcagatctaaaaaatgattcattatttagttcgtttatacaactgccagctcaaaaaaagaaagaaaacttattaagaaaaaaagctttcgatatcatgaaagacttgaacattgatcatatggcagattcttatgctagggaattatctggtggacagaaaaagttattagagttaggaagatcaattattaatgaaccaagcattcttcttttagatgaaccattagcaggtgtaaatccaaaattagctgaggaaatattatcaataattcaaaaattatcagacagcggtataacaattttaatggtagagcacaacattgaggcagtgatgaaaatttcggagcgcgtagtagtttggcagaaggagct

SEQ ID NO: 269812 - DNA, 1840 bp, Unknown
  Bacterial polypeptide expressing nucleotide sequence isolated from the Sargasso Sea
atgacgcccggggcacgtaccgcaaaccgccgtggggtcggtccgaaatgggccggccagatgggccagcacttcatcaggatgctcatgacaccgaataccgcttccagccccgcgctgccgccggacgaaaaagtctccgcctggagcctgatcaaaccttactgggtttccgaagaacgaaaaacggcgtgggggctgctcgtcgcgatcatcgtgatgaatctgctcgtcgtgtggatcaacgtgcgcctgaatcgctggagcgccgacttctacaacgcgctgcagaccaagaacgtgcacgactttccgcacctgctgatggtgttcaccgggctcgcgttcggcttcatcatccttgccgtgtacggccgttatctgcgccagatgctcggcttccgctggcgccagtggctgaccacgcgttatctcaacgaatggctgcgcgacagcgccttctaccggatcgaacgcgaccggctcgccgacaaccccgaccagcggatcagcgacgacctgcaatcgttcgccaccaccacgctctcgctaacgctcgacctgctctccacggtcgtcacgctggtctcgttcatcacgatcctgtggtcgctggccggcgcgctgaccatttcgctcggcggcatgccaatacaggttcccggctacatggtgtgggccgcggcgctctacgccgtggtgggctcgctgatcatccagaaggtcggccacccgctcgtgccgattaactaccaggcacagaaagtcgaggcggatttccgtttcggcctgatccgccttcgtgagaacgccgaacagatcgccttctataacggcatggaaacggagaagacgaacgcgcacacgctgttcggccgtatccgcgacaactggtggcaggtgatgaagtacaccaagcggctcaccttcgtgctgagcttctacggtcagatcgcgatcatattcccgatcgtcgtcgccgcgccgcgctacttcgcaggcgctttctcattcggcgtgctgatgcagatctcgcaagcattcggcaccgtcagcgattcgttttcgtggttcatcaatagttacggcacgctcgtcgagtggcgcgcaaccgtgaaccggttgcgtgaattcaagcgcatcgtgcatgcgccgcgtctgaaggagtccgtgtcgccggccaccgcgcatggcggcatcaacctgcatttcgtcgatgaagaccggctttccaccgacggcctccagcttgcgctgccgaacggcaacccgctgtcgcgcatccgcgatatcgcgatcacaccgggctcgcgctggctggtgcggggtccgtccggctccggcaagagcacgctgatgcgcgcgctcgccggcttgtggccgttcggcgacggctcgatcgacgcaccggtcaacgcacgcatgatgttcatcccgcaggtcagctacatgccgatcggcacgctgaaggccgcgctcgcctatccgtcccccgcggacacctacaccgacgaagaatgccgtgaagcgctcgtcacctgccatctttcggaatacgccgagcgcctgcaggaatcggggcactggacgcgcatcctctcgccaggcgaacaacaacgcctcgccggcgcccgcgtgctgttgcacaaaccggactatctgttcctcgacgaagcgaccagcgcgctcgatgcggaaaacgaagcacgtctctatcacctgttcaccgaacggctgccgaaggcggcgatcgtcagtgtcgcgcatcgcgaatcgctggcggcgttccatggcgacacgctcgacgtcgagcgttcgggcgaaccgatcgccgcataaa

SEQ ID NO: 269813 - DNA, 391 bp, Unknown
  Bacterial polypeptide expressing nucleotide sequence isolated from the Sargasso Sea
atgcttagtgtaaataatttgtctgtgaattatgggtctacccgcgttgtcgacaagttaaatcttgagcttggacaagacgaaatcctgatgctggtggggccaaccggctgcggtaaaaccaccattttgcaagcgttggctgggcttattcctatttcagaaggtgctatgagcctaggtgaatgggaaagtacagcaaacaaacatgttccgcctgaaaagcgtaacgtaggtatggtgtttcaagactttgcgttgtttcctcatcttaccgttcagcagaacgtttgctttcgtttaaaagacactaagctggccgatcattggcttcaattattaggcctagataacttccgcgatgcaaaacctgcacgtctttctggcggtc

SEQ ID NO: 269814 - DNA, 664 bp, Unknown
  Bacterial polypeptide expressing nucleotide sequence isolated from the Sargasso Sea
atgatccttgaagtaaacaaactaaggaaagaagtctcttcaggagatagtaaattagtcatactggatgatgtgagtttcaatcttctcgaaggccaatctttggcaataactggaccatctggatccggaaaatcaacattactaggtcttctagctggactcgataccgccaccagcggtgaaatttaccttaatggagagggcttacatgaattagatgaagagcaacgagcgcttttaagaaaagagaaagttggttttgttttccaatcattcgaactcctaccaagccttactgcgttagagaacgttatgctgccttctgagctaaaagatgaagacgaaccagaaggaagagcaaaatatttcttggatagagttggattaaaggaaagagaacaccactatccaaatcagttatccggtggagagcagcaaagggttgctattgcaagggcattcgcttgctctgcaaaaatattatttgctgacgaacctaccggcaacctagatccaaagaatggagaaatggtttctgatcttctttttgaagtcaattcagaaactgacaatgcattggttgtagtgacgcatgatcatgatctagcagataggtgtgataaaaagattaatcttaaattaggaaaaatagttgaataat

SEQ ID NO: 269815 - DNA, 979 bp, Unknown
  Bacterial polypeptide expressing nucleotide sequence isolated from the Sargasso Sea
aatttttggaataatgctttaaaacttctacaaaattcaaacggacaagttgatgcaaaagcttttcaagacgctggttgtattgttggcgtaaataacgcttcttttggagtaaaaaaaggtgaaatgatggtagtcatgggattatcaggctcaggaaaatcaaccttacttcgatgcatatcaagactgactgatgccactgctggaaaaatatttattgatggtgaagatttgttgtcaatgaatagcaaacaattaattgaattacgaagaaataaaatgggtatggtatttcaaagttttgcacttctacctcacaaaaccgttattgaaaacattgcctttcctcttcaagtaaagggcactaatacaagagaaagtatggcaaaagctttagagatggttgagttagtaggattaaaaggtagagaaaattattttccaagagagctttcaggaggacagcaacaaagagtaggaattgctcgctcactagcagtagagcctgatatttggtttttagacgaaccgttttcagctcttgatccccttattagaaaagaaatgcaggatgaatttttaagattgcaagcagttttaaataaaacaattatgtttgttacacatgattttgatgaagctcttcgtttagcagatcgtattgcaattatgaaagatggaataatagagcaattagatactcctgataatattgtactaaacccagctactgaatatgtaaaaaaatttactgaagatgtacctagagaaaaagttcttaaaattgaatctattatggataattatgatccaaataatgcaagctctactaaagtatctaaagatgcaattatagaaacgttagctgaatcaattcttaatagcaaagaaatactcactgtagttgataataataatgaaattgtaggttctttaaatcccactaaagtaattaaagtaatttttggaaaataat

SEQ ID NO: 269816 - DNA, 1066 bp, Unknown
  Bacterial polypeptide expressing nucleotide sequence isolated from the Sargasso Sea
aatggctaaaattactttaaaagatctaagtcatagctatttagaaaagcaaaatagtaatgccgactgggctcttagagaagtcaacattgattggaaagatggtggagcatatgcgcttttaggtccatcaggatgtggaaagacaactttattaaatattatttcaggcttgttaaaacctacaaaaggcagcgtgttgttcgatgatagagatataacaacatttaatcctgttgaaagagacattgctcaaatatttcagtttccagttatttatgacaccatgactgtttatgacaacttagcgtttccattaaaaaatagaggtctttcagaatcagaaatatcatccaaagtaaaagagattgctgaaatgcttgagttaacatcaactttaaataatagagcctctggtttaacagctgatggtaagcaaaaaatttccttaggtagaggacttgttagatcagacgtaaatgtaattatgtttgatgaacccttaaccgttatagacccacatttaaaatggattttaagatctaaattaaaagaattacatcaaaaaattaatcgcacaatgatttatgtaacacacgatcaaacagaagccttaacttttgctgatcaagttgtggtaatgcatgaaggacaaattgttcaaactgggacaccagttgagctttttgaaaaacctaaacacacatttgttggacattttattggttcacctggaatgaatatccttccatgtgaaataaaaaatggtgaagttaattttagtggtcaaaaaattcaaagtcataagactataaaaaaatcaagctttaataaaactcaattaggtataagacctgagttcattaatttttctaataatggaatcccagttaagataaaaagagtaagcaatactggtagacataaaattattgatactgaaagcagtggaggaaatataaaaattttatcaaattcttctaccgaaattccaagtgggagcgctcatataaccttcaatcaaaaatatacttatgtttatgaagataactggatcattgaataa

SEQ ID NO: 269817 - DNA, 1519 bp, Unknown
  Bacterial polypeptide expressing nucleotide sequence isolated from the Sargasso Sea
gttgcgactagagaagattagtaaaatttatcctactggcgaagtcttgaaagatgtcagttgggaaattagaaatggagagagaattggtttggttggagtcaatggagcaggaaaatcaacacaattaaaaattattgctggattagaagaagcaactgatggatctttgattagcgaaggggatccaactattgcatatttaaaacaggaatttgatgttgatctttcaagaactgttagagaagagttatttgttgcatttaaagaagcatctgatttacttcacagtcaaaaattagttcaagaaaatatggaatctgaattagcttctaaagatttagattacctagatttattaatcaaagaattaagcgtgattcaaagcaaatttgaatcaataaatggttacgatttagaatctaaagttgaaaagttattacccactattggtttcaatcaaaatgaagcagacagactagttggagacttctcgggtggctggcagatgagaatagctttaggaaaaatcctattacaaagtcctgatttattgttacttgatgaaccaactaatcatttagatttagaaacgattgaatggctagagaattatttacttaatcagaaaattgctatggtaattgttagccatgatagatctttcttagataaagtttgtacgagaattgttaataccgagcgaggtaaatctaaaagctaccttggaaattatacgtcatatcttcaacagagagattttgaattggaatcaacaaaagttgcatacgagaaacaacagaaggatatacaagttcaaaaggcatatatagaaagatttcgagcaagtgctacaagaagtacacaagctaaaagtagagaaaagttattagataaagttgaaaagataaaagctcctgagaataacttaaaaggacctaattttaaatttttggaagcaccccgtgctggtagggatatcttaaatattaaggatttatcccatagctatgaagataaaattttatttttaggagcctttttagagcttgagccaggagaaagaatagcatttttaggtccaaatggttctggtaaatctactttactgcgactaattatggggttagaagatcctgatgaaggatctattacgataggaaaatataatattatacctagttattttgaacaaaatcaagcagaggccttagagttagataaaacagtaattgagacaatttctcaatctgtacctgattggacacaaacagaaattcgttctttactgggaagctttggtttaactaatgattcggtttttaaggaggtcagtcagattagtggaggagagaaagcaagacttgctttagctttaatgattattaagccgtcaaatttgcttattcttgatgaaccgacaaatcatttagatataccttcaaagcaaatgctagagcaggcattatccaattataatggcactgcattaatagtttctcatgatcgatattttatt

SEQ ID NO: 269818 - DNA, 296 bp, Unknown
  Bacterial polypeptide expressing nucleotide sequence isolated from the Sargasso Sea
tagctactcaaccagacttcttgtctgtgacgaacctacatcagcattagacgtgagcattcaagcacaaatattaaacttattaaaagatcttcaagaacagttaaatctcactattttatttataagccatgatttaccggttgttagacaaatgtgtgataaaatagctgtgcttaaagacggaaaattatgtgaagtgtcagaaacagaagagctgtttaaaaatcctaaacataattatactaaagaactactaaaattaatgccaaaaattgagtcaatttataactaaa

SEQ ID NO: 269819 - DNA, 818 bp, Unknown
  Bacterial polypeptide expressing nucleotide sequence isolated from the Sargasso Sea
aatgaatttaatcggaaaaaatataacttacaaaccagataaccagttccacttgaatgatgtatcattcgatttcaaaaaaggaaatctttacaccattttagggagaactttatctggaaaaacgacatttttaaaaacaattgcaggcttgcttaacccagatactggagaattattttttgaggacaaagattttagcaaaattcctgtttgggaaagaaatgtggcaatggtttatcaacaatttattaattaccctcatcttaatgtttatgagaacataatttttccgcttaaacaaagaaaactaagcgaagagcaaattaaaatggatgtagaagatgcacttaagaccgtaggattagttggttttgaaaatcgtaaaattcaagaattatcaggtggtcaacagcaaagagtagccttggccaggtctcttgcaaagaaagcaaagatacttcttctcgatgaaccattggttaaccttgattataagttaagagagcaattaagagaggaatttaaaagaatattctctgcgggtctgtctcaagatacaattttaatatactcaacaactgatcctcaggaagtaatggagttaaatggtgaagtaatagtattacacgagggtaaagttttacaaaaaggagatgccaaagaaatatttgaaaatccaaagaaccttagagtagcagaaatctcaaacgatccgccaatgaatattttaacaggcagtaaaagttcagatcagttaacctttgaaaatatttcaataaatttgccagcatatttaaaagatttaaagagtcaaa

SEQ ID NO: 269820 - DNA, 560 bp, Unknown
  Bacterial polypeptide expressing nucleotide sequence isolated from the Sargasso Sea
tttgcactttcaattacattgcgggtgcggccgcctattcgcaccgcccccttccaatcaaaaaccggtgtctgccatcgtcgaatccatgcagccaatcgtctcggtcacgaatctgtcgaaaacctatgccacgggttttcatgcactcaaaaacatcaatctggcgatcaaccgcggagaaatcttcgccttgctgggccccaacggcgcgggcaaaactacccttatcagcatcatctgcggcatcgtcaatgcgagcgagggcagtgtgacggtggacggccgcgatatcgcgcaggactaccgtggcgcacgttcgctgatcgggctcgtgccacaggaactcaccaccgactcgttcgaaaccgtctgggcgaccgtctcgttcagccgcggcctgttcggcaagccgaaaaaccctgcttacatcgaaaaggtcttgcgcgatctgtcgctgtgggaaaagcgcaatagcaagatcattacgctgtcgggcggcatgaagcgccgcgtgctgatagcgaaggcgctctcgcacgaaccgcgcgtgctgtttc

SEQ ID NO: 269821 - DNA, 859 bp, Unknown
  Bacterial polypeptide expressing nucleotide sequence isolated from the Sargasso Sea
tatggctaatttaaaaaatctttcggaacgcattaaatcagtgacaagcattcagcaggttacaaaagctatgaaaatggttgctgcagcaaaggttaaaaaagcgcaggataaaatggaaatatcaagaccatattcaaaaaatacccaagagcttatttgtagaattcttcctcaaataagttcaactgatatttctcttgttgaaaaaagagatataaaaaatattggtataattgtgatttcgagtgatagaggttttgctggttcatttaattcaagcgttataaggaaagtcgaaaaagaaattgaaaaaattggaaaagataaagtgtatttattttgtattggaaaaaaatcatcagaatatttttcaaaaagagattttaatgttaaagaaacattttttgatttttggaaagatatgaattacgaaacagcttctgaaatatctaattcttttataagagcatttgaacaaaatgatattgatgaagttcatgtagtctataacagatttaagacactagcttctcaagaattaatgatggagaaagttttgcctgtagattttactaccgattataatgctaaagattataattatgattatgaaccaggacaaaaagaaatagtttcaactctcattccgaagcatgtaacggtacagatgtggcagcaacttttagagtcttatagtagtgaagaagctgctagaatgattgctatggataatgcaacagagaatgcaaaagaaataattaaagaattaaagttagaatttaacaaagctcgtcaagctgcaattactacagaaatgcttgaaattgttggtggggcggaagcattagtcgattaa

SEQ ID NO: 269822 - DNA, 730 bp, Unknown
  Bacterial polypeptide expressing nucleotide sequence isolated from the Sargasso Sea
atgatcaatccaatagaagtaaaaaatgtttataaaaactactctgataaaaatgcagtaaatggaataaatttttcaatatcagataatgaaatcgtaggattactagggcctaatggatgtggaaaaactacaacgatagctattatgctcggtttgttgagagcatcatccggtcaagtttttattaaaggaaaagatatcgaaaaaaatagaattgaacttctgcataagatgaattttatttcaccatatattgagcttccaaaaaaattaacagttaaagaaaatttaattgtttatgcgagattatataatgtaaataaactaaatgatagaatagattatttagtagaaactttaaatctaaaaaattttattaatcaaaaaactggagaattatcctctggtcagaaaaatagagtaagtttagcaaaatctttaattaatactccatcaattttattattagacgaacccactgcttcactcgacccagatactggagattttgttagaagttttcttgaaaaatatataaaagaaaatacagtttcaatattactggcctcccataacatgaatgaggtcaaaagactttgttcaaatgttttaatgatgaaaaatggaaaaatagttgatgaaggcaccccaaatcaattacttaaaaaacatggtcaagataacttggaggaagtttttttaaaattatcaagaaatgaaaaatagt

SEQ ID NO: 269823 - DNA, 598 bp, Unknown
  Bacterial polypeptide expressing nucleotide sequence isolated from the Sargasso Sea
cctgcagcaggtcagcaaagattttgggatcaagacccttcttgatcaggtcgatctcgagatcgggcctcaagatcgcttgggactcatcggcattaatggctcggggaaatcaaccctgctccgcgtgattgccggccttgagccagtgggggatgggcgggttcaaatcaatccacgcaaccgcgtggtctacgtggaccaaaaccccagccttgatcctgaacgaacagttctcgagcaggtgttcgctgattgcggcgaaaagatgcagctggttgagcgctacgaaaccgtcagccaacagctcgagcaacaacctgatgatcaggcgctcctaggtgagctcagccagatcagcaatcgcatggatgaggccaaggcctgggaacttgagcgccaatgccaagaggtgctcagccggctgggcattcgcgaccacaaccgcaaagtgggagagctctctggtggctaccgcaaacgcttggctttggcctccgcgcttgtagcagaaccggatggactactgctcgatgagcccaccaaccacctcgacgccctagccaccgagtggctccagggttttctgcagcgcttt

SEQ ID NO: 269824 - DNA, 1861 bp, Unknown
  Bacterial polypeptide expressing nucleotide sequence isolated from the Sargasso Sea
tctgaatgaaaaaagtaatgtccttaagtcaatttttacctttcataacagacatatatcttctggctctattaaagaagtaattaattcaaagccagatataaaaagttttgaaacattcaaagaaatcattgacgaattagagtttgagcttgttgaattacaaacttctgacaaatcgaatattgaaaaactagataacgctatatgttttttcgaggagggcagctttgctttgatttccaccaggcaagatggcactattagcctatcctttaaaagcaagcgcaaagtggaagtttcaatcgatgatttggttaaaacaaaaaaaataaaaatattttctgtcttccctaaatttgaatctagtaaaaatgtaaataaccgtattaaattgctcaatccccttacaaatctcggtggcataaatttcttttgggttgcccttgcctctttcacatcgaatgttttgggtctcgccacttcaattttcattatggttgtttacgatcgagttctcccaaatcaagctgatcaatctctttatgctctggcaataggtgtcgggatcgccatagtttttgaccagctattcaaatcagcgcgaggtgcaattttagaaaatagtgccgtcaataaagataagaaatctaatgaccaaatttttgaacaattcgtggaaactaaaacagatttaacaaaacgctctattggatcgttaactacgatttcaagagattatgaaacatacaaagaatttgtttcttcagcaggcctcattttgcttattgatctaccatttattttagtatttgttttagtaatctactatatcggtgatctgttgtttttagtccctttgatttccgtccctgcggtaattattggtattttaataatgcagccttttttgttccgcacctccaagcgtgtttccaaagtaaatcaaagtaaacaaggtcttctgattgaaatcttatcaggtttggacgctcttagagtaaatggagcatattccttcattaaaaagaaatttagtgcacaggcagacgattattcaaaagttatcaataacgcaaaacgtttcaatcaaatcacaaccaactatgtcagcattatccaacagctcgctcaaatcgctattatagtttatggtttccatttgtttgtagaacaaagaatatcaatgggggctattatcgctacgatgatcttatcgggcaaaacgcttggccctttagctaaaatggcccaaacactcggtcgagcaaatagtgcctacgttgcgcgaaataatttagtcgaatttttttctcaacaacggcgagagcgtttctctaaagttggcctagaaaatgtcagaaaaaatttagcgatagacgtacaaaatgcctccgtaaaactgtccgcagacagtaaaccaatttttacaaacctttcgtttgatgtaaagaaaggtgagaaaatcgctgttattggtagatcgggtgccgggaaaacaacactcctaagaaccatttgtgggcttctagagcccgagaccggatccgttcagatcaatggcgaccaggccagctcaattccgagagatgaattattcaggcacgtgggggttgttcttcaagaaagttggttgttttctggcactctgagagacaacttaacgctcggctatgaagattttaatgatgaacaaattagcgaagcgctgaacgaagcaggagctcattttctaggagaaaataaaggggaaatgcttgagtttccaatcttggatagaggatcaaatctatccggtggtcaaaagcaagctatctgcatcgctagagtacttttacaaaaaccatatatcttattactt

SEQ ID NO: 269825 - DNA, 385 bp, Unknown
  Bacterial polypeptide expressing nucleotide sequence isolated from the Sargasso Sea
tatgggagcaattgatatcaaatcagctgggaagatatacccaaatggcactagagctttagaagatgtaagtataacaattaatgacggtgaatttgtagttcttgtcggtccttcaggatgtggaaaaactacattacttagaatggttgctggtttagaagacataacagagggtgaaattgcaattggggacaaaacagtaaacgaagttgcccccaaagatcgagacatcgcaatggttttccagaattatgctttgtatcctcatatgtcagtttatgacaatatggctttttctctgaaacttagaaaattgccaaaagatgaaattgaacaaaaagttaaagatgctgcaaaaactttagaaataagtgaactttag

SEQ ID NO: 269826 - DNA, 815 bp, Unknown
  Bacterial polypeptide expressing nucleotide sequence isolated from the Sargasso Sea
catgcctcttaatccatcgttcccacctagctctaaaattacaagatttggtttatgttctttaagcaattttggaagtctatatagacctccagatgttgtatctccactaataccagcattaatgattcttatattaatctcgagagcatttaaatttctctccagaactgatggccatgattcctctatttttaccccatacccagcactcaaactatctcctaaaacaacagcaatatattctttgtttttgaattgctcggatgaatttactgacgaagaaagtgtcagtagaatacctaaaagcaaagctatggatattttgaaaaattttattttagaagttaaaaacatcaccaaagaagttaacagcccagagggtcttttgacaatagttaaagatattaatttatcagttgagcaaggcaagcctatttcattagtgggcccatctggatctggaaaaactacacttttagccatcatggcagggcttgatttacccacctctggaactgtcactctgatgggctctcaaattacaactcttgacgaagacaagagggcacaaattagaggtaaagacgttggctttgtttttcagtcatttcatttgatgccaagattaactgctcttgataatgtaatgttgcctcttgagatttcaggggatccttattcaatggataaggctcaagaagcgcttaagcaagttggtttatctaaaagggcaaagcattttgcaacccaactcagtggtggtgaaaaacagcgtgttgccattgcaagatccattgttaataaacctaaaa

SEQ ID NO: 269827 - DNA, 340 bp, Unknown
  Bacterial polypeptide expressing nucleotide sequence isolated from the Sargasso Sea
aatgtcaaaaataattgaacttaagaatgtaaataaatggtttgataagtttcaagtcctaaaggacattgatcttgaagtagctccacaagaaaaaattgttatatgtggaccctcaggatcaggtaaatcaactttaataagatgcataaacagactagaggagcatcaagaaggaaatattattgttgatggtacagagctatctgagagcactaagaatattgaaaaaataagagctgaagttggaatggtgtttcaacagtttaatttattcccccacttatctattttagacaattgttctttagcacctatatgggtaaaaaaacttccaaaa

SEQ ID NO: 269828 - DNA, 709 bp, Unknown
  Bacterial polypeptide expressing nucleotide sequence isolated from the Sargasso Sea
atggccttttttgagggaaataaaatgaccgggggttacggagatggcccagatatcatcaattcttgtagcattaatgtcaataagggtgaaatcgttgcaatattaggtcctaacggagctggaaaatcaacagcgatgaaagcaatgcttggattattaaaacttaagtcaggtaatatctcaatcggtggtgaagatatctcaagtttatctcctcaggaaagagtaaaaaaaggaatttcatttgtaccccaaactagaaatgtttttgcagaacttactgttagagaaaatttagaaataggcgcttatttgagaacagatgatatttataaagtaattgatgagatttatgatctttttccaatacttaaagaaaaaaaagatcaaatagttgggcaactatctggagggcaaagacaacaagtagctttaggaagagccttaatgataaaaccttctgttctaatgttagatgagcctacagctggggtttcgccaatagtaatggatgaattatttgaacatattctaagagttaaagagactaaagtaggaattataatggttgagcaaaatgcaaaacaagcgcttagtatttctgatagaggttacgtattagtgactggtgaaaataaatttgagggttctgggaatgaattattaaatgatccagaggtacgaagatcttttttaggagcataat

SEQ ID NO: 269829 - DNA, 337 bp, Unknown
  Bacterial polypeptide expressing nucleotide sequence isolated from the Sargasso Sea
actgcttgaagaagcccaaaggctgctaacggcattagggctgtccgaaccgctcaaggagggacgtccggtggtggaattgagtgtcgggcagcaacagcgtgtggctgcggccagggccctcatcggccggcctgagttggtgattgcggatgaacccacttcagccctcgactcggatctcagagaggtgttcctcaatctgctgtttgccgaatgtgacaaggctggcagtgccctgctcttcgtcagtcatgactcggaactgagccgattctttggaagaagtctttctcttcctcagatcaacagggtttccagtttggaggcagcatga

SEQ ID NO: 269830 - DNA, 961 bp, Unknown
  Bacterial polypeptide expressing nucleotide sequence isolated from the Sargasso Sea
tatgagtaataatttaattgaagtaagaaatttggtaaagcattttgaagtatcaaaaagtgttttctcaagaaataaaaaaattgtaaaagctgttgatggtattagttttgatataaaagctggtgagacccttggacttgttggtcaaagtggttgtggaaaaacgacaactgctcgatctctttgtttattagatccaaaaacttcaggaagtgttaatttttataatcctgatacccaaaatatggagtctattgacaatattgatgaagatggaatgcgaatatttcgaaggaatatgcaaatgatttttcaagatccttatgagtctttaaatccaaggtggactatcaaagatataattaaagaacctttagatattcataacattggttcatttgacgaaagagaagaagctgtcatggaaattctgaggacagtaggtctaacccctccagaaaattatttaaatcgttatcctcacgaaatatctggtggtcagaggcaaagagtatcaatagcaagaacactagtaatgaaacctaaatttgtgatttgtgatgagccaacatctatgctggacgtttcaatacgaatatcaatcatggatttaatgcttaatctagcgaaagaacttgatgtttcttatttatacattacccatgatctcgccgttgcaagatatatgtgtaacagaatcgcagttatgtttaatggaaaaattgtagaaatagctgaaacagaggagctacttcaaaaccctatacatccatatactaaaagattaatttcgtcaattccaattccagatccaaaatatgtcagggaaaggtatgaaattaattttgatgaactagataaaatcgttaaagataatcctaatgaacaaatggttgatgtaggtaataatcattttgttgcaactcatgagacgaaggaatatttgattgaatcttaa

SEQ ID NO: 269831 - DNA, 700 bp, Unknown
  Bacterial polypeptide expressing nucleotide sequence isolated from the Sargasso Sea
ttgattgagataaagaatttacataagtcttatgaaatgggggctaattcactgcatgttttaaaaggaattaatttttctgtaaaagatggagagttagttgctatcatgggatcttcaggatctggtaaatcaacacttctaaatattttaggaatgcttgatactgctgatgccggaacctatcatcttgataatataaaaattgcaaatatggatgagaccaaggctgcaaactatagaaataaatttttaggatttgtttttcaatcatttaatttaattaattataaagatgccctagagaacgttgctttgccactttattatcagggtctaccaagaaaagataggcaaaaagtaggattagaatatcttgataaagttggacttaaagaatggtcagatcatctcccgagtgagctgtcaggtggacaaaaacaaagggtagcaattgcacgagcgatggcgtcaaacccaaaagttcttcttgctgatgaaccaacaggtgctctagattcaacaacatcaagagaagtaatggccttaatacaaagaataaataatgaaggaaaaaccattcttgttgtaacccatgaaaatgatattgctaatatgtgtaaaagaattgtacaccttaaagatggaattatagtagaggataaaaaaattaaacaaaatataattaaagatgtttaat

SEQ ID NO: 269832 - DNA, 682 bp, Unknown
  Bacterial polypeptide expressing nucleotide sequence isolated from the Sargasso Sea
atgactgaaaaattaatttctattagtaatttatctaaagaatttttagttaataaaaataaaacctgtattttaaaaaatataaattttagtattgtaaaaggtgatattatttctatagctggtccatctggatcaggtaaatctacatttctaaatatcttaggtttattagattccgtatttagtggaacttatgattttttagattttaatgttaatcttctaacaaataatgaaaaaaatattattagaaataaatctattggttttgttcatcaatttttttatttaattcctgaattaactgttttagaaaatgtatctttacctaatttaatacttaataatcagatgaggaaatctaatgatttagctaaagaaataattgtaaattgcggattagaaaatcgaatgtattctaagccaacctatttatctggaggtgaacagcaaagagttgcaattgcaagagctttaataaataatccagaacttataattgctgatgaaatgacaggaaacttagatgaaaaaacagctgatactgtatttgaattttttttagataagatatcttctaataatcaaacacttatctatgttactcataacgaaaaatatgctaaaaaagctaatacagcctttgaaatatcaaataatcaaattcataaaatttaat

SEQ ID NO: 269833 - DNA, 1594 bp, Unknown
  Bacterial polypeptide expressing nucleotide sequence isolated from the Sargasso Sea
tttgatcacaacagcgaatatcaccatgcagtttggcgctaagccactgtttgaaaacatctcagttaaattcggcggcggtaaccgttacggtcttatcggtgcgaacggctgcggtaaatcaaccttcatgaagatcctttgcggtgatctagagccgagcagcggtaacgtatctttagacgtcaatgagcgtctgggtaaactcagccagaaccaattcggttacgaggaatacacgctgattgacaccgttatcatgggccaccgtgaactgtggaaggtcaagcaagagcgtgaccgtatctattctttacctgaaatgagcgaagaagacggcattgccgtggcaaaccttgagatggaatttgccgaaatggacggttacaccgccgaatctcgcgctggtgaactgttacttggcgtaggtatcggtatcgaaagccatttcggtctaatgtctgaaatcgccccaggtttaaaactgcgggtattattggcgcaggccctcttctcagatcctgatgtgctgctgctcgacgaacctaccaacaacttggacatcgacactatccgttggttacaggacgtcttgaaccaacgcgatagcaccatgatcatcatttcgcacgaccgttacttcttaaactcagtctgtactcatatggcagacttagactacggtgaactgcgtgtttacccaggtaactacgacgaatatatgctagcagcgactcaggcccgtgagcgtttgctagctgacaacgccaagaagaaagcgcaaatttctgagctacaaaccttcgttgctcgcttctctgctaacgcttctaaggcaaaacaagcgacttctcgtgcccgtcaaatcgataagatcaagctggatgaggttaaagcctctagccgtgttaacccattcattcgtttcgagcaggaaaagaaactgttccgtaatgcgttagtggttgagaatttggctaaaggttatgacacgccactgtttaaagacttaaacctgattgtcgaagtgggcgagcgtatcgctatcctcggtgagaacggtgtaggtaaaaccacgctactgcgtactttaatccatgatattccacaggatgaaggccatatccaatggtctgaaaacagcaatatcggttactacgcgcaggatcatgagtctgattttgaaaacgatatgaccctcttcgagtggatgagccaatggcgtaaacctgaagatgacgaccaagcggtacgcggtatcttaggccgtatgctgtttagcgccgacgatattaaaaagtctgtaaaggtgctgtcgggtggtgaaaagggccgtatgttatttggcaagctgattatgcaaaagccaaatatcctgatgctcgacgaaccgactaaccacatggacatggaatcgatcgaatccttaaacaacgcgctggaaaaatacgaaggcacgctgttgtttgtgagtcacgaccgtgcattcgtatcgtcactggccaaccgtatccttgaaattactcctaacggtgtgaatgacttcaagggcacctatgatgagttcctcgcgagcaagggcatcgaaggctaa

SEQ ID NO: 269834 - DNA, 367 bp, Unknown
  Bacterial polypeptide expressing nucleotide sequence isolated from the Sargasso Sea
agactctacgaattcgtagataaattaactggagagttgtcctctggtcaaaaaaatagggttagtcttgcaaagtcaataattaataatccaagagttttacttcttgatgaaccgacagcatcacttgatcctgaaacaggtgattttgttagaagttttttagaggaatatcaacaggaaaataaaacatcaattctattagcatcacacaatatggcagaggtagagagactatgttcttcagttttaatgatgaataaaggatcgattattgatgagggtagaccggaggaattaattaaaaaacatggaagaaaaaatatggaagaagtttttttaaaacttacaagggaaaaagtatgaa

SEQ ID NO: 269835 - DNA, 721 bp, Unknown
  Bacterial polypeptide expressing nucleotide sequence isolated from the Sargasso Sea
atgcttaaaatttctaatgttgaaacattttacggtaagatccaagctttaagaggtgttgatcttgatgtgaatgatggtgaaattgtttctttaattggctctaatggagcgggtaaatcaactttacttatgacgattagtggagtgaataaagctaaaagaggaaatataattttcaatggtaaaaatattgaaaaccaagcacctcacaaaattgtagatatgggtatttgccaagtaccagaaggaagaagaattttttcaagactaacagtagaagaaaatttaagattaggagctcatgccaacgaaaaaggtaagtattttgaaaatgatataaaggaagtttatgatttatttcctgtattaagcgatagaaaaactcaaagaggtggaacactatctggaggtgaacaacaaatgttagccattggaagagcactaatgagcaaacccaaagtacttttattggatgaaccttcgcttggaatagctcctaaattagttaaccaaatttttgtttcaataaaaaatattaataaagaaaaaaatgttactatttttttagttgagcaaaatgccaaaaaagctttggagcttgcagacagagcatatgttcttgtaaacgggaaggtgaccataaagggtcctggacaagagttacttaaaaataaagatatacaagccgcttacctcgaaggagggtcaaaaaattaac

SEQ ID NO: 269836 - DNA, 745 bp, Unknown
  Bacterial polypeptide expressing nucleotide sequence isolated from the Sargasso Sea
atggaagaaataattgaagttaataatgtttctaaatcgtttggtggggtcaaagcaaatattgatatatcactaaaagtaaaaaaaggttcaataactggtattataggtccaaatggatgcggcaaaacaactttatttaattctattgtaggctatcaccctattgataatggttcgataatttttgataataatgaaatttcaaagttacttgtcggggatatagcaagacttggaatgttaaggacatttcagcaaactaggatatattcaaaaatgaattgtgtggataatatgcaaatatctgtttcacaccgaaaagactctaaagactcaatgtttgctagcagaaaaggagaaattaaagaaagggcggaaaacttacttgaatttgtaggcctatattcaaagcgaaatcttatttcaggagatctttcttttgggcaacaaaagctactagaatttgcaatggcattaatgaatgatcctaaagttttgcttcttgatgaacctactgcgggaattaatccaacattaattaatggacttattgatagattaagaaaagcaaatgaagaattaggtattacattatgtgttatagaacataacatgagagtaattatgaacttagcttctcatatttattgtttggcaaatggtaaagttcttgccaatggctcacccagtgaacttcaaaaagatcaacgggttattgatgcttatttagggggtcattaga

SEQ ID NO: 269837 - DNA, 1801 bp, Unknown
  Bacterial polypeptide expressing nucleotide sequence isolated from the Sargasso Sea
attggagtccattgtgtctcaacaatcttcacacacctcggttcgccaacgggcagtattgccatggatttggcaatttcttaagccctatcgtttgcgagttgtcgcggcgattgtatttttattgatcggttctttggcttggttatctctaggtcagggcgtgcgtttgatggtggacgaaggttttattaaggataacgcccagcgactgaatgaaattattctattggtgctgctcatcaccgcagtgagtggcactgcggtgttttgccgtttttatctgatgacatggcttggggagcgtgtcagtgccgatattcggcttgcagtttataatcaattacttaaattatctccggcattttatgccaaggtgcgcactggtgaggtgatttcacgttttaccgccgattcaaccttactgcaaaccgttgtcggttcgagtctctctatggcactacgctccggcgtgacggttattggtgggctggcgatgatggggatcaccagcgtgaagatgacactgctcgtgctactggccgtgcctttggtgttggggcctgtcggtttctttggccgaaaagtgcgtaccttagcgcgcgaaagccaagatagggtggcggatctcggtgcctatgtggatgaaaccttgcatgagatccacacagtgcaggcctatggccatgaggataaggaccgcagcctgttcaatggccgtgtcgaagatgtgatgaccgccgccagcggccgcattcgttaccgcgcgctgctgatttcttcagtgatgttcctcagtattgctgccattgcgctagtgacttgggtcggcgcccacgatgtgatgtcaggtaagatgacgggcggcgaactctcagcctttatgttttatgcggtcatggtggcaggcgcggttgcgaccattagtgaagtggtcggggaaatccaacgcgcctcgggcgccgcagaacgcttaatcgaattagccgaaactgaggtcgatattccggcgccgctggtgcctaaaaccctgccagataaagtatgcggcgagctgcaactgcaacaacttaacttccattatcccgagcaaactcagttagtgctcagcgacttagaccttgtaataaatgccggcgagcgggtggctttggtcggcccgagtggtgccggcaagagcacgctatttcagttattgcagcggttttatgtgccgtcatctggcagtatcttattggatgggattgatattgctgcgctttcaccacaggatttgcgggcgcagtttgcgctggtgccgcaggactcagtgatttttgctactagtgtgctagaaaatgtgcgctatggccgcgttgatgccaacgagcaggaagtgatcgatgcttgtattgcggcccgtgcccatgagtttatcagtgaatttaatgaaggttatcaaacctatttgggtgagcgcggtgtgcgcttatctggcgggcaaaaacaacgtattgccattgcgagggccattttagccgacagacctatcctattactcgatgaggccaccagtgcactcgatgccttgagtgagcaaaaagtgaagcaggcgcttgatgagttaatggcgggtaaaactacgctgatcatcgcccatcggcttgcaaccgtaattaatgccgatcgaattattgtgtttgataaggggcgaattgttgccagtggtaagcatcaaactctaatgcaaaccaatgccttatatcgagagtttgccagtttgcagctgctaacggatgaggttaacccattgagcgagtaa

SEQ ID NO: 269838 - DNA, 1747 bp, Unknown
  Bacterial polypeptide expressing nucleotide sequence isolated from the Sargasso Sea
atgctcaccccttctcaggccggcttccggcgtctgcttccactgctgcgaccgcatctgcgtcagctgctgatgggggggctgtgcatggtgatttacgtgggcagcttcccgctgctggtgcgccttgccggtgaattgtttccggcgctcggctctcagaatctcagccgcgtcctgcagctgatcggccagggggtgctgatcttcgcggttcagaaactggcccaattcggccaggactctcttttggccgatcctgcccttcgggtcagccagcggttgcggcgggagttgttcagcacgctgcagaccgttgagctgggtgctctcgaaaagctgtccgccggggatctcacctatcgcctcaccgaggatgcggaccgcgtcagcgaagttctgtacaagagcatccacgacacagtccccagcgtcctgcagcttcttgtggtcctgggaaccatggtctggctggactggaagctgaccttggcgatcctgctgctggcgccgttgatcatttggttgatcagcctgttcggggcgaaggtgatggtggccaccgaacgcagtcagaaaaaggtcagtgaactggccggtcttctcggtgaggcgattgaggggctcccgctggtgcgggcatttgcggctgaaccatggctccaagagcggtttgagcaggaaattgatcagcaccgacaggccaggcagcgcacttacagccttgtggctctgcaacatcccgttgtgggaatcatcgaggtgatcggcctgttctcggtgctgggcctggcggcctggaggattcagagcggtgacctcgacatcgcaggtctcagcagttatctgacgggcctgatcgttctgatcgatccaatcgcccacgtcacgaacaacttcaacgagttccagcagggccaggcgtcgctgaggcgtctgcgggagatcgaacgggagccgcgcgagccggtggatccccccgatgcggtgaatcttggtcagctgcggggtgacctcaggctggagggggtgagttttggctacgccgtcggcgatccggtgctgcagcagctggaccttgatgttccggcggggacggtgatggctctggtgggaccgtccggtgccggcaaaagcacactgttctccctgctgttgcgtttcaacgccgcccaacagggccgaattgtcctcgacggtcacgacctcagcacgcttcgggctcgggacctgcgccgccagctggccctggttccgcagcgcaccacggtcttttccggttccattgctgaggcgatccgtttcggacgccatgccaccgatgcccaggtgatggaggcggctcttctggccaacgcggatgggtttatccgtgatttgcccgatggttacaacacgcagctggaagaacggggcacgaatctctccggcggtcagctccaacgcatcgcgatcgctcgagcggtgctgggcaatccagctgtgctactgctggatgaagccaccagtgctctggatgcagaagccgaagcggctgtccagcttgggttgcgacgggccatgcgtggacggacggttctggtgattgcccaccgtctggccacggtgcaggaagccgatcagatcgtggtgcttgagcgtggtcgcatcgttgatcgcggcacccacgacagcctgatgcagcgcggcggtcgctaccgcgatctgtgcgagcgccaattcatccgtgatctgcagaacggttgaa

SEQ ID NO: 269839 - DNA, 928 bp, Unknown
  Bacterial polypeptide expressing nucleotide sequence isolated from the Sargasso Sea
atggagcgtgacatgccgatgcatcccgccccctcgtccgcgccgctctgcgagatcgacggcctgaagatcggctttcgcggccatgacggcaccgtcaccgacgccgtgcgcgacctgtcgctgacgctcgcccccggcgaacggctcggcatcgtcggcgaatcgggctccggcaaatcgctgacgggccgcgcgctgctcggcctgctgcccgacgccgcgcgctggtcggcccgcacgatgcgcttcgcgggccacgacctgctcgcgatgccgccgggcgaacgccggcggctgtgcggcagccagatgggcatgatcctgcaggacccgaaatattcgctgaacccggtgatgacggtcgcgaagcagatgggcgaggcattccggctgcacgagccgggcctgcgcggccgcgcgctgcgcgaacggatcgtcgacgcgctcgcggccgtgcagatacgcgatcccgcacgcgtcgccgatgcgtatccgcacgagctgtcgggcggcatgggccagcgcgtgatgatcgcgatgatggtgtcgaccggcccgcgcctgctgatcgccgacgaaccgacttccgcgctcgacgtcgccgtgtcgatgcaggtgctcgcggtgctcgacgcgatgatcgcgcggcatggcacgggcctgatgttcatcagccacgacctgccgctcgtgatgtcgttctgcgatcgcgtcgcggtgatgtatgcgggccgcgtggtcgaaacctgcgccgcgcgcgacctgcgcgacgcttcccatccctatacgcgcgggctgctcgcagcgaacccgccgctcgcgaacccgccggacgaactgcccgtgctgcggcgcgatccggcgtggctcgaacccgcgtcgcatgccggcacgccggccgatcgacaggaggcagcaagatgat

SEQ ID NO: 269840 - DNA, 859 bp, Unknown
  Bacterial polypeptide expressing nucleotide sequence isolated from the Sargasso Sea
atgaccaccaaccgacccttgctcgacgtgcagggcctgacgcgccgcttcgacggcgtgaccgcgctcgacggcgcgagcctgtcccttgccgatggcgaactgctgagcgtgatcgggccgaacggcgcgggcaaatcgacgctgttcaacctgatcgcgggcgccgaccggcccgatgccggccgcgtgacgttcgacggccgcgacatcacgggcaccgcgcccgagcgcctcgcgacgctcggcatcgcgcgcacgttccagcacggccgtgtgttcggcaacctgagcgtgctcgacaacgtgctgatcggcgcacatgcgcggctgcgcgcggcccggccgggctggcccgcgctgggtgccgcggccgaggtgctgcgcgcgctcgtgcggcccgcggcggtgcggcgcgaggaagccgcgctgcgcgacgaggcgcgcgcgatcgtcgccgggttcggcgagcggctcacgccgcgcatcgatcatccggcgcacagcctgtcgtatgcgaaccggcgtcgcgtggagatcggccgcgcgctcgcgctgcatccgcggctgctgctgctcgacgaaccgacggccgggatgaacgagacggagaccgccgagatgctgcaactgatccagtcgctgaaggcgcgcggcctgacgatcctgctgatcgaacacaagctcgaactcgtgatgcgcgtgtccgaccgcgtgatggtgctcgacaacggcgtgaagatcgccgaaggcgcgccgcgcgacgtgcggcacgacccgcgcgtgatcgaggcgtacctcggccgccggcatgcgggtggcgcgccggccgaccgcacggcacaggcggccgcatgac

SEQ ID NO: 269841 - DNA, 1861 bp, Unknown
  Bacterial polypeptide expressing nucleotide sequence isolated from the Sargasso Sea
atggtgaacaaaccgctaaccgagcctacagaatcgagtacacttcccccacgatcattatcagagtccactatgtctcacaacgctgcgaattcttcgattcgccaacgggcggtattgccctggatttggcaatttcttaagccctatcgcctgagggtggtggcggcgattgtatttctgttgattggctccttggcctggctatccctcgggcaaggcgttcggttgatggtggacgaaggttttattaaggataacgcccagcgtctcaatgaaattattctgttggtgctgctgatcaccgccgtgagtggcactgcggtattttgccgtttttatctgatgacttggctcggcgagcgggtcagcgccgatataaggctgacggtttacaatcaactgctgaagttgtctccggccttttatgccaaggtgcggaccggtgaggtgatttcgcgctttactgccgactctactctgctgcaaaccgtggtcggctcgagtctgtcgatggcgctgcgctccggcgtgactgtgatcggcgggctggcgatgatggggatcaccagcgtgaagatgacgctgctcgtactactggccgtgcctttggtgctagggcctgtcggtttctttggtcgaaaagtgcgaaccttagcgcgggagagtcaagatagggtggcggatttaggggcctatgtggatgaaaccttacatgaaattcacacagtgcaagcctatggccatgaggataaggaccgcagtttgttcaatggccgcgtcgaagatgtgatgaccgccgccagtggtcgcattcgttaccgcgccatgttgatttcctccgtgatgtttttaagtattgccgccatagcatctgtgacttgggtcggcgcccacgatgtgatgtcgggtaagatgacgggcggtgaactgtcggcctttatgttttatgccgtgatggtagcaggcgccgtcgccaccattagtgaagtcgtgggtgaaatccaacgcgcctcgggcgccgccgaacgcttaatcgaattggctgaaactgaagtcgatattcctgcgccactggtgcctaaaacgctgcccacgaaagtgcgtggtgagctgcaattgcaacagctgaattttcattatcccgagcaaactcagttagtgctcagcgatttagaactaacgataacagcgggtgagcgggtagccttggtcgggccgagtggtgcgggcaagagtaccctgtttcagttattgcagcggttttatgtaccgtcttcgggcagcattcatttggatgggattgatattgctgagctttcaccaaaggatttacgggcgcagtttgcgcttgtaccgcaggactcagtgatttttgctaccagtgtgctagagaatgtgcgctatggccgcgtcgatgccagcgagcaggaggtgatagatgcctgtatcgcagcccgtgcccatgagtttatcagtgagtttagtgaaggttatcaaacctatttgggtgagcgcggcgtgcgtttatccggtggtcaaaagcagcgtatcgccattgcgagggcgattctagccgacaggcctatcttgctgctcgacgaggcgaccagcgcgctcgatgccttaagtgagcaaaaagtgaagcttgcactcgatgaattgatgacggggaaaaccacgcttatcatcgcccatcgcctcgccactgtgattaatgcggaccgaattatcgtgttcgataagggacggattgtcgccagtggtaagcatcaaactcttatacaaaccaatgccctatatcgcgagtttgccagtttgcagctgctcacggatgaagtgagtgcgctgagtgagtaag

SEQ ID NO: 269842 - DNA, 847 bp, Unknown
  Bacterial polypeptide expressing nucleotide sequence isolated from the Sargasso Sea
tctgcgtaaaaggactgtcagctccgtgagccccactcctaccgagtcactgctggaacttcgcgacgtcgactttggctacggcgaccgcctcgtcctgtccaacctgaacctgcgcttcgggcgggggcaggtcgttgcggtcatgggcgggtcgggttgcggcaagacgaccgtgctgcgcctgatcggcggcctcgtgcgcgcacgccgcggccaggtgctgttcgacggtgccgatgtcggcgcgcaaacgcgcgacggcctgtacgcgctgcgccgcaagatgggcatgctgttccagttcggcgcgctgttcaccgacatgtcggtgttcgagaacgtcgcgttcgcgctgcgcgagcacaccgacctgcccgaagacctgatccgcgacctcgtgctgatgaagctcaacgcggtcgggctgcgcggcgcgcgcgacctgatgccgtccgaggtatcgggcgggatggcgcgccgtatcgcgctggcccgcgcgattgcgctcgatccgcagctcatcatgtacgacgagccgttcgcgggcctcgatccgatttcgctcggcatcaccgcgaacctgatccgcacgctgaaccaggcgctgggcgcgacgtcgatcctcgtcacgcacgacgtgccggaatcgttcgcgatcgccgactacgtgtatttcctggccaacggcggcgtgctcgcacagggcacgcccgacgagctgcgcgcgtcgaccgatccgagcgtgcggcagttcatcgacggcgcgccggacggcccgttcaaatttcattacacgagcccgccgcttgcagcggatttcgggctcggcggagggcgcgcatga

SEQ ID NO: 269843 - DNA, 1915 bp, Unknown
  Bacterial polypeptide expressing nucleotide sequence isolated from the Sargasso Sea
atgatcagcatcaaccaagcgcaattaatccgtggcagcaaaaccctgctcgacgaagcctctttgaccatctatcccggccataaggtcggcctagtcggcgccaatggcacgggtaagtcctcactgctggcattaattatgggtcacctgagcttagacaaaggcgagttcagcatgccttcgggttggcaaattgccaccgtagctcaggaaacgccagcgctggaagtctctgcacttgagtatgtacttgatggtgataaagaatatcgccaacttgaggccgatttacatatcgcgcaagaacacaatgatggccacgccattgccaccttgcacggtaaaatcgatgccattggcggctacgctattcgtgcccgcgcaggtgccttgctggcaggtttaggttttagcgaagccgagcaaaataacccagtgaaaagcttttcgggtggttggcggatgcgcctcaaccttgcccaagcgctgctgtgccgctcagacttactgctgctcgacgaaccgaccaaccacttagacttagataccatgtactggctcgaagggtggattaagtcctatcaaggcacgctgattttaatcagccacgacagggattttatcgacgagattgtcgatgaaatcgtccatgtcgagaatcaaaaactcaattattacaaaggcaactacagtgcctttgagcgtatccgtgccgaacgtatggcgcagcaacaggtcgcctatgagcgccagcaaaaagaacgggcgcatatgcagtccttcgtcgaccgcttccgctacaaagccagtaaagctaagcaagcgcagagccgcttaaaggcgctggaaaggatgactgagctgttgccatcccaggccgatagcccgttttatatggaatttcgcccacctgaagccctgcccaatccattgataaaaatggaacaggtggctgtgggttatggcgacaagcaaatccttagcaaagtgcatttgaacttagtccccggcgcccgtattggcctattaggacgcaacggcgcgggtaaatcgacactaatcaaactgttatcgggacaactgtcaccgatgaccggattgtatgagcccaatcccggcctgaatatcggatactttgcccagcaccaaatcgaatttttacgcttagacgatacgccgctgcaacatctgatgcgcctcgcgcccaatgcccgtgagcaggaattacgtaacttcctcggcggttttggcttccatggcgatatggcactctcgccagtgcgcccgttctcaggtggcgagaaagcgcgtttagtattggccttattagtgtggcagcgccctaacctattactgctcgacgaaccgaccaaccacttagatttagaaatgcgccatgcacttactatggcattgcaaacctttgaaggcgcaatggttattgtatcgcacgaccgtcacttactgcgcttaacctgtagcgattactatctagttgatcaaggccaagtgcaggccttcgatggcgatttagaggattaccaccaatggttactcgatgccgctaaggccgccagtgcaaattccaccgctaatggtgacgatgccaagcccgccgtcgataagaaacagcaaaagcggttagaggcagagctgcgccaaaaggtgtcgccacttaaacgcaagcaggcgaagcttgaaaccgatcagcaaaagcttagtgaacggctcgccgagctagagcatctgctcgccgatagcgagctctatgatcaggacaataaagccaaactcacgtcggtactcagtgagcgcaccagcttgacacaaacgctagaagaaagtgaaatgcaatggcttgagctgcaagaagaaattgatgcaatggaacttgagctgatgggtcagtaat

SEQ ID NO: 269844 - DNA, 856 bp, Unknown
  Bacterial polypeptide expressing nucleotide sequence isolated from the Sargasso Sea
ttgaccggcccggcgtcgccacgatgcgacgccctcctcacccgcaggatcaatgcgatgaaccaggcagtctccccgagcacaccggcgatcgagtttcgcaacgtgtcgtgccgcttcatttcgccggaaggcaaggccaccgtcgcgctgcgcgacttcagcatgagcgtcgcgcgcggcgagttcatcgcgatcgtcggcccgaccggctgcggcaagtcgaccacgctgaacctgatcaccgggctgctcaagcccgcgacgggcgaagtgcgcgtgatgggccgaccggtcgacgggatcgacccgcgcatcggcttcgtgttccaggccgacgccgtgttcccgtggcgcaacgtgatcgacaacgtcgcggccggcccgctgtttcgcggccgctcgaaggacgtcgcgtacacgcaggccgaggaatggatccgcaaggtcggcctcgacaagttcacgaagcactacccgcaccagctgtccggcgggatgaggaagcgcgtcgcgctcgcgcagaccttcatcaaccagccggaaatcctgctgatggacgagccgttctcggcactcgacatgcagacccgcacgctgatgcaggacgagctgctgcagctgtggtccgcgaacaagggctcggtcgtgttcgtcacgcacgatctcgaggaagcgatcgcgctcgccgaccgcgtgttcgtgctgaccgcgcggcccgccacgctcaagcgcgtgtacgagatcgacctgccgcgcccgcgcgtcacgtcggagatccgctacgacacgcgcttcatcgaaatttccaaggacatctggcacgacctgcgcgaagaagtgcagatcggctgac

SEQ ID NO: 269845 - DNA, 1777 bp, Unknown
  Bacterial polypeptide expressing nucleotide sequence isolated from the Sargasso Sea
gatggtacgcaacaagaccttctgggtatttctcgtggtgctgttcgcgctgccggtactgcccggcgcgctacaggtgcctgaatactggatcacgctgctgaactacatcggcctctacgcgatcgtcgcgatcgggctcgtgctgctcacgggcgtcggcgggatgacgagcttcgggcaggccgcgttcgtcggcatcggcgcctacgcgaccgcgttcctgacgacgcgctatggcgtgtcgccgtggctcgcgctgatcgtcggcgtcgtgctgacggcgctcgtcgcgctcgtgctcggggcggtcacgatgcggctgtccggccacttcctgccgctcggcacgatcgcgtggggcctcgcgctgttctacctgttcggcaatctcgaactgctcggcaagtacgacgggatcaacggtattccggcgctgaacctgttcggcatcacgctcgaaagcggccgcagcctgtatttcctgatctgggccgtcgtgctggctgcaatcgtgtcagtgcagaacctgctgaacagccgcccaggccgagcgatccgtgcgctgcgcggcggcggcgtgatggccgaggcgatgggcgtgaacaccgcgtggatgcgcgtcgtgatcttcgtctatgcggccgtgctcgcggccgtatcgggcttcctgtacgcgcacctgcagcgtgcggtgaacccgacaccgttcgggctgaatcacgggatcgagttcctgttcatggccgtggtcggcggggtgtcgcacgtgtggggcgcagtgcttggcgcggcgatcctgaccgtgctgcaggactacctgcagacgctgctgccgaagctgctcggctcggaaggcaacttcgagatcatcgtgttcggcgtgttgatggtgctgctgctgcagtacgcgcgccagggcgtgtggccgttcgtcgccaggctgttcccgcacgggccgcgtgcgcatgtgcccgagcatgccgatccgttgccgcaacgcgcgaagcctgcggccggcgagccgctgctcgtcgtcgacaacgcgcgcaagcagttcggcgggctcgtggccgtcaacgatgtcagcttcgacgtgaaagcggggcagatcatcgggctgatcggcccgaacggcgccggcaagtcgaccacgttcaacctcgtgacgggcgtgctgaagccgacgggcggcacgatcacgttccgtggcgagcgcatcgatgggctcacatcgcgccagatcgtccgccgcggcatcggccggacgttccagcacgtgaagctgttgccggcgatgacggtgctcgagaacgtcgcgatcggcgcgcaccttcgtggccatacgggcgtgtggcgcagcgtcgcgcggctcaatgcccatgaggaagcgcaattgctggccgaggccgcacagcagatccgccgcgtcgggctcgagaagcacatgtacgacgaagcgggcagcctcgcgctgggccagcagcggattctcgaaatcgcgcgcgcgctgtgctgcgacccgacactgctgctgctcgacgagccggccgccgggctgcgttaccaagagaagcagcaactcgccgacctgctgcggcggctgaaggcggaaggcatgagcgtgttgctcgtggaacacgacatggatttcgtgatgaatctcaccgaccggctggtggtgatggagttcggcacgcggatcgcggaagggctgccgcaggacgtgcagcaggatccggcggtgctcgaagcgtatctgggcggggtggagtga

SEQ ID NO: 269846 - DNA, 1348 bp, Unknown
  Bacterial polypeptide expressing nucleotide sequence isolated from the Sargasso Sea
gatgcaaaattcgaccgttatcaacgcccccgccaagccgtcccagccgctgcagccgccgcgcctgggcgatgaaatcctgcgcgtcgagcacgtgaaccgcggcttcaacaagtcgcagggcgaattgctcgtgctcgacgatgcgaacctgtcgctgcgcgaaggcgagatcgtcgggctgctcggccgttccggctcgggcaagtcgacgctgctgcgcatcatcgccgggctgatcgagccgaccggcggggaagtgacttatctcggcaagccgttgaccggcccggccgaaggcgtcgcgatggtgttccagaccttcgcgctgttcccgtggctcaccgtgctgcagaacgtggaagcgggcctcgaagcgctcggcgtcggcgcacgcgagcggcgcgagcgcgcgctggccgcgatcgacctgatcggtctcgacggcttcgagaacgcgtacccgcgcgagctgtcgggcggcatgcgccagcgcgtcggctttgcacgtgcgctcgtcgtcgacccgacgatcctgctgatggacgagccgttctccgcgctcgacgtgctgacggccgagacgctgcgtaccgacttgctcgacctgtggacgcaaggccggatgccgatcaagtcggtgctgatcgtcacgcacaacatcgaggaagccgtgttcatgtgcgaccggatcctcgtgctgtcgtcgaacccgggccgcgtgatcgccgagatcaaggtgccgttcaagcatccgcgcaaccggctcgacaccgatttccgcaagctcgtcgacgacatctacgcgaagatgaccgcgcgtcagaccaacgaggcgacgaagaaggggctggagctcggcagctggatgccgcgcgtgtcgaccaacctgatggccggcctgatcgagacgctcgcgatggcgccgtaccacggccgcgcggacatgccggaaatcgcgcgcacgctgcatctggaagtcgacgaactgttcccgatcgccgaagtgctgcagtacctcggtttcgcggacgtgcgggaaggggacgtgttcctgacgccgcctgcgcgcgtgttcgcggaattcggcacgcaggagcgcaagctgatgttcgcggaacatttgctgaagcacgtgccgcttgctgcgcgtattcggaaggtgctgaacgagcgtccgggccatcgtgcgccgcgcgtgcgcttcgagcaggagctggaggatttcctgtcggacgaagcggctgaggagacgctcgatgcggtgatcgactgggggcgttacggggaagtgttctcgtacaacgacaagaccgaggtgttcagtctcgaggatgtcgagagctga

SEQ ID NO: 269847 - DNA, 514 bp, Unknown
  Bacterial polypeptide expressing nucleotide sequence isolated from the Sargasso Sea
tggcacggcgctccggtcgagcgggcagccattccgaggtaccggcgcaacgtcgcgtatatccggcagcggcccgcgctgctggatggcagcgtcgaggacaatctgcgatatccgtacgaactgcgcacctatcgcgacgtgcgcttcgatcgcgcacgcgccgcgagcctggccgctcaggcaggccgcggcaacgactttctggacaaacgcgcgagcgaattgtccggtggagaggcgcagatcaccgcgctgatccgcgtgctgcaacttgcccccgaggtgctgttgctggacgaacccaccgcttcgctcgacccggaatcgtcccacgcaatcgaagcgctggtgcatgcatggttcgccgccgatcccgcccggcatgcatcgatgtgggtatcgcacgacccggcgcaagccgcgcgcatgagcgtgcggcacctcacgatgcgcgccggcgtgctcgacgaatccgtggcgacgccagtgcagcaggagctcggccaatgac

SEQ ID NO: 269848 - DNA, 754 bp, Unknown
  Bacterial polypeptide expressing nucleotide sequence isolated from the Sargasso Sea
atgaacggcaacgcgatcgcgctgcacggcgtggtgcagcgcttcggcgcgcagacggtgctcgacggcgtcgagctgagcatcgcggccggcgagcgtcatgcgctgatcgggccgaacggcgcgggcaagtcgacgctgttcggcgtgatcgccggcgcggtgcggccgacgcgcgggcgcgtcgtgctgcacggcgtcgagctgcgcgggcgcgggccggtcgtcgcgagccggctcggcatcggccgcagtttccagcagacgagcgcgttcgcgcggctgaccgtgttcgacaacctgcgctgcgcggcgctgcatgcaccggccgaacggcggcgctggtggaaccggctgcgcgaatcggcatcggtcgatctcgcggccgctcgcgtgctgcacgacatcggcctcgatgcgcaccgcgacacgctcgccggcgaactgagctatgcggaacagcgcgcgctcgatctcgggatcgcactcgcgagcggcgcgcgcacgctgctgctcgacgagccgacggccggcatgagccgcgcgcaggcggcgcggatgatcgcgctgattcgtgcgacgacgcaggggcgcacggtcctgctgatcgaacacgacatggatgcggtgttcggcttcgccgaacgcatcacggtgctcgtgcgcggcacggtggtcgcgaccggcgcgccggatgcgatccgcaccgatccggccgtgcgggccgcctatctgggcgagggcggcccatgag

SEQ ID NO: 269849 - DNA, 886 bp, Unknown
  Bacterial polypeptide expressing nucleotide sequence isolated from the Sargasso Sea
gtcaaaaaaagctacggcgaaaagagggtcgtcgacggactgtcgtttcatgtcaacagaggcgaatgtttcggcctgctgggcccgaacggcgcgggcaagaccaccacgttgcgcatgctgctcggcattgccacaccggacgccggcacgattcgcctgtgcggcgagccgattcccggccgtgcgcggatcgcgcgagcgcgtgttggggtcgtcccacagttcgacaatctcgatcccgatttcacggtccgcgaaaatctgctggtatttggccgttacttcggtttgagcgccgcgcaatgtcgcgcgatggtgccgtcgctgcttgaattcgcgcgcctcgagagcaaggcggatgcccgcgtgagcgaactgtcgggcggcatgaagcggcgcctcacgctggcgcgcgcgctcgtcaacgatcccgacgtgctgatcatggatgagccgaccaccggcctcgatccgcaggcgcgccatctgatctgggaacggttgcgttcgctgctggtacgcggcaagaccatcctgctgaccacgcacttcatggaagaagccgaacggctgtgtcatcgcctgtgcgtgatcgaggaaggacgcaagatcgccgagggcgcgccgcgcgagttgatcgcgtccgagatcggctgtgatgtgatcgaaatcttcggccccgatccggtggcgttgcgtgaagagctggcgccgttggtggagcgcaccgagatcagtggcgagacgctcttctgctatgtgaacgaccctcagcccgtgcatgcccgcctcaagcaacgtgccgatctgcgctatctgcatcgtccggcgaatctggaagatgtattcctgcggctgaccggacgcgagatgcaggattgac

SEQ ID NO: 269850 - DNA, 954 bp, Unknown
  Bacterial polypeptide expressing nucleotide sequence isolated from the Sargasso Sea
aaaccggcacgctcacggaaggtgcgcccacggtgactggcataatcagcctgaagccgggcggcgaagaggcgctgttacgtgtgacggccgccgtagaaaaaggatcacagcatccgctgggtatggcagtggtcaacgccgcacgtgaaaaagggatcacggtgccggctgtcagtgattttaatgccccgtcgggtaaaggggtttcaggggatgttgaagggctgcgggttattatcggtaatgagctggccatgcaggaaaacagtatcgttattgatagccagaaggcgactgcggatgccttacgcagggaaggcgctaccgttatctatgtggcgacagacgggcagcttgccggcctgatcgctatttctgatcccctgaaagcaaccacgcccgacgcacttaaggccttgcgtgaggcgggtatccgtattgtcatgctgaccggggataaccagcttaccgctgaagcggtggcgcataagctcggaatagaagaggttgaagccggggttctgcctgatggtaaaaaagcagtgattagccgtctgaaagcatcaggccatgtggtggcgatggcgggagacggcgtgaatgatgcacctgcactcgcggcagctgacgtggggattgcaatggggacggggacagatgtggcgatagagagtgccggcatcacgcttcttaaaggtgacctgatgatgctgaacaaggcccgacaactgtccgagatcaccatgaagaatatccggcagaatctgttttttgcgtttatctacaatgccctcggagtacccgtggcggcaggcctgctttatccggcgtatggcatactcctctcgccggtgatcgcggcagcagcaatggccctttcctccgtcagcgttatcgtcaatgcgttacgtctcagaagtatcaggctcggcaaagaagcgcatgaataaa

SEQ ID NO: 269851 - DNA, 325 bp, Unknown
  Bacterial polypeptide expressing nucleotide sequence isolated from the Sargasso Sea
aggacagaggcaaagaattgcaattgcaagatcattaataatgaatccatcttttatgattttagatgaaccgacttcagctctagatcgatcaatacagatacaagttattaatttattaaaagatatccaggatgaatataaattaacatatctatttataagtcatgatttaaaagtaataagatctatgtcagattatatatttgttatgaaagacggaaaaatagtagaatctggtctttctgatcaggtttttgactatccaaaagaaaaatatactaaaaaattgctctcagctgcgttaagatacgcatccgattga

SEQ ID NO: 269852 - DNA, 702 bp, Unknown
  Bacterial polypeptide expressing nucleotide sequence isolated from the Sargasso Sea
gccccaacggcggcggcaagtccaccctgctcaaactcctggcaggccaggagcagcagcaagccggcgagatcctgctcaagggcaagccgctgacaagctacggcaagaaagcgctggcccgcgagctcgcctacctgccccaacgtccgctggtgcccgccggcatccaggtcgagcagctggtgcagtacggccgccatccccatcagggctggttcaatcagtggagcgaggaggatgcgcgcatggtgcgctgggcctgcgagcggatgcagctgggcgacattctgcagcagagcgccagctccctctccggcggtcaggcccagcgggtgtggctcgccatggtgctggcccaggatgcggacatcatcctgctggatgaacccaccagcgcgctcgacatcggccaccagaccgaggtgatggaggccatccaccagatcaccgccgagggcaagacggtgctcatcgtcatccacgatctcgccaccgccgcccgctactgcgacgagctgatcgcgctgggggatggcggcattcaggccatggggccggcccgcgaggtggtgaccaagtccctcatcgaccgcctctaccagaccgacgtggacatactgcacgcccccggcgacggcgcccccatcatagtgccgcgccgcaggccgcatgcctttgccatgcgccaaccggcctgag

SEQ ID NO: 269853 - DNA, 1030 bp, Unknown
  Bacterial polypeptide expressing nucleotide sequence isolated from the Sargasso Sea
aatgtctggaaaatatttggcaataattcaaaagaagctttggatgctattcaaaatcaaaagatttcaaaacaacaagctttagaaaaatataattctgtaatcggagtctcaaatgtctcatttgatgtaaataaaggagaaatattttgtgttatgggactttcaggtagtggaaagtctactttggttagacatattaacaggcttcttgaaccaacttctggaaaaatactgataaacaatcaagacgtaatgcaatttgataaagaaaacctacaagaattaagaaataaaaaaataggaatggtatttcagaattttgctttaatgcctcatagatcagttttagataatattgcaatgcctttagaaataagaggagtaagcaaaaatgatagattggatactgcaaacaatattttaaacattgtagaacttcaaggttggggaaataaatatgcacatgaactatctggaggtatgcagcaaagagtaggtttagctagagcattagcagctgatccagaatttttattaatggatgaaccctttagcgcattagatcctttaataagaagacagcttcaaacagaatttataaagctttcaaaaaaaatgaaaaagactactgtttttattacacacgatttagacgaagcagtaagagtagggcatagaatagctataatgagagatggagctgtagttcaaattggaacgccagaagaaattgtagttaatccggctgatgaatatgtttctgattttgttaagggaatttcaagattaaaagttgttcaagcaaaaacaatcatgaaatctataaaagactatgaaaataaatttggatcattggataatgatagcgaaatagttaatgaaaatgacgttttaagtaaattaatagaaacttcaatttcaaaagacaaaccaattattgtaacggataaaaacaatcaaaaaataggagctataagtcaatctgatctattaaaagctgttgttgaaggaagtgaaaatgaataaa

SEQ ID NO: 269854 - DNA, 1213 bp, Unknown
  Bacterial polypeptide expressing nucleotide sequence isolated from the Sargasso Sea
ccacccagcgatgcggatgtagggcctttatcagggggagaaaaacgacgcgttgctttatgccggttgttgctctcggccccagacctgctactgcttgatgagccgaccaatcatcttgacgccgagtcggtggcttggcttcaacggtttttgcatgactttcctggtacagttgtaaccgtcactcacgatcgatattttctagatgaagttgccggatggatattggagctggacagaggacagggtattccttacgagggtaattattcgggctggctggaacaaaaacaaaaacgtcttcagcaagagggcaggcaagatgccgccaggcaaagatcgctggccaatgaattagaatgggtcagggcctcgcctaggggacgtcaggcaaagagtaaggcacgtttgacggcctatgaagatctgctcaaacaaagtcaagaaaacggcatagataacgcaaaaatagttattccaccaggaccgcgtcttggagacttggtgattgaatcacttaatcttgtaaagggatattctgacaagcttcttgtagatgacttatcattcaaactgccacctggcggcattgttggtgttataggaccaaatggtgcaggaaaaacaaccctatttcgaatgataactggtcaggatagcccagatggcggctctatcaatgtaggtgaaacggttaaattaggctacgttgatcaatcaagggatgacctgaacccgaattcaacggtttgggaggaaatttccgacggactggaagaaatagagcttgggaagcgtaaaatgcaaagccgggcctattgcggaatgttcaattttagaggcgcagatcaacagaaaaaagttggtcagctgtctggtggtgaacgaaaccgtgtccatctcgccaaaatgcttaagtcaggagcaaatctcatcttattggatgaaccgacaaatgatctggatgtagatactctaagagcgttagaggaagctctgcttgatttcgccggatgcgctgtggtcattagccatgatcgttggtttcttgacaagatcgccactcatattttggcctttgaaggagatagtagcattcaatggtttgagggtaattatcaagcttatgaggaggacaggcggagacggcttggggccgaggcagaacagccccatcgaataaaatataaacctattattcgcgcctagc

SEQ ID NO: 269855 - DNA, 1726 bp, Unknown
  Bacterial polypeptide expressing nucleotide sequence isolated from the Sargasso Sea
tgaccgaactgcgatagactatgtggtggacggtgacaaacattttcgtaatctacaggcgcaattagaagccgctgaaaaaagcggcgacggtgtaaagattggccaaattcacgggcagctcgaacaagcgggagcatacgacgtggaagctcgcgcagcgaccattctgtcgggtcttgggtttaccaatgtgcagttaagcgcgccagttagcgatttttcaggtggctggcgtatgcgcctaaacctagctcaagcgctactttgtccttcagacttactgctgcttgatgaacctactaaccacttagacttagacgccgttatttggctagagaaatggcttcaacgctatgcgggaacgctattgctgatttctcacgataaagcttttatcgacaacacggttgcgcaaattatcagtgttgaacaacagaagcttatcacctacaccggtaactactcgtcttacgaaacccagcgcgctgaacgtattcgcttgcaaaacattgaatatgaaaagcagcagcaaaaagtagcgcacctcaattcgtttattacccggtttaaagctaaagcgagtaaagctaagcaagcgcaaagtcgtattaagcagttggagaaaatggaaaccttgttgccagcccatatggcaagcccatttagcttctcttttgcgccgccgtcggcactgccaaacccgcttgtgcaaatggaaaagatacagctgggttacgacgaccatattgtgctgcaacaggtgaaactcaatttagtacctggcagcagaataggtcttctaggtcgaaacgggcagggtaaatctacgctaatcaaactgttggcgggtgtacatgcgccaaagcaaggtatttttaatacggctaaaggccttaagattggttattttgctcagcatcagttagaaacattagatgctgacgctactccgcttcttcatttgcagcgcattgacgaaaaagccaccgagcagcaacttcgcgactacctgggcggttttggatttaatggcgatgaagcgttagcgcccgtggcacctatgtcgggcggtgaaaaggcgcgcttagtattggcgttaattgtttatcagaagcctaatttattgctgctggatgagcctaccaaccacttagatttggaaatgcgccatgcgctaaatatcgcgcttcaaggttttgaaggcgccatggtactggtctcgcacgaccgcttcttactctcctcggtatgtgaagatttctatttggtagacagtggcgaagttgaaccatttaaaggcgacttggacgactatcgcgactggattttaaaacagcaggcagcggaaaaagccaaggccaacagcgacgccaaaaacgaagagcaacaagagactggcgcgcagagtaagccggaacgcaaattagatcgtaaagaagaaaaacgccgtgaagccgagtttaggcaaagggttgcgccacttaaaaaagccattgaaaaacacgaaaaagccatggaaaaatgtggtgctgctttggctgaggtggaagcgtcacttgccgatacttcgctttacagcgaagacaaaaaagcgcagcttatgggcctactcgacaagcaaactcagcttaagcaacagcttgaagaagaagagatggcatggctagatgcccaagagcagattgagctaaagcgagaagagtatgacaatgccaacgcctaa

SEQ ID NO: 269856 - DNA, 1306 bp, Unknown
  Bacterial polypeptide expressing nucleotide sequence isolated from the Sargasso Sea
aatgaatattagaaatgtttacttgtttttaatagttgttctatctttggggcttttctttgagtggtcttctgagaaaaaaaatctatctatcgaaaatcaccttttggatgcaaaatcttctgtctttgatattggtgatggttatgttgttgttgaaaatgaagagctttacgttgttgttgaggtgcaaaccggaaagatggttgaaacaaggattaaaaaacaccttgtagaaaatgttgatggctcccttggttatagggtttttggcaaatctaatgattctttgtttgagtactattttaaaagtggttttcgtgttcgtgatggtgatgattatcgagttttggctcctttatatgaagttgttgatatgggccctggttttgttgagttgcaagatacatcccttggtgtttcaaaaaaaatatctttcttagaaaaaagttatgaggtttctattttagataccattataaaccaagacaaagcgcaggcttttgctgctctatatagaacagatgggaaagcccttgatttgaggcgagatgctttaagtgggggtatgatgaataatagttcttatgagggtgtcgctattagctcggcagctgacccgtactcaacatcacgcttaagaagtatagataaagatattagggacgaatcaagggctggttgggttgcttttatacaaaaatatttctttgcagccattattggatctgatgaatatatttacagttattttgctgctcctaaagatgagggtggtttgtttaagatgggttattttgttgagaactcctctgcactgagtggtgagcttaagcatgagcacaggctttttgttgggccaaaaataagaaaagatttaatggatagggctgataatttagagctatcaattgatatggggtggttttggtttttgtctcaaccaatggtttggtttatggatgttctaaatgggtatttaaataactggggtttaacaattattgtttttactattttaattaagcttcttttttggcctgttacagcaaaaagttttaggtctatggctaacctcaggaaaataaccccagagttaaacgaaattaaggagcgctataaagacgaccgtcaaaaacaaagccaagagactatgaagcttatgaagagacatggagcaaaccctcttgggggttgtttgcctatgttaattcaaatgcctttttttatagggtttttctttgctttgagagaaatggttgagctgcgtcatagcgagcttgtgatttggagcgacctttcttca

SEQ ID NO: 269857 - DNA, 772 bp, Unknown
  Bacterial polypeptide expressing nucleotide sequence isolated from the Sargasso Sea
atggctactttagtcgctgaaaatttaacctttgcatacgcaaaaaaaagtaagccagttttgaataaggtatcggttgagattaaacctggaactctaacagcgttagttggcccaaatggcgcaggtaaatcaactcttttgagaattttgcaaggacaaaatactccagataaaggcgaaataaaaattgatggtgaaaatttatatagatctagagctcttgtggcacttatgcctcaaagaagttctatgaattggaagttccccatcacagttgaaaagttggtatctcttggtcaaataaagtattcaaaatcaagaagtaataacccatttcaaattaagactcttctagcatatcctaattcttggataaataaatgttgtgaattagaggcgacaatgcagagagtaggcatttcaagtttggcgaatagaagactcgattctctttcaggaggacagcagcaaagagctctattagcaaaaactcttatgtccccggcaaaaatatttcttttagatgaaccttgtgcagctttggacccacctgcaaaggaggattttcttaaaattgttcgtcaacttgccgataccggactttctttgctcgtaagtagccatgattggggcgattctttaaataactatgatcaagtaatcgttcttgataaaagtgttttggcagttggtagtcctgaccaaatacaagataaattagaggcaataaacattagctctataaacgaaaataaaatgtgtgattaga

SEQ ID NO: 269858 - DNA, 602 bp, Unknown
  Bacterial polypeptide expressing nucleotide sequence isolated from the Sargasso Sea
tgtaaatgatatcagtctttccttggaggagggcgtttttgcgtccattttgggaccatctggatctgggaagaccacgcttcttgcaatcatggccggccttgatctgccgagtagtggatccgtgaagcttcttgataaagaaatcacaagcttaaatgaggacaagagggcacagattagaagcaaggatgttggttttgtttttcagtcttttcatttgctgcctcgattatcagctttagacaatgtgatgatgccactcgagatactcggcgctaaagacgcaaaggagagggcactaaaagctttggatgaagtgggtttatccaaaagaacaggacatgttcctcatcaattatctggaggagaaaagcaacgagtcgcaattgcaagagcaatggttaaagcgcccagcatcttatttgcggacgagcccactggaaatttagaccaatcaagcactgacaatattctcgaactattactgggaatcaataaacaaacaaagacaaccttggttgtcgtaacacatgatcagcagttagcctcacgatcggatatggtcttcgagcttcaagaaggaaagttaaaatgctgaa

SEQ ID NO: 269859 - DNA, 490 bp, Unknown
  Bacterial polypeptide expressing nucleotide sequence isolated from the Sargasso Sea
ttttcaacaatttaacttgtttcctcatatgacagctttacaaaattgtatagaggctccaattgaagttttaggtcttaaaaaagaagaagctgaagaaagagctctcgagttacttgagttggtaggtttgactgataaaaaagatcaacaccctagtagactttctggaggtcaacagcaaagagttgcaatagccagagctttggctatgagaccaaaagttatgctcttagatgaaataacttctgcacttgatcctgaggtcgtgggagaggtattaaacgtaattcgttctttaaataaagagcataatttaacaatgattatggtgacccatcaaatgggatttgctcgcgaaatttctgacagagtttgttttttcaatgagggtagaatatttgaggaaggcccaccagaaaaactatttggtgatccacaaaatgagagaactaaacagtttcttcatgcagttttagactcacattaa

SEQ ID NO: 269860 - DNA, 727 bp, Unknown
  Bacterial polypeptide expressing nucleotide sequence isolated from the Sargasso Sea
gtggacgaattactgtcgctcgttggactgttagatcacagcgcaaaatacccgagccagttatctggaggtgagcagcaaagaattgcgctggcgcgcgctattgccacatcaccaaatcttttgttgctggatgaacctctctctgctctggatgctaaggttcgggttcacctgcggcaagagctgaaaaattttcaccgacggcttggtttgacaacagttatggtaacgcatgaccaagaggaagctttatctatcgcagatcgtatttttgtgatggacagcgggaagataatgcagtcgggaactccagaggatatctacgccaattcaagtaatccatttgtagccaactttattgggatgactaacttcattgagggacatgtgttaaacaagaactcaataaaagttgataacaaacaaatagctataaattcccatagttacaaaaagggcaccaaagttattattgctgctcgacctgaatatgtccaacttgccgagaaaagcagcagtaatacatttgttgggagagtggttgatgtcgagtttttgggttcgttccaccgaattcatctggaaacctcaattatgccagatcaacctttgatagccgacaaaccaatgattgataattttagtaaatccattgctattggcgataatttgagctttgcgttgtcaccaaatcacctaaacgtctatgagcgtgataactaaa

SEQ ID NO: 269861 - DNA, 556 bp, Unknown
  Bacterial polypeptide expressing nucleotide sequence isolated from the Sargasso Sea
cattttgggcccatctggatctgggaagaccacgcttcttgcaatcatggccggtcttgatctgccgagtagtggatccgtgaagcttcttgataaagaaatcacaagcttaaatgaggataagagggcacagattagaagcaaggatgttggttttgtttttcagtcttttcatttgctgcctcgattatcagccttagacaatgtgatgatgccactcgagatactcggcgctaaagacgcaaaggagagggcactaaaagctttggatgaagtgggtttatccaaaagaacaggacacgttcctcatcaattatctggaggagaaaagcagcgagtcgcaattgcaagagcaatggttaaagcgcccagcatcttatttgcggacgagcccactggaaatttagaccaatcaagcactgacaatattctcgaactattactgggaatcaataaacaaacaaagacaaccttggttgtcgtaacacatgatcagcagttagcctcacgatcggatatggtcttcgagcttcaagaaggaaaattaaaatgctga

SEQ ID NO: 269862 - DNA, 430 bp, Unknown
  Bacterial polypeptide expressing nucleotide sequence isolated from the Sargasso Sea
tctttggcaccgatatgggtgagaaagcttccaaaagttgaagctagagaaaaagctatggaatatttaaaaagagtgcaaattgatgatcaggctcacaagtacccagcgcaactatctggaggtcaacaacagagagctgcaatagctagagcattgtgcatggagccaagaattatgttgtttgatgagcctacctcagcgctggatcctgaaatgattaaagaggttttagatgttatggtcggattagcagaaggtggcatgaccatgcttgttgtgactcatgaaatgggttttgccaaagaagttgctgacaaaattatatttatggatgaggggcagatagtagagagtaaaaacccaacggatttttttgctaatcctgagagtgagagaactaagacatttcttagtcaaattctctagt

SEQ ID NO: 269863 - DNA, 714 bp, Unknown
  Bacterial polypeptide expressing nucleotide sequence isolated from the Sargasso Sea
tatggaaaataaaaagtctgaagaaactatagtaaagtttgacgaagtaacaaaacaatatggtgatcttatagttttggacaagttaaatttagaaattaaaaagaatgagatggtgtctattattggaccatcaggctcaggtaaaactactgttctaagagttttaatgactttagaaaagattaatggaggggttatacatttggatggtgaaacactgactcatatgaacgcaaatggaaaattagttgaggctgatgaaaaatatttaagggagagacgatctaagattggaatggtattccaacaatttaatttatttccacacatgacagctttacaaaattgcgttgaggccccagtagaagttcttggtatgaaaaaagaagaagcagagaaaagagctttggaattattagaattggttggtttgacagataaaaaagatgaacatccttcaagattatctggaggacaacagcaaagagttgcaatcgccagagctcttgcaatgagaccaaaagtaatgcttttggatgagattacttctgccttagatcccgaggtagtgggagaagttttaaatgttattagatcacttaacaaagaacataatttgacaatgattatggttacccatcaaatgggttttgctagagaaatttctgatcgagtttgtttttttaatgagggaaaaatttttgaacaagg

SEQ ID NO: 269864 - DNA, 757 bp, Unknown
  Bacterial polypeptide expressing nucleotide sequence isolated from the Sargasso Sea
ttgaaagtttggtatccaataaaaaaaggtatactcaaaagaactgttaattacgttaaagcagtaaaaaatttaagtttttcacttagaaaaggcgagagtattggtattgttggtgaatctggatcaggtaaaacctctcttatattagctatactaaaattaattaaatcagagggagaggtgtttattgagaatcaagatataaatcaacttaaacataatcaaattttaaatataagaaagcaaattcaaatagtatttcaagatcctttttcatctttaagccctagaatgaatgttgaggaaattatatcagaaggtctaaacattcattatccaaaaatggacagagatttaaagatttctaaattaaaaaatgtcttgaataatgttggattaaatttttctgaaacaatagaaaaataccctcatgagttttcaggagggcagagacaaagaatagctatcgcaagagctttaattttggagcctaaagttttgattctagatgagcctacatcagcacttgatataacagttcaaaatcaaataataaatttattaaataatctccaaaacaaactttctttaagttatatttttattagccatgatatgaaagttatcagatcaattgctgataaagttattgtattaaaaaatggtatagttgttgaggaaaataacagtgacgaaatatttaataatcctaaatcagagtatacaaaaaagttgattaaatctgtattataaa

SEQ ID NO: 269865 - DNA, 470 bp, Unknown
  Bacterial polypeptide expressing nucleotide sequence isolated from the Sargasso Sea
tttcaacagtttaatttatttcctcatctatctattttagataattgtactcttgcacctatatgggtaaagaaaatgcctaaaaaagatgctgaggaattagctttaaaacacttagaaagagtacaaatacttgatcaagcacaaaagtatcctggccaattatcaggtggacaacaacaaagagcagcaatagcaagagctttatgcatggaaccaaaaataatgctttttgatgaaccaacatctgcattggaccctgaaatgattaaagaagtgcttgatgttatggttaatttagcaaaacaaggtatgactatgattgtagttactcacgaaatggggtttgctaaagaagtagccgatcaaatgatatttatggatgaaggaatgattgtagaaaaagctgataccaaagaattttttgctaatccaaagagtgatagaaccaaactttttctcagccagat

SEQ ID NO: 269866 - DNA, 541 bp, Unknown
  Bacterial polypeptide expressing nucleotide sequence isolated from the Sargasso Sea
aaagtttagaaagcaaattcaaatgatatttcaagacccgtattcttcattaaatggaagattaaaggttaaagatatagttgctgaacctattaaacttcacaatccttcaattagttcaaaagatatagatagttatatttatgatctattagagtctgttgaactaacacaacaatcagctgaacgttatcctcatgaattttcaggaggtcaaagacaaagaatttctatagcaagagctcttgctacccagcctagattacttgtttgtgatgaaccaacttcagcattagatgtgagtattcaagctcaaatattgaatttattaaaagatttacaagaacaactaaatttgacaatcttatttattagtcatgatctaccagttgtaagacaaatgtgtgatcgaatagcagtattaaaaaatggcaaaatttgtgaagtttcaatgactgaagaattatttaaaaatccaaatcatgaatatacaaaagaattattaactttaatgccaaaaatagaatcaatttataactaa

SEQ ID NO: 269867 - DNA, 763 bp, Unknown
  Bacterial polypeptide expressing nucleotide sequence isolated from the Sargasso Sea
aagatatctaaatctgaaacacaagagaaagttcaaaaggcacttgatatggtagaattgggaaattttggaacaagatttcctgctcaattatcaggcggtcaacagcagagagtagctttagcgagagcattagtatttgagcctagacttgttttgatggatgaacctcttggtgcgttagacaaaaatttaagagagcaaatgcaatatgaaataaaacatatacacgatagaattggaatcactgttgtttatgtaacacatgatcagagtgaagctttaacaatgtcaaatagaattgcagttttcaatgatggagttgtgcagcaattatctacgccagatatattatatgagaaacctgaaaactcttttgttgcaaaatttataggagaaaacaatactttaaatggtgttgttaaagagattaatgacagcatttgtgaagttgatcttgataataatcatggaacagttaaagctcttaaagtaaacgtaagtgaagttggagaaaaaactcaattatcaataagaccggagagagtttcaattgactcaagtgataatagcttaaattcatttacaggaaaaatcgaagaactaatttatcttggtgaccatataagagctaggttagatgtttgtggcaataatgaattcattgtcaaagttccaaatgaaggaagctttaatcataaagaaggtgatactctaaatttaagttggaactctgaagacgttagagctttggatatctaaa

SEQ ID NO: 269868 - DNA, 748 bp, Unknown
  Bacterial polypeptide expressing nucleotide sequence isolated from the Sargasso Sea
gctggtcaagaacctctccaaacagttcggagacaaaacagtcctcgaggacatcaacttctcgatgcaatccggtgagttcgtcacctttgtcggcagttccggctgcggcaaaagcaccttgctgcggctgatcgccggccttgatcaccccagcagcggctcgattcacgtggatggatccaccgttcaagggcccggccccgacaggggcatggtttttcagaaatacagcctctacccctggctgaatgcagccgacaacgtctccttcggcatgcggctgcaaggcatgacatcgaacgacgtacgcgatcgcacctcctatttcctcgaggtggtgggtctgcaggatgccgccaccaaactgccgcgggaactctccggtggcatgcagcaacgggtggccatcgcccgcgccctggccaccaatcccagcgtgctgctgctcgatgaacccttcggggctctggatctgcaaatccgcgaaacgatgcaggactttctgctcaatctctggcaacgcaccggactgaccgtgctgctgatcacccacgacgtggaggaagctctggtgctggcccagcgcgtgcacgtcctggcaccgaaccccggccggatcatccgctcgctcgacgtgatcctggataaaagcgatctggatcagctgcgcctcagcagtgatttcctgcagctgcgccgcagcctggccacaagcctgcgtcagctggagccaaccatcgggtga

SEQ ID NO: 269869 - DNA, 806 bp, Unknown
  Bacterial polypeptide expressing nucleotide sequence isolated from the Sargasso Sea
aaaattattagatttcaaaaatgttacaaaaatttttgatgaacaatcaattattatgtcaaaaaaagaaaaagataaattgaaagctttagataatgtttcatttgaaatttatgaaggtgaatcatttggtttagtaggagaatcagggtctggtaaatcaactattgcaaaaattataacgaatttagttaagccaaccgctggagaagtgttttttgaaaatatttctttgcatgatccaaaaaacaaaaaaattaagaataaatatcgaggacaaatacaaatgatttttcaagatccttattcttctttgaatccgcgctttaaagttaaagatattatagcagagccaattaaattttttcaaagaaatattagctcaaccgatataggcaaaaatgttaatgatttaattgatatcgtaggaatgacaagacagtctttagacagatatcctcatgaattttctggaggtcaaagacaaagaatttcgatagcaagagctttagcaaccagaccaagactacttatttgcgatgaaccaacatctgctttagatgtaagtattcaagcacaagtattgaatttattaaaagatcttcaagatgaattaaatttaactattttatttatcagtcatgatttacctgttatcaggcaaatgtgtgatagaattgctgttttaaaaaatggtcttttatgcgaaattgctgcaactgaaagtttatttaataatccaaaccacagttatacaaaagagttgctagatttaatgccaaaaattgaatctatacataattaga

SEQ ID NO: 269870 - DNA, 844 bp, Unknown
  Bacterial polypeptide expressing nucleotide sequence isolated from the Sargasso Sea
gtatttcaaggctttgctttgtttcctcatatgagtgtttctgaaaatattggatatggtttaaaaatacaatctattgaaaataacattattaaaaataaagtaagtagaatgatggatttagttgggcttactggtctatctaaaagaaagcctcatgagctttctggtgggcagcaacaacgagtacagttggctagagctcttatattagaaaatgatgttttgctacttgatgagcctctttcagctttagacgcccaacttagaaaagatatgtgcatagagttaaaaagacttcaaaaaactgtaggtattagcttcgttcacgtaacacataatcaagaagaggctatgtcagttgcagatagaatagctatcattgctgatggtgaaatgattgagcaagggacacctaaggaaatttatagtaatccaaagaaaaaatttacagcagagtttattggagagaaaaatatatttaacggcaaagttttagatgtcaacaaatcaacaatattagttgacatagaaagcgataaaatagaggttaccaacaaaaattataaaattaataaaggccaggatgttagtttgtctataaaatctgaatcaattaaagttgacaaattaaaagtgtcaaaacaacctcaagaaaagaaagcgattaaaggtaaaattactgagataacttttttaggccaatttgtaagatatcttgttttattaaataataatcaagaaattcaagttagatcacatgatgaagtaagtaatattaacgtaaatgatgatgtaatgttaagttggagattagaagattttcttgttcatgaaggctagt

SEQ ID NO: 269871 - DNA, 958 bp, Unknown
  Bacterial polypeptide expressing nucleotide sequence isolated from the Sargasso Sea
aatgaatttagttgagattgatgatgttgaaagaagattttattcatatcctcatgaattatcaggtggtcaacgccaaagaataatgattgctatggctcttgttaataaacctcaattgttaattgccgatgagcctacaactgcacttgatgtaactatacaagcacaaattttggatcttatgtctaaacttaagagagagcttggtatgtcaattctatttattactcatgatttgggtcttgttagagagttctctgatcaggtttgtgtaatgcaaaatggaaatatcgttgagaatgggaatacagccgatgtctttgataatcctatacatgcctatacgcaaaaattattaaacgccgaacctaaaccaaaaacaataataaatcataaagaggacccactgattaaaattgaaaatttagatgttttttataatatgcctagaactagtttttttaagagcaatagatttcatgctgtaaaagatacgtcaattaatatatataaaaatactacaattggcttagtgggcgaatcagggtcaggtaaatctactctaggaaaggccatagcaaatcttactccttatgaaggaaaaatatattatgacgggcaggacattgcatcatcctcaaaggaaattaagaaacacatccaaatagtgtttcaagatccctatggatctttatcaccaagaatgactataggagaaatagttggagagggactgggagtgcattttaatctttcaaaaaaggaatcagatttaaaaattgataaagttttaacagatgtaggaattgagcttaatgcaaaaaataaatatccgcatgaattttctggcggtcaacgtcaaaggatagcaattgcaagatcattaataatgaatcctaattttatgattctggatgaaccaacatctgctctcgatagatcaatacaaattcaa

SEQ ID NO: 269872 - DNA, 889 bp, Unknown
  Bacterial polypeptide expressing nucleotide sequence isolated from the Sargasso Sea
cggcggcttcacgatgtttcgcatgagcgttgcgtttatcgtcgtcggccacgtggtgttcacgctgccgttcatggtccgcgcggttgccgccgtctgcgcgagcagcgatctgcgcacgctcgaagaaggtgcggcgagcctcggcgcaagcttcctgcaacgcttcgtcacgatcgtgctgccgaatgcacggccgggaatcgttgcgggcgcgctggcggtgcttacgctctcgatcggcgaattcaacctgacatggatgctgcacacgcccgacaccaagacgctgccggtcggccttgccgacacctacgcgtcattgcgcatcgaaatcggcagcgcctacacgattctgtttttcatcatgacgatgccgctgctcgtcgcgatgcaatggctcggcgtcgatgcgaccggccagcgcagcgcggggaaaaaacgcgccgcctcccgttcgaagccttcaccgacgtccacgccatgaaactcgactccgttcccatcacgctcacgcaatgcgcaaaaacgtttcgcggcacacgtgtgctcgaaccgctcgatctgcacatcggcgcgggcgagacactggtcctgctcgggccgtccggttgcggcaaaaccactacgctgcgcatgatcgcgggcctcgaaacacctgacaccggcggcagcatcgcattcggcgacgaagacgtcaccgcgttgccgatcgagaaacgccaggtcggcatggtgtttcagagctatgcgctgtttccgaatctgaccgtgcgcggcaacatcggctacggactgaagatcaaacgcgtgccggttgaaaccgcacggcaacgcgtcgacgaaaagctcgcgatgatgcgtctcaccgctcacgccgaaaaaccga

SEQ ID NO: 269873 - DNA, 652 bp, Unknown
  Bacterial polypeptide expressing nucleotide sequence isolated from the Sargasso Sea
actcatcaagcaacccaaggtcctgctgctggatgagccgctaggcgcactcgacaaaaaactgcgtgaacagatgcagatcgaattgcgccagctacagcaacagattggcattacgttcctgtttgtgacccacgaccaggaggaagccctgaccctctctgaccggattgcggtgatgtcagaaggtgccgtcatggaaattgcctcgccgggacaactctatgagtcacctgggtcaccgttcgtcgcagatttcatcggcagcatgaatttctttgagggcgagattctctcctcgaccgacagtgcgataacggtccagaccagcactctggggactgtcagtgtgacaaactccgacgcccaggtgaccgccggacaaaaagcctgggtcgcaatccgacccgagaaaatgcagccggtgttttccgatccaggagagcgtgccaacacgacaggcggcaccatggggccctcagcctatctgggtgaccggagccacttctacgtgcacctgtcagagcgtgacgatcctgtgctggttgcgctgcagaatctcgagcgctcaatggagcaactccataaacccaatcagccggtctggctgcagtgggccagtgacgccgtggtggtgctccctcgggactaa

SEQ ID NO: 269874 - DNA, 523 bp, Unknown
  Bacterial polypeptide expressing nucleotide sequence isolated from the Sargasso Sea
ggatgtttagacacacctactaatggaacctatttcttgaataataaatctgtgagcgagcttactgatgatgagttagcacatataagaaatgatgagattggttttgtatttcaatcgtttcacttattagccagaaactctgcattagaaaatgttatgttgcctttaaagtatgctggtgaaaataaaaagaacgctattaaaagatcaaatgatgcgcttgataaagtcggtttatcagatagatcaaatcattcaccatcagaattatcaggtggtcagcaacaaagagtagctatagcaagggcgttagtaaacaggccaagtatcttatttgcagatgagccaactggtaatcttgattcaaagacaggcgaagatgttatgaatctatttaaagagttaaatgaaaaaggtcaaacaataattcttattacacacgaagacagtattgcacaacaatctaatagaattataactattatggatggtctgataaaatctgatataagggaatgac

SEQ ID NO: 269875 - DNA, 502 bp, Unknown
  Bacterial polypeptide expressing nucleotide sequence isolated from the Sargasso Sea
catgaaaactttaaaaattgatgaattatcaaaaaattttggaacaacagaagttttaagaaaaattaatttagaaatagacgagggaaatttcttagtacttttaggtccttctggctgtggaaagtcaacgttattaaatattattgctggtttagaaacaataaatgaggggaatgtctatatagatgattacaatgtaagcaaagtagaaccaaaagaccgaaatattgcaatggtatttcaatcttatgctttgtacccatcaatgaatgtgcgagaaaatatgatatttggccttaaacaagccaaagtgtcaaaagaaaaaatagaagaacagttacaaaaagtttcaaaatttttgcaagttgatgctttactagaaaggaaaccttcgcaactatcaggaggtcaaagacaacgtgtggctatcggaagagcactagttagagagcctagaatatttttatttgatgaaccattatcaaatttggatgcaaaa

SEQ ID NO: 269876 - DNA, 766 bp, Unknown
  Bacterial polypeptide expressing nucleotide sequence isolated from the Sargasso Sea
gatgatttctacagaaaacttggaaaaacactatgaggttggacctgagaaagtttttgcattaaaaggaataaacctctctattgataaaggtgagtttgtttcaataatgggcccatcaggatcagggaaaactactctaatgaatattattggatgtttagattcaccttcaaaaggtgattatttcttaaacggtaaacttgtaagtgaacttaatgatgacgagcttgctcaaattagaaataaagaaattggatttatatttcagtcatttaaccttctagcaagaaattcggcattgagtaatgtattattaccaactaagtatgcaggcttagatgaaaaaaaatcattatcaagagctaaagaaatgcttgagttggttggattatccgatcgaactgatcatgcgccttctgagctatcgggaggacaacaacaaagggttgcaattgcgagagctttagttaataaaccaagtataatttttgctgatgaaccaactggaaatctagattcaaaaacaggacaagatgttatgaatttacttaagaatttgaataataatggacaaactataattattattactcacgaggataacattgctagtcagtctaacaggataattaaaattaaagatggacttattgaggttgataacaaaaaatgtctaaatttatgcaccttgtattattttcttttttgttgtcaagttgtggcagtagtaacgatgcttcaaaaaatgaattttataaaatga

SEQ ID NO: 269877 - DNA, 307 bp, Unknown
  Bacterial polypeptide expressing nucleotide sequence isolated from the Sargasso Sea
cgcctgtcgcgcgccgaacgccgcgagaaagtgcaagcgatgatgcagcaggtgggcctgcgccccgagcattatcagcgctacccgcacatgttctccggcggccagcgccagcgcatcgccctggcccgcgccatgatgctgcagccgcaggtactggtagcggacgaaccgacctcggcgctggacgtgtcgatccaggcccaggtgctgaacctgttcatggacctgcaggagcagtaccagaccggctacgtgttcatctcgcacaacctctcggtggtgcgccatgtcgccgacgacgtgc

SEQ ID NO: 269878 - DNA, 568 bp, Unknown
  Bacterial polypeptide expressing nucleotide sequence isolated from the Sargasso Sea
aatgaaaaatttaattgaagttcaaaacataaaaaaaaattacggtaaaaaaaaagctgtaaaaggaatatcatttaatgtcgaggaagatgaaattttaggtttgcttggtcctaatgggtctggaaaaacaacaactattggaatgttgttaggcttgcttcaacctacaagtggtcaaatatttatcaataatcttaaacttgaagaaaatagaattcaaattcttgaaatgattaattttatatccccatatattgaacttcccaaaaaacttacagtgaaacaaaatttatatgtttattctaaactttataaagttgaaaatattaaggaacgaattgagtatttatcggaaaagctaagaataggtgaattattaaacagtattaccggagaactttcatcaggtcaaaaaaatagagtaagtttagcgaaagccctagttaacgaaccaaaagttctgcttcttgacgaaccaactgcttctttagatccagaagtaggagattttgttagaacatttctagaagattataaaaagaaaaaaaaatttcgatacttttag

SEQ ID NO: 269879 - DNA, 547 bp, Unknown
  Bacterial polypeptide expressing nucleotide sequence isolated from the Sargasso Sea
tatgttgcgttttgagcaagtcacaaaaagttatagcggtggttttgtcgcgctcgacagggttagttttcatctggaaaaaggcgaaatggcttttttaacagggcactcaggcgcgggtaaaagtaccttattaaaactgatcagcctgattgaacgcccaagcacaggcaaagtctttatcaatggcgtggatttaagccgggtgaacaaaggtcaggtgccttatgtgcgccgtgatattggtatgattttccagaaccataagctgttgatgaaccatagcgtgttcgacaatgtggccttgcctctggtgattgaaggtttcagcggcaaagacatgaccaaaagagtgcatgcagctttggataaagtagggctgttggataaggtgcgttgtctgcctcacacattatccggtggcgagcagcaacgggtcggtatagcccgcgctgtcgtcaatcgcccacctttattgttagccgatgaacccacaggtaatctggatcctgatttatccaaagacattatgaacgtattcgaagcc

SEQ ID NO: 269880 - DNA, 739 bp, Unknown
  Bacterial polypeptide expressing nucleotide sequence isolated from the Sargasso Sea
gtccttcggcggtaaccgtgccgtcgatgacgtttccttcatcctggggaagggcgaactgctggccctgattggcccaaacggggcggggaaatcaacttgcttcaacatgctctacggtatccttgctccagataagggctctgtctgcctggacggccgcgagctgatcggcatgaagccccgcgacatctggcgcctaggcgttggcaggaccttccagatcactgctgtctatgcttccatgtcggtggtggaaaacgtgcagatggccctgatctcccataaccgaaaggcattttccgccttcactggggcagccaagctctatcgggacgacgccatggcgctccttgatctcattggtatgaaggatcaggctgaccgggccgctaacatccttgcctacggggatttgaagcgtctggaactggccgtcgccctggcacacgacccggtgctcctcctcatggacgagcccaccgccggcatggcaccgggtgaacgccgcgcactcatgaagctgaccgccgacatcgtcgccgaacgcggcgtcagtgttctgttcacggaacacgacatggacgtggtgtttgagaacgcacatcgcgttctagttctaaaccggggccagttgctggctgagggctccgtggacgatgtccgcgccaacccggctgtccaggaagtctacctgggcggcggcacaacctttggcggagacggcgatcatgcttga

SEQ ID NO: 269881 - DNA, 288 bp, Unknown
  Bacterial polypeptide expressing nucleotide sequence isolated from the Sargasso Sea
atcgttcagatcacaaaccagagcaactttctggaggtcaaagacaaagagttgcaattgcaagatccattgtcatggaaccagatgtccttctagcggatgaaccaacaggaaacttagatacttcatcaggcaacgaagttgtgaaattaatcgaagagcttaacattgcgggcctgaccctaatagtggtcactcatgatagagaaatgggcgagcgttcaaatcgcttgattgagttgagagatggaaaaatcattaatgatcaaaatcaaaaaaaggcctgaa

SEQ ID NO: 269882 - DNA, 247 bp, Unknown
  Bacterial polypeptide expressing nucleotide sequence isolated from the Sargasso Sea
aagaaaaagtaaaattagagaactaagtgtcggcgaagctcagagagttgcaattgctcgtgcaattgtaagtaaaccaaaagtcatttttgccgatgaaccaacttctgctcttgacgacaataattcagagaaagttattaaacttttatttactcaagcagaaaaaaataatacaacgcttattgtttcttcacatgattctagaataaagaaaaaattttcaaattttttggagctagattaa

SEQ ID NO: 269883 - DNA, 575 bp, Unknown
  Bacterial polypeptide expressing nucleotide sequence isolated from the Sargasso Sea
aatgaaaacgttaaaaattgaagaactatcaaaaaactttggatcgactgaggttttaaaaaaaattaatttagaaatagatgaaggaaatttcctagttcttttaggaccatctggatgtggaaaatcaactttattaaatattattgcaggattagaaacgattaatgagggtgatgtttttattgatgattataatgttagtaaagtagagccaaaagaccgtaatattgctatggtttttcaatcttacgctctatacccttctatgaatgttaaggagaatatgatttttggtcttaaacaggcaaaaacatcaaaggaaaaaatacaagaacagctagaaaaagtctcaaaatttctacaggtagatcaattgttagagagaaaaccttctcaattatctggaggacaacgacaacgtgttgctattggtagagctctcgtaagggagccaagaatatttttgtttgacgaacctttatctaacttagatgcaaagctacgagttgaaatgaggagagaaataaaaaaacttcatcaacagctaaaaacaacagttgtttatgtgactc

SEQ ID NO: 269884 - DNA, 688 bp, Unknown
  Bacterial polypeptide expressing nucleotide sequence isolated from the Sargasso Sea
tatggccgctacgcctactccccttgaagtgcgcaatattaaaaagcgctttggcgatacggaagttctcaaaggtctctccctggaagcccaaaaaggtgacgtcatcaccctcattggcgcctcagggtcgggcaaaagcaccttcctgcgctgcatgaacctgcttgaacagcccgacgatggagagctctacgtccacggcgaacaaattcgttttaaaaccaccaaacacggccgtgagcccgccgactggaaacaggtggtgcagatgcgtgccaagctctcgatggtcttccaaagcttcaatctatgggcacacatgacgctgctggaaaacatcatcgaagcgccgatccacgtgctcggcaagcccaaaaaagaggcaatcgagcatgcccatgcgctgctggatcgcgtagggctgagcgctcgcgccaatgcctacccggcacaaatgtccggcggccagcagcagcgcggtgccattgcacgggcgctcgccatggacccggaagtcatgctgttcgacgagcccacctcggcactggacccggagttggtcggcgacgtgctgaaagtcatgcgtgacttagccaatgaaggacgcaccatggttgtggtcacccacgagatgagctttgcccgcgacgtgtccagcaaagtgatctacctgcaccaaggcttg

SEQ ID NO: 269885 - DNA, 340 bp, Unknown
  Bacterial polypeptide expressing nucleotide sequence isolated from the Sargasso Sea
caaactaaagtcggtgatcagggaatcttgctttcaggcggacagagacaaagaatcgccatagccagagcattgctaaaagatgcacctatattgattctagatgaggcaacttctgcacttgattcagagagtgagaaactcattcagaaggcttttgaccgattgatggaaaataggacaacttttgtcattgctcatagactaagtacaattgagaaagcagatcgaatattggttctctcagatggaaaaattgttgaagagggcactcatcaagatttattaagccaagatggagaatattctcttttgtataaaatgcagttcaatgattaga

SEQ ID NO: 269886 - DNA, 853 bp, Unknown
  Bacterial polypeptide expressing nucleotide sequence isolated from the Sargasso Sea
gataatcctaaacatgcctatacgcaaaaattattaaacgccgaacctaaaacaaaaacaataataaatcataaagaagacccactgattaaaattgaaaatttagatgttttttataatatgcctagaactagtttttttaagagcaatagatttcatgctgtaaaagatacgtcaattaatatatataaaaatactacaattgggttagtgggcgaatcagggtcaggtaaatctactctaggaaaggccatagcaaatcttactccttatgaaggaaaaatatattatgacgggcaggacattgcatcatcctcaaaggaaattaagaaacacatccaaatagtgtttcaggatccatatggatctttatcaccaagaatgactataggagaaatagttggagagggactgggagtgcattttaatctttcaaaaaaggaatcagatttaaaaattgataaagttttaacagatgtaggaattgagcttaatgcaaaaaataaatatccgcatgaattttctggtggtcaacgtcaaaggatagcgattgctagatcattaataatgaatcctaattttatgattctggatgaaccaacatctgctctcgatagatcaatacaaattcaagtgataaatcttttaaaagatatacaaaatgaatatgaattgacatatttgtttattagtcatgatttaaaggtaatacgctcaatgtctgattatatttttgtaatgaaagacggaataatagtagaatctggactgtcaaatgatgtttttgactatccaaaagaaaaatatactaaaaaattgctctcagctgcgttaagatacgcaaccgattgag

SEQ ID NO: 269887 - DNA, 115 bp, Unknown
  Bacterial polypeptide expressing nucleotide sequence isolated from the Sargasso Sea
aatgaataatcgcccaaaccaattatccggaggtcaacaacaacgagttgctattgcgagagctattatcaataaccccgcaattttgttagcagacgaacctacggagcactag

SEQ ID NO: 269888 - DNA, 442 bp, Unknown
  Bacterial polypeptide expressing nucleotide sequence isolated from the Sargasso Sea
tatgtcggaagcaatcattaaaattgcaaacatgaataaatggttcggggattttcaagttttaaaagatattaacttagaagtcgaaaagaataaaaaaatagttgtttgtggaccatctggttcaggaaaatctactttgataagatgtattaatagattagaggagcatcaaaaaggcagtatagtagttgacgggactgaattaaatgaaaatacaaaaaatattgaacaaataagagctgaagtaggtatggtttttcaacaatttaatttatttccacatttatctattttggataactgcactcttgctcctatttgggtaagaaaaatgccaaaagtacaagcacaagaattagctatgaaacaactagaaaaagttcaaattgctgatcaagctcaaaagtttccaggtcaattatctggtggacaacaacaa

SEQ ID NO: 269889 - DNA, 445 bp, Unknown
  Bacterial polypeptide expressing nucleotide sequence isolated from the Sargasso Sea
acttcataatccggatataaaatctagtgatttagatagttatatctatgatttattagagtctgttgaattaactcaacagtctgcaatcagatatccccatgaattttcagggggacaaagacaaagaatatcaatagcaagggcactagcaacccaaccaagacttcttgtgtgcgatgaacctacatcagcattagacgtgagcattcaagctcaaatactaaacttattaaaagatcttcaagaacagttaaatctcactatattatttataagccatgatttacctgttgtaagacaaatgtgtgataaaatagctgtgcttaaagatggaaaattatgtgaagtgtcagaaacagaagagttgtttaaaaatcctaaacataattatactaaggaactactaaaattaatgccaaaaattgaatcaatttataactaa

SEQ ID NO: 269890 - DNA, 464 bp, Unknown
  Bacterial polypeptide expressing nucleotide sequence isolated from the Sargasso Sea
gatttttgatcaatctttagaagataatataagatacgcaaaacccgaagctactgacgcagaagttttcaaagcagcaaaagaggcaaagattgaagttttgatagaaaaaagaagtggggcaccagtgggccccaaaggaagtcaactttctgggggtcaaaaacaaagggttgctctggcgcgaacatttcttaagccggctccaatacttttattagatgaagcaacatcagctttggattcaataacagaagcaagtattgcaaaaggattaatgaagcttagcaaaaatagaacaactatagtagttgctcataaactagatcttattaaagatgctgatatgattttcgttctagaggacggcagagttgcagaaagtggcaatcataaaaagctgagtaaaagtgggaaattgtacacatcacttttagaggcacaaaagccaaaaaataagtaga

SEQ ID NO: 269891 - DNA, 930 bp, Unknown
  Bacterial polypeptide expressing nucleotide sequence isolated from the Sargasso Sea
gcgcttgatattcttacggcaaagcagattttggagctttttaatcacctacagggcgaaacattgatatcggcgctatatatttcgcacgatttgggtttagtttcacaggtagccgataaggtttcagtgctgaaggctggcgagatcgtcgaaagtgggccacgtagtgaggtgttcgggagccctagggaacaatatacaaaggcgttactgggatccctacccaatccgaaaaattggttgggagcaactgaaccgccgcctaaagcgcaggcgctcatatctgctgaggccataactgttgaatacggtcgtcagtcaagggttggccagcttttatctcccaaaccgacacatcgaggtgctcaggatgttgatctcaaagttctagagggagagcttgtcggattagttggtgagtcaggttcaggcaaatcaactattgcgaaggtcttgtctggcttgcaagactttgatggggttattcgtttcagtaagaagaatttcgtaagccgaagcaagatcgacagaaactaccgtcgcaacgtacaaattgtttttcagcacccagacgcatcgctcaatccgcggcaacgcgttcacgaaatcctctcccgacccttgaagctgtatgacatagttccgccggaaaagcgcgcagggcgcgttgaagagcttctggaaaaggtccgcctaccgatagagttcgcagaccggttcccgcaccaactttctggtggcgagaaacagcgcgttgcgatcgcccgtgcgtttgcagccgagcccaaacttgtaatatgtgacgaaattaccgctgcattggacgtatcggtacaggcatcggtcgccgatctgctcgtaaaactgcagcagcaaaccggaaccgcttgccttttcatcacccatgatctgaaccttgtcccgcaa

SEQ ID NO: 269892 - DNA, 575 bp, Unknown
  Bacterial polypeptide expressing nucleotide sequence isolated from the Sargasso Sea
tatggcatctaaaaaagatttcgttaaatttgataaagttgataaaagctacgatggtaaaattttagttgtaaaagatctccaattagacattgctgagggtgaatttataactatgttagggccctctggctcaggtaaaaccacttgcttaatgatgttagcaggttttgaaacacctacaaatggtgaaatttatttagatggaaatgcgatttcaagtattccaccccataaaagaggaattggtatggtttttcaaaactatgcattatttcctcatatgactgtttacgagaatttagcttttcctttaagagtaagaaaaatacctaaggacgaggcagataaaaaaattgataaggcattatcaatggtatccttacaaggttttgctgcaagaatgcctggccagttgtctggcggacaacaacaaagagtagctgttgcaagatcactagtttttgatcctcaattagttttgatggatgaacctcttggagctttggataaaaacttaagagaaagtatgcaatatgaaattaaacatattcatgaaagcattggtgtaacag

SEQ ID NO: 269893 - DNA, 346 bp, Unknown
  Bacterial polypeptide expressing nucleotide sequence isolated from the Sargasso Sea
attagatcaagctcaaaaatttccaggacaactattaggtggacaacaacaacgtgtagctattgcaagagctttatgtatggagccaaaaataatgttatttgacgaaccaacatcagcacttgaccctgaaatgattaaagaagtactagatgttatggtaaatttggctaatcaaggtatgacaatgattgttgttacacatgaaatgggatttgctaaagaagtggcagatagtatgatttttatggatgaaggaaagatagtagaaaaggctgatactaaagaattttttgctaatccaaagagtgagagaactaagctatttttaagtcaaatcttataa

SEQ ID NO: 269894 - DNA, 642 bp, Unknown
  Bacterial polypeptide expressing nucleotide sequence isolated from the Sargasso Sea
attggctgattcaacctcccaagctgttgctgaactgagtggcgtcagcaaggtctacggccagggtgatcttgaagtcagggcgctggatcaacttgatctcaccgttcgcagcggcgattatctggcggtgatgggggcgagcggctccggtaagagcacggcaatgaacattcttggctgcctggatcgaccgaccggtggccgttaccggctcaatggaattgccgttgaacagctcgatgatgatgagcttgccgaactgcgaaaccagtccctgggattcgtgttccaacagttccatctcctgccccatgcctcagccatggataacgtgatgctgccgatggtctacgccggaatcccactggacgaacgcaaggatcgagcggcttcagccctggatcgcgtcggcctgagtcaacgtctggacaatcgtcccaaccagctctccggcggccagcagcagcgggtcgccatcgcgagagcgatcatcaatcacccgagtcttctcctggcggacgaacccaccggcgccctcgactcgaacaccacggctgaagtgctggaactgtttgatgaattgcaccagcagggaatcaccctggtgatggtgacccatgaagacgatgtggcagcccg

SEQ ID NO: 269895 - DNA, 730 bp, Unknown
  Bacterial polypeptide expressing nucleotide sequence isolated from the Sargasso Sea
aatgattaaccttgttgaattaaaaaatattaaaaaaaattatggctctaaagaagctgttaaagatctatctttccaaataaaagagaatgaagttttaggtctgctaggacccaatggttgcgggaaaacaactacaattggtatgatgttaggtttactaaaaccaacaagtggagaaattttaattgataataaaaaaatagaggaaaataggattgaaatattgaaaaaaataaattttatttctccgtatattgagttacctaaaaaattgacagtcaaacaaaatttaattgtttacggaaaattatataatattaaaaatttaaataatagcatcgattatctagttgaaaaattaagattagaagaattattaaataaaatcacaggtgaactttcttcaggacaaaaaaatagagtaagtcttgcgaaagccttaataaatagtcctaaagttttattattagatgaaccaaccgcatcacttgatcctgaagtaggtgattatattagaacctttttagaaaattataaaaaagagagaaacatatcgatcttgttagcctcacataatatgaatgaagttaaaaggctatgtaaatttgtattaatgatgaaagatggtgttatcattgacaaaggaagtccttcagagttgatagaaaagcacggtcaaaaaaatttagaggaagtatttctaaaactttcaaggagtaaaaaatga

SEQ ID NO: 269896 - DNA, 532 bp, Unknown
  Bacterial polypeptide expressing nucleotide sequence isolated from the Sargasso Sea
gacacctctttattgcatcgttccattcgtgataacattgcctacacttctcctgaaatttcagatgaaaatgtgatcgaggcagcaaagaaagcaaatgcctgggaatttattcaggaccttgaagattcttttggacgcaaaggactcgaagctcatgttggagagcggggagtcaagctttccggaggacaacgacagcgtattgcgattgcacgtatgtttctcaaagacgctccgattctggtacttgatgaggcaacatccgctctcgattctgaagttgaagccgcaatccaggaaaatctttttgaactgatggagggaaaaacggtgattgcgattgcccatcggctatcgaccattgcccaacttgaccgactggtggtgatcgacgcgggagccgtgattgaaaccggaacccatgaagaattggtcagaaattccctgatctatgctgatctttggaatcgtcagtcaggaggttttttggctccagaggaatataagaaaaaatctgaagcagcgtgaa

SEQ ID NO: 269897 - DNA, 591 bp, Unknown
  Bacterial polypeptide expressing nucleotide sequence isolated from the Sargasso Sea
aatgattattgaaactaaagatttatataaagagtatcaagttggctcacaaaaaattaaagcaattaataatatagatctatctgttgaaaagggtgaatttatttcaataatgggtccttctggatccggtaagactactttaatgaatattattggatgtttagactcacctacatctggttcatatcatttaaatgggaaattagtaagtcaactttctgatgatgagctagccaatataagaaatgaggagattggttttgtatttcaatcgtttcatttattatcaaaaaactctgcattagataatgttatgttgcctctaaaatatgcaggtactaataaagtagatgcaatagaaagatcaaatgcggtattaaaacaagttggcctttcggatagagctaaacattcacctgcagagctttcaggtggtcaacaacaaagagtggctattgcaagagcattggttaataaaccaagtattttatttgcagacgaaccaacaggtaatcttgactccaaaactggcgctgatgtaatgaacttatttaaagaattaaataaagatggacaaacaataataat

SEQ ID NO: 269898 - DNA, 421 bp, Unknown
  Bacterial polypeptide expressing nucleotide sequence isolated from the Sargasso Sea
atggtattcgataatttaattataagagcaaggtcactttcaaaatcttatggtagtgaagatgttttgacggacttcaatattgacatttggtacggttcaatatttggaattttaggtgtctctggttctggtaaaacaacagcattaaggcttctagctggttttgaaaacccagatcaaggaacaatcgaaatgcataacaaagtcatatttgatgagaaaactaatttaccacctgaaaaaagaaaaattggtatggtatttcaagattatgcactattccctcatttaacagttgaaaaaaatattgcttttggtttaagtaaagaagaaattaaaaacggaagactcgatgaggtaataggtatgacaaacttaagttcgtacagaaaaaaatttccacaagatatttcaggag

SEQ ID NO: 269899 - DNA, 806 bp, Unknown
  Bacterial polypeptide expressing nucleotide sequence isolated from the Sargasso Sea
cttggccggcgtccgattcgaagccctctgcaagagctacccaggccgacgagggggccgccccgtcgacgtgatccgaagccttgatctgatgatcgaggacggtgagtttctcgtgcttgtcggaccttccggctgcggcaaaagcacgcttcttcgtcttctggcaggacttgaactcccatccgccggagagatccttatcggtgatcgacccgtcagcagggtgcggccggcccaaagggatgtggccatggtgtttcagagctacgcgctctatccgcatctgagcgtccgggacaacctcagcttcgggctgcgacgcagccgctctctgtcgccactacagcgtctgcaggatcagctgcaccgaagtgctcgccacctgccgccctccctgcaggtgcccagtccccgcgagcgacgcatcgaaacgcgcgtgggggaggtggctgagtcgctggaactgacggacttgctggatcgactgccgaaggaactctccggtggccagaaacagcgggtcgctctcggacgtgcgatggcccggcagccaaaggtctttctgatggacgagccgctcagcaatctcgatgccaagctgcgaaacagcacccggacccgcatcgtcgagctgcagaaacagctgggtaccacgacgctgtatgtgactcacgatcaggtcgaagcgatgacgatgggtcatcgcatcgccgtgctgaatcagggatacctgcagcagctggggactcccatggagttgtaccgatggccctcgaatctgttcgtcgcccagttcattggca

SEQ ID NO: 269900 - DNA, 877 bp, Unknown
  Bacterial polypeptide expressing nucleotide sequence isolated from the Sargasso Sea
tcaaattaacaatgaagtaattaatgaaatgcatccatctaaaagacataccgcaatggtattccagtcctacgctttgtatccacacatgaatgtttatgataatatgtcttttggacttaaaatagaaaaaaaaactaaagaagaaattcatacaaaagttctcagtgcagccaaaacacttaaaattgaagatcttttagaaagaagaccaaaagaactttcaggtggccaaaggcaaagggttgcaattggaagggcgataactcgaaatccaaaaatttttttattcgatgaacctttgtcaaatcttgatgcagctcttagagcagaaatgagagtcgaaatttccagacttcataaaaaaataaaaacaaatatgatttatgtgactcacgatcaagtagaagcaatgactttagcagatagaattgtaattttaaataacggcaatattgaacaagtaggaacaccaaatgaaatttacacaaatccagataatatttttgttgctcaatttattggaactccaaaaatgaatatttttaaaatcaattctgagaacattatctcaaacaacagaataaatattttaggaaatagcatctcttttagtggaataaacttagataaaaaaaattattatttaggtattagacctgagcatttaacttttaatggaaatcaagaatttaattttactccaaaaattgaattaattgaaaatctcggaaatgaaaaaatagtttacatggtaagtgaaaataaccaattatgtgcaaaaatttctagtgatattcaaatcaacaacaaacttggttttaatttaaaaaatgttttattatttgatgaaaatggtcttaggataagacaatag

SEQ ID NO: 269901 - DNA, 498 bp, Unknown
  Bacterial polypeptide expressing nucleotide sequence isolated from the Sargasso Sea
gaatggtatttcaacaattcaacttatttccacacatgacagcccttcaaaattgtatagaggctccagtggaggttttaggaatgaaaaaagaaaaagcagaagaaagagcacttgagcttttggaattagtagggttaacagataaaaaagatcaacatccttcaaggttatctggaggccaacaacaacgtgttgcgatagcaagagctttagcaatgagaccaaaagtaatgttgctagatgaaataacctcagctttagacccagaagttgttggtgaggtcttaaatgttataagatctttaaataaagaacacagtctaacaatgataatggtaacccatcaaatgggatttgctagagaaatttcagatagagtatgtttttttaatgaaggaaaaatttttgaacaaggacctccagaacaattatttggtgatcctaaaaatgaaagaacaaaacaatttcttcatgcagtgctagatgcaaattaaa

SEQ ID NO: 269902 - DNA, 754 bp, Unknown
  Bacterial polypeptide expressing nucleotide sequence isolated from the Sargasso Sea
tcgcttttacgacttgttgagcccttgtcaggtgaagtgcgcatggcaggaaaagatgtgcttaaacttcccaaagacgaacttcgtaatatccgaagtgatatgcaaatggtttttcaggatccttttgcgtcactcgatccgcaaatgttgcttctggatcaagttgcggagccaatgcgaaacttttcaactatggctgaaaggtcgatcgaggaacgagttgaaggccttttcgagcgtgttgaactaccaaagagctttttacgccgctatccgcacgagctatcgggggggcaaagacagcgcgttgcaatagctagggctctagctttgaacccaaaattaataattgctgacgaagcagtgagcgcattagatgtatcagttcaagcacaagttcttaatctaatgatggaattgcaatcggagttagaactaagtttcttattcataagccatgatatggccgttgtagaacgcgtcagccacgatgttggcgtgatgtatctcggtcggttggtagaaattggttctagacaagcagtattcagtaacccacagcacgcttacacaaaagcacttatgagtgctgttcctatagtagacccgtcaaaaaaggttttagaaggtgatttgaaatttaagcaaataccatctccaatccatccacttgattacgaagctgaaaaaccgaaatataaagaggtaactgaagggcattttgttctaacctctgattgtgggtattgat

SEQ ID NO: 269903 - DNA, 955 bp, Unknown
  Bacterial polypeptide expressing nucleotide sequence isolated from the Sargasso Sea
tgaagcagatttccgatatggtttagtacatattagagataatgctgaatcaatagccttttactctggagaaaatcctgagcgaagtgaaactgaaagacgcttaggagaagtggtgagaaactttaatttactgattatatggagagtaataatagacgtcatgagaagatccattaattatgctggaaatttctttccatatttaataatggcaatcccttactttaaaggtgatattgactatggacgctttattcaggcaagctttgcatttggaatggttgaaggttcgttatttttcattgttaatcaaatcgaagaacttgctaaatttactgctggtattggcagattagaaggattccaatcaaaagttgaatccattagtcaaaccaacccaacaagcaatcaaaatgttatttcagattacccctcaattcttattaataatgctgacctttgtccaccaggttcaaataaaacaataattaaaaatttaaatttgagcatcgaaaataatcaatcacttttggttgtgggaccatctgggtgcgggaaaacatctttactaagaatgattagtggtttatgggaacccgatcggggagtaattaaaaaaccaaaaattggggaattattattcattcctcaaaaaccatatatgttacttggttctttaagggaacaattatgttatcccacagaagttaagaaatttagtgatgaacatcttacttctgtacttcatgaagtcaatttgaaaaccttattggaccggtatcctaatcttgatatcaaacaagattggccacgaattctttccctaggcgagcaacaaagattagcttttgcaagactcttactaaattctccaagatttgcagtacttgatgaagcaacaagtgctttagatattaatactgaaaaaaaactatatagtttactaaaggaa

SEQ ID NO: 269904 - DNA, 868 bp, Unknown
  Bacterial polypeptide expressing nucleotide sequence isolated from the Sargasso Sea
ttggctgtcgttactaccggagccattttggcgggaaatcattcgctcgatcaggccatccttcctctgttaacgattctggcgatggctgcatttcttcctgtttctgaaattgctcaggtcggcaggcaattggcagacacccttggttcaacacgtaggatttatgccctggagcatgaaccggtgaccatcaaagacggcctgagaaaaatatccagtgaaacggcatcagagttgtcaatttccaatgtcggttttcattaccctgggagatctcagaaggttctggaaaacataagttttaccattcaaggtgggcaaatggttgcattggtcggaccttccggggcaggaaagacaaccctggcgcaactgctaatgcgtttttgggatccttccgagggaaccatcctgctttcaggaaatgatatcagagaatacggacttgaagcactccgctcaaaaatcgctctcgtcgctcaggatacctacctgtttaacagcaccctcaaagaaaacatccttatcgcaaaaccaaatgcaggctacccggaaatgaaaagggccattcaaatggcatctttgatggaacttgtcgaaaccctgccgcaggggtttgataccaaagttggagaaagaggaaccagtctttccgggggccaaagacaaagggttgccatcgcaagagcctttttgaaagatgcaccgattttaattcttgatgaagcaacctctcatttagatgctttgagcgaaagcgaagtacgtggcgccctggataaactcaaagaagaccgcaccacgattatcattgcacaccggctttcaacattcgaaatgcagacaacattatcgttctcgatgg

SEQ ID NO: 269905 - DNA, 352 bp, Unknown
  Bacterial polypeptide expressing nucleotide sequence isolated from the Sargasso Sea
tttgaataagaagaagttagtgaaaaatgatgcgttaataattgatgatttgcatcataaatatgataagcgagaatgttcaaattggatattaaacgaaattaacctgacaattgaaaatggcgaattgttagggttgcttggcccttctggttgcggaaaaactactcttttaagattaattgcggggttcgaatacccctctagagggaggatttctctaaatgataaggaaatttcaagtaagaaaaaaattcttagtcctgagaaaagaaatattggtatggtttttcaagactatgcacttttccctcactttactgtttttggaaaatgtaattttttggtttga

SEQ ID NO: 269906 - DNA, 171 bp, Unknown
  Bacterial polypeptide expressing nucleotide sequence isolated from the Sargasso Sea
ggaagacggcgacatcatcttcttcgtggccggactcgacctgacctatgcgccgccgcacaagcgcaatctcggtctgctgttccagaattacgcgctgttcccgcacctgacggtgttcgagaacgtcgcattcgggctgcgcgcacgcggcatggcgtcgtcggaagt

SEQ ID NO: 269907 - DNA, 319 bp, Unknown
  Bacterial polypeptide expressing nucleotide sequence isolated from the Sargasso Sea
tccggaggtcaacaacagagatgtgcaatagctcgttcacttgcaatgaacccaagtattatgttgtttgatgaacctacttcagctttagatcctgaaatgattaacgaagtgcttgatgtaatgactgaccttgcaaatttggggatgacaatgattgtagttactcatgaaatgggttttgcaaaaaaacttgctagtaaagtcatttttatggacaatggtatgattgtagagaataatactccagataatttttttaattatccaaaagaagatagaactaaaacttttttaaaacaaatattgaaacattaat

SEQ ID NO: 269908 - DNA, 739 bp, Unknown
  Bacterial polypeptide expressing nucleotide sequence isolated from the Sargasso Sea
tttaacaatgctttacctataataagcgtgtatgtttttgcaggctaccgtttattaccagctttacaacagatgtattctagttttactcaacttacttttgttgttccttcactcgatgaactaaataatgatcttagaaaccttcaatctcttaataaaagcctaggtcacattagattagcttttaataaaacaattactttaaaaaatattcattataattatcctaattcatcgataaaagctttgaaaaatataagcataaacattcctataaattccacaattggtttggtaggtgccacaggcagtggcaaaactacattaatagatgtcattttgggattattagaaccacaaaaaggatccttagaaattgacggcaaagttattacaaatctaaatacaaggtcttggcagcgttatatcggttttgtcccacaacatatttatttatccgatgacacagttgctgctaatattgcatttggtatggatcaaaaagacattaatcaaggagctgttgaaagagcctctaaaattgcaagtttacatgaatttataaaagacgaattaccaatgcaatatcaaactacaattggagaacgtgggattagattatcgggtggacaacgtcaacgtattggaattgcacgagctttatatcatgacccaaaagttcttatttttgatgaagcaacaagtgctctagatggtactacagaaaaaattgtaa

SEQ ID NO: 269909 - DNA, 364 bp, Unknown
  Bacterial polypeptide expressing nucleotide sequence isolated from the Sargasso Sea
gttaccccccatgagttttctggcgggcaacgccagcgcattgccattgcccgtgcgctcatcatggagcctgcattactggtgctggacgaacccacctcagcgctggatcgcagtgttcagcaccagatactggaattgctgaaggcactacaacagcgacggggactcagctatctgtttatcagccatgatctgaaagttatccgtgctatttgtcaccgtgtgttggtgatgaaagacggcaaacccgtggaacagggcgatactgaggccatttttgaaaacccacagcaaccgtacacccagacgctgatcgatgcggcctttgccaacagcaggaaacagacggttgcactttgat

SEQ ID NO: 269910 - DNA, 439 bp, Unknown
  Bacterial polypeptide expressing nucleotide sequence isolated from the Sargasso Sea
caaacaatttttttatcagacagttcaataaaagaaaatatagcatttggaataccaaaaaataaaattgatgacgagcttgtgaaagattctgcaagaaaagcccaaatatctgaaactatagaatcttgggaaaagaaatatgatactagtgtcggagaaagaggtgtcaaactttctggtggtcaaagacagagaattggaatagcaagagcattatataataatgcaaatgtactaatttttgatgaagcaacaagtgccttagataataaaaccgaaaaacaagtaatgagtgaattagaagatcttgatgacaatttaactatattaatggtggctcacagattaacgactttaaaaagctgtgacttaatagttgaattagataatggaaaaataaaatcaatcggaacttattctgaaattatcaattaaa

SEQ ID NO: 269911 - DNA, 529 bp, Unknown
  Bacterial polypeptide expressing nucleotide sequence isolated from the Sargasso Sea
ttgtttcagcaaaatccaatgtcgacattaaatcccaaaaaaactatctacagcactatagccttgccattaaagattcataaaattgtagaaaataataagtacaaaacaaaagttgaagaactcttatcttttgttggtttagaaagcaattttatggatagatatccggatacattatctggagggcagaaacaaagagttgcaatcgcaagagctttagcaacggaaccaaaagttttaattcttgatgagccgacttcagctttggacgttattgttcaatcaaaagtattaaatttattattagacataaaaaagaaatttgatcttacatacatttttattacccatgatttaagtgttgtaaaaaatattgctaataaagtagttgtaatgaataaaggtaaaattgaagaaactggaaatacaatagaaattttccaaaacccaaaaagtgaatacacaaaaactcttataagagctataccaaccgtaactgatgaagaagatgcaacaaaaccataat

SEQ ID NO: 269912 - DNA, 832 bp, Unknown
  Bacterial polypeptide expressing nucleotide sequence isolated from the Sargasso Sea
cgggttcttccctccgccaaccggatcacgcactatttctcctcgttgcggcagacggccccgctgctggatgcgatttatccggatctcgaaaacgccgcacggttttccagctacgaaagcgagttaaagacagcacgcaggcaggacgccggcaaaatggttatgagccacgaactggtccttcggaatgtgacttatcgttacccgaacgccccggaaacaacccttgcgaagatcaatatgacggtttccaaaggggaaacagtcgccttcgtaggccgcaccggcgccggcaaaagtacgctcatcgatatcgtgctgggtctgcttcccccgacagaaggagagatactaatcgacggccaggcggtagaatacggtccaaatatctggaaaggccggattggctatgtcccccagaacatctatctgatggacgacacgcttcgcagaaatatcgccatcggcattcccgaccacgagatcgacgaaggccgtctgcagacggttatgcgtctggcccacctcgacgatgtgctggcgtcgctcaacgagggactcgattcggaaatcggcgaacggggcatgcggctttccggcggacaaagacaacgcatcggcatcgcgcgcgcgctctataacgacccggaagtccttgtgctggatgaggccacatcggcactagacagcagcaccgagcgcgacatagcgaacgcgatcgaacagctatccggtagcaaaaccgtttttgtgatcgcccaccggctcggcacggtacgccgatgcgacaagctattctatctcgaagaaggaacaattactgcgtccg

SEQ ID NO: 269913 - DNA, 802 bp, Unknown
  Bacterial polypeptide expressing nucleotide sequence isolated from the Sargasso Sea
tttaatcttttaaaggaaaaaaataacattgatgatagtggaagtgaaaatttaaaaaaagaaaattcagaaataatttttaaaaatatcttttttggatatgaaaaaaaaagaacaataattaaaaatatatcttttactataccagaaggaaaatctcttgcgattgttggtccaactggtgctggaaaatcgacaataagtaaattattatttcgtttttatgatccggatagtggagaaataataattaataaaaaaaatattaaaaaatataaacaaaactcattaagacaaatgataggtgttgtacctcaagatacagtattatttaatgacactattttttataatatttcttatggcttgattgattcaagtgaagaagatgtaataaatgcagcgaaaattgctggaatacataattttattgaaagtatcccaaataaatacaatacaattgttggagagagaggtcttaaattatctggaggagaaaaacaaagagtttctattgctagagctgttttaaaaaatccatcaattttcttttttgatgaagcaacatcagctttagatactaatactgagaaagaaataaataaaaacttaaacaaaatttctcaaggtaaaactacattaattatcgcacatagactctctagtgtttcaaatgctgataaaattattgttatagataaaggaaatattattgaagaaggagatcattttagtttactaaaaaaaaatgggttatacgctttgatgtggaataagcaaaaacatgaaataaatcactaat

SEQ ID NO: 269914 - DNA, 547 bp, Unknown
  Bacterial polypeptide expressing nucleotide sequence isolated from the Sargasso Sea
tatggcatcagtagttgttgaaaatttaactaaagagtttggtgaagtcaaagctgttaatgatattaatttaagagtaaatgatggagaattcttagttcttctaggaccttcaggctgtggtaaaagtactttacttagaatgatttctggacttgagtttccaacttatggaaaaattttaattggtgataacgatgtaacgagaacaattcctaaagatagaaatatttctatggtttttcagaattatgctttgtatcctcatatgacaataggagaaaatattaagtttccactagagtctagaggttataataaaagtgaaattaatgaaaaagtagaatgggcatctacattattaaaaatttctgacttgttagacagaaaacccagagaaacatctggaggtcaaagacaaagaactgctctagcaagagcactagtaagagatccagacgcatttttaatggatgagcctttatcaaatttagatgctaagcttagacattccgccagggaggaaattagacaatttcagaatcaa

SEQ ID NO: 269915 - DNA, 406 bp, Unknown
  Bacterial polypeptide expressing nucleotide sequence isolated from the Sargasso Sea
aaaacaccaaaaaagaaagcagaagaattagcaatgaaacagttagaacaggttcaaatagcagatcaagctgcgaaatttccaggacaattatcaggcgggcagcaacaaagagcagctttagctcgagctttgtgtatggagccaaaaataatgttatttgacgaaccaacatctgcattagatcctgaaatgattaaagaagtattagatgcaatggttaatcttgcaaaagcaggaatgacaatgattgtagttacacatgaaatgggttttgctaaagaagtagcagatgaagttgtatttatggatgaaggaatgattgttgaaagagctaaaaccaaagatttttttgctaacccaaaaaatgaaagaacaaaacttttcttaagtcaaatactttaat

SEQ ID NO: 269916 - DNA, 757 bp, Unknown
  Bacterial polypeptide expressing nucleotide sequence isolated from the Sargasso Sea
aatgagtctatctaaaattaaaaatatcccatttggtaaaaatataattgaattaaaaaatatcagcttatcttttgggggtgttaaagcattaacagaagtttcttttgaggtaaaaagaggtgaggtgtttgctataattggaccaaatggagctggaaagtcatcaatgctgaatgtcattaatggattctataagccaacatctggtaaaattaattttgctggtcaagaaagattacaaatggaacctgagtttgccgcaaaaagtggtatcgcaaggacatttcaaaatatagccctttttaaaggcatgagtacattagataatctaatgactggaagattattaaaacaaaagcaaaatttgtttatgcaagctttgtatattggaccagctgaaaaagaagaaacttttcacagagaaaaagttgagagagttatagattttttagacctccaatcaataagaagaactcctgttggttcacttccatacggactacaaaaaagggttgagcttggaagggctcttgcgatggaaccagaaattcttcttttagatgaaccaatggcaggtatgaatgttgaggaaaaacaagacatgagtagatttgttttaacagctaatcatgaacttaaaacaacaattgttttaattgaacatgatatgagtgttgtaatggatatctcagatagaattgttgtgctagactatggaaaaaaaattggatcaagtaaacctgaagaaattaga

SEQ ID NO: 269917 - DNA, 400 bp, Unknown
  Bacterial polypeptide expressing nucleotide sequence isolated from the Sargasso Sea
atgtttcttgaggtctcccaactcgaagtgcgctacgcaggccgcgcacaggccgccgtgcaaggcgtcacgctcagcctgaaagcgggtgacatcggcgtgctgatcggcccgtccggctgcggaaagaccaccctgctgcgcgctgtggccgggctggagcccgtgacgggaggcgagatccgcctgaccaaaagcgtggtcagcagcgccaccctgagcgtgccgcccgagctgcggcgcatcggcatggtgttccaggactacgcgctgttcccgcacctgtcggtgggccgcaatgtagcgtttggcatccaccagctgccccgggccgagcaggccgcgcgggtggccgaggtgctgaagcttgtggggctggaaggcagcgagcaccgctacc

SEQ ID NO: 269918 - DNA, 793 bp, Unknown
  Bacterial polypeptide expressing nucleotide sequence isolated from the Sargasso Sea
atggaaaataaaaactcagacgaaattattgttaaatttgaagatgtaacaaaacagtatggcgatctagttgttttggacaaattaaatctagaaattaaaaaaaatgaaatggtatcaattattggaccttcaggttcagggaaaactacagttttaagagttttgatgacactagaaaaaattaatggaggtgtaatccatttagacggagaacctttaactcatatgaatagtgaaggtaaattaacagtagcaaatgaaaaatatttaagagatagacgctcaaaaattgggatggtatttcagcagtttaatctttttcctcatatgacagcacttcaaaattgtattgaagcacctgtagaggttttaggtatgaaaaaagaagaagcagaagaaagagctctagaattattagagttagtaggtttgactgataaaaaagaccaacatccaagtcgattatctggaggacaacaacaaagagttgcaatagctagagcgttagcaatgaggccgaaagttatgcttctagatgaaattacttctgcattagacccagaggtagtcggggaggtgcttaatgtaattagatctttaaacaaggagcataatttaaccatgatcatggttactcatcaaatgggatttgctagagaaatatctgatcgtgtttgtttttttaatgaaggtaaaatttttgaacaaggaccaccagaaaagctattcggcaatccacaaaacgaaagaactaagcaatttttacatgcagttcttgatgctaattaaa

SEQ ID NO: 269919 - DNA, 496 bp, Unknown
  Bacterial polypeptide expressing nucleotide sequence isolated from the Sargasso Sea
ggcgtggttccgcaagacagtcttctctttgatggcacagttcaggccaacatcgctcttaccaggcctgatgcaagctttgaagagataaccggtgccgctcaggtggcctgcgcccacgattttattcagtcattaccagggggctattccagctcagtaggtgagcgtggctcagccctctccggtggtcagcgtcagcggatggcgctcgcccgaatggtgcttaagcggccccgtttgctggttcttgatgaagccaccagcgctttggatgtggacactgaacagcaggtcacgcgcaacttggcagaggtttaccgcggcagcaccgtgctgtggattacccatcgccttggcagcctgcgccatgccgatcggattttggtgatgcatcaaggcagcttggtggagcagggaacacacagcgaactgatgcaattaggcgggcgatacgccactctgtaccggcaacaagaggcgggccttgcatgag

SEQ ID NO: 269920 - DNA, 666 bp, Unknown
  Bacterial polypeptide expressing nucleotide sequence isolated from the Sargasso Sea
aatgtcacatacattagtaacattcaaaaatgtttgtaaaaactttgaaaaaaatccagcagtaaaagatattaattttgatattggaaaaggagaatttcttgccattatgggaccttcagggtgtgggaaaacaacgacattgaggatgttagctggattagaaataccgtcatctggtgaaataagatttaataatcgtttgatgaatactgtaaaacctcatgaaagagatacacctttggtatggcaatcattagctctattcccttttttaaacgtacaagaaaatgttgaatttggacttaaaatgaggggcttaagtcctaaaataagaaataaaaaatctttagattggcttgaaaaattagaggttaaagagcttgcaaaaagagatatatcaacattatctggaggtcaaaaacagcgtgttgctcttgcaaggtcgttagtaatggaacctgaaattttactccttgatgagcctttatcagctttagatgcgcatctagtaatcagaatgcaagctgtacttactcaattacaaaaagaattgaatataacttttgtttacgtaactcattcacaatcagaagcctttgcaatggcggatagagtaataattatgaatgtagggggagtttctcaaatcggtactccaaaaga

SEQ ID NO: 269921 - DNA, 790 bp, Unknown
  Bacterial polypeptide expressing nucleotide sequence isolated from the Sargasso Sea
aatggataaaaattctcaagaaataatagtaaagtttgatgaagttactaaacagtatggagatcttgtagttttagataagctaaacttaaatattaaaaagaatgaaatggtctcaatcattggtccatcaggatcaggaaaaacgactgtactaagagtattaatgactttagaaaaaattaatggtggagttattcatttagatggtgaaccacttacccatatggatacaaatggcaagctgatcgaagcaaatgaaaaatatttgagagataggcgttcaaaaattggcatggtatttcaacaattcaatttatttcctcacatgacagcacttcaaaattgtattgaagcaccagttgaagttttaggtatgaagaaagaagaagcagaagaaagagcccttgaacttttagaattagttggattaacagataaaaaagatcaacatccttcaagactttcaggaggccaacaacaacgagttgcaatagcaagagctttagcaatgagaccaaaagtaatgttgctagatgaaataacttcagccttagacccagaagtggttggagaagttttaaatgtaattagatctttaaataaagaacatagtttaactatgattatggttacacatcaaatgggatttgctagagaaatttcagatagagtatgtttttttaatgaaggtaaaatttttgaacagggcccaccagagcaattgtttggagatcctaaaaatgaaagaacaaaacaatttcttcatgcagtgcttgatgcgaattaa

SEQ ID NO: 269922 - DNA, 881 bp, Unknown
  Bacterial polypeptide expressing nucleotide sequence isolated from the Sargasso Sea
gctcaagggtatagattttgcctacggaaacaatactgtgtacaccggtatggaatgcgaggtggagcgcggccaacgcaccgtgcttgtgggccccaacggcgcggggaaatccacgctactcaaactgatggccggcgtactcgagccccaagctggcaggcgcgagcttgggcacaacgtgaaggccggttatttttcccaaaaccgcgtggacgtactgaaccctgcggccactgttttggaggaggctacggattgtccacaggcgctgaccgaagagcgcgcgcgtaccatactcggcacatttctctttagaggggacgatgtgttcaagcgcgtgagtgtattgagcggcggggaaaagagccggctcgcgttggtgaagctcctgctcgatccaccaaatttgctgctgatggacgagcccacaacgcacctcgacatggccagcatcgatgcgcttattgccgcgctggaactgtacgaaggcacgctggtgttcatcagccacgatgttcattttatccgtgccatttctgcgcacactatccacgtcaacgccggaaaacttcgtaactttccaggtggttacgattattatttgcaaaagacccgggccgaaaccgcccgggccggactcacgctgggcagcaacggtgccccggtcaaggccgcgccagccaaggtgaaggtggatcggcgcgctcagaaacgcgccgaggccgaaacccgtcaggctcgcagccgcgaacggcgtggagtagaaaaggaagtgaaacgtctcgagggggaaattcagaaagctgagcagaaaatcacagagctaaccacggaattggagaaacctgagacctatgaaaatcccgcgcgagccatga

SEQ ID NO: 269923 - DNA, 223 bp, Unknown
  Bacterial polypeptide expressing nucleotide sequence isolated from the Sargasso Sea
atgcagtgcccggcggatacgactacgacgtggcgtggcggggagcaagctgtcggtggtcaaaagcagcgcgtcgcgatcgcaagggccatcattcgcaagcccaagattttgctgctcgacgaggcgacgtcggcactcgacaacgagagcgagaaaatcgtgcaggagagcttggacgccctgctcgcggacaataagaatgcgggtcgcacgatggtgc

SEQ ID NO: 269924 - DNA, 550 bp, Unknown
  Bacterial polypeptide expressing nucleotide sequence isolated from the Sargasso Sea
caatcaggaagtggtaaatccactttcttaaatatgattggattattagacagcataaccgatggttctatagaaattgagggtaaagatgtctcagaactctcagacaatgagctctcaaagtttagaggtgaaaagattggatttatatttcaaagtttttttctactcccaggactaacagctcaggaaaatgtcgctgaaggtcttctataccaaggtatttcaagatcagagagattagaaaaagcaaaagaagttttagaacaagttggtcttggtgacaggttgacccatttaccaaaagaattgtcaggcggtcaacaacaaagagtcgcaattgctagagctcttgttcaggatccggcattcgtactagcagatgaaccaacaggaaatttagataaggaatccggtatcaacatactcaatattttgaaagacctaaacaatcaaggtaaaacagtgataatgattacccacaaccaggaacacgcaaggatgtttaaaaaagttatagaactagttgatggaaaaatagtgaattaat

SEQ ID NO: 269925 - DNA, 488 bp, Unknown
  Bacterial polypeptide expressing nucleotide sequence isolated from the Sargasso Sea
aatgattaaaattaactctctctcaaaagaatatgtgatgggagaaaataaactattagccttaaatcaagttagtattgaaattctctctggggaatttgtatctataatgggatcatcaggttcaggaaaatcaactttaatgaatattattggatgtctagatgaaccttctagcggagaatatttttttaaagataataaaatatctggttatagctcaaacaaacttgcagaattaagaaacaaagacattggttttatttttcagaattttaatttattaccaagattaaatgctttagaaaatgtcatattaccacttttatattcaggaaaaacattaaaagtaagaaataaactcgctttagaagcattagaaagtgttggcttaagtgatagaatttatcataagccaaatcaattatcaggaggacaacagcagagagtttcaattgcaagagcaattgctggttcgccaaaaataa

SEQ ID NO: 269926 - DNA, 916 bp, Unknown
  Bacterial polypeptide expressing nucleotide sequence isolated from the Sargasso Sea
gatgtttcaatacaatctcaaattttagatttaattaaaagattaaccaaagaaagaaatttagcagttatattaattacccatgacatgggtgttatttctgaaaccacaagcagagtggcagttatgaaaaatggagatttagttgaaattggaacaactaaagaaatactaactcaaccaaaagagatttacacaagagcacttataagttctgttcctccaacgaacaaaaaaataaatagatttaaaattattgaaaaagaaaacaaaaatgaaggtcaaactaatattaaaattttaaacagatggacaaaaaaagaaattatcgaacaggatttagttaaagttaaaaatttaagcaaaacatttgatgataatttttttactgaaagttctaaaaactctgtcatggcagttgatgatgtatcatttgctattaaagaaggagagtcatttggtctagtaggagagagtggtagtggcaaatcaacaattgcaaaaatgatagtaaatttatatagccctagtgctggagatattgattttgataatgtttgtataacaaaaattaaaaataataaagaaatgatgaagtttagaaaacaaattcaaatgatatttcaagatccttattcatctttaaatggaagattaaaagttaaagatatagtttcagaacctataaaacttcataacccttcaattagctctaaagatttagataattatatttatgatttgttagaatctgttgaactaacccaaaaatctgctgaacgctatccacatgaattttctggaggacaaagacaaagaatatcaattgcaagagctctggcaactcaaccaagattattagtatgtgatgaaccaacttctgctttagatgtaagtattcaggcacaaatactaa

SEQ ID NO: 269927 - DNA, 676 bp, Unknown
  Bacterial polypeptide expressing nucleotide sequence isolated from the Sargasso Sea
cgagatatctcaacagggtctggtcgcggtgatcggccccaacggcgctggaaaatccacgatgatcaaggctgtcctcggcctgaccccgaccttagcaggcaacatccgggctttcggcaaacccgtcaaacatgcgcgaaaacgcatcgcctacgtaccgcaacgtaccagcgtcgactgggattttcctgcctccgccgaggacgtggtggcgatgggtctttacggcaaaattggctggtgccgtccggtccggcgccgtcaccgcgggtccgcccgcgaacatctagaccgtgtcggcatggcagatttcgcaagccgccagatcggacaactgtccggcggtcagcagcagcgggtattcctcgcccgtgccctcgcgcaagaggcagatctatacctgatggacgagccgttcgcaggcgttgacgccgccaccgagcgcgctatcgtcgacgtgatgcgcgatgtccggtcgaacggtgcaacgctggtctgtgtgcatcacgatctgcagaccgtcggcgactatttcgatagcgccgtcatcctgaacatccgccggattgcggcggggcccgtcaccgacgtcttcaccgaggaaaatctgcgggccgcctatggcggccgtctggcgacgaccgagattcgcgccatcgccgacagcgcgtga

SEQ ID NO: 269928 - DNA, 846 bp, Unknown
  Bacterial polypeptide expressing nucleotide sequence isolated from the Sargasso Sea
agaatcacttcaggagagattttaatagaaggaaaagaagtaagcaatattcccgcttctgaaagaggtcttgcgatggtattccaatcatatgcattatatccgcatatgtcagtttataaaaatatggcattttctcttgaaaacttaaaaattgataaaaaaactattgagcagaaagtaaatagcgcagcaaaacttctgcaaattgaagactaccttcagcgaaaaccaaaagctctatctggcggtcaaagacaaagagttgctattggtcgtgccatagtaagagatccgaaagcatttttattcgatgagcctttatcaaatttagatgcagaattgagagttacaatgagaaaagaactttcagctttgcatgaaaagattggtggcactatgatttatgttacacatgatcaggttgaggctatgactttagctgatcaaatagttgttcttaatgaaggttatgtagctcaagctggtgcgccactagatttatataataatccaagtgatatttttgttgcagggtttataggatcacctaaaatgaattttattaatgttaaatcttctatggaaaataatggaataagtttaaaatcaaaaagtttaaatatacaatcttttatagaagttgaagttaataaagactttactctaggcattagacctgaacatatttatataagtaaaaaagatgagtcagatttagaagtaacagtagattattctgaacaactaggaagtgaaacatatttttattgcaacacaaatgattcttctcaacttattgttcatcaaacaggtcagtataaagttacaaaaggtgataaatta

SEQ ID NO: 269929 - DNA, 610 bp, Unknown
  Bacterial polypeptide expressing nucleotide sequence isolated from the Sargasso Sea
gctggagaacccccatgacggccagattctggtggccggcgaagagctcaagctcaagcgcgcccggcagggcgaactggtcgccgccgacaatcggcagatcaaccggctgcgcgctcgcgtcggcttcgtgttccagagtttcaacctctggccgcacatgagcatcctcgacaacatcatcgaagcgccgcgccgcgtgctgggccagtccaaggccgaagcggtcgaggcggccgaagcctttctggccaaggtcggtatcgccgacaagcgccatgcctttcctgcccagttgtccggcggtcagcaacagcgcgccgccatcgcgcgcacgctggcgatgcagccgcgagtaatactgtttgatgagccaacctcggcactggacccggaaatggtgcaggaggtgctcagcgtgattcgtacactggctgacgagggccgtactatgctgttggttacccacgaattggggtttgcccggcaggtgtccagtcaggtggtgtttctgcatcaggggcaggtcgaagaaatcggcaccccggatcaggtgttcgataacccaggttccgaacgctgccgacagttcatgtctagccacaagtaa

SEQ ID NO: 269930 - DNA, 421 bp, Unknown
  Bacterial polypeptide expressing nucleotide sequence isolated from the Sargasso Sea
catgcaactgaattccactgaaatctctgaactgatcaaaaaacgtattgaacagttcgaagttgtcagtgaagctcgcaacgaaggtactatcgtcgctgttactgacggtattatccgtatcaacggccttgctgactgtatgcaaggcgaaatgattgagcttcctggcaaccgttacgctatcgcactgaacttagaaagaaattcagtaggtgctgtagttatgggtccttatgcggacctgcgtgaaggcacaaaagttaaatctactggccgtatccttgaagtaccagttggtccaggcttattaggccgtgtggtcaacactttaggtgagccaatcgacggtaaaggtccaatcgatgctgctggtttcgcaccagtagaaaaaatcgctccgggcgttatcgatcgtcgt

SEQ ID NO: 269931 - DNA, 803 bp, Unknown
  Bacterial polypeptide expressing nucleotide sequence isolated from the Sargasso Sea
accaaaaatcaacattaaactcaaagaagatcccttgattgaaataaagaatttagatgttttctatgaaatgccaagtattaattttttcaaaaaaaatagatttcacgctgtaaaagatacatctttaaatatttataaaaatacaacaattggattggttggagaatcaggatccggtaaatcaactttaggaaaagcaatagcaaacttaacaaaatatgaaggaaatattttttttgatggtcttgaaatatccagttcttctaagcaaataaagaaacatattcaaatagtatttcaagatccatatggatcattgtcaccaagaatgacgattgatgaaattgttggagaaggtttatcagttcacttcaaactttcaaaaaaagaatcacaatttaaaatagataaggtattaagtgatgttggaattgaactttccgcaaaaaacaaatatccacatgaattttctggtggtcaacgccaaagaatagccattgcaagatccttaattattagtccagcattcatgattcttgatgaaccaacctcagccttagatagatctatacaaatccaagttattaatttgttaaaaaatattcaagatgaatataaattaacatatctctttataagtcatgatttgaaagtaattcgctctatgtccgattacatttttgttatgaaggatggaaaaattgtagagtcaggcattgcaaataatgtttttgaatatccaaaagaaaaatatactaaaaaattactctcagctgcgttaagatacgcatccgaatgag

SEQ ID NO: 269932 - DNA, 805 bp, Unknown
  Bacterial polypeptide expressing nucleotide sequence isolated from the Sargasso Sea
gtgaatgttcatttattagagcaagagacagagattgttgataaacctaatgccaagccgataaatgttacaaaaggccacgtaaagttttcaaatgtccatttcagttatgacagtaagcgtccaattctaaatgacttgagtgttgagatacaaggtggagcaaaagttgcaattgtaggatcttctggctctggcaagtcaacaattggtcgtcttttatttcggttttatgatgtttcaggaggttctgtatcgatagatggacaagacattaaaaatattactcaatcatctttacatagcgctattggagttgttccccaagacacagttttgtttaatgacagcatattttataatatcgcgtacggtaaggacaatgctactaaggccgaggtggaagaggcggccagggccgctcaaatacacgagtttattgcgtctttaccagatgggtatggcactactgttggtgaaagaggtttaaagctttctggaggtgagaagcagagggtaggtattgcaagaaccctactcaaagatccaccaattttactactggatgaggcaacatcggctctcgactccgaaactgaacgtgaaataaatgatgctctggaaaatgcaggtaagggccgaacggttatctcaatagcgcaccgtctctcaactatttcagatgctgacaaaatagttgttcttgaacgtggggaaatagttgaaattggtaaacactccagtctcttaaaaaaccgaagtcgttactttgaactttggaacatgcagctaaaggctggctaaa

SEQ ID NO: 269933 - DNA, 670 bp, Unknown
  Bacterial polypeptide expressing nucleotide sequence isolated from the Sargasso Sea
gttgacgttgcgtgatatcgaagtacgccgcggcgagcgggtgacgctggcgctggacgaacttcacctcgaaggcgatcgcttcaccgtgatcctcggccacaacggctcgggcaagtcgaccctgatgaacctgctggcgcggcagctgcagccgacccgaggctcgctgcaactggacgggcgtaccctagccggtttttctgcccgtgactttgcccagcgcgtggccttcctgccacagcacctgcccgatgtcgccggcctgaccgtgcgcgaactggtgcgtctggggcgctttccctggcgcgggctgctcggccgctggcgcgccgaggaccatgctgccgtcgatcaggcgctggcccagaccgatgtcgcccattacgccgatcacctggccgacagcctctccggcggcgagcgccagcgcgcctggatcgccatgctgctggctcagcaatcgccgctgcttttgctcgacgagccaacctcggcgctggacctggcgcatcagtacgagttgatgggcctgctgcgtcagctcaatcgcgatagcgggcgcggtatcgttgccatcctccacgacatcaacctcacggcgcggcatgccgacacgggtgatcgccctcaaacaggggcggatcttcttcgacggcagcccggacga

SEQ ID NO: 269934 - DNA, 627 bp, Unknown
  Bacterial polypeptide expressing nucleotide sequence isolated from the Sargasso Sea
aatccaccctgctgcgctgcatcaactggctcgaagagccggatcgcggcagtattcacatcgccggccagcgcatcggcgtcgacgtccagggcaagcgcatgaacaaccgcgacctggcggcgattcgcgccaagaccggcatggtgttccagagtttcaacctgtggccgcacctgaacgtgctgcagaacgtcatggaagcaccgatgcaggtgaagaagatgcgcaaggacgaggcccgcgccatcgcccagacgctgctggaaaaggtcggcatggaacagaaggccgaggcctttccctacaccctttccggtggacagaagcagcgcgtggcaatcgcccgcgccctggccatgagccccgaggtgatcctctttgacgagccgacttcggcactcgacccggagcgggtcggcgaagtgctgacggtgatgaagaacctctccagcgagggctacaccatgatcgtggtcacccacgaaatggaattcgcccgcgcggtatcggaccaggtggtgttcctggaaaagggcctgttgatcgagaaatccgcaccggagaagttcttcaccaacccggaaaccgaacgcgtgcgcaagttcctcgaactgtccgcatgac

SEQ ID NO: 269935 - DNA, 262 bp, Unknown
  Bacterial polypeptide expressing nucleotide sequence isolated from the Sargasso Sea
ccttgtgggagaacctgttcatgcattgagtattgggcagcagcaacgtgttgctatagcgagagctttaatagggcaccctgaaatcattattgcggatgagccaacatcagcacttgataatacgcgaaaaaaacaatttattgagttgttgattgaacattgtaaggcaagtaaatcaaccttgatttttgtctcgcatgatttggaattaaagccatacttttcttcaacgtatcatattaacgacattattcattag

SEQ ID NO: 269936 - DNA, 673 bp, Unknown
  Bacterial polypeptide expressing nucleotide sequence isolated from the Sargasso Sea
gtaaaagacgtctcttttgaagtaaatcaaaatgaaattattgggattcttggccctaatggttgtggaaaaactactacaatcggtatgattttaggtttattaaaaccatcaaaaggaaaggttttaataaatggagtcgaaattgaaaacaaacgtgtgaacttattaaatcagttaaattttatatcaccttatatagagttgccaaaaaaattgacagttagacaaaatttagaagtttatgggaggctttatgatgtgaacaaacataaggcaagaattgaatatctgtgtgaaaaattaagactctacgaatttatagataaattaactggggagttgtcatctggtcaaaaaaatagggttagtcttgcaaaatcagttattaataatccaaaagttttacttcttgatgaaccaacggcatcacttgatcctgaaacaggtgattttgtcagaagttttttagaggaatatcaacaggaaaataaaacatcaattctgttagcatcgcacaatatggcagaggtagagagactatgttcttccgtttttatgatgaacaaaggatcgattattgacgagggtagaccagaggaattaattaaaaaacatggaagaaaaaatatggaagaagtttttttaaaacttacaagggaaaaagaatgaa

SEQ ID NO: 269937 - DNA, 307 bp, Unknown
  Bacterial polypeptide expressing nucleotide sequence isolated from the Sargasso Sea
ttagataaagtaggtcttgaagacagagttgaacataaaccaaacgagctatcaggaggacagcaacagagagtcgcaatagcaagagctcttgtaaataatcccagtattatatttgcagacgagccaacaggtaatcttgatactaaaacaggtgaagagataatgagtctttttaaagagcttcataaaaatgggcaaaccataatagtaataacccatgaaactgatattgctgatcaaactgatagagttataaacattaaagatggtctaattgagtcagatatgaggagaaatgtatgag

SEQ ID NO: 269938 - DNA, 652 bp, Unknown
  Bacterial polypeptide expressing nucleotide sequence isolated from the Sargasso Sea
tggcgagtctggatctggtaaatcaacacttgggaaagctttagcaggactgattgatttcaaaggttcagttctttttgaaggtcgtaatatcggtcaattaaattcaagagaatcaaaattaatcaaaaaagatattcaaattgtatttcaagatccatatgggtctctttcaccaagaatgacaataggagagatagttggcgaaggccttgacgttcactttaaccttaaaaaaaatcaaaaagacgaacgtattgctgaatctttgaagtcagttgagattaatccagacgatagatttaaatatcctcacgaattttcaggtggacaaaggcaaagaattgcaattgccaggtctttaatactaaatccatcatttatgattttagatgagcctacttctgcactagatagatcaattcaaatgcagataattgagcttttaaagaatattcaaacagactttaaattgacttacttgtttattagccacgacttaaaggttgttcaatcaatgtcggattacatatttgtgatgcaaaatggatatattgttgagtctggaccagcaaaacaagttttctcaaacccagaagaagtctatactgataaacttcttaacgcagcattgcgttattcaactatttaa

SEQ ID NO: 269939 - DNA, 751 bp, Unknown
  Bacterial polypeptide expressing nucleotide sequence isolated from the Sargasso Sea
aatggttgaattaaaatttaaagataaaatagaattcaaaaaagtaatatttagatacccaagttctaaaaaaaatattattgaaattgacaatctggaaataaataaaaaaaaatttataggaataaccggtgggactggtgcgggtaagtcaacatttattgatttgttaatgggcttaattgatcctgattatggttcaatcactattgatgataaaaaaattaatgatacttggaaaaaaaatataaactatattccacagagtatttttttagctgatgacacaattttaaataatatcgctttagggataagacctgaggaaataaatttagataaagtaaaaaaagcttgtaatattgcagatttaaaggattttattgagaatgatttaccagataaatataaaaccttagtcggcgagaatgggattagattaagcggaggtcagcgtcaaagagtaggtatagctagagcaatatacaatgatgcaaatgaaatattaataatggatgagtctacaaactctttagatttgttaacagagaataaaataataaataaaatcttagaagcaaatatatttaaaacagtttttttcataacccatcgaattcagtctcttaaaaaaagtgagatgattgttttttttgagacaggaaaaatatctgctttttcatcttatgatgaagcaaaaaaattaaatataaattttaaagaattcgatagaatttcatatgaaaaataa

SEQ ID NO: 269940 - DNA, 733 bp, Unknown
  Bacterial polypeptide expressing nucleotide sequence isolated from the Sargasso Sea
aatggataaaaattctcaggaaataattgttaaatttgacgaagttacaaaacaatatggagatcttgtagttttagataagctaaatttgaatattaaaaaaaatgaaatggtttcaattattggtccttcaggttctggaaaaacaactgttctaagagtattgatgactttagaaaaaattaacggcggggttattcatttggatggagaaccacttactcatatggatacaaatggcacattagtagaagctaacgaaaaatatttgagagatagacgttcaaaaattggcatggtatttcaacaattcaatttatttccacatatgacagcccttcaaaactgtatagaagctccagtagaggttttaggaatgaaaaaagaagaagcagaagaaagagcacttgagcttttagaattagtaggattaacggataaaaaagatcaacatccttcaagattatcaggaggccaacaacaacgtgttgcaatagcaagagctttagcaatgagaccaaaagttatgcttttagatgaaataacctcagctttagatccagaggttgttggagaagttttaaatgttataagatctttaaataaagaacacagtttgactatgattatggtaactcatcaaatgggatttgctagagaaatttcagatagagtatgtttttttaatgaaggaaaaatttttgaacaagggccaccagaacaattatttgga

SEQ ID NO: 269941 - DNA, 805 bp, Unknown
  Bacterial polypeptide expressing nucleotide sequence isolated from the Sargasso Sea
ctgctcggcgacgcgcgccagtccgacgtgcgcctcgaagcccgcaacctgagcatgggctacgcccagacccgtatcatcgaagacctcgacctgctgatacccagtggtcaggtcagcgccatcgtcggccccaacggctgcggcaaatccaccctgctggccggtcttgctcgcctgcacaagcccatctccggcagcgtactgctcgacggcaaggccattggcagcctgccgtcgcgtgaagtagcgcgccggctcgccctgctgccccaggacgcctcagctcccgatggcctgacggtcagcgaactgatccgcttcggccgccaaccgcaccagagcctgctgcgccaatggagcgaggaagaccaggccatcgtcgacgcggcattggtagccgccgatctggtcgaactggccgatcgaccgctggagtcgatgtccggcggccagcgccagcgcgcctggatcgccatggccatcgcccaggccacgcctctgctgctgctcgacgaacccacctcggcactggacctgggccatcagatcgaagtgttcgagctgatccgccaactggccgccgccggcaagaccatcgtcatggtggtgcacgatctctccagcgcctgtcgctacgccgaccacctgatcgccatgcatcagggccggatcgtcgccagcggccgccccgacgagatcgtcacctcggcgctggtcgagcgcctgtacggcgtacgctgcacgctgctgcgcgatccaatgagcggcacgccggtgattgcgggggtcagtaggctctgat

SEQ ID NO: 269942 - DNA, 775 bp, Unknown
  Bacterial polypeptide expressing nucleotide sequence isolated from the Sargasso Sea
tatgtctaaaatagaatttagaaatataaataaatcctttggagaaaataaagtaattaataattttaatattaatattaattcaggcgaatttgttgttttagttggtccatcaggatgtggtaaatcaactctcttaagaatggtatcaggattagaaacaatcgataaaggagaaattttattaaatgacaaaatattaaatgatttaataccttcaaaaagagagatagcaatggtatttcaatcttatgctctttatcctcatatgaatgtttatgaaaatatgtcatttggtttaaaaatggaaaataaaaataaaaaccaaattgataaaaaagttaaagaagctgctaaaatgcttcaaattgaagacttattagaaagaaaaccaagagagttatcgggtgggcaaaaacaaagagttgcgattggaagagcaataacaagaaacccaaaaatttttttattcgatgaaccgctatcaaatttagatgcagccctaagatcagaaatgagggtagaaatatcaaaactccacaaaaaaattaatactaatatgatttacgtaactcacgatcaagttgaagcaatgactcttgctgataggattgtaattcttaacaagggtaatatagaacaattttctactcctaatgaagtttactctgatccaaataatgtttttgtagcagagtttataggaacccctaaaatgaatattataaaattggaaaaaaaatatataaaatcaaatataattaattttttttga

SEQ ID NO: 269943 - DNA, 702 bp, Unknown
  Bacterial polypeptide expressing nucleotide sequence isolated from the Sargasso Sea
tatgtctcaaaaagatagtttcgtaaaattcgagaaggtagataaaagttacgatggagaaatactagtcgtaaaagatttaaatcttgatgttccaaaaggagagtttttaacaatgttgggaccatctggatcaggaaagacaactgttttaatgatgttagctgggtttgaaaccccaacgaatggagaaatatatttggatggaaatccgataagcagtattccaccaaataaaagaggaataggtatggtttttcagaattatgcattatttcctcatatgactgtaaaagaaaatttagcttttccactagaggttagaaaaatgaaacagtctgaaatagataaaaaagtttcaaatgcacttgcaatggttgaactacaagactttggaaatcgaatgcccttacaattatctggaggccaacaacaacgtgttgcattggctagatctttagtgtttgaaccaagattagttttaatggatgaaccactaggagctcttgataaaaatttaagagaacaaatgcaatatgaaattaaacacattcatgaaaaaattggtattacagttgtttatgtaactcatgacaaaagtgaagcattaacaatgtcaaatcgaattgcagtttttaatgatggaaagatttcaacaatttcttcggcagatgttttgtatgaaaaaccaatagttctttt

SEQ ID NO: 269944 - DNA, 430 bp, Unknown
  Bacterial polypeptide expressing nucleotide sequence isolated from the Sargasso Sea
tactctagctccaatatgggtaaaaaaacttccaaaaaaagaagcagaagaagtagcaatgaaaaatttaacgagagtacaaattgatgatcaagctcttaaatttccaggtcaactttctggtggtcaacaacaaagggctgcaatagctagagctctatgtatggaaccaaaaataatgttgttcgatgaaccaacttctgcactcgatcctgaaatgataaaagaagttttggacgttatggtcgatttagctaaaggcgggatgactatgatagtggttactcatgaaatgggatttgctaaagaagttgctgattatatgatttttatggatgaaggaaaaatagttgagagagctaaaactaaagaattttttgaaaatccaaaatcagatcgtacaaaactttttttaagtcaaattttataa

SEQ ID NO: 269945 - DNA, 425 bp, Unknown
  Bacterial polypeptide expressing nucleotide sequence isolated from the Sargasso Sea
agtgcttggaatgaaaaaagaagaagccgaagaaagggcgctagaattattagagctagtaggattgacagacaaaaaagatcaacatccatctagattgtctggcggtcaacaacaaagagtagctatagctagagctttggcaatgaggccaaaagtaatgcttttagatgaaattacatccgcattagatcccgaagtagttggagaagttttaaatgttattagatctttaaataaagaacataatttaactatgataatggttacacatcaaatgggatttgcccgtgaaatatcagatcgtgtatgtttttttaatgaaggaaaaatctttgaacaaggtccgccagaagaattatttggagatccaaaaaatgaaagaacaaagcaatttttacatgccgtacttgatgctcattaat

SEQ ID NO: 269946 - DNA, 434 bp, Unknown
  Bacterial polypeptide expressing nucleotide sequence isolated from the Sargasso Sea
catggcacaagttgaacttaaaaatgtcgataaagcttttggacaaacgaaagtcataaaagatgttgatctatctatagaaaaaggtgagtttgttgtctttgtgggcccctcaggttgcggaaaatcaacattgcttaggcttatcgcggggttagaaagtttaagtgatggtaaaatcataatagctgatcgacccgttatggatttaccaccctcagaaagaggtattgcgatggtttttcaatcatatgctctctaccctcatatgtctgtttttcagaatatggctttttccttaagtctacaaaagttttctaaagaccaaattagaacacgtgttgaagctgcagctaaaattcttcaaatggagcatcttcttgatcgaagaccagcagccttgtctggtggacaacgtcagcgtgttgctattg

SEQ ID NO: 269947 - DNA, 726 bp, Unknown
  Bacterial polypeptide expressing nucleotide sequence isolated from the Sargasso Sea
tatggaaaaaaaatcatcagatatcattgttaatttttcagaagtaacaaaacaatatggagatttagttgttttagataaattaaatttagaaattaaaaaaaatgaaatggtttctattattggaccatctggttctggcaaaactactgttctaagagttttgatgactttagaaaaaatcaatcaaggtgttatatacttggataatgaaccacttacgcatatggattcaaatggacaattaattgaagcgaacgaaaaatatcttagagaaagaagatcaaaaataggaatggtttttcaacaattcaatttatttccacatatgacagcattacaaaattgcattgaagctccaatagaagttttgggtatgaaaaaggaagaagcagaacaaagagcactggatttattagagttagtaggtttgacagataagaaagatgaacatccaagtagactttcaggaggtcaacaacagcgtgttgcaattgccagagctttagcaatgagaccaaaagtgatgttgttagatgaaattacatctgctttagatcctgaagttgtaggagaagtgttaaatgtaattagatcacttaataaagaacataatctaacaatgatcatggttacacaccaaatgggttttgctcgagaaatatcagatagggtttgtttttttaatgaaggaaaaatttttgaacaaggtccgccagaacaatt

SEQ ID NO: 269948 - DNA, 538 bp, Unknown
  Bacterial polypeptide expressing nucleotide sequence isolated from the Sargasso Sea
tggagggaaatagaattgaaatctttggaacaaataaacttcatatctccatatattgaattaccaaaaaaacttacggttaaacaaaatctaaccgtttatggaaaattatataaaatacataatattaatgagagaattgaatttttatcagaaaaattaagattgggaggattacttaatggcattacaggtgaattatcatctggacaaaaaaatagagttagtttggcaaaagcattaatcaatgaaccaaaagtattgctattagatgaaccaaccgcatcattagatccagaagtaggtgattttgttagatcttttttggaagattataaaaaagaaaaaaaaatatctatacttcttgcctctcataatatgaatgaagtcactagactttgtaagtcaattctaatgatgaaagaaggaattataattgacaaaggaaatcctgaagaattaatcaataaacatggtagaaaaaacctcgaggaagtttttttaaaattatctaggagtaaaaatgagcttaactagg

SEQ ID NO: 269949 - DNA, 628 bp, Unknown
  Bacterial polypeptide expressing nucleotide sequence isolated from the Sargasso Sea
aattttattacttgatgaacctttatctgctttagatagaaaactgcgtcaatcaatgcaattagaattaaaaaatattcaaaatgagttaggtattgcttttatttttgttacacatgatcaagaagaagctctgactatgtcagataaaattattgtaatgaatcaaggtaagattatacaaaaaggcacacctacacaaatttatgataatccatctagcaagtttacagctcagtttataggagaaagtaatttttttgaaggaaagataatcaatatcaatgaaaaaataacaataaaatcaaattgctcaaatactatttatttaaaaaatcttgataaatacaaatttgagattgataaaaatgtaactattttattaagacctgaagaattttcactctctccttatgaaacaaataatgaatgctttatagaaggtaatgttgaacaaatattttttttaggaactgattttaaaatcttaataagaatttctaatgaaaaagtaatacattgttcacttagagactctactaggtatgaaattaaaaaatttaaaagtggagcaaaagtaaaattattttatgatcctatgaacatcaaagtattaaataatgagtag

SEQ ID NO: 269950 - DNA, 655 bp, Unknown
  Bacterial polypeptide expressing nucleotide sequence isolated from the Sargasso Sea
gcaatttacttattgggtttaattaaaaattcatcaggacaaataagttttttagataaagatataaatcattatcttaaggaagaaagaataaattttagaaaaaatattcagatgatttttcaagatccttatggttctttgaatcctagaaaaactattggatcaactttatctttagcacttaaaatacattttaaattgaaagatgaagtgttaaaaaaaaaagtatttgaattattaaatatggttgaattatctcctcccaaagatttttttgatagacatcctcatgaattaagtggtggtcagcagcaaagagttgctattgctagagcaatttctacaaaacctaaattaataatttcagatgaggcagttgcgtcattagatatgtctataagatctgatatattaaaattattaaaaaaaataaataaagaaaccaaagtaagtatgattatgatttctcatgatctatcagtattaagaaatatgtgtagtagaattgcaattatgcatttaggaaaaattgttgaaattggaaataaaaaagaaatatttgataatcctaaaaaaaattacacaaaatctcttatttcagcaacattagaaattccgaataaagaaagaaaggtaaattatgaaaaatgaa

SEQ ID NO: 269951 - DNA, 460 bp, Unknown
  Bacterial polypeptide expressing nucleotide sequence isolated from the Sargasso Sea
atgattgaatttaataatataagtgttacttacccaggaggagttcaagctcttaacaatgtcacattagatattgaagaaggtgattttgtaataatagtaggtatgtcaggtgcaggaaaatctactttgcttcgaactgtaaataaccttgttaagcccactgaaggtgaagtaatagtggattctcgaaatgtaaccactgcatcaaaaaaggaattaaaagagatacgttcagatataggtatgatatttcaaacttttaatttagtaaacagatcgtctgtattaaaaaatgtattaactggaagattaagtcaagtttctactcttcgctcagtgttcggactatggccaaaagaagataaagatattgcttttgaatccttaaacaaagtagaaattttggaaaaagcatacgtaagaggatcaaatttatcaggaggtcaacagcaaaggg

SEQ ID NO: 269952 - DNA, 793 bp, Unknown
  Bacterial polypeptide expressing nucleotide sequence isolated from the Sargasso Sea
tccgttgaaggtccgaaagatggggcaggcggaagtcgaggaacgggtacagcgcgcgctcgacatggtgcaattgtctgacttcggtggacgacggcccgctcaactctccggcggccaacagcaacgtgtcgccgtcgcaagagccctcgtcttcggtccaaaactggttctgatggatgaaccccttggcgcgctcgacaagcagctgcgcgagcagatgcagtacgaaatcaagcacattcacgagaaccttggaattactgtggtctacgttacacatgaccaatccgaggctctgacgatgtctaaccggatcgccgtgtttaatgacggcgtgatccagcaattggcgccgcccgccgaactatacgaacgcccagaaaattctttcgttgcgcagttcatcggcgaaaacaataaactgacgggcatcgtcattgcacaagaagaaaagtcgtgcctggtcgaactcaattccggcgagcgcgtgaatgccctgccggttgctaccgacggagcgggtacggctaccatgttgtcacttcggcccgagcgggtcgcactcaacccggcagaaggtgaatgcgacaccaccgttttcggaaaggtcgaggaactgatctatctcggcgatcacatacgcacccgaatgtcagtgtgcggccgcgacgatttcatcgttaaagttccaaacgcttcagagccatccgggcttacacccggaattgaaatacctctcgggtggcgacgcgaggattgccgggcgcttgacctgcccgcagagggataa

SEQ ID NO: 269953 - DNA, 559 bp, Unknown
  Bacterial polypeptide expressing nucleotide sequence isolated from the Sargasso Sea
aatatttatcaataatctaaaacttgaagaaaatagaattgaaattcttgaaatgattaattttatatccccttatatagaactgcctaaaaaacttacagtgaaacaaaatttatacgtttactcaaaactttataaagttcaaaatattaaggagcgaattgagtatttgtcggaaaagcttagaatatcagagttattaaacagtattactggggagctttcatcaggtcaaaaaaatagagtaagtttggccaaagcactagttaatgaaccaaaagttctgctacttgacgaaccaactgcatccttggaccctgaagtaggagattttgtaagatcatttttagaggaatataaaaaagaaaaaaaaatttcaatactattagcatctcataatatgaatgaagttacacgtttatgtaaatctgtattaatgatgaaaaatggagaaattatagaccaaggtaaacctgaagatttaattacaaaacatggaagaacaaatttagaagaagtttttttaaaactatcaaggagtaaaagtgagtttaactag

SEQ ID NO: 269954 - DNA, 744 bp, Unknown
  Bacterial polypeptide expressing nucleotide sequence isolated from the Sargasso Sea
aaaaaatgaaaaatttaattgaagttaagaatataaaaaaaaattatggaaaaaaagaagctgtaaaaggtatatcctttaatgtagaagaagacgaaattttaggtttgctaggtcctaatggatcgggaaaaacaacaactattggaatgttgctaggcttacttaaacctactagtggtcaaatatttatcaataatcttaaacttgaagaaaatagaattaaaattcttgaaatgattaattttatatcgccttatattgaactccccaaaaaacttacagttagacaaaatttatatgtttactctaaactttataaagttaaaaatattaaggagcgaattgagtatttgtcggaaaagctaagaataggagagttattaaacagtattactggggagctttcatcaggtcaaaagaacagagtaagtttggccaaagcactagtgaatgaaccaaaagttctgctacttgatgaaccaactgcttctttagacccagaagtaggagattttgttagaacttttttagaggaatacaaaaaagaaaaaaaaatttcgatacttttagcttctcataatatgaatgaagtcacacgcttatgtaaatctgtattaatgatgaaaaatggagaaataattgaccaaggtaaacctgaagatttaattacaaaacatggaagaacaaatttagaggaagtttttctaaaactatcaaggagtaaaagtgagtttaactaga

SEQ ID NO: 269955 - DNA, 331 bp, Unknown
  Bacterial polypeptide expressing nucleotide sequence isolated from the Sargasso Sea
ttaggcgagcgtggtgtgcgtttatccggtggtcagcgccagcgtatttccattgccagagccatcttaagtaacccttcggtgttgttattggatgaagccaccagtgctttagacgctgaaagcgaacggcaagtgcagcaagctttagataacgccgcacaaaaccgcacgaccttagtgatagcgcaccggctggcaacagtcttggcagccgatcgtattgtggtgctggaagcggggcgaattgtcgctcagggcacccatacagagcttttgcaaagcagtgagttgtatgcccgtttggcggcgctgcagtttagccactaaa

SEQ ID NO: 269956 - DNA, 625 bp, Unknown
  Bacterial polypeptide expressing nucleotide sequence isolated from the Sargasso Sea
gcgcggttgggtgatgcaacgctgagcggcgtgccgccctggcgtcagcaggcgcaggtggcctacctgccgcagcaattgccgcaggcggtgtcgctgctggcctacgaaagtctgctggcggcggcgcgggcgcgttgtccacaacttgcgtcgcacgagctgactgcgcgggtcgaagcgattctgcagcgcctgggcatcgagcatctggccctgcagcgcatggatcgtctgtccggcggtcagcggcaactgctcggcctggcgcaggcgctggtcggtgaaccgcaactgttgttgctcgacgagcccaccagtgcgctcgacctgcactggcaactgcgcgtgctcgactgcgtggccgagcgctgccgcactgaacgcgccatcgccctggtggcctgtcacgacctcaacctggcgctgcgcttctgcactcacctgctgttgctggcgcccggcggcgcttaccgtttcggcgcacccgccgaggtgctggacgccgcctggctgcgccgcgcgtacgccatcgaggcgcgtatcgaacactgctcgctcggccagccgttggtgctggccgatagccctctgctcaaggaagccccacctcatgcccaatagc

SEQ ID NO: 269957 - DNA, 766 bp, Unknown
  Bacterial polypeptide expressing nucleotide sequence isolated from the Sargasso Sea
ttgggacatgggaatgcgcccgtgagcgcagccccgtcgctctattgtcgcggcagcgccgcctttggcgcggtgcctgtgttcgacgccattgaacttgagattgcggccggacagtggacctgcctacttggctccagcggcgttggcaaatcaaccatcttgaaattgtttgccggtcttggcgacaaggtcactttcattggcaatcttggtgccagcgatggtcagccggatggaagggtcgccatgatggcccaaagtgatcttctcttgccctggctgagcgtgtcccagaacgtttgcctgggcgcgacattacgcggcgaggcgcgcgacgacgatcgtgtggccgaggtcctcaaccgcgtcgagctgtcggaaaaatcggaaagcaaacccgggcagctctcaggtggtcaacgtcagcgggttgctctggcgcggaccctgatggaggaccgaccgattgttttgctcgatgaacccttctccgccttagatgcaagaacccgtgcgcagatgcaggaactggccgccgaggtgcttgtcggacggacggtgttgctggtcacccatgacccagccgaggccgcgcgtctcggccatgtaatcaagattatgtcagcgaacggaattgaggacgtggtgccgcccgctggcgcggtaccgcgtcgctttgacgctgacgacgtattgcgggttcaggcagggctattgggccgattgagggaggatgacgcatgcgtgcaggcgaacatctaag

SEQ ID NO: 269958 - DNA, 741 bp, Unknown
  Bacterial polypeptide expressing nucleotide sequence isolated from the Sargasso Sea
tatttgaagctttaaattttaaaataaacccaggtgaaaaagttggtttagtttgtcgttcaggttcagtaaaaagttcaattgttaatttattactccgtttgtatgatctagatgacggacaaattttaattgatgacaatgatatttctcaagtttcacaagattcattaaggtcaaatatagctgtggttacacaagacacagctcttctccatagatcaataaaagataatattttatatggaaatcccaatgctgatgatgaggaacttttcaaagcagccaaacaagctgaagcatatgactttattttggatttagaggataaagatggaagaaaaggttttgatgcttacgttggtgaaaggggtgttcgtttatcaggtgggcaaagacagagaatagctatagcaagagttattttaaagaatgctccaattcttgttttagacgaagcaacgagtgcccttgacagcgaagtagagtctgcaattcaaactcaactgacaaatattcttgaaaacagaacctcgcttgtgatagcacatagactatcaacgattaacaaacttgatcgattaatagtcatggatcaagggaaaattatagaagttggaacacataatgaactcataaaaaataaaggtcattattcaaaattgtggtcactacaatctggcggatttcttccaactgctgatgatccaaaactaagaaaaaaaacaaatattatttaac

SEQ ID NO: 269959 - DNA, 667 bp, Unknown
  Bacterial polypeptide expressing nucleotide sequence isolated from the Sargasso Sea
atgcaaatcttattatcagctaaaaatatttcaaaaacttttcaaggaaaaagagttcttgacaatattaatattgaaatcaagaaagcagaaattgttgctatatctggagcttctggtgctggtaaaacaactttacttaatattttaagtactttagataaacctgacaacagtgatatttcctcattatttattgatgatgaagaagtatttaatttaggtaaaaatgatcttgctaatctaagaaatcaaaaaattggatttgtttttcaatttcatgagttaatcccggagttaaatgttttagagaatgtatgtctgccaggttggattaataaggataataatgttaaaaataaagctgaagaacttctgaaatactttggtttaaaggattttgcaaataaaaaaccattaactctttcaggaggtgaaaaacaaagagttgcaattgccagatctcttattaataatcctaaaattatttttgcagacgaacctactggtaatttagattcaaaaaattcaaaaattctttttgacctattttttaaattaagagatgattataactgttctgttgtaattgttacacatgatgaaaatagtgcaaatatttgtgacagaaaactattaattgttgatggtaaaattaaaaattaaa

SEQ ID NO: 269960 - DNA, 775 bp, Unknown
  Bacterial polypeptide expressing nucleotide sequence isolated from the Sargasso Sea
cgatggctgcaatttcttcctgtttctgaaattgctcaggtcggcaggcaattggcagacacccttggttcaacacgaaggatttatgccctggagcatgaaccggtgaccatcaaagacggcccgcgtaaaatatccagtgaaacgacatcagagttgtcaatttccaatgtcggttttcattacccggggagatctcagaaggttctggaaaacgtgagttttaccattcaaggtgggcaaacggttgctttggtcggaccttccggggcaggaaagacaaccctggcccaactgctgatgcgtttttgggatccttccgagggagccatcctgctttcaggaaatgatatcagagagtacggacttgaagcactccgctcaaaaatcgctctcgtcgctcaggatacctacctttttaacagcaccctcaaagaaaacatccttatcgcaaaaccaaatgcaagttaccctgaaatgaaaaaggccattcaaatggcatctttgacggaacttgtcgaaactctgccgcagggttttgataccaaagttggagaaagaggaaccagtctttccggggggcaaagacaaagggttgccatcgcaagagcctttttgaaagatgcaccgattttaattcttgatgaagccacctctcatttagatgctttgagcgaaagtgaagtacgtggcgccctggacaaactcaaagaagaccgcaccaccatcatcattgcacaccggctttcaaccattcgaaatgctgacaacatta

SEQ ID NO: 269961 - DNA, 869 bp, Unknown
  Bacterial polypeptide expressing nucleotide sequence isolated from the Sargasso Sea
tgcatacgacccagtaaaaaaacttgttaatctaaatgcccaattgcaggaagggctcgctgcgagtgagagaatctttggtgtattagacatcaaacctaaaatcgttgacaggagcgatgctatacaacttaaagaagtgactggggagattttgattgaaaaccttcacttttcctatgacggcacgcccccaattttaagcaatttatcgatgcaaataccagctggacaaaccattgccttggtcggacattccgggtctggaaagagcacacttctaaatttaataacaaggttttttgccccttcatccggccttattttacttgatgataaagacattcaaacagtgacactctcatcactacgccaaaacttcgccatcgttagtcaggatgtttctctctttaatgaaacgataaaagcaaatatttgttacgggaaccccgaagcctctgacgagaaaattgtagaagctgccaaaaatgcagctgcacatgaatttataactcaattaccaaatggatatgaaaccgaagttggggaaaacggtgtaaaactctcgggtggacaaagacaacgcatagttattgcccgcgcaatgttaaaggatgcaccgattcttttattggatgaagcaacgtccgcactagattctgaatctgaaaaatccgttcagtttgcactgcagaaacttatgaataaccggacaacaattgtcattgcacatcgtctttcaaccatacaatctgctgataggatctatgtactcgatgaaggcaaggtggctgaatttggaaaacatgcggaacttttaaaacgtaacggcgtctacgcaaacctctataaactcccagttttctgaa

SEQ ID NO: 269962 - DNA, 1000 bp, Unknown
  Bacterial polypeptide expressing nucleotide sequence isolated from the Sargasso Sea
agctatttcccacgcaaagcgtgaagcaggctatgcaagagacggcatggacgatttttttgttactgtgcaccggcagatgcgattgtcgacgacgtatcatattcttatttatttaaacaacgccttcctggttttcactatctccgctctcgcgatatggctctggatgtcatccattgtttccaccggttcgattgcaattgcgattgcgatgtgtctaaggatcaacggaatgtcccagtggatcatgtgggaagtgtcgtctttatttgaaaatattggagttgtgcatgacggtatgagcatgatggcaaaacctcttgaggtggtggatcatgaacaagcatcgactctaaaaattagcagtgggaaagtagattttgaccatgtcggatttcattacggacgtcagggtggaatcatggaagacttcagtcttaccataactgcgggagaaaaagttggggtggttggacgttcaggtgccgggaaaactaccctgatgaatctgctgctccgtttttatgatctggaaaaaggtgaaatccgggttgacggacagaatatatccggagtcacccaggaaagcctcagagctcaaattggggtggtgacccaggacacctctttattgcaccgctccattcgtgacaacattgcctacacttctcctgaaatttctgatgaaaatgtgatagaggcagcaaagaaagcaaatgcctgggaattcattcaggaccttgaagattcttttggacgcaaaagacttgaagctcatgttggagagaggggagtcaagctttccggaggacaacgacagcgtattgcgattgcacgcatgtttctcaaagacgctccgattctggtacttgatgaggcaacatctgctctcgattctgaagtcgaagccgcaatccaggaaaatctgtttgaactgatggagggaaaaacggtgattgcaattgcccatcggctatcgaccattgcccaactgacc

SEQ ID NO: 269963 - DNA, 572 bp, Unknown
  Bacterial polypeptide expressing nucleotide sequence isolated from the Sargasso Sea
gatgaataaaaaagacgcatacgtcagtttccaaagtgtccagaaaagctatgatggggagacactggtaattaagaatctgaatttggaaacagaaaggggcgaattcctgacgatgcttgggccttctggttcaggtaagacaacctgcctcatgatgcttgccggttttgagacagcgacacacggtgaaatcattcttgacggaatacctattaacaatgtcccgccacataaaagaaacataggtatggtcttccagaattatgcactttttccccatatgactgtcaacgaaaacctagctttcccactgcaggtccgtaaattaaaaaaaagcgaaatagaagaccgtgtaaagaaagcacttgacatggtgcagctgggaagctttggttccagacgacctatgcagttgtccggaggccagcagcaacgtgttgctgtggcacgtgccctagtatttgaaccaaaactagtacttatggatgaacctttaggggcacttgataaacagcttcgtgaacaaatgcagtatgaaataaagcacattcatgaaaaccttgaagtaa

SEQ ID NO: 269964 - DNA, 849 bp, Unknown
  Bacterial polypeptide expressing nucleotide sequence isolated from the Sargasso Sea
ccaacattaaaattttaaataggtggactaaaaaagaaattattaatcaagatctaattcaaataaaaaacttaagtaaaacatttgatgatagtttttttaccgaaagttcaaaaaatgctgttatggcagtagatgatgtctcgtttaacattaaagaaggccaatcattcggactagtaggagagagtggcagtggaaaatccacgattgctaaaatgattgttaatttgtttagaccgagctcaggagatatttactttgataatgtttgtataacaaagattaaaagtaacaaagaaatgatgaaatttagaaaacaaattcaaatgatattccaagatccatactcttcattaaatggaagattaaaagttaaagatatagttgctgaacctataaaacttcacaatccttcaataagttcaaaagatttaaatgattatatttatgatttattagaatccgttgaactatctcaacagtctgctgatcgttatcctcatgaattttcaggaggtcaaagacaaaggatatcaatagcaagagctcttgcaactcaaccgagacttcttgtgtgtgatgaaccaacttctgcactagatgtaagtattcaagcgcaaatattaaatttattaaaagatttacaggatcaactaaatctgacaatcttattcattagtcatgatttaccggtggtaagacagatgtgtgatcgaatagcagtattaaaaaatggcaaactttgcgaagtttcaatgacagaagaattatttaaaaatccatctcatgattacacaaaagaattattaactctaatgccaaaaatagaatcgatttataactaat

SEQ ID NO: 269965 - DNA, 667 bp, Unknown
  Bacterial polypeptide expressing nucleotide sequence isolated from the Sargasso Sea
acaaagacaaagagttgcaattggtagagcaattacaaggaaaccaaaagtatttttattcgatgaacctttgtctaacttagatgcagctttaagagttcagatgagagtagagcttgctaaattacatgatcaattaaatgcaacaatgatttatgttactcacgatcaaaccgaagcgatgacacttgcagatgatatagttgtgttagatcaaggtattgtatcccaaaaaggatctccattaaaactttataatgagccagaaaatttatttgttggtggatttattggttcaccaaagatgaattttattaatactaaagtaataagctcaaatagctctagcactgaagttgaaatttcagggcaaggaaaaattattgttcctaaaacttcagataaagtttcaccaggcgatagtataaagattggtatcagaccagaacatatcttaatcaatactgctgaaaaatgctgggagagtaaagtattcgtaattgaaaaattaggctcttcaacatttttatatctagaaaaagagggagaacctctagtagttcaaactgacggagcaagtaaagttaatgttggcgacaatctctccttgagcttcgatctaaacaaatgtcatttatttgatagtaataatttagcctttaaataa

SEQ ID NO: 269966 - DNA, 738 bp, Unknown
  Bacterial polypeptide expressing nucleotide sequence isolated from the Sargasso Sea
tatagatggcattagtattcatgattataagttatcacatcttcgtcgatatatttcaattgttaaccaatcaccaacattatttaatgatactatcgaaaaaaatattgcttatggagaaagtgatattgatcaagataaattaattgaagccgctgaaatgtcaggttgcaatgaattcatatctaaacttcctgagggttataaatctgaaattggagatgacggtgttcttctctcgggtggtcaacgtcaacgaatagctatagcaagagcattctacaaagattcgcctattatcattttggatgaggccacatctgcattagataatgaatctgaattaatagttcaagaagcaattgaaaagttaataaataacaggactacaatcgtaatagctcacagactttctaccattgaaaatgctgacaaaattttagtgcttgatcaaggttcagttgctgaatcaggtactcactcaatattgttagataaagatggaatttataaaagtttgtaccaaaataaatttaatgattcagatgaaatagacaagtcttcaagaggaattgcaaggcaggagcaccttccaacctttacagaagaacctgttgagcagggttacttaattgatgcatggtatagaaaaagtttttggctttatctcttaacacctttaacttttttatttacttcttttataaaattccgaaaaaagtcatatataaaaaactc

SEQ ID NO: 269967 - DNA, 901 bp, Unknown
  Bacterial polypeptide expressing nucleotide sequence isolated from the Sargasso Sea
gtgttccagtcctacgcgctgtacccgaccatgagcgtgcgcgagaacatcgagttcggcctcaagatccgcaagatgccgcaagccgacatcgacgccgaagtggcgcgcgtggccaagttgctgcagatcgaacacctgctcaaccgcaagccgggccagttgtccggtggccagcaacagcgcgtggccatgggccgtgccctggcgcgtcggccgaagatctacctgttcgacgaaccgctgtccaacctcgacgccaagctgcgggtcgagatgcgtaccgaaatgaagctgatgcaccagcgtctgaaaaccaccaccgtctacgtgacccacgaccagatcgaagcgatgaccctgggcgacaaagtggcggtgatgaaggacggcatcattcagcaattcggcaccccgaaggaaatttacaacgaccctgccaacctgtttgtggcaagctttatcggttcaccaccgatgaacttcgttcccatgcgtctaaaacgccagaacggtggtctggtcgcgctgctcgacagcggccaggcccgttgcgagttgccgctgggcgtgaatgacgccggtttggaagaccgcgatgtgatcctgggcctgcgcccggagcagatcgtgctggcagcgggcgagggcaacggctcgtcgagcattcgcgccgaagtgcaggtgaccgagcctaccggcccggacaccctggtgtttgtgcagctcaatgacaccaaggtctgctgccgtttggcgccggacgtggcaccgcaagtgggcgagacactaaccttgcagttcgacccggccaaggtattgctgtttgacgccaagaccggtgagcggttgggcgcagtggcttcattgccggcacaggggcatgccgacaatgtgaccc

SEQ ID NO: 269968 - DNA, 787 bp, Unknown
  Bacterial polypeptide expressing nucleotide sequence isolated from the Sargasso Sea
gaagtgacaaaaatttttgatgataattctttaagtagtggtttttcatttatttctaataaaagtttgaatgataaaatagttaaagctgtcgacaatgtatcttttgaattattcgaaggcgagacacttggattagttggagagtctggttcaggtaaatcaactattgcaaagattattactggattaattgctcctaacaaaggtgatttaatttataataaagaacctctatataattcaaataaaaaatatcaaattcataatagtagaggtcaaattcaaatgatttttcaagatccttactcatctctaaatcctcgttttaaagttaaggatattattgcagaaccaattaaattttttcaaaaaaatattagcaataatgaacttttacaaaatgtttatgacctaatagatattgtgggaatgaccagacaatctctagatcgatacccgcacgaattctcaggagggcaaaggcagagaatatccattgctcgtgccttggcaacaagaccaagattattaatatgtgatgaaccaacttctgcattagatgtaagtatacaagctcaaatattgaatttattaaaagatatacaagatgaacttcatctcactatgctatttattagccatgatcttcctgtaattcgccaaatgtgtaaccggataattgtactaaaaaatggtgctgtttgtgaaacaaaagatacagaggaattgtttaatactcctgagcatgaatatacgaaggaattaattagacttatgcctaaaa

SEQ ID NO: 269969 - DNA, 814 bp, Unknown
  Bacterial polypeptide expressing nucleotide sequence isolated from the Sargasso Sea
gaaataaaaggtgaaattcaatttagtaaagtttccttcgcctatgctaaatcttctcaaaatatactcaacaatattaatcttgaaatagatataggagagtcggttgcctttgtcggaaagtcaggtgcaggcaaaacaactctaatgagccttcttccaagattttatgatgattatgaaggagaaataaagattgatggagtattattgaatgaatttgaaataaagaatctaagatcacacattgctctagtaagtcaaaacataactttatttaatgacacaatcgctaataatattaactatggctctgaagaaagatcccttgatgaaattaagtcagccgctcaaaaagccaatgctcatgatttcatagaagctctacctgatggctatgcaacaattgctggagatgatggtgttcttctctcaggtggccaaagacaaagaattgctatagccagagctctattaaaagatgcacctattttaattcttgatgaagctacttctgcactagattctgagtcagagaattatattcaagaagccttattagaattgacaaaaaatagaacaacattggttattgcacatagattatcaactattgagaattcagataaaattgtggtccttgaatccggtagtgttgttgaaataggttcacatgaaagcttaatttctcaagatgggcattatgcagaactacacaagaatcaatttaaagatgatgaagaagatggtcaaagaagagaacctcaaataaatttctttgaagaaaatactgatgatctctcttcggctagtt

SEQ ID NO: 269970 - DNA, 496 bp, Unknown
  Bacterial polypeptide expressing nucleotide sequence isolated from the Sargasso Sea
gaaaacagaaatattgggcttgttgttcaagaaagagctttattcccttttttaactattatcagaaacgtcatgtttggcatcaaagaaacgaaaagtaaaaagtatgaaattgcaatgagattactgaagctctttaaagttgataagtacgcatataattttccaaatgaaatttctagtggcgagcaacaaagggtcgcaattgcaagagccatggctccaaacccaggtatactactaatggatgaaccttttggcactcttgaccagtcattaactcgtcaactaagaacagaaacgagaaaaattttaaaagataataataccaccgcaataattgtttctcatgattttgatgatgctatttcaatgtcagacaaagtaattgttattgatgatggacaaatagttcaaagtggatctgcgaaagatataacacatatatcgccagaaaaatcagtaaaattgggtagtattatatcaaattcataat

SEQ ID NO: 269971 - DNA, 724 bp, Unknown
  Bacterial polypeptide expressing nucleotide sequence isolated from the Sargasso Sea
atggctgtagatgatgtgacatttgatattaaagaaggtcaatcatttggattagtaggcgagagcggcagtggaaaatcaacaattgctaaaatgattgttaatttatttaggccaagttcaggagatatatattttgacaatgtttgcataacaaaaattaaaagtaacaaagaaatgatgaaatttagaaagcaaattcaaatgatatttcaagatccatactcttcgttaaatggaagattaaaagttaaagatatagttgctgaacctataaagcttcacaatccttcaataagttcaaaagacatagatagttatatttatgatttattagaatctgttgaattaactcaacaatcagcagagcgttatccgcatgaattttctggaggtcaaagacaaagaatatcaattgcaagagctcttgcaactcaacctagacttcttgtttgtgatgaaccaacttctgctctagatgtaagtattcaagcacaaatattaaatttattaaaagatttacaagaacaattaaatttgacaatcttatttattagtcatgatttaccagtggtaagacaaatgtgtgatcgaatagcagtattaaaaaatggcaagctatgtgagatctcaatgacggaagaattatttaaaaatccatcacatgaatacacaaaagagttattaacattaatgccaaaaattgaatcaatttataactaat

SEQ ID NO: 269972 - DNA, 517 bp, Unknown
  Bacterial polypeptide expressing nucleotide sequence isolated from the Sargasso Sea
attttagtaactcatgatcaagaggaagcattaactatgagtgattttattgctgtgatgtttgatggaaaagtagaacaaattgcttcgcctaaagagttatatgaaagaccatcatcgagaagagttgcatcttttataggtgctatgaattttgtaaatgcagtaattttagagtctaatggtaaagtaaaagtaaaaagcgacttattgggtaagtttgagatttcaaagaaacaagtctctggaaatcatcttaataaagaaataactctaggaattagacctgaactgatttccataaatccagaaaaatcaaattccaaaagtttaattaaaggagaaataattgaaatttcttatttaggtgaaactacatactacaaaattggttttagcaaaaataatctacaattagatgttgcagcccaaaattcttttggaacgattaattatgaaattggtaacaaagtaaaaattaattttgataaagaaaatattgtaggatttgtttaat

SEQ ID NO: 269973 - DNA, 439 bp, Unknown
  Bacterial polypeptide expressing nucleotide sequence isolated from the Sargasso Sea
tatgtctaatgatcacttcgtaagatttgaaaatgttgataagagttatgatggcaaacagcttgttgtcaaaggacttaatttagatatcgaagagggtgagtttgttacaatgcttggaccatctggttcaggtaaaactacttgtttaatgatgttggcaggttttgaaacaccaacaaatggacaaatatatttagacaacaaagttatttcagacatacctcctcataaaagaggaataggtatggtttttcagaactatgcattgtttcctcatatgacagtttatgaaaatttagcttttccattaagagtacgaaaaattccaaaagatgaagctgataagaaagttgataaagctttgtcgatggtttcgttgcaaggttttgaggctcgaatgccaatgcaattatcaggagggcagcaacaaagggta

SEQ ID NO: 269974 - DNA, 774 bp, Unknown
  Bacterial polypeptide expressing nucleotide sequence isolated from the Sargasso Sea
cctgttacaggtccaaggacttcaggtttttctgaaacaacgaaatcgacggttgacggtcgtggaagacctgaatttttccctgggttttggcgaaaggcttggaatcgtcggtgagtccggatgcggaaaatccgtcacggcccttgccttattgaatttacttccctcgaccatgagcatggcaggcagaatccaccttgcttcgagggatgggcaaacggaggatttgaatcaattgtctgaagcccggctttgtgaaatccgtgggaaaaaaattgggatggtctttcaggaacctatgtctgccctcaacccggtccaaacaattgggcatcaggtttctgaaagcttattgcttcaccactccctttccaggcatgaagcggatcaaaaagcatccaggatgctggatcgcgtaggacttcctgattcacgttttgcccgaaaactatacccccatcagctttcgggtggacaaaggcagcgggtcgtgatcgcgattgccatggcatgtggtccggacctgttggttgctgatgaaccgaccaccgccctggatgtcaccatccaggcacaaatcctgagactgctcagtgagctggtagaagaagaaaaaatgtccctgatcctgatcactcacgacctcggggtgatttcagagaacacagaccgaatgctggtcatgtacgctggaagatgcgtcgaaagcgggcttacggaagatgtcttttcaaaattgaaacatccttacacccgcgggctgtttgaagc

SEQ ID NO: 269975 - DNA, 445 bp, Unknown
  Bacterial polypeptide expressing nucleotide sequence isolated from the Sargasso Sea
tatgggtgcaataaatatatcaaatgttggcaaagtttatccaaacggaacgcgtgctttagaagatgtcaatattgaaatcaatgatggtgagtttgtagttttagttggcccttcaggttgtggcaaaactactttgttaagaatggttgctggacttgaggatattacagaaggcgaaatttctattgctgataatgtagttaatgaagtagctccaaaagatagagatatcgcaatggtttttcaaaattatgctttataccctcatatgtctgtttatgacaatatggccttctcgcttaaattacgtaaattatctaaagaagaaatagataagaaagtaaaagaagctgccaaaactcttgaaattgatgaattgcttgatagaaaaccaaaagcgctgtccggtggtcaaaggcaaagagtagcaatgggtagagca

SEQ ID NO: 269976 - DNA, 917 bp, Unknown
  Bacterial polypeptide expressing nucleotide sequence isolated from the Sargasso Sea
tttctagttctgcagcaggaaatctctcctggaatgctgattgctggaagtattttaattggacgcgcgttgcagccggtggaaattgcggtaggtgcttggaaggggttcgtcgattctagggagcaatatttacgtttggtcgattggttagcgaacagccggccagacaccgaaaagatggcgttacctgcgatcgctggcaacatatcagttaaaaacgtagcgatggcggcacctggatctcggaagccagcactatctggcgttacttttgatatcccagccggagcaacttgtatgattttcgggtcttcaggggccggcaagagcacgttgttgcgcggaatccttgggttgtggccgacacaagccggtgagattcgtattgacggcaccgaggctttcaagtgccagcgctcggagctgggaccgcagctaggatacttacctcaagacatcgaattgcttgagggctcggtaagccaaaacatttcacgcttcggtaaggttgacccagatctagttatacaagcggctgaagatgcaggcattcatgagttcattctcgcattgccaaacggttatgacactgagttggggcaagttggcggcgttttgtcgcctgggcagcggcaaagggtcgcactggctagagctctttacgctcgaccaagactggtgattttagacgagcccaattctaacttagacgaggcgggcgaggctgctcttggcagggccattcagatactgaaggacaatggttccactgtgctaattgtatctcacaggcaaaacatactgcctctgaccgattatttacttgttctggctgggggtcagatcgtcgactttggcggatctgatgatgtgttgcaccgactaaacagtaggttcaagggcgatactggcgg

SEQ ID NO: 269977 - DNA, 541 bp, Unknown
  Bacterial polypeptide expressing nucleotide sequence isolated from the Sargasso Sea
atgtctgacccaataataaaaattcaaaatatgaataaatggttcggtgattttcaagttttaaaaaatataaatcttgaggttgaggcaaataaaaaaattgtagtatgtggaccatcaggatcgggtaaatctacattgatcagatgtatcaatagattagaagagcaccaagagggagatataattgttgatggaaatgaactatcagaaaaaacaaaagatattgaaaaaattagagctgaagttggaatggtttttcaacaatttaatttatttccacacttatcaattttagacaattgtactcttgcaccaatttgggtgaaaaaaatgccaaaaaaggaagctcaagaacttgcattagatcaacttaaaaaagtacaaatagatgatcaagccaataagttccctggacaactctctggaggtcaacaacagcgttgtgcgatagcaagagcattgtgtatgcagccaaaaattatgttatttgatgaaccaacgtctgcaatagaccctgaaatgattaaagaggtgcttg

SEQ ID NO: 269978 - DNA, 418 bp, Unknown
  Bacterial polypeptide expressing nucleotide sequence isolated from the Sargasso Sea
atggatgtcgaactaaaagcgtttacgaagagtttcggtaaggtaatagcggttaataatatgaatctgcagattgaacatggagagtttcttgttctactcgggccttctggttgtggtaaaactactgctttgagaatgattgcgggtttggaaactattgaaaatggtgagctttatatagggggtaaattaatgaatgatgtactcccaaaatacagagatgttgcaatggtttttcaaagttatgctttatatcctcatatgattgtagaggataacattggatatccccttaaaatgaaaggaataaaaggagaggaaaaaaaagatgcaattttaaaagccgcaaaacaggtacagcttgaaaaatttttgaatcgatatccaaaacaactttctggcggacaaagacagc

SEQ ID NO: 269979 - DNA, 301 bp, Unknown
  Bacterial polypeptide expressing nucleotide sequence isolated from the Sargasso Sea
gaaataggtgatgatggtgtactactgtcaggcggtcaaagacaaaggcttgcaatagcaagagctttttataaaaactctccaattattattctcgatgaggcaacatctgctcttgacactgaatcggaagaattagtgcaagagtcacttgaaaaattaatatctgatagaacaacgatagttatagctcatagattatcaaccattgaaaatgctgatcaaatagtagtactggatgatggtcttatatcgcaacaaggaaaacattcagatttacttgaagaagagggcatatacg

SEQ ID NO: 269980 - DNA, 739 bp, Unknown
  Bacterial polypeptide expressing nucleotide sequence isolated from the Sargasso Sea
gatgctggatctgcgcggggtcacggtgccaggacggcagcgaccccggctccatgccctctctctgcagctcaagcctggtgagcgggtggcgttgctggggccgagcggggcgggcaagagcaccctgctggcggtggcgactggcttgatcaccccccctgaggggcgtgtgctctggtttggtgagcctgcctcgcggcggccgcagctccgtcgccgccagcaagcccgcatcggcacgctctggcaggacctgcgcctggtcgatgaactcagcgttcagcaaaacctcaatgccggctgcctggcgcgctggagctggggacaggtgctgttgaacctgttctcggcccaggacagccaggcttgtcgtcttgccctcgctcgagttgagctcgatcatgggctgttgatgcagcctctggatcggctctccggaggacagcggcagcgggtggccatcgcccgcctgctgcgccaggacgcccagctgctgctggctgatgagcccctggcccagctggatcccccgctggcccgccgcctgctccagctgttgctcgagcttgggcaggctcctcgagccttgttgctgagcctgcatcgccctgacctgctcgagggttttgaccgcgtcatcggcctgcgctgcggtgagttgctgtttgatcaaccgcctgcctcgctgacgtctgccgacctgcagcagctgtattccacccacggccagccatga

SEQ ID NO: 269981 - DNA, 373 bp, Unknown
  Bacterial polypeptide expressing nucleotide sequence isolated from the Sargasso Sea
ctacgatacttttctcggcgagcgtggcgtgcgcctttcgggtggacagcgccaacgcattgcgatcgctcgcgcgatcctgaagaatccgcccatcctgctgctcgacgaagcaaccagcgcgctcgatgccgccagcgagcggctggtccagaaggctctcgacaatgccgcgcagaaccgcaccacgctggtcatcgcgcaccgtctcgcgaccgtgcagcaggctgaccgcattgtcgtgctggaacaaggccgcatcgtcgcgcaggggcggcacgccgagcttctgctgagctcgccgctttatgcccagcttgcggccctgcagttcggcgagccggcggggctggccgcgcagggggcgctctga

SEQ ID NO: 269982 - DNA, 397 bp, Unknown
  Bacterial polypeptide expressing nucleotide sequence isolated from the Sargasso Sea
cggatcgcctgcgcccacgacttcatcatggagcagccccagggctacaactctcctgttggcgaacggggtgccgggttgtccggcgggcagcggcaacgcatggccctggcccgtgccgtgctgcagaacccccgcctgctgattctggatgaggccaccagtgccctggatgcccgcaccgagcgccaggtgtgcctcaacctgttcgacgccttccgcggtcgcaccgttttcttcatcacccaccggctggccaccgtgcggccggcggacatgatcgtgctgatggaccagggagcggtgatggaggtgggagaccacactgagctgatgcagcgtcagggctggtattacgggcttcatcagagtcagcaccaggagggagtgagctgat

SEQ ID NO: 269983 - DNA, 670 bp, Unknown
  Bacterial polypeptide expressing nucleotide sequence isolated from the Sargasso Sea
catcatcatcgaagattatccctcaattcttattcacaatgctgacctttgccctccaggctcaaataaaacaataattaaaaatttaaatctaagtattgatgctaatcaatcacttttggttgtaggaccctctggatgtgggaaaacttctttactaagaatgattagtggtttatgggaacctaatcatggattaataaaaaaaccaaaatttggggaattattattcatacctcaaaagccttatatgttactgggttctttgagagaacaattatgttatcccacagaagttaaaaaatttagtgatgaacatcttaattctgtacttcatgaagtcaatttaaaaaccttagttgatcgttatcctaatcttgatatcaaacaagattggccaagaattctttctcttggtgaacagcaaagattagcttttgcaagactcttactaaattctccacgatttgcagtacttgatgaggcaacaagtgctttagatattgatactgaaaaaaaactatatagtttactcaaggaacgagaactttctcttgttagtgttggacatagacctagcttaaaagattttcatgaaaatattttagaattgaatggacaaggagattggaaattagtgacttctgataagtataattttaaggattag

SEQ ID NO: 269984 - DNA, 403 bp, Unknown
  Bacterial polypeptide expressing nucleotide sequence isolated from the Sargasso Sea
ttgaaactcctaactaatggagaaatttatttagatggaaatccaatttcaaacattcctccacataaaagaggtattggaatggtatttcaaaactacgcattatttccacacatgacagtttatgaaaatttagcatttccattaaaagttagaaaattttcaaaagatgatacagacaaaaaagtagaaaaagctttgtcgatggtttccctttcaggttttggcagtaggatgcctggacaattatctggaggacagcaacaaagagttgctgttgcaagagcattggtatttgatccagccgtagttttgatggacgaacctttaggtgctttagataaaaaccttagagaaagcatgcagtatgaaattaaacatatacatgaaagtattggtgtta

SEQ ID NO: 269985 - DNA, 455 bp, Unknown
  Bacterial polypeptide expressing nucleotide sequence isolated from the Sargasso Sea
taaacaagctgaagcatatgactttatattagaactagaagataaagatgggagaaaaggttttgatgcttacgttggtgaaagaggtgttcgattgtctggtgggcaaagacagagaattgctatagcaagagttattttaaagaatgctccaattcttgttttagacgaagcaacaagtgcccttgacagcgaagtagagtctgctattcaaactcaactgacaaatattcttgaaaacagaacctctctcgtgattgcacacagactatcaacgattaacaaacttgatcgattaatagttatggatcaggggaaaattatagaagttggaacacataatgaactcataaaaaataaaggtcattattcaaaattatggtcactacaatctggcggatttcttccaactgctgatgatcctaaactaacaaaaaaaacaaatattatttaac

SEQ ID NO: 269986 - DNA, 809 bp, Unknown
  Bacterial polypeptide expressing nucleotide sequence isolated from the Sargasso Sea
taaatcgactgaagatatttttaataatgctaagcatcaatatacaaaagaactaataaatagcaaaccaattaggttattacgaaatgctcctttggatgatgaattattaaaaattaataatttacactgtaaatatctgacaaaaaattcattttttgagagtaataaaaaatattttaatgcacttaaaaatattgatatcactctaaatcaaggagaaaccatagggatagtgggagagtcaggatcaggaaaaacaacattagcgatggcaatcttacagttgcttagatatgaaggagaaataaattttttaggaaaaaatctgaatgaatgtgcagattctgaattaaggaagattaggaatcaatttcaaattgtattccaagatccttactcatctttgtcaccaagaatgacaataagacagatactctctgagggcattgtagaatatgagaacatatcttcaagtaagcttaatgaaagatgtgagttattgattaaagaggtagggcttgacccgacaatgttagatagatatccacatcaattttctggagggcaacgtcagagaattgctatcgcaagagctctttcattacgtccaaaaatgattatttttgacgagccaacaagcgctttagatgtaattgttcaaaaaaatattcttgatcttattgtttcattacaagaaaagtattcgattagctatgtatttattactcatgatttaaaagtaattcgagctatttctcacagaacatacgttttaagagatgctgaaatagtggagagtaattaac

SEQ ID NO: 269987 - DNA, 93 bp, Unknown
  Bacterial polypeptide expressing nucleotide sequence isolated from the Sargasso Sea
cttgagcgcgttcgtataccttgagcaagccggtaagtttccagctcaactctctggtggacaacaacagcgagtagctattgctagatcact

SEQ ID NO: 269988 - DNA, 460 bp, Unknown
  Bacterial polypeptide expressing nucleotide sequence isolated from the Sargasso Sea
atgactgatattttaagatttgaagatgtaggtttgaggtacggacttgggcctgaaatactacaggatatttcctttgggcttcaagagggatctttccatttcttgatgggcccctctggtgcaggaaagtcatctttgctaaaattaatgtatctagcgcttaaacctactcgaggattgatacatatatttggagaggaaatctcaacaataaatagaaaaagagctccaagtttgagaagaaatattggggtcgtttatcaagagtttagattaatcccacatattagcgcttttgataatgtggcccttcccctcagaataacaaagctcaaagaaagcttgattaaaaaaaacgttgaagaattgcttgaatgggtaggcctcaaggattacatgctatcaaaacctcctacattatcaggtggacagcagcagcgggtagcaatagcaagag

SEQ ID NO: 269989 - DNA, 608 bp, Unknown
  Bacterial polypeptide expressing nucleotide sequence isolated from the Sargasso Sea
tatgaaaaataacaactcagatgaagtcatagtcaagtttgaaaatgtaactaaacaatatggcgatttagttgttttagataaacttaatctggaaattaaaaaaaatgaaatggtttcaatcataggcccatctggatccggaaaaacaacagtattgagagttttaatgactttagagaagataaatggaggagtaattcatttagatggcgaacctttaacgcatacaaatataaatggaagttttgtcgaagccaatgagagatacttaagagagagaaggtcaaaaataggaatggtgtttcaacaatttaatttatttccacacatgacagcattacaaaattgtatagaggcaccagtagaagtattaggaatgaaaaaagaacaggcagagaaaagagctttggaattattagaacttgttggtttaactgataaaaaagatcaacatccaagtaggctatcaggaggacaacaacaaagagttgctatcgcgagagcgcttgctatgaggccaaaagtgatgcttttagatgaaataacatcagcattagatccagaggttgttggagaagttttaaatgtaattagatctttaaata

SEQ ID NO: 269990 - DNA, 373 bp, Unknown
  Bacterial polypeptide expressing nucleotide sequence isolated from the Sargasso Sea
ttggcaccattccttgaggtcaaggagctttggcatcgctacgccagttccgattggaccctgcaaaacattgatttctccctcgaggcaggtcagttgcttggcctccttggcccatcgggttgcggcaaaacaacgctgctgcgcttgattgctggttttgagaggcatagccagggctcgattgcgattgctggccgcgaggtggcgtcgacgcggcgttggttgccgcctgagcgacgtcaggttgggatgttgtttcaggactacgcgctgttcccgcacttgacggcttggcaaaacgcttgctttggcctcaagcccaatgccgatcgcggtagggcccagtggcttttggagcttttgggttgaa

SEQ ID NO: 269991 - DNA, 863 bp, Unknown
  Bacterial polypeptide expressing nucleotide sequence isolated from the Sargasso Sea
ttggaaatttttgcattactattttcgttcatcaaaattacgattaatgtcatctcctattattgaaactataggtgtatcaatggctgtcatattgctctggctaggaggatcagaggtaatggttggttcttctttatcctctgaagactttttaagattcatgttcttattattttcaatgttaggccctgttcggtccctaagcaatgttcacattacgcttcaaaatggatatgcttcggctgaacgtatttttgaggtacttgatgaaaaaactgaggtagtagactctggagaaaatgagcttatgtatcttgaaagcgagttgaaatttgaaaatgtatcatttaattatggagagggatcttttcaattaattaatatcaactttcaaatgaaaaaaggtgaaaccattgcggttgttggtgccagcggggcaggcaaatccacaatagctgatttgataccaaggttttatgatgtaagcaaaggcaaaattatcattgatggtaaagacatcagagagtataaaattgattcattaagaaagatgatggggattgttacccaagagaccataatgttaaatacatctattcgagataacataacctatggttctaatgaaattgatgaaaaaaagatgcttgaggctgccaatggtgcaaacgcttgtgagttcattgataatttagagcttcaatatgataccattattggtgagcggggagttaagttgtctggtggccaacaacaacgaatagcaattgcccgtgcaatttataaaaacccatctcttctaattttggatgaagcgacatccgccttagatacaaagtctgagcgtttagtacaaaatg

SEQ ID NO: 269992 - DNA, 701 bp, Unknown
  Bacterial polypeptide expressing nucleotide sequence isolated from the Sargasso Sea
tatggaaatgctttcactagtagagatggaggaactcaaaaatcgtttaccttcccaactctctggcgggcagcagcaacgtgttgcactcgccagagcattggttggaaatccagatattcttcttttggatgaaccgctttccgctcttgacccatttttgcgaagacaaatgcgagctgaattaaagcaattgcagcggaaactaaatatcacttttgttcacgtgactcactcccaagaagaagcgatggcgcttgccgatctggttgtagtgatgcgggatggacaaattgaacaggctgataatccgcgaacagtctttaaggaacctgtaaatgaatttgttgcagagttccttggggatcaaaatattttaattggtcaaatcatatcagcaaaaggcaaaactttaactgtcgaaggaccaggtaatttaagatttcctatatcttcaacaaatttttcaataggggatacaattaaatttgccttaagaagcgatggcttggctttggggcaaataccaaaaggttctcatcgttcgaaggcaaaacttatccaaaccgaatatgccggctctaacgtacaagtaaaattacgtagtgatgacggtcaagaattcaacgctatttgcggcgaagaccacttcttctcgcataactggcacgagggagatgatatctatatatcgctagacc

SEQ ID NO: 269993 - DNA, 926 bp, Unknown
  Bacterial polypeptide expressing nucleotide sequence isolated from the Sargasso Sea
catgattttgggggttatttctaaagtctcagatgaaataatagttatgaaagatggtaaaataatagaagaaggcatcacaaaaaagatattaaaaagtcctaaaaaagattatacattaggattgttaaaatgtttgtggaagctagaaaaaggaaatccttctttatatacagataaaaaagttccatttatagaagtaaaaaatataaagaaagagtatcaattacctaacagactttttagtaaaagaaaaaaattatcagcagttgaagatgtttctttttcagtatttaagggcgatagtgtggctattgtaggagagtctggatctggaaaaacaactattgccaaaattataaatggtttagaatatccagacagtggagagattttaattaataattgtcctataaataaaatagatttatttaaaagggcaaggttgatacaaccaatttttcaagatccatactcaactttaaatcctaatcataccattggatatgtgatttctaggcctttaattattcaaaaaaggttctcatcaaaagaaatatatcaaaatgcgataaaaatgcttaaattagtagaattacctgatacatttttttacaggtttcctaaccagctttctggaggacaaaggcaaagggtttctatagcaagagctttaatattagagcctcagttattgatttgtgatgaacctacatcagctttagatgtaactatacaggatcaaattcttgatttactagaaaacctaaagaaaaaactttcaattacaataatcataataagtcatgatatatctgtagtaaaatatctttcaaaaagaatctttgtaattaaggatggtaaaattgtggaaagtggatttacaaaagatgtgttggaaaatcctcaatcatcttatactaaag

SEQ ID NO: 269994 - DNA, 829 bp, Unknown
  Bacterial polypeptide expressing nucleotide sequence isolated from the Sargasso Sea
tgtaggtttagtctttcagattatgcattgtttcctcatctatccgttttagataacgtaaaatttggattaagacgagatcgttcccgaataacggaaagtaaggcggttcacgctttagagatggttcacatggaaaaatttctgacgaagtacccccatatgttatcaggcggtgaacaacagagagtagcactagcgagagcgctggctccacaacctgatgttatgttgttggatgaaccatactccggacttgatgctaggcttcgtgaaaagatacgcgatgaggtattacacttattacgtgaacagggttgcgcaacattaatggttacgcacgacgcagaagaagcaatgtttatggcggataaaatagtggtaatgaatgacgggcgtgttcttcaagttggttcaccggatgaactatattttcagccagtaaactcttttgtggcgggtgtttttggggaattgaataaattaaatggattggtgcgcgagaataaagcaatcacacctctagttgattttcccgtagaagagttcgctagtggcactgaagttgaagtagttattagacctgaggcactttgtttgttaccgctagagggatcaaatatttatcttgaggcgtcagtagttgagtcgagattactaggacgagtgagttacatacatttatcttcgaaatgcccagatcgtgatggtgaaaacattcacttacattgtaagatgcctggccgggtcttaccttcttctggagaaatggtgcgagtttatatagatatagagcagacattcgttttcgaaaaaaacaaacaatagc

SEQ ID NO: 269995 - DNA, 292 bp, Unknown
  Bacterial polypeptide expressing nucleotide sequence isolated from the Sargasso Sea
aatgactagaaaatctttagaccgatatccccatgaattttctggaggtcagagacaaagaatttctattgcaagagctcttgcaacaaagcctagattattaatttgtgatgaaccgacatcagctttagatgtaagtattcaggcacaaatattaaatttattaaaagatatccaggatgaacttcatttaacaatattatttataagtcatgatctgcctgttattagacaaatgtgcaatagaattatagtattaaaaaatggtatcatttgtgaaacaaatgaaact

SEQ ID NO: 269996 - DNA, 510 bp, Unknown
  Bacterial polypeptide expressing nucleotide sequence isolated from the Sargasso Sea
tttcaggaggccagagacaaagaatctcaattgctcgcgcccttgccagtcagcctgattttttggtgtgtgatgaacccaccagtgctttggatgtctccgtccaggctcagatactcaatctgatgaaaaaactccaaaaagaactcgggttgacctacttgttcataagccatgatttagcggtcgtttctcacctttccgacaaagtgggagtcatgtatttaggaagattggtggaatgggcggacaccaaaactcttttcagggcgccgaaacacccctacaccaaaatgctcctggatgcgatcccggatttgaatttatccggaaaagccagaactcctttggcaggtgaagttccaagtccaatcaatccaccatccggatgccacttccatccacgctgcccctggtccaatgagcggtgccgaactgaattgcccacgctcatggatcaacagcaacaaagcgttgcatgtcatgctgtagatgaaaacagaatttgat

SEQ ID NO: 269997 - DNA, 827 bp, Unknown
  Bacterial polypeptide expressing nucleotide sequence isolated from the Sargasso Sea
acattagtcaaaatattgtatggtttgcttgcctctgatcagggatacataaattataatggaggtaaattagaaatatcatcaccttcagaagctagaaaaaacggcataggaatggttttccagcatttttcactttttgaatctttaacagtaagagaaaatttaattttaggtattgataatcagatttcatataatgatttaaaaatccaacttgaagatatttcttctaaatacaatcttccattagatttagatgcaccaataacatcactatctgctggagaaaaacaaagagtagaaattgttagaattcttttacaagatccacaattattaattatggatgagcctacttcagtacttacaccacaagaagttaaaaatttatttgtaactttaaatgctcttgttaaagaaggaagaactatcctttatataactcataaattagaagaagtgattactatatgtaatgaagtaacaatcatgagaaatggtaaagtaattgattcttgctcaactagtaatcaaacagcaaaaacattagcaacaaaaatgctgggtgaaaagttagatgaacttaaaactgattatactcaagtcaaaaattcaataaatttttctgctaaaaatatttcttgttcttttaatgatcctttttatactgatttaaaaaatgtatcttttcaagtgaatgtaggtgaaatttttggaattgctggagttgctggtaatggacaaactgaactgatggatattttagttggagaaaatacttctcttgactctggagagcttgtttttaatgaaaaaaatattga

SEQ ID NO: 269998 - DNA, 282 bp, Unknown
  Bacterial polypeptide expressing nucleotide sequence isolated from the Sargasso Sea
ctccgtcaataggttgtcttcaaaccagcgctttgagcactggacagcagcaacgtgttgcaatcgccagggcgcttattaaccagcctaaattacttatagctgatgagcctacctccgcgcttgacatggaaaaccgtgatagtttcatgtcgctgatcacagagctggcaactacctataagaccactctactttttgttagtcacgacttatccttgagtcattacttcgaccgggtcgaaggcctgagttctttctgtcgaaatggagaaaattgat

SEQ ID NO: 269999 - DNA, 298 bp, Unknown
  Bacterial polypeptide expressing nucleotide sequence isolated from the Sargasso Sea
atgctaaacagacgggtagtcgtaccccgggccacggccgaagaccttttggtcgacagcctgtcggtggcctatgacggaccccaggttttgcacgatgtgacgcttgacgtagctgcaggcgagatggtcgccctcctgggacccagcggctgtggaaagacgacgctcctacgaactatcgccggtctcgaacgccagatgtcaggcactgtccgcctaggcgaacgcgttctcggcgacgggcattacttcgtcccaccggagaagcggcggatcggcatggtgtttcaggacg

SEQ ID NO: 270000 - DNA, 570 bp, Unknown
  Bacterial polypeptide expressing nucleotide sequence isolated from the Sargasso Sea
gatggctgcggagaacgacacgcttgtccgctttatagaagtgcaaaaaagctatgacggcgaaacgctcgtcgtaaagaacttgaaccttgacgtggagcggggtgaatttctaaccatgttaggcccgtccggttcgggcaagacaacttgcctgatgatgctggccggtttcgagccggcaacgcacggtgaaattaccttagacggtgtgccgattaataacgtaccaccgcataaacgtggtattggtatggttttccagaactatgcactattcccgcatatgaccgtcgctgagaacttggcgtttccgcttcaggtccgcaaaatgcacaaaaccgagatcgaaagccgggtcaatcgggcgctcgatatggttcaattgggtggattcggcagtcgtcggccggcgcaattgtccggcggacagcagcagcgtgtcgcggtggctcgcgccttggtgttcgatcccgcgttggtgctgatggatgaaccctctggcgcgctggataaacagctgcgtgagcagatgcagtacgagatcaagcatattcacgagaaatcttg

SEQ ID NO: 270001 - DNA, 866 bp, Unknown
  Bacterial polypeptide expressing nucleotide sequence isolated from the Sargasso Sea
agaaagaaatttagcagttatattaataacacatgatatgggagttattgccgaaacaactaatcgggtagcagtgatgaagaatggaaatttagttgaaattgggcctacaaaagaaatattaactaatcctaaagaagtttatacaaaatctcttgttagttctgttccgccaacaaataaaaaaatattaagatttaaaattattgaaaaagaaaacaataaccaaaatgaaacaaatattaaaattttaaatagatggcaaaaaaaagaaataattaatcaaaatttagttgaagtaaaaaatttaagcaaaacatttgacgataatttttttacagaaagttctaagaattctgttatggcagttaataatgtgtcatttaatataaaagaaggagagtcctttggtttagtaggagagagtggtagcgggaaatcaacaattgctaaaatgattgtaaatttatatagcccaagttctggagatattaattttgacaatgtttgtatcaccaaaattaataacaaaagggaaatgatgaaatttagaaaacaaatacaaatgatatttcaagatccttattcttcgttaaatggaagattaaaagttaaagatatagtgtctgaacctattaaacttcacaatccttctataagttcaaatgatttaaataattatatatatgatttgttagaatctgttgaattaagtcagcaatcagccgaacgttaccctcatgaattttcaggaggtcaaagacaaagaatatctattgcaagagctcttgctactcaaccaaggctactagtgtgtgatgagccaacatctgctttggacgtaagtatccaggcgcaaatatgaa

SEQ ID NO: 270002 - DNA, 943 bp, Unknown
  Bacterial polypeptide expressing nucleotide sequence isolated from the Sargasso Sea
tttgaataagaagaacttagtgaaaaatgatgcgttaataattgatgatttgcatcataaatatgataagcgagaatgttcaaattggatattaaacgcaattaacctaaaaattaaaaatggcgaattattagggttgcttggtccttctggttgcggaaaaactactcttttaagattaattgcggggttcgaatttccctctagagggaggatttctctaaacgataaggaaatttcaagtggaaaaaaaattcttagtcctgagaaaagaaatattggtatggtttttcaagactatgcacttttccctcacttaactgttttggaaaatgtaatttttggtttaaaaaacaaaaaagatagatctagagttgactatttattaaatgttgtaggtcttgatagttttattggaagatacccacatgaattatctggaggccaaaaacaaagactagcaattgcgagagctcttgctcctggtactaattttattttattagatgagccattttgtagtcttgatatgcatgtcaaaataaaattgagaagtgaactcccaaatatcctaaaaggttgtaatgcaagtggattgatggtaactcatgatccggaagaggcaatgtcaatttgcgataaagttgccgtcatgaatgaaggaaaaatacatcaaattgatacaccaattaaccttctaaacaatcccaagaccctatttgttagtagttttattttgggtaataatattattaatcttcaaaaaaatggtaattcatatatgtcgtgtttaggtgaaataaatagttcagtggttttacaaaatgcaaatattaaaagtatgtcaatttcgcctaaatttatttcaattaaaaaatcagaatctggaaatgcgaatgtaatatctaaagaatttcttggagaatttcttatatataaagta

SEQ ID NO: 270003 - DNA, 469 bp, Unknown
  Bacterial polypeptide expressing nucleotide sequence isolated from the Sargasso Sea
ttatttaatgacagcatattttataatatcgcgtacggcaaagataatgctaccaaggccgaggtagaaaaggcggccaaggctgcgcaaatacacgagttcattgcgtccttaccagatggatatggcactaccgttggtgagcgagggttaaagctttctggcggtgagaagcagagggtaggtattgcaaggactttactcaaagatccaccaatcttactactcgatgaggcaacatcggctctcgactccgaaactgaacgtgaaatacatgatgctctggaaaatgcaggtaagggccgaacggttatctcaatagcgcaccgtctatcaactatttcagatgctgacaaaatagttgttcttgaacgtggggaaatagttgaaattggtcaacactccaatctcttaaaaaaccgaaaccgttactttcaactttggaacatgcagctaaaggctggctaaa

SEQ ID NO: 270004 - DNA, 727 bp, Unknown
  Bacterial polypeptide expressing nucleotide sequence isolated from the Sargasso Sea
ttgcttttggcaaatgcctcattggaaatcgtgccaggtgaaattctggcgctcgttggcccgaatggcgctggaaagtcgactttgctgcgtactctcgccggagatttgaaacccacttcaggaaacgtattctatgattctagaaatctaaaccaactttcggtgagagagcgcgctattccaaggagtgtgatgtctcaaactcaacccatgatttttgattttaccgcacgtgaagttcttcagatgggatggttacatgcagatcacaactactataacgagtattttgagtcagctgttgataaccttgcgtgtgcctgcgaaattgagcaactgatggaacaaaagtttaataccctctctggaggggaacaaaaatttattcactttgctcgatcactgctgcaattatgggcgcctgatgatttaaaagataatcgttacctgctgttagacgaaccagtggcgggcttagatatggggcgcgagttgcatatgttaaatgtcattaaagagcacgctaagtatatgggagtgcttattattttgcatgatttaaacttggcggcacgatttgccgatagtgtcctgttgttagaagagggtcaaattttgaaagcaggaccgccccaagccgttttcaccgagcacattatcagcaatgtatacaaagtgcctgtgatgatcacacaggacccgttaacaattagatattattgaa

SEQ ID NO: 270005 - DNA, 934 bp, Unknown
  Bacterial polypeptide expressing nucleotide sequence isolated from the Sargasso Sea
aggaccaagcgcttcagggtaaaagttcattatttaagaataatagctggatttgaaaatattagctcaggtaaagtgaagctcaatggtctgatcgttgatgatcgatcaacaatagttcagccacaaaatagaaatgtaggaatcatttttcaagatcttgcattatttccacacttgagttgtaaggataatattctttttggtataacaaattattcagctgaccataaaagacaaagattagatagactttgtaacttacttgatatcacatcaatcaatgataaatttcctcatgaaatatctggcggacaacaacaaaggatagccatcgcgagagcattagcacctggacctgaaattcttttattagatgaaccatttagtgcattggatgaggagctaaaagaaactttgatgcatgatgttaaaaatcttttaaaagaagaaaaaataacaacaattgttattactcataacataaaagaggcttttcagttatctgataaaattgcatttcttgataataaaaagatcatacagtttgatacagcatacaatctttatcataaaccttatacaaaagaaattgctaatttttgtggaattggtagctttataaatggaactgtaattgataataaccatgtttctaccatactaggtaatttattcggtgatacatccaaatttaaagttggctcgaatgtatcagttatgataagaccagatgatatcattcatgatgatgattcaccacaatctgcaaaagtactagaaaaaattttttttggatctgattttttatacaaacttgaactaactgaaggcgaaaaaatattttgttatacacctagtcatcataatcatgcaattaatgaagttataggtatcaaacctgtaattgatcatctaatattgttcgattaat

SEQ ID NO: 270006 - DNA, 900 bp, Unknown
  Bacterial polypeptide expressing nucleotide sequence isolated from the Sargasso Sea
ctcacgaagctttcttggcggtcaaagacaaagaattatgatagccatggccctggtcaatcagccaaagcttctaattgcagatgagccaacaaccgctcttgatgtaaccattcaggcgcaaatacttgaccttatgtctaagcttaaaaaagaacttggaatgtctattttgtttattacgcatgatcttggccttgtaagagagttttctgatcaagtatgcgttatgcaaaatggacatattgttgaaaaggggaataccgttgatgtatttaaaaatcctgagcattcatacactaaaaaacttcttaatgctgagcctcagccaaaattagatattaatactgaagaaattcctttaataaagattgaaaatgtagatgtcttttatgatatgccaagcataaatttttttaacaagaatcgtttccatgctgttaaaaatgcatctttaaatatattcaaaaatactacaattggtgtggtgggggaatctggctctggcaaatcaaccttaggtaaggcaatagcaaatcttattaaatatgagggcgatattttttataatgggaaggatatcagatattcttcaaaagaaataaaaaagcatatacaaattgtttttcaggatccatatggctctttgtcacctagaatgactgttggagaaattgttggagagggactaggtgtccactttaatttgaccaaattagagacacaaaaaagaattgataaggttttagatgatgttgggatagagatagatgcaaaaaataaatatccacatgaattttcaggaggtcaacgccaaagaattgcaattgcaagatcattaataatgaatcctgcatttatgattctagatgagccaacttcagccttggatagatcaat

SEQ ID NO: 270007 - DNA, 553 bp, Unknown
  Bacterial polypeptide expressing nucleotide sequence isolated from the Sargasso Sea
catgttccaggactcgcgcctgctgccctggaagcgtgtggccgacaacgtggccctgggcctgccgcccgagcggcgcggcgctgcggcccacgtgctggcgcgcgtggggctgggcgaccggttgaacgagtggccggcacgcctgtcgggcggccagcgccagcgcgtggccctggcacgtgccctggtgcacaacccgcgcctgctgttgctcgacgagccgctgggcgcgctggatgcgctgacgcgcatcgagatgcaccgcctgatcgaaggcctgtggcgcaccagcggctttaccgcgctgctggtgacccacgacgtgcaggaggccgtggccctggccgaccgcgtgatcctgatcgaggacggccagattgcgctggaccagcgcatcgacctgccacgtccccgctcgcacggcgatgccgcctttgccgccatcgaaaaacgcatcctggaccgcgtgctgcaaaagcccgatggcgacccggcgcacgaagccccctggccgggtgtgccggcgcacgggctgcgctgggccgtgtga

SEQ ID NO: 270008 - DNA, 664 bp, Unknown
  Bacterial polypeptide expressing nucleotide sequence isolated from the Sargasso Sea
aatgattctaaaagtaaatggacttaaaaaagaagtcacctcgggtgaatcccttcttaccatattagataacgtatcgtttgagcttcaagaaggccagtctttagcaataactggtccatcgggttccggtaagtcaactttattaggccttttagcaggactagatattgctacgagtggtgagatttatttagatggtattggtttacaccttttagatgaggaaagaagagctgggatacgaaaagaaaaaattggtttcgtgtttcaatcttttgagttactgccaagtttgactgctttggaaaatgtcatgttgccttctgaactaaaatctgaaacaaaaccaatggaaaatgctgaatacttcctagaaagagttggattaaaagatagacagcaccactacccaaatcaactttcaggtggtgaacaacaaagagttgcaatagcgagagcttttgcatgtaaatctaagattctttttgcagacgaacctacaggaaacttagacccgaagaatggagagttaatttctaaattgctgttcgaggttaatgctgaaagtgacaatgctcttgtcattgtgactcacgaccatgagctagccaataattgcgataagaaaattgagctaaaactaggtcaaatagttgaataa

SEQ ID NO: 270009 - DNA, 824 bp, Unknown
  Bacterial polypeptide expressing nucleotide sequence isolated from the Sargasso Sea
agcaatattaacagaaccaaaagaaacttatacgaaaagtttagttagttctgttcctccaacaaataaaaaaatatccagatttaaaattatagagaaagaaagcaataaccaggaaaacattaatttaaaaattttaaacagatggaataaaagagagattttaaaaaaagatttagttcaaataaaaaatctctgtaaaactttcaatgaaggtttttttacagaaaaatctcaaaataatgtattagcagttgatactgtttcatttaatatacaagaaggaaaatcttttggacttgttggtgaaagtggcagtggaaaaactacaattgcaaaaatgattgttaatttatttaaacccacttcaggtgaaatttattttgatgatgcatgtattaataatataaaaagtaacaaagaattacttaaatttagaaaacaaattcaaatgatattccaagatccgtactcctcattgaatggtaggcttaaggttaaagatattattgctgaacctataaagttacatgatgcaaatattagctctaatgaattaaatgagtatataaatgatctcttagactctgtggagttatccaagtcttcagccgaaagatatcctcatgagttttcaggaggacagagacaaagaatttctattgcaagagcattagcaacaaaaccaagattattagtttgtgatgaaccaacatctgctttggatgtgagtattcaggctcaaatactaaatttacttaaagatttacaagaacaacttaatttaactatcctttttataagtcatgatctaccagttgttc

SEQ ID NO: 270010 - DNA, 701 bp, Unknown
  Bacterial polypeptide expressing nucleotide sequence isolated from the Sargasso Sea
attaaagaatatttattataagcaccctaacgctccaaaagatactttaaatgatatcaatttaactataccatcatgtacaactgtaggtctggtgggaattactggtagtggtaaaactactttagtagatattattttaggtttattagatgcccataaaggtcaaattgaagttgatggtactataataaacaaagataatcttagagcatggcaacgtaacattggctatgttccccaacaaatctatttagctgatacaagtatatcaaacaacattgcttttggagtaaattcaaccaatattaaacaagaggatattgaaatagctgcaaaaattgcaaatatacatgattttgtaattaatgaattgcccttaaaatataataccattgtgggtgaacaaggtgtgagactttcaggtggtcaaagacagcgtattggaattgcaagagccttgtaccataatccaaaattattgattttagatgaagctacaagtgcacttgataatcttacagagcaatcagtaattaatgaaatatataagttaagaaaaaatatgactatcataatgatctcacatcgtttgagcactattgaaaaatgtgataaaatatttttgttagaaggtggcaaacttaaaaatcaaggccaatataacgaaataatttcaactagtggtaaatttaaataga

SEQ ID NO: 270011 - DNA, 853 bp, Unknown
  Bacterial polypeptide expressing nucleotide sequence isolated from the Sargasso Sea
aatgccaagtcttaaagatttaagaaacagaatatccagtgttaagtcgaccaaaaaaattacctcagcaatgaagatggttgcggcagctaaattaaaaagagcacaagataatgcagaaaaaacgagaccatatgcaagaaaaatgagtgaaattgtaaattctttagttgaaaacaataaatcaaaagaatttaagttttcagaaaaaaaaactaaaacaagaaatatacttcttgtagtgtgttctgctgacagagggttatgtggagggttcaatggttcgataataaaattttcaaaaaaactgtcagagaaaataattaatgatggaggtcaagtcagttacatatttgttgggaaaaaagcttaccaatctcttcaaagattttgcggtgaatctattctggactttttttccgatattgctaatccatctattaaatttgagttagcgagttctttacgagataaaattttggaactttttttaaatggttcaatggatgaatgttacttaatatacaccgaattcaaaagtgcaatttctcaaactgtacaatccctaaagcttctcccactaaacgcattagaaacaagcgataacaatagttcaaataaatcttatgattttgaaccaagtgaagaggaaattttgaatgaaataattcctaaaaatattgcaatacaaatacacactgctctcctcgaaaacttagcaagtgagcaaggatcgagaatgactgcaatggataatgcaacgagaaatgcaaatgacatgatagacaatttaacgctattctataatagatcgagacaagctcttattacaaaagagttaattgaaataatt

SEQ ID NO: 270012 - DNA, 946 bp, Unknown
  Bacterial polypeptide expressing nucleotide sequence isolated from the Sargasso Sea
gatcgctgacgagccgacaaccggtctcgatgtcacgacccagaaggcgaccatggatctcgtccgtgatcttacccaggaacgcaatatgtccgtcgtactgatcacccatgatctcgggatggccgtagcgtactgcgaccgaatcgtagtcatggagaagggcgcggtggttgaaaccgcaccggtcgcggaactgttttccaatccacagcacacctatacgaaaaaactaatcgcaggctctccgggaccacattcgacccttgccgagctggcccccgaaacacccactccaacaagtgcaacggtgctgccgggatcgagtgttaagctcccagaaaacggcattaggggaggggagaacatcctcgaagttttcaacctagtgaaggagtttcccattcagcgggccgctggtgggcattggccatggcgcaaggcatcgcaaccggatcggagcttccgcgctgttgacgatatttcgttcagcttgaagcgcggcgaaagtttgggcttggtaggggagtccggttgcggaaagtctacgacttccagcatcatcacccggctcatggatccgacatcaggtgacatcatcttcgacggcaaaaatattacagcctatcgggcccagacctttgggctgaggccggagcgtcagcaaattcaaatggtcttccaagatccgacggatagtctcaatccgcgatattcgtcctacgacagcattgcagaaccgctaaaacgactcacgggacttcgggacagaacgctaattcgggagaacgttgaggtattggcggaacgagttggtctacctaaggctctattgagccggttcccgcaccagctctccgggggacagaaagcccgcgtcgggatagcccgcgccattgccgttaatcctaaacttctgatcctagacgaaccgacgtccgccctg

SEQ ID NO: 270013 - DNA, 712 bp, Unknown
  Bacterial polypeptide expressing nucleotide sequence isolated from the Sargasso Sea
atgacagaaaaactgcctattatcgaaatccacgatttgcataaaagctatgacaaacttgatgttttaaaaggcgttgatttggtagcgcatgagggatgtgttgtcagccttattggggcatcagggtcgggcaaatcaacactgctacgttgcgctaacctgctcgaaaacagccagcatggtgaagtaatatttcatggtgacaaggttaaatgggccggtcacgggaccgcgcgtcatccgtcagacaaacatcagcttcgccgtatccgaagcaagctatccatggtgttccagcaatttaacttatggtcacatctaaccattttgcaaaatattaacgaagccccaatcactgttttgcaagaatcacctgacgaggtagaggcacgctcccgcgcgttgctcaaaaaggttggtattttggacaaggctgatatgtacccggcacaattgtctggcggtgagcaacaacgcgctgggattgcccgcgcgcttgccatgaatccgaaagccattctattagacgagccaacatccgcgctcgacccagaaatggaacaggaagttgtgcaggtcataaaagcgctggcagatgaggggcgcacgatgattttagttactcatgacatgaatttagcgtatgacgtatcagaccatgtggtgtttttgcatgaaggtaggatccttgaagagggttcgccgcaaa

SEQ ID NO: 270014 - DNA, 841 bp, Unknown
  Bacterial polypeptide expressing nucleotide sequence isolated from the Sargasso Sea
tatacaaaaaaactttttgaaagcagtatctgcttcaggcccaaaatcagtccccgcacactccaagataattttgagcgctcaagataccaaggtgtggtttcctgtttataaaggcttcttgaagcggacagtgggccacattaaagcgctaaactcagctacttttaatgtaagaatgggtgaaacattaggaatagtaggtgaaagtggttcggggaaatcaactattgctctagctcttatgcgattaattgattttgagggtgaaattaattttgatggcaaagatataggttcattaaaaacaagagaattaagacgaatgcgatctgatatgcaaatcgtatttcaagacccttttggttcattgtcacctcgtatgacttgtgcacagataatttccgagggtttggaggtccatcaatcagaaagttttgaagatacccaactgtttgtagatgatgttatgcaagaagtcggtttagatcctgccttcaaacatcgttacccccatgaattctctggaggtcaaagacaaaggatcgccatcgctcgggctatggtgcttaagccgaaattagttattttggatgagcctacttcagctttagatagaaccgtacaattccaaatagttcagttattaaagcaacttcaagaaaagtatggattagcttatatatttatcagtcatgatctagcagtcattcgtgccatgtcacatcgggttcttgtaatgaaacaaggtgatatagttgagagtggctatacagatcaaatttttcaggatcctaaggagtcctatacgcgtgatcttttaatggcggcaaatagttag

SEQ ID NO: 270015 - DNA, 706 bp, Unknown
  Bacterial polypeptide expressing nucleotide sequence isolated from the Sargasso Sea
tttggatatggagaaaaaaatgttttagaaaatataaatttgaaaattcctaaaggtaaaagagttgctcttgtaggattatcaggttcaggtaaatcgaccattgcaaatataatagctagattttttgataattataatggtgatataacaattgactctcaaaatataaagaaaatgcatttaatagatctaagaaataatatttctatggtaacccaagaaacagttttatttaatgatactatagcaaacaatataaagtatggaaaattagaagccaataatgatgaaattaacaaagttgctaaactagctggaattacggaattttcagacttattagaaaaaaaattagatacagttataggtgaaagcggagttaaattatctggtggtcaaagacagagagtagcaattgccagagccattattaaagattcgccaatacttatcatggatgaagcaacatcttctctagataatattacagaaaaagaaatatataaaacaattaaaaatttaatgaaaaacaaaacaattttgattatagcacataggctaagtacgattgaagattcagatattatttatgtaattgataaaggtagaattgaaaattttggctcacatacggatttgttaaataaatcagaaatttacaaaaaacttcaattaaaagaaaaactagaaaatgagttttaaa

SEQ ID NO: 270016 - DNA, 655 bp, Unknown
  Bacterial polypeptide expressing nucleotide sequence isolated from the Sargasso Sea
ggggtgcccgcgccggtgcccgagggcgcgcaggtggtggccgagacgcaggatttgcgcgtgtggttccccattcagaaggggtttctcaagcggaccgtcggccatgtgaaggcggtgaatgccgccacgctcagcgtgcgggcgggcgagacgctcggcatcgtcggcgagagtgggtcgggcaagacgacgctggcgctggcgatcatgcggctgatcgcgtcgcagggcgcgatccgctttggcggcgaggatgtgcagggctggtcgacgcgggacttgcgcaagcgccgcgcgcagatgcagatcgtctttcaggacccgttcggcagcctcagcccgcgcatgacctgcgcacagatcatcgccgaggggctgggtgtgcatggcaatccgggcgggcgaccgcagcgcgacctggtcgccgaggtgatggaggaggtggggctcaaccccgccacgatggaccgttacccgcatgagttttccggcgggcagcggcagcgcatcgcgattgcccgcgctatgatcctgcggcccaagctggttgtgctggacgaaccgacaagtgcgctcgacatgacggtgcaggtgcagatcgtggacctgttgcgcgatttgcaggtgaaatacgggctggcctatcttttca

SEQ ID NO: 270017 - DNA, 397 bp, Unknown
  Bacterial polypeptide expressing nucleotide sequence isolated from the Sargasso Sea
ccaagcggcgaccttagcccacgcgatggaatttatcgagcaactgcccgaaggtttagatacccaagtcggtgaaaacggcgtgttattatcgggcggtcagagacaacgtatcgcgattgcccgcgctatgctgcgtgatgcgcctgtgctgatccttgatgaagccacctcggcacttgataccgaatctgagaaagcgattcagcaggggctggataatctacgtcaaaaccgcacctcggttgtgattgcccaccgtttgtcgaccattgaaagtgccgaccaaattttagtggtcgatcaaggccgtatcgttgagcgcggtacccataaatcccttctggaacttggcggcatgtatgccaagttataccaaatgcagtttggtagctaa

SEQ ID NO: 270018 - DNA, 886 bp, Unknown
  Bacterial polypeptide expressing nucleotide sequence isolated from the Sargasso Sea
tgtgattgtagaaaaagaaaacaataataaaaaagaaaataatatcaaaattttaaatagatggtcaaaaaaggaaattataaatcaagacttagttcagataaaaaatttgaataaaagttttgatgataatttttttacagaaaattctaaaaattctgtgatggctgttaataatgtttcatttgaaataaaagaaagcgaatcttttggcttagtaggagaaagtggaagtggaaaatctacaattgctaaaatgattgtaaatttatttaaaccttcatctggcgatattttctttgacaacgtttgtataacaaaaattaaacatagatctgaattaatgaaatttagaaaacaaattcaaatgatatttcaagatccttattcttcactaaatggaagattaaaagtaaaagatataattgcagaaccaattagacttcacaatccatcaatatcaaatatagatttaaataattatatttatgatttactggagtctgtagaattaactcaaaaatctgcagatcgatatccacatgaattttcaggagggcagagacaaagaatatcaattgcaagagcacttgcaacacaaccaagacttttagtttgtgatgaacccacttctgctttggacgtaagtatacaagcccaaatattaaatttacttaaagatcttcaagaacaattaaatttaacaattttatttataagtcacgatttacctgttgttagacaaatgtgtgatagaattggtgtcttaaaagatggcaaattatgtgaagtttcaaacactgaggatttatttttaaaaccaacacatgaatatacaaaagaacttttacgattaatgcctaaaattgagtctatatataattaa

SEQ ID NO: 270019 - DNA, 379 bp, Unknown
  Bacterial polypeptide expressing nucleotide sequence isolated from the Sargasso Sea
tatgaggaagtcagccttgtcctgtttgcaggttgaaaatgtcagctgccgttacaacggccgcaatgtgctggagcagctctccctgacggtggcagacaacgagattgtctgcctgctgggcgcgagcggctgcggcaagaccacgttgctcaaggccatcgccggcctgctgccgctggcagagggcacgattcgcctcggtgataccctgcttgacgggccagataccagcgtgccgcccgaggcgcgcaacatcggcatgatctttcaggattacgccctttttccccacctgacggtggccgacaacgtcggcttcggcctgaccaaactcgatcgccgtgcccgccagcagcaggtggacgaggcgctggcg

SEQ ID NO: 270020 - DNA, 485 bp, Unknown
  Bacterial polypeptide expressing nucleotide sequence isolated from the Sargasso Sea
gatgtctaaaaatacagaattcgttaagttcgataaagtagataaaagttacgatggtaaagtcttagtagtaaaagatttaaatcttaatatctccgagggcgagttcattactatgcttggtccatctggttcaggaaaaacaacttgtctgatgatgttggctggatttgaaacaccaaccaatggtgaaatctatttagattctaatcctatttcaaatattcctcctcacaaaagaggaattggaatggtttttcaaaattatgcattgtttcctcatatgacagtttatgaaaatttagcatttcctttaagagttagaaaagttcaaaaagatgagattgataaaaaggtagataaagctttatcaatggtttccctatcaggatttgaaagtagaatgccagcacaattatctggtggtcagcaacaaagggtagcggttgcaagagctctcgtatttgatccagcagtagttctaa

SEQ ID NO: 270021 - DNA, 631 bp, Unknown
  Bacterial polypeptide expressing nucleotide sequence isolated from the Sargasso Sea
ttgaataagaagaacttagtgaaaaatgatgcgttaataattgatgatttgcatcataaatatgataagcgagaatgttcaaattggatattaaacgcaattaacctgaaaattgaaaatggtgaattgttagggttgcttggtccttctggatgcggaaaaactactcttttaagattaatcgcggggtttgaatatccctctagagggaggatttctctaaatgataaggaaatttcaagcggaaaaaaaattcttagtcctgagaaaagaaatattggtatggtttttcaagactacgcacttttccctcacttaactgttttggaaaatgtaatttttggtttaaaaaacaaaaaagatagaactagagttgactatttattaaatgttgtaggtcttgatagttttattggaagatacccacatgaattatctggaggccaaaaacaaagactagcaattgcgagagctctcgctcctgggactaattttattttattagatgaaccattttgtagtcttgatatgcatgtcaaactaaaattgagaagtgaacttccaaatatcctaaaaggttgtaatgcaagtggattgatggtcactcatgatccggaagaggcaatgtcaa

SEQ ID NO: 270022 - DNA, 577 bp, Unknown
  Bacterial polypeptide expressing nucleotide sequence isolated from the Sargasso Sea
tatgctcagtgtcgaaataaaaaaggccttagaaacactaactctagatgtgaggtttgaagtcaatgccggcacggtaacggcactatttggtaaatcgggcgcaggcaaaacaacaactgtccactccattgctggccttataaaaccggacgatggagagattacattaaataataaggtattattcaaccataatttgagaactaatcttccagtttataggcgaaaaataggatttgtctttcagagtgctcgtctatttccgcacatgacagtgaaaaagaatctcctatttggattacccagacctaataagatacatataaaaattactttagatatggttactaaattattagatctttcttcactattggatagaagaccgcaaacattatctggaggcgaaaggcaaagggtatctatcggtcgcgctcttttatcgcagcccgaccttttgttaatggacgaaccactgtcgtcaatagatttgcacttgagaggagaaattttaccttttatacaaaaagtagttgcagaagttcaaataccagtcatctacgttacccattct

SEQ ID NO: 270023 - DNA, 736 bp, Unknown
  Bacterial polypeptide expressing nucleotide sequence isolated from the Sargasso Sea
gacaaacaaacaattgagcaaaaagtaaatgatgctgcaaaacttttacaaatttcagattttttacagagaaaaccgtcaatgttatcaggaggccaaagacaaagagttgcaatgggaagagctattgtaaggaatcccaaaatatttttatttgacgaaccactttcaaacctagatgcaaaattaagaattcagatgagacttgaaattaaaaaacttcaacaaaaagttggagttacaagtatttttgtaacccatgatcaagttgaagccatgacacttgctgatagattggcagttattaataatggtattattgaacaattaggcacaccaatagaaatatataatagtccaaaatctttgtttgttgctggatttataggatcaccacaaatgaactttatagagggtgagttaaaaaataaaatattatctgctgatggttttgaaattaaagacattaagagtgattataatggagaagctatcttaggaataagacctgaacatttattacaatctgacaatggtttaattaatctaaaagtggagttagtagagcaacttggttcagacaatcttgtttatggccaattgaaagataaaaaagatttttgttatagatgccctggaaatcaaacaattgaaaaaggtagtactttaaagttaaatattgaaaataataattattatgtttttgataaaagtagtggcaaaagagttaactaaa

SEQ ID NO: 270024 - DNA, 727 bp, Unknown
  Bacterial polypeptide expressing nucleotide sequence isolated from the Sargasso Sea
tgaatatgatttaagttttcttagaaaatccatatcaattgttactcagtcaccaactctatttaacgacactatagaaagaaatatagcctatggtgatgacgaatttgattctgagagagtaatggagtctgctagattagctggatgtttagattttatagataaattaccagaaggcataaattcagaaataggtgatgatggtgtactactgtcaggcggtcaaagacaaaggcttgctatagcaagagctttttataaaaattctccaattattattctcgatgaggcaacttctgctcttgatactgaatcggaagaattagtgcaagagtcacttgaaaaattaatatctgatagaaccacgatagttatagctcacagattatcaaccattgaaaatgctgatcaaatagtagtattggataatggtcttatatcgcaacaaggaaaacattcagatttacttgaagaagagggtatatacgcttcactatataaaaatgttccaattgaaagtaagaaatcatcttctacatccttacaaaaagtttcatatttacagccaattgacgatgttgaaaataattccagttttgtaataaatgcttggtatcaaaaacatttatggctgtatctactcttaccattctcatggatttttacttttctaactaatagacgaagaagaaaatatcttaaaaaccaaatttcgtcatttaaa

SEQ ID NO: 270025 - DNA, 820 bp, Unknown
  Bacterial polypeptide expressing nucleotide sequence isolated from the Sargasso Sea
atgaggcccatcttaaaagtaaagaatttaagtaagcattttgatgtttctccgcctttgatcactaggctggtgagcagggaagaaaaatccattctgaaagcagttgaagggatcggatttgaaatcaagcaaggtgaaaccgtaagtcttgtgggagaatcaggttgtggaaaatccactgttgcaagattggttgtcaaactctatgagcccacaaatggtgagatattttttggaaaccaaaacttttcaagcatcaaatccagaaaagagttgaagcccatccgaaggcggattcaaatgatttttcaggatccctatgcgagtttaaatcctcgttggagggtctttgatatcattgctgaaccccttcgcgctcatggaatcatttctgataaacaaggattgaaaagaagaatcactgaattattggaacaagtcagcctctccagtgcagacagtgaaaaattcccccatgaattttcaggaggccagagacaaagaatctcaattgcccgcgctttggccagtcaacctgattttttagtgtgtgatgaacccaccagtgctttggatgtctccgtccaggcccaaattcttaatctgatgaaaaaactccaaaaagaactcgggttgacctacttgttcataagccatgatttggcggtcgtttcccacctttccgacaaagtaggggtcatgtatttgggaaggttggtggaatgggcggataccaaaactcttttccgggcaccgaaacacccctatactaaaaagctcctggatgcgatcccggatttgaacttatcgggaaagc

SEQ ID NO: 270026 - DNA, 557 bp, Unknown
  Bacterial polypeptide expressing nucleotide sequence isolated from the Sargasso Sea
catggcaaacatacaatttaaaggaattcacaaatcctttggttcgaataaaataatcacagattttaacttagacggaaaagaagatgaatttcttgttttagtaggaccatctggatgtggaaaatcaacattattaagaatgattgctggacttgaacaaattgataatggtgaaatatttattaatgatcaaaaaataaacgaacttcatccctcaaagcgtcagacagcaatggtattccagtcttatgctctttatccgcacatgaacgtttttgaaaatatgtcgtttggattaaaaattgaaaagaggccaaaagaagaaattgcttccaaggtaaaagaggctgcaaaaattttaaaaatagaagaacttttagatagacgaccaaaagaattatctggaggacaaagacaaagagttgcaattggtagagcgataaccagaaatccaaaaatatttctttttgatgagcctttgtctaatttagacgcggcattaagagctgaaatgagagtagaaatatcaaagttacataatcaaattaaaacca

SEQ ID NO: 270027 - DNA, 787 bp, Unknown
  Bacterial polypeptide expressing nucleotide sequence isolated from the Sargasso Sea
aaaatttttccagatcaaactaaggcagtaactgacttaaatcttgaaatcaaatcaggagaatttatggtattagttggcccctcgggatgcggaaagtccacaaccctttcaatgatagccggacttgaggagccatctagtggagaaatttttattgatggacaaataatcaacgcactaccgccaaaagatagagatatttctatggtatttcaaaattatgcgttatatcctcatatgaatgtctttgataatatggcttttagcctaaaacttagaaaatggtcaaagtctgatatcaaaaaaagagtaaaggaggcagctaataccttggaattagaaaattatcttgatcgttacccaaaggcactttcaggaggacagaggcaaagagttgcattgggaagggcaattgtgagaaagcctaaggtgtttctttttgatgagcccttatcaaaccttgatgccaaaatgcgaactgttatgagagtagaactaaaaaaacttcatgaacagatcggagctacaatgatttatgtaactcatgatcaaacagaagcaatgaccttaggtcaaaggatttgtataatgaatgaaggaattttgcaacaggtagatacacccattgaaacttataattctccaaaaaatacctttgttggtagtttcattggttcaccacagatgaattttataaatggaaaattaaatttaataaatgataagtattattttagttccgaaacatttaacatgcatttagataaaaaatttatatctggaa

SEQ ID NO: 270028 - DNA, 808 bp, Unknown
  Bacterial polypeptide expressing nucleotide sequence isolated from the Sargasso Sea
atacaaagattacttccttctttccaacaagcatataattcttgggtaattattacaacaagtacaaattcagtccttaatttattaaaactccttgatcaaaatccatatttagaaaaaaagaaatcaaaagactttttatttaaaaacaaaattactcttaaaaatatttctttctcttataagaaaaattcaagaaaaataataaaaagctttaatttagaaattttcaaaggagatagaattggaattattgggccatcgggaggaggtaaaagcaccttagcagatttattaatgggtcttttaaaaccaacgcaaggaattattgaaatagatggaatagaccttcatagaaataataaatatttcaagaaagattggtatagaaatatttcacatgttccccaagatatatttttaatagactcaagcattgcagaaaatattgcatttggtgtgccatttgagaaaattgataagaaaaaattaatgttagtaattcatttatcaagattatcaaatttcataaaaaacattgatgatgcattttcaacaaatgttggagagagaggattaaaactaagtggaggccagagacaaagaattggaatagcaagggcattatacaagggtggaaatatactaattcttgatgaggcaactagcgcacttgatcaagatacagaagcttcaataatgcaaacaattgataatttaaattcatcaattacagttattgtaataacacatagattgagtacactaaaaaaatgtgatcgcataatagatttaggaaaaaattaaa

SEQ ID NO: 270029 - DNA, 326 bp, Unknown
  Bacterial polypeptide expressing nucleotide sequence isolated from the Sargasso Sea
ttcaggaggtcaacaacaaagggttgctatagcaagggctcttgcaatgagacctaaagttatgcttttagatgaaatcacctctgcgcttgatcctgaggtagtaggggaagttttaaatgttatacgttcattaaataaagagcataatttgactatgataatggtaactcaccaaatgggttttgctcgtgagatttcagacagagtttgcttttttaatgatggtaaaatatttgaggaaggacccccagaaaaattatttggagatcctcaaaacgaaagaactaaacaatttctacacgcagtattagactcgcattaat

SEQ ID NO: 270030 - DNA, 328 bp, Unknown
  Bacterial polypeptide expressing nucleotide sequence isolated from the Sargasso Sea
taaagctcgaagagctcagtctagagaatggcttagagctgttggtttagaagaccatttttcaaagctgccgcatgatttatcaggtgggcaaaaacaacgagttgccattgcaagagctcttgcagctagaccaaaattactattagcggatgaaccaacatccgcattagatagttcaactggtagagaaattgttgatttgttaaaaaaattggccttagaacaatcttgttcggtgttgatggttactcatgatccgcgaatattggatgtagcagatcgtctcttgcgaatggaagatggccaaatattgccctctgtttag

SEQ ID NO: 270031 - DNA, 415 bp, Unknown
  Bacterial polypeptide expressing nucleotide sequence isolated from the Sargasso Sea
atgaaaaaggaagaagcagaagaaagagccctagaacttttagaattagttggattaacagataaaaaagaccaacacccttcaagactttcaggaggccaacaacaacgtgttgcaatagcaagagccttagcaatgagaccaaaagtaatgttgttagatgaaataacttctgctctagatccagaagtggttggagaagttttaaatgtaattagatctttaaataaagaacatagtcttacaatgataatggtaactcatcaaatgggatttgctagagaaatttcagatagagtttgtttttttaatgaaggaaaaatctttgaacaaggcccaccagagcaattgtttggagatcctaaaaatgagaggacaaaacaatttcttcatgcagtgcttgatgcaaactaaa

SEQ ID NO: 270032 - DNA, 753 bp, Unknown
  Bacterial polypeptide expressing nucleotide sequence isolated from the Sargasso Sea
aatttttagtaaaaaaaaatattgttcaagctttagataatgtaagtctcgaaatcgaagaaaatgattgttttgcaatagttggagagtcaggatctggaaagactacgttagcaaatattattttaggtatttataattatgataaaggtgaaatttggttagataataataaacttttttcaaaaagaaatttagcactaagaaaactaatacaatttgtacaacaaaacccaatgtctactctaaatccaaaaaaaacgatatttaaaacaatttctttacctttaaaaattcataaaatagttaataatgatatgattattgaaagagtagagacgcttctctcttatgtcgggttgggtaccgaattcatgtatcgttatcctgatactttatcaggaggtcaaaagcagcgggttgcaattgctagagctcttgcttctgaaccaaaagtcttaatattagatgaaccaacatctgctttagatgttattgttcaatcaaaagtcctaaatcttttattagatattaaagaaaaattaaatcttacttatatttttataactcatgatttaagtgttgttaaaaacattgcaaataaagttatggtaatgaataaaggaaaaattgatgaatttggtgttacaaaagaagtattctctaacccaaaaagtaaatatactaagactttaattagagcaattccaactgttacagatgaagaagatgcaatcaaaccaaaattataaa

SEQ ID NO: 270033 - DNA, 791 bp, Unknown
  Bacterial polypeptide expressing nucleotide sequence isolated from the Sargasso Sea
tgttcatgagacctcattaagtattgatgaaggagaatttatggtttttgtaggacctagcggatgtggaaaatcaactttattaagaatggtcgcaggtttagaggatattactgagggtgatattaatcttgatggaaaattaatgaatgaagttgatccatctgaaagagatgtagcaatggtgtttcagaactatgcattatacccacacatgaatgtttataataatttagcctatggtctaaaaaatagaggaattgataaagaaacaatcgagcaaaaagtaaatgatgcagctaagttgctacaaatttcagattatttacagagaaaaccttcgatgttatctggaggtcaaagacaaagagttgctatgggtagagcaattgtaagaaatccaaaaatattcttgtttgacgaacctctttcaaacttagatgcaaaattaagaattcagatgaggcttgaaataaaaaaacttcaacaaaaggttggagtaacaagtatatttgttacgcatgatcaagttgaggccatgacacttgctgatagattggcagtaattaataatggaattattgaacaacttggtactcctatcgagatatatgataatccaaaatctttatttgttgctggttttattggttcaccacaaatgaattttttagatggtaatttaaaaaataaaacattatctgcagaaggttttgaaattaaagatattaatagtgactatgagggagaagttacactaggaattagacctgagcatttaagtcaaagtg

SEQ ID NO: 270034 - DNA, 601 bp, Unknown
  Bacterial polypeptide expressing nucleotide sequence isolated from the Sargasso Sea
catggaactgagcgtccataacttatccaagcgctatggcgacaaaacgattctccagggcatcaatttctcgatgcagtccggtgatttcgttaccttcgtcggcagctcaggttgtggcaagagcaccctgctacggctgattgcaggtctcgatcagcccagcagcggcagcatccatgtggatggttcaccggttcaagcgccgggcccggaccgtggcatggtgtttcagaaatacagcctctatccgtggctgaatgcagccgataacgtcgccttcggcatgcggctgcaagggttgaagccagcggacgtgcgcgagcgcaccgcctacttcctggaggtggtgggtctgcaggaagccgccaccaaactcccgcgggaactctccggtggcatgcagcaacgggtggccatcgcccgagccttggccaccaatccaagcgtgcttctccttgatgaaccctttggtgctctggacctccagattcgggaaaccatgcaggatttcctgctcaaactctggcaacgtacgggtctgaccgtgcttctgatcacccacgatgtggaggaagccctcgtcctggctcaacgggtt

SEQ ID NO: 270035 - DNA, 364 bp, Unknown
  Bacterial polypeptide expressing nucleotide sequence isolated from the Sargasso Sea
ttgaataagaaaaacttagtgaaaaatgatgcgttaataattgatgatttgcatcataaatatgataagcaagaatgttcaaattggatactaaacgcaattaacctgaaaattgaaaaaggcgaattgttagggttgcttggtccttctggttgcggaaagactactcttttaagattaatcgctgggttcgaatatccttctagagggaggatttctctaaatgataaggaaatttcaagtggaaaaaaaattcttagtccagagaaaagaaatattggtatggtttttcaagactatgcactgttccctcacttaactgttttggaaaatgtaatttttggattaaaaaacaaaaaagata

SEQ ID NO: 270036 - DNA, 524 bp, Unknown
  Bacterial polypeptide expressing nucleotide sequence isolated from the Sargasso Sea
catgagcgcattgatcgagttccagggtttcaacaaattcttcggcgaggcgcaggtgctcaagggtatcgacctgagcgtgcaacgcggcgaagtggtggtgatcctcggccccagcggctgtggcaaaagcaccttgctgcgttgtttgaacgggttggaagtggcacacagcggcagtctgcggttcgccggcaaagagctgctggataaaaccaccgactggcgccaggtacgccaggacatcggcatggtgttccagagctaccacctgttcccgcacatgagcgtgctcgacaacatcctgctcggcccgctcaaagtgcaaaagcgcgacccccgggaggcccgtgagcaggcggaaaaattgctggagcgcgtgggccttgccgacaagcgcgacgccttcccacgccagctttccggcggccagcagcaacgcatcgccatcgtgcgctcgttgtgcatgaaccctcaggtcatgctgtttgacgaagtcaccgcggcccctcgaccggagatgg

SEQ ID NO: 270037 - DNA, 589 bp, Unknown
  Bacterial polypeptide expressing nucleotide sequence isolated from the Sargasso Sea
tattcgcttccagggccagcagttgcagggcctcagccagcaggaagtacgtccgctgcgtcggcagatgcaggtggtgtttcaggacccctttgggagcctgagcccacgcatgtcggtgagccagatcgtcggtgaaggtctgcgtattcacggcatgggcaacgaggcggagcaggaacaagccatcatcgacgcgcttttggaggtagggctggacccgcagacgcggcatcgctacccccacgagttttctggcgggcaacggcagcggattgccattgcccgggcactggtgttgaaaccggcgctgatcctgctggacgagcccacttcggcgctcgaccgtacggtgcagcgtcaggtggtggagttgttgcgcggcttgcaggccaagtacaacctgacctatctgtttatcagccatgacctggcggtagtcagagcgctgagccaccagttgatggtggtcaagcagggccaggtggtcgaacaggggtctgccgagtcgatcttcagtgcaccgcaacacccttatacgcagcagttgctggaagccgcttttctggccccggcaacggctcactga

SEQ ID NO: 270038 - DNA, 720 bp, Unknown
  Bacterial polypeptide expressing nucleotide sequence isolated from the Sargasso Sea
aagcagtagacaacgtatcatttgaactattgaaaggagaaactctaggattagttggtgaatctggttcaggaaaatcaactatagcaaaaattattacaggtttagttaaacctaataatggagatatttattataacgatctcacactttataattcaaagaaaaaatatcaaatagacaagagcagagggcaaatacagatgatatttcaagatccctattcatcattaaatccaagatttaaagtcagagatataatttctgaaccaattaaattctttcaaagaaatattagtaaagatgagcttattcaaaatgtatatgatttgattgatattgttgggatgacgcgacaatctttagaccgatacccacatgaattttcaggaggacaaagacaaagaatttcgattgctagagctttagctacaagacctcgactgttaatatgtgatgaacccacttctgcattagatgtaagtatacaagcacaaattttaaaccttctaaaagatatacaagatgagcttcatctaacaattttatttataagtcatgatcttccagtaattagacaaatgtgtaatagaattattgttcttaaaaatggcagggtgtgtgaaactaaaaatactgaggaattatttaataacccagagcataactacacaaaggagcttattagattaatgccaaaaattgaatcaatagtatgat

SEQ ID NO: 270039 - DNA, 679 bp, Unknown
  Bacterial polypeptide expressing nucleotide sequence isolated from the Sargasso Sea
tttgggctggttggagaaagtgggtctgaggaaaagtactcttgcccgtctaattgcgggattatatacaccaaaatcaggtgatataaatatatttggccataacgttttacagaaaactcaaaaaacaaaaacttctttaattagaagaaaaatgcaaatgattttccaagatccctactcttctttaaattcaagaatgaccgttgaggatataatttccgaaccaattcgttttcaccgatcaaccgagaattcgagtgaaacaacagaggtcgttcgagatttgatctcttttgttggtatgcctaccacttcactgaaaaaatacccacatgagttttctggtggtcagcgacaaagaatttctattgcgagagcacttgcttcaagacctgagattcttatttgtgatgagccaacttcagctttagatgtctcagttcaggctaatattctgaatttacttaaagatttacaagaagaattaagtcttaccatgttattcatatcgcatgatttgccggtaattagacaaatgtgtgatcgggttgcagtgatgcagaatggaaaaatttgtgaaatagcccaaacagatgagttgttcgatcatccagagcatgaatatagcaaacatcttttgggcttaatgcctcgaatggatttatttcgtctttaa

SEQ ID NO: 270040 - DNA, 588 bp, Unknown
  Bacterial polypeptide expressing nucleotide sequence isolated from the Sargasso Sea
gcacactggatgtttattctgattccggcgcgacagtgccgcgggttgggtatgtatttcaaaatgcgcgtctactaaattggcttacagtggaagataacatgacctttgctctggagtcgcaggaaattcctaaggatttatggaaagagagagtggataaatatctcgagatggtagggttagaaggtcagcaaaaaaactatccccttaatctctcaggaggaatgcagcaacgtgtagcaatcgcgcgggctctggctatagaaccggatatactgttaatggacgagccatttagtcacttggatgagattactgcaaggaagatgcgttttgatttaatggaaatcttgatgcgcgctaaccccactattttatttataactcatgatctgggtgaggcggtatttcttgctgataatatttatatgatgagcactaaacccgccagaatctttaagcaaataaatgtcgaagtgccccgtccgagaaaaccggaggacccaaaaatctttgatctagaaaaagaactcgtcagagaattctttagtgtcttggatgctcaaaatttagaggacggctaaa

SEQ ID NO: 270041 - DNA, 479 bp, Unknown
  Bacterial polypeptide expressing nucleotide sequence isolated from the Sargasso Sea
ctacctttttaacagcaccctcaaagaaaacatccttatcgcaaaaccagatgcaagctacccggaaatgaaaaaggccatacaaatggcatctttgacggaacttgtcgaaaccctgccgcaggggtttgatacaaaagttggagaaagaggaaccagtctttccgggggccaaagacaaagggttgctatcgcaagagcctttctgaaagatgcaccgattttaattcttgatgaagccacctctcatttagatgctttgagcgaaagtgaagtacgtggcgccctggacaaactcaaagaagaccgcaccaccatcatcattgcacaccggctttcaaccattcgaaatgctgacaacattattgttctcgatggcggaaaaattaaggagtcagggaaccacgatcagttattgaagaagaacggactttattcccaactggtctacaagcaaatgaattttgcaagaggataga

SEQ ID NO: 270042 - DNA, 647 bp, Unknown
  Bacterial polypeptide expressing nucleotide sequence isolated from the Sargasso Sea
tatggaaaataaaaaaactgaagaaattatagtaaagtttgacgaagtaacaaaacaatatggtgatcttgtagttttggataaattaaatctagatattaaaaaaaatgaaatggtctctattataggaccatcaggttcaggaaaaacaactgtcctaagagttttaatgacattagaaaaaattaacgggggagttatacatttggatggtgaaactcttactcatatgaattcaaatggaaaattagttgatgctgatgaaaaatatctaagagaaagacgatcaaaaattggtatggtcttccaacaatttaatttatttcctcatatgacggcactacaaaattgtattgaagctccagtagaagttcttggaatgaaaaaagaagaagcagaagaaagagcgctagatttgttagaattagttggtttgactgataagaaagatcaacatccatccagattatcagggggacaacaacaacgtgttgcaattgctagggctttagctatgagaccaaaagtaatgcttttagatgaaatcacttctgcattagatcccgaagtggttggtgaagtcctaaatgtaattagatcattaaataaagagcatagccttacaatgataatggtgactcatcaaa

SEQ ID NO: 270043 - DNA, 588 bp, Unknown
  Bacterial polypeptide expressing nucleotide sequence isolated from the Sargasso Sea
tgttagatattattttaggtcttcttgatccagaaaaaggaagtatttctatagatgataataaaataaattcaaaagaaatgcttaatgcttggcatttatcaatttcacatgtaccacaagatgtgtatttatcagacatttcacttgcagaaaatattgcaaactcaaatgaaattaataatgatttgttagaaactgtcactaaaaaggctgaaatatttgaccacatacaatcattgcctgataagtttgaatcattagctggtgaaaatggttcaaacctttctggaggacaaagacaaagaattggaatcgcaagagcgctttataaaaattctgaagttattatccttgatgaagcaacaagtgctttagatggaatcactgcagataaaataattaaaaatatacttaaagataaaacaaaaacaataatcatggtttcgcatagtatgaaatctatacaaaactgtgatctaatttttgaagttgaatcaggcgagattaaatcatttggaacgtatgattatttaaaagaatctagtgattcttttaaaaaactaaccatttcagatttgagttaac

SEQ ID NO: 270044 - DNA, 607 bp, Unknown
  Bacterial polypeptide expressing nucleotide sequence isolated from the Sargasso Sea
atcaggagggcagcgtcagcgtgtagctattggtcgtgcgatcgtacgcaaaccaagagcttttttatttgatgaacctttatctagtttagatgcagagttgcgagtaaatatgcgattagagattgcaaacctgcatagacaattagacaccactacaatttatgttacacacgatcagatagaagccatgacgcttgctgaccgcattgtagttcttaataatggagaaattgaacaagtaggaacgccagatgatatttaccaaaaccccgtaaatacttttgtagcaagttttattggatcccctaaaatgaattttattgatggagatgcggctagtgaatttgaggccgaaagaattggaatcagacccgaacatttagaaataaataaagaaaaaggaaaatggtctatggaaattctgcattatgaaaacttgggtgcggagagctatatttacttgagtaataaaactataggaagctttactgttcgttgtgaaccatcaagcaattgggaaatcggaaattcagtatatattacaccacaattagtgcatgtacaccgttttgataaatcaggcaagcgtcttaataaacaataa

SEQ ID NO: 270045 - DNA, 769 bp, Unknown
  Bacterial polypeptide expressing nucleotide sequence isolated from the Sargasso Sea
agttagaaaaatagataaagcagaaatagaagagaggattaatcgaactttaaaaatggtatcactaactggatttgaaaataggatgccagctcaattgtcaggaggacagcaacaaagagttgctgttgcgagagctttagtttttgacccaaaacttgtactcatggatgagccacttggtgcattggataaaaatttgagagaaagtatgcaatacgaactaaaacatattcatgagtcccttggtgtgacggttgtttatgttactcacgatcaaggagaagctttaacgatgtcaaatcgtattgctgtatttaatgatggaaaggtgcaacaactatcaggtcctaatgaattgtatgaaacgcctgtaaattcatttgttgctagttttattggagaaaacaatacatttaccggaacggtaactgaaataacctctgggtctgcaaaaattcaaacagattcaggcgatacaatattcgctaacccaatagctgtaaattcctccggggacaaatccagaatatctctcaggcctgaaagagtgagcattgatccaaatgaacatcttgaaaatcaatttactagtgtaattcgtgaaattatctatcatggagatcatactcgggtgcgagtaaatcttttggggaatgatgaatttatactcaaagtaccgaatgcaagtagcgatttagatttcaacataggagataaattagacctaggatggtcttctcatgattgtcgagccttagattattaa

SEQ ID NO: 270046 - DNA, 481 bp, Unknown
  Bacterial polypeptide expressing nucleotide sequence isolated from the Sargasso Sea
gtatttcaacagtttaatttattccctcacttatctattttagataattgttctttggcgcctatttgggttaagaaacttccaaaaaaacaagctgaagaaatagcaatgaataatttaaaaagagttcaaattgatgatcaagctttgaaattcccgggacagctttcaggaggacagcaacaacgtgctgcaatcgcaagagctttgtgtatggaacctaaaataatgttatttgatgaaccaacatctgcattagatccagaaatgattaaagaagttttagatgtaatggttgatttagcaaaaggtggaatgacaatgatagtggttactcacgaaatgggatttgcaaaagaagtagctgattacatgatttttatggatgaagggaaaatagttgaaagagcaaaaacaaaagagttttttgaaaatccaaaatcagatcgtactaaactatttttaagtcaaatattatagc

SEQ ID NO: 270047 - DNA, 619 bp, Unknown
  Bacterial polypeptide expressing nucleotide sequence isolated from the Sargasso Sea
atgacagatactaaagaagtcgtaattaggtgctctcaagtaaataaatcttattcgcagggttctactcagatcaatgttctgcgtgatattaacttgtctgtaagttctggcgatgagatagccatcgtcggaatttcaggttcaggtaaaacaactcttttaaaccttttaggcggacttgacttgccatcctctggagttataagtgtggctggaaagaatcttaataagattagtgagtccgataggggttttttgcgaaataaatatctggggtttgtattccagtttcatcatttgctgggtgaattcaatgctctagagaatgtagctatgcctttatttattgctgggtgcggtcgtgaagaggctgaagtgcgatcggaaactatactcaagcgagtaggccttatcaatagagttgcgcataaacctagcgagctgtcaggtggcgagaggcaaagggtcgcgatagcgagagctttaattaataatcctcagtgtgtgctacttgatgagcccaccggtaatttggacaaattcacagctgctgaaatacgagatttacatactgatctaaatgggactttccgtacaagttttattacggttacac

SEQ ID NO: 270048 - DNA, 611 bp, Unknown
  Bacterial polypeptide expressing nucleotide sequence isolated from the Sargasso Sea
cggagccagtggcgcaggaaaaacgacgctgctcagcctcgccaatggcagtcttcagcccgatcagggccaggtgcagtggcgaggccagccgatcaggacactgccgcggcggaggcgtctggagatcggaaccctctggcaggacctgcggctgatcgaggaactgacggtcagccgcaatgtcaatgccggtgccctcgggcgacactccctgctctgggccctgcgcaatctgctccagccgctcgaacggcgggagtgcctggccgcggtgaccgcagcgggtctggagcctgaactgatggacaccacggtgagccgtctgtccggcggccagcgtcagcgggtggctctggcccgcctgttgcggcaacaaccgcttctggtgctcgcggatgaacccctctccgccctggatcccgtccttgccgaggaggtgatgctcggtctgctggatcaggccggctgcctggtgagcctgcaccgtcccgacctggtgcatcgcttcgaccgcgtcatcggcttacggcaggggcgcctcgtgctcgacaaatcaaccggcgatgtcacgtctgacgcgatcgcatgcctctaccaatccctctgaa

SEQ ID NO: 270049 - DNA, 427 bp, Unknown
  Bacterial polypeptide expressing nucleotide sequence isolated from the Sargasso Sea
caaaactttcatcttttaccaagaaatagcgcacttgataatgtgatgttacctttaaaatatgctggtattaggaaagaaaatcagatgaatatagctaaaaaagctttatctcaagttggacttgagtcaagaatgaatcatcagccatctgaactctcaggtggccagcaacaaagagttgcaattgcaagggcattagtgaataacccatctattttgtttgcggatgaaccaacaggtaatctagatagtaaaacaggcaatgacgttattgagctttttcacaatttacacaaacaaggccaaactattattcttattacgcatgagaaaaatatagctgctgaagctcagagaaccatatatattaaagatggtttgatagaatcagattcatacagagaaaaacatgcaacattataat

SEQ ID NO: 270050 - DNA, 737 bp, Unknown
  Bacterial polypeptide expressing nucleotide sequence isolated from the Sargasso Sea
gcatgtgccgcgcggtcagacactggccgtggtgggcgaatccggttcgggtaaatccacactcgcccgcgttatcaccggtttgctgccgcccttccagggcagcgtcaaattcggggacgaggaactgtccaacgcgcaaaaggaccgctcacgcgatcatttgcggcgcatccagctgatctatcaaatggcggataccgcgatgaacccgcgccagaccgtcggacagatcatcggtcgcccgttgcagttctatttcggcaagcgcggtgcggaacgcaaaaaggaagtcatcaaacttcttgatgaaatcgagatgggcgaagctttctatgaccgttatccggccgagctttccggtggccagaagcaacgtgtggccatcgcacgtgccctggccgcacagccggaactgatcctgtgtgacgagccgacctcggcacttgatccgctggttgccgagggcatccttgatcttttgctgcgcctgcaaaaggaacgtcaggtgtcctatctgttcatcacccatgacatcgcaattgtgcgtgcgattgccgattcagttgcggtgatgctgcagggcaagctggtcgatttcggtccgcgctccgaagttctgaacccgccatttgacgattacaccgaccttcttttgaagtcggtgccggaaatggaactgggctggctggaaaaagttctggcctcgcgcaaaatggaaagtgccggtcactaaa

SEQ ID NO: 270051 - DNA, 979 bp, Unknown
  Bacterial polypeptide expressing nucleotide sequence isolated from the Sargasso Sea
tccatgaaagctaccgattggcgaacccagtttgtgaaacaaatgaacgaagccgattccaccacaaattcgcgggcggtagatagtctactgaactttgaaaccgtgaaatactttaataatgaacgtttcgaagccaatcgctacgatgaagatttagcagcgtgggaagtagcccgtcgacgaaatagattatccctttttacccttaatgctgggcaagcgagtattatcgccgttgccatgaccgcaatgatggccaatgcggcgctaggcgtattaaacgaggaaatgaccattggtgattttgtcctgattaacgcgttcaccatgcaaatttttatgccccttaacttccttggctttgtgtatagagagattcggggcagccttgccaatattgacaagctatttaatttactcgcgcaagtacctaaaattaaagatactgagaatccagagacattaaagacaacaaaccctaccgtcagcttcaaagacgtgcatttttcttacggcgaaaaacgcaaaatactcagcggcatcacctttactgtgcctgccggtaaaaagattgcagtggttggtgcaagtggtgccggtaagtcgactattatgaaattactgtttcgcttttatgagccaaatgaaggcaaaatattcatagacggcaaagacattaagcagctctcacaggatagccttcgagctcacattggcatagtgccccaagacactgtgctttttaatacgtcgttaaaagagaatattcgttacggcaaccccaaagccactgatgacgaaattagccaggtgattaaacttgcccaccttgaagcctttatcgagaagttgccagagggactcgagacaaccgttggcgagagaggtttaaagctctctggtggcgagaaacagcgcgtggccattgctagagccctgctgaaaggtgcgtctattatattttcgagaagcgaca

SEQ ID NO: 270052 - DNA, 323 bp, Unknown
  Bacterial polypeptide expressing nucleotide sequence isolated from the Sargasso Sea
agatccggatgcatttgaaaaagccagaaatgctcttgttcaagttgggcttggctccagagttaagaattttgcaacacagctcagtggaggcgaaaaacaaagagttgcaattgctagagcaatagttaatcagcccagaattttatttgctgatgagcctactggaaacttagatacgaagagttcatctgccataacagatttactattctcaattaatgagttaattaaaacaacgctagttcttgttactcatgacctatcattagctaaaaagtgtgacgaaatatatgagctatcagatggttcaatcttatgat

SEQ ID NO: 270053 - DNA, 573 bp, Unknown
  Bacterial polypeptide expressing nucleotide sequence isolated from the Sargasso Sea
taattgagccgctcgatggtcatttaaaagttgatggtcaatccattaccgccgcaaatcgccgccagtggcaacgcaatatcgggtatgtaccgcagcatatttaccttgctgatgacagcgttgcagccaatatcgcctttggtgtgaaacccgaggatatcgatcaacaagctgttgagctagctgctggaatagccaacatgcatgatttcgtttgcaatgaactgccacaggggtatgccaccactgtcggcgagcgtggggtccgtctctctggcgggcaacgccaacgcatcggcattgcccgagcgctctatcataaacctaaagtgctggttctggatgaggccactagtgccctggacaatcgcaccgaactagctgtgatggaagcagtaaacaacctgggtcgcgaaatcaccatcatcttgattgcgcatcgtctgtcaactttgcaacagtgcgataaaatttatcttctcgagaggggcgagatcaaaggtagtggtacttatgcagaactttcctctagtagccatcaatttgcggatatggctggtaactcatgac

SEQ ID NO: 270054 - DNA, 520 bp, Unknown
  Bacterial polypeptide expressing nucleotide sequence isolated from the Sargasso Sea
aatgatatttcaagatccatactcatcattaaatggcagattaaaagttaaagatatagttgctgaacctataaaacttcataatccttcgataagctcgaaagatatagatagttatatttatgatttactagagtctgttgaactaactcaacaatcagctgaacgttatcctcatgaattttcaggaggccaaaggcaaagaatatcaattgcgagagctcttgctacccaacctagattgttagtttgtgacgagccaacttctgcattagatgtaagcattcaagcgcaaatattgaatttattgaaggatttacaagaacagttaaatctgacaatattatttattagtcatgatttacctgtggtaagacaaatgtgtgatcgaataggagttttaaaaaatggaaaactgtgtgaaatttcagaaacagaaaatttatttaataatccatcacatgattactcaagagagctactaaaattaatgccaaaaatagagtctatttataaataa

SEQ ID NO: 270055 - DNA, 750 bp, Unknown
  Bacterial polypeptide expressing nucleotide sequence isolated from the Sargasso Sea
atatgactgtttatgataatatagcttttcctatacgtgcatctggccaagattctgaaaatctcgatgacgaagtaaaaagaattgcttccatgttacaaattgaaagtcttttagatcgaaaacctggcgaactaagtggtggtgaacaacaacgtgtttctcttggtcgcgcaattattaaaaaacctaaaatctttttgatggatgaacctttgtctaatcttgatgcttcattgcgtgccgaattacgtgctgaaattaaaaaattacataaagagttgggaatcacattcatttatgttacacatgatcaaactgaagcaatgtctatggccgatcgtattgcattaattaaagatggaaaattactccaagtcgacaaacctgaagtaatatacaatactccaaatcattcatggattggttcattccttggaatgcctgctatgaatcttgctaattcctccgatctcggcgattcaatatctgctaaaaaaggcgccagtgttgttggaatacgacctgaaaatatcaccataagttctgaaaaatccaaattaacaggttctgtaatctctatagaatatcttggagatagtcaaatccttaatgtaaaggtaggaaaatccgtcatgaaggttaaagttccaaatgattcaaaatactctgttggcgctgatgtcaatcttgacttttctgatgattctttgagatttttctctgatgacggccaatatgttaagtgaa

SEQ ID NO: 270056 - DNA, 436 bp, Unknown
  Bacterial polypeptide expressing nucleotide sequence isolated from the Sargasso Sea
attgcacattatagctccaatatgggtaaaaaaaatgcccaaaaaagatgcagaagacttggcaatgaaacaattggaacaagttcaaatagtagatcaagctcaaaaatttcctggacaattatctggtggacaacaacaaagatgtgcaattgcaagagccttatgtatggagcccaaaattatgttattcgatgaaccaacatcagcacttgatcctgaaatgattaaagaagtactggatgcaatggttaatctagctaaagctggtatgaccatgatagttgtaactcatgaaatgggctttgccaaagaagttgcggatgaagtaatattcatggatgaaggtatgattgtagaaaaagcagaaactaaagagttttttgccaacccaaaaagcgatagaactaaactatttttaagtcaaattctataa

SEQ ID NO: 270057 - DNA, 317 bp, Unknown
  Bacterial polypeptide expressing nucleotide sequence isolated from the Sargasso Sea
attatcaggtggtcaacaacagagagttgcaatggcaagagcatgggcaatgcagccaaaaataatgttatttgatgaacctacttctgctttagatcctgagatgattaaagaagttttagatgtcatgaaagaacttgctgcttctggcatgacaatgattgttgttacacatgaaatgggttttgctaaggaagcagctgatagattttatttttttgatgaagggttgttagtagaagaaggtactcccgaacattttttcactaatccaaaagaagatagaacaaaattatttttaagtcaaatactatagt

SEQ ID NO: 270058 - DNA, 532 bp, Unknown
  Bacterial polypeptide expressing nucleotide sequence isolated from the Sargasso Sea
aagaccacgctccttgcaatcatggcaggccttgatttaccaagcagtggctccgtgaaacttcttgataaagaaatcacaagcttaaatgaggataagagggcacagattagaagcaaggatgtcggttttgttttccaatcttttcatttactgcctcgattatcagcccttgataatgtcatgatgccactcgagatactcggcgcgaaagatgcaaaggagagagcgctaaaagctttggatgaagtgggtttatccaaaagaacagggcatgttcctcatcaattatctggtggagaaaagcaacgcgtcgcaattgcgagggctatggttaaagcgcccagtatattatttgcggatgagcctactggaaatttggatcaatcaagcacggataatattcttgatctattgcttggaatcaatcaacaaacaaagacgaccttggttgtcgtaacacatgatcagcagttagcagcacgatcggatatggtcttcgagctacaagaagggaaattaaaatgctgaa

SEQ ID NO: 270059 - DNA, 797 bp, Unknown
  Bacterial polypeptide expressing nucleotide sequence isolated from the Sargasso Sea
ttatgaaaatttagctttccccttaagagttagaaaaatgaaaaaagatgaaattgataagaaagttgacaaagctttatcaatggtatcactaaatgggtttgaaacaagaatgccaggacaactttcaggaggacaacaacaaagggtagctgtagctagagctttagttttcgatcccgcagtagttttgatggacgaacctttaggtgcactggataaaaatttaagggagagcatgcagtatgaaattaaacatattcatgaaagcattggagtaactgtagtttacgttactcatgatcaaagtgaagctcttacaatgtcgaatagaattgcagtgtttaatgatggaaaagttcaacagctatcaaatccctcagagctttacgaaaaaccagtaaattcatttgttgcagagtttatcggtgaaaataatacctttaatggtgaagtatcagatatttcaggagatgaatgtaaagttaagctatctaatggagaaataatagccagcgctatttcagtaaaatctaaaggtgaaaaaacaactgtctctctaagacctgagagagctttaatcgaaccaagtgaaaaaatggataatatgtttagtggtaagattgaagaggtaatttatcatggtgatcatactagagttcgaattaatttattaggaaacccagaatttattttaaaggtcccaaacagtacttccaatctagaacttaaggtcaaacaagatattaaaatcggttggaacagttctgacgcaagagctttagacccaaaataaa

SEQ ID NO: 270060 - DNA, 592 bp, Unknown
  Bacterial polypeptide expressing nucleotide sequence isolated from the Sargasso Sea
atgaataaacttatagcctcagatctttacaaatcttatcaatctgggggacattattctgaggtcctttcaggggtctcaattacaatttctgaaggtcaagcaattggagtcataggctcatcgggtagcgggaaaactactctattacaaatacttgctggcttggagcaccctgatcagggcaacattttttttaatgagattaatttgctatccaataatttagaaaattttaattcaatgagaaatgcattatttggatatgcatatcaattccattacttgttagatgatctaactgtttttgaaaattgtaatttggttttcaaaattgcgaataataaaaaaattactaagaattctcaaaaaattttacaaacccttgatgagctcggaattattgaattacaaaataaatatccatatatgctttcaggaggagagcggcagcgagttgcaattgccagagctgttgttcacgagcctgagtttatattgatggatgaaccaactggtaatttagatcaagaaaatgctgagataattcaagacctcactattaaattagctaaagatcataatattggta

SEQ ID NO: 270061 - DNA, 913 bp, Unknown
  Bacterial polypeptide expressing nucleotide sequence isolated from the Sargasso Sea
acgaccgataaagttattgtcatgagatacggacatattgttgaacaaggtgagactaaagaattattaacaaatccaaaatcaacagaagcaagaagtttagtaatttcagtaccaccaacaaataagaaaattgatagatttaaattgattagccccgatggtaaggaaataacatctagttccaaggatttgacacaaaatattattaaaacatggggagtaagggaaaataaaaatcaaaaattattaaaacttgaagaagtgacaaaagtttttgatgataattctttaggtaatggtttttcatttatttctaataaaagttcgaatgataaaatagttaaagctgtcgacaatgtatcttttgaattattcgaaggtgagacacttggattagttggagagtctggttcaggtaaatcaactattgcaaagattattactggattaattgctcctaaaaaaggtgatttaatttataataatgaacctctatataattcaaataaaaaatatcaaattcataatagtagaggtcaaattcaaatgatttttcaagacccttactcatctctaaatcctcgtttcaaagttaaggatattattgcagaaccaattaaattttttcaaaaaaatattagtaataacgaacttttacaaaatgtttacgacctaatagatattgttgggatgaccagacaatctctagatcgatacccacatgaattctcaggagggcaaaggcagagaatatctattgctcgcgccttggcaacaagaccacgattattaatatgtgatgaaccaacttctgcattggatgtcagtatacaagcacaaatattgaatttattaaaagatatacaagatgaacttcatctcactatgctatttattagtcatgacctcc

SEQ ID NO: 270062 - DNA, 787 bp, Unknown
  Bacterial polypeptide expressing nucleotide sequence isolated from the Sargasso Sea
tatgaatgacactgcagtaactgaagatctccccttaagagtgcgtgacctgaatgtggcctatcgtcgcaaggtggtgctctgggacgcttgtgctgagtttccggcaggtcaactcgtggcaatcgtcgggccgaacggcgccggtaaaagtactttactcaaagctgctatggatttgattccatcggtctccggctcagtcaccttctgggggcagagctaccaggacatgcgccatcgtgttgcctatgtgcctcagcgggaatcggtggattgggattttccggttaatgcccgggaagtggtagccatgggattgtaccggaaagtaggttggttccggccggtacggaaatcgcatcgggagcaggctcaggccgcactggaacgcgtagggttagcggatttcggagatcgccaaattagtcagttgagcggtggtcagcaacagcgggtctttctggcacgcgctctggttcagcaagcagatctctatctgatggatgaaccttttgccagtgtggatgccgctaccgaacaggccattgtacgtgtgctgcaggatttgaaagatcagggcaagagtgtggtctgtgtgcatcacgacctggaaacgattcgggacttctttgattatgcggtcttactcaatatgcgcgtggtcacccagggaagtatcgagacagtgatgacacgtgaaaatctggcgattgcgtatggaggcaagcatcacttactggatcgggtcgctcgtgagatccgtgaagaagagttacgcagatga

SEQ ID NO: 270063 - DNA, 436 bp, Unknown
  Bacterial polypeptide expressing nucleotide sequence isolated from the Sargasso Sea
cccgtcaatatcaaatatagatttaaacaattatatttatgatttacttgagtctgtagaattaactcaaaaatctgcagatagatatccacatgaattttcaggaggacagagacagagaatatcaattgcaagagcacttgccacacaaccaagacttttagtttgtgatgaacctacctctgctttggacgtaagtatccaagctcaaatattaaatttacttaaagatcttcaagaacaattaaatttaacaattttatttattagccatgacctaccggttgttagacaaatgtgtgatagaattggagttctaaaagatggcaaattatgtgaagtttcaaacactgaggatttatttttaaaaccaacacatgaatatacaaaagaacttttaaggttaatgcctaaaattgagtctatttacaattaa

SEQ ID NO: 270064 - DNA, 667 bp, Unknown
  Bacterial polypeptide expressing nucleotide sequence isolated from the Sargasso Sea
actgagtggcgtcagcaaggtctacggacagggtgatcttgaagtcagggcgctggatcaacttgatctcactgttcgcagcggcgactatttggcggtgatgggggcgagcggctccggcaagagcacggcgatgaacatccttggctgcctggatcgaccgaccggtggccgctaccggctcaatggaattgccgttgaacagctcgatgatgatgagcttgcggacctacgcaaccagtccttgggattcgtgttccaacaatttcatctcctgccccatgcctcggccatggagaacgtgatgctgccgatggtctacgccggcatcccactggatgaacgcaaggaacgagcggcttcagccctggatcgcgtcggtctgagtcaacgtctggacaatcgtcccaaccagctctccggaggtcagcagcagcgggtcgccatcgccagagccatcatcaatcgcccgagtcttctcctggcggacgagcccaccggcgccctcgactcgaacaccacggctgaagtgctggaactgtttgatgaattgcaccagcagggaatcaccctggtgatggtgacccatgaagacgatgtagcagcccgagcccatcgaattgcccgttttcaggatggccgcatcgtgaatgaagcatcacaatga

SEQ ID NO: 270065 - DNA, 502 bp, Unknown
  Bacterial polypeptide expressing nucleotide sequence isolated from the Sargasso Sea
tccagcggcgccgtgttgttcaaggggcaggacatccatcgctgggacagccgcacccaggcgaagtttcgcaatcaggagctgggttttgtgtaccagttccaccacctgctctccgagttcaccgcgttggaaaatgctgccatgccgctgctgatcgccggtgagtcggtgaagagcgcgaccgacaaggcgagccggatgctggggcgggtagggctctcccaccgtctcaaccaccgaccgtccgaactctccggtggcgaacgccagcgggtggccatcgcccgtgccttggtcaacgaacccagcctggtgctggcggacgagcccaccggcaacctggatcacgccagcgccaccgccgtctatgagctgctctgcgagctcaaccgcgagctcggcaccgcgttcgtggtggtgacccacgatctcagcctggcagccaagctccatcgccgggtgaccctggtgagcggcgtgatggcggaggtcgcctgat

SEQ ID NO: 270066 - DNA, 625 bp, Unknown
  Bacterial polypeptide expressing nucleotide sequence isolated from the Sargasso Sea
atggttcaggaaaaaccacaacaatttggtatgatgctgggattgctaaaaccttctaatggagaaataataatagatggaaaaaagattgaagataacagaattgaaattttaaaaaaaataaattttatttctccttatattgaacttccaaaaaaactaactgtaaaacaaaacctaattgtttatggtaaattatattcagtttcagatattaaaaaaagaattgagtatctatcagaaaaattaaggttaggtgatttattaaataaaattacaggtgaactttcatcaggacaaaaaaatagagttagcttagcaaaagctttgattaacaaaccaaaagttttattgttggatgaacctactgcttctcttgatcctgaaattggtgactttgttagaacgtttttagaagagtataaaaaagaaatgaaaatttcaattttattagcttcacataatatgaatgaagtaacaagattatgtaaatcaatattaatgatgaaagatggtattatcattgatagtggaagccccaacgaattaattagtaaacatggaagacaaaacttagaagaagtgtttttaaaacttacgagagatgagaatgagtataattaga

SEQ ID NO: 270067 - DNA, 828 bp, Unknown
  Bacterial polypeptide expressing nucleotide sequence isolated from the Sargasso Sea
gtagaaataggaccaacgaaagaaatattaactaaacctaaagaaatttatacaaaagctcttgtaagttcagttcctcctacaaataaaaaaatagatagatttaaaattattgaaaaagaaaacaaaactcaagatgaaactaatattaaaattttaaacagatggacaaaaaaagaaattattgatcaggatttagttaaagttaaaaatttaagcaaaacgtttgatgatagtttttttatagaaagtactaaaaactctgtaatggctgtagacgatgtatcatttaatataaaagaaggagagtcatttggattagttggtgaaagtggtagtggaaaatcaacaatagcaaaaatgattgtaaatttatatagcccaagcaaaggagatattgattttgataatgtttgtataacaaaaattaaaagcaataaagaaatgatgaagtttagaaaacaaattcaaatgatatttcaagacccttattcatctttaaatggaagattgaaagttaaagatatagtttcagaacccatcaaacttcataatccttcaataagttctaaagatgtagatagttatatttatgatttattagagtctgtcgaactaactcaacaatctgcagaacgttatccacatgaattttctggaggacaaagacaaagaatatcaattgcaagagctcttgcaacacaacctaggttactagtttgtgatgagccaacttcagctttggatgtaagtattcaggcgcaaatattaaatttgttaaaggatttacaagagcaattaaatttgacaatattattcattagtcat

SEQ ID NO: 270068 - DNA, 276 bp, Unknown
  Bacterial polypeptide expressing nucleotide sequence isolated from the Sargasso Sea
tgaccgatgaactcgctcatggctatgacacgctgatcggtgagcgcgggatcatgctgtctggtggccagcggcagcgggtgggcattgcccgcgcgctataccgtgatcctccagtattgctgtttgatgaggccaccagtgcattggacatggaaacagaagcagcaataggtgaagccatagaggggatgatgggcaagaagacagtgattgtgatcgcgcatcgcgaaggcgcactgcgagggtgtgacagagttgtttccctctcatgag

SEQ ID NO: 270069 - DNA, 454 bp, Unknown
  Bacterial polypeptide expressing nucleotide sequence isolated from the Sargasso Sea
ccaatcacacttcacaaaccatccatatcaaatatagatttaaataattatatttatgacttacttgagtctgtagaattaactcaaaaatctgcagatcgatatccacatgaattttcaggaggacagagacagagaatatcaattgcaagagcgcttgccacacaaccaagacttttggtttgtgacgaacctacctctgctttagatgtaagcatacaagcgcaaatattaaatttacttaaagatcttcaagaacagttaaatttaacaattttgtttataagtcacgatctacctgttgttagacaaatgtgcgatagaattggcgttttaaaagatggtaaattatgtgaagtttcaaaaactgaggatttatttttaaaacccggccatgaatacacaagagaacttttacggttaatgcctaaaatagagtctatttataaataat

SEQ ID NO: 270070 - DNA, 829 bp, Unknown
  Bacterial polypeptide expressing nucleotide sequence isolated from the Sargasso Sea
accgaagttttccacaatcctagacacccttttacacagcaccttttagactccgagcctaaaggtgaattgaagcaccccgcatgcaaatcagagatttccattgaatgttctgatttaaaggtttggtacccaataaaaagagggattttacgtaaagtggttgggcatattaaagccgtagatggagtttcactagaaattcgcaaaggccatacacttggggtcgttggcgagtccggctcaggaaaatctagcctgggtcgatccctagtaagactagaggaaagtatgggccttattaagtttaatgggaaagaaatacagaacctaacaaatgatcaactgcgtccccacagaaaacacatacaaatagtttttcaggatccgtttagctctttgagccctaggctatcggttggccaaatagtcgaagaagggcttatagtccataaaattggtggtaattctcatgaacgtaggaaactaataagtgcggtgctaaatgaagttggactagagcccagcatgcaggaccggtatccacatgaattttcaggaggacagcgccagcgaatagctatttcgcgagctttagttttaaagcctgagttaataatatttgacgaaccgacaagtgccttggatgtgtcagttcaagcacaaataattgacttattaaaaaaccttcaggaaaattataacattacttatatgtttattagtcatgacttaagggttgttcgagcaattagccataaccttgctgtaatgaagcaggggaaaattgttgaggctggcccaacccaaactataatcaaaaatcaaa

SEQ ID NO: 270071 - DNA, 650 bp, Unknown
  Bacterial polypeptide expressing nucleotide sequence isolated from the Sargasso Sea
tttaaaatttactgctgggattgggagactagaaggattcctttcaaaagtcgaatctattagtcaaatcaaccctacaagtaatcagaaaattatttcagattacccctcaattcttattaacaatgctgacctttgccctccaggatctaataaaacaataattaaaaatttaaatctaagcattaatactaatcaatcacttttggttgtaggaccttctggatgtggtaaaacatctttactacgaatgattagtggtttatgggaacccaattatggagtaataaaaaaaccaaaaattggggaattattattcatacctcaaaagccttatatgttactaggttctttaagggaacaattatgttatcccacagaagttaaaaaatttagtgacgagcatcttacttctgtacttcatgaagtaaatttaaaaaccttagttgatcgttatccaaatcttgatatcaaacaagattggccaagaattctttctctaggtgaacaacaaagattagcttttgcaagactcttactgaattctccaagatttgcagtacttgacgaggcaacaagtgctttagatattgatactgaaaaaaactatatagtttactcaagcaacgagaactttctcttattagtgt

SEQ ID NO: 270072 - DNA, 590 bp, Unknown
  Bacterial polypeptide expressing nucleotide sequence isolated from the Sargasso Sea
tattaatcttgaattacaggagggtgaaacagttgcagttattggacaatcagggagtggaaagtccacacttttatcactgatggcaggattggatcgtcaaacttcggggtttcttagattaaggaacaaggaaataagtgaaatgagtgaagtgaagctgactcaattccgtgcagaaaatatcggaattatttttcagcagttttatctgatgccccaccttacagcattagaaaacgtaagtttacccttggaaatgtttggatatgatgattacctcaaccgagcgaaagaagcacttaaacaggttgggctttcagaccgtgaaaagcattttccgcatcagctaagtggaggagaatcacaaagggtggcaatcgcaagggctgttgttactaaaccttctattcttcttgcagatgaaccaacaggaaaccttgacaacgataccggtatacaggtggcaaaccttctttttgatcttgtaaatgctactggtatgacaatgcttttggtaactcataatactgagatggcggatcgttgttcaaaacagctgacacttcagaatgggacttttaaatgaa

SEQ ID NO: 270073 - DNA, 226 bp, Unknown
  Bacterial polypeptide expressing nucleotide sequence isolated from the Sargasso Sea
aacatcgctgcagaacacagtggctcatctgtttttgctggtgttggtgaaagaactagagaaggaaatgacttctttcatgaaatgacagaagcaaaagttatagacaaagtagcattggttaatggacaaatgaatgaacctccaggtaatagactacgtgtagccttaaccggaataacgatggctgaacacttcagagacaatggcagcgatacacttttat

SEQ ID NO: 270074 - DNA, 563 bp, Unknown
  Bacterial polypeptide expressing nucleotide sequence isolated from the Sargasso Sea
gatggcggatccagctcccatcgttgccaccaacgtcagccacagctacggaaccggttcgatgcgccgtgaggttttgcaggacatcaacttccgcgtggatcccggggaggtggtgctgctcacgggaccttccggctgcggcaaaacaaccctgctcaccctggtgggagcgctgcggagtttgcaacacggtcagttgcaagtgctgggggtgcccttggcccgggctggccgcggggatcgacgccggctgcggcaacgcatcggcatgatctttcaagggcacaacctcttgcgctgtcttaccgccgagcaaaacgtgcagatgggagccgatcttctgccgggcctcagttacggccaaaggcgcggtcaagcccgcgaatggctccgtgctgtgggcttgggggatcaactcagcaaggtgccccacgatttgtcgggcggacaaaagcaacgggtggccatcgcccgggccttggcggcccgcccccgcttgcttctggctgacgagcccaccgcagccctcgatggccgcaccggccgtgaaattgtggagc

SEQ ID NO: 270075 - DNA, 412 bp, Unknown
  Bacterial polypeptide expressing nucleotide sequence isolated from the Sargasso Sea
aaataattatatttatgatttattagagtctgttgaactaacacaaagatctgcagatagatatcctcacgaattttctggaggacaaagacaaagaatttcaattgctagagctctcgcaacacaaccaagattgctagtctgtgatgaaccaacatcagctttagatgttagcattcaggctcagatattaaatttgttaaaagatctccaagagcagctcaacttaacaatcttatttattagtcatgatctgccagttgttagacaaatgtgtgatagaattggagtgttaaaaaacgggaaattatgtgaagtttcaaattcagaggaactatttttgaaacctagccatgattatactaaggaacttttacatttaatgcctaaaattgagtctatttataattaa

SEQ ID NO: 270076 - DNA, 582 bp, Unknown
  Bacterial polypeptide expressing nucleotide sequence isolated from the Sargasso Sea
gtttttatgaaacagagcaggtggaaattttactggatggtatcaataccaaagactgtacgctggactcattgcgctcacaaatggctgtggtgtcacagcatgtggtgctgtttaacgacactatcgccaacaacattgcttatggctaccgtggtgaattaagcccagaacgtttactggaagtggcagaaaaagcccatgtgatggaatttgttcatcagatgccagatggactcgacactgaaattggcgaaaacggtgtaactttatccggtggtcaacgccagcgtattgcgatagcacgggctttgttacgtctggcgcctgtgcttattctggatgaagccacttcggcccttgataccgaatcagaacgtaaaattcagggggctttggatgaattatttaaaggtcgaaccagtattgtcatagctcaccgtttatccactattgaaaatgccgatcagattttagtgatggatcaaggccagattgtagagcagggcaaccatcagtccttgctggcacaaaatggctactatgctcagctgtataaaatgcaatttagcgaagtctgat

SEQ ID NO: 270077 - DNA, 436 bp, Unknown
  Bacterial polypeptide expressing nucleotide sequence isolated from the Sargasso Sea
aatgtctgacccaataataaaaattcaaaatatgaataaatggttcggtgattttcaagttttaaaaaatataaatcttgaggttgaggcaaataaaaaaattgtagtatgtggaccatcaggatcgggtaaatctacattgattagatgtattaatagattagaagagcaccaagagggagatataattgttgatggaaatgaactatcagaaaaaacaaaagatattgaaaaaattagagctgaagttggaatggtttttcaacaatttaatttatttccacacttatcaattttagataattgtactcttgcaccaatttgggtaaaaaaaatgccaaaaaaagaagctcaagaacttgcattagatcaacttaaaaaagtacaaatagatgatcaggccaataagttccctggacaactctctggaggtcaa

SEQ ID NO: 270078 - DNA, 718 bp, Unknown
  Bacterial polypeptide expressing nucleotide sequence isolated from the Sargasso Sea
atgaataaggaaaaaaaatcaaatgataatttagttacattttctgaagtaactaaacaatatggtgatttggttgtacttgataaacttaatctagaaataaaaaaaaatgaaatggtttctattataggcccttcaggttcaggaaaaacaactgttttaagagttttaatgacattagaaaaaattaataacggagtcatttatttagacaatgaacctttaacccacatgcaagaaaatggaaaattaatagaggcaaatgaaaaatatattagagaaagacgttcaaaaataggtatggtttttcagcagtttaatttatttcctcatatgacagcattacaaaattgtattgaggcacctgttcatgttctaggtttaaaaaaagaagaagcagaacaaagagcacttgaattattagaacttgttggactgactgataaaaaggatgaacatccaactagattatcaggtgggcaacaacaacgtgttgctattgctagagctcttgcaatgagaccaaaagtaatgcttttagatgaaattacttctgcattagatcctgaggtagtaggagaagttttaaacgttatacgctcccttaataaagaacataatttaacaatgattatggttactcatcagatgggctttgctagagagatttctgatcgagtttgctttttttatgaaggaaaaatattgaacaaggacc

SEQ ID NO: 270079 - DNA, 426 bp, Unknown
  Bacterial polypeptide expressing nucleotide sequence isolated from the Sargasso Sea
caagttatgacgaaatagaaaatatagctaaacttactggaataactgaattttctgactctctagatcaaaatttagaaacagtaataggtgagagtggagttaaattatcaggaggtcaaagacaacgagttgcaatcgcaagagctatgattaaagacgcacctatactaataatggatgaggcaacgtcatctctagataatattactgaaagaaaaatatataagacaattaaggagttaatgaaaaataaaactactttaattattgctcatagattaagcactattgaagattctgatataatttatgtattagataaaggaaaaattgaaaattttggtagtcatcaagatttattaaataaatcagcaatttataaaaaacttcaactaaaagaaaaattagaaaatgaattttaaa

SEQ ID NO: 270080 - DNA, 781 bp, Unknown
  Bacterial polypeptide expressing nucleotide sequence isolated from the Sargasso Sea
atgaatgtttataataatttagcttatggtctaaaaaatagaggaattgacaaagaaacaattgagcaaaaagtaaatgatgcagctaagctgttacaaatttcagattatttacagagaaaaccttcaatgttatctggaggtcaaagacaaagagttgctatgggaagagcaatagtaagaaatccaaaaatattcttatttgacgagcctctttcaaacttagatgcaaaattaagaattcagatgaggcttgaaattaaaaaacttcaacaaaaggttggagtaacaagtatatttgttacacatgatcaagttgaggctatgacgcttgctgataggttggcagtaattaataatggaattattgaacaacttggcactcctattgagatatatgataatcctaaatctttatttgttgctggttttattggttcaccgcaaatgaattttttagatggtaatttaaaaaataaaacattatctgcagaaggctttgaaattaaagatattaatagtgactatgagggagaagttacactaggcattagacccgagcatttaagtcaaactgaaaatggtttaattaatttaaaagtagacttagtggaacagcttggttcggataatcttgtttatggtcaattgaaaaataaaaaagacttttgttacaggtgtccaggaaatcaaactattgaaaaaggcgctaatttaagactaaatattgagaacaataaatattacatttttgataaaagcaccggtaaaagagttaata

SEQ ID NO: 270081 - DNA, 453 bp, Unknown
  Bacterial polypeptide expressing nucleotide sequence isolated from the Sargasso Sea
catgtctcaaaaagatagtttcgttaagttcgataatgtagataaaagttatgacggtgaagttttagttgtaaagggtttaaacttagatatccctcaaggagaatttttaacaatgcttggaccttcaggctcaggtaaaactactacattgatgatgttagcaggttttgaaacaccaacgagcggagaaatatacttagagggagaaccaataagttcaattccaccatacaaaaggggaattggaatggtttttcagaactatgcattgtttcctcatatgactgtaaatgaaaatttagcatttcctttagaggtgagaaaattgcctaaagctgaaattaatgaaaaagttcacaaggcattatcaatggtggagcttcaagattttggaacaagaatgccattacaattgtcaggtgggcaacagcaacgtgtagcttttagcag

SEQ ID NO: 270082 - DNA, 823 bp, Unknown
  Bacterial polypeptide expressing nucleotide sequence isolated from the Sargasso Sea
ttctctttatgcttttgctggttatagattgatgccggccttacagcaaatattcactggagcatctcatattagatttgttgaagcttccttggattctatacataacgatctaaataatttgagcaatttaaattcttttagaggaaaatcagatgatataagtttgaataagaagattgtattagattccgtattttacagttatccagatgatccaaaattagttttgggtggaattaatttgtccatcaataaaggcactagcgttgcctttgttggagagacaggaagtggaaaaactacaattgtggacatcataatgggcttattaaccccaaagaaaggaagcttgtttgtagacgaaacaaaaatagatcccacaaatttattttcctggcaacaatcaattgggtatgttcctcaagatatttacctttcagatgattctattgcttcaaatatagcttttggaatagaaaaagaaagtatagaccatgagtttgttaaggaggcatctaaaattgcccaactagaaaattttatacaacttgaacttcgggatgggcatgaaacaattgtcggcgaaagaggggttaggctttcaggcggtcaaaggcaaagaataggtatagctagggcaatttataagaagcctaagattttaattttagacgaagcaacaagtgcattagatagtcttacagaatctaaagtgattgagggaattaaaaaggtagataaaaatgtaactattatttctatagctcataggataaatacaattatagatagtgattgtatcttcgtcctagataaagga

SEQ ID NO: 270083 - DNA, 599 bp, Unknown
  Bacterial polypeptide expressing nucleotide sequence isolated from the Sargasso Sea
tattcaggttttagaagacctttctctggatttgaagaaaggagaaagcctagctcttgtgggagcttcaggttcaggtaaatcaactcttttgcacgtcatttgtggtttagagaaacccaacaaaggaaatgtttatattaagggagtgaatattactgaccttagtacagacgaaagatcattatttagaggcaaagaggtggggtttgtatatcaatttcatcatttacttcctgatttaactgcattagagaatattgctctgccagctatgctttcaggtattggaaaagaagaagcttttgagatatctgcctctttattagaacaggtaaatttaaatgataaaaaagaaaataggcctaatgaattatcaggtggagaaagacaaagagtggcgatagctagagcaatgtccaacaacccttcgtgcttaataatggatgaaccaactggaaatctagataagaaaaatgtagaaaattttatgaatcttcttatggatatggtctcaactagagaaattgctttgataattgcaactcatgacaacaatgtctctagtcgactggataagttattaaacttagaataga

SEQ ID NO: 270084 - DNA, 841 bp, Unknown
  Bacterial polypeptide expressing nucleotide sequence isolated from the Sargasso Sea
aattagcaaggccatcccacttctcggagctttagcctttggagcacagcgcatgctacctattcttcaacagttttatttttcatggtcaactattcagggtgtcatagcatcaatgcaggatgttttagaattactagagcaaccaatgccagagcagcagaaattgaccagagatgctttgcaattcgagaaaatgatcgagttgaagaaccttgattttgagtataatcctgctgcaggcagagtaattcgggacgcaaacctcattatatccaaaggtagcaaggttggtttcatcggtgagacaggaagtggaaaaagtaccatgcttgatattattatggcactgttgcagcctactaagggccatttgattgtggatggaaacgtcattgatgatcaatctggaaaagcatggcagtacaatattgctcacgtacctcagtcaatctttctctcagataattctgttgaagaaaatattgctttcggcttacccactgaaaagattgaccatcaaagggtgaaatgggcagcgtcacatgctcagattgatagggtgatcgaaaaattaccaaatcaatacaaaacattagttggtgaacgcggtgttagactttccggcggtcagcgtcaacggattggtatcgctcgagctttatataaagataccgaagtcatcatttttgatgaagccactagcgctctcgataatcaaactgaagccgctgtaatgcaggccattgaaggattgcatgaaaaactcactgtgcttatcatcgctcacaggcttacgaccctcaagaactgcgatatgattgttgagcttgataatgga

SEQ ID NO: 270085 - DNA, 526 bp, Unknown
  Bacterial polypeptide expressing nucleotide sequence isolated from the Sargasso Sea
atgatacttgaaataaataaactttataaatcttttcctcaagcggatcttggtaaaattgatgttttgaaaaatattaatcttgaattacatgagggtgaaacagttgcagtaattggacaatcagggagtggaaagtctacacttttatcactgatggcagggttagatcgtcaaacttcgggatctcttcgattaagagacaaggaaataagtgaaatgagtgaagttaagttgactcaattccgcgcagaaaatattggaattatttttcagcagttttacctgatgcctcaccttacagcattagaaaacgtaagtttacccttggaaatgtttggacatgatgattaccttaaccgagcgaaagaagctcttcaacaggtcgggctttcagaccgtgaaaagcatttcccccatcaactaagtggaggagaatcacaaagggtggcaatcgcgagggctgttgttactagaccttctatacttcttgcagatgagcccacaggaaacctgacaacgatac

SEQ ID NO: 270086 - DNA, 553 bp, Unknown
  Bacterial polypeptide expressing nucleotide sequence isolated from the Sargasso Sea
atgaaaacattaaaaattgatgaattatcaaaaaattttggaacaacagaagtattaagaaaaattaatttagagatagacgaaggaaatttcttagtacttttaggtccttcgggctgtggaaaatcaacattattaaatattatagctggtttagagacaataaatgaggggaatgtatatatagatgattacaatgtaagcaaagtagaaccaaaagaccgaaatattgcaatggtatttcagtcttatgctttgtatccatccatgaatgtccgagaaaatatgatatttggccttaaacaagccaaagtatcaaaagaaaaaattgaggaacagttacaaaaagtttcaaaatttttgcaagtagatgctttactagaaaggaaaccttcgcaactatcaggaggtcaaagacaacgtgttgctattggaagagcgctagtaagggagcctagaatatttttatttgatgaaccactatctaatttggatgcaaaattaagagttgagatgagaagagagattaaaaaacttcatcaacagcttaaaa

SEQ ID NO: 270087 - DNA, 424 bp, Unknown
  Bacterial polypeptide expressing nucleotide sequence isolated from the Sargasso Sea
ttacaagagtttacctcattctttcctcatcaattatcaggtggtttactacaaagagttgcaatagcaagggcattgcttttttatcctaatttattattattggatgaaccatttgctgctttagataaccttagtagagaaattatttcaggtgagcttgtttcgataattaaaaaaaattctcttactgtattaatggttacgcattccattgaagaagcagctttattaagtgatgaagttttgataacaggaaaagcacccataagagtaataaaaaaattcactcctcctaaatgcgaatacaatgaatcttggcaaacattaggtctaagaaaatcattgcaagataaatcttttaatacctatttaaaattaataagagatacttcatatctagctctggaaagggaaaaataag

SEQ ID NO: 270088 - DNA, 662 bp, Unknown
  Bacterial polypeptide expressing nucleotide sequence isolated from the Sargasso Sea
gcaacgtgtcgctcttgcaagagctttagtaagacaaccaaaagttttattattagatgaacctctaggtgctttagataaaaaattaagagatgaaatgcagttagaattaagaactcttcaaaaaaatattggaattacttttgtattcgtcactcacgatcaacaagaggccataagtatgtcagatagagttgccgttatgaatgatggaaaaattcaacaattatcagcacccaatgaactttataagaatccaaaaaatatatttgtaagtgattttattggtgaaacgaattttcttaaagctgagacaaaatcaagtgatggagaatacatcaatgtttcaattgaaggattgggagaatttaaaattaaaaataatttaaatatagcagcaaattcttctgatgttgtttgcagtgttcgtccagaatcaatgatgatttccaaagtgaaatctgactgggatatttgtcttgatgctaagattactcagacttcatatttaggagagatgactagattttacgttgaagctaagggaataagcaagacaatcactgtttcttctcaacattttgacaataagtcttttgaaaataatgaatgctttataagtataagtttagaagatatttctttattgaataaaaaatagc

SEQ ID NO: 270089 - DNA, 946 bp, Unknown
  Bacterial polypeptide expressing nucleotide sequence isolated from the Sargasso Sea
caagaaaggaaatttagcagttatattaattactcatgacatgggagttatctctgaaacaactgacagagtggcagttatgaaaagtggagatcttgtagaaataggaactacgaaagaaatattaacaaaacctaaggagctttatacaaaggcacttgtaagttcagttccccctacaaataaaaaaatagatagatttaaaattattgaaaaggaaaataaaacagtaggtgaaactaatattaaaattttaaatagatggactaaaaaaaaaattattgatcaggatttaattaaagtaaaaaatttaagcaaaacttttgatgataatttttttacagaaagtactaaaaattctgtaatggctgttgacgatgtatcatttaatataaaagaaggagaatcgtttggcttagtaggtgaaagcggaagtggcaaatcaacaatagcaaaaatgattgttaatttatatagtccaagtactggagatattgattttgataatgtttgtataacaaaaattaaaagcaataaagaaatgatgaagtttagaaaacaaattcaaatgatttttcaagacccttactcatctttaaatggaagattaaaagttaaagatatagtttcagaacctataaaacttcacaatccctcgattagttctaaagatctagatagttatatttatgatttattagaatcagttgaattaacacaacaatctgcagaacgttacccacatgaattttctggaggacaaagacaaagaatatcaatcgcaagagctcttgcaactcaaccaagattactcgtctgtgatgaaccaacttctgctttagatgtaagtattcaagcacaaatattaaatttattgaaagatttacaagagcaattaaatctgacaatattatttattagccatgatttaccagtggtaagacaa

SEQ ID NO: 270090 - DNA, 586 bp, Unknown
  Bacterial polypeptide expressing nucleotide sequence isolated from the Sargasso Sea
atgaaaacgttaaaaattgaagaattgtcaaaaaactttggagcaactgaagttttaagaaaaattaatttagaaatagatgagggaaactttttggttcttttgggaccctcaggctgtggaaaatcaacacttttaaatattattgcaggtttagagacaatcaatgaagggaatgtttacatagatgattacaatgtaagtaaagtagaaccaaaagaccgaaacattgcaatggtttttcaatcatatgcattgtacccatctatgaatgtacgtgaaaatatgatttttggccttaaacaagcaaaagtatcaaaagaaaaaatagaagaacagctaggaaaagtatcaaaatttttacaagttgacgctttattggaaagaaagccctctcagttatctggaggacaaagacaacgtgtagcaattggtagagcgcttgtaagagagccaagaatatttttatttgatgagccattatctaacttggatgcaaaattaagggttgaaatgagaagagaaattaaaaaactccatcaacaacttaaaacaaccagtggtttatgtaactcacgatcaaacc

SEQ ID NO: 270091 - DNA, 850 bp, Unknown
  Bacterial polypeptide expressing nucleotide sequence isolated from the Sargasso Sea
gaatacacgatcaagcttttaaaatcagagcctcaagaaaaggatcatttgcatgtttcagaggataatattttagatatttcaaatctcagtgttttttacaaaataccatcaaaacagctatttaagactgatagattttgtgcggtttttaacatttctttaaaaatcccaagaaattcaacagttggtgtggttggagaatcaggttctggtaaatcaacacttggaaaagcgattataaatcttcttgattttgaaggatcaattaaatttaatggtaaatcaattaaagatcttagctcagctgaaaagaaattattaaaaaaagatattcaaatagtttttcaagatccctatggatccctgtcaccaagaatgacagttggcgaaatcataggagagggattggatatacattttgatttttccaaagaagaaaagatagaaaaaatatcaaatgtgatgaaagatgttggattagatgacaacctcatttttaaatatccacatgaattttctggtggtcaaagacaaagaatcgcaattgctagatcaataattttaaatccgaaattcatgatccttgatgaaccaacttcagcgcttgatagatccattcagattcaagtgatagacgttttaaaaagattacaagacaaatatgaattaacatatttatttattagccacgatcttaaagtaataagatctatgtgtgatcagatttttgttatgagtgagggaaagttagtagagtatggtaaagctgatgaggtttttgaaaatcctcaacaggagtatactcaaaaacttttaagagcagcactgaaatactcatcaaattaag

SEQ ID NO: 270092 - DNA, 409 bp, Unknown
  Bacterial polypeptide expressing nucleotide sequence isolated from the Sargasso Sea
gttggttttgtttttcagtcttttcatttgttgcctcgactatcagccttagacaatgtgatgatgccactcgagatactcggcgctaaagacgcaaaggagagggcactaaaagctttggatgaagtgggtttgtccaaaagaacaggacacgttcctcatcaattatctggtggagaaaagcagcgagtcgcaattgcaagagccatggttaaagcgcccagcatcttatttgcggacgagcccactggaaatttagaccaatcaagcactgacaatattctcgaactattactgggaatcaataaacaaacaaagacaaccttggttgtcgtaacacatgatcagcagttagcctcacgttcggatatggtcttcgagcttcaagaaggaaaattaaaatgctgaa

SEQ ID NO: 270093 - DNA, 718 bp, Unknown
  Bacterial polypeptide expressing nucleotide sequence isolated from the Sargasso Sea
cttgggaagagcaatagtaaaactagaaaatattgattctggagacattatagttgatagtctaaatattaattcatctaaatctgatgatttgaaaaaccttagatcaaatgctcagataattttccaagatccatactcatctcttgaccctaggtattcagttggtagaagtattgccgagcctatcctaattcaaagacaatgtagtcgatctgaagcaaaagacagggtatcagttcttttaaaaagagttgggctaacgaacgaaatggcaaatcgttatccacatgagttttctggtggtcaacgtcaacgtattgcaatagcaagggctctagcttcagaaccaaagtttatcgtagctgatgaaccgacatcggctctagatgtaactatccaagctcaaatacttgaactgctgaataacctaaaaaatgaaaaaaatatctctcttctttttattactcatgacctagcagttgttaggcaaatttctaatcaagttgctgttatgtgtcaggggaaaattctcgaaataggtcctaccgattctgttttagataacccccaaaatgattatactaaatctttacttagtgcagctccttatcctgatccggaaaaaagaaaaaaattaaaaagaaatattaatttaaaatcatttaatacaggaccactaattgaaatagcaaaaaatcattgggcggcatcatga

SEQ ID NO: 270094 - DNA, 555 bp, Unknown
  Bacterial polypeptide expressing nucleotide sequence isolated from the Sargasso Sea
acttaaattatattaaaaaaaatcagttaaaaaaaattagaaaagatattcaaatagtttttcaagatccattttcatcacttagtccaagaatgaatgtttatcaaattttatcagagggtatagacgtacattttccaaaattctcagaatttgaaaaaagagaaatgataagaaacatattaattgaaacaggtatgaattttgaaaatgatcataataaatttcctcatgaattttcagggggacaaagacaaagaattgcaatatctcgcgcattaatacttaagcccaaaatattaattttagatgagccaacttctgctttagacataacaattcaaaatcaaattttaaatttactcaagaatctccaagaaaaatactctttaagttatatcttcattagtcatgatatgaatgtaataagatctgtttcagataaaataatggtgcttaaaaatggcaaaataattgagcatggcaatgctgaatctatttttactaatcctgaaaagaattatacaaaaaatttaattaaaactgttatttaat

SEQ ID NO: 270095 - DNA, 618 bp, Unknown
  Bacterial polypeptide expressing nucleotide sequence isolated from the Sargasso Sea
tatgagtaatctcatagaagttcaatcagtaaataaaacatacaaaagaggtgaagagactttagtcgtgttagatgacttaagccttgaagtacaaaaaggagatttcttagctttaatgggtccttcaggatcaggaaagtctaccttattgaacttaatcggaggactagataccccaacatctggtcagatagtggttaatgaacaacatctagagaccatgaacgcgtctgctttaagcacatggagagctaacaatgttggctttatattccagttttataacttattaccagttctaacagctcataagaacgtagagataccgcttctcttaaccggcttatctggatctcaaagaaaagaacacgtttccactgctctaaatgtagttggcttatccgatagaggaggccataaaccgaatgaactttcaggtggacaacaacaaagagtagctattgctagagcgcttgtttcggatcctgatatattggtttgtgatgagccgacaggtgatttagataggaacacagctactgaaattttggatcttctccaaatacttaatcgagatcacggcaaaacgattcttatggtgactcacgatcctgt

SEQ ID NO: 270096 - DNA, 722 bp, Unknown
  Bacterial polypeptide expressing nucleotide sequence isolated from the Sargasso Sea
cctgttacaggtccaaggacttcaggtttttctgaaacaacgaaatcgtcggttgacggtcgtggaagaccttaatttttccctgggttttggcgagaggcttggaatcgtcggcgagtccggatgcggaaaatccgtcacggcccttgccttattgaatttactcccctcaaccatgagcatggcaggcagcatccaccttgcttcaagggatgggcaaagggaggacttgaatcaattgtccgaagcccggctttgtgaaattcgtggtaaaaaaatcgggatggtctttcaggaaccgatgtctgccctcaacccggtccagacaattgggcatcaggtttctgaaagcttattgcttcaccactccctttccaggcatgaagcggatcaaaaagcatccaggatgctggatcgcgtaggacttccggtttcacgttttgcccgaaaactctacccccatcagctttcgggtggacaaaggcagcgggtcgtgatcgcgattgccatggcatgtggtccggacctgttgattgctgatgaaccgaccaccgccctggatgtcaccatccaggcacaaatcctgagactactcagtgagctggtggaagaagaaaaaatgtccctgatcctgatcactcacgacctcggggtgattgcagagaacacggaccggatgctgatcatgtacgccggaagatgcgtcgaaagcgggcttacgg

SEQ ID NO: 270097 - DNA, 646 bp, Unknown
  Bacterial polypeptide expressing nucleotide sequence isolated from the Sargasso Sea
aaatcgacaatagcaaaaattataactggactagtcagaccaactgttggggaaatagagtataataatttttcgctttacgacaaaaaaaagaaatatcaaatccataaaagtagagggcagatacaaatgatatttcaagatccttattcatcattaaatccccgtttcaaagtaaaagatattattgcagaaccattaaaattttttcaaaaaaatatgtctaaacaagatttagatcaaaatgtttttgatttaattgatatagtgggtatgacaagacagtctctggatcgttaccctcatgaattctccggtggtcaacgacaaagaatttctattgctagagccctagcaacaagaccacgattattactatgtgacgagccaacatctgctcttgatgtaagtatacaagcccaaatattaaatttattaaaagatattcaagatgaacttcatttaactatgctatttattagtcatgatcttcccgttatcagacaaatgtgcaatagaattgttgttcttaaaaacggtatagtttgcgagacaaatgatactgaagaattgtttaatcaaccaacacatcaatatacaaaagaattaatcagattaatgccaaaaatagagtcaatagtttaaa

SEQ ID NO: 270098 - DNA, 442 bp, Unknown
  Bacterial polypeptide expressing nucleotide sequence isolated from the Sargasso Sea
atgtcaaatgcaattatacaaatgaaggaagtaaataagtggtttggagattttcaagttttaaaagatattaatttagaagttggagagaaacaaaaaatcgttgtttgcggtccttctggatcaggaaagtctactttaatcagatgtattaatagacttgaagaacatcaaaaaggacaaattatagttgatggaagcgaactatcagaaaaaacaaaagatatagaaaaaatcagagcagaagttggaatggtttttcaacaatttaatttatttcctcatttatcaattttagataattgtacattagcaccaatttgggtaaagaaaactcctaagaaacaagctgaagagctcgcaatgaaacagttagaacaagttcaaattgcagatcaagcgatgaaatttccaggtcaatgtccggaggacaacaacagag

SEQ ID NO: 270099 - DNA, 424 bp, Unknown
  Bacterial polypeptide expressing nucleotide sequence isolated from the Sargasso Sea
attagaagcaaggatgttggttttgtttttcagtcttttcatttgctgcctcgattatcagccttagacaatgtgatgatgccactcgagatacttggcgctaaagatgcaaaagagagggcactaaaagctttggatgaagtgggtttgtccaaaagaacagggcatgttcctcatcaattatctggaggagaaaagcaaagagtcgcaattgcaagagccatggttaaagcgcccggcatcttatttgcggatgagcccactggaaatttagaccaatcaagcactgacaatattctcgaactattgctgggaatcaataaacaaacaaagacaaccttagttgttgtaacacatgatcagcagttagcctcacgatcggatatggtcttcgagcttcaagaaggaaaattaaaatgctgaa

SEQ ID NO: 270100 - DNA, 484 bp, Unknown
  Bacterial polypeptide expressing nucleotide sequence isolated from the Sargasso Sea
aagactaaaagtaaaagaaattattgcagaaccaattaaacttcataatccggatataaaatctagcgaattagacagttatatctatgatttattagaatctgttgaattaactcaacagtctgcaatcagatatccccatgaattttcagggggtcaaagacaaagaatatcaatagcaagggcactagcaacccaaccaagacttcttgtgtgcgatgaacctacatcagcattagacgtgagcattcaagctcaaatactaaacttattaaaagatcttcaagaacagttaaatctcactatattatttataagccatgatttacctgttgtaagacaaatgtgtgataaaatagctgtgcttaaagatggaaaattatgtgaagtgtcagaaacagaagagttgtttaaaaatcctaaacataattatactaaggaactactaaaattaatgccaaaaattgaatcaatttataactaa

SEQ ID NO: 270101 - DNA, 478 bp, Unknown
  Bacterial polypeptide expressing nucleotide sequence isolated from the Sargasso Sea
atgtctgtaaaaaatgattttgttaagtttgataaagtagacaaaagctatgatggcaaagttttagttgttaaagatcttcagttagatatagccgaaggagaatttattaccatgttaggaccatcaggctctggtaaaacaacttgcttaatgatgttagctggatttgaaacccccactaatggtgagatatatttagatggaaatgcaatttcaagtattcctcctcataaaagaggtatagggatggtatttcaaaactatgcactgtttccacatatgactgtatatgaaaatttggcgtttccgcttagagtaagaaaaattccaaaagatgaagcagataaaaaaattgataaagctttatctatggtgtcgctgcaaggttttgctcaaagaatgccgggacaattgtctggaggtcagcaacaaagagtggctgtagctagatctttagtgttcgatccacaattag

SEQ ID NO: 270102 - DNA, 667 bp, Unknown
  Bacterial polypeptide expressing nucleotide sequence isolated from the Sargasso Sea
atggaaatcttactatcagctaaaaatatttcaaaaacttttcaagggaaaaaagttttagatgatattaatattgaaattaagggtgcagagattattgctatatcaggagcttctggggctggtaaaacaactttgcttaatattcttagcacattagataaaccagatgacaccaataagtctaccttaattattgaaaatcaggaaatatttgttctaggcaaaaatgatttagctaatcttagaaatcaaaaaattggttttgtctttcagtttcatgagttaattcctgagttaagtgttttagaaaatgtatgtctacctggttggattaaaaaggataatgatgttaaaaaaaaggctgaagaactattgaaatactttggcttagaggaatttactcataaaaaaccattaaccctttcaggtggtgaaaaacaaagagttgcaatagctagatctcttgttaataatcctaaaattatttttgctgatgaaccaactggtaatttagattcaaaaaattcaaaaatcctttttgacttattttttaaattaagagaagattataattgttctgtcgttattgttacacatgatgaaaaaagtgcaaacatctgtgatagaaagctattgattgttgatgggaaaattaaaaattaaa

SEQ ID NO: 270103 - DNA, 754 bp, Unknown
  Bacterial polypeptide expressing nucleotide sequence isolated from the Sargasso Sea
tggtccttctggttgtggaaaatcgacacttctacgactcatagcagggcttgaagaggtcactaatggtgaaatatacattaataatgaaagagtcactactactgtaccaaaggatagagacatctcaatggtgtttcaaaactatgctctatatccccagatgactgtttatgaaaatatggcttttggtttaaaaatgagaaatgaatctagtggatttattaaagaaaaaatccaatgggcttctaaaaaattaagtttagaggaattactatctaggaaacctaaagaattatcaggaggccaaaaacaaagagttgcacttgggagagctatcgtccgtgagccaaaagtattcttatttgatgagcctttatcaaacttagatgcaaaattaagaattcaaatgcgttcggtaataaaaagacttcatgaagaacttgatgctacgatggtatacgtcactcatgaccaagtggaggcaatgacactaggtacaaaaattattgcattaaatgaaggcgtgattcatcaagttgattctcctattaatttatacagtgaccctgctgatactttcgttggaaagttcattggcaatcctggtataaatttgatacctttaactatttctgagaattttgaaattaacattgaaggaaaaaagaataatcctatcacatccgaagaaattgatacggaggcaatttttaaaaattattcaaagaaaaaagtaatcctaggcattcgt

SEQ ID NO: 270104 - DNA, 505 bp, Unknown
  Bacterial polypeptide expressing nucleotide sequence isolated from the Sargasso Sea
atgagtctaataaaagtaaaaaatcttaaaaagaaatatttccttgggtcacaaagcgtcgatgctttaaagggattaagttttgaaattaaccaaggagagtttctttcaattatgggaccatctggttcaggtaaaacaacgcttatgaatattattggctgtcttgatactccttcttcaggagaatatattcttgataataataaagttcaagagctagatgataatgaacttgcaaacattagaaataaaaagataggatttgtatttcaatcttttaaccttctttcaagaaataatgcccttaataatgtcatgcttccactttcatatgcaggatttagctcagcaaacgcaaaaaaaagggcttcagaggttttaagtttagttggccttaatgatagggttgatcacaaaccgtctgaactgtcaggcgggcaacaacaaagggtagctatagcaagggcgcttgttaataaccccaagtataatttttgctgat

SEQ ID NO: 270105 - DNA, 535 bp, Unknown
  Bacterial polypeptide expressing nucleotide sequence isolated from the Sargasso Sea
aatgtctaaagttgaattaataaaattaaataaagtttttgaatctaaaataggtgaagatgttattgcggttaataattttaatatgaatatagagcacggagaaatcgtagctttactaggttcatcaggatgcggcaaaactactaccttaagaatgatagcaggatttgaaaaatgtacagatggagaaattaaacttgatggagaaatgattaatcacttaaaaccatcagaaagaaatgtagcaatggcatttgaaggatatgcattgtacccacctttaactgtcagtgaaaatatagcttttggattgataagagaaaaaatttccaaatctgaaataaataaaaaagtcgatgaggttataaatttattagaaatcaaagatattgttgatagatacccgcccaccatttctgctggacaacagcagcgtgtaagtttggctcgtgccttagttaggaattctaaagttttgttattagatgagcctatgtcgcaacttgagccgcagtttacgagctgtttttga

SEQ ID NO: 270106 - DNA, 485 bp, Unknown
  Bacterial polypeptide expressing nucleotide sequence isolated from the Sargasso Sea
tatgacaaaagttcgttttgatgatttatttaaatcttatgataaaacagaagtaattcatggtattaacttagaggtgaattcgggagaatttattgtttttgtaggtccttcaggatgtggaaaatcaacattattaagaatggtagctggcttagaagatataacaagtgggaatatgtatataggagaaaacttagttaatgatgttgctccagcccaaagagaagttgctatggtgttccaatcttacgctctttatcctcatatgacagtttacaaaaatatggcgtttggtcttcaactagcaaaaaaaccaaagaaggaaattgaggaaaaagttattaaagctgcaaagatacttcagatagaagattatctggataggctgcctaaacatctgtcaggaggtcagcgtcaacgtgttgcaatcggtagggcaatagttagagaccctaaagtttttttatttgatgaacctttat

SEQ ID NO: 270107 - DNA, 652 bp, Unknown
  Bacterial polypeptide expressing nucleotide sequence isolated from the Sargasso Sea
atgagtgacgaaacaactgccagtcctttactctccgtaagaggtattcgcaagaactatcgttctgggggaggtgttcttgaggtcttacagggtgtggattttcatgttcttcctggagagtttgtagcaattgttggtcaaagtggctcaggcaaaagcacgctgttacacctcatgggcctgcttgacgctcctgatgctggagaagtgtggctcgaaggtaagagaattgatcatcttccagccgcccaacgtgatggacttcgaaataccgtcattggcatggtctttcaggcttatcatctccttccagaactctctgctttggaaaatgttctcgctcctctgcttgtgcgtcacggagtcatggagtggctgaaagcagggactcatgcacgagatcaggccaaaatgctccttgatcgcttcgggctcggcgaacgaatgcgacacaaacctcggcagctatcgggaggtgaaatgcagcgtgtagcaatcgcacgcgcactcatcactcatccgcatgttctgcttgcagatgagcccacgggcaatcttgatgagtccactggtgtagatatcctagatgccatttgtgagttgaaccgccgggatggcctttctatagtgcttggacacacgacactgc

SEQ ID NO: 270108 - DNA, 443 bp, Unknown
  Bacterial polypeptide expressing nucleotide sequence isolated from the Sargasso Sea
gatggttactgatgaggttgttattgaaatctcgaatatgaataaatggttcggccactttcacgttctgcgggatattgatttgattgtcaacaaaggtgaaagaattgttatatgtggtccctctggatctggaaaatctactttaataagatgtattaatcgacttgaagaacatcaaaagggcataattaaagttgacggagtagagttgaatgatgatgtaaaaaaaatcgataaaattagaagcgaagttgggatggtttttcagtcattcaacttatttccacatcttacagcacttgaaaattgtactttagcgcctgtttgggttcgtaaactccctaaaaaagatgcagatgaaattgctatgaaatatttggaaattgttaaaatacctgagcaagctcttaaatatcccgggcaactttcaggtgggcagc

SEQ ID NO: 270109 - DNA, 910 bp, Unknown
  Bacterial polypeptide expressing nucleotide sequence isolated from the Sargasso Sea
agaggtcgaggcggcagcaaagctcgccaacgcccactccttcatctccggtctggagcacggctaccacacagacgtgggcagtggcggctccaagatctccggcgggcagaagcagcgtgttgccatcgcccgtgcgatcatacgcaagccgacggtgctgttgctcgacgaggcgacgtctgcgctggacaatgaatcggagaaggtggtgcaggcggcgctcaacgagctgctcgcgaagaccaagagcgccaaggaggcaaccaccacgatcgtcatcgcgcaccgtctcacgacgatcaccaactcggacacgatctttgtgatctcggcaggcgagctcgcggagcagggcacgcacgacgagctgctcgagaagggcggcgtgtacgcacttctctcgaagaagcagggccttggtaagacgggcgacgcggtcgcgccgccagcttccgcgcccgagatgggtggcgacgcgtcagacaagctccaggcagatgtcacgccagcggccaaggtgcaggcggtgggatcccccggtctgaagcagcgcactgcgggcaagcgcactgcgagcgtcgctccaattgtggagagcgcggcggctggcgggattgaggacccggtggagaagaagaagcgcgagaaggcggaggcggaggccatgcagaaggaggcggagaaggcaaaggggcgaatctgggcgatgcaagaggacgacaagctctacaatatcggcggcttcttcggtgctgtcggtaacggcctcgtgttcccggtgatggcagtcacgttcgctggtatgctctttatgcttctcaaccgctccggcaccttcatgcgtaaccagtcctacgtgctcgcgggcatgtttgcggccatctctgtgctgctctgcgtgccatcc

SEQ ID NO: 270110 - DNA, 352 bp, Unknown
  Bacterial polypeptide expressing nucleotide sequence isolated from the Sargasso Sea
atgctgtatagatatccacaagagttttcaggaggccaaagacagagaatagcaatagctcgagcgcttgtgcttcagccgaaattattaatccttgacgaacctactagcgctctagatgttttagtgcaagatagtgtggttaaacttctcatcaatttacaatcaaaattcaatttatcatattgttttataagtcatgacttaaatctgatcaaaaagatgtgtcatcgaacctatgtaatgaaagattctattataattgagcagggtacaactaaaaaaatctttaaaaatccacaagaagcatatacaagaagtctcctagaatcatcttttattagctactaaa

SEQ ID NO: 270111 - DNA, 769 bp, Unknown
  Bacterial polypeptide expressing nucleotide sequence isolated from the Sargasso Sea
cttgagttcagttatttcatttaaagatgtaagtcttaattttggaggagtccaagctttagatgatatttcttttgatattgaagaaggttctttgtttgcaataattggaccaaatggtgctggcaagacctcagcatttaattgtattaatggaatatacagacctacaactggttctgtaaatatattcgataaagatatatctgatatgaagccagaccagatagctgacttaggaatttctaggacttttcaaaatattgaattatttgaaaatatgacggcgttagataatatattaatcggtgctcatagacatattgattatggatctgtagctggtttgctttttactaaaaaagctcgagaggaagaagatagagcaagagaaattgcagaagatataattgattttctagagattgaagaatatcgattttcatttattctttcattaccttatggtattcaaaaaagaatagaattagctagagcattagccatgaaaccaaaagttctgcttctagacgaacctgcagcaggaatgaataacgaggagacggaagatatagccaggtttatacttgatattcatgaagagttaggagtgacagttgttttagttgatcatgatatgaacatggtcatggatatagcgacagatttaatagctatggattttggaaagaaattatttgatggaaaacctgaagatgctgcaaaggataaaacagttattgaggcttatttaggagttagtgattga

SEQ ID NO: 270112 - DNA, 728 bp, Unknown
  Bacterial polypeptide expressing nucleotide sequence isolated from the Sargasso Sea
caaagctttagcaatggtttcgcttgttggattgcaaaacagaatgccaggtcaactgtcaggtggtcaacaacaaagagtagcagttgcaagagcattagtttttgatcctgctgttgtcttaatggatgagcctttaggtgctttagataaaaatttaagagaaagcatgcagtatgaaattaaacacattcatgaaagtattggagtaacagtagtttatgtaacccatgatcaaggtgaggctttaacgatgtcaaataggattgcggtatttaatgatggtaaagttcaacaactgtcaagtcctgataaactatatgaagaaccagttaactcttttgttgcagaatttattggagaaaacaatacttttggcggagaagtttctgaaatttcaaacggaacatgtaaagtgaaattagaaaacggtgaaataattgccaatccaatttcagttaaatctgttggagaaaaaactacagtatcaattagaccagaacgagctttaataaaccctaaagataaaatggataataatcaaaaagggaaaattgaagaggttatttatcacggggatcatactagagttagattaaatttacttggtaattcagagtttatattgaaagttccaaatagttctcaaaacctagatataaaacttggtaatgaaattaatattggctggaacagtcatgacgctagagctttggacccaaaataag

SEQ ID NO: 270113 - DNA, 505 bp, Unknown
  Bacterial polypeptide expressing nucleotide sequence isolated from the Sargasso Sea
ctattcgagccgaagttggaatggtttttcaacaatttaacctttttccttcatttatcaatattagataattgtactttagctccaatttgggttaaaaaaatgccaaaaaaagaagctgaaagtttagctatgaagcaattagagcaggttcagatagtcgatcaagctcttaaatttcctggtcaattatcaggaggtcaacaacaaagatgtgcaatagcaagagctttatgtatggagccaaaaataatgctatttgatgaacctacatcagcacttgacccagaaatgattaaagaagtccttgatgctatggttaatttagcaaaggctggcatgactatgatcgttgtgactcatgaaatgggatttgctaaagaggtagcagatgaagttatattcatggatgaagggatgatagtagaaaaagccgtgacaaaagagttttttgcaaatcctaagagtgaccgaactaagctgtttttgagccaaattctttaga

SEQ ID NO: 270114 - DNA, 406 bp, Unknown
  Bacterial polypeptide expressing nucleotide sequence isolated from the Sargasso Sea
atggaacaatatttatcagttaaaaatatcaataaattctttggagattttcaagcacttaataatgtaagttttgatgttaaagagggtgagtttgtttgtatactaggtccttcaggatgtggaaaaacaaccctattaagagtagtcgcaggattagagagtcaatcagaaggcttaattaatcaaaataataaagacatatctttattacctcctgatcaaagagactttggaattgtgttccagtcgtatgctttatttccaaatttaagtgtaaaaaacaatatttcctttggattaaaaacaagaaaacaaaataatgaaacaattgataaaagagttgatgaattattaaaattggttggtttgagcgatcatataaataaatttcctgctcaactat

SEQ ID NO: 270115 - DNA, 502 bp, Unknown
  Bacterial polypeptide expressing nucleotide sequence isolated from the Sargasso Sea
ttgattttaaatgatatttctcttgatattgaggaagataaaattacatgtattttgggtccatctggaagtggtaaaacaaccctattaaaacttattgccgggctagaaaaaactcaaaaaggggaaattcatataaaagataagttggttagctcttcagatactcacttaaaaactgaatcaagaaatattggatttttattccaagactttgctttatttcctcacttaagtgtaagagaaaatttaaagtttgcaataaatggaaagtctgatgctaatatagaaattgatgaaataatgaaacttataaaactacctaactctttaccaaaatatccacatgaattgagtggtggagaacaacaacgagtggcattagctagagctataatttcaaaaccacaactacttcttttagatgaacctttttctaatctcgatttaagtttaaaagaagaaataagagatgacactttacatttattacaaaaattta

SEQ ID NO: 270116 - DNA, 699 bp, Unknown
  Bacterial polypeptide expressing nucleotide sequence isolated from the Sargasso Sea
gggctttgaatcctcgaatgttgattaaagatattgttggggaaccattagttattcatggtaagacagaaaatatgcgtgaaagagtcattgagttattgaataatgtaggtcttggtaaggagcatttgtacagatatcctcatgaattctcaggaggtcaaagacagcgcatagttattgcaagggcacttgcactggaacctaaagtcttagttttggatgaaccaacttcggctttggatgtgtcagttcaggctcaaattctaaatttacttaatgatcttcaaaagaaatttaatttgacttatattttcatttcacacgacttgtcagttatagaatacatgtgtgatcgtcttgcagttatgtatttaggaaaagtcgttgaagaggcagataccaaggacttattttcaaatccttaccatccttacacaaaggcattactttcggcaacacctagctttgaaaaagatagaaagaaaatcatgattttgggagatgtgcctagtccaataacttatttggatgaatctaaagttaaattggcaacagaaatgactgaacaagagcgtctagagatagaggcaattgaaggtaagaatattgattacattgtcagatccagtttgaatgaagtactgcctttagttaagttgacagagacacattatgcaagagtagaaaatgactgag

SEQ ID NO: 270117 - DNA, 271 bp, Unknown
  Bacterial polypeptide expressing nucleotide sequence isolated from the Sargasso Sea
ttggtaaacggtaaggtctccgacgcagaaatcactgccgcgagcgagcaggcgcatgcgcacgacttcgtgagctccttcccggacgggtacgggaccctcgtcggggagcgcggcatccgcctgagcggcggccagaagcagcgcctcgccctggcccgcgcgattctcgtggacccgaaggtgctcctcctggacgaggccaccagcgccctggacgccacctcggaagtccttgtccaggatgcgttagccacacagtattcatgac

SEQ ID NO: 270118 - DNA, 850 bp, Unknown
  Bacterial polypeptide expressing nucleotide sequence isolated from the Sargasso Sea
actatttatcgtgaaataagacaatcgttagttgatatggaaaatatgttcaatcttttaaaggaaaaaaataatattgatgatagtggaagtgataatttaaaaaacaataatgcagaaataatttttaaaaatatcttttttggatatgaaaataacagaacaattattaaaaatatatccttcagtatacctgaaggtagatctttagctatagttgggccaactggcgcaggaaaatcaacaataagtaaattattgtttcgtttttatgatccagatagtggagaaatattaattaataagaaaaatattaaaaaatacaaacaaaactccctaagacaaatgataggtgtagtcccccaagatacagtattatttaatgacactattttttataatatttcttatggcttaattgattcaagtgaagaagatgtaataaatgcagctaaaattgcaggaatacatgattttattgaaagtattccaaataaatacaatacaattgttggagagagaggtcttaaattatctggaggagaaaaacaaagagtctctatcgctagagctgttttaaaaaatccatcaattttcttttttgatgaagcaacatcagctttagatacaaatactgagaaagaaataaataaaaacttaaacataatttctcaaggtaaaactacattaattatcgctcatagactctctagtgtttcaaatgctgataaaataattgttatagataaaggaaatattattgaggaaggagatcatttaagtttactaaaaaaaaatgggttatacgctttaatgtggaataagccaaaacatgaaattaatatttaat

SEQ ID NO: 270119 - DNA, 804 bp, Unknown
  Bacterial polypeptide expressing nucleotide sequence isolated from the Sargasso Sea
catgggggtttacaagattttagatgcaagtccttcagtaattgagaaaaaaatcgaaaatattgaaactgtccttgaaccttcagtttcttttaattcagtaaaatttaaataccctggacacagtcatgttgtacacagctctttgagctttaatatcaaaaaaggagaacgagttggaattgtaggttcaagtggatgcgggaaatcatctatagtcaaactgcttctccgcttccatgatccagtgcaaggatcagtacatatcggaggaatagatcttagagatatttcattcgaccagattagaggaatgatctctgttgtgcatcaggacacatttttatttcatggtaccattgaagacaacattaaaatgggcaaccataaagccaatgaagacgagattattaaagcagcaaaaaatgcgaacatacatgagtttgtttcaacacttcctgaaggatacaaaactttaattggtgaaaaggggatcaagctctcgggagggcaacgtcaacgggtagccattgcaagagctctcctgagggataagcctatactcatattggatgaggctctttctgcagtagatgctgaaaatgaatttataatccaacaggcacttgatcgtttgatgaaagaccgcacaacactggtattagcacatcgactctcaagtatcgttaaatgtgacagaatcctagtaattgacaagggaataatagcagagtcaggttcacatcagagcctaatgctgcagaacggtatttattcagttctgatgtctcagcaggtacgtga

SEQ ID NO: 270120 - DNA, 778 bp, Unknown
  Bacterial polypeptide expressing nucleotide sequence isolated from the Sargasso Sea
acacgtaggatttatgccctggagcatgaaccagtgaccatcaaagacggcccacgaaaaatatccagtgaaacggcatcagagttgtcaatttccaatatcggttttcattatccggggagatcacagaaggttctggaaaacgtgagttttaccattcacggtgggcaaacggttgctttggtcggaccttccggggcaggaaagacaaccctggcgcaactgctgatgcgtttttgggatccttccgagggagccatcctgctttcaggaaatgatatcagagaattcggacttgaagcactccgctcaaaaatcgctctcgtcgctcaggacacctacctttttaacagcaccctcaaagaaaacatccttatagcaaaaccaaatgcaagttacctggaaatgaaaaaggccattcaaatggcatctttgacggaacttgtcgaaactctgccgcaggggtttgatacaaaagttggagaaagaggaaccagtctttccgggggccaaaggcaaagggttgccatcgcaagagcctttctgaaagatgcaccgattttaattcttgatgaagccacctctcatttagatgctttgagcgaaagtgaagtacgtggcgccctggacaaactcaaagaagaccgcaccaccatcatcattgcacaccggctttcaaccattcgaaatgctgacaacattatcgttctcgatggcggaagcattaaggagtcagggaaccacgatcagttattgaagatgaacggactttattccc

SEQ ID NO: 270121 - DNA, 676 bp, Unknown
  Bacterial polypeptide expressing nucleotide sequence isolated from the Sargasso Sea
agatttattttataaccaaacattaggaatagtaggagaatctggatcaggaaaaacttctttgattctagcacttttaaaattaatttcttttaagggtaagattctatttaatgatttagatatatcaaaattaaaaagcaaagatctcataaaaattagaaaagatatgcaaattatttttcaagatccatttagttctttaagtccaagaatgacagtagaagaaatagtaagagaaggtctagatattcatatgaaagaagttccaattaaagaaaaacaacaaatgataatagatatattaaatgaagttggattaaattatgatgatgttagaaatcgctttcctcatgaattttctgggggacaaagacaaagaatagctatagcaagagcaataattctaaaacctaaacttttaatattagatgaaccaacctcagcgctagatgtgagtatacaaaatcaaattattaaacttttaattaaattacaaaaaaaatatgaattaagctatatattcataagccatgatattagagttattcgttcagtatctgattatataattgtacttaaaaaaggtgaaattgtagaagaaggttctgctgaggatgtttttagtttgcctaaaagtaactatacaaaagaactattaacagctgtaatttaa

SEQ ID NO: 270122 - DNA, 367 bp, Unknown
  Bacterial polypeptide expressing nucleotide sequence isolated from the Sargasso Sea
atgtcagatcctattataaaaataaataatatgaataaatggtttggagatttccaagttcttaaagatattaatcttgacgttgaaaaaaataaaaaaattgtagtttgtggtccatctggttcaggaaaatcaactttaattagatgtattaatagactagaagaacatcaaaaaggatcaatcatagttgatgggactgaattaactgaagaaacaaaaaatattgaacaaataagagctgaagttggaatggtatttcagcaatttaatttatttccacatttgtcaatattagataactgtacacttgctcctatatgggtaaaaaaaatgcccaaaaaacaagctgaagagttagcttaaa

SEQ ID NO: 270123 - DNA, 368 bp, Unknown
  Bacterial polypeptide expressing nucleotide sequence isolated from the Sargasso Sea
attcatcgatgaattgcctgaggggttacagacaaaagtttgtgatcagggcattcttctttcaggtggacagagacaaagaattgcaatagctagggcgctactcaaggatgccccaatactgattctcgatgaggcaacctctgcacttgattcggaaagcgaaaaatttatacaaaaggctttcgatcggttgatggaaaataggacaacttttgtcattgcccatcgtctaagcacaattgaaaatgcagacaaaatattggtcctatcaaacggaaaaatcgtcgaagagggaacccatgaagagttattgaatcaagatggagaatactcttttttgcataaaatgcagttcaatgactaga

SEQ ID NO: 270124 - DNA, 859 bp, Unknown
  Bacterial polypeptide expressing nucleotide sequence isolated from the Sargasso Sea
attgctcaggtcggcaggcaattggcagacacccttggttcaacacggaggatttatgccctggagcatgaaccagtgaccatcaaagacggcccgcgaaaaaaatccagtgaaacggcatcagagttgtcaatttccaaagtcgattttcattacccggggagatctcagaaggttctggaaaacgtgagttttaccattcaagttgggcaaacggttgcattggtcggaccttccggggcaggaaagactacactagcgcaattgctgatgcgtttttgggatccttccgagggaaccatcctgttttcaggaaatgatatccgagaatacgaacttgaagcaatccgctcaaaaatcgctcttgtcgctcaggatacctacctttttaacagcaccctcaaagaaaacatccttatcgcaaaaccagatgcaggctacccggaaatgaaaaaggccatacaaatggcatctttgacggaacttgtcgaaaacctgccgcaggggtttgataccaaagttggagaaagaggaaccagtctttccgggggccaaagacaaagggttgctatcgcaagagcctttttgaaagatgcaccgattttaattcttgatgaagccacctctcatttagatgctttgagcgaaagtgaagtacgtggcgccctggacaaactcaaagaagaccgcaccacgattatcattgcacaccggctttcaaccattcgaaatgctgacaacattattgttctcgatggtggaagcattaaggagtcagggaaccacgagcagttattgaagaagaacggactttattcccaactggtctacaagcaaatgaatttttcaggaggataga

SEQ ID NO: 270125 - DNA, 448 bp, Unknown
  Bacterial polypeptide expressing nucleotide sequence isolated from the Sargasso Sea
gagccgcagatggatgaagatgagcgtcgtgcagcggtttccaacgtactgaaggaggtcggcctttcgcctgaattcctggatcgctacccccacgagttctctggcggacaacgacagcggatcgcggtagcgcgggcgctcatattgaagccgcaactgctggtgctggacgaacccacttcggcactagatatgtcggtgcaggcgcagattgtcgagctgttgcgagatctacagaaaagacacgagttaacctacctttttattagccacgacctaaaggtggtcagagccctgtccaatcacgtcattgtgatgaaggatggtgtgatcgtcgaatcgggaacttcggatcagatcttcgacgcgcctgaaactgattacactaaggcgctgatcgccgcggcgttcgacctggaggtcgcaggcggtgtcagtcagtagc

SEQ ID NO: 270126 - DNA, 577 bp, Unknown
  Bacterial polypeptide expressing nucleotide sequence isolated from the Sargasso Sea
cgtttttatgatcccgacgccggcacggtaaagatcgggggtcacgatcttaaagacctgcgccttgaagatatccgcggccagatcgcggtcgtcaatcaggacacttatctttttcatggcacggtcgcggataatcttcgggtcggcaagcctgatgccacggccgaagaactcgaagccgcctgccgcgcggccaacgcccatgagtttgtttcgctgctgccccaggggtacgacacagtgatcggcgagcggggcatccgactttcgggcgggcagcgccagcgcgttgccatcgctcgggcgatcttgagagacgcaccgatcctgattctcgatgaagcgctctcggcagtggatgccgagaacgaatcgatcatccaagacgcgctcgatcggttgatgcgtgggcgcaccacgctgatctttgcgcatcggctttcgagcgtcatcgatgccgaccgcattctggtgctgaacgaggggggtatcgccgaagagggcacccacgctgaactcatggcgaagcgaggcgtctatccccagctgatggcggcgcaggccgaagaaagcg

SEQ ID NO: 270127 - DNA, 442 bp, Unknown
  Bacterial polypeptide expressing nucleotide sequence isolated from the Sargasso Sea
atgaaaaatgtcaacaaatggtttggagatttccaggttttaaaagatgtaaatttagatgttagtcaaaaacaaaaaattgttgtttgtggcccttcaggttctggaaaatctacattgataagatgcatcaatagattagaagaacaccaaaaaggagagataattgtagacggaaatgaacttactgaagatacaaaaaatattgaaaaaataagagcagaagtcggaatggtattccaacaatttaatttgtttccacatttatctatattagataattgtacattggctccaatttgggtaaagaaaatgccaaaaaaacaagctgaagaaatggcaatgaacgaacttaaaaaagttcaaattgctgatcaagcgaaaaaatttccaggtcaactgtcaggcggtcaacaacaaagatgtgcaatagctagagctt

SEQ ID NO: 270128 - DNA, 615 bp, Unknown
  Bacterial polypeptide expressing nucleotide sequence isolated from the Sargasso Sea
tgcagggatatgaaaatcgtttgcctcatcaattatctggtggccaaagacaaagaatagcattagcaagagctctaataacaaaaccaagtgttttacttcttgacgaacctttatcggctttagatcctgcacttagagttttaatgagaacagaacttaagcaaatgcaaagagaacttaatataacatttattcatgttacacactctcaagaagaagcattagcacttgcatctattgccgtagtgatgaatgaaggaaaagtggaacaaattgataatccgcttaccgtttataacaaacctaaaagcgcttttgtttctgaatttgtggggggacataacattatccaagaagaaaataaattattctctattagaaccgataatattcgtttggaaaaaaataataaaaccaaaaaaaatactgaaaaaatgaaaattactgatattgagtttcagggtaatagtgtaaaaattattttaaataatacaaaatataaacattttaatgtaattttaggtgactcagagttttttacaaaagacttaaaaattagtgatgacgtatactgttcttgggatattaaaaaattacacgaacttcaatgat

SEQ ID NO: 270129 - DNA, 640 bp, Unknown
  Bacterial polypeptide expressing nucleotide sequence isolated from the Sargasso Sea
ctgcgcgtacccagccggccgaggccctgcgctatgagtgagtccatgaaccagaacgccatgaaacagcacaatgccgtgctcagctgtcgcaacctgagcaagcgttacgacgagggccccgagtcggtggtggtgctcgatggcctcgagctggaactcttccccggtgaacgtgtggccatcgtcggcagctccggttccggcaagagcacccttttgaacatgctcggcggcctggatacgcccagcgagggcagcgtctggctggccggcgagcaactctcggcgctgagcgagaccgctcggggtctgctgcgcaaccgcgcgctgggctttgtctaccagtttcaccacctgctggccgagttcactgcgctggagaacgtctgcatgccgctgttgatcggcaagacgtcgatcagcgaggcgcgcgagcgtgccaccaagctgctcgagcgagtcgggcttggccatcgcctcaatcacaagccgtcagaactgtccggtggtgagcgtcagcgtgtggccattgcccgtgccctggtcaaccgccccgggctggtgttgctcgatgaacccaccggcaacctcgaccagcacaccgctgaaggcattcaggagctgatgcgtgagctca

SEQ ID NO: 270130 - DNA, 455 bp, Unknown
  Bacterial polypeptide expressing nucleotide sequence isolated from the Sargasso Sea
aatgtctaaaaatacagaattcgttaagttcgataaagttgacaaaagttacgatggtaaagtcttagtagtaaaagatttaaatcttaatatctcagagggcgagttcattactatgcttggcccatctggttcaggaaaaacaacttgtctaatgatgttagctggatttgaaacgccaactaatggcgaaatttatttagattctaatcctatttcaaatattccacctcacaagagaggaattggaatggtttttcaaaattatgctctttttcctcatatgacagtttatgaaaatttagcatttcccttaagagtaagaaaagttcaaaaagatgagattgataaaaaagtagataaagctttgtcgatggtttctctttcaggatttgaaagtaggatgcctgcacaattatcgggaggacaacagcaaagggtagcggttgcaagag

SEQ ID NO: 270131 - DNA, 673 bp, Unknown
  Bacterial polypeptide expressing nucleotide sequence isolated from the Sargasso Sea
catgtcccaattcaaaaaaaaatattcccatgagctttctggaggtcagcagcagcgtattgcattggctcgagcaatggcacctaaaccatccctgctcttgatggatgaaccactttccagtctggatgaggaactgagagaacaactggcccgagagattcgaattattttgcagcaggaaaagatttccgccatattggtaactcacgatcagaacgaagcctttgccgtaggagatcatatcagtgtaatgcaccaaggccgagttcagcaaaacgattctgcctataatctataccatcatcctttgaaccgctttgttgcagaatttattggggaaggaaccttgctgtccggatttgtatccagcgaggatactatctcaacagatttgggagatattgcggttaatttaccggaggactttaagtatcaggaaaaagttgacgttttaatccgccctgaaaacgttatcttgtcgcatgataacgaaattaaagcaataattacagcgcgttattttagaggttctagttacttgtataatttaaaaactagccgaggtgcggaactcttatgcttactcaacgattcagagagccttcaaatagatcaattgattggtgttaggcttcaaatcgaaaggccagtgatttttagttatccttaa

SEQ ID NO: 270132 - DNA, 459 bp, Unknown
  Bacterial polypeptide expressing nucleotide sequence isolated from the Sargasso Sea
cttgaaagatcgctcaaaggaggatgaagtggcagatataaatataaatactataaataaatattatggagatgtgcacgttattaaggacatttctcttgatattaaaagtcaatcttttactgttttagttggcccaagtgggtgtggaaaatcaacgatgttaagaatgattgcaggattagaagatattaattcaggaacaatttctattgatggagaagttgttaatgatcttcctccgaaacagagaaatattgcaatggtgtttcagtcatatgctttgtacccacatatgacagtttttgataatatggcttttggattaaagttagaaaaaagatcaaaagatgaaataaatgaaagagtgcaggaagcagcaaggattttacaaattgaagaatatcttcaaagaaaaccaaagcaactttctggaggccaaagacaacgtgtagccat

SEQ ID NO: 270133 - DNA, 568 bp, Unknown
  Bacterial polypeptide expressing nucleotide sequence isolated from the Sargasso Sea
aatgaaagctattgattgtaaaaatgtttctgtaaatcttggtggatatgaagttctaaaaggaattgatcttgaagtagaagtgggcggttggacaacgattgttggtccaaatggagcgggtaaaagcactttaataagggccactggtggaatcgtaaaatcttcaggaaatataaagatagttgatagaaatgttcaggatttgggacatagagaactggctaaatttgttgctgttgtatcacaaaaaccggtaattcctatggggatgagagtaatcgattacgttcttttaggaaggatttcgcatttaggcttttttgaatctgaaggcgaacaagacattgaaactgcggttctagcacttggatcattagatgctgcacatctatcagacagatttgtaggtactctttcgggcggggagaaacagcgtgttgtagttgcacgagcactagcacagagttctccggtgcttttgttggatgaacctacgacagcattagatatgaaacatcaacaggaaaccctagaactcataaatcaactgagagtagagagaaac

SEQ ID NO: 270134 - DNA, 565 bp, Unknown
  Bacterial polypeptide expressing nucleotide sequence isolated from the Sargasso Sea
ttgtatagatatccacacgaattttcagggggccagagacaaagaatagtgattgcacgagctcttgctttagatccaaaaatattagttttggatgagcctacctctgctttggacgtatctgtccaagctcaaatcttgaaccttcttaatgacttacaaaagaaatacgatctaacctatgttttcatatctcatgatttgtcagtaatagagtatatgtgtgatcgtttggcagtcatgtacctaggtagagttgtagaggaagcagatacagaagatttgttttccaatccacaacatccttacactagagctctgttgtcagctacccctagttttgaaaaacaaaaagaaaaaattatgattcttggggacgtccctagtcctataacatatttagatgaatcaaaagctaagttagctactgagattaccgaacaggaacggttagaaatcaaagctattgagggaaaaggaattgaatatatagtaagatcaagtcttaatgagcatttatcattaaaagaagtagcaccttctcattatgcgcgggtaaaataaa

SEQ ID NO: 270135 - DNA, 805 bp, Unknown
  Bacterial polypeptide expressing nucleotide sequence isolated from the Sargasso Sea
tatgccctgggagcatgaaccagtgacaatcaaagatggcccgcgtaaaatatccagtgaaacggcatcagagttgtcaatttccaatgtcggttttcattacccggggagatctcagaaggttctggaaaacgtgagttttaccattcaaggtggacaaacggttgctttggtgggaccttcgggggcaggaaagacaaccctggcgcaactgctgatgcgtttttgggatccttccgagggagccatcctactttcaggaaatgatatccgagaatacggacttgaagcactccgctcaaaaattgctctcgtcgctcaggatacctacctttttaacagcaccctcaaagaaaacatccttatcgcaaaaccagatgcaagctacccggaaatgaaaaaggccatacaaatggcatctttgacggaacttgtcgaaaccctgccgcaagggtttgataccaaagttggagaaagaggaaccagtctttccgggggccaaagacaaagggttgccatcgcaagagcctttctgaaagatgcaccgattttaattcttgatgaagccacctctcatttagatgctttgagcgaaagtgaagtacgtggcgccctggacaaactcaaagaagaccgcaccaccatcatcattgcacaccggctttcaaccattcgaaatgcagacaacattattgttctcgatggcggaagcattaaggagtcagggaaccacgatcagttattgaagaaaaacggactttattcccaactggtctacaagcaaatgaatttttcaagaggatag

SEQ ID NO: 270136 - DNA, 451 bp, Unknown
  Bacterial polypeptide expressing nucleotide sequence isolated from the Sargasso Sea
aatgtttcaattaaaaaatatcgataagtcttttcgcgaccgagacgaagaaatatatgtagcacgcgatttgtcctggtctctcgaagcgggtgaaagtgcggcattgtcgggtgaaagtggtgtcggtaaaacgacgctactgaacatcatagctggcttagatggtgcggaaagcggggaggtgattatcgatggaatagacataagacgcttgagtcactcgaatctggcaaatttcagacgtgatcgtctggggttaatctttcagagatttcacctagtaccatcacttagtgcttgggataacgcggcacttcaggctcgcttggggcagtgcttcgatacggattttgccgattatttgtttgacgcgttgtccataaatggtttagcacaacgatatccctcgcagctgtcaggtggtcagcagcaaagagtggctatcgcg

SEQ ID NO: 270137 - DNA, 706 bp, Unknown
  Bacterial polypeptide expressing nucleotide sequence isolated from the Sargasso Sea
atgaatgctgcagccgatacagtcgtcaagctcgtaggtgtctccaggctgtatcggcaaggtgccagcgtcgtgcatgcgctgcagcatatcaatctggaaatccgcaaaggcgactttgcggtgctggtagggccgtccggctcgggcaagacaacgctcctgaacgtgatcggtggcttggactcacccaccgaaggccatgtctgggtcgacggcagcgagatcgggacactgggtaaagccgcgctttcggacatccgcttgcgcaagatcggcttcgtcttccaggagttcaatctgattcccgttctttccgcgctagaaaacgtggaattcgtgatgctgttgcagggggtgccagagatgcagcgccgggaccgcgccatgacgctgctcaaggaactgggattggaagggatggagcacaggcgtccgcagcaactctccggtgggcagcagcagcgcgtggcggtggcgcgcgccatcgcggccgagccgatcatcgtgctgcccgatgagccgaccgccaatctggattccaaagccggcgccgcgctcatggacatgatgaaggccatgaatgaacggcgcggcgtgacgttcgtgttctccacccacgacccgatggtggtcgaacgcgcgcggcgggtcattcgcctgcgtgacggccggatcgaagccgatgagcgccgaccgccatgat

SEQ ID NO: 270138 - DNA, 739 bp, Unknown
  Bacterial polypeptide expressing nucleotide sequence isolated from the Sargasso Sea
aatgaaaaatttaattgaagttaaaaacataaaaaaaaattacggaaaaaaagaagctgtaaaaggtatatcgtttaatgtggaagaagatgaaattttaggtttacttggtcccaatggatctgggaaaacaacaactattggaatgttgctagggttacttaaacctacaagtggtcaaatatttatcaacaatcttaaacttgaggaaaatagaattgaaattcttgaaatgattaattttatatcaccttatattgaacttcctaaaaaacttacagtgaaacaaaatttatatgtttactctaaactttataaagttcaaaatattagggaaagaattgaatatttatcggaaaagctaagaattggagaattattaaacagtattactggggagctctcatcaggtcaaaaaaatagagtaagtttagccaaagctttagtcaatgaaccaaaagttctattgcttgacgaaccaactgcctctttagacccagaagtaggagactttgttagaacatttttagaagagtataaaaaagaaaaaaaaatttcgattcttttagcctctcataacatgaatgaagtcacacgtttatgtaaatctgtgttaatgatgaaaaatggagaaataatagaccaaggaaaacctgaggatttaattacaaaacatggaagaacaaatttagaagaagtttttttaaaactatcaaggagtaaaagtgagtttaactag

SEQ ID NO: 270139 - DNA, 452 bp, Unknown
  Bacterial polypeptide expressing nucleotide sequence isolated from the Sargasso Sea
aatgtcagataaaataattcaaataaaagaaatgaataaatggtttggagatttccaagtcttaaaaaatattaatttagacgttgaaaaaaacaaaaaaattgttgtttgtggtccctctggttcaggtaaatcgacattaattagatgtattaatagacttgaagaacaccaagaagggtcaattgtcgttgatggcactgaattaaccgaagagacaaaaaatatagaacaaattagagctgaggttggaatggtatttcaacaatttaatttatttcctcatttatcaatattagataattgtactcttgctcctatatgggtaaaaaaaatgcctaaaaaagatgctgaagcattagctttaaaacatttagaaaaagttcagattgctgatcaagcatacaaatatccaggccaactttctggtggtcaacacaaagatgtgcaat

SEQ ID NO: 270140 - DNA, 968 bp, Unknown
  Bacterial polypeptide expressing nucleotide sequence isolated from the Sargasso Sea
gagagtagtaatttctttagctttatgttgtgagcctgaattgttaatcgcagatgagccaacaacagcattagatgtgtcaattcaatctcagattatagaacttattaaaaaattaacaaaagaaagaaatcttgcagttattttaattactcacgatatgggagtaatagctgagactgctgatcgtgtagcagttatgaaaagcggtaatttggttgaaatcggtgaaaccaaaaaaatattaaccaatccacaagaaaattataccaaaagtttagtaagttcagttccaccaactaataaaaaaattacaagatttgtaatagttgaaaaagaaaagaataataataaagaaaataatattaagatattaaatagatggtcaaagaaagaaattgtaaaccaagatttagtagaagtaaaaaatcttaataaaagttttgatgataatttttttacagaaagctctaaaaattctgtgatggcagttaatgatgtttcatttgaaataaaagagggtgaatcttttggcttagtaggagaaagtgggagtggaaaatctacaattgcaaaaatgattgtaaatttatttaaacctacttctggagacatcttctttgacaacgtttgtataacaaaaattaaacagagatctgaattaatgaaatttagaaaacaaattcaaatgatatttcaagatccttattcttcactaaatggaagattaaaagtaaaagatataattgcagaaccaattacacttcataatccatctatatctactttagatttaaataattatatttatgatttgctggagtctgtagaattaactcaaaaatctgcaaatcgatatccacatgaattttcaggaggacagagacagagaatatcaattgcaagagcacttgccacacaaacaagacttttagtttgtgatgaacctacctctgctttggacgtaa

SEQ ID NO: 270141 - DNA, 556 bp, Unknown
  Bacterial polypeptide expressing nucleotide sequence isolated from the Sargasso Sea
attggcagaaattcagttgcgtaatcttagtaaaagttggggaaactttgttgctgttaaaaatttcaacctcactatagctgataaagaatttttggtactacttggtccttcaggttgtggtaaaacaactacaatgagaatgatagcaggtttagaggatatctcagaaggagagatatttatagatggaaaattagtaaataatttagagcctaaagacagagatatatctatggtttttcagagctatgcactttatcctaatatgaatgtatatgaaaacattagatttcctctaaaggttagaaaaatagaaaaaaaaattcaggatagtaaggttaaaaaagcagctcaaatggtagaattgactgaataccttgatcgtaagccggccgagttatcaggtgggcaaaaacagagagttgcattagcccgtgctatagttagagaacctaatgtttttttaatggatgaaccactttctaatttagatgctaaacttaaagtatccacaagggctcaaataaaaaatttaagtcatgaattagcaata

SEQ ID NO: 270142 - DNA, 858 bp, Unknown
  Bacterial polypeptide expressing nucleotide sequence isolated from the Sargasso Sea
gttcgtaggacctagtggatgtggaaaatcaactttattaagaatggttgccggtttagaggatataactgaaggagatattaatcttgacggacaattaataaatgaagttgatccatcagaaagagatgtggcaatggtattccagaactatgcattgtatccacatatgaatgtttataataatttggcttatggtttaaaaaatagaggaattgacaaagaaacaatcgagcaaaaagttaatgatgcagctaaacttttgcaaatttcagattttttacaaagaaaaccatcaatgttatctggcggacaaagacaaagagttgctatgggtagagcgattgttagaaatcctaaaatattcttatttgacgaacctctttcaaacttagacgcaaaattaagaatccaaatgagacttgaaatcaaaaaacttcagcagaaagttggagtaacaagtatatttgttacacacgatcaagttgaggctatgacgcttgcagacagattagctgttataaatgatggaattatagaacaacttggaactcctattgaaatttataataatccaaaatctttatttgttgctggttttattggttcaccacaaatgaattttttagatgctaatttaaataataaaacgctatcagcagaaaactttgagattaaaaatatagaaagtgattataatggtgaggttactttaggaataagaccagagcatttaattgagtctgaaaatggtttgataaatttaaaagtagaattggttgaacagttaggttcagataatcttgtttatggacaaaataaaaatataaaagatttttgttatagatctccaggaaa

SEQ ID NO: 270143 - DNA, 808 bp, Unknown
  Bacterial polypeptide expressing nucleotide sequence isolated from the Sargasso Sea
aattacgcattatatccacatatgaatgtatataacaatttagcttatggattaaaaaatagaggtttagcaaaagatgtaatagaaaaaaaagtaaaagctgcggcaaaactattgcagatatcagattatttagaaagaagaccggcattgttatcgggaggccaaagacaaagagtggcaatgggtagagcaattgtaagaagccctaaaatttttttatttgatgaaccgttatccaacttagacgcaaaactacgtattcaaatgaggttagagattaaaaaacttcaaagaaaagttggagtaacaagtatttttgtaacccacgaccaagtagaagcaatgacattagcagatagactggcagtaattaataatggaataattgagcaattaggaacgccaatagaaatttataataatccgacatctgtttttgtagcaggattcataggatcacctcaaatgaattttattgaaggtgaactaaaaaataaaaaattaaaaacccaagcatttgaaattaaaggcattaaaagtgattttaatggaaaagttattttagggattagacctgaacacatggtgcaagcttacaatggattaattaagttcaatgtggatttagttgaaaaattaggatccgacaatcttgtatatggagaaattaagggtaaaaaagatttattatgttatcgaacaccaggaaatgagaaaataaattcaggttctaaattagaattaaatattcaagataataaactttatatatttaataaaaaaactggcaaaagaataatttaaa

SEQ ID NO: 270144 - DNA, 592 bp, Unknown
  Bacterial polypeptide expressing nucleotide sequence isolated from the Sargasso Sea
tatggaaaataaaaactctgatgaaattatagtaaagtttgatgaggtaacaaaacaatatggagatcttgtagttttggataagctgaacttaaatataaaaaaaaatgaaatggtttctattattgggccatctggttcaggaaaaacaacagttttaagagttttaatgactttagaaaaaattaatggaggagttattcatcttgatggagaaactttaactcacatgaatttagacggtaaattagttgaagctaatgaaaaatatttaagagaaagacgttctaaaattggaatggtttttcaacaatttaatttatttccacatatgactgctcttcaaaattgtatacaagcgccagtagaagtgcttggaatgaaaaaggaagatgccgaagaaagagcacttgagttgttagaattagtaggtttaacggataaaaaagatcaacacccaacaagattgtctggaggccaacaacaaagagtagcgattgctagagctttggcaatgagaccaaaggttatgcttttggatgaaataacatcatcattagatcctgaggtggttggagaagttttaaacgta

SEQ ID NO: 270145 - DNA, 733 bp, Unknown
  Bacterial polypeptide expressing nucleotide sequence isolated from the Sargasso Sea
atgagtgcgctgctgaaactgcagaatatccacaaggccttcgccgacgtgcacgtgctcgaagacgtcagcctgagcctggccgctggcgaagtggtcagcctgctcggcccttccggctgcggcaagagcactctgttgcgcatcgccgccgggctggatcaggactaccagggcgggctggaactcaacccgctgctcaacttcggccgcggcagcggcatcggcgtggtgttccaggagcctcggctgatgccctggctgagcgtggcgcagaacgtcggcttcgccgatggctgggtggctgatgaccagtggattgaacaactattgcgcgacgtcggcctgcacgggcgtggtgatgcgctgcccaagcacctctccggcggccaggcccagcgcgttgccatcgcccgcgccctgtacggcaaaccgcaagtactgctgctcgacgagcccttcagcgcggtggacgccttcacccgcatgaaactgcaggatctggtggtggtgctggccgcccgctacgagatcgccgtgctgctggtcactcatgacctcgacgaagccttctacctcagcgaccgcgtgctgatccttggcggcacaccaagccgcctgcaacgcgaactggccgtgcccctgacccgcccccgcgaccgccgctcggccgaactggcctacctgcgcggcgaggccctgaccgagctgtaccagtcgcacatgctgtaaa

SEQ ID NO: 270146 - DNA, 342 bp, Unknown
  Bacterial polypeptide expressing nucleotide sequence isolated from the Sargasso Sea
aatgtctaattctataataaatatcgaaaatgttaataaatggtttggtgatttccaagttttaaaagatattaacttagaagtacaaccaaagcaaaagattgtagtctgtggtccatcaggctctggtaaatcaactttaataagatgtattaatagattagaagagcaccaagaaggtaaaattattgttgatggaacagaacttagtgaaaatacaaaaaatattgagcaaataagagctgaagttggtatggttttccaacaatttaatttatttccgcacttatctattttagataactgcactttagcacctatttgggtaaaaaagatgccaaa

SEQ ID NO: 270147 - DNA, 866 bp, Unknown
  Bacterial polypeptide expressing nucleotide sequence isolated from the Sargasso Sea
ggagcgtgggaatgttactgccggtgatattgctgctgcaggagctatttcattaaggctatcacagatgactggatgggtaagttttactttgatgactctatacgcaaaccttggagaggttgaagatggggtaaagactctatctacctcatataaattaggtgataaagataaagctccagaccttttggtatctaaaggttctattaattttaaaaacgtttgttttacctatggcaaaaatttaagcgccgttaaaaacatttcactatccatcgcaccaggcgaaaaaatcggacttgtgggagcttctggagcaggaaaatctactttagtgtctcttctattaagactctacgaaccacaaaagggtgtcatctctatcgatgacataaatataaatgatataacccaatcgagtctaagaaagcaaattgcaatggtgacccaagaaaccgctctttttaataggtctgcaagggacaacattatgtatggaaatcctaacgcaacagaaaatactcttattagagcgagtaggcaagctgaggcccacgactttatccttggtttagaggaccataagggaaggaagggttatgatgcacatctaggtgaacaaggcgttaagctttctggaggtcaaaggcaaagaattgctctggcacgatcaattttaaaagactcaccaattctcgttttagatgaagcaactagtgctttggacagtgaagttgaaagctctatacaaaatgcactcgagttagtaatggagaataaaactgtgttagctattgctcaccgattgtctactttagcaaaaatggatagaataatagtcctctctaatggtcaagttgttg

SEQ ID NO: 270148 - DNA, 769 bp, Unknown
  Bacterial polypeptide expressing nucleotide sequence isolated from the Sargasso Sea
taaattaagaagagctcaagaaagcgctgagaagggaaggccttattctgaaaaaatgaataatgttattttaaatttatcaaatggtatttctgataaagaaaatgcaccaaagttattgtcaggtactggtcaagaaaaaactcatctttgtgtggtgatgacttctgatagaggtttatgtggtggatttaattctaatattattaaaaaagctaaaagttattttgcaaaaattgtagatgaaggtaaagaacttaaaattattacagtaggctcaaagggaaatgatcaactaaaaagagtttatggtgataaaataattgaaaatatttctttcaaagagtctaaaaatgcaaattattttgatgctgacaaagttgggaaaatggtaattgaaaaattcgaagcaggtgaatttgatgtttgtacaattttttataaccaatttaaaaatgtaattactcaaattcctcaagcacagcaaattattccattaaataatgagggagaagaaagtagctcagaagaaagttacgaatttgaaccagatgaagatgaaattttaagcaatttattgccaaagaatatttctacgcaaatatttaaagcaatgttggagaattcagctagcgagcaagggtctagaatgagtgcaatggataatgcaacccgaaacgcacgtgaaatggttgacaaacttactattgaatataatagaagtcgtcaggcagcaattacaaaagaactaatagaaatcatatcagga

SEQ ID NO: 270149 - DNA, 682 bp, Unknown
  Bacterial polypeptide expressing nucleotide sequence isolated from the Sargasso Sea
gatgaaaaccagtacaaaaactgtcatctctataaataatatctctaaagtatacgaaggccctccgccagtaagagctttagatggtgtctctcttgaaattaaggaaggagattttgtctcaatagtcggtcaatcaggaagtggtaaatccactttcttaaatatgattggattattagacagcataaccgatggttctattgaaattgagggtaaagacgtctcagaactctcagacaatgagctctcaaagtttagaggtgaaaagattggatttatatttcaaagtttttttctactaccaggactaactgctcaggaaaatgtcgctgaaggtcttctataccaaggtatttcaagatcagagaggttagaaaaagcaaaagaagttttagaacaagttggtcttggagacagattgacccatttaccaaaagaattgtccggtggtcaacaacaaagagttgcgattgctcgtgctctagtgcaagatccggcattcgtactagcagatgaaccaacaggaaatttagataaggaatccggtatcaacatactcaatattttgaaagacctaaataatcaaggtaaaacggtaataatgattacccacaaccaggaacatgcaagtatgtttaaaaaagttattgaactagttgatggaaaaatagtgaattaa

SEQ ID NO: 270150 - DNA, 904 bp, Unknown
  Bacterial polypeptide expressing nucleotide sequence isolated from the Sargasso Sea
tcggaaggatttttcttcaacaagaatatttctctggtcaaagcagtagatggcatcaacttcagcatcaaaagaggtgaaactcttgggttggtgggagaatccggctgcggaaagaccaccacaggacgctgtattcttcaattggaaaaagccaccgagggtaagattgttttcgagggccaggacctgacccagcttgattcttctgaactctcaccgctgaggcagaaaatccaggtcattttccaggatccctacagttctctcaatccaaggttgaagattggagacaccatcagtgagccgatgaaggttcacaacatccaatccgatccgaagttacggaataaaagagttgccgaactcctgaacatctgcggacttccttcggtcatggcagaccgttacccccacgaaatgagcggaggccagagacagcgtgtcggaatcgcccgcgccctctccctgaaccctgaattcatcatttgtgatgaagcagtttcggccctggatgtttcgatccaggcccaggtcatcaacttgttggaagacctgagggaagaattcaacctgacttatttgttcattgcccacgatttgagtgtggttcgccacctctgccaaaaagtggcggtgatgtatctaggcaaaattgtggaaatggcggattgtgatgaactttatgacaatccccaacatccctacaccaaagctttactgaatgcggttccggttccggatcctgaagttgaaaaaaacagggaacacaacatcatgacaggagaagtcccaagtccgatcaatccaccttcgggctgtgtctttcatccgcgttgttccctggcagtggaatcctgtaaatcggatatccctgtttggaagataaacgtgcaggccattt

SEQ ID NO: 270151 - DNA, 358 bp, Unknown
  Bacterial polypeptide expressing nucleotide sequence isolated from the Sargasso Sea
tcaattatcaactggaatgaaacagcgtgttgctattgcacgtgctcttgtcatggatcctgatgtattgctaatggatgaaccatttgctgcacttgattctcaaactcgagatttattgttagttgaaatgcaaatgatttggcagaaaacaaaaaagactataatttttgttacacacaatgtacctgaggctgctgtgcttggctcaagagttgctgtatttagtcatagaccttcagttgtgaaaaaatcccttgatattgattacaaacgaccccgtgttgcagaagatgagaacttgggacaatttgaaaaacaaattcttgctgcattacggcatcagggaccaaaatag

SEQ ID NO: 270152 - DNA, 487 bp, Unknown
  Bacterial polypeptide expressing nucleotide sequence isolated from the Sargasso Sea
atgagcattcttcttaaattaaataaggtaaatcttaaataccaaactggtaaagataatatcaaagttttaaaaaatattaacttaactaccaagaaaaaagaaacaatttctattgtaggggaaagtgggtcaggaaaaactagtctaataatgctaattggaggtttagaaaaagcttcttctggaaaaattttttttcaaaatcatgaaattacaaaattgagtgaagatgaagtctctgaaattagaagaaaaaatattggaattatatttcaatcattttatttaattccaaattatactgcggttgaaaatgtagcattaactctagaattaaataaattcaaaaatcctgaaaaagaggcaaaacaattattagatagatttagattaaaccatcgatttaataatttaccaagtcaactatcagggggagaacaacaaagagttgcaatagcgcgagccattgcaatgaaaccagaat

SEQ ID NO: 270153 - DNA, 788 bp, Unknown
  Bacterial polypeptide expressing nucleotide sequence isolated from the Sargasso Sea
gaccgccaaacaaattgttgatcaaaaagtccgggatgctgcagaagttttacaaattacagaattactggaacgcaaaccgaaagaactttccggaggacaaaggcaaagagttgccatcggacgggccattgtcagggatccaaaggtttttcttttcgatgaaccactctctaatcttgatgcaaaacttagagtgcagatgcgaattgaattgacaaagttgcatcgggaactcaatgcaactatggtatacgtcacacatgatcagattgaagctatgactatggcagacaaaattgttgtgcttagggagggttatgttgaacaggttggtgctccattagacttgtatcataaacctgcaaacttgtttgttgctgggtttatcggttctccggcaatgaattttttggatggaaagatttcaggaatttctgatcagacaattgagtttgaactaaccaatcagaaaaaaattcaaatccactgtcaaccaggagaaaaggttaaagcaggcagttcagccaaagctggtattagaccagaacatattgaattaaccggagacagtgatccaactctacaggcaaaggtttttgcggtggaacgtcttggaggggaaacttatctttatgtaaaaacagaaaataatgaagaactaacagtgcatgcttccagcgacaaagtaattagagtagatgatttagtatcaataggatttgctcaggagtcctgccatctttttaacgaacagggacaggtttttgagaagttggcagcctagt

SEQ ID NO: 270154 - DNA, 685 bp, Unknown
  Bacterial polypeptide expressing nucleotide sequence isolated from the Sargasso Sea
ctgcgcttcgaaaatatcggcatgcgctacggcatcggaccggaggttctgcgcgacatcagcttcacgctagcacccggatcgttccatttcctgacgggctcaagcggcgcaggcaagacgacattgctgaaactaatgtatctggctttgcggccgacacgcgggctggtgcatctgttcgacaacgatatctcggtcaccccgcgcgacgaattgccggcgctgcgccggcgtatcggcgttgtgttccaggactttcgcctcatcgaccacctgaccgccgtcgaaaatgttgcccttccgctgcgcgtcaacggtgtccggcacggcgagatcgatacccatgtgcgcgaattgctaagctgggtcggtctcggcgaacgtctcgatgcgcgtccctcgacattgtccggcgggcagcagcagcgcgtggcaattgcacgggctgttatcaacaggccacgcctgctgttggccgatgagccaaccggcaatgtcgacgaccatatcgccgtgcggctgatgcacctgttcgaagagctcaacaaggccggaaccacgattgtcatcgccacccacaacaatgttcttgtcgaggagttcgggtacccggtcctgcaacttgacgatggtgaactgaccgtccggcgcatccgccagccggctgcggaggtcgtgtgat

SEQ ID NO: 270155 - DNA, 772 bp, Unknown
  Bacterial polypeptide expressing nucleotide sequence isolated from the Sargasso Sea
agaaaattaaacaaatcagacattgaagaaaaagtaaaaaaaactttggagatggtggaattgggagagtttggaaatcgtatgccactacaattgtcaggtggtcaacaacaacgtgttgctttagcaagatctttagtttttgagccaagattagtattaatggacgaacctttaggagcacttgataaaaaacttcgtgaacaaatgcaatatgaaattaaacatattcatgagagaattggaatcacagttgtttatgttactcacgatcaaagcgaagcattaacgatgtcaaatcgtatagcagtatttaatgatggaaaaattcaacaaatatcatcaccagatattttatatgaaaaacctgagaacgcatttgttgcaaattttattggagagaacaaccagcttaaaggaaaagtaaaatctattaacggaaaaaattgtgttgtaactactgatcaaggcgacgatattacttctttaaaaataaatgttaatgcagtcggtgatgcttcaactgtttctttacgcccggaaagagttgagattaattctaccgaaagcaattttgaaaattcttttaatgcaaaagtaaaagaattaatttatttaggagatcatattcgcacaagagttgaagtttgtggcaacgatcaattcattgtaaaagttccaaattcatataagggcgctaatttaaaagaaggagcaacagttaaactttcttggaaagccagcgattcaagggcactagatctacgttaat

SEQ ID NO: 270156 - DNA, 856 bp, Unknown
  Bacterial polypeptide expressing nucleotide sequence isolated from the Sargasso Sea
ttggagctcaaaaatgctgcctattgtccagcactcatttgatagctggtcaaaattgactggaggtagggcaacattgtcagataccttaatacttttagagcaaccacttcaagaaaaaagtgtatctaataataattcaagaatgaattttgatagtgaaatagtttttgatcacataactttttcatactcaggaagtaaacagaatgtcatcaatgatatttcattaaaaataaagaaaggagaccgaattggcttagtaggagaaacgggctcaggtaagagcacttttatagatatattcatgggtttgcttgttcctcaaaatggtgaaattagagtagatggagttattttaaataagtctaatgctcatagctggcaacaaaatatctctcatgttccacaaagtatttttttaatagatgcaactattaaagaaaatatagcttttggagttgataaagacaagatagatattgaaaaagttgttgctgcatcaaaaatagcacaaatacactctatagttaacgaaatgcctaatcaatatttatcaaatgttggtgagaaagctgttcagatttcaggaggccaaagacagaggatagcaatagcacgtgctctatataaaaacctaaagattatagttttagatgaagctacaagtgcattagacactactaccgaaaataggctaatggaggctatagataaagtagataaagatattacaatgttgatggttgcccacagactatctaccctcaaggactgtaataagataatagaatttgaaaatggtaaaatcaagagaataggtagctatgaggaaataattacgtctcaattatga

SEQ ID NO: 270157 - DNA, 580 bp, Unknown
  Bacterial polypeptide expressing nucleotide sequence isolated from the Sargasso Sea
gaccaagacatatcgcatgtgtcccaggacagccttagaagtaagatatcggtggtagcgcaggatacatctatgttcaacaggtctgcttatgataatatattatatggcaatcctattgcatcctatgatgatgttattgactcagcaaagaaggctcaagcatatccattcataatggatcttactgacaatcaaggccgtacgggttttaacgcataccttggagaacgaggtgtgaagctttcgggcggtcaacgtcagagaattgctttagcgcgcgcaatcctgaaaaaagctccaatattaattttagatgaggctactagtgctctggatagcgataccgaagctaaaattcaactcgctctagattatgtaatgcgtgacaaaactgtatttgcaatagctcaccgcctatctacaattgtaaaaatggatagaattattctacttcatgaggggagaataattgaacaggggacacatcgcgagttactgaagaacggtggattatactcaaagtattgggagcaacaagccggtggttttatcggcattgaccagatggcagtttgaa

SEQ ID NO: 270158 - DNA, 443 bp, Unknown
  Bacterial polypeptide expressing nucleotide sequence isolated from the Sargasso Sea
ctatggcgcgagggaaaatgtcacccgtagccaaattgaacacgcagcaaaaatggctcatgtagaagagtttctcgctaacttgccagatggcctggacaccgtcataggtgagaatggcttgatgctatcgggaggccagcgccagcgcattgctatcgcacgggctattttagcccaggcgcctattcttattcttgatgaggcaacgtcggcgttagacacagaatctgaaaagttaattcaagatgcattagaaacactgcaaaagcgctgcacgagtattgtagtggcacacagactctctaccattgaaagcgcagacgctattatggtggtcgagcaagggcagattatcgaaaaaggcagccataacgaactgctcgagaaaaatggtcattacgcacaacttcatgcactgcagtttggtgatgctaagtgag

SEQ ID NO: 270159 - DNA, 433 bp, Unknown
  Bacterial polypeptide expressing nucleotide sequence isolated from the Sargasso Sea
aatgtctgagtcaatcatcaaaatagaaaatatgaacaaatggtttggagattttcaagttttaaaagatataaatctagaagttgaaagaaataaaaaaattgtagtgtgtggaccatcaggctcaggtaaatcaacactgattagatgcataaatagattagaagaacaccaaaaaggaagtataatagttgatggaaccgaacttaatgaagatactaagaatatagaacatattagagcagaagtaggaatggtatttcaacaatttaatctatttccacatttatctatccttgataactgtactttagctccaatatgggtaaaaaaacttccaaaaaaagaggctcaggatttagcaatgaaacaacttgaaaaagtacagattgctgatcaagcacaaaaatttcctggacaattatcaggtggt

SEQ ID NO: 270160 - DNA, 676 bp, Unknown
  Bacterial polypeptide expressing nucleotide sequence isolated from the Sargasso Sea
atgaataacaaagttattgatgtaaaagatttaaagaaaaatttttctgataattcaaatattataaaagcagtaaacgaggtcagtttctcagttaatgaatccgatataatgattgtctttggacgttcaggctcaggtaaatcgacacttcttcatttgttagctgggttagaaactatcacaagcgggcaaataaaatttgaaaattacgctttccaagatttgacacttgatgagctagcatcaataaggaggacaaatattgggtttgtttatcaatttcaccatttaattcctgaattcaaagcaattgataacgcggcatttcctcttttgcttaacggccagtcaagagaagtcgcttatgaaaaatcaagacaaatactagctaaatttggacttgaaaaaagattatttcacaagcctaatcaattatctggaggagaaaggcaacgtgtcgctattgcaagagccctaatacatgatccaaagtttgttttgctagatgaacctacaggagatttagatcgtgaaactgcccaagaagttagagaaatgttgaaagattttatgataaattctaaatcttccttaataatagctactcatgatagaagttttgaagaaatttcagattttcagaagacaatggactcaggttcttttatataaa

SEQ ID NO: 270161 - DNA, 595 bp, Unknown
  Bacterial polypeptide expressing nucleotide sequence isolated from the Sargasso Sea
cctgctgcagcgcctctatacgcctgaacgcggccgggtgctggtcgacggcatggacctggccctggccgatgtctcttccctgcgccgacagatcggtgtggtgctgcaggacaacatgctgttcgcccgcagcatccgcgagaacattgcgctgaccgaccccggtgcgccgatcgagcaggtgatgcaggcggcgaagatggccggcgcccatgagttcatcctggagctgtcggagggctacgacaccgtggtcggtgaacacggcgcctcgctgtccggggggcaacgccagcgtatcgccatcgcccgcgcactgatgggcaacccacgcatcctgatcttcgacgaggccaccagcgccctggactacgagtccgaacgcatcatccagcagaacatgcaggccatctgcaagggccgcacggtgatcatcatcgctcaccgcctgagtgcggtgcgcgacgccaaccgcatcctggtgatggatcgcgggcagatcgtcgagcagggcagccatgccgaactgctcacccaccaggccggccactattcccgtctgcaccgcctgcagcaaggcggtgccgcatga

SEQ ID NO: 270162 - DNA, 687 bp, Unknown
  Bacterial polypeptide expressing nucleotide sequence isolated from the Sargasso Sea
gaatgccaggacaactttcaggaggacaacaacaaagggtagctgtagctagagctttagttttcgatcctgcagtagttttaatggacgaacctttaggtgcattggataaaaatttaagagagagtatgcagtatgaaattaaacatattcatgaaagcattggagtaactgtagtttacgttactcatgatcaaagtgaagctcttacaatgtcgaatagaattgcagtgtttaatgatggaaaagttcaacagctatcaaatccttcagagctttatgaaaaaccagtaaattcatttgtcgcagagtttattggtgaaaataatacctttaatggtgaggtatcagatatttcaggagatgaatgtaaagttaagctatctaacgcagaaattatagctagtgctatttcagtaaaatctaaaggtgaaaaaacaactgtatctttgagacctgagagagctttaatcgaaccaagtgaaaaaatggataatatgtttagtggcaagatagaagaggtaatttatcatggtgatcatactagagttcgaattaatttattaggaaacccagaatttattttaaaggtcccaaacagcacttccaatctagaacttaaggtcaaagaagatattaaaatcggttggaatagttctgatgcaagagctttagacccaaaataaa

SEQ ID NO: 270163 - DNA, 496 bp, Unknown
  Bacterial polypeptide expressing nucleotide sequence isolated from the Sargasso Sea
gatgaataccagtgtttccatcaaggacctgtcgctctccttcggggccgtggatgtcctcaagaacctcgatctcgatatccaggacggcgagttcctggtgctgctcggctcgtccggctgcggcaagtccacgcttttgaactgcattgcgggcctgcttgacgtcaccggcggccagattttcatcaaggacaagaatgtcacctggctcgagccgaaggatcgcggcatcggcatggtgttccagtcctatgcgctctatccgcagatgacggtcgagaagaacctgtccttcggccttcaggtggcgaagattccgaaggcggagatcgacaagcgcgtcaagcgcgcctccgaaatcctgcagatcgagccgctcctcaagcgcaagccggccgagctttccggcggccagcgccagcgcgtcgcgatcggtcgcgcgctggtgcgcgatgtcgacgtgttcctgttcgatgagcccttgtcgaacctc

SEQ ID NO: 270164 - DNA, 631 bp, Unknown
  Bacterial polypeptide expressing nucleotide sequence isolated from the Sargasso Sea
atgattgttaatttatatagcccaagcgctggagatattgattttgataatgtttgtataacaaaaattaaaagtaataaagaaatgatgaaatttagaaaacaaatccaaatgatatttcaagacccttattcatcattaaatggaagattaaaagttaaagatataatttcagaacctataaaacttcacaatccttcaataagctccaaagatatagatatttatatatatgatttattagaatctgttgaattaactcaacaatcagcagaacgttatccacatgaattttctggaggtcaaagacaaagaatttcaatagcaagagctcttgcaactcaaccaagacttcttgtttgtgatgaaccaacttctgctctagatgtaagtattcaagcacaaatattaaatttattaaaagatttacaagaacaattaaatttaacaatcttattcattagtcatgatttgccagttgtaagacaaatgtgtgatcgaatagctgttttaaaaaatggaaaactttgtgagatatcaaaaactgaagagttatttaaaaacccatcacatgaatacacaaaagaactacttacgttaatgccaaaaattgaatcaatttataactaat

SEQ ID NO: 270165 - DNA, 613 bp, Unknown
  Bacterial polypeptide expressing nucleotide sequence isolated from the Sargasso Sea
attataaatcttcttgattttgaaggatcaattaaatttaatggtaaatcaattaaagatctcagctcagttgaaaagaaattattaaaaaaagacattcaaatagtttttcaagatccatatgggtccctgtcgccaagaatgacagttggcgaaatcataggagaaggcttggatatccattttgatttttccagtgaagagaagatagaaaaaatatcaaatgtaatgaaagatgttggattagatgatagcctcatttttaagtatccacatgaattctcaggtggccaaagacaaagaatcgcaattgctagatcaataatcttaaacccgaaattcatgatccttgatgagccaacttcagcgcttgatagatctattcagattcaagtaatagatgttttaaaaagattgcaagacaaatataaattaacatatttatttattagccatgatctcaaagtaataagatctatgtgtgatcagatttttgttatgagtgagggaaagctagtagagtttggtaaggctgatgaggtttttgaaaatcctcaacaggaatatactcaaaaacttttaagagcagcactcaaatattcatcaaattaag

SEQ ID NO: 270166 - DNA, 424 bp, Unknown
  Bacterial polypeptide expressing nucleotide sequence isolated from the Sargasso Sea
tatgattaatcaagttgaagttgaaaaagtgtataaaacttttggagaagttaaagccgtagatggagtgtcattaaaggttgcacaaggtcatttcttttctcttttaggtccttctggttgcggaaaaacaactttattgagattgattgctggatttgaaataccaaactctggtgatattttaattgatagcaaatcaatggatagaatagcaccgaatttaagaccaaccaatatggtgtttcaaaattatgctattttcccacatcttaacgttgaagaaaatgttgcttatggccttagaaaaaaaaatcttcctaaagagaaaaaattaaaaatgattaacgattctcttgagcttgttggacttgaaggtcttaacaaaagatcttcaaacgctttatctggggccaaaagcaaa

SEQ ID NO: 270167 - DNA, 694 bp, Unknown
  Bacterial polypeptide expressing nucleotide sequence isolated from the Sargasso Sea
actggctgtttgtaatgtatattttaaatacccttccagggaagagtacactttaaaagatataaatcttacagtacaagaaggtgaggctatagggattattggaccctcaggttctggaaaatctactctcattgatttacttttaggttttttaaaacctgaaaaaggagaaattaatgttaatgaatattctattaactctaatttagaaggatggagaaaccaggttgcatttatgccacaacaagtttacctaatagacgatactattttaaataatgtggcccttggtattaaggatgaagaaatcgatcatgctagagtcacgacctctcttgaagcagcccaattacaagatttagtagaggatttgcctgatggatataatactttagtaggtgaaagagggttgcaaatgtcaggaggccaaagacagagagttgcgcttgcaagggctttttatttcggtagagatattctaattttagatgaggctacaagttctcttgataataaaactgaaaaagaaattattaaaaatataaaatcactgaaaggaaaaaagaccttaatagttatagcgcacagactaaccacactagttaattgtgacaggatttatgaaatagataatggaaaaataattaatgaagggtcttatgaagatgtgattttaaagaatgatagatag

SEQ ID NO: 270168 - DNA, 862 bp, Unknown
  Bacterial polypeptide expressing nucleotide sequence isolated from the Sargasso Sea
tatttgggttttaattcaaaagacataatccctttaattacaatatttggtcttggaactttaagattaagaccggttgtttctacttttctaaacagtattaaccaaattcgattttgccgctatgccacatcaattgtatatcgtgatatgaaaagatccagtaattatagattgaatgaatcaagcttgcaattcaagaaaaataactttggaaaagaatttgaaaatcttgaaataaataatatttctttcaaatatccgaatacaaataattgggctatagaagaaatatcattatccattaataaaggtgattcaataggagtaattggtccatctggcgctggtaagacaacattaattgatctactactaggccttattgatcctcagtccggtaaaatacaatacaatggtaatttcttagatgataatttatcaaattggcaatccaatgttgcttatttgcctcaggaaatctttcttacagatgataccttatcagcaaatattgcactaggcattgatgaagagcatattgattataaaaaaataagtgggattctagaaaaagtaaagttagcaacattagttgattctttgcctaagggtttaaaaacaattattggtgaaagaggtgcaaaattatctggaggacagagacagcgtattgcattggcgcgtgctttttaccatgatagagatgttttaattatggatgaagcaactagcgctttggataatgaaacagaaaatgagattgtcaatgaaattaaaggtcttaaaggtaaaaaaactcttatagttatagcacatcggttttctactattaaacattgtgataaaatatataagttag

SEQ ID NO: 270169 - DNA, 670 bp, Unknown
  Bacterial polypeptide expressing nucleotide sequence isolated from the Sargasso Sea
atctttaatcggttcgtcgggatcaggaaaatctaccctacttagatgtgcaaaccttttggaaaacagccagcaaggtaagatattttttgatggagaagaaattaaatgggcaggaactggagaagatagaacgccggctgattcaaatcaggttcgattaatgcgaacgaatttatctatggtttttcaacagtttaatttatggtcgcacatgaccgtgttgcaaaatgtaatggaagctccggtatctgtgctcggtatagaaaaagagaaggctgagtgtaatgctcgtgattatttaaataaagttggtattggagaaaaatggggctcatatccggcggagctgtcaggaggacaacagcaaagagccgcaattgcaagggccttgtgtatggaacctagtgcattattattcgacgagccgacttcggcactcgatccggagttagaacaagaggttataaaagttataaaagatttggcacaagagggacggacaatgattatcgttacacacgatatgcagcttgccggagatgtgtcagatcacgttgtttttttacataagggattaattgaagaggaaggttcaccaaactctttgtttaaatcccctaaatcagagagactgcaaaagtttttaagttcaactcgcgcagcctaa

SEQ ID NO: 270170 - DNA, 514 bp, Unknown
  Bacterial polypeptide expressing nucleotide sequence isolated from the Sargasso Sea
cagacgttcaagataggtatggtttttcagcaatttaatttatttcctcacatgacagccttacaaaattgtgtagaagctccagtcgaggttttagggctaaagagagaagaggctgaagaacgagcattggatttattggagttagttggtttaacagacaaaaaagatcaacatccaagtagactgtcaggaggacagcagcaaagagtagcaatagcaagagctttagctatgagaccaaaagttatgcttttagatgaaataacatcagcacttgatcctgaagtagtgggtgaggtgttaaatgttatcagatcattaaataaagaacataatttaacaatgattatggttacccatcaaatgggatttgcacgtgaaatttcagatagagtctgtttttttaatgaaggtaaaatttttgaagagggacccccagaaaaattatttggagatccacaaaatgaaagaacaaaacaatttttacatgctgtgctagacgcaaactaat

SEQ ID NO: 270171 - DNA, 544 bp, Unknown
  Bacterial polypeptide expressing nucleotide sequence isolated from the Sargasso Sea
ttgcccgtggcaccgattgttcatcctgtttcgagtcttgcgagtggcttagccgagcgcccggagcactcgtcggagagcccgctttcggttcacgcggtgacggttgcgtatcagcggaagccggttctttgggacatcgattacgacgctccggcgaacagactgatcgcgattgtggggcccaacggcgcgggcaaaagcacgcttatcaaggcgtgtctgggcttggtgccccgggcgtcgggacagattgagctgtgggggcggccttacaagaaggttcgttcgcgtgtgggctacgtgccgcagcgcgagagcgtggactgggactttcccgtttcggcgcttgatgtggtgtgtatggggcggtatcggcggatcggctggtgtttgcccgtcacgcgtaagcacaagcgtgtcgcgatggattgtcttgagcatgtggggatggccggcttcgcggaccggcagatcagtcagctctcgggtgggcagcagcagcgtgtatttctggcacgggcgctgcacaggaagccgacct

SEQ ID NO: 270172 - DNA, 869 bp, Unknown
  Bacterial polypeptide expressing nucleotide sequence isolated from the Sargasso Sea
aattcatgagtatacaaaacatcttttagcagctgaacctagcggaattcctcacctctcttcgatagacgcaccctcggttatgaaaagcaccaaattgaaagtatggtttccaataaagaagggggttttgcggcgtgtaatcggacatgtaaaagctgtcgacggagtatcggttgaaatcaaagagggacaaacgcttggggtagtgggagagtcagggtcgggtaaatcgacccttggtcgcgcactattgagactagagcgcagcagtggcaccatcatctttcggggcacacaaattcaaggcttccaattcagcgagatgcgtccattacgacgacaaatgcagatcgtttttcaagatccgtatggctccttgagccctcgcctttccgtcggacaaattgtcgaggaaggccttttggttcacgacctgggcggaaactatgaagaacgccgtgatcttattggcgaagctttaaaagaggttgatctagatcccagcgtacaggatcgctaccctcacgaattctccggtggtcaacgtcaacgcatagccattgccagagctttggtcttaaaacctaatttcatcgtccttgatgaacccacttccgcactagacatgtcagtccaagcccaaatcattgatttgctgcgaaatttacaagaaaagcatggattagcttacatgtttataagccatgatctcaaagtaatccgcgcggtaagccatgaaatcattgttatgaagcaagggcgcgtagtcgaggcgggccttaccaacgaagttattaataaccctgcccaaccttacacccaagctttaatggctgcagcttttgacttgagagccgatttatctg

SEQ ID NO: 270173 - DNA, 365 bp, Unknown
  Bacterial polypeptide expressing nucleotide sequence isolated from the Sargasso Sea
cattaatgaacttaacgatcaagttgattataatgtgggtgacaatggttcaaatctatctggtggacaaaaacaaagagtagctatcgcaagagcagtttactcaaattctccaatattaattcttgatgaggcaacatcatctttagactcaaagtctgaaaaattggtacaggacgcaattgataaattaatgattaataaaacatctattgttattgcccatagattgtcaacaatacaaaatgcaaataaaattattgttttagataaaggggagattgttgagcaagggaaccatgatgagctgattaaaaatgatagttactataaaaaattgatagcccttcaatcattcaagtaag

SEQ ID NO: 270174 - DNA, 991 bp, Unknown
  Bacterial polypeptide expressing nucleotide sequence isolated from the Sargasso Sea
attgaaatactggggaggtattcaaacagttaaagctcagcacttcgagctcaccgcccgttggaagtggcaagatcgttatcgcatatttgtctccgaaggattcaagagcacggctctaggatcaacttcgggagaaattggaggttttctcaatcagatcagcggtctgcttgttttgtggataggtatggggcttgttttaaagggagatctcaccctcggcatgttgattgccttccgcattatttccggtaatgtcaccggtcctttgttgcagttgtctggcttgtatcagggattccagggagtacaactagctatggaacgcctcagtgatattttggatcagaacccagagctttcgagtcaggacgaaataggacagatttcaatgccaccgataaaaggatcgattcgattcgaaggagtgagcttccgttttggtaagaaaggtccttatcaagtcgattctgtggacttggaaatatcttcaggaagctttattggaattgtgggtcaaagcggtagtggaaaaagtactcttacaaaactgattccaaagctataccaacttgatgagggtcgtatttttattgacgattacgatatttccaaagtcaatctttcgagtttgagaaggcagattggtattgttccgcaagattcactactttttgaaggaacaattgctgataatatagctttaaatgatcctcaagcaactacagaatctataattgctgcagcaagaattgcgtgtgcccatgatttcatcatgagcttgggccaagggtatgcaacccctttggcagaacgtggcggtaatctcagtggcggtcagagacaacggattgctatcgcacggacaattttggccaatcctcaattactagtaatggatgaagcgaccagcgcactcgatttacataccgagcgccaattgtgtagaaatctttcagcatgggcttctggacgcactgtgttattc

SEQ ID NO: 270175 - DNA, 523 bp, Unknown
  Bacterial polypeptide expressing nucleotide sequence isolated from the Sargasso Sea
tatgttaaaaatgaaacagttaggcaaagtttttcacaccggtgaagtgtctacccatgcccttcgcgaggtggatttgcatgtcaaagaaggggattttgtcagcgtgaccgggccttcaggctcgggtaaaaccacttttttaaatattgccggtttattggaagtggcgagttccggcgagtttctgctggatggcgacaatgtgaatttattgccggactcagcgcgctctaaaatgcgtaaccagaagattggttttatttttcagggctttaacttaatcccggagcttaatttattcgacaatgtggatgtgccattgcgttatcgcggttttgatgccaaagaacgcaaacgccgtattgaacagcagctggagctggtggggctggcgtccagaatgaaacatttgcccagtcagttgtccggtggtcagcagcagcgggtggcgatagcccgtgccctggccaccagcccaaggtttttattagccgatgaacctactggcaacctcgacagc

SEQ ID NO: 270176 - DNA, 322 bp, Unknown
  Bacterial polypeptide expressing nucleotide sequence isolated from the Sargasso Sea
atgaccgcccctgtctccattcgcaacgccaccaagacctttggcgacttcaccgcccttgacgatgtcagccttgaaatcgcggctggcgaattcattgtccttctgggcccgtcgggctgcggcaaaaccaccctgttatcgcttcttggtggtttcctgtcgccaaccagcggcacgattgaaatcgatggcaaggatatgggcgacgttgcccccgccaaacgtccgaccaccacgatgtttcaggattatgccctgttcccgcatatgacgctccgcgacaatgtcgcctttggccttaagatgcgcaaggtcggca

SEQ ID NO: 270177 - DNA, 571 bp, Unknown
  Bacterial polypeptide expressing nucleotide sequence isolated from the Sargasso Sea
atgaaaaccagtacaaaaactgtaatttctataaataacatttcaaaagtatatgatggtcctccaccagtaagagccctagacggtgtttctcttgaaattaaacagggagattttgtttcaatagtgggtcaatcgggaagcggtaaatctactttcttaaacatgattggactattagacagcataactgatggttctatagagattgagggaaaagatgtttcagaactctcagataatgagctatcaaaatttagaggtgaaaagattggatttatatttcaaagtttttttctacttccaggattaactgctcaggaaaacgttgctgaaggtcttttataccagggtatttcaagaacaaaaagactggaaaaagcaaaggaagtattagaacaagtaggacttggagataggttaactcatttacctaaagaattgtccggaggccaacaacagagagtcgcaattgctcgagctcttgttcaggatccggcctttgttttagctgacgaaccaacaggaaacctagataaagaatccggcatcaacatactcaatatttgaa

SEQ ID NO: 270178 - DNA, 574 bp, Unknown
  Bacterial polypeptide expressing nucleotide sequence isolated from the Sargasso Sea
ccctggctgacggtgaccgagaacatcaagttctgccgccagctgaaggtcatctctgactcggtacacagccagtctgacgtggaagccgccagcggccgggccgatgcgctgcttaatctgatgggcttgaagaactttgccggcgcctaccccagccagctttccggcggcatgcagcagcgcgtcgcgattgcccgggcgttgatgccacggccggactttctgctgatggatgagccgttcggcgcgttggacgcgcagacccgtgaggtgatgcatgacctgatcctgcacgtgcaccggctggagaagagcaccatcttgtttgtcacccacgacgtggaagaggcgatctacctgggtacccgcattgtgctgatggcgccgcgccccggccggatcgacagtatctacgaggtgccgctgcccaaggtgcggcatcaggacatgaagctggagccggaatttatcgccttgaaacgcgagattctgactcgcatccgcgaaacctccggggtgcagaccgacctggatcaactggcgcgtttgagtgaaggggccgggttgtgat

SEQ ID NO: 270179 - DNA, 499 bp, Unknown
  Bacterial polypeptide expressing nucleotide sequence isolated from the Sargasso Sea
tatgggagcaattgatatcaaatctgctgggaaaatttacccaaatggcactagagcacttgaagaggtaagcataacaatcaatgatggtgagtttgtagttcttgttgggccatcaggttgtggtaaaactactctacttagaatggttgcgggtcttgaagatattactgaaggagaaatttcaataggcgacaagacagtaaacgacgtagcaccaaaagatcgagatatagccatggtttttcaaaattatgcactttaccctcatatgtccgtttttgacaatatggccttctctttaaaattaagaaaattaccaaaagatgaaatagataagaaggtcaaagatgctgcaaaaacacttgagataagtgaattgcttgatagaaaaccaaaggctttatctggtggacaaagacaaagggttgcaatgggtagagctattgttagaaatccacaggcttttcttatggacgaaccattatcaaacttagat

SEQ ID NO: 270180 - DNA, 796 bp, Unknown
  Bacterial polypeptide expressing nucleotide sequence isolated from the Sargasso Sea
tttggatagaaaaccaaaggctttatcaggtggtcaaagacaaagagttgcaatgggtagggcaattgttagaagtcctcaggcatttttaatggatgagcctctttcaaatctagatgcaaagctaagggttcagatgagagctgaattgggcgaactacactcccaattagaaactactactttatatgtcacgcacgatcaagtagaagctatgacaatgggtgatagagttgcagtaatcagaaaaggtgttctccagcaaattgatactccaagagagatatatttatatccaaagaatatttttgttgcgggatttataggaagcccggcaatgaatttcgtttatgcaactattaatgcttcaggaaaaaaaacaaaattaacatttggtgattcaaacatagttagctctgatgcaccaaaatctttatctgactttaatggtaaggaaattgtacttggaattagaccagaggcatttgaagattcagtctatgcgaatgataaagaatttactgaacaaattaatataaatgtttctttactagagcaacttggttctgatacctatatacacttttacaaagatattccgcctgtgcaaactaaagcaattgaagaaatcctagctgatgaaggtgaagatatatctgcattaggtactgaaacaaaatttatagcaagaattaatccaaatgcaacaattgaagaaggacagaatattaatctggctatagatccttctaaacttcattactttgacccagagaccgggttagctataacttaa

SEQ ID NO: 270181 - DNA, 571 bp, Unknown
  Bacterial polypeptide expressing nucleotide sequence isolated from the Sargasso Sea
tatggcttttttaaaatttgaaaatattgataaatcctttggtgaaaacaatgtaattagtaaatttaacctagaggttgaaaaagggaaatttatagtattgttaggtccatctggttgcggaaaatctacgctactaagaatgatagctgggttagaaaaaatagattatggaaaaatacttttagagaataatctcttaaatgatttgctaccttcaaaaagacaaattgcaatggttttccaatcttacgctttatatcctcacatgagtgtttttgaaaatatttcttttggtcttaaatcagagaaaatttcaaaaaatgaaatcaaagataaagtaatcgaagctgctaaaattttaaaaattgaagaacttttggataggaaaccgagggaactttctggaggtcaaagacaacgagttgctattggaagagctataactagaaatcctaaattatttttattcgatgaacctctttccaatctggatgctgcccttaggtcagaaatgagagttgaaatctcaaaactacataaaaaattaaaaagtaatattgtttatgta

SEQ ID NO: 270182 - DNA, 390 bp, Unknown
  Bacterial polypeptide expressing nucleotide sequence isolated from the Sargasso Sea
gagcacttgaattactagagttagtaggtttaacagataaaaaggatcaacacccatcaagattgtctggtggccagcaacaaagagtagctatcgcaagagctttagccatgagaccaaaagttatgctattagacgaaattacctccgcattagaccctgaagttgtgggagaagttttaaatgttattagatcattgaataaagaacatagtttaacaatgataatggtaacccaccaaatgggttttgctagggaaatatcagatagagtatgtttttttaacgaaggtaaaatatttgaacaagggccacctgaaaaattatttggcgatccacaaaatgaaagaacgaagcaatttctacatgctgtactcgatgctaattaat

SEQ ID NO: 270183 - DNA, 352 bp, Unknown
  Bacterial polypeptide expressing nucleotide sequence isolated from the Sargasso Sea
caaattgatgatcaagcaaacaaatttcctggacaactttcaggcggtcaacaacaacgttgtgcaattgcaagagcattatgcatgcaaccaaaaataatgttatttgacgagccaacctcagcattagacccagaaatgatcaaagaagtacttgatgcaatggttagtcttgcaaaaggtggaatgaccatgattgttgtgacacatgagatgggatttgctaaagaagtcgctgatgaggttatttttatggatgaaggcatgataattgagaaggctgatacaaaagaattctttgctaacccaaagagtgacagaacaaagctttttttaagccaaattctttaaa

SEQ ID NO: 270184 - DNA, 746 bp, Unknown
  Bacterial polypeptide expressing nucleotide sequence isolated from the Sargasso Sea
cttaaaaaataattcttttatggcgcgtaagcaatttacagcagttgatgatgtaactttcaagatcaatacaaattctactgttggattagtcggcgaatcccgttcgggcaagtctacattgggtaaagcaattgccggattattaaattacgagggtgaaatattatttgatggaaaaaatcttggtaagatttctgcctttgaaagacaaagaattaaaaaaaatattcagattattttccaagatcctttcggctcattatctcccagaatgaccgtgggcgagattattggtgaaggcctagatatacattttgatttaaagaaaaatgaaaaggtatcgctaataaaagattcaatggaggatgttgggttaaatccagagcatatttttaagtatcctcatgaattttcaggaggacaacgccaaagaattgccattgctaggtcgatcattttaaaacctaaattacttatacttgatgagccaacttctgcacttgatcgatccatccagattcaagtcttggagcttttaaaagaacttcagaagagacttaaattaacctatttatttattagccatgatcttaaagttatcagatcaatctcagatcatatttttgttatgcaaaatgggaaaattatagaaaccgggccatctaaagttgtatttgaagatcccaaaaatcaatatacagtagacttgctaaaagctgcattaaaatattcctctggttaaa

SEQ ID NO: 270185 - DNA, 423 bp, Unknown
  Bacterial polypeptide expressing nucleotide sequence isolated from the Sargasso Sea
gtaatcttgaacttaatcaaaatgtatatgacttaattgacattgttggaatgacaagacagtccttagatcgttaccctcatgaattttctggtggtcagagacaaagaatttctattgcaagagctttggctacaagacctcggttattaatatgtgatgaacctacatctgcattagatgtaagtattcaagcacaaatattgaatcttttaaaagatattcaagatgagttgcatcttactatgttattcattagtcatgatctacctgtaattagacaaatgtgtaatagaattgttgttcttaagaatggaattttatgtgaaactaaaaatactgaagaattatttaataatccagaacattcttatactaaggaacttattaggttaatgccaaaaattgaatcaataatttaac

SEQ ID NO: 270186 - DNA, 705 bp, Unknown
  Bacterial polypeptide expressing nucleotide sequence isolated from the Sargasso Sea
attgataataaacaaaatttctaaatcgtatggtaataaaaaagttgttagagatataagtatattaattaatagaggtgaaatagtaggcttacttggaccaaacggcgcaggtaaaactacaacattctatatgattgtaggtttagtaaagccagatacaggatctattttattagataagattgagatttctaaaatgcctatttactcaagaggacttcagggaataagttatttgcctcaagaaccttcaatttttagaggtatgaatgttgaagataacttgctttcaataattgaaattgtagaaaaagataaaaataaacatgatataatattgcaaagtcttctcaacgagtttgatattaaccatgtaagaaaatctaaatcaatagtactatcaggaggggagagacgtagattagaaattgcaagaactttagcatcacgtcctaaatatcttcttcttgacgaaccattaactggtattgatccagtttcaattgaagaaataaaaataattataaaaaaattaaaacaaaaaaatataggtgttttaattactgatcataatgtaagggagacacttaaaatcgtggataaagtgtatattgtaaatgagggtatgatatattttagtggaaaccccaatgaagccatatctaatgataggataaagaaattttatcttggtagcaattt

SEQ ID NO: 270187 - DNA, 382 bp, Unknown
  Bacterial polypeptide expressing nucleotide sequence isolated from the Sargasso Sea
atgagtgaagttggtttagagcctagttctatgcttagatttcctcatgaattttctggaggtcaaagacaaagaatagctatagcaagatcatttgtcttaaatccaaaatttgttcttttggatgaaccaacatctgcacttgatttatctattcaaaaacaaattctagaacttttactacaacttcaaaaaaatcacaaaactacttatatttttatcagtcatgatttaagagttataagatcaataagccacaatttaatcgttatgaaagatggttcaattttagaacaaggtgtggcaaaaaatatattaaacaatcctcagaatgattatacaaagaatttaataaaatctgctttcgatattatttattaat

SEQ ID NO: 270188 - DNA, 736 bp, Unknown
  Bacterial polypeptide expressing nucleotide sequence isolated from the Sargasso Sea
gatgaaaagctagttaaagcagttaatgatgtttcatttgaattatttgagggcgagacattaggtctagtcggtgagtcaggttcaggcaaatcaacaatagcaaaaattattacaggacttgtcagacctactgcaggtgaaatagaatataataatttttctctatacaatcaaaaaaagaaatatcagatccaaaagagtagagggcaaatacaaatgatatttcaagatccttattcatcattaaatccaagatttaaagtgaaggatattattgctgaacctttgaaattttttcaaaaaaatatttctaaacaagatttagatcaaagtgtttttgatttaattgatatagtaggtatgacaaggcaatctttggatcgttatcctcatgaattttctggtggtcaacgacaaagaatttcaattgccagagctctagcaaccagaccacgtttgttagtatgtgatgaaccaacttcagcacttgatgtaagtatacaagcgcaaatattaaatttattaaaggatatacaagatgaactgcatttaaccatgctttttatcagtcatgacctaccagtgataaggcaaatgtgtaataggattgtggttcttaaaaatggtatagtttgtgagacaaatgatactgaaaaattatttaataacccattacacgcttatacaaaagaattaattagattaatgccaaaaatagagtcattagtttaaa

SEQ ID NO: 270189 - DNA, 598 bp, Unknown
  Bacterial polypeptide expressing nucleotide sequence isolated from the Sargasso Sea
tatggctgaaatagaacttaaaaatatttcaaaatcatttagtgacacacaggtcatcaaatctcttgatctatcgatccaagacggggaattcattactattgtggggccttcaggatgcggcaaatcaactttattgagaataatcgcaggattagaaactcagtcttcaggagatgtcatcatagatggtcgtgaagtaaataatataagagccagtgatcgagatttggcaatggtgtttcaatcttatgctctctatccacacttgactgttaaacaaaatttatctgttcctcttaaactgcgagagctttcaaaaattgaaagaattcccatatttaactggtttctgccaaacaggcattcaaaattagaggaaatcaataataaagttcaaaaagcctctgatactttaaagattactcacctgcttgaaagaaaacctggtcaattatcaggtggtcaacagcaacgtgtagcggttgggagagctatggttagagaaccagttgcttttttgatggatgagccattatcaaatctggatgctgcccttagagtgcatatgcgtgcagaaatttcagaactccatcgt

SEQ ID NO: 270190 - DNA, 766 bp, Unknown
  Bacterial polypeptide expressing nucleotide sequence isolated from the Sargasso Sea
tttgccagcctttatcccgcatggcgggcgtcacgcgttgccccggctgaggcgcttcgctatgagtgagtccaagtcatctcgatcggccccacagccacttctcgaacttaaagatgtgtggcgtagctacaaccaaggcggttcaaaactaaatgttttgaccggtgcaagcttgaaggtgcgagctggcgaaatgacagccttggtggggccatctgggtctggcaagtcgaccttgttaaatattgctggtcttcttgaacaacctgactcaggcaaggtatttattgacaaagtcgactctgggcgattgcggcaaggaaaacgcacattgttgcgccgcgagcatattggctttgtattccaatttcatcggttgttgccagaattttctgcactggaaaatgtgatgataccgcaaatgttgaatgggcttgataaatttgagtcggcggacagggccgatcaattgttagcgatggttggtttgcaagatcgtatcgatcaccgcccaggattgttgtcgggtggtgaacaacagcgtgttgccattgcgcgggcggtagccaatgccccgcgggtgttattagctgacgaaccaacaggcaatttggacccagatacagccaaagatgtttttgggcatctggctgccatcacccgcgccactcaaacggcggctttagtggtgacacataaccaacaattggcactccacatggatagcattttgaccattgttaacggcaaggttgttgaattg

SEQ ID NO: 270191 - DNA, 626 bp, Unknown
  Bacterial polypeptide expressing nucleotide sequence isolated from the Sargasso Sea
aatggcacaaacaaatgaaccgatagttaagttttcagaagttacaaaaagatatggtgatcttgttgtcttagataaacttgacctagaaataaaaaagaacgaaatgatttctatcattggtccgtcagggtctggtaaaacaacggttctcagggttttaatgacactagaaaaaattaatagcggcgtaatttatgtcgatggtgaacccttaactcacatgctctcaagcggtgaattaattgaggctaacgagaagtatttacgtgagcgccgatcaaaaattggtatggtgttccaacaattcaatttattcccacatatgacagcgcttcaaaattgtatagaggctcctatgcaagtattaggaatgaataaagaggctgctgaggagcgggcgcttgaattactagaactggtcggattaagcgataaaaaagatcagcatccaagtcgactatcgggtggccagcaacagagagttgcaattgcccgagctcttgcaatgcgtccaaaagtaatgcttctagatgagatcacttcggctcttgatccagaagttgttggggaagttttaaacgtaatcagatcacttaacaaagaatacagcctaactatgataa

SEQ ID NO: 270192 - DNA, 580 bp, Unknown
  Bacterial polypeptide expressing nucleotide sequence isolated from the Sargasso Sea
atgaaaaacttaattgaagttcaaaacataaaaaaaaattatggcaaaaaagaagctgtaaaaggaatatcttttaatgttgaggaagatgaaattttaggtttgcttggtcctaatggatctggaaaaacaacaactattggaatgttgctaggcttacttaaacctacaagtggtcaaatatttatcaataatcttaaacttgaagaaaatagaattcaaattcttgaaatgattaattttatatccccatatattgaactgcccaaaaaacttacagtgaaacaaaatttatatgtttattctaaactttataaagttcaaaatataaaggaacgaattgagtatttgtcggaaaagctaagaataggtgaattattaaatagtattacaggagaactttcatcaggccaaaaaaacagagtaagtttagccaaagccctagtaaacgaacctaaagttctgttacttgacgaaccaactgcctctttagatccagaggtaggagattttgtgcggacatttttaaaagattataaaaaagaaaaaaaaatttcgatacttttagcttctcataata

SEQ ID NO: 270193 - DNA, 730 bp, Unknown
  Bacterial polypeptide expressing nucleotide sequence isolated from the Sargasso Sea
tatggaaaacattaaatctggtatttctttaccttccgtaacaaaaaatattatttataaaaatgtaagctattcttaccctagtagaaatgctatggtactaaaaaatttaaactttactataaatgcagggtcttttacagcaataataggtcattcaggtgcgggtaaatctacattagtagacatgctaacaagattgattacaccttcaagtggtcaaatattatttgatggcattaatattttggatttatctttatactctattagatcaaatatatcgtatataccacaagaccctattttgtttagaatgactatagcagaaaatatgaggtatgtaaaagaagatgcttcagattctgagttatggagtgctttgaagctagctaatgcagaaaattttgtaaaagatcttcctgatcaactaaacactaatttaggtgctatgggttctaagttatcaggaggccaaagacaaagaattatcctggctagaacatttttaaaaaaaccgtcagtattaatattagatgagcctaccagtgcgctggataaagactcagatgaatatattcagaatactatagctattttacaaaaaaagatgaaaattactgttattttaattgctcatagaatttcgtcatataaaaacttagatcaaataattagtataaaggatggtttaattaataaagttggtaaggcaagcgattttttataa

SEQ ID NO: 270194 - DNA, 769 bp, Unknown
  Bacterial polypeptide expressing nucleotide sequence isolated from the Sargasso Sea
ggaagcaaaaaatattaatgtgaattttcctattcggaaaggatttctgcaacgcatttcagatgttgtccctgcggtagtagatgcaagctttcaacttcactcaagagaaagtctagggattgtgggtgagagtggttctggtaaatctacgcttgcaagagctttgactaagcttgtgcaccacaaaggaaatatttattttaaaggtaatgaagttgtcagcctaaattctgcacttttgaagccttaccgtaaagaagttcagatagtatttcaggatccatttggatctttatcacctcgattatctgttggtgagataattgcagaagggcccaaggcacatggcaataaggatgcttacatcctccaacaaagagtgacagaagtattagaagaagtgggattagaagctaattttcacgaccgttatccacatgaattttctggcggacaaagacagcgtattgccatcgcacgcgcattgattttgagacctgaagttatcatctttgacgagcccacatctgcccttgatgtaacagtgcagaaacagatcattgatttacttcttaaactgcaagaacgacacgggttaagctatatttttattagccatgatatctcgttaattagtaatgtttgccataatatgttcgttatgaaggacggaaaaattgttgagttaggaacagttcgaaagattttaaataacccatcagatgcctatacccagacacttattgatgctgctaatagaaaataa

SEQ ID NO: 270195 - DNA, 596 bp, Unknown
  Bacterial polypeptide expressing nucleotide sequence isolated from the Sargasso Sea
cgggcctaacggcgccggaaaatcaaccttgctgcaaatcatgcaaggcatgctcacccccagcgctggccatgtgctgatcggaggagccttgattcaatcctgccgccagcagatcgctctgatgccgcagcggggacgtatcgactggtccttccccatcactgcgctggagatggtgcgtctgcgacagcctcgacggcagccaaccagccgttgcatgacggcccaagaagctctcgaacgagtgggccttggccatcgcgccagggaccgtcttggcatgctctctggcggacagcagcagcgggttctgctggctgctgccattgctcagaacgtggacactctgctgttggatgagccatgttcagcgctcgatcctccggctcgcgccagggtgatcgatttactccagcagctcgcccgagaggggcgcagcatctgcttgaccagtcacgattggggttcagctctgttgcagtacgaccgggtgatcgtgctggaccgggagatgttgtttgacggcagcccagctgatgtcgggcagcagctgaatgatttgatgagcagcgcaacgcgctgcccgcactgat

SEQ ID NO: 270196 - DNA, 655 bp, Unknown
  Bacterial polypeptide expressing nucleotide sequence isolated from the Sargasso Sea
gaagctcataaattgctagaattggttcaaatgtcagaattttctgatagattcccagctcaattatctggaggtcaacaacaaagagttgcattagcaagagctctcataactaatccgtctgttttacttttagacgagcctttatcagctttagatccctttctaagaattaaaatgagaagtgaattaaaagctttacacaaaaagcttggcattactttcatacatgttactcactctcaagatgaagctatggctttagctgacatgatagtggtaatgaacaatggaataattgaacaggtaggcaatccatatgaaatctataataatcctaagaataagtttatagctacttttgttggtggtcataacgtaattattaaaaacaagaaatcttattctatcaggatggatcacataaacttagatgttaaaaaaataaataacaaaaaaaataataattataacccatttttagttaaagaaatagagttccaaggccagattgtaaaggttacaggagaaactaaaaattttggagaacttagtgttcaactatcggacgaaatgtttcttaaaaacaaatttgaaattaaagatgaagtttttataagttgggaccacgaacgagaaagtttgctagaatagt

SEQ ID NO: 270197 - DNA, 658 bp, Unknown
  Bacterial polypeptide expressing nucleotide sequence isolated from the Sargasso Sea
ggttgaaacccacgccttaagagactttaacctgtacgtaaaagaaggggattttatttcggttaccggtccttcaggctcaggtaaaaccacgtttcttaatattgccgggctgctggaaaccttcaatggtggtacctatatgttagatggactggatgtcagcaatcttaacgacaaacaacgtagtcagttacgtaatgaaaaaattggcttcattttccagagttttaacctgatccctgacctcgacctgtttgataacgtcgacgtgcccctgcgataccgggggttcaataaagccgaacgtaaggagcgtatcgaaaacagccttgaaatggtgggcttgattaaccgtatgaaacacctgccctctcagctgtccggtggacaacaacaacgggtggcgattgccagagcgttggctggtgagcccagatttctcctcgccgatgagcccacaggtaacctggacagtaaaatggcacacagtgtaatggatctgttgcaggacattaaccaaaaaggcaccaccatagtgatggttacccacgacggcgaactggccagacaatcaggccgtaatatctttgtgcgggatggtcaggtcagtgaattgcaggaagtcgccagtaccgcagaagcggctagcgcttag

SEQ ID NO: 270198 - DNA, 721 bp, Unknown
  Bacterial polypeptide expressing nucleotide sequence isolated from the Sargasso Sea
cgaccctggaagactccaactcaaggtgaagaaaggagaagccgtcgccctggtcggcagcagcggtgcaggaaagacgacccttgccaacctgattccaagattcttcgatgtcacccggggagaggtcctgatcgatggcgtcaatgtgaaggactatgacctccacgccatgcgcagccagatctccatcgtcacccaggacaccatcctcttcaacgacaccgtggcgaacaacatcatctacggacagcccgactgctccaaggaacggatgtatgccgccgccagggccgccaatgcccatgagttcgtaagccagcttaccgacggctacgacacttttattggtgaaaaaggcgtcaaactctcaggcggtcagagacagcgtctctcgattgcccgtgccctggtcaaggactctcctatcctcatccttgatgaggccacctccgccctcgattctgaatcagaaatcgaggtccagcaagccatcgaaaacctgatggaaaaccgcaccaccgtggtcatcgcccaccggctgtccaccatccgaaacgccgaccggatctgtgttatggaagaaggaaggattgttgaggaagggacccacgaagaactcctgctcctcgaaggacgctacagccagctccatgccctccagttccgcaacgaaactgaagaagaacttggccgttcaggaaactatctggtttcataa

SEQ ID NO: 270199 - DNA, 886 bp, Unknown
  Bacterial polypeptide expressing nucleotide sequence isolated from the Sargasso Sea
ggtgaaattcaaattaacaatgaagtaattaatgaaatgcacccatctaaaagacataccgcaatggtattccagtcctacgctttgtatccacacatgaatgtttatgataatatgtcttttggacttaaaatagaaaaaaaaactaaagaagaaattcacacaaaagttctaagtgcagccaaaacacttaaaattgaagatcttttagaaagaagaccgaaagaactttcaggtggccaaaggcaaagggttgcaattggaagagcgataactcgaaatccaaaaatttttttatttgatgaacctttgtctaatcttgatgctgctcttagagcagaaatgagagtcgaaatctctagacttcatcaaaaaattaaaactaatatgatctatgtaactcacgatcaggtagaagcaatgactttagcagatagaattgtcatattaaataatggcaacattgagcaagtaggaacaccgaacgaaatttacacaaatccagataatatttttgttgctcaatttattggaacaccaaaaatgaatatttttaaaattaattctgagaacattgtctcaaacaacaaaataaatattttaggaagtagcatctcttttagtggaataaacttagataaaaaaaattattatataggtataaggcctgagcatttaactttaaatgaaaatcaagaatttaattttactccaaaaattgaattaattgaaaatcttggaaatgagaaaatagtttatatggtaagtgaacataaccaattatgtgcaaaaatttctagcgatattcaaatcaacaacacatttggttttaatttaaaaaatattttattatttgacgaaaatggtcttaggattagattataat

SEQ ID NO: 270200 - DNA, 403 bp, Unknown
  Bacterial polypeptide expressing nucleotide sequence isolated from the Sargasso Sea
aatgccaaaaaaacaagctgaagaaatagctatgaaaaatttagagagagttcaaatagctgatcaggctaaaaaatttcctggtcaattatccggtggtcaacaacaaagatcagcgcttgcaagagctttatgtatggagccaaaaataatgttgtttgatgaacctacttctgcccttgatcctgaaatgattaaagaggtactagactcaatggttgatttagctaaagcaggtatgaccatgattgttgttacgcatgaaatgggttttgctaaagaggtggcagataatatgatttttatggatgaaggacgtatagttgaaaaagctaaaaccaaagatttttttgacaatcctaaatctgatagaactaaactttttttaagtcaaatcttataa

SEQ ID NO: 270201 - DNA, 685 bp, Unknown
  Bacterial polypeptide expressing nucleotide sequence isolated from the Sargasso Sea
acaaagacaaagagttgctattggaagagcattggttagagagccaagaatatttttgttcgacgaacctttatctaacttggatgcaaaactaagagttgagatgagaagagagatcaaaaaacttcaccagcaactgaaaacaacagttgtgtatgtaactcatgatcaaactgaagcaatgagtttaggaacaagaattgcgattatgaaccatggtgttattcagcaaaatgatacacctgaaaatatttacaataaaccaagcaatacatttgtagcagattttattggatcaccatctatgaatctaattaagggaactttaaaagaaacttcaggcaaaatattttttactgcaagtgattctaattttgaaattccaattaaagattatgaatttaaagataaatctaatttaaataataaagaagttttctttggtttaaggccagagcacatttactttaaaaaatctaatgaaagtgattttgaagtcaatttaagagcagatttaagtgagtatataggtcatgaacaaataatgacttttgattattctaatcaggaaattttagctaaatttccttcaaccataaaaattgaactagcaaaagaaacgaaattatattttgatttaactcaaacatcattatttgatgctcaaactgaggagagaatataa

SEQ ID NO: 270202 - DNA, 352 bp, Unknown
  Bacterial polypeptide expressing nucleotide sequence isolated from the Sargasso Sea
caaattgctgaccaagctcacaaatttcctggccaattatctggaggacaacaacaaagatgtgcaattgcaagagctttatgtatggagcctaaaataatgctttttgatgaacctacttctgccttggatccagaaatgattaaagaagttttagaggctatggtaaatttagccaaggcaggtatgactatgattgttgttacacacgaaatgggctttgcaaaagaagttgcagatgaagtaatctttatggatgaaggaatgatagttgaaaaagcagcaacaaatgaattttttgctaatccaaaaagtgatagaactaagctatttttaagccagatactctaaa

SEQ ID NO: 270203 - DNA, 452 bp, Unknown
  Bacterial polypeptide expressing nucleotide sequence isolated from the Sargasso Sea
cattcgggacaatctactctggggccatgattccttagacgatacggccctcatgcatgcctgcagacaagctcatatcgatttctttatcaactctctcccccaaggcctagatacgctaataggcgacaggggcattaaactttcaggaggccaacgccaacgcgtagcacttgcacgcaccctcttgcgtaaacctcaattacttattttagatgaagctacttcagccttagatgctgaatcggagcatgccattcaacaaagcattaacgagctcaaaggcaagttgaccttgcttgtgatttcgcatcgcttatctacggttaaaatggcaaatcgaattgttgtaatggataatggggcgattattcaggaagggacttgggataaacttagtcaggatgaggggctgtttcagcgctttaagggcttgcagattgtgggatgag

SEQ ID NO: 270204 - DNA, 622 bp, Unknown
  Bacterial polypeptide expressing nucleotide sequence isolated from the Sargasso Sea
acttctttaattcttgcacttttaaaattaatttcttttatgggaaagattctatttaatgatttagatatatcaaaattaaaaagcaaagatctcattaaaattagaaaagatatgcaaattatttttcaagatccatttagttctttaagtccaagaatgacagtagaagaaatagtaagagagggtctagatattcatatgaaaaaagttccaattaaagaaaaacagcaaatgataatagatatattaaatgaagttggattaaattatactgatgttagaaatcgttttcctcatgagttttctgggggacaaagacaaagaatagctatagcaagagcaataattctaaaacctaaacttttaatattagatgaacctacttcagcgctagatgttagtatacaaaatcaaattattaaacttttaattaaattgcaaaaaaaatatgaattaagctacatatttataagtcatgatataaaagttattcgttcagtatctgattatataattgtgcttaaaaaaggtgaaattgtagaagaaggatctgctgaagaagtttttagtttgccaaaaagtaactatacaaaagaattattaactgctgtaatttaat

SEQ ID NO: 270205 - DNA, 451 bp, Unknown
  Bacterial polypeptide expressing nucleotide sequence isolated from the Sargasso Sea
ccaattaaatttttttcaaaaaaatattatcaataatgatcttttacaaaatgtttatgacctaatagatattgtgggaatgaccagacaatctctagatcgatacccgcacgaattctcaggagggcaaaggcagagaatatctattgctcgtgccttggcaacaagaccaagattattaatatgtgatgaaccaacttctgcattagacgtaagtatacaagctcaaatattgaatttattaaaagatatacaagatgaacttcatctcactatgctatttattagccatgatcttcctgtaattcgccaaatgtgtaaccgaataattgtactaaaaaatggtgctgtttgtgaaacaaaagatacagaggaattgtttaataatcctgagcatgaatatacgaaggaattaattagacttatgcctaaaattgaatcaattatttaa

SEQ ID NO: 270206 - DNA, 899 bp, Unknown
  Bacterial polypeptide expressing nucleotide sequence isolated from the Sargasso Sea
gctgaaactacaaataaagttattgtcatgcgtcatggattaattgtggagcaaggtaataccaaggatttactaactaacccaaaatcttcagaagcacgaagtttagttatatcagttccaccaacaaataaaaaaattaaaagatttaaacttatcagtcctgatggttcagaaataacatcaagctcagctaatttaacaaaaaatattattaaaacttggggggtaagaaaaaatactaatcaaaaattactagagttaaaagaaataacaaagatttttgatgatcagtctatctcttatagaaaaaaaataaatgaaaatacagttaaggcagtaaaaaatgtttcatttaagttatttgaaggagaaactcttggtttagttggagagtcaggttctggtaaatcaacaatagccaaaatcattactgggctagttaggccatcatttggtgagctggagtataatggtttatcactttataatttaagaagaaagtatcaaattgacaagattaggggtcaaattcaaatgatttttcaagacccatattcatctttaaatccaagatttaaagtaaaggatattattgctgaaccaattaaattttttcaaaaaagtattacaagaaaagacttggagcaaaatataaatgatttaattgatattgttggaatgactagaaaatcactagatcgataccctcatgaattctctggaggtcagagacaaagaatttctattgctagagcacttgctacaaggccaagattattagtttgtgatgagcctacatcagctttagatgtaagtattcaggcacaaatattaaatttattaaaagatattcaagatgaactgcatctgacaatgctatttattagtcatgatct

SEQ ID NO: 270207 - DNA, 553 bp, Unknown
  Bacterial polypeptide expressing nucleotide sequence isolated from the Sargasso Sea
aatgggggtaaatcttaaagatatttgtttgagagatctgcgctctctcatttcggttgtacgtcaagatggaatgatgtttgatgaaacgatacttgaaaatattagatttggaaagccaaccgcttctgatgtagaaattagaaaggcagctaaaatggcttatgtggacgaattcagtaatggattaaaagatggcttaagcacagtagtaggtccaagaggatcaactctatcaggggggcaacgccagcggatatctatagctcgcgcctttttgaggaatagtcctcttcttctcttagacgaaccaacctcggcattagacagcaagtcggagaggttgatacaaaaatcgttaagtaatctatcaatgttctccaccacgataacaatagctcacaggttatctactatagtcgaaagtgacaaagtactgattttggacgagggtaaaatagttggtgaaggtacgcatgataagttattgcaagagaacactctatattttaatttgtttaaatcacaagtagaaaataaaaataatgaataa

SEQ ID NO: 270208 - DNA, 979 bp, Unknown
  Bacterial polypeptide expressing nucleotide sequence isolated from the Sargasso Sea
acacgtcgtaaagactctcaatctggaaatgaaagacaaagagtttatgttttttgtggccccttcaggctgtgggaagtcaacgacgttgcgcatgatcgccggtctggaggagatcagcggtggcgatctgctgattgacggtaaacggatgaacgatgtgccggcgaaatcgcgcaacattgcgatggtctttcagaactacgcgttgtacccgcacatgacagtctatgacaacatggcgtttggcctgaaaatgcagaaaattgcccctgccgtgattgaggaacgtgtcaactgggcggcgcaaatccttggcctgcgcgattatctgcaacgtaaaccgggtgcgttatccggtggtcagcgtcaacgtgtggcactggggcgtgcgattgttcgtgaggcaggggtcttcctgatggatgaacccttatcgaatctcgatgccaaacttcgcgtacagatgcgggcagaaataagcaagctgcatcagaaactcaataccaccatgatatatgttacccacgatcaaacagaagccatgacgatggcgacgcgtattgtgattatgaaggatggtattgttcagcaggttggtgcgccaaaaacagtttataaccacccagcaaatatgtttgtcgcaggatttattggctcaccggccatgaactttattcgtggcgcgattgacggtgataagtttgttactgaaacactaaaattaacgattccagaaaataaattagcacaattaaaaacgcagggttatgaacatcaggcgatcacgctgggtattcgccctgaggatatccatccgcagcttaataatgaaaatagtgtatcagcaaaaattagcgttgcagaactcactggcgctgaatttatgctttataccattgttggggggcatgagttggtggtccgtgccggtgcagtgaatgattatcacgcaggagaaaatatcactattcatttg

SEQ ID NO: 270209 - DNA, 463 bp, Unknown
  Bacterial polypeptide expressing nucleotide sequence isolated from the Sargasso Sea
ttcccacgtaagtgtcttagaaaatatcatgttagcgccgacaaaaattttaaaacgcagtagatcaaaagtagagcaagaggcgttagctcttttagaaaaagtgggtcttccggataaacgaaatgcataccctaggcagttatcaggcggtcagcagcaaagaatcgcaattgccagagcattagccatgaaacccaaattaatgctttttgatgaaccgacttctgctcttgatccggagatgatttctgaggttctggacgtgatggtagatttgtcaaaagctggcatgactatgattgtcgttacgcatgaaatgggatttgctagggcggcagctgatcgagtgatccttatgcataatgccagtatagtagaggatgcagcacccaaagaattttttgaaaatccaaaaagtgaacatacgcaattatttctttcaaaaattttacaacattaa

SEQ ID NO: 270210 - DNA, 388 bp, Unknown
  Bacterial polypeptide expressing nucleotide sequence isolated from the Sargasso Sea
tattcctaaagaagaaatagatacaaaaaaaattaaattatgtgcaaaaatggcgcaattgtcagagacaattgagtcatgggatatgaaatatgatactgttgttggcgaaaggggcgtaagaatatctggaggtcaaaggcaaagaattgcaatagctagagctttatataagaatgcagatgttatggtttttgatgaagccacgagcgcccttgataatgataccgaaagggcagtaatggattcaattgagagtctaaatccaaatataaccataataattgttgctcacagaacctcaaccttacaaaattgtaatgaaattattgagttgaaagatggtaaaattagaaaaaaaggcacttacgaagatatatttaagtaa

SEQ ID NO: 270211 - DNA, 505 bp, Unknown
  Bacterial polypeptide expressing nucleotide sequence isolated from the Sargasso Sea
atgagtgctcttcttaaattaaaaaaaataaatctcaaataccaaactggtaaagataatatcagtgttttaaagaatattgatttaaatattaagaaaaaagaaactgtatcagtagttggagaaagtggctcaggtaaaacaagtttaataatgttaattggaggcttagaaaaaccgacctctggtaaaataatttttaatgatcaagaaataacaaacctcagtgaagacgaagtatctgaggtaagaaagaaaaatattggaataatatttcagtcgttttatttaattcctaattacacagcagttgaaaatgttgctttaacgcttgaacttaataattttaaaaatccagaaaaagaggctaaaattttattagatcgttttggtttgaaacatcgttttaataatttgccaagtcagttgtcaggtggtgaacaacaaagggttgctatcgctagggcaattgcgatgaagcccgcaattaatcttagcagatgaa

SEQ ID NO: 270212 - DNA, 739 bp, Unknown
  Bacterial polypeptide expressing nucleotide sequence isolated from the Sargasso Sea
atgaaaaatttaattaaagttaaaaatataaaaaaaaactacggaaaaaaagaagcagtaaaaggtattacatttaatgttgaagaaaatgaaattctaggattgttaggtccaaatggatctggaaaaacaacaactattggaatgttacttgggttgctaaaacctacaagtggacaaatatttatcaataatctcaaacttgaagaaaatagggtcgaaattttagagatgattaattttatatcaccttatattgaattaccaaaaaaattaactgtaaagcaaaatctatatgtttattcaaaactttataaagttcagaatattaaggagagaattgagtatctatcagaaaaattaagaattggagaattattaaacagtattactggggaactatcctcaggccaaaaaaacagggtaagtttggcaaaagcattaataaacgagccaaaagtattattacttgatgaaccaacggcatcattagatccagaagttggtgattttgtaagaacgtttttagaggaatacaaaaaagaaaaaagaatctctatacttttagcatctcataatatgaatgaggttacacgtttatgcaaatcagttcttatgatgaaaaatggagaaattatagatcaaggcaaaccaaacgatttaattgctaagcatgggagagcaaatttagaagaagtttttttaaaattgtcaaggagcaagagtgagtttaattaga

SEQ ID NO: 270213 - DNA, 580 bp, Unknown
  Bacterial polypeptide expressing nucleotide sequence isolated from the Sargasso Sea
ggtttgtataacaaaaattaaaagtaataaggaaatgatgaaatttagaaaacaaattcaaatgatatttcaggatccatattcttcattaaatggtagattaaaagttaaagatatagtttcagaacctataaaacttcataatccatcaattagttcaagagatatagatgattacatttacgatttattagagtccgtagagttaacacagcaatccgcagaacgatacccacatgaattttctggaggacaaaggcaaagaatatctatagcaagagctttagctacacagccaagattgttagtttgtgatgaaccaacttctgcgttagatgtaagtattcaagcccaaatattaaatttattaaaagatttgcaagaacaattaaatttaacaatcttatttattagtcacgacttacccgtaataaggcaaatgtgtgataaaatagcagttctaaaaaatggtcaattatgcgaggttacaaatactgaagatttatttatgaaaccttcacatgattatactaaagaattgcttagattaatgccaaaaatagagtcaatttataactaa

SEQ ID NO: 270214 - DNA, 868 bp, Unknown
  Bacterial polypeptide expressing nucleotide sequence isolated from the Sargasso Sea
attgcttcccattccggtcgaagcagcattacttttaaaagcatgcaattggttgcaagcgacacaaagacgctaatgggcgtaagaggaaataggatttcgatgatatttcaggaacctatgacctctcttaatccactacatgttatagaaaaacaaatttcagaaacactagccctgcacagtggattaaccgggcgagaagcgagaaacaagtgtatagagcttttagaaatggttggccttcaaaagccagaaacaagattgcaagcttacccgcatcaattgtccggcggtcaacggcaacgagtgatgatagcagcagcccttgcaaataaaccagatcttctcatagccgacgagcctactacagcactggatgtaaccgttcaggcacaaatccttgagttgttgaaggatttaaaaaaagaacttgggatggctttactattgatcacacacgacttgggcgttgtaaaaaaggttgctgacaaagtttgtgtgatgagtaaaggtgaaataatcgaagccaaaccagttgaaaaactatttgccaatccagaacacccctacacacaaaagcttataggttcagagccgagtgggacgccaaatgccttgccggatggcgcgggaaaaattttagaagttgaaaatttgaaggtatggtttcccattcaaaagggagttcttaaacgcacaattgggcatattaaggcggtagatggaataagtttttctataaagtctggcgaaactttgggtgttgtgggcgagagcggatgcgggaaaacaacgcttggactggctgctctgagattacagccaagtgaggggagaatagctttcattggtagtcccaataaac

SEQ ID NO: 270215 - DNA, 451 bp, Unknown
  Bacterial polypeptide expressing nucleotide sequence isolated from the Sargasso Sea
aatgagttttttagatttaaaaaatgtgactaagatttacccaaacggaactaaggctgttcatgagacctcattaagtattaatgaaggagaatttatggtttttgtaggacctagcggatgtggaaaatcaactttattaagaatggtcgcaggtttagaggatattactgagggtgatattaatcttgatggaaaattaatgaatgaagttgatccatctgaaagagatgtagcaatggtgtttcagaactatgcattatacccacacatgaatgtttataataatttagcctatggtctaaaaaatagaggaattgataaagaaacaatcgagcaaaaagtaaatgatgcagctaagttgctacaaatttcagattatttacagagaaaaccttcaatgttatctggaggtcaaaggcaaagagttgctatgggaagagcattgtga

SEQ ID NO: 270216 - DNA, 714 bp, Unknown
  Bacterial polypeptide expressing nucleotide sequence isolated from the Sargasso Sea
ataattttaactgtaaaattaaaaaaggtaaatttacaagtattattggtccttcaggtacagggaaaacaaccttgttaaagttaatagctgggttagttgaacccgaaacaggagaaattaaatttgataataagttactaaatgatgtaattaatcagataacactaatccaacaaaatccgtcattaatgccttggttaaacgtttatgataatattacattagccaaattaagtaacaaaaaaataaactatataaatgtagataaattaataaaagatataggtttagaagaattttcttcatactttcctcataaattgtcaggtggattattacaaagagttgcaattgcaagggcattaatcttttatcctagtttattattattagatgagccatttgcagctttagataacctaagtagagaaattatttcaactgagcttgtttcaataattaaacaaaaatcactaactgttttaatggttacacactctattgaagaagcagctttgttaagtgatgaagttttggtaactggtatagcacctataagagtaattaaaaaatttatacctcccaaaagtgtaaataatcaaacttggcaaaaattaggtcttagaaaatcattgcaagacaaatcttttaacggatatttaaaatcaataagagatacttcatatttacttttggaaaaggaaaaataag

SEQ ID NO: 270217 - DNA, 694 bp, Unknown
  Bacterial polypeptide expressing nucleotide sequence isolated from the Sargasso Sea
atgagtgaaagtttactagaagtaaaaaatctatgcaaaaggtttcctattaagggtggtttactagggaaagaaattggcgcggtaaatgctgttaataatatttctttttctataaaaaaaggcgaaacattaggccttgtgggtgaatcaggttgtggaaaaacgactcttggaagaagtatattacgactaattgagcctacctctggtgaagtaaggtttaatggcaagaatattttagattttaataaaaatgagatgagagcgatgagaagaaaaatgcaaatcatttttcaagatccctatgcttcgcttaaccctagaatgacgattggttctattcttgaagaacctcttattattcacgatcttttttcgacaaaggaagagagagtgaaaaggctccatgagcttttggattatgtacaattaccaaaagatgctttaaataaataccctcatgagttttcaggaggtcagagacagagagtttgtatagcgagggcattggccgttgagcctgagtttattgtttgcgatgagccagtatctgcacttgatgtttccgtccaggcacaggtcgtgaatcttttaatggaccttcaaaaagaactaagtttgacatacttatttattgcacatgacttaaaagtcgtagaatacatatcaaacccgggtcgcccgttatgta

SEQ ID NO: 270218 - DNA, 394 bp, Unknown
  Bacterial polypeptide expressing nucleotide sequence isolated from the Sargasso Sea
atgaatcaggaaatcaccgcatcccctattgggtcccgtccaaatgagtcagattccaaaattatttcaattaaaagcatgcataaatggttcggtgactttcacgttctgaaagacattaacctggaagtcgccaagtcagaaaaaatcgttatctgcgggccgtcaggctcagggaaatccacgctgattcgatgcattaaccggctcgaggagcatcaacagggctccatcactgttgatggcactgaactgacccaggacctcaaaaatattgagatcatccggtctgaagtgggcatggtcttccagcagttcaacctcttcccccaccttagtgttctcgataacgtcagccttgcgccgatttgggtacgcaaacttcctcgggcag

SEQ ID NO: 270219 - DNA, 496 bp, Unknown
  Bacterial polypeptide expressing nucleotide sequence isolated from the Sargasso Sea
atggtatttcaacaatttaatttattcccacacatgacagctttacaaaattgtatagaagcacctgttgaagtattgggtatgaaaaaagaagaggcagaagaaagagcattagagttattagaactagttggtttaactgataaaaaagatcaacacccaagtaggctctcaggaggacaacaacaaagagttgcaatagcaagagcgctagctatgagacccaaagttatgcttttggatgagataacatctgctttagacccagaagttgttggagaagtgttaaatgttattagatctttaaataaagaacataatttaactatgatcatggttacccatcaaatgggatttgctagagaaatttctgatagagtttgtttttttaatgaaggaaaaatttttgaacaaggaccaccagaaaaattatttggcaatcctcaaaatgagagaaccaaacaatttttacatgctgttcttgacgctaattaat

SEQ ID NO: 270220 - DNA, 860 bp, Unknown
  Bacterial polypeptide expressing nucleotide sequence isolated from the Sargasso Sea
ctcttcgggggatattatttttgatgatgttacgattacaaagttacctgagaataaactggagaatattagaggcaatgagatttcaatgatttttcaggaacctatgacatcattgaaccccctatttacggtcggagatcaagtatctgaagtcatcaaaagacataagggtttgaacaaagataaatcatgggctaaagcagtagaattattagatgccgtaaaaatagctaatccagaaaaaagggcttttgattatccattccaattgtctggaggtcaaaggcagagggtaatgatagccgtagcgttggcctgtcagccaaaaattttaatagccgatgaacctactactgccttggatgtaaccattcaggcggagatattagcattgatcaatatgttgaaagaagaaacaggtaccgctgtgatgtttatcacccatgatatggccgttgtagcgcagatggcagatagagtggtagtgatgtatccaggtaaaaaagttgaagagggtacggttcatgagatcttcagcaatcctaaacatgactacaccaaatccttattagcggctgttccgaagcttggggaaatggcgagtaagaagtatccggaacccatgaagcttgtaggagaaggaagctctaaaaaaccacagcccattgttggaactgaacagcccctattaaaagttaataatctagtaacacactaccctgtaaaaggaggggtgtttagaagaactgttgcccgtgttcatgctgtagaagatgtatcttttacaatcatgaagggtaaaaccttatcgcttgttggagaatcaagatgtggtaagtcaacagttggccgatcgt

SEQ ID NO: 270221 - DNA, 666 bp, Unknown
  Bacterial polypeptide expressing nucleotide sequence isolated from the Sargasso Sea
ttggtcctaatggtgctggaaaatcatctatgctcaatgtcataaatggattttatcatcctcaagagggggaagtttggtttcgaggtaaaaaaaggggatcaatgaaaccctatcaaatagctcaccaaggtattgcaagaacttttcaaaatattgctcttttcaaagggatgacagcgttagacaacatcatgacgggtagatttactcacatgaaaaagggtattttttctcaaatgatttgggaaggtggagcttcaagagaagaatatgaaaatagagaagtggtagaaaaagttattgatttcttagaaatacagcatattcggaaaacacctgtgggtgcattaccctatggtcttcaaaaaagggttgaattaggcagagcattagctgcagaaccagaattacttctacttgatgaacctatggctggtatgaatgtagaagagaaagaagatatgagtagatacattttggatgttaatagtgaattcgagactacagttgctctaatagagcatgatatgggggtagtaatggatatatcagacagagttgtagttatggactatgggaaaaaaattggtgatggtactcccgatgaagttcgtaataaccaagctgtaattgacgcctatttaggtgtttcagagcattagg

SEQ ID NO: 270222 - DNA, 520 bp, Unknown
  Bacterial polypeptide expressing nucleotide sequence isolated from the Sargasso Sea
atgatacttgatatcaaagaccttcatcattcttttggcgaagtaaatgctattaataaattaagtttttctatgaaacaaaattcaatagtttctattttaggtccttctggttgtggaaaaactactttaattcgtttaatagccggtttggaagaagttcaaacaggagaaatattcttcgaagataaaatggttgcaaatgtaaaatttaatacaccacctgaagagcgatcaatatcctatgtatttcaagactttgcattatttcctcacatgactgttagagaaaatatcagttttgctgctagttctaaaataaataaaaaacaattagtagaccaagtaatacacttgtcaaaagttgagagtttccttgataaatatccacatactcttagcggtggagaacagcaaagagtggcattagcaagatcaatagcagttcaaccaaaactattacttttagatgaacctttctcagatttagatacaaacttaaaacgtgaaattatagatg

SEQ ID NO: 270223 - DNA, 415 bp, Unknown
  Bacterial polypeptide expressing nucleotide sequence isolated from the Sargasso Sea
atagatagttatatatatgatttattagaatctgttgaattaactcaacaatcagcagaacgttatccacatgaattttctggaggtcaaagacaaagaatttcaatagcaagagctcttgcaactcaaccaagacttcttgtttgtgatgaaccaacttctgctctagatgtaagtattcaagcacaaatattaaatttattaaaagatttacaagaacaattaaatttaacaatcttattcattagtcatgatttgccagttgtaagacaaatgtgtgatcgaatagctgttttaaaaaatggaaaactttgtgagatatcaaaaactgaagagttatttaaaaacccatcacatgaatacacaaaagaactacttacgttaatgccaaaaattgaatcaatttataactaat

SEQ ID NO: 270224 - DNA, 970 bp, Unknown
  Bacterial polypeptide expressing nucleotide sequence isolated from the Sargasso Sea
gcagatgctaactcttcaaataaagttcagaatcttaaacttgaagcaacaaataatcttgctacaccaataatccaatttttagtttctatatccctttccctagtcgcatattttgcattaggttcttcattaggaataacgcttgatgcagaaactttcgtagcattttttacagcagcagggttgatggcaaaacctataagacagttatcaagcattaatggtgttatacaaaaaggtttagctgctgcaaatgagatatttgatcaattagattttgatgacgaagttaatactggagatacaacaaaacctatcgaaggtgttatagagtttaaggatgtttcttttggatatacaggagataaaaatatattaaataatataaatttaactgttaataagcatgaaacaatagcatttgttggtaaatcgggatcgggaaaatctacattagctaatcttatttctagattttattcggattatactggacagatattaatagatggaattccaaacaatgaatatgatttaagttttcttagaaaatccatatcaattgttactcaatcaccaacactatttaacgacactatagaaagaaatatagcctatggtgaagacgaatttgatactgagagagtaatggagtctgccagattagctggatgtttagattttataaataaattaccagaaggcataaattcagaaataggtgatgatggtgtactactgtcaggcggtcaaagacaaaggcttgcaatagcaagagctttttataaaaattctccaattattatactggatgaggccacgtctgctcttgatactgaatcggaagaattagtgcaagagtcacttgaaaaaataatatctgatagaaccacgatagttatagctcatagattatcaaccattgaaaatgctgatcaaatagtagtactggataatggtcttatat

SEQ ID NO: 270225 - DNA, 546 bp, Unknown
  Bacterial polypeptide expressing nucleotide sequence isolated from the Sargasso Sea
aatgaatcaaatacatggtgaatcagtaacattccaaaatgtagaaaaatactatggcaacactgctgctgttaaagattttaatttagaaattaaaaatagtgaatttttaacattgcttggaccaagtgggtcaggaaaaacaacagttttaaatatgatagctggcttcattaaacaaacttctggatcaattttaattggcaaaaattcaattgaaaatcttccaactgaaaaaagaaatgttggtatggtatttcaaagctactcattatttcctcatatgaatatatttgataatgttgcctttcctctcaaaatgagaaatgaaaataaaaaaataataaatgaaaaagttagatatgcattaaatttggttaatttagatggtgttgaaaaaagaatgccaaatgaattatcaggaggtcaaagacaacgaatagcttttgcgagagctattgtatttaaaccaaaagttctactaatggatgaacccttgggtgctcttgatttaaaattacgagaaaaaatgcaaattgaaattaa

SEQ ID NO: 270226 - DNA, 697 bp, Unknown
  Bacterial polypeptide expressing nucleotide sequence isolated from the Sargasso Sea
aataaaagagggagagtcttttggcctagtaggagaaagtgggagtggaaaatctacaattgctaaaatgattgtaaatttatttaaacctacttctggagacatattctttgacgacgtatgtattacaaaaataaaacagaaactagaattaatgaaatttagaaagcaaattcaaatgatatttcaagatccttattcctcattaaatgggagattaaaagtaaaagatataattgcagaaccaataacacttcacaatccatctatatctaatttagatttaaataattatatttacgatttactggagtctgtagaattaactcaaaaatctgcagatcgatatccacatgaattttcaggcgggcagagacaaagaatatcaattgcaagagcacttgctacacaaccaagacttttagtttgtgacgaacctacttcagctctagatgtcagtattcaagcccaaatattaaacttgctaaaagatcttcaagaacaattaaatttaacaattttgtttataagtcatgacctacctgttgttagacaaatgtgtgatagaattggagtcttaaaagatggcaaattatgtgaagtttcaaacacagaggatttatttttaaaaccaactcatgaatacacaaaggaactattgcacttaatgcctaaaattgagtctatttataattaa

SEQ ID NO: 270227 - DNA, 598 bp, Unknown
  Bacterial polypeptide expressing nucleotide sequence isolated from the Sargasso Sea
tgaattaataacttcatcaggaaaaattgaattcgataaaattgatttaaatttaataaaaaaaaataaacttaaaagtattagaaaaaatattcaaattgtttttcaagacccttactcttcattaagtcctagaatgaatgttgaggaaatattgaatgaaggaatagatgtccactttccaaaatgccctgtaagtgaaaggaaacaaattttaaaagatattttaaaagaaacaggcatgaactatgaaagagattataataaatatcctcatgaattttcagggggacaaagacaaagaattgcaattgcaagagctttgattttaaaacctaaaattcttattttggatgagcccacttcagcattagacattactatacaaaaccaaatattagatttacttcaaaacttacaggaaaaatattctcttagctacatattcataagtcatgatatgaatgttatccgatcagtatcagacaaaatattggttttaaaaaaaggaaaactaattgaatataatagtgctgaaaaagtttttaataagccaaaagatgaatatacaaaaaagctaattagttcagtggtttaa

SEQ ID NO: 270228 - DNA, 493 bp, Unknown
  Bacterial polypeptide expressing nucleotide sequence isolated from the Sargasso Sea
atgtcaaaaaatttagaatttgttaaatttgataaggtagataaaagttacgacggaaaagtattagtcgttaaggatctaaaccttgatattgccgaaggagaatttattacaatgcttgggccatctggttcaggtaaaacaacttgcttaatgatgttggcaggatttgaaactccaactaatggagaaatatatttagacaaaaaccctatttcaaatattccaccgcataaaagaggaatcggaatggtgtttcaaaactatgcactgtttcctcatatgacagtttacgaaaacttagcttttccattaagagttagaaaattttcaaaagatgacattgataaaaaagttaataaagctttatcaatggtttctttatcaggatttgaaaatagaatgcccggacaattatctggaggacaacaacaaagagtagctgttgcgagagctctagtttttgatccaccaagtagttttaatggatgag

SEQ ID NO: 270229 - DNA, 496 bp, Unknown
  Bacterial polypeptide expressing nucleotide sequence isolated from the Sargasso Sea
atgctggctccaataattcaaattaaagatgtaaataaatggttcggtgattttcaagttttaaaaaatattaacctagaagtagaaaaaaataaaaaaattgttgtttgcggaccttcgggatcaggaaagtcaactttaataagatgcataaatagacttgaagaacaccaagagggtaaaataatagtagatggaaatgaattggatgaaaatacaaaaaatattgaacaaattagagctgaagttggaatggtatttcaacaatttaatttatttccacatttatcaatactagataattgcactttggcgcctatttgggttaaacagatgccaaaaaaagatgctgaaacattagctatgcagcacctagaaaaagtacaaatttcagaccaagctttaaaatatccgggtcaactatcgggaggacaacaacaaagatgtgcaattgcaagagctctttgtatggagccaaaaaataataatttttgac

SEQ ID NO: 270230 - DNA, 672 bp, Unknown
  Bacterial polypeptide expressing nucleotide sequence isolated from the Sargasso Sea
gagaatccggatgcggcaagtcaacgacctcaagcataataacgcggctcatggatccaacttcgggcgacgtgatatttgatggccaaaacattacgacatatccggccgacacattcgcgcaaagacctgagcgccagaaaatacagatggtctttcaagacccgacggaatgtttaaatcctcgatactcagcacacaattgtatcgccgaaccactgaaacggttactcggacttcgcgataaatcggaacttcgttcgaagatcgaaaccttagccgaacgagttggtcttcctatcgggctcttggacaggtttcctcatcaattgtctggaggacagaaagcaagggttggaattgccagggctattgccgtagacccacttttgttggttctcgacgaacccacctcggcgctagacgtatccgtacaagcgctcgttctgcgacttctcgatcggctgaagcgcgaatctggaatgagttacatcttcgtttcgcacgatctaaacgtcatccgattgctctgcgaaagggtaatcgtgatgaacagaggccggatcgtcgagagcggactggccgaagacgtattaaggtgcccgaccaagccgtacacacgacgcttgatcgaagcgataccacaattcgaggtttttgcctcgcattagt

SEQ ID NO: 270231 - DNA, 577 bp, Unknown
  Bacterial polypeptide expressing nucleotide sequence isolated from the Sargasso Sea
atggttcagccattaattgaattaaagagtattaagaaagcattccagaaaaaaaggaaaacggaactgttggttttggatgacgttaatttttctataaaaaaaagagaaatagtggcgttgttgggcaaatccggttcggggaaatcaacgttgttgcgaattatttccgggttgataaagccaagtggaggcgaggtgttgtatcacggtgagtgtgttgaaaagcctgtgcagggcttgagtatggtgtttcaacattttgccttgttaccctggttgacggtattgcaaaacgtggagttggggttggaagctcaaagagttcccgcgagtgagcgtcgtgaaagggcattacaagcgattgatgttgttggattggatgggtttgaatctgcatacccaaaagaattatccggtgggatgtctcagcgtgttgggattgcgcgagcattggtggtggatcctgaaatattgttaatggatgagccattctctgcgttggatgtgttgactgcggaaaacttaagaggtgatttattggatatttggggggctgaaaagacgaatattcaag

SEQ ID NO: 270232 - DNA, 862 bp, Unknown
  Bacterial polypeptide expressing nucleotide sequence isolated from the Sargasso Sea
tttgtacgggcaaaaaaaaataacaattaaaaactcaatattgcttgtttttccaagagtatttttagaatttttttttatttttgtaatttctttagctgcaatattttatatcttaaaaggcaatcaattagtcgacttgtttaatattttagttgtatatacagtaattgcatccaggttatttccggcagtctcgaggatagcttcaggtttccaaatgattacaacaggcaaggcttctgttaatgtattattcaatgaaaaaaaaatatttcaaaatgtaccagataatagaaataaacagaaaatttcttttgaaagcaatatacaatttaaaaatttagatctatcgatatttgatgagaaaaccaaaataaataaaatcattttaaaagatgtttcttttgaaattaataaaaatcaatttataggattagttggtaagactggggttggaaagacaactttaattaattatttatcaggatttcttgatgcagatcaatcaaatatatttattgatggaaaaagaattttaagttcaaaaactttaaatttttcaaattttggtgtagttacacaagaaccgctaatttttgatggaacaataaaagaaaatctttattttcaagaaaatccaaaaattgatgaaaaaaaattaaaaaaagcaattcaagcatcagatttagaaacttttattgatcaatccaaacttggacttgaaacattaattaatgaaaaaggtacaaatatttctggaggacaattacagcgtatttgtatcgcaagagcgttaatatttgaaccgaaaatattaattttggatgaagcaacatctgcattagatcttcaaacagaa

SEQ ID NO: 270233 - DNA, 655 bp, Unknown
  Bacterial polypeptide expressing nucleotide sequence isolated from the Sargasso Sea
ggagcctccggctgcggcaagagcaccctctgccgggccttgatgggtctcaacaccattcgcggcggccgcgtggacctgttgggccagaacctgctcagcctcaagggtgaaccgttgcgccaggcccgccgagccctgcagatggtgtttcaggacccactggcctgtctcaatccggccctgaacgtggcggaggccattgccgaccccttactcattcatggcctgtgcagtaaggctgccgcccgccagcgggcacgggagctgatggagcgggttggcctcaacccagctgaacagttccaggatcgtcttccccgccaactctccggcgggcaacaacagcgggtggccattgcccgggccttggcgctgcagccgaaggtgctgatctgcgacgaaagcgtcagcatgctggatgctgaggtgcaggccgaggtgctggcgctgctgcgggagctgcagcatgagctggggctggcgatgattttcgtgacgcacgacctctcagtggccagcgggttctgtcatcgcgtgatcgtgttggacaagggggagatcgtggaggaaggaccgggtgagcggatcttccaggcccctcaggccgccatcagccgcacgctggtggatgcatgtccgcgcttgccttgag

SEQ ID NO: 270234 - DNA, 830 bp, Unknown
  Bacterial polypeptide expressing nucleotide sequence isolated from the Sargasso Sea
tcctcatttattttttatgcgtttttagtggcgagttcgactggctttttatccgagcttgcaggggatttgcagcgggccgccggtgccgccgagcgtattgcgcaggtgctcgcaacaaccgatataatgccgcaaacaacaacgccgcggcgatttgatctgcataatccggtcgcatgccattttgaaaatgtgaattttgcctatccatcagcgcggcaccggccggctgttgctgatctggattttaccattgcggctggtgaacgcgtcgccattgtggggccgagtggtgccggtaaatcgacattatttcatctgttgttgcggttttatgacccgttgactggccgcatatcaattgcgggtgcggatctgcgtgatgtggcgattgatgaactgcgtgaccatatcggtctggttccacaggacgcggcattattttcatcaacagtgcgagaaaatattgcctttgggcggcctgacgccaccgaggcaatgattattgatgcggcgcaaaaagcgcaggcagatgaattcatttcagcacttgatggcgcctatacggcgttggtcggtgaaaaaggcgtgcggctgtccggcgggcagcgtcaacgcattgccattgcccgggcgattttacggaatccgcggctgttactgcttgacgaggcgaccagcgcacttgatgcgcaatccgaagcggccgttcaacatgcgcttgaaaatctgatgaaaaaccgtaccagtctggtgatcgcgcatcgtctggcaacggtcgtacaagcagaccgcattttgttgatggatcgggggcgcattcaggc

SEQ ID NO: 270235 - DNA, 859 bp, Unknown
  Bacterial polypeptide expressing nucleotide sequence isolated from the Sargasso Sea
tttgaataagaataacttagtgaaaaatgatgcgttaataattgatgatttgcatcataaatatgataagcgagaatgttcaaattggatattaaacgaaattaacctgaaaattgaaaatggcgaattgttagggttgcttggcccttctggttgcggaaaaactactcttttaagattaatcgcggggttcgaatatccttctatagggaggatttctctaaatgataaggaaatttcaagtaggcaaaaaattcttagtcctgagaaaagaaatattggtatggtttttcaagactatgcacttttccctcacttaactgttttggaaaatgtaatttttggtttaaaaaacaaaaaagacagatctagagttaattatttattgaatgttgttggtcttgatagttttgttgaaaggtacccacatgaactgtctggaggtcaaaaacaaagactcgcaattgcgagagctcttgctccaggtacaaattttattttattagatgaacctttttgtagtcttgatatgcatgtcaaactaaaattgagaagtgaactccctaatatcctaaaaggttgcaatgcaagcggattgatggttactcatgatccggaagaagcgatgtcaatttgcgataaggtcgccgttatgaataatgggaaaatacatcaaattgatacaccaataaacctcctaaataatcccaagaccatatttgttagtagttttattttgggtaataatattattaatctcaaaaaaaatggtaattcatatatttcttgtttaggtgaaataaatagttcaggggttttacaaaattcaaatattaaaagtatgtcaatttctccctaa

SEQ ID NO: 270236 - DNA, 859 bp, Unknown
  Bacterial polypeptide expressing nucleotide sequence isolated from the Sargasso Sea
ggtaggctttgtcgggccaagcggcgcgggcaagtcgtcgatcgtgcgtctgctgctgcgtttttatgatcccgattcgggcacggtaaagatcgggggtcacgatcttaaagacctgcgccttgaagatatccgcggccagatcgcggtcgtcaatcaggacacttatctttttcatggcacggtcgcggataaccttcgggtcggcaagcccgatgccacggccgaagaactcgaagccgcctgccgggcggccaacgcccatgagtttgtctcgctgctgccccaggggtatgacaccgtaatcggcgagcggggcatccgactttcgggcgggcagcgccagcgggtggcgatcgcccgggcgatcttgagagacgcacccatcctaattctggatgaagcactctcggcagtggatgccgagaacgaatcgatcatccaggacgcgctcgatcggttgatgcgcgggcgcaccacgctgatctttgcgcatcggctttcgagtgttatcgacgcggatcgcattctggtgctgaacgaggggggtattgccgaagagggcacccacgctgaactcatgtcgagccacggtgtctatcaccagctgatggcggcgcaggcggaagaaagcgcgggtggggcagtcgaagtcgatcccgagcgggtacgcaaggccgaaaagatgccgacgtatagcgaggaagcgcagttcgcgccaacggacgccatcgttaaagcacaggggctcggctggtttgcggctgcgcgcgaactcatgaaatacatcgtgccctataaaggcaggctcgcgatgacttttggttttggggtgacgcgggtgcttgcgtatatcggc

SEQ ID NO: 270237 - DNA, 820 bp, Unknown
  Bacterial polypeptide expressing nucleotide sequence isolated from the Sargasso Sea
ccaagattacttccgcttgttcacagatatacgcaacttggggcaaactataggacaaagtatcctagtatttgcgaagtcgttgaggaattagaaaaaaataataatcaaaaagagttaattcttcgaaatagagaatttatctttaacaaagatattgttttaaagaatatagatttttcatatgaagaatcaaatcttattcttgagaatattaatttaaaaattaataaaggtgatcatgttgggatttatggagaaacaggaagtggcaaaagtacatttcttgacatccttataggattaattccaccttcaaaggggaatatcttgattgatgatgttgatatttataaagaaaaatcttcaaatctttggactacaaatattgcccatgtagctcagaatatatatcttaaggaaggtactattgcagaaaatattgcctatggggaatcgcctaatgaaattaattatgacttattggtaaattcagccaagtctgcacaaatatataaatttatagaaaaatccaataaaggatttgaaaccagtgttggagaaggaggaattaggttaagtggtggtcaaagacaaagaattgtaattgctagagctctttatagagcaagagaaatacttgtattagatgaagcaactagtgctttagataacgacactgaagaaagtattattgaagcaataaaaaaacataataatttaactatacttatggttactcatagattaaaaagtctgaggatttgcgatagggtttttaaggtgtgtggcaatcaaattattgaagaaaaaagataaa

SEQ ID NO: 270238 - DNA, 751 bp, Unknown
  Bacterial polypeptide expressing nucleotide sequence isolated from the Sargasso Sea
aatgaacaatgtacttgaattaataaatgtcaaaaaatcttatggtaattttgatgcaattcatggaattaatttaaaaatcaaagaaggctcctactgttgccttcttggtccttcaggttgtggaaaaacttcattacttagaatgattgctggtcacgaagaaattagtgaaggagaaatctaccttggatcttcaagattaaacgaacttcctccttcaaagaggggaacttcgatgatgttccaaagctatgcattattccctcatttaaaggtaatagataatgtatcttttgcattaaaaattatgggagtatctcgagaaaagcgaaataaaactgctttgaaatatgtggagatggttcagatgcagggatatgaagatcgtttccctgatcaactatctggcggccaaaaacaaagaatagcacttgcaagagctttaataactaaaccaagtgtcttacttcttgatgaacctttatctgctttggatcctgcacttagagttttgatgagaacagaactaaaacaaatgcaaagagagcttaatattacctttatacatgttactcattcacaagaagaagcacttgcacttgcatcaattgctgtagttatgaatgaaggaaaagtagagcaaattgataaccctttaactatatttaacaaacctaaaagtgcctttgtttcagaatttgtaggtggtcataatattatctcaataggaaaaaagttgttctcttta

SEQ ID NO: 270239 - DNA, 484 bp, Unknown
  Bacterial polypeptide expressing nucleotide sequence isolated from the Sargasso Sea
atgaataaaaatataattgaaataaataaactttataaaaattttaaaagtattaattcaacaattaaagtgttgaaggatataaatttgaatcttgaaagtggtaaattaattgctttaataggaccctctggttcaggaaaatcaactttcttgcacttgctagctttactagataaaccttctaagggaaaaattcgcttattgggaaaagataccgatgacatatctgaggatcaaaaaaaccttataattagaaataatatttcaattatttttcaaaataataatcttttatctgactttaattccttagaaaatgttgcaataccacttataattagaggtaatagctataatttttctattaaaaaagctgctaagattttatcaaaagtcaatttagatcataggctagagcattttcctaatgatttatctggtggtgaaaaacaaagagttgcaattgctagatctatagcat

SEQ ID NO: 270240 - DNA, 568 bp, Unknown
  Bacterial polypeptide expressing nucleotide sequence isolated from the Sargasso Sea
atgggtccctcagggtctggcaaaactaccttaatgaatattattgggtgtttagattctcctactaatggatcctattatctcaataataaatcagtaagtaagctagatgatgatgaacttgcgaaaataagaaatgaagagataggtttcgtttttcagtcatttcatttattggcgagaaatactgcatttgacaatgttatgctacctttaaaatatgctggattaagcaaagaagaggccacaaaaaggtcaaataatgttctagatcttgttggtttatcaagtcgttcaaaacatacaccagcagagctttcaggaggtcaacaacaaagagttgcaattgcaagagctctcgtaaatgaacctagtattttatttgcagatgaacctactggaaatttagattctaaaaccggtcaagatgttatgaagatctttaaggatttaaatgaaaatggacagacaataattttaattactcatgaagatagtattgcaaaacaatcgaacagaattataactattatggatggtctgatagaatcagatctaaaggaatgac

SEQ ID NO: 270241 - DNA, 319 bp, Unknown
  Bacterial polypeptide expressing nucleotide sequence isolated from the Sargasso Sea
tccattatctggtggtcaacaacaaagatcagctatagctagagctttgtgtatgaaaccaaaaatcatgttatttgacgaaccaacatcagctttagaccctgaaatgataaaagaagttttggatgcaatggtaaatttagcaaaaggtggaatgaccatgatagtggtaactcacgaaatgggctttgctaaagaagttgctgatgaagtaatttttatggacgagggtatgatcgtagaaaaacaacctaccaaaaacttttttgcaaatccaaaaagcgatagaactaaactatttttaagccaaatattataa

SEQ ID NO: 270242 - DNA, 867 bp, Unknown
  Bacterial polypeptide expressing nucleotide sequence isolated from the Sargasso Sea
gagatttcagtggattttaactgcgatggttttactcatgacaccattgaaacgactcacgaatgtcaatgccatgattcaaagaggcatagctgccgccgctagtattttttcattattggatgaacggaatgagatagatagaggaaccaaagatgctcaaaagctaattggtgctgtccatttcaaggatgtaaatttctcttatggctcagaaaaagaaaccttaaaaaacatcaatacaaatattaaagcagggcaaacaattgcaatagttggaaaatctggaagtggaaagaccacttttgtgaaccttattccaagattttatgatgttgaaaaaggctctattgagattgatggtatacagatagaagaatatacgcttgaatcactcagatcgaatatcagtttggtgacacaagaggtcacccttttcaatgacacaattgagaacaacatcatttacggcggacattcaaatcaggaaatcacagatgcagttaaagcttctcatattgatgagtttattcatgatctaccagatggactgcaaactaaagtcggtgatcagggaatcttgctttcaggcggacagagacaaagaatcgccatagccagagcattgctaaaagatgcacctatattgattctagatgaggcaacttctgcacttgattcagagagtgagaaactcattcagaatgcttttgaccgattgatggaaaataggacaacttttgtcattgctcatagactaagtacaattgagaaagcagatcgaatattggttctctcagatggaaaaattgttgaagagggcactcatcaagatttattaagccaagatggagaatattctctttt

SEQ ID NO: 270243 - DNA, 593 bp, Unknown
  Bacterial polypeptide expressing nucleotide sequence isolated from the Sargasso Sea
aatttactttgaaaatgtatccttatttgagccaaaaaataaagaattaattaaaaagttcagaggtcaaattcagatgattttccaggacccttattcatctctaaatccaaggtttaaggtaaaaagcattatagctgaaccaataagattttttcaaaaaaatattgatgaaatttcagtaaatcaaaatgtgaatgatttgatagatattgtaggcatatcaagaaaatcacttgaaaggtatccacatgaattttcaggaggacaaaggcaaaggatttccattgcaagagcgttagctacaagacctagacttcttatatgcgacgaacctacttctgcacttgatgtaactattcaagcgcaagttctaaatcttttgaaggacttacaaagtcatttaaatcttacaatattatttataagtcatgatttaccggtaattcggcaaatgtgtgatagaacagctgttttaaaaaatggtaatgtttgtgaaactaataaaactgaaagaatttttacaaacccaaaaaattcatatacaaaagaattattaaaactaatgccaaaaatagagtcaattatctgaa

SEQ ID NO: 270244 - DNA, 568 bp, Unknown
  Bacterial polypeptide expressing nucleotide sequence isolated from the Sargasso Sea
taaatcaattaaagatctcagctcagttgaaaagaaattattaaaaaaagacattcaaatagtttttcaagatccatatgggtccctgtcgccaagaatgacagttggcgaaatcataggagaaggcttggatatacattttgatttttccagtgaagagaagatagaaaaaatatcaaatgtaatgaaagatgttggattagatgatagcctcatttttaagtatccacatgaattctcaggtggccaaagacaaagaatcgcaattgctagatcaataatcttaaacccgaaattcatgatccttgatgagccaacttcagcgcttgataggtctattcagattcaggtaatagatgttttaaaaagattgcaagacaaatataaattaacatatttatttattagtcatgatctcaaagtaataagatctatgtgtgatcagatttttgttatgagtgagggaaagctagtagagtttggtaaggctgatgaggtttttgaaaatcctcaacaggaatatactcaaaaacttttaagagcagcactcaaatattcatcaaattaa

SEQ ID NO: 270245 - DNA, 484 bp, Unknown
  Bacterial polypeptide expressing nucleotide sequence isolated from the Sargasso Sea
aatggtcggtgacaaagatgataggtatcgttctatattacgcagagaaaaatttggttttgtttttcaatcatataatcttgtaccgaggttgtctgctatcgagcaagtcgagttaccattggtttatcaaggtgttaagaataagaaagcgatagcacttgaagctttgtctcgagtaaatttagatgatagagcacaccattttccacaacaattatcaggtggacagcaacaacgagttgcaattgcacgttctcttgttgttcaaccacaagttgtttttgcggatgaaccgactggtgctttagatactcaaagcggaaaagacatcatgaaaattttttctagtttatcccttgaaggaatcacgatcatattaattacacatgaacaacatattgctgagaaagcaagtcgcattctagaaatgagtgacggccaagtaatatctgatgtttcttcagagaggaacatgatatga

SEQ ID NO: 270246 - DNA, 423 bp, Unknown
  Bacterial polypeptide expressing nucleotide sequence isolated from the Sargasso Sea
tgtaaatttatttaaacctagttccggtgatattttctttgataatatttgtattacaaaaattaaaagtaattcagaaatgatgaaatttagaaaacaaatacaaatgatatttcaagatccttattcatctctaaatggaaggttgaaagttaaagatatagtttcagagccaattaagctacacaatccttcaattagtacaaaagatttaaacaattatgtttttgatttattagagtcagttgagttaataaaaaattcagcagatcgttatccccatgaattttctggtggtcaaagacagagaatatctattgcaagagctttagctacacagccaagacttcttgtatgcgatgaaccgacttctgctttagatgtaagtattcaagctcaaatattaaacttattaaaagatct

SEQ ID NO: 270247 - DNA, 682 bp, Unknown
  Bacterial polypeptide expressing nucleotide sequence isolated from the Sargasso Sea
gaaggatacgaaaatagaatgccatcagaattatctgggtggacagcagcaaagggttgcggttgcaagagcaattgttttagaaccaaaagtattattatttgatgaacctctatcaaatttagatgcaaaattaagaagacaagtaagagaagatattagagaaattcagcaaaaacttggtgtaactacgatttatgttacacacgatcaagaagaagctttggctatatcagataaagtaatagttatgaataatgctgttattgctcaagaaggaagtccaaaagatctttataattgtccaaaaaataaatttgttgcaaattttatcggagatgccaacgtctttaaagctgaaataattaataaacaatcaaacaattatgaactgaaattaggtgaaatgaatattaatattgaaaccgataaagatttaaataattcagtttctgtagcattaagacctgaaaatataaatataaataaaaataaaactgaaaattctattcatgccaaagtaaatactgcgtcttttgtaggtactagctatcaatatatattgaactcgaaaattggaaaaatatatgttgtatcaacagacacaaaaaacatattcaatattaacgatgaagtttatttaaatattgaaaaagaagaattaaaaatccttaatgattga

SEQ ID NO: 270248 - DNA, 541 bp, Unknown
  Bacterial polypeptide expressing nucleotide sequence isolated from the Sargasso Sea
ttgaaagatcgctcaaaggaggatgaagtggcagatataaaaattgataacataaataagttttatggtgacgtccaagttatcgaaaatgtttctttagaaattaaaagtcaatcctttacagtattagtaggtccctctggttgtggaaaatctacaatgctgagaatgattgcaggtttagaggatataaactcaggtacaatttcaattgatggtacagtcgtaaatgacttaccaccaaaagaaagaaatatcgcaatggtatttcaatcttatgccttgtaccctcacatgactgtatttgataacatggcatttggattaaaattagagaagagatctaaagaagaaatagatgagcgtgttcaagaagctgcaaaaatattgcaaattgaagaatacttatctcgtaaaccgaagcaattatctggtggtcaaagacaaagggttgctataggaagagctattacaagaaagcctcaagtatttttatttgatgagcccattatcaaaccttggatgctgctcttagagtcaa

SEQ ID NO: 270249 - DNA, 832 bp, Unknown
  Bacterial polypeptide expressing nucleotide sequence isolated from the Sargasso Sea
tgaaagagatgtagcaatggtgtttcagaactatgcattatacccacacatgaatgtttataataatttagcttatggtctaaaaaatagaggaattgacaaagaaacaattgagcaaaaagtaaatgatgcagctaagctgttacaaatttcagattatttacagagaaaaccttcaatgttatccggaggtcaaaggcaaagagttgcgatgggcagagcaattgtaagaaatccaaaaatattcttatttgacgagcctctttcaaacttagatgcaaaattaagaattcagatgagacttgaaattaaaaaactccagcaaaaagtcggagtaacaagtatatttgttacgcatgatcaagttgaggccatgacacttgctgataggttggcagtaattaataatggaattattgaacaacttggtactcctattgagatatatgataatccaaaatctttatttgttgctggttttattggttcaccgcaaatgaattttttagatggtaatttaaaaaataaaacattatctgcagaaggttttgagattaaagacgttaatactgagcatgaaggagaagttactttaggaataagaccagagcatttagtacaatctgaaaatggtttaattaatttaaaagtagacctagtggaacagcttggttcggataatcttgtttatggtcaattaaaaaatataaaagacttttgttacaggtgcccaggaaatcaaaatattgaaaaagtttctaatctaagtctaaatattgagaacaataaatattatatttttgataaaagtactggcaaaagagttaattaa

SEQ ID NO: 270250 - DNA, 844 bp, Unknown
  Bacterial polypeptide expressing nucleotide sequence isolated from the Sargasso Sea
aatgagttttttagatttaaaaaatgtgactaagatttacccaaacggaactaaggctgttcatgaaacctcattaagtattaatgaaggagaatttatggtttttgtaggacctagcggatgtggaaaatcaactttattaagaatggttgcaggtttagaggatattactgagggtgatattaatcttgatggaaaattaatgaatgaagttgatccatctgaaagagatgtagcaatggtgtttcagaactatgcattatacccacacatgaatgtttataataatttagcttatggtctaaaaaatagaggaattgacaaagaaacaatcgagcaaaaagtaaatgatgcagctaagctgttacaaatttcagattatttacagagaaaaccttcaatgttatctggaggtcaaagacaaagagttgcaatgggtagagcaattgtaagaaatccaaaaatattcttatttgatgaacctctttcaaacttagatgcaaaattaagaattcagatgagacttgaaattaaaaaacttcaacaaaaggttggagtaacaagtatatttgttacgcatgatcaagttgaggccatgacactagctgatagattggcagtaattaataatggaattattgaacagcttggaactcctattgagatatatgataatccaaaatccttatttgttgctggttttattggttcaccgcaaatgaattttttagatggtaatttaaaaaataaaacattatctgcagaaggttttgaaattaaagatattaatactgactttgagggagaggttaaattaggaataagacctgaacatttaagtcaa

SEQ ID NO: 270251 - DNA, 553 bp, Unknown
  Bacterial polypeptide expressing nucleotide sequence isolated from the Sargasso Sea
atggaaaataaaaattctaatgaaattatagttaaatttgaagatgtaacaaaacaatatggcgatctagtagttttggacaaactaaatttagatatcaaaaaaaatgaaatggtttctattatcggtccttcagggtcaggaaaaacaacagttctaagagttttaatgactttagaaaaaattaatggaggagttattcatttagatggtgaaactcttacacacatgaatttaaatggtaatcaagttgaagctaatgaaaaatatttaagagaaaggcgatcaaaaattggaatggtgtttcaacaattcaatctatttcctcatatgacagcacttcaaaattgtattgaagctccggtggaagtactgggtatgaaaaaagaagaggctgaagaacgagctcttgaacttttagaattagtaggtttaacagataaaaaagatcaacatccaacaagactttctggtggacaacaacaaagagtggcaattgcaagagctttagcgatgagacccaaggttatgcttttagatgaaattacttctg

SEQ ID NO: 270252 - DNA, 313 bp, Unknown
  Bacterial polypeptide expressing nucleotide sequence isolated from the Sargasso Sea
gggaggtcaaagacaaagaattgctatagctcgtgctttaatactaaatcccaaaatattaatactagatgaaccaacatccgcactagatgtaactatacaaaaacaaataattgatttgctaaatacattacaaaataaattttctcttagttatttatttattagccatgatatgaaagtaattaggtcagtagcagataaaattattgttttgaaagatggtgatttaatagagtataataaatctgaaataatttttaattcacctaaaaatgaatatactaaaaatttattaagctctgttctataa

SEQ ID NO: 270253 - DNA, 790 bp, Unknown
  Bacterial polypeptide expressing nucleotide sequence isolated from the Sargasso Sea
ttttattcttgaagcaacagcatttggaggaattatattaattatcctttataaaatgtccgagacaggaacttttattaatactatccctataataagtttatatgtatttgcagggtatcgattaatgccagcagcacaattaatttatgcatcttctactcaaattgcttttgctagtccttcgattgaaaaagtgtataaagatatgaagaatctaaatccaataaattttcatcaagacaagggtgttttacctttaaataaagaaatttctttaaaaaatattagctatagttatcctaatgcagttagaacagcattaaaaaatataaatttaaatatacctattaaaaataccataggatttgtaggcgctactggaagtggtaagacaacaattgttgatattattctaggtttattagaagctcaaaaaggaactttagaaattgatggaataattataaacaaaaataacagtcaatcttggcaacgttcaattggctatgttccacagcacatttatctttcggatgacactgttgcatcaaatattgcttttggtcaagagcctaaggatattaatgaagaagaaattcaaaaggcttctaaaattgctaacttgcatgattttgtgatgcatgaattgcctaatcaataccaaactattattggagagagaggcgttagattgtcaggtggccaacgtcaaagaattggaattgcaagagcactatattttaatcctcaggtattaattctagatgaagcaaccagtgcattagat

SEQ ID NO: 270254 - DNA, 275 bp, Unknown
  Bacterial polypeptide expressing nucleotide sequence isolated from the Sargasso Sea
gatgcttgaatttgaccaagtgcagcacgcgtacaatggcacccagtcagtaaatggtgttagttttcatgttgaacgcggtgaagtggtgtcgttattgggtccatcaggatgcggcaaaacaacattactacggcttgctgctggtcttgaaaaaccacgtgcaggatgtatcaggcttgatggtcagcagttatcagatagtcaggtgatgatccccccagaaaatcgagggattggttacatgttccaggattatgctctatttccacatc

SEQ ID NO: 270255 - DNA, 646 bp, Unknown
  Bacterial polypeptide expressing nucleotide sequence isolated from the Sargasso Sea
ctgaccaaaacctttcctggagtcaataacacctccccagtggaagtactcaaaggtcttgaactcaaagtggaagagggagaaaccaccgccatcattggacaatccggaagcggaaaatcgacccttttgtcgttgttggcaggattggaccaaccgacttccggaacccttaaattgaaagaacgccatctggattcgatgtccgaggaagaattaactcaattccgggcggaaaacatcggaatcatcttccagcagtttcatctgatgacccacctcaatgctctggaaaacgtgagtctccccctggaaatgaatcaccaacaggacgctcttgaacttgcagagaaagctctggagcaggtgggtcttggcttgcgtatggatcattttccccaccagctcagtggaggggagtgccagcgggtggccattgcccgggcgatcgtcattcgcccagcgcttcttctggcggatgagccgtcggggaacctcgatcatgacactggagaacaggtggcagacctcttattcgatctggttggaagaacaggaatgacgatggttttggtcacccacaattccgagcttgctttacgctgttccaaacagttgaccctcagtcatgggcttcttcagtgag

SEQ ID NO: 270256 - DNA, 772 bp, Unknown
  Bacterial polypeptide expressing nucleotide sequence isolated from the Sargasso Sea
atgtcactactagtagctgaaaatttatcttattcgtatgcaaaaaatgtaagcccggctataagtaaagtttccataacagttgaaccaggtacattaactgctctagtaggaccaaacggagctggcaaatctactcttttaagaatattgcagggacaatgtattcctgataatggccagataacaattgacggggagaagttaattagacaaagatctcaggtggcactcatgccacaaagaagctctatgaattggaaatttccaataactgtagaaaaactagtttcattaggacaaataaaatactcaaaatcaaaaagtagtagtccttttcaaataaaagctcttcttgccaaccctaatgcatggattaataaatgctgtgaattggaggccacaatgcaaagagtcggcattgcaaatattgctaaaagaaggcttgattctttatctggtggacaacaacaaagagctctattagccaaaacattaatgtctccagcaaaaattttcctccttgatgaaccttgtgcagctttagatccacctgcaaaggaggattttctaaaaattgttcgtcaacttgctgatgctggtctttctttaatggtgagcagtcatgattggggtacctcgttaaatagttatgatcaagttattgttttggataaagctgtattggcctgtggaagccctgattccataaaagataaattagaggatataaatattagctctattgaggataataattgttgtgattaaa

SEQ ID NO: 270257 - DNA, 914 bp, Unknown
  Bacterial polypeptide expressing nucleotide sequence isolated from the Sargasso Sea
aaaagcacttgtaagttcagttcctcctacaaataaaaaaataaatagatttaaaattattgaaaaggaaaataaaaatcagggtgaaactaatattaaaattttaaaaagatggacaaaaaaagaaataaccgatcaagatttagtcaaagttaaaaatttaagcaaaacttttgatgatagtttttttgtagaaagcactaaaaactctgtaatggctgtagacgatgtgtcatttaatataaaagaaggagagtcttttggactagtaggtgaaagtggaagtggcaaatcaacaatagctaaaatgattgtaaatttatacagcccaagtgctggagatattgattttgataatgtttgcataacaaaaataaaaagtagtaaagaaatgatgaagtttagaaagcaaatacaaatgatatttcaagatccatactcatctttaaatggaagattaaaagttaaagatatagttgcagagcctataaagcttcacaatccctcaataagctcaaaagatatagatagttatatttatgatttattagaatctgttgaactaactcaacaatcagctgaaagatatcctcatgaattttctggaggtcaaagacaaagaatatcaatagcaagagctcttgctactcaacctagacttcttgtttgtgatgaaccaacttcagctttagatgttagtatacaagctcaaatactaaatctattaaaagacttacaagagcaattaaatttgacaatattatttattagtcatgatttacctgttgtaagacaaatgtgtgatagaatagcagttttaaaaaatggaaaactttgtgaaatatcaaaaaccgaggagttatttaaaaacccatcacatgattatacaaaagaactacttacgttaatgccaa

SEQ ID NO: 270258 - DNA, 421 bp, Unknown
  Bacterial polypeptide expressing nucleotide sequence isolated from the Sargasso Sea
caacaatgtaggttttatttttcagttctataatttacttcctgttttaacggccaacaaaaacgtagaaattcccttattgctgacaagtctttctgcttctaaaagaaaagagcacgtctctacagcactaaatgtagttggattgtctgatagaggagggcataagccaagtgagctatcaggtggacaacaacaaagggtagccattgcaagagctcttgtttctgatcctgatattttagtgtgtgatgagcccacaggggatttagatagagagacagcaactgaaattcttgatttattgcaaattctaaatcgtgatcatggaaaaacaattttaatggtcactcatgatcctgtagctgctgattttgctaaaagaacacttcatttggataaaggcagacttactaactaa

SEQ ID NO: 270259 - DNA, 694 bp, Unknown
  Bacterial polypeptide expressing nucleotide sequence isolated from the Sargasso Sea
cgcgccggtcattatgctcgaccaggcaaggctcgccctgtccagcgccgaaggcatggttgaaatcctgcgcggcatcagcctgtcgatcgaggccggcgagacggtcggcgtgctggggccaagcggcgccggcaagacaagcctgctgatgatcatggccgggctggaaagcctgaccggcggcagcatcagccttgccgaaaacgatatcacgacaatgggcgaggatgcgctggcggcgctgcgccgcgatcaggtcggcattgtctttcaggccttccgcctgatcccgtcaatgacggcgctgcagaatgtcgccgtgccgatggagcttgccgggcggcgcgacgccgaccagatggccgcgatggcgctggaggcggtcgggctcggccaccgcaagacgcatcgtcccgaccagatgtcgggcggcgagcagcagcgcgttgccattgcccgtgccatcgcgacgcggccgcgcattcttctggccgacgagccgacaggcaatctggacagcggcaccagcgagaaggtcatcgccacccttttcgaggcaactaaatccgccagcgcggcgctggtcctcgtcacgcatgacgccgatcttgccgaacgctgcgagcgtgtcctgaccatcgaggacggtcgcatcgtcggcgaccggaagaccacagccggcgcagcatga

SEQ ID NO: 270260 - DNA, 809 bp, Unknown
  Bacterial polypeptide expressing nucleotide sequence isolated from the Sargasso Sea
aaaaaaaattactgaatcaaaaaatactaatgaaattttaaaagttgaggatcttaaggtttggtttccaataaaaaaaggaattttaagaagagtaaaagattatgtcaaagcgattgataaaataagttttagtcttcaagaaaaaaaaacattaggaatagttggagaatctggatctgggaaaacttcacttatacttgctctattaaagttgataaactctgaaggaaaaataatttttaattcttcaacaattaatttaagaaaaaatgcagatatcaaaaattttagaaaaaatgttcagatagtctttcaggatccttttagttctcttagtcctagaatgacagtagaacaaataatatctgaaggacttgatattcatgaaaaaaatttaagctatgaagaaaagcaaaaaaaaatatttagtgtagtaaatgaaataggaatggattacatagaaataaaaaacaggtatcctcatgaattttcaggcggacaaagacaacgtgttgctatagcaagagctttagttcttaaaccaaaattactgatattagatgagccaacatcttcattagacgttagtattcaatctcaaatacttgacttacttaataatttacaaaaaaaatataatttaacctacatatttattagtcatgatatgaaagtaattaaagctatatcagattacgtattagtattaaaaaatggtaaaattgtagaagaaggtgaaacaaataaaatttttatgaaaactcagaatgagtatacaaaaaatctaataaaagctgttatttaat

SEQ ID NO: 270261 - DNA, 765 bp, Unknown
  Bacterial polypeptide expressing nucleotide sequence isolated from the Sargasso Sea
tatggaaaataaaaataatgaaccgatagtcaaatttgatgaagtaactaaacaatatggtgatttagtagttttagataaacttaatttagagattaaaaaaaatgaaatggtttctataataggaccatcaggttctggcaaaactactgttttacgagttttaatgactttagaaaaaataaacggtggtgtaatccatttagacggagaaccgttaactcacacgcagaatgatggaaaacttactgaagctaatgagaaatatttaagagaaagacgttcaaaaattggaatggtatttcaacaatttaatttattcccgcatatgactgcattacaaaattgcattgaagcacctgttgaggttttgggtctcaaaaaagaagaagctgagcaaagggcattagagttactagagctagtcggattaaccgacaaaaaagatcaacatccatctagattgtctggtggacaacaacagagagttgccattgctagagctctcgctatgaggcctaaagttatgttgttagacgaaataacctcagctttggatccggaagtagttggagaagtacttaatgtaataagatctttaaataaagaacataatcttacaatgattatggtcacgcaccaaatgggttttgcacgtgagatatctgatagagtatgtttttttaacgaaggtaaaatatttgaacaaggtcctccagaaaagctatttggagatccacaaaatgagagaactaaacaatttct

SEQ ID NO: 270262 - DNA, 496 bp, Unknown
  Bacterial polypeptide expressing nucleotide sequence isolated from the Sargasso Sea
atgtccgacccaataatacaaataacagatgtaaataaatggtttggagattttcaagttttaaaaaatattaatttagaagttgagaaaaataagaaaatagtagtttgtggaccttctggatcaggaaaatctactttaataagatgtattaatagacttgaagagcatcaagagggacaaataattgttgatggaaacgaattaagtgaaaatacaaagaatattgaacagataagagcggaagttggaatggtttttcaacaatttaatctatttccacacttatctatattagataactgcactcttgcacctatctgggtcaaacaaatgcctaaaaaagatgcggaaaaacttgcaatggaacatttagaaaaagttcaaatatcagatcaagcatttaaatatccaggacaactttcgggaggtcaacaacaaagatgcgctatagcaagagctttatgtatggaaccaaaaaataatgctttttgat

SEQ ID NO: 270263 - DNA, 741 bp, Unknown
  Bacterial polypeptide expressing nucleotide sequence isolated from the Sargasso Sea
ataagaaagttgacaaagctttatcaatggtttcacttaatgggtttgaaacaagaatgccaggacaactttcaggaggacaacaacaaagggtagcagtagctagagctttagttttcgatcctgcagtggttttgatggacgaacctttaggtgcactggataaaaatttaagagagagtatgcaatatgaaattaaacatattcatgaaagcattggagtaactgtagtttacgttactcatgatcaaagtgaagctcttacaatgtcgaatagaattgcagtgtttaatgatggaaaagttcaacagctatcaaatccttcagagctttacgaaaaaccagtaaattcatttgtcgcagagtttattggtgaaaataatacctttaatggtgaagtatcagatatttcaggagatgaatgtaaagttaagctatctagtggagaaataatagccagcgctatttcagtaaaatctaaaggtgaaaaaacaactgtatctttgagacctgagagagctttaatcgaaccaagtgaaaaaatggataatatgtttagtggcaagatagaagaggtaatttatcatggtgatcatactagagttcgaattaatttattaggaaacccagaatttattttaaaggtcccaaacagtacttccaatctagaacttaaggtcaaacaagatattaaaatcggttggaacagttctgacgcaagagctttagacccaaaataaa

SEQ ID NO: 270264 - DNA, 846 bp, Unknown
  Bacterial polypeptide expressing nucleotide sequence isolated from the Sargasso Sea
taaaataattaataacttgatcccgtcaaagagagaaattgcgatggtatttcaatcttacgctctctaccctcatatgaatgtttatgaaaacatgtcgttcggattaaaaatggaaaaaaaagataaaagtgaaattgataagaaagtaaacaatgctgcaaagatgcttcagattcaaaatctacttaagagaaaaccaaaagagttatctggaggtcaaagacagagagttgcaattggtagagctataacaaggaacccaaaaatatttttatttgatgaacctttatcaaatctagatgcagccctaagatcagagatgagagtagaaatatcaaaacttcataaaaaaataaatacaaatatgatttacgttacgcatgaccaagtagaagccatgaccctcgctgatagaatcgtaatactaaatgagggaaatattgaacaattttctactcctggtgagatttatgaaaatcctagcaacatatttgttgcagaatttattggtacacccaaaatgaacataattaaaataagcaaagagcaaatccaaaattcaaatacaataaatttttataacaaccagatagtatttaatggatatattttagaagacgatttttttttggggataagaccagaacatataaatatttctccagaaggtaagattaagtgtaatataaatattgatttaattgaaaatttaggatttgaaaaaattatacatgcttccttgggagatcatgcgataagaataaaaacagataagaaatcattggaaggtataaatataatttcatttttacctgaaaatttttacctttttgacaaaaaagg

SEQ ID NO: 270265 - DNA, 568 bp, Unknown
  Bacterial polypeptide expressing nucleotide sequence isolated from the Sargasso Sea
gtatgaaccagctgagggaagtattcggattgatggcaacgacatcagcaaggtggatttgtattccctgcgggctcaaatcggtgttgtgccccaggacagcttgctgtttgacggaacggtgatgtctaacattgctttgaccaggcctgatgctggttttgaggaaattgtgttggccggtcaggtggcctgcgcccatgaattcattgaggccatgcctgctggatacagcagttctgtgggtgagcgcggtgctggcttgagcggcggccagcgtcaacgtttggcgattgctcggatgattattcgcaaaccaagattgttggttttggatgaagccaccagtgccttggatgttgataccgaacggcggttaactgctaatctcatgcaactgtacaaaggcagtacggtgtttttcattacccataggctcgcctctttgaaagctgcggatcacattttggtgatggaccagggcgctctggttgagcagggcacccatgaagagctcatggagctcgatggccgttacgccacgctctatcaccagcaggaggtttag

SEQ ID NO: 270266 - DNA, 836 bp, Unknown
  Bacterial polypeptide expressing nucleotide sequence isolated from the Sargasso Sea
attggtcacggcttacaatatattgatttatatcaataatgccttccttgttttcactatctccgcactcgcgatatggctctggatgtcatccattgtttccaccggttcgattgcaatcgcgattgcgatgtgcctcaggatcaacggaatgtcccagtggatcatgtgggaagtgtcgtctttatttgaaaacattggagtcgtgcatgacggtatgagcatgatggcaaaacctcttgaggtggtggatcatgaacaagcatcggctctcaaaatcagcagcgggaaagtagattttgaccatgtcggatttcattacggacgtccgggtggaatcatggaagacttcagtctttctatagctgccggagaaaaagtcggtgtggtcggacgttcaggtgccgggaaaaccaccctgatgaacctgctgctccgtttttatgatctggaaaaaggtgaaattcggatcgacggtcagaatatatccggagtcacccaggaaagccttagagcccaaattggggtggtgacccaggacacctctttattgcaccgttccattcgtgacaacattgcctacacttctcctgaaatttcagatgaaaatgtgattgaggcagcaaagaaagcaaatgcctgggaatttattctggaccttgaagattcttttggacgcaaaggactcgaagcgcatgttggagagcggggtgtcaagctttccggagggcaaaggcagcgtattgcgattgctcgtatgtttctcaaagacgctccgattctggtacttgatgaggcaacatctgctctcgattctgaagttgaagccgccatcc

SEQ ID NO: 270267 - DNA, 417 bp, Unknown
  Bacterial polypeptide expressing nucleotide sequence isolated from the Sargasso Sea
aatggttaagttagttcaggttgaaaatgtctttaaaagctttggtgatgttaatgctgtgaatggtgtttctttagatattgaagaaggccagttctattcacttttaggtccttctggctgtggtaaaactacgctattacgactaattgctggctttgaaaaaccaacttctgggcaagtctttattgataatacctcgatggaaggtattgagcctaatttacggccaacaaatatggttttccaaaattatgctatttttccacatttgaatgtagaagaaaatgtggcctacggattgcgaaacaaacgtgaaaataaaaatgaacaaaacaaacttgttgatgaagcacttgaactagtaggattatccggtctcaataaacgttctgctaatgcccttttccggcggcc

SEQ ID NO: 270268 - DNA, 634 bp, Unknown
  Bacterial polypeptide expressing nucleotide sequence isolated from the Sargasso Sea
ttagacggtttatttgaccaccaaaaagataaatcagaaaaattatctaaagaagagcaaatagatattgttcaaaaacttctgaagagtgtagatttagctccaggagttgctgaaatgtaccctcatgaattaagtggtgggatgaagcaaagggttgcaatagctatagcaacatcaatgcaacctagagttattgtggcagatgaacctacaagtgctttagatgttgttgttcaaagaaatgttatgcagacacttggaaggcttcaagaaggtttgcatgcatcaattatattaataggtcatgatatggggcttgttgctcaattttcagatcatgttggtgttatgtatgcagggagattagttgaagttggtcctgtgaaaacagtatttaaatccccaaagcatccttatacaagattattaattaatagcttacctactctgagcaacaagaaggatttcataggtattccaggtttacctgcaagccttcttgatcttccagagggatgtgcgttttgtttaagaattggtaaagaagataagaataagatcccttgggttaatgttgcaaaggatcattacctgcaagattgcaaaacttgtgcagattacggtaaataaa

SEQ ID NO: 270269 - DNA, 751 bp, Unknown
  Bacterial polypeptide expressing nucleotide sequence isolated from the Sargasso Sea
ttttacagaaagtaccaaaaatgctgtaatggctgttgaagatgtatcgtttaatataaaagaaggggagtcgtttgggttagttggtgaaagtggaagtggtaaatcaacaatagcaaaaatgattgttaatttatatagcccaagtgctggagatattgattttgataatgtttgtataacaaaaattaaaagtaataaagaaatgatgaaatttagaaaacaaattcaaatgatttttcaagacccttattcatctttaaatggaagattaaaagttaaagatatagtttcagagcctataaaacttcacaatccttctattagttctaaagatttagatagttatatttatgatttgctagagtctgttgaattgactcaacaatctgctgaacgttacccacacgaattttcaggaggacaaagacaaagaatatcaattgcaagagctcttgcaactcaaccaagattactcgtctgtgatgaaccaacttctgctttagatgtaagtattcaagcacaaatattaaatttattgaaagatttacaagagcagttaaatctgacaatcttattcattagtcatgatttaccagtggtaagacaaatgtgtgatcgaatagcagtattaaaaaatggaaaactttgtgaaatttcaaaaaccgaggaattgtttaaaaacccatctcacgattatacaaaagaattactaacattaatgccaaaaatagagtctatttataactaa

SEQ ID NO: 270270 - DNA, 737 bp, Unknown
  Bacterial polypeptide expressing nucleotide sequence isolated from the Sargasso Sea
taatatgcctagaactagtttttttaagagcaatagatttcatgctgtaaaagacacgtcaatcaatatatataaaaatactacaattggcttagtaggcgaatcaggatcaggtaaatctactcttggaaaggccatagcgaatcttacttcttatgaaggaaaaatttattacgacgggcaggacattgcctcatcctcaaaggaaattaagaaacacatccaaatagtatttcaagatccatatggatctttgtcgccaagaatgactattggagaaatagttggagagggactaggagtacatttttatctttcaaaaaaagaatcagatctaaaaattgataaagttttatcagatgtcggaattgagcttaaggcaaaaaataaataccctcacgaattttcaggcggtcaacgtcaaaggatagctattgctagatcgttaataatgaatcctaattttatgattttggacgaacccacatctgctctcgatagatcaatacaaattcaagttataaatcttttaaaagatatacaaaatgaatatgaattgacatatttgtttatcagtcatgatttaaaggtaatacgctcaatgtctgattatatttttgtaatgaaagacggaataatagtagaatctggcttgtcaaatgatgtttttgactatccaaaagaaaaatatactaaaaaattgctctcagctgcgttaagatacgcaaccgattgag

SEQ ID NO: 270271 - DNA, 547 bp, Unknown
  Bacterial polypeptide expressing nucleotide sequence isolated from the Sargasso Sea
agggccttctggttgcggtaaaacgtctttacttagagctattagcggtctatgggcaattcaatctggtgagatagaaaccccctcaaatggtgagttactttttattccacaaaaaccctacatgactcttggctcattgagagaacagctttgttacccattagataaaaacagattcagtgatgatcatctaaaagcagttttagaagaagtcaagttacctcaaattatccaaaggtatcctgatctagatatcaaacaagattggcaaagactattatctctgggagagcaacaaaggcttgctttcgcaagacttttgctgaattcccctaaatatgttgttttagatgaagcaacaagtgcattagatgtaaatacagaaaaacatctttatgaacttcttaacaaacgcgagatggcttgcattagcgttggtcataggccaaccttgaagaactatcatgaaaatgtgcttgaaataactgagaacaaaggttggcgattattgcctgcttcaagttaccaatttactgagaactag

SEQ ID NO: 270272 - DNA, 424 bp, Unknown
  Bacterial polypeptide expressing nucleotide sequence isolated from the Sargasso Sea
gctcctatttgggtaaaaaaaatgccaaaaaaagaagcggaagaattagcattaaaacatttagaaagagtacaaattcttgatcaagcacaaaaatatccaggccaattatctggaggacaacaacaaagagctgcaatagcgagagctttatgtatggagccaaaaataatgctttttgatgaacctacatctgctttagacccagaaatgattaaagaagtgctcgatgtaatggtaaatcttgcaaaacaaggtatgactatgattgtggtaactcatgaaatgggttttgccaaagaagttgccgatcaaatgatatttatggatgagggaatgatagtagaaaaagcagataccaaggaattttttgctaatcctaagagtgataggactaaacttttcctaagccagatactataga

SEQ ID NO: 270273 - DNA, 750 bp, Unknown
  Bacterial polypeptide expressing nucleotide sequence isolated from the Sargasso Sea
catgtctgattttttactggcgctgcaggatgttcatgtcaactttcctgcgcgtaaaaactggcttggcaaggttacggaacgggtgcatgcgctcaacggcctggatttacagattcgccagggtgaaacgctggggattgttggcgaatccggttgtggaaaaagtacgctggcgcaactgctgatgggcatgcttaaacccagccagggaagctattctcgccgtggtgataaacagcataacggtatgcaaatggtctttcaggaccctctttcatcgctggatcctcgcttaccggtgtggcgcacgatcactgagccggtatggatccaaaaacgaagtccggaacgtgagcgccgcatgcttgctgaagatttggcacaacaggtaggtatccgcccggaatatctcgaccgtctgccgcatgcgttttccggtggacaacgccagcgtatcgccatcgcccgggcactatcgtcagaaccggatgttatcgtcctcgatgagcccacttcagcactggatatctctgtgcaggcgcaaattctcaatcttctggtgtcactacaggcgcgcagaaatctgacctacgtattgatatcgcataacgtgtcggtggtccgccatatgagcgaccgtgtggcggtgatgtacctcgggcaaattgttgagctgggcgatgctccacacgttctcactcaccccgcccatccgtacacacgggtattgctggactctgtccctaa

SEQ ID NO: 270274 - DNA, 673 bp, Unknown
  Bacterial polypeptide expressing nucleotide sequence isolated from the Sargasso Sea
atgaataaaaccatcttagaagtttccaatgttacaaaaaaagttaccagccctgagggcgaactaaccattgtaaatgatatcagtctttccttggaggagggcgtttttgcatccattttgggcccatctggatctgggaagaccacgcttcttgcaatcatggctggccttgatctgcctagtagtggatccgtgaagcttcttgataaagaaatcacaagcttaactgaggataagagggcacagattagaagcaaggacgttggttttgtttttcaatcttttcatttgttgcctcgattatcagccttagacaatgtgatgatgccactcgagatactcggcgctaaagacgcaaaggagagggcactaaaagctttggatgaagtgggtttgtccaaaagaacaggacacgttcctcatcaattatctggaggagaaaagcagcgagtcgcaattgcaagagccatggttaaagcgcccagcatcttatttgcggacgagcccactggaaatttagaccaatcaagcactgacaatattctcgaactattactgggaatcaataaacaaacaaagacaaccttggttgtcgtaacacatgatcagcagttagcctcacgttcggatatggtcttcgagcttcaagaaggaaaattaaaatgctgaa

SEQ ID NO: 270275 - DNA, 676 bp, Unknown
  Bacterial polypeptide expressing nucleotide sequence isolated from the Sargasso Sea
aattaatatatataaaaatactacaattgggctagtgggcgaatcagggtcaggtaaatctactttaggaaaggccatagcaaatcttactccttatgaaggaaaaatatattatgacggacaggacattgcatcatcctcaaaggaaattaagaaacacatccaaatagtgtttcaggatccatatggatctttatcaccaagaatgactataggagaaatagttggagagggactgggagtgcattttaatctttcaaaaaaggaatcagatttaaaaattgataaagttttaacagatgtaggaattgagcttaatgcaaaaaataaatatccgcatgaattttctggcggtcaacgtcaaaggatagctattgctagatcattaataatgaatcctaattttatgattctggatgaaccaacatctgctctcgatagatcaatacaaattcaagtgataaatcttttaaaagatatacaaaatgaatatgaattgacatatttgtttattagtcatgatttaaaggtaatacgctcaatgtctgattatatttttgtaatgaaagacggaataatagtagaatctggactgtcaaatgatgtttttgactatccaaaagaaaaatatactaaaaaattgctctcagctgcgttaagatacgcaaccgattga

SEQ ID NO: 270276 - DNA, 451 bp, Unknown
  Bacterial polypeptide expressing nucleotide sequence isolated from the Sargasso Sea
agagatagtaggagaaggattaaaggtccatgaacctcatttacccaatgaaattagactctcaaagataataggtgcattaaatgatgtcgagctagatgaaacgttctactcaagatttcctcatgaactttctggtggccagcggcaaaggattgctatagctagagcaataatactcagacctaaactaatactactagatgaacccacttctgctttagacgtttcaattcaaatgcagatattatatctgttgaaagatctccagaataaactgggtttggcatacttgtgcattagtcatgatttaagagtgattagattcctatcagatcaagtgtatgtcatgaaagaaggagtaattgttgagcgcggttcttctgaagaagttttcgaagaccctaaacatgaatacaccaaagaacttttagctgcttcaattgcataa

SEQ ID NO: 270277 - DNA, 565 bp, Unknown
  Bacterial polypeptide expressing nucleotide sequence isolated from the Sargasso Sea
attattggaacaagtcagcctctccagtgcggacagcgaaaaatttccccatgaattttcaggaggccagagacaaagaatctcaattgctcgcgcccttgccagtcagcctgattttttggtgtgtgatgaacccaccagtgctttggatgtctccgtccaggctcagattctcaatctgatgaaaaaactccaaaaagagctcgggttgacctacttgttcattagccatgatttagcggtcgtttcccacctttccgacaaagtgggagtcatgtatttaggcaggctggtggaatgggcagataccaaaactcttttccgggcgccgaaacacccctacaccaaaatgctcctggatgcgatcccggatttgaacttatctgggaaagcccgaactcctgtggcaggcgaagtcccaagtccaatcaatccaccatccggatgccacttccatccacgttgcccctggtccaatgagcggtgccgaactgaattacccacactcatggatcaacagcaacaaagcgtcgcgtgtcatgccgttgtggaaaacagaatttga

SEQ ID NO: 270278 - DNA, 651 bp, Unknown
  Bacterial polypeptide expressing nucleotide sequence isolated from the Sargasso Sea
acaatatttccaaagtttacgaaggcccacctcccgtaagagctttagatggagtatctcttgaggtagaggaaggtgactttgtagccatagtcggtcaatctggaagtggaaaatcaaccttacttaatatgattggattactagatagcataacagaagggtcaattgagatagaagaaagcgatgtttcgaaactttctgataatgaactttctaaatttagaggagaaaaaataggatttatttttcaaagcttttttcttttacctggactgactgctcaagaaaatgtggctgaaggcctcctttatcaaggtatttctagaactgaaagacttgaaaaagcaaaaaaagttttagaccaagtaggtttaggtgacagattaactcaccttccaaaagaattatctggtggacagcagcaaagagttgcaatagcaagagcacttgttcaagatccagcatttgttttagcagacgaaccaactggaaatcttgataaagagtcgggtataaatattttaaatattttaaaagaccttaataatcaaggaaaaacggtcataatgattacccacaaccaggaacatgcaaatatgtttaaaaaagttattgaattagttgatggaaaaattgtaagtaaatgaa

SEQ ID NO: 270279 - DNA, 343 bp, Unknown
  Bacterial polypeptide expressing nucleotide sequence isolated from the Sargasso Sea
gggcctccagacgatgatcggcgaaaacggtattcgtttgtcgggtggccagcgccaacgcttggcaatcgctcgggcaatcattggaaaaccggaactgcttttgctggacgaggcgaccagtgcactcgacaatgagtctgaacgcctggttcaacaagcgctggaggcgattgccaaggaattcacgcttgtggtcattgcacaccggctaacgaccgtgcgacatgccgatataatatacgtgatggaaggaggtcaggtcgttcagaccggaaaatataatgacctagtggcccaagatggcattttccggcaactgcattcggcgggttttgagtga

SEQ ID NO: 270280 - DNA, 388 bp, Unknown
  Bacterial polypeptide expressing nucleotide sequence isolated from the Sargasso Sea
aaagttaaagaaattttacttgaagtaggtttagactacgaagagaattataatagataccctcatgagttttctggtggtcaaagacaaagaatagctattgcaagagctttaatacttaacccaaaaattttaatactagatgaaccaacttcagcactagatatctcaatacaaaatcaaatcattgaattactaagtagtttgcagaaaaaattttctttaagctatatttttataagtcatgatatgaaagtaatccgctcagtatcagacaaaatcttagtaataagaaatggtcaagtcatcgaaagtaacaattcatatgaaatatttaataatccaaaaaaccaatatacaaaaaacttaattcaatcagtaatttgaa

SEQ ID NO: 270281 - DNA, 658 bp, Unknown
  Bacterial polypeptide expressing nucleotide sequence isolated from the Sargasso Sea
ggatctggcaaaaccacagttctcagggttttgatgactttagaaaaaataaacggaggagtgatcaatttagatggtgagccattaactcatatgaatgaaaatggtaatctcattgaagcaagtgaaaaatatctaagggaaagacgttctaaaattggaatggtttttcaacaatttaacttatttcctcatatgactgctttacaaaattgcatagaagctccaattgaggttttgggtcttaaaaaagaggaagctgaggaaagagctcttgatttactcgagctagtgggactgactgataaaaaggatcaacacccaagtagactttctgggggtcaacagcaaagagtagctatagcaagggcacttgctatgagacctaaagttatgcttttagatgaaataacttctgcacttgatcctgaagttgttggagaggtgttaaatgttatacgctctctaaataaagaacataatttaactatgataatggtaacccaccaaatgggatttgctcgtgaaatatcagatagagtttgtttttttaatgaaggtaaaatatttgaagaaggcccgccagaaaaattgtttggtgatccacaaaatgagagaactaaacaattccttcatgcagttttggactcgcattagt

SEQ ID NO: 270282 - DNA, 538 bp, Unknown
  Bacterial polypeptide expressing nucleotide sequence isolated from the Sargasso Sea
atgaatcaaccattagttgaaattaaaaacttatctctaaaatatggaaattatactgctttaaaaaatatcagtgcttcatttttcccaggtaagtgtgttgtaatatgtggaccgagtggatctggcaaaagttctcttttgaggtgtgtaaataaattagaagaatttgatgagggagatgtaatatttgacggccatagtttaaaaaaaactaaaaatatttctcaaataaggtcaaatataggaatggtatttcagcactttgaactttatcctcatttatcagttttaaataatattaccctagcaccaatacaggttaagggtttatcaaaaagggaagctaattctaatgcaatgaaattattagaaagagttggcatcgatgatcaagcaaagaagtatccagcagagctctcaggcggtcaacaacaacgagcagcaatttctagagctttagctttagagcctaagttaatgctttttgatgagccaacatcggcgttagatccagaaatgatatcagaagtttgaa

SEQ ID NO: 270283 - DNA, 470 bp, Unknown
  Bacterial polypeptide expressing nucleotide sequence isolated from the Sargasso Sea
attactatttgagggaactgtagcagaaaatatcgccttaaataactccgaagcatcagatgatgagatcatcgaagcatctaaaatagcctgcgctcacgattttatcatgacgttggaaaaaggctatgcaacaaatatatctgaacgtggggccaacctaagcggaggtcaacggcagagaatcgctattgcaagaacaatattggcaaatccacaattattgattatggatgaagctacaagcgctcttgattacaataccgaaaatcttttgacgcgcaatctggcggaatgggcacatggaagaacagtgttatttgtcacacacaggttaaattctttgaaaaatagcgatacgattttggttatgcaagactcgatgcttaaagaaaaaggaacacaccaagaactaatggacaagcagtcaatttattacgcattgtggaatcagcaaaacagcctttgat

SEQ ID NO: 270284 - DNA, 793 bp, Unknown
  Bacterial polypeptide expressing nucleotide sequence isolated from the Sargasso Sea
atggccaaaaataatacagatgaaattatagttaagtttgatgaagtaaccaaacaatacggtgatctagtcgttttagataaacttaatcttgaaattaaaaaaaatgaaatggtttcaattataggcccatctggttcaggaaaaacaacagtattaagagttttaatgactttggaaaagataaatggtggggtaatctatttagatggagaacctttaacacacatggattcaaatggaagcatggttgaggcaagtgaaaaatatttaagagagagaaggtcaaaaataggtatggtgtttcaacaatttaatttatttccacatatgacagctttacaaaactgcattgaagctccagttgaggtattaggcatgaagaaagaagaggcagaagaaagagctttagaattattagaacttgttggtttgacagataagaaagatcaacacccaagtagattgtcaggtggtcaacagcaaagagtagccatcgcaagagcacttgctatgagacctaaagtaatgcttttagatgaaattacctcagcgttagatccagaagttgttggagaagttttgaatgttattaggtctttaaataaagaacataatttaactatgataatggttacccatcaaatgggttttgctagagaaatatctgatagagtatgtttttttaatgaaggaaaaatttttgaacaaggacctcctgaacaattatttggggatccacaaaatgagagaaggaaacaatttctgcacgcagtgcttgatgcgaattaat

SEQ ID NO: 270285 - DNA, 496 bp, Unknown
  Bacterial polypeptide expressing nucleotide sequence isolated from the Sargasso Sea
gggtgtggtgccccaagacagcctgctgtttgatggcaccgtgcaggccaacatcgcgctaaccagacccgatgccagctttgaagaaatcactggcgcggcgcaagtggcctgcgctcacgatttcattcaatccttgcccggtggttactccagctccgtaggggaacggggctcagcactttcgggcgggcagcgtcagcgcatggctttggcgcgcatggtgctgaagcgccccaggcttttggtgctcgatgaagccacaagcgccctcgatgtcgacaccgagcaacaggtcacccgcaatctggcggaggtttatcgcggcagcaccgttttgtggataacgcaccgtcttggcagtttgcgccatgccgaccacatcttggtgatgcatcaaggcagcctcgttgagcaggggacccacagcgaactcatgaaattgggtggccgctacgccaccctctaccagcaacaggaggcaggccaggcatga

SEQ ID NO: 270286 - DNA, 511 bp, Unknown
  Bacterial polypeptide expressing nucleotide sequence isolated from the Sargasso Sea
tccccaacaaaaggcacttattctttaaataacaaagaagtgagccaaatgagtgatgatgaactttcaaaaattagaaatactgagataggttttgtttttcagaattttagtttgctaccaagaagctctgctcttgaaaatgtaatgctacctcttcagtatgccggtataagtctcagtgaaagaaaaactattgcacttgatgctcttgaaaaagtagagttattagatagaaaagatcataagccttcagagttatctggaggacaacaacaaagagtagcgattgcacgtgcacttgttaataatccatcaatcttatttgctgatgagcctactggtaatttagatagtcagacaggtatgaaagttttggatatttttaaaaggttaaatgaaaatggtcaaacaattatattaattacccatgaaaatgaagtggctagtgcagctaaaagaattattcacatcaaagacggaaatatttcaaatgatgagatacattagt

SEQ ID NO: 270287 - DNA, 406 bp, Unknown
  Bacterial polypeptide expressing nucleotide sequence isolated from the Sargasso Sea
atcggtatcatctttcagcagtttcatttgatgacccacctcaatgctcttgaaaacgtgagtctccccttggaaatgaatcacgagcaggatgctcttgaacttgccgagaaagcactggagcaggtgggccttggatcgcgtatggatcattttcctcaccaactcagtggaggggagtgccagcgggtggccattgcacgggcaatcgttattcgcccagcgcttcttcttgcggatgagccgtcgggtaacctggatcatgacactggagaacaggtggcaggcctcttattcgatctggtcggaaggataggaatgacgatggtcttggtaacccacaattctgagcttgctttacgatgttccaaacagttgaccctcagtcaggggcttcttcagtgag

SEQ ID NO: 270288 - DNA, 666 bp, Unknown
  Bacterial polypeptide expressing nucleotide sequence isolated from the Sargasso Sea
catggggcccatcttaaaagtaaagaatttaagcaagcattttgatgtttctccgcctttgatcacaaggctggtgagcagggaagaaaaatccattctgaaagcagttgaagggatcggattcgaaatcaagcaaggtgaaaccgtgagccttgtgggagaatcaggatgtggaaaatccaccgttgcaagattggttgtcaaactctatgaacccacaaatggtgagatattttttggagaccaaaacttttcaagcatcaaatccagaaaagagttgaagcccatacgaaggcggattcagatgatttttcaggatccctatgcgagtttaaacccgcgttggagggtctttgatatcattgctgaaccccttcgcgctcatggaatcatttctgataaacagggattgaaaaaacgaatcaatgaattattggaacaagtcagcctctccagtgcagacagcgaaaaattcccccatgaattttcaggaggccagagacaaagaatctcaattgctcgagccctggccagtcaaccggattttttggtgtgtgatgaacccaccagtgctttagatgtctccgtccaggcccagattctcaatctgatgaaaaaactccagaaagaactcggattgacctacttgttcataagccatgattt

SEQ ID NO: 270289 - DNA, 718 bp, Unknown
  Bacterial polypeptide expressing nucleotide sequence isolated from the Sargasso Sea
acagtcattgcggtggacgaggtcgacctcggcatccccaagggccgcactctcggcctcgtgggggaatcgggatgcggcaaaaccacgctcggacgcgccatcctccgcctccagcaaccaacctcgggttccgtacaatatgacggtacggaacttattggcctcacccaatcggacatgctcgagtaccgcaagcgcatgcagatcatttttcaggatccctatgcctccctcaacccccgtcaaaccatcgagcaaaccttgattgaaccgatgctcgttcacaagatcggatcaaaccaggcggatcggcgcgaccgggtcgtttcgctccttgaggaagtcgggcttggagccgagtttctcttgcgctacccacacgaattctctggtggtcaacggcaacgcataagtgtggcccgggccctggcggtggaaccggagttcgttgtctgcgacgagtgtgtctccgcaatggacgtatccgtacaagcccaagtcctcaacctccttcgcgagcttcaggagaaacgtaagctcacctacttgttcatatcccacgacttaagcgtggtgaagtttatgtcagacgacatagccgtcatgaagcaggggtgcatcgaagaattcggttcggctaatgacatttacgaaaacccgcaatccgactacacgagggaattgcttgatgccgttccccgagccgatttctaag

SEQ ID NO: 270290 - DNA, 325 bp, Unknown
  Bacterial polypeptide expressing nucleotide sequence isolated from the Sargasso Sea
tctggagtatccaaaagttacagttcttgaaagatcagaagagatattagaaaaagtggggctgaaagaaagaattaatcatctaccgtcagaactatctggaggagaaagacaaagagtagctatagctcgttctatggtaaatgaaccaacttgcttaattatggatgaaccaactggagacctagatactaataatgcttcaattatcattgatttaatattaaatcttatagaatcgaaggatattagccttatcttggctactcatgatatggtttttgctaatttattagataatattattgatttatcaaatggttga

SEQ ID NO: 270291 - DNA, 406 bp, Unknown
  Bacterial polypeptide expressing nucleotide sequence isolated from the Sargasso Sea
cttatctggtggtcaacaacaacgcgtagctatcgcaagagcgctcgtacagaaacctcaaatagttttagccgatgagcctatagcctctctagatccgttgaatgcgaaaatagtgatggagtccctacgagacattcatgatactgatgggctgactgtcatctgcaatctgcacacactggatacagccagacagttttgcgacagagttataggaatgagcgaaggtcgtatagtttttgatggtaaggcggataatttaacgacagaagttgccaagtctatttatggcgcatcggaggactttgaagagtcaatgacttcgacggcaattggcagcgataataacaagccatcacgagaagacctgcagataaaagaattatcaactgtagacgcgtga

SEQ ID NO: 270292 - DNA, 840 bp, Unknown
  Bacterial polypeptide expressing nucleotide sequence isolated from the Sargasso Sea
tcgaaaagacaaatagctatggttttcaatcatatgctctgtatcctcatatgaatgtttttcaaaacatctcttttggattgacttcagaaaaaatagaaaaaaataaaattaaacaaaaagttttagaggcttcaaaaattttaaaaattgaagaacttttggatagaaaaccaaaagaactctcgggtggtcaaagacaaagagttgctataggcagagctattacgagaaatcctaaacttttcttgtttgatgaaccgctatctaatttagatgctgctctaagatcagaaatgagagttgaaatttcaaaattacacaaaaaattaaaaagcaatattgtttatgtcactcatgatcaaatagaagcaatgactttagcagataaaattgtaattatgaataaaggaaaaattgaacagtttggggatccagaggatatttataataatccaaggaatattttcgttgctgagtttattggaaatccaaaaatgaatattttaaaaattgaaagaaaagatataattaacaaaaatactttaaaattattcaataaaaatatccattttgaaaattctaattttgagagtgagatttatattggaataagacctgaagacatctcattagaaaatgaaagcgaaatttcagctgaaattaaaattgatcttattgaaaatttaggatctgagaaaattatttacacacatataaatggatcagaaataagaataaaaaccattaaaaatatcaaagataaaaatattacaatttacttaccaaaaaataagttatatttattcgatgttaataaaaatagattaaaaacatgac

SEQ ID NO: 270293 - DNA, 475 bp, Unknown
  Bacterial polypeptide expressing nucleotide sequence isolated from the Sargasso Sea
atggcatctattgaactaaaaaatatcgaaaaaagttttggaacaaacaaggtaataaataaatttgatataaaaataaatgatggagaatttattgttttagttggtccatcaggttgtggaaagtctacacttttaagaatgatctcaggtttagagtcagttgatataggagaaatttatttagataacaaactaataaataatctaattccttctaaacgcgaaattgcaatggtttttcaatcctatgctttgtatccacacatgaatgtttttgaaaatatggctttcggattaaaaatggaaaaaattccaaaaagtgaaattaatcaaaaagttaataatgctgctgctacacttcaaattgaggatttgcttgaaaggaagcctaaacagctttcaggtggacaaagacaaagagttgcaattggtagagcaatcacaagaagtcctaaggttttcttatttgatg

SEQ ID NO: 270294 - DNA, 489 bp, Unknown
  Bacterial polypeptide expressing nucleotide sequence isolated from the Sargasso Sea
acaggtccattcgtgaaaacatttgctatgggaaatcagatgcaaccaaaaaagaaatcattgcagcagcaaagaaggctcatgctcatgatttcattttaaatctgcaagatgaaagtggaaggaaaggatacgatgcccacgttggagaacgcggcattaaactgtcaggaggacaacgccagagaataacgttagcacgggtaattttgaaaaatgcacccattttgcttttagacgaagctacgagtgcgctcgacagcgaaattgaaaatcaaattcaagatactttaaaaaatatgatgaaagggaagacagtaattgcaatcgcgcatagattatcgacgattgctcagatggaccgaatacttgtgctagataatggtaaaataatagaggatggagatcatcaatcccttttgtcaaaaggcggattatactatgagctttggcatcaccaatctggtgggtttttgaagtctgactaac

SEQ ID NO: 270295 - DNA, 537 bp, Unknown
  Bacterial polypeptide expressing nucleotide sequence isolated from the Sargasso Sea
ggatttcccagggtcaccccatggtttttccttttaaagtttctgaagtcgttttgatgggacgtcaccctcatctttctgctttatcttttgaaagtcacgaggattttaatatcagccagcgtgcaatggaaacaaccatgacttctgagttttccgaacgattttttaatgaaatcagtgagggggaaaaacagcgtgtgatgattgccagtgccttagcgcagaatcctgaattgatgcttctcgatgaacctacatcagcgttggacttaaaataccaaattgaaatcatgaatatcctcaaggatctcaataccaatcataaaatgacgctaattgtggccatgcatgatctaaaccttgcctctcggttttgtaataggattatcctaataaacgaagggaaggttgttagcgatggtacccctctacaagtgcttaaaaaagatattctcgagcaagtctatggaatagagctagacctcgacttcaaaaacggtcacaccctgattcatcctaagatcgatagttagg

SEQ ID NO: 270296 - DNA, 658 bp, Unknown
  Bacterial polypeptide expressing nucleotide sequence isolated from the Sargasso Sea
atgaaagatacacctcctgtagttgaagccagtaaagttgatttggtattccaaacagcagatggtcctgtacatgcgctgtctgatattgatctggagatcaataaaggtgatttcatctcacttatcggaccatctggatgtggtaaaacaacactgctgcgtttaattgctgaccttgaaaaaccaactggaggcatgctcaaggttaatggaatttctccggaagaagcccgcctgaatcgtgactatggttatgtttttcagtcgcccgccctttacccttggcgcaccgttgatggcaatctgaaattgcctctggagattatgggtgttgaaaaagctgatcagaacaaacgtgccagggaagcactggaaatggttgatcttaccggctttgaaaaaaaattcccctggcagctttccggaggtatgcagcagcgtgtttcaatagcacgtgcactgacattttatcctgatctcctgctgatggatgaaccttttggtgctcttgacgaaatcgtacgtgatcagctcaatgaacactttcacaggctttgggaacagactcacaagaccgtagtgtttgttactcactccattcctgaagcagcctatctttccacaaaaattgtggtcatgtcccccctccaggaaa

SEQ ID NO: 270297 - DNA, 544 bp, Unknown
  Bacterial polypeptide expressing nucleotide sequence isolated from the Sargasso Sea
cattcgagatgttacacaagaaagtcttcacagatctattggtgtggtgcctcaagatacagttctttttaatgatacaatttactacaacatagcatatggacttgataatgcatctcgagctgcagttgaaaaagccgccaaggatgcccaaattcatgattttattttgtccctcccagaaggttacgatacgacagtgggtgagcgtgggttaaagctttcgggtggtgaaaaacagcgagtaggcattgcaaggacccttttaaaaaacccacctattttactattagatgaagcaacatcggcattggatactgaaacagaacgtgaaattcgggagactttaacgaatgcttctgaggggcgaagtgttataacgatcgctcatcgtctttcaacaattgcagatgcggatagaataattgttttggaaaatggaagtattgttgaaataggtacgcacgaagcgcttctcagtaaacggggacgctattattctttgtggacaaaacaattaacagaagataagccagctgcttaa

SEQ ID NO: 270298 - DNA, 523 bp, Unknown
  Bacterial polypeptide expressing nucleotide sequence isolated from the Sargasso Sea
aaatattcggaaaacattcaaattatttttcaagacccttattcatcattaagccccagaatgaatgtgcaagaaatactaactgaaggtatagatgtacattttcctaaacaatctcatattgaaaaaatacaaatgttaaaagatattttaaatgaaactggaatgaattatgatcgtgattataataaatatcctcatgaattttcaggtggtcaacgacaaagaatcgctatagctagagccttaatattaaaacctaaaatactaattttagatgaaccaacttcagctctagatattactatacaaaatcaaattttagatttacttcaaaatcttcaagaaaaattttcactaagttatatatttattagtcatgatatgaatgttataagatctgtctcagataagataatagttcttaaaactggaaaattaattgaatacgatgaagctaaaaatatttttaataaccctgttgataattatacaaaaaatttaatacgctcagttatataaa

SEQ ID NO: 270299 - DNA, 763 bp, Unknown
  Bacterial polypeptide expressing nucleotide sequence isolated from the Sargasso Sea
aaagatgatattgataaaaaagttgataaagctttatctatggtttctttatctggatttgaaaaaagaatgcctaatcagctctcagggggacaacagcaaagagttgctgttgcaagatctctagtatttgaccctcaattagttttaatggatgaaccattaggagctttagataaaaatttaagagaaagtatgcagtatgagataaaacatattcacgaaaatattggtgtaactgtagtttatgtcactcatgatcaaagcgaagctcttaccatgtctagtagaattgcagtatttaatgatgggaaagttcaacaactatcaagtccagataaattatatgaagaaccagtcaattcatttgttgcagagtttataggagagaacaatactttttctggacaagtgacagatatctcaggaggtaaatgtaaagttaaactagatactggcgctgaaataatttctaatccgataagggtaaaaacaaagggagaaaaaactaaagtttcattgagacctgagagggcgataatagatccagaagaaaaaatggataacaaacataaagggaaaatagaggaagtaatttaccacggagatcatgcaagagttaggttaaatttattaggcaataaagaatttattttaaaagtaccaaacagctctgcaagaatggatataaaacctggtaatgaaattaatgtaggttggaacagtaatgatgctagagctttagatccaaaatcaatctgag

SEQ ID NO: 270300 - DNA, 694 bp, Unknown
  Bacterial polypeptide expressing nucleotide sequence isolated from the Sargasso Sea
aatgcctaatcagttatcaggcggtcaacaacagagagttgctgtagcaagatctttagtatttgatccccaactagttttaatggatgagccattaggagctttagataaaaatctaagagaaagtatgcaatatgaaattaaacacattcacgaaaatattggagtaacagtggtctatgttacccacgaccaaagtgaagctcttactatgtctagtagaatagcagtttttaatgatggaaaagtacagcaattatcaagcccagataaactatacgaagaaccagtaaattcatttgttgcagaatttataggtgaaaataatactttttctggacaagttacagatatttcaggaggtaaatgtaaagtaaaattagatactggtgctgaaataatttctaaccctataagagtaaaaacaaaaggagaaaaaactaaagtttctctaagacccgaaagagcgattatagatccagaagaaaaaatggataataaacataaaggaaaaatagaggaagttatttaccacggagatcatgcaagagttaggttaaatttattaggtaataaagaatttattttaaaagttccaaacagctctgcaagaatggatataaaacctggtaatgaaattaatgtaggttggaacagtaatgatgctagagctttagatccaaaatcaatctga

SEQ ID NO: 270301 - DNA, 654 bp, Unknown
  Bacterial polypeptide expressing nucleotide sequence isolated from the Sargasso Sea
aagtaaatcaaaatgaaattattggtatacttggtcctaatggttgtggaaaaactactacaatcggtatgattttaggtttgttaaaaccatcaaaaggaaaagttttaataaatggtgtcgaaattgaaaatcaacgtgtagatttattaaatcaattaaattttatatcaccttatatagagttgccaaaaaaattgacagttagacaaaatttagaagtttatgggaggctttatgatgtaaacaaacataaggaaaaaattgaatatctgtgtgaaaaattaagactctacgaatttatagataaattaactggggagttgtcatctggtcaaaaaaatagggttagtcttgcaaaatcaataattaataatccaaaagttttacttcttgatgaacctacagcatcacttgatcctgaaacaggtgattttgtcagaagttttttagaagaatatcaacaggaaaacaaaacatcaattctattagcatcacataatatggcagaggtagagagactatgttcttcagttttaatgatgaataaaggatcgattattgatgagggtaaaccagaggaattaattaaaaaacatggaagaaaaaatatggaagaagtttttttaaaactaacaagggaaaaagtatgaa

SEQ ID NO: 270302 - DNA, 445 bp, Unknown
  Bacterial polypeptide expressing nucleotide sequence isolated from the Sargasso Sea
aatgacagaagtcaatattgtaaatttaattaaaaacttctcaggcatgacaagacctgcagttgataatatatctattaatatacgaaatggggaactgatagctttattaggcccttcaggttgtggaaaaactactattttaaaaatgataacaggattattaactcctgacaatggtgatattttattagataaccaatctatcttatctgtaccaacagaaaaaagaaatgttgttatggtttttcaaaattatttactttttccttatatgaatgtgaatgaaaatgttggtttttcactcaagatgaaaggagatgacccaaaaataataaataaaagagttcaagaaatgttagagttagttaaattgcctgatataggagaaagaagaccaaaacaattatctggaggacagcaacaaagggtagcattagcaaga

SEQ ID NO: 270303 - DNA, 574 bp, Unknown
  Bacterial polypeptide expressing nucleotide sequence isolated from the Sargasso Sea
aatgaataaaaccatcttagaagtttccaatgttacaaaaaaagttaccagccctgagggcgaactaaccattgtaaatgatatcagtctttccttggaggagggcgtttttgcatccattttgggcccatctggatctgggaagaccacgcttcttgcaatcatggctggccttgatctgcctagtagtggatccgtgaagcttcttgataaagaaatcacaagcttaactgaggataagagggcacagattagaagcaaggacgttggttttgtttttcaatcttttcatttgttgcctcgattatcagccttagacaatgtgatgatgccactcgagatactcggcgctaaagacgcaaaggagagggcactaaaagctttggatgaagtgggtttgtccaaaagaacaggacacgttcctcatcaattatctggaggagaaaagcagcgagtcgcaattgcaagagccatggttaaagcgcccagcatcttatttgcggacgagcccactggaaatttagaccaatcaagcactgacaatattctcgaactattactggggaatcaataa

SEQ ID NO: 270304 - DNA, 649 bp, Unknown
  Bacterial polypeptide expressing nucleotide sequence isolated from the Sargasso Sea
aaagagatagctatgatacctcaaaatgccggtcaatcactcacacctaatcttaaaataggatatcaaattgaagaaacattaaaactgcattcaacaatcaacactaaagacagacaattaaaaataacagaacttttacataaagtaaggctcccatcaccaaatattatggctcagagatatcctcatgagctatctggtggacagcagcaaagagtggctatagccatggcattagcaggtagtccaaaattattacttttagatgaaccaacaaccggtcttgatgtaacaactcaagctcatgtacttgagttattaaatgaaattgctaaagatacagacacctcattggtttatgtaagtcatgaccttggagcaattgctcaagtaagtgacagagtaattgtaatgtacgctggagaaatagttcttgatggtaatgttcgagaagttttaagttcccccctccacccttatgcttatggattacttaattcaataccaaaactctctttaccaggattgcctgaagcaatgcctggtacacctcctgagcttgaacaaaatataaaagggtgtagtttttttgaaagatgtgaatttgcaacagataaatgcaaaaattcaaagccagagcttttta

SEQ ID NO: 270305 - DNA, 343 bp, Unknown
  Bacterial polypeptide expressing nucleotide sequence isolated from the Sargasso Sea
tggactcgacacactgatcggtgagaatggaatgcgcttgagcggtgggcaacgccagcggttgggtgtggcccgtgcgctgtttacccgcccgcgtctgttggttcttgatgaagcgaccagtgccctagactccgaaactgagcaggccatcgcgcggaccatgatggacttggagggaagcgtgacgaccatcacgatcgcccaccgcttagcgactatacggcactgcgatcttgttctctatctagatcagggtaggctggcggcagggggagattttgacgacgtgcgcgcgcagtcggtcgattttgaccgtcaagcgaaactcctagggctctga

SEQ ID NO: 270306 - DNA, 349 bp, Unknown
  Bacterial polypeptide expressing nucleotide sequence isolated from the Sargasso Sea
actggggaactttcatcaggtcaaaaaaatagagtaagtttagccaaagccctagttaatgaaccaaaagttctgctacttgacgaaccaactgcttctttagacccagaagtaggagattttgtaagaacatttttagaagattataaaaaagaaaaaaaaatttcgatacttttagcttctcataatatgaatgaagtcacacgtttatgtaaatctgtattaatgatgaaaaatggagagataatagaccaaggcaaacctgaagatttaatcgcaaaacatggaagaacaaatttagaggaggtttttttaaaactttcaaggagtaaaaatgagtttaactaga

SEQ ID NO: 270307 - DNA, 711 bp, Unknown
  Bacterial polypeptide expressing nucleotide sequence isolated from the Sargasso Sea
tccattgaaggtaagaaaaatgtctcaagtggaaatagagaaaaaagtagataaagctttatcaatggtttcactcggtggatttgcaaacagaatgccaggtcagctgtcaggaggtcaacaacaaagagtagcagttgcaagagcattagttttcgatccatctgttgtattaatggatgagcctttaggtgccttagataaaaatttaagagaaagtatgcagtacgaaattaaacacattcatgaaagtattggtgtaacagtagtttatgtaactcatgatcaaggtgaagctttaactatgtcaaatagaatcgcggtatttaatgatggtaaagttcaacaactatcaagtcctgataagttatatgaagaacctgtgaactcctttgtggcagaatttattggagaaaataatacctttggtggagaggtttctgaaatttcaaatggaacatgtaaagtgaaattagaaaaaggtgaaataattgctaatccaatttcagtaaaatctgtaggtgaaaaaactacagtatcaattagaccagaacgagctttgataaaccctaaagacaaaatggataataatcaaaaaggaaaaatcgaggaggtcatttatcatggggatcatactagagttagattaaatttacttggtaattcagaatttatattgaaagttccaaacagttctcaaaacttagatat

SEQ ID NO: 270308 - DNA, 661 bp, Unknown
  Bacterial polypeptide expressing nucleotide sequence isolated from the Sargasso Sea
tctgcccatgcgctttacgctgtcggtcgcgcacggtgagcagatagcgatactcgggcccagcggcgccgggaaaagtacgctgctgaatctgattgccggctttctcacgcctgccagcggtaacatggtgattgacggtgaagatcacaccacgacaccaccctcgcgccgtcctgtttctatgctgtttcaggaaaacaacctgttcagccatctgagcgtacagcaaaacatcggcctgggcctgaatcctggattgaagcttaacgcatcgcagcgggagaaaatactccacatcgcccagcaaatggggatcgactctctgctggaacgcctccccagtgagctttccggcgggcagcggcagcgcgtggcgctggcgcgttgtctggtgcgggaacaacctattttactgcttgatgaaccgttctctgcacttgatcccgcgctgcgccaggagatgctaacgctggtggccgaagtctgtcgcgagaaaaagctgacgttactgatggtttcccacagcgtagaagatgcggcgcgaattgcgccccgctcgattgtggtcgccgacgggcgcatcgcctggcagggcgatacggacgatctgttaagcggcaacgctagcgcctcggcgctattgggcattaaagcataa

SEQ ID NO: 270309 - DNA, 466 bp, Unknown
  Bacterial polypeptide expressing nucleotide sequence isolated from the Sargasso Sea
tgaactgcccaaaaaactcacagtagaagaaaatcttgaagtttacggaagattatatggagtaaataatctacaaaataaaattttgaatttgatggaagatttagatttaactgattttagaaaaagaaaaactggcgaactctcttctggacaaaaaaatagagtttctcttgccaaggcattaattaatgaaccagaaatacttcttttagatgaaccaacagcaagtcttgatccagatgtgggtgattatattagaacttatattgaaaacttttcttcaaaaaaaggtacaactattttattggcatcccataatatgaatgaagttgaaagactttgcagtgaagtaatgatgatgaaaaatggaaaaattatagataaaggaacatgtaatgctttaattagtaaacatggaagaaaaaatttagaagaaacttttttaaaaatagttagagaataa

SEQ ID NO: 270310 - DNA, 310 bp, Unknown
  Bacterial polypeptide expressing nucleotide sequence isolated from the Sargasso Sea
tatgtccaatgctataattaaaattgaaaatatgaataaatggtttggagattttcaagtattaaaagatattaatttagaagtagaaaaaaataaaaaaattgtagtttgtggaccatcaggctcaggtaaatcaactcttataagatgtattaatagattagaagaacatcaaaaaggttcaattgtagtagatggaaccgaacttacagaaaatactaaaaacattgaagcgataagagctgaggttggtatggtattccaacaattcaacttatttccacatctttcaatattagacaactgtact

SEQ ID NO: 270311 - DNA, 479 bp, Unknown
  Bacterial polypeptide expressing nucleotide sequence isolated from the Sargasso Sea
atttcaacaatttaatttatttccacatttgtctattttggataactgcactttagctcctatttgggtaaaaaaaatgcctaagaaaaatgctgaagagcttgcaatgaaacaattagaacaagttcaaattgttgaccaagcccaaaaatttcctggtcaattatctggtggacaacaacaaagatgtgctatcgctagagcattgtgtatggaacctaaaataatgttatttgatgaaccaacctcagcattggaccctgaaatgatcaaagaagtattagatgcaatggtaaatttagcaaaagcaggaatgactatgattgtagtaacacatgagatgggctttgctaaagaggttgctgatgaagtaatttttatggacgaagggatgatagttgaaaaagcagaaactaaagagttttttgctaatccaaaaagtgatagaactaaactatttttaagtcaaattctttaac

SEQ ID NO: 270312 - DNA, 631 bp, Unknown
  Bacterial polypeptide expressing nucleotide sequence isolated from the Sargasso Sea
aatggttgtgaatttatttaaaccaagttctggggatatattttttgataatgtaaatgttactaagatcaaaaaaaataaagatttattaaaatttagaagacaaattcagatgatctttcaagacccattttcttctttaaatggcagactcaaagtaaaagaaattattgcagaaccaattaaacttcataacccaaatataaaatctattgatttagacaattatatttacgatttattagagtctgtagaattaagtcaacaatcggcaataagatatcctcatgagttttcgggtggtcaaagacaaagaatatcaattgcaagagcattagctacacagcctagacttcttgtttgtgatgaaccaacttcagcccttgatgttagtattcaggctcaaatcttaaacttattaaaagatttacaagaacagttaaatcttactattttgtttatcagtcacgatttacctgtagttagacaaatgtgtgataaaatagctgtacttaaagatggaaaattatgtgaagtttctgaaacggaggaattgtttaaaaacccaaaacataattatacaaaggaactactaaaattaatgccaaaaattgagtcaatttataactaa

SEQ ID NO: 270313 - DNA, 793 bp, Unknown
  Bacterial polypeptide expressing nucleotide sequence isolated from the Sargasso Sea
gaaaacttagcttttcctttaagagtaagaaaagttgagaaagacgaaattgataaaaaagttgataaggctttgtcgatggtttcattgaacggatttgaaacaagaatgccagcccaactttcaggtggtcaacaacaaagagttgctgtagcaagagctttagtatttgacccagcagttgttttaatggacgagcctttaggagcgctagataaaaatttgagagaaagtatgcaatatgaaattaaacatattcatgaaagtattggggtaacagttgtttatgtaactcatgatcaaagtgaagctttgacaatgtctaatagaattgcagttttcaatgatggaaaagttcaacaattatcagacccagctgaattatatgaaaaacctgtaaattcgtttgtcgctgaatttattggtgagaataatacttttaatggagaagttatagatatagataaagataaatgtaaagttaagttaggtaatgctgaaataatagccaatcctatttcggtaaaatctaaaggtgaaaaaactactgtttcattgagacccgagagggcactaataaatccaaaagataaaatggataatatgtttactggaaagatagaggaagttatttatcatggtgaccatacaagagtgaggttaaatcttttaggtagctcagaatttattttaaaagttccaaatagcacctccaatctagagctaaaagtaagtcaagatattaaaattggatggaacagcttagatgctagggctttagacccaaaataaa

SEQ ID NO: 270314 - DNA, 265 bp, Unknown
  Bacterial polypeptide expressing nucleotide sequence isolated from the Sargasso Sea
cggccctcggccttgtccggcggggagcgacaacgggtggccattgcgcgggcgctggttaatcagccggcctgtgtcctgctggatgagccgaccggcaatctggatgcggatactgcggagtcggtacacgccttgctggcagaattgaaccgtgaatatcagaccagtctgctggtggtcacccatgacatgcagcttgcccagcgcatggatcgcatttatcgcttgcaggcagggcagttgcacgagcaggtggcctgat

SEQ ID NO: 270315 - DNA, 358 bp, Unknown
  Bacterial polypeptide expressing nucleotide sequence isolated from the Sargasso Sea
actgtctggagggcagagacaacgactatcaattgcccgtgctttggttaaagatgccccgatactgatactggatgaggcaacctctgcacttgattcagaatcagaaattgaagttcagcaggcagttgaacatctaatggaaaatcgcactacgctggtgatcgctcacagactatctacgatccagagcgcagacaggatttgtgttatggaaaacggtcagattgtagaacaagggaaacatgaagaacttttgctaaatgggggaagatatcaccaactttatgaaatgcagtttaaacatcagcctgaaattcaaataacggaagaatccaaagaaaatctagtttcctga

SEQ ID NO: 270316 - DNA, 601 bp, Unknown
  Bacterial polypeptide expressing nucleotide sequence isolated from the Sargasso Sea
aaagctgaggtagtggatatacctggtgcgaaaaaactccaaattaaagaaggtgagataagatttgacgctgtctcattcggctattcacccgagagaactgtacttaaaagcttgacgtttcgggttgctccaggcgaaacccttgcaatagtaggagctagcggctcaggaaaatcaaccatcactcgtcttatttttagactctacgatacattagatggaaaaatcttaattgatggtcaagatatcagactgataacccaggaaagtcttcgtgagtcgattgcgattgtatcacaggatacaatactctttaacgagacaatttattataacatagcatatgggcggcctaacgcttctcccagtgaagttgaggaagctgcgcgtttagcgcagattcatgaatttatcacgaaacaaccgaacgggtatcagacgattgttggggagagaggactgaagctttccggtggtgaacgtcagagagtgggaattgcgcgggccctcataaaacagacaaaaattcttgtttttgatgaggcaacatcagctctcgacagctatactgagagggaaattttcgatggtcttaatg

SEQ ID NO: 270317 - DNA, 806 bp, Unknown
  Bacterial polypeptide expressing nucleotide sequence isolated from the Sargasso Sea
aacgcaattaaccttgaaaattaaaaatggtgaattgttagggttgcttggtccttctggctgcggaaaaactactcttttaagattaatcgctgggttcgaatacccaactagagggaggatttctctaaatgataaggaaatttcaagtgggaaaaaaatacttagtcctgagaaaagaaatattggtatggtttttcaagactatgcacttttccctcacttaactgttttggaaaatgtaatttttggtttaaaaaacaaaaaagatagatctagagttgactatttgctaaatgttctaggtcttgatcgttttattggaagatacccacatgaattatctggaggccaaaaacaaagactagcaattgcgagagctcttgctcctggtactaattttattttattagatgaaccattttgtagtcttgatatgcatgtcaaattaaaattgagaagtgaattcccaaatatcctaagaggttgtaatgcaagtggattgatggttactcatgatccggaagaggcaatgtcaatttgcgataaagttgccgtcatgaatgaaggaaaaatacatcaaattgatacaccaattaaccttctaaataatcccaagaccctatttgttagtagttttattttgggtaataatattattaatcttcaaaaaaatggtaatacatatatgtcttgtttaggtcgaataaatagttcaggtgttttacaaaatgcaaatattaaaagtatgtcaatttcgcctaagtttatttcaattaaaagatcagaatctggaaatgcgaatg

SEQ ID NO: 270318 - DNA, 460 bp, Unknown
  Bacterial polypeptide expressing nucleotide sequence isolated from the Sargasso Sea
atgccccaaaaagtaaaaaacgcaattgtgcgtatggaaaatgttagcaagtggtttgacgatttccaggctatcaatgatgttaatctgacaatttatgagggggaaagaattgtaatatgtgggccatcaggctcgggaaagtcgacattgataagatgtttgaacggccttgaaaagcatcaaaaggggaaaataactgtacatgagaccgagcttactgggggtgcttcatcggtgagaaaggtccgcgaagacgtcggtatggtcttccagcaatttaatctttttccacatttgacagttttggaaaattgcacattagcaccagtcagcaactccaaaatggatgccagtgcagctcacaataaagctatggagtaccttaagagagttcagatccctgaacaggctgacaaattgccaggacaattatcaggcggtcagcagcagcgagtag

SEQ ID NO: 270319 - DNA, 88 bp, Unknown
  Bacterial polypeptide expressing nucleotide sequence isolated from the Sargasso Sea
ttgcaaaggcaccatggaggcttttctgtttttgctggagttggtgaaagaactagagaaggaaacgatttgtatcatgaaatgattg

SEQ ID NO: 270320 - DNA, 760 bp, Unknown
  Bacterial polypeptide expressing nucleotide sequence isolated from the Sargasso Sea
aaaggcagaccttacagtcaaaaaatgcaaaatataatattgaatttgactaaatctattaatgaccctcaaaatgcaccaaaactacttgttggaacaggagaagataaaaagtatctgtgtgtagttttaaccgctgacagaggtctttgtggaggattcaattcaaatatttgtaaattagctaagactaattttaaaaaaattctaagtgaaggaaaagaacttaatattattaccgttggatctaaaggacatgatcaaattaaaagagaatatggaaaatatgttattaaaaaattcagttttaaagataaaaaaaatataagcttcaacgatgcggatgaggtagggaaagaaataatatctttattcaatcaagataaatttgataaatgtattatattttacaataattttaaaaatgtaattacacagataccgcaagctcaacaaataattccagcagagacaaaaaatttagaagaaggcaatgaccaaaatttttcatacgaatttgaaccagaggaagatgaaattttagaagacttactgccaaaaaatatttcaactcaagttttcaaagctctacttgaaaatgcagcgagtgaacaaggatcaagaatgacggcaatggataacgcaaccagaaacgctggagatttagtcgacaaactttacatcgatttatataggagcagacaagcatctattacaaaagaatttaatagaattatatcaggagcagaaagtttataat

SEQ ID NO: 270321 - DNA, 661 bp, Unknown
  Bacterial polypeptide expressing nucleotide sequence isolated from the Sargasso Sea
gaattagtttcttaccaaaagaatattaaagagagtaaaaattttgattcagcttctatcttaaaagttgaaggtttagatgtatggtacccaattaaaaaaggtcttttaaaaagaacagttgactatgtaaaagcaattaaaaatgtcagttttgatttaaaaattggtgaaagtattggtatcgttggagagtcaggttcaggaaaaacatctcttattttagctattttaaatttaattgaatctaaaggaaaaatacaaataaataaaaaagatcttagtcaattaaataagaaagaaatgttaaatttgagaaaggaaatacaaattgtatttcaagatccattttcatcattaagtccaagaatgaatatagaagatattatttctgaaggattgttaattcattatccaaaaataggtaaaaaagaaaaagaagaaaaaataaaaaatatattagataaagttggattagaatataaaaatacgattgaaaaatatcctcatgaattttcaggtggtcaacgtcagaggattgcaattgcaagagctttaattttggagccaaaaattttaattttagatgaacctacatcggctctagatgtaacaattcagagtcaaataataaaccttctaaataaacttcaaaaacaac

SEQ ID NO: 270322 - DNA, 463 bp, Unknown
  Bacterial polypeptide expressing nucleotide sequence isolated from the Sargasso Sea
atgacagctctacaaaattgtattgaagccccagtgcaagttttaggaatgaaaaaagaagaggcagaagaaagagcacttgaattattagaacttgtagggttaacagacaaaaaggatcagcacccatcaagactgtcaggtggccaacaacaaagagtggccattgctagagctttagccatgagaccaaaagttatgcttttagatgaaatcacctcagctctagaccctgaagttgtgggagaagttttaaacgttattaggtctttaaataaagaacataatttaacaatgataatggttactcatcaaatgggctttgctagagagatatcagatcgtgtttgtttttttaacgaaggcaagatatttgaacaaggaccaccagaaaaattgtttggtgatcctaaaaatgagagaacaaagcaatttttacatgctgttcttgatgcaaattaat

SEQ ID NO: 270323 - DNA, 484 bp, Unknown
  Bacterial polypeptide expressing nucleotide sequence isolated from the Sargasso Sea
tacattgagctgccaaaaaaactaactgtgaaacaaaatttaattgtttatggaaaattatatagcataaagaatttagaaaataggatcgaatatctctcagaaacattaagattaaaaaatttattaaacagagttacgggagaactttcttcgggacaaaaaaatagagtaagcttagcaaaagcactgatcaatgaaccaaaggtattgctattagatgaaccgactgcatctcttgatcctgaaataggagattttgttcgaacatttatagaaaattacaaaaaagaaaaaaagatgtctatcttattagcttctcataatatgaatgaggtaactagactttgttcatctataatgatgatgaaagatggagaaattatagacagtggcaatccaaaagatcttataaaaaagcatgggagacaaaatttagaagaagtatttttaaaacttacaagaaacaaaaatgaactttagt

SEQ ID NO: 270324 - DNA, 571 bp, Unknown
  Bacterial polypeptide expressing nucleotide sequence isolated from the Sargasso Sea
ttgaaagatcgctcaaaggaggatgaagtggcagatataaatataaatactgttaataaatattttggagacgtccacgtaattaaagacgtatctctagatatcaaaagtcaatcattcacagttctagtcggacctagtggttgtggtaaatcaactatgttaagaatgatagcaggactggaagatatcaattcaggtacaatttcaattgatggtcaagtggttaatgatttaccaccaaagcaaagaaatattgcaatggtgtttcaatcttatgcattgtaccctcatatgactgtatttgataatatggcatttggattaaaattagaaaaaagatctaaagatgaaattaatgaaagagtaaatgaagctgcaagaattcttcaaatagaagattatcttcaaagaaaaccaaaacaactttcaggtggtcaaagacaacgtgttgcaattggaagagcaatcacaagaaagccaaaagttttcttgtttgatgaaccactttctaaccttgatgctgcattgagggttcaaatgagagttgaattagcaaaacttcataatg

SEQ ID NO: 270325 - DNA, 792 bp, Unknown
  Bacterial polypeptide expressing nucleotide sequence isolated from the Sargasso Sea
gtcgtgaaggcgaggatggccgcgcacgagctccacgcggtcatagaccgcgcgccggagggcggcgagggcgccgatacgcgcgacccgaaaggcgcggcgctcgtcgcgagccaagtcaagggagagatcgagttcgtggacgtgacgttcgcgtacgcggcgaggccgattttccgagggttgacgatgaacattcccgcgggaaccaccgccgcgctcgtcggggagagcgggtgcgggaagtccacgatcgcgcgcttactcgagcgtttctacgaccccacctccggcgtcattcggctggacggcgtggacatctcgtccatcagaatcaccgacctcagagccgcgatcgggatcgtctcccaagaaccgctgctgttcgaggcgtcgcttcgcgagaacatcgccgtgggacgcgcgaacgcgtccgccgaggacgtgccgctcgaggacgtcgtcagcgcggcgatgtcggcgatggcgcacgacttcatctcctcgttcccatccggatacgacacgatcgtgggcgggaagaactcgaagctcagcggcgggcagaagcagcgcgtcgccatcgcccgcgccgcgctcaggaaccccccggtgctcatcttggacgaggccacctccgcgctggacaccgagaacgagcggctcgttcaggaggcgctcgacgcgctcgtggccgggtcgaagcgaacgacgatcgtcatcgcgcacaggctgaccacggtcaggggcgcggataagatcatcgtcctggggtcggcggacgccgcgggg

SEQ ID NO: 270326 - DNA, 469 bp, Unknown
  Bacterial polypeptide expressing nucleotide sequence isolated from the Sargasso Sea
gtttaatctgtttcctcatctttcaatactagataattgcacactagcaccgatatgggtaaaaaaaatgcccaagaaagatgctgaagatcttgcacttaaacaattaaaacaagttcaaatcgatgatcaagcatataaatatccaggtcaattatcaggtggccaacaacaaagatgcgctattgctagagcattatgcatggaaccaaaaataatgctatttgacgaaccaacatctgcccttgatcctgaaatgattaaagaagttttagatgcaatggtaaatcttgcaaaggcaggaatgacaatgattgttgtaactcatgaaatgggttttgctaaagaagtagccgatgaagtaatttttatggacgaaggtatgattatagaaaaagctaccacaaccgaattttttgccaatcctaaaagtgatagaaccaagctatttttaagccaaattctttag

SEQ ID NO: 270327 - DNA, 403 bp, Unknown
  Bacterial polypeptide expressing nucleotide sequence isolated from the Sargasso Sea
tatgtattacaatgaatctttaatagtaaatgacgtaactcacttttataaaaaaactaaatctataaataattttagtttaagagttaaaaagggtgaagttgtaagtttgctaggtccaagtgggtgcggtaagactactttactgagacttatagctggttttgatgatcctgtttccggggaaataatcataggtgaaaacatagtatatggttcaaattatatttctacagaaaaaagaggtgttgggatgttgtttcaagatatagcattatttcctcatcttactgtgggaaaaaatataggttttgccattgaaaataataaaaatagaaatgaagttataataaatttattaaaaaaagttggtttagaaaaatttattaataggtatccagat

SEQ ID NO: 270328 - DNA, 334 bp, Unknown
  Bacterial polypeptide expressing nucleotide sequence isolated from the Sargasso Sea
tttgtataagaagaactttgtgaaaaaagatgcgttaataattgatgatttgcatcataaatatgataagcgagaatgttcaaattggatattaaacgaaattaacctgaaaattgaaaatggcgaattgttagggttgcttggtccttctggttgcggaaaaactactcttttaagattaattgcagggttcgaatacccctctagagggaggatttctctaaatgataaggaaatttcaagtagggaaaaaattcttagtcctgagaaaagaaatattggtatggtttttcaaggctatgcacttttccctcacttaactgtttggaaaatg

SEQ ID NO: 270329 - DNA, 565 bp, Unknown
  Bacterial polypeptide expressing nucleotide sequence isolated from the Sargasso Sea
tatggggccatctggctctggaaagtctactttaatgaatataataggatgtttagattctcccacagatggtgattactatctaaatgataagtctgtaagtcaattaagtgatgatgaattagctaaaataagaaataaagaaataggctttgtatttcaatcttttcatttacttccaagaaatactgcttttgaaaatgtaatgctacctttaaagtatgctggtttggataaaaatgttgcaaaaaaaaagacagaaaaagtaattgatcttgttggtttatctagtagatctaatcatacacctgcagaattatctggaggacaacaacaaagagttgcaatagctagagcattggtaaacaaaccgagtattttatttgcagatgagccaacaggaaatttagattcaaaaactggacaagatgtgatgaaaatctttaaagatctaaatgagcttggtcaaacgataattttgataactcatgagaatgatattgcaagacagtctaatagaattattactattatggatggtctgatagaatccgacacaaactaa

SEQ ID NO: 270330 - DNA, 450 bp, Unknown
  Bacterial polypeptide expressing nucleotide sequence isolated from the Sargasso Sea
atataaaattagatagtcgtattttaaatgataaaaaaatatttatagaacccgaaaatagaaatataggttatgtttttcaagatttcgcactatttcctcatattaatgctgaaaaaaatatgaaatatgctttatcaaatgattttcatagctcgtatgaagaaattatcaacactttaaatcttcaagaccatcttaaaaaaatgccgcatgaaatgtctggtggccaacaacaaagagttgcaattgctagatctatattgatgaaaccatcccttcttattttagatgagccattctcaaaccttgataaggaaaatgcttcgaatgcacagtctttgatagcaaaaatagtgaaagatcttaatattccttgcattctggtaacgcatgattcaaataatttaaattttttaaaaatttctgaagaaattactcttaattaac

SEQ ID NO: 270331 - DNA, 885 bp, Unknown
  Bacterial polypeptide expressing nucleotide sequence isolated from the Sargasso Sea
ctgggggttatagccgagacagcagatcgtgtagcagttatgaaaagtggtaatttggttgaaatcggtgaaaccaaaaaaattttaactaatccacaagaaaattatactaaaagtttagtaagttcagttccaccaactaacaaaaaaatttcaagatttgtgatagtagaaaaagaaaacaataataaagaagaaaataatattaaaatattaaatagatggtcaaagaaagaaattataaaacaagatttagttgaaataaaaaatcttaataaaagttttgatgataatttttttacagaaaattctaaaaattctgtgatggctgttaatgatgtttcatttgaaataaaagagggtgaatcttttggtttagtaggagaaagtgggagcggaaaatctacaattgctaaaatgattgtgaatttatttaaacctacatctggagatatattatttgacaatgtttgtataacaaaaattaaacagagatctgaattaatgaaatttagaaaacaaattcaaatgatatttcaagatccttattcttcacttaacggaagattaaaagtaaaagatataatcgcagaaccaattacacttcacaatccatctatatctaattttgatttaaataattatatttatgatttgttggagtctgtagaattaacccaaaaatctgcagatcgttatccacatgaattttcaggcggacagagacagagaatatcaattgcaagagcacttgccacacaaccaagacttttagtttgtgatgaacctacctcagctctagacgtaagcattcaagcacaaatactaaatttactaaaagatcttcaagaacaattgaatttaacaattttatttataagtcat

SEQ ID NO: 270332 - DNA, 541 bp, Unknown
  Bacterial polypeptide expressing nucleotide sequence isolated from the Sargasso Sea
atggctactttagtcgctgaaaatttaacctttgcatacgcaaaaaaaagtaatccagttttgaataaggtatcggttgagattaaacctggaactctaacagcgttagtgggcccaaacggcgcaggtaaatcaactcttttgagaattttgcaaggacaaaatattccagataaaggcgaaataaaaattgacggtgaaaatttatatagatctagagctcttgtggcacttatgcctcaaagaagttctttgaattggaagttccccattacagttgaaaaattggtatctcttggtcaaataaagtattcaaaatcaagaagtaataacccatttcaaattaagactcttctagcatatcctaattcttggattaataaatgttgtgaattagaggcgacaatgcagagagtaggcattgcaagtttggctaatagaagacttgattctctttcaggaggacagcagcaaagagctctattagcaaaaactcttatgtccccggcaaaaatatttcttttagatgaaccttgtgcag

SEQ ID NO: 270333 - DNA, 675 bp, Unknown
  Bacterial polypeptide expressing nucleotide sequence isolated from the Sargasso Sea
gcggccagcgccagcgggtggcgatggcccgcgccatcgtgcgcaacccgcggctgttcctgatggacgagccgctctccaacctcgacgcgcgcctgcgcagcgaagtgcgcgacagcattatggatctccaccagcagctgaaaaccagcaccgtctacgtcacccacgaccagaccgaggcgatgtcgatggccgaccgcatcgtggtgatgaacggcggccacgtccagcaggtcgggcggccggagtacctctacgcccatccggccaacctgttcgtcgccgggtttatcggctcgccggcgatgaacctgctgtcgctgccctgcgccgacggtgaggtacagctcggcgacctgcgccatccgctgccgtcgcgctatcgcgacgagccccgggtctggtttggcattcgtccggaacatatcagcgatcgcgtggaggaggggcacctgcgcctctctgccaccgtgctgcaacgagaactgatgggagccgattacctgctccacgtcagcacccccatcggcacactgcgctttagccgccgccatcgcggcgcggtgccggagaaaggcgacacgctgaccctcggcttttcgcccggggatattcatctttttcatgctgagcaacagcacaatttactccaggagattgaccatgcttaaa

SEQ ID NO: 270334 - DNA, 580 bp, Unknown
  Bacterial polypeptide expressing nucleotide sequence isolated from the Sargasso Sea
atgattaaaacaagaaacttaagaaggtcttacctaacaggtacacagtctgtagatgctattaaaggtattgatttagatatcagcagaggcgaatttatctcaattatgggtccctcaggctctggtaaaaccacactaatgaatattataggttgtttagattcaccatcgtcaggtgaatattatttaaatgataaattggtgagtgaattaagcgataatgagctagcaacaataaggaataatgaaattggctttgtttttcaatcatttcatttactagcaaggaattctgcattagacaacataatgcttccactgaagtatgctggcaaagataaagtttctgctttagaaagatcccaagaagtacttaaacaagttggactttctgatagagcctcgcatactcctgcagaattatcaggaggacagcaacagagggttgctatagcaagagcactcgtaaatagtccaagtattatttttgcagacgaaccaacaggaaatttagattccaaaactggagcagaggttatgtcactatttaaagatctaaacgcaaatggacagacta

SEQ ID NO: 270335 - DNA, 646 bp, Unknown
  Bacterial polypeptide expressing nucleotide sequence isolated from the Sargasso Sea
tttccaaagtatacgaaggcccacccaccagtgagagctttagatggtgtatctcttgaggtagaagaaggtgactttgtagcgatagtaggtcaatctggaagtggaaaatctactttacttaacatgattggattattggatagtataacagaagggtcaattgaaattgaagaaagtgatgtttcgcaactttctgataatgaactttccaaatttcggggtgaaaagataggatttatctttcaaagtttctttcttttacctgggctaactgctcaagaaaacgtagctgaaggactgctttatcaaggcatttcaagaacagaaaggctaaaaaaagcaacagaagttttagatcaagttggtttaggtgatagattaactcaccttccaaaagaattatctggtggacagcaacaaagagttgcaattgcaagagcacttgtccaagatccagcatttgtattagcagatgaaccaactgggaatctggataaagaatctggaataaatattttaaacattttaaaagaccttaataaccaaggaaaaactgtcataatgattacccacaatcaagaacacgccaacatgttcaaaaaagttatcgaactagtagatggaaaaattgtaagcaaatgaa

SEQ ID NO: 270336 - DNA, 780 bp, Unknown
  Bacterial polypeptide expressing nucleotide sequence isolated from the Sargasso Sea
tgatctcaaacattagatcaaagaaatttgaagtaatagatattataaaaatgatgaactcaaaggttaagattaatcctaaaattagaaaaatttataattttaaagattctataaaactattaaatgttaattttgcttatgatgataaaagtaataccttagaaaatgttaatttaaccattaataaaggcgatcgagttggaattataggatctactggtagcggaaaatctacattgcttgatatcataatgggtcttttgcaaccaaatagtggagaagttttaatagatggcattaatataaacaactcttttgataaaacttctttaaacaaatggcagtcttgtatatctcatgtgccacaaaatatttttatttctgatgcttcttttgctgaaaatatcgcttttggtttatctattaatcaaattgatattgataaagtaagagaatgtgccaagaaagctatgatcgataattttataaataatagtgagaaaaaatactttacaaatcttggtgaaggcggagttaaaattagtggtgggcaaaaacaaagaattggtatagctagagcattatataaaaatagtaaggttttaattttggatgaagccacaagtgctcttgataataaaacagaacatgatgtaatgaatacttttcaggatttgaatagtgtgactcttttgatagtgactcatagaccaagcacaataaaatattgtgataaaattattgaaataaaaaaaggttctataatgagttcttgat

SEQ ID NO: 270337 - DNA, 659 bp, Unknown
  Bacterial polypeptide expressing nucleotide sequence isolated from the Sargasso Sea
aatgtctaaaaatacagaattcgttaagttcgataaagttgataaaagttacgatggtaaggtcttagtagtaaaagatttaaatcttaatatctccgagggtgagtttattactatgcttggcccatctggttcaggaaaaacaacttgtctgatgatgttggctggatttgaaaccccaactaatggcgaaatttatttagactctaatcctatttcaaatattccaccacacaaaagaggaattgggatggtttttcaaaattatgcattgtttcctcatatgacagtttatgaaaatttagcatttcccttaagagtaagaaaagttcaaaaagatgagattgataaaaaagtagataaagctttatcaatggtttctctttcaggatttgaaagtagaatgccagctcaattatctggtggtcagcaacaaagggtagccgttgcaagagctctcgtatttgatccagcagtagttctaatggatgaacctcttggagctttagataaaaacttaagagaaagcatgcaatacgaaattaaacatatccatgaaaatattggtgttactgtggtttacgttacacacgattcaggagaagcattaactatgtcaaataggattgcagtgtttaatgatggtaaggttccacatt

SEQ ID NO: 270338 - DNA, 418 bp, Unknown
  Bacterial polypeptide expressing nucleotide sequence isolated from the Sargasso Sea
aatgtcagagacaattatacaaatgaaagaagtcaataaatggtttggcgactttcaagttttaaaagatataaatcttgatgttaaagaaaaacaaaaaatagttgtttgtggaccttcaggttctggaaaatcgacattaataagatgcattaatagactcgaagaacatcaaaaaggacaaataattgtcgacggtaatgaattatctgaaaaaactaaagatatagaaaagattagagcggaagtaggaatggttttccaacaatttaatttatttccacacttatcaattttagataattgtactttagctcctatatgggtaaagaaaacacccaaaaaaaaagcagaggaattcgctatgagacaattagaacaagttaaaatagccgaccaagctgcaaaatttccagga

SEQ ID NO: 270339 - DNA, 675 bp, Unknown
  Bacterial polypeptide expressing nucleotide sequence isolated from the Sargasso Sea
aatgaagagttactcaattgatgatttaagtttccaaaaggtttatttttcttacgatgataaacttaatacaaatgaaattttaaataactttagttataaaatcaaaaaaggaaaatttacaagtattataggtccttctgggtcaggaaaaacatctttgctaaaattaatttctggtattactaaatgtaaaaaaggtgaaattagattcgaaaacgaaataattaaaaataaatcgattgatatcagtttagtacagcaaagtgctgctcttatgccttggttgaatgtttaccagaatattgagttaggaaatataaataaaagaaataaaaaattaaataaaattgataaaattattaaagatgtaggtttgcaagaatatacaaaattctacccttatcaattatccggcgggttgttacaaagagtagcaattgcaagagcattattatttaatcccaaactattactcttagacgaaccatttgctgctttagataatctaagtagagaaattatatcaacagaacttatctcaatcattaaaaaagaagctgttacggtcattatggtcacacactctattgaagaagcagcattgctaagtgataaagttttagtcacaggattggctcctataaatgttattaaaagttttattccgcctaa

SEQ ID NO: 270340 - DNA, 654 bp, Unknown
  Bacterial polypeptide expressing nucleotide sequence isolated from the Sargasso Sea
taggcatagtcggagaatcaggatcaggaaaaacatcattagtgctagcaatattaaaactaataaattctgaaggtaaaattaagataaataatttagatctatctaatttaaaacaaaaagaattcaaaaaattaagaaaagacatacaaattgtttttcaagatccattttcctcattaagtccaaggatgactgtagagcaaattgtttctgaagggctctatgtccattatccagatatttcagttgatgaaaaaaatttaaaagttgaatcgattttaaatgaagtaggtttaaaatattcagaaacctataatagatttcctcatgaattttcaggaggtcaaagacagcgaatagcaattgctagggctctaatattaaatcctaaaattttaattcttgatgaaccaacttcagcacttgatataacaattcaaaaacaaataattgatttactaaataatctccaaaaaaagtatttaataagttatttatttattagtcatgatatgaaagtaataaaatcagttgcggacaacattctagtattaaaaaatggaaatttaattgaatcaggaaacacagatgaaatttttaataatccaaaaaatgattatacaaaaacattattaagcgctgttatctaat

SEQ ID NO: 270341 - DNA, 350 bp, Unknown
  Bacterial polypeptide expressing nucleotide sequence isolated from the Sargasso Sea
aacgttctactcaagatttcctcatgaactttctggtggccagcggcaaaggattgctatagctagagcaataatactcagacctaaactaatactactagatgaacccacttctgctttagacgtttcaattcaaatgcagatattatatctgttgaaagatctccagaataaactgggtttggcatacttgtgcattagtcatgatttaagagtgattagattcctatcagatcaagtgtatgtcatgaaagaaggagtaattgttgagcgcggttcttctgaagaagttttcgaagaccctaaacatgaatacaccaaagaacttttagctgcttcaattgcataaa

SEQ ID NO: 270342 - DNA, 862 bp, Unknown
  Bacterial polypeptide expressing nucleotide sequence isolated from the Sargasso Sea
gaagtggtgagaaactttaatttactgattatatggagagtaataattgacgtcatgagaagatccattaattatgcaggaaatttctttccatatttaataatggcaatcccttattttagaggtgatattgattatgggcgctttattcaggcaagctttgcattcggaatggtcgaaggttcgttattttttattgttaatcaaatagaagaactagcaaaatttactgctgggattggcagattagaagggttccaatcaaaagttgaatccattagtcaaaccaatccaacaagcaatcaaaacgttatttcaaattacccctcaattcttattaataatgctgacctttgcccaccaggatcaaataaaacaataattaaaaatttgaatttgagcatcgaccataatcaatcactattagttgtaggaccatctggatgtggaaaaacatcattactgagaatgattagtggtttatgggaacccgataatggagtaataaaaaaaccaaaaattggagaattattattcatacctcaaaaaccttatatgttgctaggttctttaagggaacaattatgttatcccacagaagttaagaaatttagtgatgaacatcttacttctgtacttcatgaagtaaatctaaaaaccttagtggatcgttatcctaatcttgatatcaaacaagattggccaagaattctttctttaggcgaacagcaaagattggcttttgcgagacttttactaaattctccaagatttgctgtacttgatgaggcaacaagtgctttagatattgacacagaaaaaaaactatacagtttactaaaaaaacgagaacttctctcat

SEQ ID NO: 270343 - DNA, 367 bp, Unknown
  Bacterial polypeptide expressing nucleotide sequence isolated from the Sargasso Sea
gatgacaacctcgctttttaaatacccacatgaattttcaggcggccaaagacaaagaatcgcaattgctagatcaataatcttaaacccgaaattcatgatccttgatgagccaacttcagcgcttgatagatccattcagattcaagtgataaacgttttaaaaagattacaagacaaatatgaattaacatatttatttattagccacgatcttaaagtaataagatctatgtgtgatcagatttttgttatgagtgagggaaagttagtagagtatggtaaagctgatgaggtttttgaaaatcctcaacaggaatatactcaaaaacttttaagagcagcactcaaatactcatcaaattaa

SEQ ID NO: 270344 - DNA, 559 bp, Unknown
  Bacterial polypeptide expressing nucleotide sequence isolated from the Sargasso Sea
gttacttgatgaacctttaggtgcccttgatgctaatttaagaaaaacaatgcaagttgagctaaaaaaaattcattctgaatttggtattacatttgtttatgtcactcatgatcaagaagaagctctcagtatgtcttcaagaatagttttaatgaacgagggtgaaatagagcaattatcaaatccaaatgaactgtatgaaaatcccaatactgcatttgcagctaaatttatgggattttcaaatattttttctattagtgacattgaacaaataaattcaaataaaattttaaattatttatttgatgaaaataaacattcaaataaattatgttttagatctaaagatgttaatatagtttcacaaaataatggtgattttaaaattatttccaaaaattattatggtgactcatataaatttcaagctattaatagcaatggtttgattataaatgtatcttcttcagataacaatatttctaaacttgaaatagatacactagtagatttaaaaattaataataaaaaaattattactctaaaaaaataa

SEQ ID NO: 270345 - DNA, 469 bp, Unknown
  Bacterial polypeptide expressing nucleotide sequence isolated from the Sargasso Sea
atgtcaacaaacaaagaattcgtaaaatttgataaagtagataaaagctatgacggtaaaatattagttgttaaagatcttcaactagatattgctgaaggagaatttataacaatgttaggaccttcaggttctggtaaaacaacttgtttaatgatgttggctggttttgagacaccaacgaatggtgaaatatatttaggtggaaatgcaatttcaagtattcctccacataaaagaggaataggaatggtatttcaaaactatgctttgtttccacacatgactgtgtatgaaaatttagcgtttccgttaagagtaagaaaaattccaaaggatgaagcagataaaaaaatagataaagcactatctatggtgtctttacaaggttttgcttcgagaatgccaggtcaattatcaggaggtcaacaacaaagggttgctgttgaaagatctttggtatttgatc

SEQ ID NO: 270346 - DNA, 652 bp, Unknown
  Bacterial polypeptide expressing nucleotide sequence isolated from the Sargasso Sea
gccgagggcgacatcaccttcgaacgcatccgcttcgcctatccgggccgcggcgtggtgttcgaggatctcgacctgcacattccggcggggcagaaggtcggcgtggtgggctcgtccggggctggcaagtcgaccctgatcaacctgctgcagcgcctcgacgatgtgcagggcgggcgcatcctggtcgacggccaggacatccgcagcgtcagccaggacagcctgcgcgagaagatcgccgtggtgccgcaggagactgcgctgttcaaccgcagcatccgcgagaacattcgctacgggcgtccggatgccagcgacgaggaagtgatcgaggcggcgcgcagtgctttctgcgacggcttcatccgcgagctgccagagggttacgagaccctggtcggcgagcgcggggtgatgctctccggcggccagcgacagcgcctgggcatcgcccgggcgttcctcaaggacgcaccgatcctgatcctcgacgaggccacctcggcgctggatacccagtccgaaggcgagatccaggcggcgctcaacctgctggtgcacaaccgcaccgtggtcgcggtggcgcaccgcttgtccaccctggcgagcttcgaccgcatcctcgtgttgcgcgacggccgcatcg

SEQ ID NO: 270347 - DNA, 376 bp, Unknown
  Bacterial polypeptide expressing nucleotide sequence isolated from the Sargasso Sea
ttagaattagtaggtctaacagataaaaaagatcaacatccatcaagattatctggaggacaacaacaacgagtagcaattgcaagagctttagctatgagaccaaaagtaatgcttttagatgaaataacttcagctttagacccagaggttgttggagaagtattaaatgttattaggtctttaaacaaagaacataatttaacaatgataatggtaacacatcaaatgggatttgctcgagaaatatcagatcgtgtttgtttttttaatgaaggaaaaatttttgaacaaggacccccagaacaattatttggagatccaaaaaatgaaagaactaaacagtttttacacgcagttttagatgctaattaat

SEQ ID NO: 270348 - DNA, 511 bp, Unknown
  Bacterial polypeptide expressing nucleotide sequence isolated from the Sargasso Sea
caagatccatattcatctttaaatggaagattaaaagttaaagatatagtttcagagcctataaaacttcacaatccttcaataagctcaaaagatatagatagttatatttacgatttattagaatctgttgaactaactcaacaatcagctgaaagatatcctcatgaattttccggaggtcaaagacaaagaatatcaatagcaagagctcttgctactcaacctagacttcttgtttgtgatgaaccaacttcagctttagatgttagcatacaagctcaaatactaaatctattaaaagacttacaagagcaattaaatttgacaatattatttattagtcatgatttacctgttgtaagacaaatgtgtgataggatagctgttttaaaaaatggaaaactttgtgagatatcaaaaactgaggagttatttaaaaacccatcacatgattatacaaaagaactactcacgttgatgccaaaaatagaatcaatttacaattaag

SEQ ID NO: 270349 - DNA, 691 bp, Unknown
  Bacterial polypeptide expressing nucleotide sequence isolated from the Sargasso Sea
gccggtattaaataatttgtctatgactattaaagcgggcgagagcattgcgcttgttggccgctcaggctcgggtaaatccaccatatcaaacttattacctcgctattatgatttagaagcgcccagtgaaatattactggatggtattgctttaaatgaatataagctaagcgatttacgtcgtcaatttgctttagtatcgcagcaagtggtgctttttaatgacacgattgcaaataatatttgttatggcctccaacgcgatgtatcgatggaagagcttcatgctgtggctaaacaagctcatgtctgggagtttgttgaagatttaccggagcaacttaacactatggttggtgagaatggggtgatgctttcaggtggtcagcgtcaacgtatcgcgattgctcgcgcaatattaaaagatgcaccaattttaattttagatgaagcgacctcggcgctggatactgaatcagaaaaactcattcaacatgcccttgatacattaatgagagacaaaacgtctattgtaattgcgcataggttatcgactattgaaaatagtgaccgcatttatgtaatagacagtggtcaagttattgaaagtggtacccatacagatttacttgctaacgatggcacttattctgcgttatgcaaaatgcagtttggtgagcaagggtga

SEQ ID NO: 270350 - DNA, 358 bp, Unknown
  Bacterial polypeptide expressing nucleotide sequence isolated from the Sargasso Sea
tatgaattatgaaagggatcataataagtatccccatgaattttcaggaggtcaaaggcaaagaatagcaattgctagagctttaattttaaagcctaaaattcttattttggatgaacctacttcagcattggatattactatacaaaatcaaatattagatttacttcaaaatttacaagaaaaattttctcttagttatatatttattagtcatgatatgaatgtaattagagcagtatcagacaaaatattagtacttagaaaaggaaaactaattgaatataatagtgctgatgttgtcttcaataatccaaaagatcaatatacagagaaattaataagttcagtaatttaa

SEQ ID NO: 270351 - DNA, 391 bp, Unknown
  Bacterial polypeptide expressing nucleotide sequence isolated from the Sargasso Sea
aaagttttattagacgttggaatagaattaaatgcaaaaaataaatatccacatgaattttctggtggtcagaggcaaaggatagcaattgctagatctttaatcatgaatccaacttttatgattttagatgaaccaacctctgccttagatagatcaatacaaatacaagttattaatttgttgaaggatattcaaaatgaatacaagttgacctacctatttataagtcatgacttaaaagtaataagatctatgtccgattatatttttgttatgaaagatggaaaaatagttgaatctggaccatctaatgaagtttttgactatccaaagcaaaattatactaaaaaattactctctgctgcgttaagatacgcatccaattaga

SEQ ID NO: 270352 - DNA, 736 bp, Unknown
  Bacterial polypeptide expressing nucleotide sequence isolated from the Sargasso Sea
aatgaaaaaaccacttgaagtaataggattatcaaaaacttataattcaaaagaagcagtaaaagacgtttcttttaaagtaaatcaaaatgaaattattgggatacttggtccaaacggctgtggaaaaactactacaatcggtatgattttaggtttgttaaaaccatcaaaaggaaaggttttgataaatggagtcgaaattgaaaaccaacgtgtagatttattaaatcaattaaattttatatcaccttatatagagttaccaaaaaaattgacagttagacaaaatctagaagtttatgggaggctttatgatgtgaataaacataaagcaaaaattgattacctatgtgaaaaattaagactctacgaatttatagataaattaactggggagttgtcatctggtcaaaaaaatagggttagtcttgcaaaatcaataattaataatccaaaagttttacttcttgatgaacctacagcatcacttgatcctgaaacgggtgattttgttagaagttttttagaggaatatcaacaagaaaataaaacatcaattctattagcatcacataatatggcagaggtagagagactatgttcttcagttttaatgatgaataaaggatcgattattgatgagggtagaccagaggaattaataaaaaaacatggaagaaaaaatatggaagaagtttttttaaaacttacaagggaaaagtatgaattttaa

SEQ ID NO: 270353 - DNA, 812 bp, Unknown
  Bacterial polypeptide expressing nucleotide sequence isolated from the Sargasso Sea
aatgagttttttagatttaaaaaatgtaacaaaaatttatcctaatggaacaaaggctgttcacgaaacctctctaagtattaatgaaggagagtttatggtttttgtgggacctagcggatgtggaaaatcaactttattaagaatggttgcaggtttagaagatattacagagggcgacattaatcttgatggaaaattaatgaatgaagttgatccatctgaaagagatgtagcaatggtgtttcagaactatgcattatacccgcacatgaatgtttataataatttagcatatggtttaaaaaacagaggaattgataaacaaacaatcgagcaaaaagtaaatgatgcagctaagctgttacaaatttcagattatttgcagagaaaaccttcaatgttatctgggggtcaaagacaaagagttgcaatgggcagagcaattgtaagaaacccaaaaatattcttatttgacgagcctctttcaaacttagatgcaaaattaagaattcagatgagacttgaaatcaaaaaacttcagcagaaagttggagtaacaagtatatttgttacgcatgatcaagtagaggccatgacacttgctgatagattagcagtaattaataatggaattattgaacagcttggtactcctattgagatatatgataatccaaaatctttatttgttgctggttttattggctcaccgcaaatgaattttttaggtggtaatttaaaaaataaaacattatctgcagaaggttttgaaattaaagatattaatagtaactatgagggagaagtta

SEQ ID NO: 270354 - DNA, 604 bp, Unknown
  Bacterial polypeptide expressing nucleotide sequence isolated from the Sargasso Sea
cctggcgcaactgctgatgcgtttttgggatccttccgagggaaccatcctgctttcaggaaatgatatccgagaatacggacttgaagcactccgctcaaaaatcgctctcgtcgctcaggatacctacctgtttaacagcaccctcaaagaaaacatccttatcgcaaaaccagatgcaggctaccctgaaatgaaaaaggccattcaaatggcatctttggcggaacttgtagaaaccctgccgcaggggtttgataccaaagttggagaaagaggaaccagtctttccgggggccaaaggcaaagggttgccatcgcaagagcctttctgaaagatgcaccgattttaattcttgatgaagccacctctcatttagatgctttgagcgaaagtgaagtacgtggcgcactggacaaacttaaagaagaccgcaccaccatcatcattgcacaccggctttcaaccattcgaaatgctgacaacattattgttctcgatggcggaaaaattaaggagtcagggaaccacgagcagttattgaagaataacggactttattcccaactggtctacaagcaaatgaatttttcaggaggatag

SEQ ID NO: 270355 - DNA, 466 bp, Unknown
  Bacterial polypeptide expressing nucleotide sequence isolated from the Sargasso Sea
ctaaatgataacgaactagcagtaattagaaataaaaagattggatttgttttccaatcattccatcttttgtcaaggaatactgctcttaataatgtcatacttccacttacttatgcaggttatgataaaaatgaagctttaaaaaaagctaaaaaagttttaacggaagttggccttgatgataggatcaatcacaaacctaatgaactctctggtggacagcaacaaagagtagctatcgcaagagcattagtgaatgatccaagcatagtatttgcagacgagccaactggaaatcttgattcgaagacaggcgaagagattatgagtcttttcaaaaagcttcataaaaatggccaaacaataattgtaataactcatgagaatgaaattgctgatcaaactgatagagtaattacagttaaagatggtttaattgaatcagatgaaaggagaatttaat

SEQ ID NO: 270356 - DNA, 736 bp, Unknown
  Bacterial polypeptide expressing nucleotide sequence isolated from the Sargasso Sea
ggctctggatatggtgcagttggatggatttcaaaatcgccgtccgatgcagctttcgggagggcagcaacaacgtgttgcagtggcaagagcattggtcttcgaacccagcctggtcttgatggacgaaccccttggtgcattagacaagcaactacgggagcagatgcagtacgaaatcaagcatatccatgaaaatcttggagtcaccatcgtttacgtcacccacgatcaaagtgaagcgcttacgatgtccaaccgaatcgccgtattcaatgacggaatcatccagcagttggccagtccggaacaactctatgaagctccggaaaatgcgtttgttgcgcaattcatcggggagaataatacgcttcgggggaaagtcagtgacatgaatagcaccacctgcaaggtcacacttgaaaatggacaatccgtagatgcccttgcggtcaatgtggattcggtaggaactgaaacctcaatatctttgaggccggaaagggtcttcataaacccgaaaactaattcatgcaagaatctggtggaagcacaggttctggaattgatctatctgggagatcatattcgctcccgggtcaatgtatgcggccatgatgacttcatcatcaaggtcccaaattccgcagatcatacccaactcaaaccgggagatacggttcaggttggttggcatgtggaagacgcacgtgcattggatatgcatgctgcttaa

SEQ ID NO: 270357 - DNA, 457 bp, Unknown
  Bacterial polypeptide expressing nucleotide sequence isolated from the Sargasso Sea
atggcaaatataaaattcacaggtgttcacaaatcttttggttctaataaaattattacagactttaatttatcaggtaaagacgatgaatttctagtattagttggtccatctggttgtggtaaatcaacattattgagaatgatcgctggattagaaaagatagatgaaggtgagatttttataaatgatcaaaaaattaatgatctacatccttctaaacgacaaacagcaatggtatttcagtcatacgccctttacccacatatgaatgtttatgaaaatatgtcttttgggttaaaaattgaaaaaagatctaaggaagaaattcaatcaaaagtaatgcaagcagcaaaaattttaaaaatagaagagttgttggaaagaaggcccaaacaattatctggaggacaaagacaaagagttgcaatcggacgcgctatcaccagaaatccaa

SEQ ID NO: 270358 - DNA, 925 bp, Unknown
  Bacterial polypeptide expressing nucleotide sequence isolated from the Sargasso Sea
ataaaaaaactaactaaagaaagaaatttagcagttatattgattactcatgacatgggtgttatctcagaaacaacaaatagagtagcggtaatgaaaaatggaaatcttgtggaaatagggcctactaaagaaatacttactaaaccaaaagagatttatacaaaagcacttgtaagctcagttcctcctactaacaaaaaaataaatagatttaaaattattgaaaagaaaaataaaaatcagggtgaaactaatattaaaattttaaatagatggacaaaaaaagaaatagccgatcaggatttagtcaaagttaaaaatttaagcaaaacctttgatgatagtttttttgtagaaagtactaaaaactctgtaatggctgtagacgatgtatcatttaatataaaagagggagagtcttttggactggttggtgaaagtggaagtggtaaatcaacaatagctaaaatgattgtaaatttatacagcccaagtgctggagatattgattttgataatgtttgcataacaaaaataaaaagtagtaaagaaatgatgaagtttagaaagcagatacaaatgatatttcaagacccatattcatctttaaatggaagattaaaagttaaagatatagttgctgaacctataaaacttcacaatccttcaataagctcaaaggatatagatagttatatttatgatttattagagtctgttgagttaactcaacaatcagctgaaagatatcctcatgaattttctggaggccaaagacaaagaatttcaattgctagagctcttgctactcaacccagacttcttgtttgtgatgaaccaacttcagccttggatgttagtatacaggcgcaaatattaaatttattgaaagatttacaggaacaattaaatttgacaatct

SEQ ID NO: 270359 - DNA, 841 bp, Unknown
  Bacterial polypeptide expressing nucleotide sequence isolated from the Sargasso Sea
ttccccggagaggcgtggagtggggctcgtgtttcaggactacgctttgttcccgcacctgaccgtttctcaaaatgtagcgtttggtctggaggatatgtcggctacggagaagagtatacgggcattaaccgttcttgagcaggtaggcatgaagtgggcaactgcgcgatatccacatacgctttctggcgggcagcagcagcgggtcgcgctggcgcgcgcgatggcgccagaaccatcagtcattttactcgacgagccgttttctggcctggatgcgcggttgcgcgatcaggtgcgagacgaatttctacatattttgaaagaagccggaacggcagctcttctcgtgacccacgatgcagaagaagcgatgttcatggctgataggattggcgtcatgcgtgacggccaactcgttcaatttgataagccggacgaactctacatgcgccctaaagatacattcgttgcggagttcttcggcgaggtgaataaattttacggcacggcgacgggggggagtgtcgcaaccccgatcggtcgattccctgcacccgccctgggcgatggagaagaggccgaagttgttattcggccggaggcaatcgggattggtgccggcagacctgacgcagcgctgtgcggcaaagtgctggcatcccggatgttggggcgaagtagcttgatccacctttgtctttgccagcaaacgaaggaagattttcatttgcatgcgcgggtgcccggaagattcttgccggatgaagccgaaactgtatcgattgaggtcgatccaaatcgtgtttttgtttttcccgtgtccagcacgaggtaa

SEQ ID NO: 270360 - DNA, 430 bp, Unknown
  Bacterial polypeptide expressing nucleotide sequence isolated from the Sargasso Sea
atgaaaaatgtcaacaaatggtttggagatttccaagttttaaaagatgtaaatttagatgttaatcaaaaacaaaaaattgttgtttgtggcccttcaggttctggaaaatcgacattgataagatgcatcaatagattagaagaacaccaaaaaggaactattattgttgacggaaatgaattaaccgaagatacaaaagatattgaaaaaattagagctgaagtaggaatggtttttcaacaatttaatttatttccacatttatcaatattagacaattgtactttagcgcctatatgggtaaaaaaaatgccaaaaaaacaagctgaagaaatggcaatgaacgaacttaaaaaagttcaaattgctgatcaagcaaaaaaatttccaggacaactgtcaggcggtcaacaacaaagatgtgcaa

SEQ ID NO: 270361 - DNA, 889 bp, Unknown
  Bacterial polypeptide expressing nucleotide sequence isolated from the Sargasso Sea
ttagactctaatcctatctcaaatattcctcctcacaaaagaggaattggaatgctttttcaaaattatgcattgtttcctcatatgacagtttatgaaaatttagcatttcccttgagagtaagaaaagttcaaaaagatgagattgataaaaaagtagataaagctttgtcaatggtttctctttcaggatttgaaagcagaatgcctgcacaattgtcggggggacaacaacaaagagtagccgttgcaagagctctcgtatttgatccagcagtagttttaatggatgagccccttggagctttagataaaaacttaagagaaagtatgcaatacgaaattaaacatatccatgaaaatattggtgttactgtcgtttacgttacacacgatcaaggagaagcattaacaatgtcaaatagaattgcggtgtttaatgatggtaaggttcaacaattatcaagtcctgataaattatatgaagagccagttaattcgtttgtggcagagtttattggagaaaataatactttcggtggagaggtaacagatatttcaaaagatgtttgcaaagttaaacttcaaaatggagaaattttagcaaatccaatttcagttaaatccaaaggtgataaaacaactgtttcaataagacctgagagagcattgattaatccaaaagataaaatggataataatcaaactggaaaaattgaagaagtcatttaccatggtgaccacactagagtaagattggatcttttaggcaataaagaatttattttaaaagttccaaacagctcaaatgagctagacttaaaattgggcaatgagattaaagtaggatggaacagtcaagacgcaagagctctagaccctaaataat

SEQ ID NO: 270362 - DNA, 595 bp, Unknown
  Bacterial polypeptide expressing nucleotide sequence isolated from the Sargasso Sea
tatatattttgataaaacttgtattacaaaaattaaaaataatagagaaatgatgaagtttagaaaacaaattcaaatgatatttcaagatccatattcatctttaaatggtagattaaaagtagaagatattattgcagaaccaattaaacttcacaatccctcaattaaaaatatggatttaaaaaattatatttttgatttattagagtccgttgaattagctccaaattctgcaacccgatatccacacgaattttcaggtggccagagacaaagaatctcaattgctagagcactagctactcaaccaagattattagtatgtgatgagcctacatctgctttagatgtaagtatacaagcacaaattttaaatttattaaaagatcttcaagagaaattaaatttaacaatattatttattagtcatgatttaccagtagtccgtcaaatgtgtgatagaattggtgtattaagaaatggaaaattgtgtgaaatttctaattctgaagatttatttgaaaatccaaaacatgaatatactaaagaattattgagactaatgccaaaaattgagacaatttataattaa

SEQ ID NO: 270363 - DNA, 838 bp, Unknown
  Bacterial polypeptide expressing nucleotide sequence isolated from the Sargasso Sea
ttattttgccggggagattgattatggcggcttcattcaagccaacttcgccttcggaatggtggaaggatcgctgttctatgtggtgaatcagattgaagaactggctcaattcacggccgggatttcccgcctagagggtttccaaagcgaggtggagcaggtgagcagggaggcccaaggtgccgatccggtgcagctgggagccgaatcaatcgtggtgcgccacgccgacctcaccccacccggtgccgaccagccgatcgtgcgggatctcagcctcagcgtgggtgaaaccgacaaattgctggtggtgggtccctccggttgcggcaaaacctcgctgctgcggatgatcagcggtctctggtcccccagcaaggggaatgtggagcgtccgcccaccggcgaactgctgttcattcctcagaagccctacatgctgctggggtcgttacgggaacagctctgctatcccaccgatgagggtcgcttcagtgacgaccaactccgccatgtgctggatgaggtcaatctcggcacactctcggagcgctaccccgacctcgacgtcaagcaggactggccccgcatcctttccctcggggagcagcaacgtctcgccttcggccggttgctgctgaatgctccacgcttcgtggtgctggatgaagccaccagcgcccttgacgtggcgacggaggatcacctctatgccctgctgcgccagcgggagctggcggtgatcagcatcggccatcggcccacgcttaagcagttccacgacagtgtcctcgaactcaagggtgacggcggctggcggctcatgccggcgacc

SEQ ID NO: 270364 - DNA, 694 bp, Unknown
  Bacterial polypeptide expressing nucleotide sequence isolated from the Sargasso Sea
ttgagttttgatgtgccgccaggtgccaaagtagccgtggtaggagaaagcggcgcaggcaaatcaacgttgatgaaacttctgttccgattttatgagcctaataaaggtaagattactatcgacggcaaagatatcacatcgctaacccaacaaagcctgcgcggccacataggtatagtgccccaagacacggtgctgtttaacaccaccttgcttgaaaatattcgttatgggaacccagacgctaccgatgatgatataaacagtgtgctaaaactcgcccacctgcaggccttcgtggaaagtttacctgaaaagttagacacaaccgttggtgagcgcgggctaaaattatcgggaggtgaaaaacagcgggtagcgattgctcgagcattgcttaaaggcgcacctattatgatttttgatgaagccacaagctcactcgatagtacctcagaacaagccatcctttctgcgctgcgtgacgctgcgaagggccacacaagcttagtcatagctcatagactatcaaccattgtggatgccgataaaatattagtactaaaaaacggtacaatagtagaggaagggacacacacttccttactggaacgacaaggtgaatacgcgacgctatggcaaactcaacagcgcgatagtgaagacaacgtcaatgaaagaacaacgtagt

SEQ ID NO: 270365 - DNA, 325 bp, Unknown
  Bacterial polypeptide expressing nucleotide sequence isolated from the Sargasso Sea
cctggacaattattctggtggacaacaacaaagatgtgcaattgctagagctttatgtatggagcccaaaattatgttattcgatgaaccaacatcagcacttgatccagaaatgattaaagaagtactggatgcaatggttaatctagctaaagctggtatgactatgatagttgtaactcatgaaatgggctttgccaaagaagttgcggatgaagtaatattcatggacgaaggtatgattgtagaaaaagcagaaactaaagagttttttgccaacccaaaaagcgatagaactaaactctttttaagtcaaattctataa

SEQ ID NO: 270366 - DNA, 740 bp, Unknown
  Bacterial polypeptide expressing nucleotide sequence isolated from the Sargasso Sea
tatgaaagatatcacaccggtagttgaagccagtaaagttgatttgattttccaaacagctgatgggccagttcatgcgatatccgatattgatttggacatcaacaaaggagattttatctcacttattggaccatctggatgcggtaaaacaactttgctgcggttaattgcagaccttgaaaaaccaactggcggtatgctcagggtaaatggaatctctccagaagaagcccgccttaatcgagactatggctatgttttccagtcaccagctctatatccttggcgtacggttgctggaaatcttaaattacctctggaaatcatgggtgttgataaaaatgatcaagaaatacgtgctagggaagcactggaaatggtcgatcttgctggctttgaaaaaaaatttccctggcaactttcaggaggtatgcaacagcgtgtttcaatagctcgtgcacttacattttatccagacctccttttgatggatgaaccattcggagctttggacgaaattgttcgtgaccagctaaatgaacactttcacaggctctgggagcagtctcaaaagacagtggtgtttgttacacactccattcctgaagcagcctatctttccacaaaaattgtggttatgtctcctcgtccaggaaagataattgatgtcatagaaagcactcttcctgaaaaacgtaagcttgatatacgagaaactaaggaatttttggaacttt

SEQ ID NO: 270367 - DNA, 803 bp, Unknown
  Bacterial polypeptide expressing nucleotide sequence isolated from the Sargasso Sea
aacaagagctccaggtagaattgcgggcggtaaagtaattgtagacaacactgatcttcttgatttagatgaagaagaaatgagaatgcaaagactagatgaagtggccttggttcctcagggtgcaatgaattctctaaatcctgttatgaaaataaaaaatcaattattagacggtttatatgaccatcaaaaagataagtcagaaaaattatcaaaagaagagcaactagacattgttgaaaagttgcttaagagtgtagatcttgctccaggggttgctgaaatgtatcctcacgaattaagtggaggaatgaaacagagagttgctatcgcaatagctacatcaatgcagcctagggttatcgtggcagacgaacctacaagcgcattagacgttgttgttcagagaaatgttatgcagacacttggaaggcttcaagaaggtttgcatgcatcaattatattaataggtcatgatatgggcttggttgcacaattttcagatcatgttggtgttatgtatgcagggagattagttgaagttggtcctgtgaaaacagtatttaaatccccaaagcatccttatacaagattattaattaatagcttacctactctaagcaacaagaaggatttcataggtattccaggtttacctgcaagccttcttaatcttccagagggatgtgcgttttgtttaagaattggtaaagaagataagaataagatcccttgggttaatgttgcaaaggatcattacctgcaagattgcaaaacttgtgcagattacggtaaataaa

SEQ ID NO: 270368 - DNA, 862 bp, Unknown
  Bacterial polypeptide expressing nucleotide sequence isolated from the Sargasso Sea
tatgtctcattggataatgtgggagataagttttttatttgaaaatattggaactatagatgaaggaaaagaaacaatttccaaaaaaccctctgttactgatgctaaggacgcaaaatcacttacagttgaaaaaggtttaattgaatttaccgatgtaaaatttaattatggaatgcctggaggattatttgaggccttaaacttaaaaataaactctggagaaaaagtaggtttagttggaagatcaggctcaggtaagagttctatagtaaacctattgcttcgcctttacgatttagacgaaggaaaaatattaattgataaaaatgacatttcaaaaatcacacaagattcgttgaggtcaaatattgctgtcgtcactcaggataccgctcttctccacagatcaattcgagaaaatattttatatggtaagccagatgctacagaaactgatttaattgaagcagcgaagcaagctgaagcttatgattttataatagatttagaggataaagatggtagaaaaggatttgatgctcatgtaggagaaagaggagtaaggttatcaggaggccaaagacaaagaattgcaattgctagagttattcttaagaatgctcctattttagttttagatgaggctacaagtgcactagatagtgaaattgaaactgctattcaggcccaactatctaatatacttgaaaatagaactgcgttagtaattgctcacaggctttctacaataaataaattagatagattaatagtaatggaccaaggaaaaattattgaggttggaactcattcagaattgattaaaaatggaggacattacgcaaatttatggtctctt

SEQ ID NO: 270369 - DNA, 640 bp, Unknown
  Bacterial polypeptide expressing nucleotide sequence isolated from the Sargasso Sea
tttagaagatgttacacagggagaaatagaaattgataacgagcgtgttgaccacctgcctcctgcaaaacgggggattgccatggtttttcagtcatatgccctttatccccacatgaatgtttaccaaaacatgtctttcggattaagactggcaaaaaccgacaaaaatataactgaccaaaaagtcagggaggcagcagagattcttcagattacagagttgctggaacgcaaaccaaaggaactttccggcggacagagacaaagagttgccatcgggagagctatcgtaagggacccaaaggtgttcctgtttgatgagccgctttcaaatcttgatgcaaaactgcgcgtgcagatgagaatagaacttaccaaactgcatcgagaacttaatgccactatgatttacgttacacatgatcaggtggaagccatgacgatggctgacaaaatagtagttctccgtgagggttttgttgaacaggttggagcaccgttggatttgtatcataagccagcaaataaatttgttgcaggtttcattggttcaccagctatgaattttatggatggaacaatctctggcatttcagacaaatctgtagagcttgagctaaacagtgatttaaaaaaa

SEQ ID NO: 270370 - DNA, 595 bp, Unknown
  Bacterial polypeptide expressing nucleotide sequence isolated from the Sargasso Sea
gatatcagtctttccttagaggagggtgtttttgcatccattttgggaccatctggatctgggaagaccacactccttgcaatcatggcaggccttgatttgccaagcagtggctccgtgaaacttcttgataaagaaatcacaagcttaaatgaggataagagggcacagattagaagcaaggatgtcggttttgtttttcaatcttttcatttactgcctcgattatcagcccttgataatgtcatgatgccactcgagatactcggcgcgaaagatgcaaaggagagagcgctaaaagctttggatgaagtgggtttatccaaaagaacagggcatgttcctcatcaattatctggtggagaaaagcaacgcgtcgcaattgcgagggctatggttaaagcgcccagtatattatttgcggatgagcctactggaaatttggatcaatcaagcacggataatattcttgaactattgctgggaatcaatcaacaaacaaagacgaccttggttgtcgtaacacatgatcagcagttagcagcacgatcggatatggtcttcgagctacaagaagggaaattaaaatgctgaa

SEQ ID NO: 270371 - DNA, 329 bp, Unknown
  Bacterial polypeptide expressing nucleotide sequence isolated from the Sargasso Sea
tggtgatcagggcattcttctttcaggtggacagagacaaagaattgcaatagctagggcgctactcaaggatgccccaatactgattctcgatgaggcaacctctgcacttgattcggaaagcgaaaaatttatacaaaaggctttcgatcggttgatggaaaataggacaacttttgtcattgcccatcgtctaagcacaattgaaaatgcagacaaaatattggtcctatcaaacggaaaaatcgtcgaagagggaacccatgaagagttattgaatcaagatggagaatactcttttttgcataaaatgcagttcaatgactaga

SEQ ID NO: 270372 - DNA, 895 bp, Unknown
  Bacterial polypeptide expressing nucleotide sequence isolated from the Sargasso Sea
gatgaacccaccacccagcctggatgtggcagtggccgggcaggtgatggccgaactcagcggcctctgccaggaactgggcagtgccctgctgctgatcagccacgacctggccatggccgcccgctggtgcgagcgcatggccatgctcgacggcggacgcaaggtggaggacggccccagccatcagctgctcacccggccgaagtcgccggtggggcaacggctggtggcctccgcccaggcccgggaaggcgaacgctcaccggcacgtcccgacaacgacagcgtgctgcgggtggaggaaatgcgctgctggcatggcgtgggtggcgcaccttgggcacccctctggctaagggcagtggatggagtgagtttcgagctcagggccggggaaagcctgggggtggtgggggcctccggctgcggcaaaagcaccctctgccgggccttgatggggctcaatcccatccgtggcggccgggtcgacctgctgggccaggatctgctgagcctgcgtggagaggcgttgcggacagcccgccgagccctccagatggtgttccaggaccctctggcctgcctcaatcccgccctgcaggtggccgatgccatcgccgatccgttgctgatccatggcctctgctcgaaagcagcagcccgggaagaagcccgccgcctgctggagcgggtcggcctcagcccggctgagcagtttcaagatcgcctgccgaagcagctctccggcggccagcagcagcgggtggcgatcgcccgcgccctggcgttgaaacccaaggtgctgatctgcgatgagagcgtcagcatgctcgatgcggaagtgcaggcggatgtgctggcgctgctgcgggagctgcagcaggagctggcc

SEQ ID NO: 270373 - DNA, 460 bp, Unknown
  Bacterial polypeptide expressing nucleotide sequence isolated from the Sargasso Sea
atgtcagataaaataattcaaataaaagaaatgaacaaatggtttggagatttccaggtcttaaaaaatattaatttagatgtagaaaagaataaaaaaattgttgtctgtggtccatctggttcaggtaaatctacattaatcagatgtattaatagacttgaagaacaccaagaaggatcaattgttgttgatggaactgaattaacagaagaaacgaagaacatagaacaaataagagctgaggttggaatggtttttcagcaatttaatttatttccacatttgtcaattttagacaattgcactctagctcctatatgggttaaaaaaatgccaaaaaaggatgctgaggaactggctcataaacatcttgaaaaagttcaaattgcagatcaagcatataaatatcctggtcaattatctggcggacagcagcaacgttgtgcaatcgcaagag

SEQ ID NO: 270374 - DNA, 400 bp, Unknown
  Bacterial polypeptide expressing nucleotide sequence isolated from the Sargasso Sea
tctcgcccggaggccgatgcgcgcgcagaggcgattttgaaagaaaccggcctgttggataaggcaaacgcctacccagctgcactttcaggcgggcagcagcaacgggttgggatcggtcgtgcgatggcattggatgccgatctgatgttgtttgatgagccaacctctgcgctcgaccctgaatgggtgggagaggtgcttgatctgatgcgccgggttgctgaaaaagggcaaaccatgttgatcgtcacgcacgagatgcaattcgcccgcgaaatcgcagatcggatcattttcatgactgggggtgacgtggtcgaacagggcccgccagaccaaattctcaacaccccccaagacccgcgcacgcgcgcctttttgcgccgcgtcttataat

SEQ ID NO: 270375 - DNA, 409 bp, Unknown
  Bacterial polypeptide expressing nucleotide sequence isolated from the Sargasso Sea
taattatatttatgatttacttgagtctgtagaattaacccaaaaatctgcaaatcgatatccacatgaattttcaggaggacaaagacagagaatatcaattgcaagagcacttgccacacaaccaagacttttagtttgtgatgaacctacctctgctttggatgttagcattcaagcacaaatattaaatttactaaaagatcttcaagaacaattgaatttaacaattttatttataagtcatgacttacctgttgttagacaaatgtgtgatagaattggtgtcttaaaagatgggaaattatgtgaagtttcaaatactgaggacttatttttaaaaccaacgcatgaatatacaaaagaacttttacggttaatgcctaaaattgagtctatttataattaa

SEQ ID NO: 270376 - DNA, 694 bp, Unknown
  Bacterial polypeptide expressing nucleotide sequence isolated from the Sargasso Sea
aagaaaattattaaagaatatatcttttaaaatttatcctaatcaaactgtcgcaatagtggggcctactggtgctggaaaatcaacaataagtaaaattttttttagattttatgatcctgcctctgggtctatattaattgataatcaagatataagaaaagtaacacaaaaatctcttcgcaaacaaattgctgtagtgcctcaagatactgtcttattcaatgaaactttattttataatatttcttatggtaatccaaattcctctaaagaggaaattattcaagttacaaaaatggcaaaattacatgactttattaagaacttacctgaaggatataatactatagttggagaaagaggtttaaagctttctggaggtgaaaaacaacgagttgctatagcaagagccttactcaaaaaacctaaaattttctttttcgatgaagccacttcttcattagatacaaaaacagaaaaagaaattcaaaacaatctagaacatttatcaaaaaatatcacaaccataataatagctcatagactttctgctgtaaaaaatgcagataatataattgtattagataatggagaagtagttgaaacaggtaatcacaaaagattattagagcttaatggcttatattcaaacctttggaaacagcaagaaaaaaactataaagataagtaa

SEQ ID NO: 270377 - DNA, 553 bp, Unknown
  Bacterial polypeptide expressing nucleotide sequence isolated from the Sargasso Sea
atggctgccccgaccccgatcgttgctgaaaacgtcagccacagctacggcgttggctccatgcgccgtcaggtgctgcaggacatcaatttccgagttgagcccggtgaagtggtcttactgactggcccatcaggttgcggcaaaaccacacttcttacattggtgggtgcactgcgcagccttcagcacggtcagctgcaggtccttggtgtgccgttagcagcagccagtcgtggagatcggcggcgtctacgtcagcgcatcggcatgatttttcagggccataacctgctgcgctgtctgacggctgaacagaacgtgcagatgggtgctgatctattgcctgggcttagctattcccagcgtcgcggccaagcgcgtgaatggcttcgggccgtgggcttgggtgatcagctcaaaaaggttccccacgatctctccggtggtcagaagcaacgggtggcgatcgcacgcgctttggcggcacatccgcggttgcttttggctgatgagcccacggctgccttggatggtcggaccgggtcgggag

SEQ ID NO: 270378 - DNA, 447 bp, Unknown
  Bacterial polypeptide expressing nucleotide sequence isolated from the Sargasso Sea
gctacggcaaatgggatgcgagcgacgaggaaatatgggcagcggcgcgggcggccaatgccgaagcctttctgcgcgccctgccccaggggctggacagccatctgggcgaaggcggcgcacgcctttcgggtgggcagcgccagcgcgtgtcgatcgcccgcgcgctgctgcgcgacgcgccgatcctgctgctggacgaggcgacgtcagcgctcgacgcggaatcggagcaactggtcaaggatgcgctcgaccggctgatgcaggggcgcacgacgatcgtcatcgcccatcggctggcgaccgtgcgcgccgccgaccggatcatcgtactggatcagggacggatcgtcgaacagggcgaccatgggacgctggtggcactgggcggcctttatgcgcggctggccagcctgcagttccaggaccagctggacggctgaa

SEQ ID NO: 270379 - DNA, 484 bp, Unknown
  Bacterial polypeptide expressing nucleotide sequence isolated from the Sargasso Sea
agatctctggtagcctacttgccacaagaaatatttttagttgatggcactttaaaagaaaatattgctttaggagaagacttattggaaataagagaagaggatgtcaggaaggcaattgtaaaaagcagtctagaaaattttgtaaatgaacttcccaacggaattgatacattgataggtgaaaggggggcacgtatttcaggcggtcaacgtcaaagagtagcccttgcaagggctttttatcatgaacgaagtgtcttagttatggacgaatctacaagcgctttggatgataaaactgaggaggagattataagatcaatttcttcattaaagggagatacaaccacaattataatagctcatagagtatcaacattaactaattgtgatttaatcattaaaatgcatgaaggcaagattatagaacaaggctcttataatgaaataataggaaaaggaagtttggatgttcaataac

SEQ ID NO: 270380 - DNA, 524 bp, Unknown
  Bacterial polypeptide expressing nucleotide sequence isolated from the Sargasso Sea
atctggaaagtcaacttttttagatttaatactgggtttaaaaaattttgaaactggagatattactatcaaatgcaaagattatgaggtcggttatgtcccacaagaatgttatataagtgaaggtacaattgaaagcaacatagcttttggagtttttaggaaaaatgtaaatagagaaagtttaattaattcagcaaaagaagcacaaatttatgattttattaattctctacctgaaaaattcaattctaaaataagctcatttggttcaaatatttcagttggtcaaaaacaaagaataggtattgcaagaacattatataataattcaaaaattttattattagatgagcctactagtgcacttgaccctgcgactgaggagaaatttatgaatatccttaagacactaaaaaaaaatagactaatcattatcacaactcatcgtaataatttaaaagaaaattatgattatactttaaagttagagaataattctattaagcagattaaaatttaaa

SEQ ID NO: 270381 - DNA, 394 bp, Unknown
  Bacterial polypeptide expressing nucleotide sequence isolated from the Sargasso Sea
aaaagaagctgaaagtttagctatgaagcaattagagcaggttcagatagtctatcaagctcttaaatttcctggtcaattatcaggaggtcaacaacaaagatgtgcaatagcaagagctttatgtatggagccaaaaataatgctatttgatgagcctacatcagcacttgacccagaaatgattaaagaagttcttgatgctatggttaatttagcaaaggctggcatgactatgatcgttgtgacacatgaaatgggttttgctaaagaggtagcagatgaagttatattcatggatgaaggcatgatagtagaaaaagccatgacaaaagagttttttgcaaatcctaagagtgaccgaactaagctgtttttgagccaaattctttag

SEQ ID NO: 270382 - DNA, 784 bp, Unknown
  Bacterial polypeptide expressing nucleotide sequence isolated from the Sargasso Sea
cttgagtgaagcatcgacctctgcggaggctaacgccgttgaagccaaaaacctggatttggtgttccaaaccagggacagtcccgtccacgctctttccgaaattaatcttgaaatccgtcgaggagatttcatcagtttcattgggccttcgggatgcggaaaaaccacccttttaagagtcatcgccgatcttgaaaagccgaccggtggcagcattgtcgtcaacggggtcagcaccgaacaggcacgtcttcagcgggcttacggatatgtgttccagtccccagctttatttccctggcggacggtggagggaaacctcaaattgcccctggaaatcatgggcatcgatgctgcggaaagaacccgacgggcaaaagaaagcctgaaaatggtcaaccttgaaggcttcgagaaaaagtttccctggcagctttccggagggatgcagcaacgggtttcgattgccagggcattgacctttgatccggaactgcttctgatggacgagcccttcggcgcgcttgatgaaatcgtcagagatcaactgaatgagcatttcctgagactctgggaaaagaatcggaaaaccgttgtttttgtaacccattcgatcccggaagctgcatatctctccaccaggatcgtggtcatgtctccaagaccgggacggatcatcgaatgcatcgacagtgaccttcctcccggacggactctggacatccgggaaccccggaatttttggatctttctcaccgtatccgggaaagtcttcgtgccg

SEQ ID NO: 270383 - DNA, 850 bp, Unknown
  Bacterial polypeptide expressing nucleotide sequence isolated from the Sargasso Sea
cgattttttggttaccgtgcaccggcagatgcgattggtcacgacttacaatatattgatttatatcaataatgccttccttgttttcactatctccgcactcgcgatatggctctggatgtcatccattgtttccaccggttcgattgcaatcgcgattgcgatgtgcctcaggatcaatggaatgtcccagtggatcatgtgggaagtctcgtctttgtttgaaaacattggagtcgtgcatgacggtatgagcatgatggcaaaatctcttgaggtgttggatcatgaacaagcatcggctctcaaaatcagcagcgggaaagtagattttgaccatgtcggatttcattatggacgtccgggtggaatcatggaagatttcagtctttccatagcggccggagaaaaagtcggtgtggttggacgttcaggtgccgggaaaaccaccctgatgaacctgctgctccgtttttatgatctggaaaaaggcgaaattcggatcgacggacagaatatatccggagttacccaggaaagccttagagcccaaattggggtggtgactcaggacacctcgttattgcaccgctccattcgtgacaacattgcctacacttctccagaaatttctgatgaaaatgtgatcgaggcagcaaaaaaagcaaatgcctgggaatttattcaggaccttgaagattcttttggacgcaaaggactcgaagctcatgttggagagcggggagtcaagctttccggagggcaacggcagcgtattgcgattgcacgtatgtttcttaaagacgctccgattctggtacttgatgaggcaacatctgctctcgattct

SEQ ID NO: 270384 - DNA, 805 bp, Unknown
  Bacterial polypeptide expressing nucleotide sequence isolated from the Sargasso Sea
tatgacagtttatgaaaatttagcttttccattaagagtaagaaaagttgaaaaagatgaaatagataaaaaagttgataaagcattatcgatggtttcattaagtggttttgaaactagaatgccagctcaactttctggtggtcagcaacaaagagtagcagttgcaagagctttggtatttgatccagcagtagtattaatggatgaaccacttggagcactagataaaaatttaagagaaagcatgcaatatgaaataaaacatattcatgaaagtattggtgtaacagttgtatatgtaactcatgatcaaagtgaggcattaactatgtcaaaccgaattgcagtattcaatgatggaaaagttcaacagctttcaaatccagctgagctttatgagaagccagtaaattcttttgttgctgagttcataggtgagaacaatactttcaatggtgaagttgtggatatagataaagacaaatgtaaagttaaattagcaaattcagaaatactagccaatccaatttctgttaagtctaaaggtgaaaaaacaactgtttctttaagacctgaaagggcgttaattagtccaactgataagatggataatatgtttactggaaagattgaggaagtaatctatcacggtgatcatacaagagttagattaaatcttttaggaagttcagagtttattcttaaagtaccaaacagcacatccaatttagaactaaaagttgatcaagatataaatattggttggaatagtgttgatgctagagcattagacccaaaataa

SEQ ID NO: 270385 - DNA, 466 bp, Unknown
  Bacterial polypeptide expressing nucleotide sequence isolated from the Sargasso Sea
atgaaatgtcttaaaataaaaaatttagacatcgcttatgggaaaaaacagattatttttggttttgattttgaactagatgaatgtcaaataggttgtttactgggaccaagtggttgcggcaagactacagtgctgaggagcattgctggttttgaacaaccttccaggggtgaaatcagcctgaacggtgaaaaattaaatggatttaaaacgcatgtcacccctgagaaaaggaatattggaatggttttccaggacatagcattatttcctcacctttcagttgaagaaaatatccaattcggtatgcgttcttggtcccgagaaaaaagagaaaaacgaagtcaggaactattggatttgattggaatgttgcaatttatgaaaaaatatcctcatcaactgtctgggaatcagcaacagaggattgctttagctcgtgcaatggctcccaaagccttca

SEQ ID NO: 270386 - DNA, 419 bp, Unknown
  Bacterial polypeptide expressing nucleotide sequence isolated from the Sargasso Sea
tctgggtaaaaaagaacgaaatgatttgatagaacaaactatgagagaggttgagcttgatccaaagtatagatttaaatatccacatgagttttcaggaggtcagagacaaagaatagctatagctagatcaataatacttaaacctaaatttattattttagatgaaccaacttctgctctggataggtctattcagattcaaattattgatttactaaaatcacttcaagaaaaatacagtttgacttatttatttataagtcatgatttgaaagtaattagagcaatgtctgacagaattcttgtaatgcaaaatggtgaaatggttgaagaaggtaatgccaaatcaatttttgaaaaacccaaagaagaatatacaagagagcttttatctgcagcaatcaaatattcttaat

SEQ ID NO: 270387 - DNA, 619 bp, Unknown
  Bacterial polypeptide expressing nucleotide sequence isolated from the Sargasso Sea
aaaatcaacaattggacgcctgctgtttaggttttatgatgctcaacaaggttcaattaaaattgatgggcaggacattcgagatgttacacaagaaagtcttcacagatctattggtgtagtgcctcaagatacagttctttttaatgatacaatttactataatatagcatatggacttgataacgcatctcgagctgaagttgaaaaggccgccaaagatgcccaaatccatgattttattttgtctctcccagatggttacgaaacgaccgttggtgagcgtgggttgaaactttcgggtggtgaaaaacagcgagtagggattgcaaggacccttctgaaaaacccaccaattttactattggacgaagcaacatcggcattagatactgaaacagaacgtgaaattcgggaggctttaacgaatgcttctgaggggcgaagtgttctgacgattgcgcatcgtctttcaacaattgcagatgcggatagaataattgttttagaaaatggaagtattgttgaaataggtacgcacgaagcgcttctcattaaacggggacgctattattctttgtggacaaaacaattaacagaagataagccagctgcttaa

SEQ ID NO: 270388 - DNA, 548 bp, Unknown
  Bacterial polypeptide expressing nucleotide sequence isolated from the Sargasso Sea
aatggctaaaataggacttagaagtatctccaaatcgtttggttccacagaggttatcaagtcacttgacctttcagtttccaatggtgagttcattaccattgtggggccatccggatgcgggaaatctactcttttgagaatcattgcaggtttggaaaatcaatcgacaggtgatgtagaaatagatggaaatgttgtaaataataccagggcgagcgaacgagatctagccatggtttttcaatcctatgctctctaccctcatcttactgttcaacagaacatgatggtacctcttaaactccgtcgcttgtctatattggaacgcttcccgataattgggttgttaatgccgaaccgtcattccaagttagatgagattgtaaataaggtgcaagcagcatcagaaactcttcaaataacacaccttttggaccgcaaaccaggtcagctttctggtggtcagcagcagagggtagcagtaggaagagcaatggtcagagagcctgtggctttcttgatggatgaaccactttccaatttag

SEQ ID NO: 270389 - DNA, 508 bp, Unknown
  Bacterial polypeptide expressing nucleotide sequence isolated from the Sargasso Sea
aatgattaattttatatcaccttatattgaactccccaaaaaacttacagtgaaacaaaatttatttgtttactctaaactttataaagttaaaaatattaaggaacgaattgagtatttgtcggaaaagctaagaataggagaattattaaacagtattactggagagctttcatcaggtcaaaagaatagagtaagtttggccaaagccctagtcaatgaaccaaaagttctgctacttgatgaaccaactgcttctttagacccagaagtaggagactttgttagaacatttttagaggaatataaaaaagaaaaaaaaatttcgatacttttagcttctcataatatgaatgaagtcacacgtttatgtaaatctgtgttaatgatgaaaaatggagaaataatagaccaaggtaaacctcaagatttaattacaaaacatggaagaacaaatttagaggaagtttttctaaaactatcaaggagtaaaagtgagtttaactag

SEQ ID NO: 270390 - DNA, 910 bp, Unknown
  Bacterial polypeptide expressing nucleotide sequence isolated from the Sargasso Sea
catgataattccggtaattaatcgttattgcaatcgagttgttatcattgaatcaggagaagtttttgatcaaaagtacggacagttaccccaggtggatgataacgtagaccataaaaacccttcaggaaaattgccggatataaaaaaagaaaaagtgttaagcattaatggtttttgtaaatcatattctaattcgggtcagaccaaaaaggcgttaaaagatgtatcgttaaacttatttagaggaaaaacactgggaattattggagaatcgggaagcggtaaaagcactctagcaaaaatgattttaaatattttaaaccgtgatgatggtgaaatggaactaaccgtatcaaacaataaagtaaagaaccttattactccaaataaaaatattggggctgtattgcaagatagctcagggtccttaaatccaaaaatgaaaattcaacaaatactattagaacctttagaaatcttagggttttttgataagaatgaaatgaaatcaaaaacgatcaaagcaatcaatgaaataggtctggaccaaagttttctagatagatacccccacaccttatcaggcggacaaagacagagggtgtctttggcaagggcaatgatgttagagcccagtgttcttgtttttgatgagcctacatctgctttggatacagaaaataaaaagagaattttggaattactcaaatcattacaaaacaagaaaaaaacatcctatcttttcatatctcacgatctacttgttatatcagaaatagctgatgaggtagcagtattatttcgtggggagataattgaaatcggaactattgaaacaattatgagtaatccaaaacaagactatacaaaaaaattagtagagtctcatcggtatagtagcgtatag

SEQ ID NO: 270391 - DNA, 507 bp, Unknown
  Bacterial polypeptide expressing nucleotide sequence isolated from the Sargasso Sea
aatgcaggataaaaataatgtggtagatcactcaaaggctttaccaataaccattcgaagccttacaaaaaaatacggctcgctttacgcactagattctatagatttagatgtcagtagtggtgaatttcttactctccttggtccttcaggatctgggaaaaccactctacttatggccattgcgggttttaaccgtccagattcaggaagcattaggtttggtaataccgaaatgattcttgccccacctcataaacgtgaagtcggcatggtatttcaaaactatgctctatttccacatatgactgttgcggaaaatattagttttccgcttaagcttagaaagtatccctctacggaatgtcataaacgtgttgatgaagccctgtccacagttcaattatctgatttgggtgatcggagaattgatcagctttcgggtggacaaaaacagagagttgctcttgctcgggctttcgtattcagtccaaggattttgcttat

SEQ ID NO: 270392 - DNA, 382 bp, Unknown
  Bacterial polypeptide expressing nucleotide sequence isolated from the Sargasso Sea
tgaattactagagctagtgggtttgacagataaaaaagaccagcatccaaccagattatctggtgggcaacaacaacgtgttgcaattgcaagagccctagccatgagaccaaaagttatgcttttagacgagataacatcagctttagatccagaagtggtaggagaagtattaaatgtaattagatcactaaataaagagcatagtcttacaatgataatggtaactcatcaaatggggtttgctagagaaatatctgatcgtgtgtgtttttttaatgaaggaaaaatttttgaacaaggtgcgcccgaacaattatttggcgatccacaaaatgaaagaacaaaacaatttttgcatgcagttcttgatgcaaattaa

SEQ ID NO: 270393 - DNA, 928 bp, Unknown
  Bacterial polypeptide expressing nucleotide sequence isolated from the Sargasso Sea
tcgcaaaaaaggtataggtatggttttccaacatttttcactttttgaatctttaactgttagagataatttaattttaggtattgataaagatatttcgtacacggatttaaaaaatcaacttaaaaatatttcatcaaaatataatttacctttagatttagatgcgccaataacttcactttctgctggtgaaaaacaaagagttgaaatagttagaattcttttacaagatcctcaacttttgataatggatgaaccaacttctgtactaacacctcaagaggtagataatctttttgtaacccttaattctcttgttaaagaaggtagaactattctttatataactcataagttagaagaagttattaatttatgtaatgacgttactataatgaggaatggtaaagtaatagactcttgctcaacaaataatcaaactgctaaatctttagctaccaaaatgttaggtgaaaaattagatgatttgaaaaaagattcttcatatttaaataataaaataagttttgttgcaaaaaatatttcttgttcttttaatgatcctttttttacagatttaaaaaatatttcttttgaagtaaaatcaggagaaatatttggtatagctggggttgcaggtaatggacaatcagaattaatggatattttagttggtgaaaatgttttaatagattctggtgaaattatttttaataatatcaatatagaatatttagatcctcaaaaaagaagagatttatcaatcgcttttgttcctgaaaataggctagggcatagtgctgttccggaattgactttaagtgaaaatattcttttgagtcagtttcctaataataatttttcaaatcgaggaattcttaatcatagttctattgaaacttatgcaaataaagtaataaatatt

SEQ ID NO: 270394 - DNA, 976 bp, Unknown
  Bacterial polypeptide expressing nucleotide sequence isolated from the Sargasso Sea
accagtcatgttgttcacaattctttgagctttaatattaataaaggtgagagagttggactcgttggttcgagcgggtgcggaaaatcttctatcgttaagctgcttctgcgtttccatgatccagtaagtggatcagttcgcattggggataaagatcttagggatatctcatttgaccagattcgaagcatgatctcagtcgtacaccaggatacatttttgtttcatggaactatcgaagaaaatataaaaatgggtaatccagaagctgaagaaactgaaataattaaagcagctaaaaatgcaaatatacatgagtttgtggaaacacttccagacggctacaaaactttaattggtgaaaaagggattaaactctcaggaggacaaaggcagagggtggcaatcgcaagagcacttttgagagataaacctattctaatattagatgaagcgctatctgctgtagatgctgaaaatgagtttgttattcagcaggcattggatcatttgatgaaggaccgtacgacactggtattagctcataggctttcaagtgttgtaaaatgtgaccgaatactagtaattgacaagggacaaattgcagagtcaggttcccatcaaatcctgatgcagcaggaggggatatataaacttctgatgtcacaacagatccgcgaggctgaatcagaagaattaatgattgaagataaagaatcggatatttttaaagaaaaagaggaagagcagtcaaaagaatcaataataaacatacccacagaaggcatagttgcagcggaaggactgaattggaaacaactaattattgagctaatgtgtcacatcaccccttggaaaggaaggcttgttctttccttctgttttggagtgctgcgtgtactttcattcataggtgttggtattttcagcgcgcttatagtacttgatttgaagaatgccaatgattattcat

SEQ ID NO: 270395 - DNA, 757 bp, Unknown
  Bacterial polypeptide expressing nucleotide sequence isolated from the Sargasso Sea
gaaaatttagatgttttttataatatgcctagaactagtttttttaagagcaatagatttcatgctgtaaaagatacgtcaattaatatatataaaaatactacaattgggttagtgggcgaatcagggtcaggtaaatctactttaggaaaggccatagcaaatcttactccttatgaaggaaaaatatattatgacgggcaggacattacatcatcatcaaaggaaattaagaaacacatccaaatagtgtttcaggatccttatggatctttatcaccaagaatgactataggagaaatagttggagagggactgggagtgcattttaatctttcaaaaaaggaatcagatttaaaaattgataaagttttaacagatgtaggaattgagcttaatgcaaaaaataaatatccgcatgaattttctggtggtcaacgtcaaaggatagctattgctagatcattaataatgaatcctaactttatgattctggatgaaccaacatctgctcttgatagatcaatacaaattcaagtgataaatcttttaaaagatatacaaaatgaatatgaattaacatatttgtttattagtcatgatttaaaggtaatacgctcaatgtctgattatatttttgtaatgaaagacggaataatagtagaatctggtctgtcaaatgatgtttttgactatccaaaagaaaaatatactaaaaaattgctctcagctgcgttaagatacgcaaccgattgag

SEQ ID NO: 270396 - DNA, 233 bp, Unknown
  Bacterial polypeptide expressing nucleotide sequence isolated from the Sargasso Sea
tcaaaagctgctttagtatatgggcagaagaatgaacctcctggagcaagagctagagttgcacttacaggaataactgtagcagaatattttagagaacaggaaggacaagacgttctttttttcgtggaaaatatttttagaattactcaagctggttcagaagtttcagctcttttaggaagaattccttctgccgtgggagatcagccaactttggctaccgacatggg

SEQ ID NO: 270397 - DNA, 965 bp, Unknown
  Bacterial polypeptide expressing nucleotide sequence isolated from the Sargasso Sea
cgatcagcatttatcagtaaccgtttaagcccattaatggaatttattggcagtttagcaatagctctatcaatatatgcaggtggggtatttgttttaaatgaaacaatgacaacaggtcaatttatgagctttctcgttagtttgttactagcttatcaacccgttaaagctcttggaaatttaaatattagtgtacaggaaggtcttgcaggagctgagagaatttttaaacttcttgatacatctaataaaaatatggaagaagtctctgaaaaaaaagatattaaattagatggagacatcttattaaaaaatatttcttttggttatgatcaaaaaaatgtacttgaaaatataaatataaatattccaaaaaataagaaagttgctttggttggattatctggttcaggaaaatcaaccattgctaatttagtacctaggttctatgataattataaaggtgacataataattggatctgaaaatataaaaaaaattcatttaaaagatctaagaaataatatttcaattgtaactcaggaaactattttatttaatgatacaattgcaaataatataaaatatgggagattagatgcatcagataatgaaattgaaaaagttgcaaatttatctggagtcactgaattctcaaatactttagataaaaagttagaaacaataattggtgagagtggagtaaaattatcaggtggtcagagacagcgcgtagcaatagctagggctattataaaagatgctccaatacttatattggatgaagcaacttcatcattggacaatattactgaaaaaggaatttatagtacgattaaagatttaatgaaaaataaaacaatcttaattgttgctcatagactaagcacaattgaagattctgatattatttatgtagttgataaaggtaaaatagatagctttggttctcatgatgagct

SEQ ID NO: 270398 - DNA, 607 bp, Unknown
  Bacterial polypeptide expressing nucleotide sequence isolated from the Sargasso Sea
catgaccgttgcatcacatccaccggtgatttccttgcgccagctacgcaagagctatgacagccttgaggtgctgaagggtgtcgatctggaggcgcgcgagggggatgtgatctcgctgatcggatcgagcggttccggcaagtcgacaatgctgcgctgcatcaacatgctggaaatcagccaggccggcgaaatcgagttctgcggcgacccggtgcgctggagcggcaatggcaccgaccgggttccggcggacaggcagcaggtcatcgagatgcgcacccggctctcgatggttttccagcaattcaatctctggtcccatttgacggtgctggagaatgtcatcgaggcgccgataacggtgctcggtcggccccgcgccgaggttgtggatgaagccatggcgcttctcgccaaagtcgggatcgccgacaaggtggattcgtatccggcgcagctgtccggcggccagcagcagcgtgccgccatcgcccgcgccctcgcgatgcgtccgaaagcgctgttgttcgacgagccgacatcggcactcgatcccgagctggagcacgaggttgtcaaggtgatccgcgagctggcagcc

SEQ ID NO: 270399 - DNA, 695 bp, Unknown
  Bacterial polypeptide expressing nucleotide sequence isolated from the Sargasso Sea
acgcaggccagctcaactttcaggaggtcaacagcaacgtatcgcactcgcaagagcattagtatttgagcctgagttggttctaatggatgagcctttaggggctttagataaacagcttagagaaaaaatgcagtttgagataactggattggcccatcgtctaggtattacagtcgtttacgtaacgcatgaccaaacggaagcattaacaatgtcagaccgagtagcagtatttaacgatggtcggatacaacagttagcaacgcctgatcagctttatgaggaacccgaaaacagctttgtagctcaatttataggagaaaacaatacgttgaacggtactatctctgatttaaaaagtgatgttgcgaccgttaagttagacagcggtgatataatcgattgcaaaccagtgaacgtttcgactattggtgagcgaacccaggtatccataagaccagagcgggtcgagctgaacaagaagaggctcccaccaggctcccacactttgactgcagaagttttagagttcatatatatgggtgatgtttttcgcaccagattgcgggtggctggtaatgaagattttatcgtcaaaacaagaaattcgtctgatcaagttagacttaatccaggagaaaaaatcgagattggctggtcaacgtcatgctgtcgtgctttagatgcataga

SEQ ID NO: 270400 - DNA, 681 bp, Unknown
  Bacterial polypeptide expressing nucleotide sequence isolated from the Sargasso Sea
ttcataaattcagtatgctgctcgatattgaaaatctaaccaaaacctttcctggagttaataacacctcccccgtggaggtactcaaaggtcttaaactcaaagtggaagagggagaaaccaccgctatcattggacaatccggaagcgggaaatcgacccttttgtcgttgttggcaggattggaccaaccgacttccggaacccttaaattgaaagaacgacatctggattcgatgtccgaggaagaattaactcaattccgagcggaaaacatcggtatcatctttcagcagtttcatctgatgacccacctcaatgctctggaaaacgtgagtctccctctggaaatgaatcaccagcaggatgctcttgaacttgccgagaaagcactggagcaggtgggccttggatcgcgtaaggatcattttccccaccaactcagtggaggggagtgccagcgagtggccattgcaagggcgatcgtcattcgcccagcgcttcttcttgcggatgagccgtcggggaacctcgatcatgacactggagaacaggtggcagagctcttattcgatctggttggaaggacaggaatgacgatggtcttggtcacccacaattccgagcttgctttacgatgttccaaacagttgaccctcagtcaggggcttcttcagtgag

SEQ ID NO: 270401 - DNA, 730 bp, Unknown
  Bacterial polypeptide expressing nucleotide sequence isolated from the Sargasso Sea
tgataaagcattatcaatggtttcattaaatggatttgaaaccagaatgccagctcagctttcaggaggtcagcaacaaagggttgctgttgcaagagctttggtatttgacccagcagttgttttgatggatgaacctttaggagcgttagataaaaatttgagagaaagtatgcaatatgaaattaaacatattcatgaaagtattggagtaacagttgtatatgtaactcatgatcaaagtgaggcattaacaatgtcaaatagaattgcagtatttaatgatgggaaagttcaacaactttcagatccagctgaactttatgagaagccagttaattcttttgtagcagagttcattggtgaaaataatacctttaatggtgaagtgattgatatcgcaaaagataaatgtaaagtgaaattagcaaactcagaaattttagctaatccaatttcagttaagtccaagggtgaaaaaactacagtttcattgagacctgaaagagcattaattaatccaagtgataagatggataatatgtttactggaaagatagaagaagtaatctatcatggagatcatacaagggttagattaaatcttttaggaagctcggagtttattcttaaagttcctaacagtacatccaatttagaattaaaagttagtcaagatataaatattggatggaatagtgttgatgctagagcattagaccttaaataa

SEQ ID NO: 270402 - DNA, 587 bp, Unknown
  Bacterial polypeptide expressing nucleotide sequence isolated from the Sargasso Sea
gatgaatgctgtaaacaacaccgtggtgctggaagccaagggcctgaccaaacgctttaccgaaggccgcctggatgtgaccgtgctcaagggcgtggacctgcagatccatgcgggcgaaacgctggccatcgtcggtgcctcgggctcgggcaagagcaccttgctgcacctgctgggcgggctggatgcacccacggcgggcacggtgcgcctgaagggcgaagagatgtcgtcgctgtcggcggagcgccaggggcagctgcgcaaccatcacctggggtttatctaccagttccaccacctattgccggagttcagtgcgctggacaacgtggccatgccgctgcgcattcgccgcctgccgttggcgcagtgccatgccgaggcggagcgggtgctggcgtcggtcgggttgaaggagcggctgatgcaccggccggccgagctgtcgggtggtgagcgccagcgggtggcgattgcgcgggcgttggtgacgcggcccgcttgcgtgctggcggatgagcctacgggcaatctggaccggagtacggctgacggggtgtttgacctgatgctgcagttgg

SEQ ID NO: 270403 - DNA, 925 bp, Unknown
  Bacterial polypeptide expressing nucleotide sequence isolated from the Sargasso Sea
tgtgaaattaaatcatttggtgctgaagagtatgaaaatagcagattggcagatgctactctttcaaataagtttcagaatcttaaactgaaagctacaaataatcttgctacaccaataatccaatttttagtttctatatccctttccttagttgcatattttgcattaggttcttcattaggaataacgcttgatgcagaaaccttcgtagcattttttacagcagcaggcttgatggcaaaacctataagacagctatcaagcattaatggggttatacaaaaaggtttagctgctgcaaatgagatatttgatcaattagattttgatgacgaagttaatactggagatacaacaaaacctatcgaaggtgttatagagtttaaggatgtttcttttggatatacaggagataaaaatatattaaataatataaatctaactgttaataagcatgaaacaatagcatttgttggtaaatcaggatcgggaaaatctacattagctaatcttatttctagattttattctgattatactggacagatattaatagatggaattccaaacaatgaatatgatttaagttttcttagaaaatccatatcaattgttactcagtcaccaactctttttaatgacactatagaaagaaatatagcctatggtgatgacgaatttgatactgatagagtaatggagtctgccagattagctggatgtttagattttatagagaaattaccagaaggcataaattcagaaataggcgatgatggtgtactactgtcaggcggtcaaagacaaaggcttgcaatagcaagagctttttataaaaattctccaattattattcttgatgaggcaacgtctgctcttgatactgaatcggaagaattagtgcaggagtcacttgaaaagt

SEQ ID NO: 270404 - DNA, 553 bp, Unknown
  Bacterial polypeptide expressing nucleotide sequence isolated from the Sargasso Sea
aatgagcaaaaaaattatagaattaaaaaatgtaagcaaatggtttgataaatttcaagctctaaaagacgtaaatttagaagtcaatcaacaagaaaaaattgtaatttgtggaccgtctggttcaggaaaatctactttaataagatgtattaatagacttgaagaacatcaagaaggacaaataatagttgatggtaaagaaatttcagaaaacacaaaagatattgaaaaaatcagagccgaggttggtatggtatttcaacaatttaatttatttccacatttatctattttagataattgcacattagcgccaatatgggtaaaaaagttaccgaaaaaacaagcagaagaaattgctatgagaaacttagaaagagttcaaatagcagaccaagcaaaaaaatttccaggacaactttcaggtggccaacaacaaagatctgccctcgcgcgagctttatgcatggaaccaaaaataatgttgtttgatgaacaacatcggctcttgatcagaaatgatccaagaggttctagatgccatgggtga

SEQ ID NO: 270405 - DNA, 640 bp, Unknown
  Bacterial polypeptide expressing nucleotide sequence isolated from the Sargasso Sea
attaataatgctgacctttgcccaccaggatcaaataaaacaataattaaaaatttaaatttgagcatcgacaataatcaatcacttttggtagtaggaccatctgggtgcggaaaaacatctttactaagaatgattagtggtttatgggaacccgatcagggagtaattaaaaaaccaaaaattggggaattattattcatacctcaaaaaccatatatgctacttggttctttaagggaacaattatgttatcccacagaagtaaagaaatttagtgatgaacatcttacttctgtacttcatgaagtaaatttaaaaactttagtggatcggtatcctaatcttgatattaaacaagattggccaagaattctttctctaggcgagcaacaaagattggcttttgcaagactcttactaaattctccaagatttgcagtacttgatgaagcaacaagtgctttagatattaacactgaaaaaaaactatatggtttacttaaggaaagagaactttctcttattagtgttggacatagacctagcttgaaagattttcacgagaatattttagaattaaatggacagggagactggaaattattgacgtctgataagtataattttaaggattaac

SEQ ID NO: 270406 - DNA, 528 bp, Unknown
  Bacterial polypeptide expressing nucleotide sequence isolated from the Sargasso Sea
aatgattataaaaactgagaatttaacaaaagactatgagactggtactcaagttgtgagtgctctcaaaggaattaatttgtcagtagaaaaaggtgagtttttatcgatcatgggaccttcggggtctggcaaaaccacattaatgaatattattggatgtttagattctcctactaatggatcttattttcttaatgataaatcagtaagtaagttagatgatgatgagctcgccaagataagaaacgatgagataggtttcgtctttcaatcatttcatttgctagcaagaaatactgcatttgataatgtaatgttacctttaaaatatgcaggtataggtaaagaagaagctacaaaaagatcaaacgatgttttggatttagttggtctatcaagtagagcaaaacacacaccatctgagctttctggtggtcaacaacaaagagttgcaattgctagagctcttgtaaatgagcctagtattttatttgcagatgaacctacaggaaatttagattcaaa

SEQ ID NO: 270407 - DNA, 443 bp, Unknown
  Bacterial polypeptide expressing nucleotide sequence isolated from the Sargasso Sea
aaaaattagaaataaagaaataggatttgtgtttcaaaaatttcacctcttaccaaggaatacggcattagagaatgtaatgcttcctctgaagtatgccagtgtaggtaagacagaaaggtctaagaaagcgatggaagctttaacgcaagttggtttagcagacagagtagaccatagaccttcagaattatctggagggcagcaacaaagagtagctattgctagagctcttgttaactctcctgcgatactatttgccgatgagccaactggtaacctagattctaaaacaggcgaagaagtaatgaacctactgcatgaattgaatgacaaaggtcaaacaattgtcctaattactcatgagaaagaaattgctgaccaaacagaaagaactatatttatacgtgatggaaaaattgaatcagatgcaattaactaaa

SEQ ID NO: 270408 - DNA, 550 bp, Unknown
  Bacterial polypeptide expressing nucleotide sequence isolated from the Sargasso Sea
atgtttcttaatgtaaaaaacttaagtaagtcttatggcgctcatgagaccattattaagaaacttaatttttctctcaaaaaaggcgaaattatttcttttattggtgaaagcggttcaggtaaaaccacctttctgaaatgtttagcaggtttagaaaatattgattccggactaattgaacttaatggaaggttattgaatgatcacaacaaatttgttgaggcaaatcaaagaaaaattggttttgtttttcaagacaatcctctctttccacacctgaatgtattggaaaatattaaatttaatttaaagaacattgacgatgatgagctaactaagttattgaatttgacagctctaaatggtttggaaaaaagatatcctcatgagttatcagggggtgaaaaacaaagggtgtgtattgcacgttcactaatcagaaaacctgatctattactgctagatgagccttttagtaacttggattcaaatattaaaactaaaattaaggatgaaatttatagaattataaaagaatctgggatta

SEQ ID NO: 270409 - DNA, 654 bp, Unknown
  Bacterial polypeptide expressing nucleotide sequence isolated from the Sargasso Sea
gttggtaggccttagtctcgagaacattactcatgcctttgatggcaatgttgtggttgacaatatcaaccttcgtgtcgatccgggcgagattatttgtcttgtcggaccatcagggtgtggaaagtcaacgacccttcgtattgccgccggactagaggaagtccaagcaggacgagtgataattagtggtaagctggttggtggcgatggacttcacgttccgccggaacgccgtggtgtaggactggtcttccaggattacgctttgtttccccaccttaaggtccttgaaaatgttgcttttggtgtctccaatggccaatccgatgaatcgcaaaaacacacggcacgggaaatgctggataaagtaggcttgggacatctggaaaatatgtttccccatactctatcaggaggggaacaacaacgtgtcgccctggcccgggcactcgcgccaaagcctagtctgatgttgatggacgaaccattttccagtttggatactggattacgggataaaattcgcgatgacacgctggcgctgcttaaggattctggtgcagcgacgcttcttgtcacccatgatccagaagaagcgatgcgaatggcggaccgtattgcgctgatgcgtgacggcagactggttcagga

SEQ ID NO: 270410 - DNA, 421 bp, Unknown
  Bacterial polypeptide expressing nucleotide sequence isolated from the Sargasso Sea
cgggaaccaacgtcgaaaccgagttgaagaagtattggaagcagtaaaaattgacgaggaattaagaaaccgtcgaccagatcagttaagcggaggtcaactgcagagagttgctattgcaagggctattgcaccagaaccaaacctaatttttctggacgaaccgacttcgtctcttgatctatctgttcgaggagaagtgcttagtcttttaaatgaacttcagaatatcttaaaaattacatatgtttttgtttcacatgaccttgaagttgtacgcgctgtctctgatagaatcgtagttatgtatcgtggaaagatagttgaggaaggatctccagaaacaatatttaaaaacccttcacatccttatacccagaagcttttagctgctagtgaattttccttactcaagaattaa

SEQ ID NO: 270411 - DNA, 406 bp, Unknown
  Bacterial polypeptide expressing nucleotide sequence isolated from the Sargasso Sea
agatatcagtgatgcaattcaagcctctcatatcgatgaattcatcgatgaattgcctgaggggttacagacaaaagttggtgatcagggcattcttctttcaggtggacagagacaaagaattgcaatagctagggcgctactcaaggatgccccaatactgattctcgatgaggcaacctctgcacttgattcggaaagcgaaaaatttatacaaaaggctttcgatcggttgatggaaaataggacaacttttgtcattgcccatcgtctaagcacaattgaaaatgcagacaaaatattggtcctatcaaacggaaaaatcgtcgaagagggaacccatgaagagttattgaatcaagatggagaatactctttgttacataaaatgcagttcaatgactag

SEQ ID NO: 270412 - DNA, 574 bp, Unknown
  Bacterial polypeptide expressing nucleotide sequence isolated from the Sargasso Sea
aaaatatattatgacgggcaggacatcgcatcatcctcaaagcaaattaagaaacacatccaaatagtgtttcaggatccatatggatctttatcaccaagaatgactataggagaaatagttggagagggacttggagtgcattttaatctttcaaaaaaggaatcagatttaaaaattgataaagttttaacagatgtaggaattgagcttaatgcaaaaaataaatatccgcatgaattttctggcggtcaacgtcaaaggatagcgattgctagatcattaataataaatcctaattttatgattctggatgaaccaacatctgctctcgatagatcaatacaaattcaagtgataaatcttttaaaagatatacaaaatgaatatgaattgacatatttgtttattagtcatgatttaaaggtaatacgctcaatgtctgattatatttttgtaatgaaagacggaataatagtagaatctggactgtcaaatgatgtttttgactatccaaaagaaaaatatactaaaaaattgctctcagctgcgttaagatacgcaaccgattgag

SEQ ID NO: 270413 - DNA, 226 bp, Unknown
  Bacterial polypeptide expressing nucleotide sequence isolated from the Sargasso Sea
aatgtctgaagtagaatataaaaacattaaaaaaaattttggatctgtagaagttcttaaagatatcaaccttaatataggaaatcaaaaatttgtagttctcctaggcccctctggatgtggtaaaactactcttttgagaatgacagctggacttgagtctatatctagtggagaaattttaatagagggaggtattattaataacatacacccaagagaccgg

SEQ ID NO: 270414 - DNA, 826 bp, Unknown
  Bacterial polypeptide expressing nucleotide sequence isolated from the Sargasso Sea
agaaattgcaatggtatttcaatcatatgctttatatccacacatgaatgtttttgaaaatatgtcctttggcttaaaaatggaaaagattccaaaaagtgaaattaatcaaaaagttaataatgccgctgctatacttcaaattgaggatctacttgaaagaaaacctaaacaactttctggtggacaaaaacaaagagtagcaattggtagagcaatcacaagaaatcctaaagtttttttatttgatgaaccattatcaaaccttgatgctgctttaagatctgaaatgagagttgaaatatctaaactccataagaaaatgaattcaaatataatctatgtaactcatgatcaggtcgaggcaatgacattagctgataaaatcgtagttcttaataaaggaaatatagaacaatacggtacaccaagtgaaatttattcagatcctaataatatttttgttgcagaatttatcggatcaccaaaaatgaatattattaaaattaataaagaacaaattatcaattcgaacacattaaaattgttcaagaatgaaattacttttgaaaactttaaatttgaagatgagatttatcttggtattagaccagaagatgtaagtttagaaaacaatcatgaaattcaagtagatgtgaatattgatcttattgaaaatttaggttttgaaaaaatcatttattctaaagtttcaacatcccaaattataattaaatcgtcgaaacatattagtgaaaaatcgctcaccatatctttctcaaaagataaagttctatttttcgacaaaaataataatagaataaga

SEQ ID NO: 270415 - DNA, 886 bp, Unknown
  Bacterial polypeptide expressing nucleotide sequence isolated from the Sargasso Sea
gaaacacggctttcagcctatcctcatcagctttcgggtgggcagaggcaacgtgtcatgattgctatggcactagcaaaccatccagatttattgatagcagatgaacccacaacggctcttgatgttactgtacaagcacagattttgaaccttctgaaacatttacaaaaaaagcttgggatggcaattttgcttataacccatgatttaagcatcgtaaaaaaagttgcagataaggtagctgtaatgatcgatggtgagattgttgaaactaatagtgtcacaaatttgtttgctagacccaaaacagcctacacacgaaaattgataaattccgaaccgactggtaagccgccaccgatcagtgaaaacgctagaacaatcctcgaagtaaaaaacttgagagtttggtttcccatacaaaaaggtattttgaagaggactgtaggatatatcaaagctgttaatggcgtaacattgagtatacgagagggagaaacacttggtgttgttggcgaaagtggttctgggaaaacaacgctgggtctggccatactgagacttcagtctagtgaaggtgatatcatctatcgtgaaagaccaatacataacatgggctatcgtaagatgattcatttgcgtagcgagatgcaagtagttttccaggatccttttggtagtctctctccacggatgtcgatggccgaaataattggcgagggtttatgggtccatcacaaagcccattccggatcaaaaaatgtctccgtcatcgagaatcgtatcgacgaggctatccaagaagttggacttgacctcgctatgcgcaatagatatccgcatgaattttcagggggacagcgtcaacgaatttctatagcta

SEQ ID NO: 270416 - DNA, 370 bp, Unknown
  Bacterial polypeptide expressing nucleotide sequence isolated from the Sargasso Sea
cttggcgaaagtgggcattgatgagcgccagcagatcaaatacccggtgcatctctccggcggtcagcagcagcgcgtctccattgcgcgtgcgctggcgatggagcccgatgtgctgctgtttgacgaaccgacttccgcgcttgaccctgaactggtaggggaagtgctgcgtatcatgcagaagctggcggaggaggggaaaaccatggtggtagtgacccatgaaatgggctttgcgcgccatgtctcgtcgcacgtcattttcctgcaccagggcaagattgaagaagaaggccatccggatgagctgttcggcaatccgaaaagccctcgcctgcagcagttcctgaaaggctccttgaagtaa

SEQ ID NO: 270417 - DNA, 525 bp, Unknown
  Bacterial polypeptide expressing nucleotide sequence isolated from the Sargasso Sea
catgaagttggagaaggaccgagacgttctgagtctcaagggagtttccgtccgctacgttgactcgaccgtggccttgcacccgacgagtctggatgtgaagcagggagagtttttggtgcttctgggcgcctcgggcgcagggaagtccaccttgttacgaagcatcaatggactggtgctgcccacaaaaggcgaggtatcgatacctggcctggcaggtggggtagtcaacgcaaagacgctgagagagcaccgcaagcgctgtgggatggttttccagcagcatcatctgattggacgtcagtcggtcctcaggaatgttctgatgggaaagctcggtgacaggggtgcattcgcttcgctatggccgtggagcaagaaggacaagctggaggcgctcacagtgattgagcgtgtcgggctgctcgaaaaggcgctctcccgggctgatgccttgtctggggggcagcagcagcgcgtaggcatagctagggcgctaatacagaagccacgaatcctgct

SEQ ID NO: 270418 - DNA, 682 bp, Unknown
  Bacterial polypeptide expressing nucleotide sequence isolated from the Sargasso Sea
atgaatagttgctcaattgatgacttaagttttcaaaaggtctgtttttcttatgatgataaactaaataacaaagaaattttaaataactttagttataaaatcaaaaaaggaaaatttacaagtattataggtccttctggatcaggaaaaacgtctttactaaaattaatttctggtattgttaaatgtaaaaaaggtgaaataagatttgaaaatgaaataattaaaaaaaaatcaaatgatgttagcttagtacaacaaagtgcttctcttatgccttggttgaatgtttaccagaatattgagttaggaaatataaataaaaaaaataaaaaatttaataaaattgataaagttattaaagatgtaggtttgcaggaatatacaaaattcttcccctatcaattatcaggcgggttattacaaagagttgcaattgcaagagcattattatttaatcctaaattattacttttagatgaaccatttgctgctttagataatttaagtagagaaattatatctacagaacttacttcaattattaaaaaagaagccgttacggtcattatggtcacacattcgattgaagaagcagcattactaagtgatgaggttttggtcacaggattagcacccataaatgttattaaaagttttataccgcctaaaagtaaaa

SEQ ID NO: 270419 - DNA, 622 bp, Unknown
  Bacterial polypeptide expressing nucleotide sequence isolated from the Sargasso Sea
tatgaacgcggctcctccccttatcgaatttcgcaaggtctcgcggatttatggctccggcgaagcggaaatcgccgcccttaacggcgttgatttctcgatcgaggccggcgagttcctctcgatcatgggcccgtcgggctccggcaagtcaacggcgatgaacattctcggctggctcgaccggccgaccagcggccagttcttcttccagggcgtcgacacgaccgaactgcccggccccaagctgaccctgctgcgccgtcatctgctggccttcgtgttccagcgctacaatctgctgccgcgctcctcggcgatcgagaatgtcgaactgccgctgctctatcgcggcatcagccgcaccgagcgccgcgagcgggcggaaaacgcgctcgatcaggtgggcctcggcgatcggctgcaccagcgcaccatggagctttccggcggccagcagcagcgcgtggcgattgcccgggcgctgatcaccgaacccgccgttctgctcgccgacgagcccacgggcaatctcgacaccaaatccagcaacgagatcatggaactggtcaccagcctcaatgtcgatatcggcatcaccggtggtgatggtcacccatga

SEQ ID NO: 270420 - DNA, 1014 bp, Unknown
  Bacterial polypeptide expressing nucleotide sequence isolated from the Sargasso Sea
aatgattgcaatgtcactaattaatgagcccgagcttctaattgctgatgagccaacaacagccttagatgtaaccattcaagctcaaattcttgatctcatgaatagacttaaagacaagcttggaatgtcaatcctatttataactcatgatttaggactggttgagaagtttagtgacagagtttgcgttatgaaagaggggaaaattgttgaacaaggcgtaacaacgaaaattttctctaatcctaaacatgaatacaccatcaagcttttaaaatcagagcccaaagaaaagaatcatttacttgtttcagaggataatattttagatatttcaaagctaagtgttttttacaaaataccatcaaaacagctatttaaaactgatagattttgtgcggtttctgatatttctttaaaaattccaagaaattcaacagttggtgtggttggagagtcaggttctggtaaatcaacactaggaaaagcgattataaatcttcttgattttgaagggtcaattaaatttaatggtaaatcgattaaagatctcagctcagctgaaaagaaattattaaaaaaagacattcaaatagtttttcaagatccttatgggtccctatccccaagaatgacagttggcgaaatcataggagaaggcttggatatacattttgatttttcaaatgaagaaaagatagaaaaaatatcaaatgttatgaaggatgttggattagatgatagcctcatttttaaatatccacatgaattttctggaggacaaagacaaagaatcgcaattgctagatcaataatcttaaacccgaaattcatgatccttgatgagccaacttcagcgcttgatagatctattcagattcaagtaatagatgttttaaaaagattgcaagaacaatataaattaacatatttatttattagccacgatcttaaagtgtatagatctatgtgtgatcagatttttgttatgagtgagggaaagctagtaga

SEQ ID NO: 270421 - DNA, 439 bp, Unknown
  Bacterial polypeptide expressing nucleotide sequence isolated from the Sargasso Sea
gatatacattttgatttttccagtgaagagaagatagaaaaaatatcaaatgtaatgaaagatgttggattagatgatagcctcatttttaagtatccacatgaattctcaggtggccaaagacaaagaatcgcaattgctagatcaataatcttaaacccgaaattcatgatccttgatgagccaacttcagcgcttgataggtctattcagattcaggtaatagatgttttaaaaagattgcaagacaaatataaattaacatatttatttattagtcatgatctcaaagtaataagatctatgtgtgatcagatttttgttatgagtgagggaaagctagtagagtttggtaaggctgatgaggtttttgaaaatcctcaacaggaatatactcaaaaacttttaagagcagcactcaaatattcatcaaattaag

SEQ ID NO: 270422 - DNA, 543 bp, Unknown
  Bacterial polypeptide expressing nucleotide sequence isolated from the Sargasso Sea
ttaaaagtagaaaattacttacatttaggaaaaatgctcaaataatctttcaagatccttacggctcactttcaccaaaaatgaatattgaagctattgttggtgaaggtttggatgttcatgagaaaatttccaaatctaaaagaaaagaaatgatcttacaaatcttgaatgaagttggactagatggagatatgattaccagataccctcatgaattctctggtggacaaagacaaagaattgcaattgcaagagcattaattttaaaacctaaacttcttatactagacgagcctacctctgcacttgatgtttcggttcaattgcaagtaataaatttgttaaaaaaaatccaaaaaaaatattctttatcatatattttcattagccatgacattgcgcttattaagtctgtaagtgataaaattattattatgaaagatggtattattgttgagtcaggcgaaactaaaagcctattttcaaagccaaatgaaaattacaccaaggagcttattttctcatctaatctgaaataaa

SEQ ID NO: 270423 - DNA, 730 bp, Unknown
  Bacterial polypeptide expressing nucleotide sequence isolated from the Sargasso Sea
gaacctgccatcagggattttatacttagacttcgcaagggtgaagcggttgcattggttggcagcagcggtgctggaaaaacaacaattgccaatttaattccacgtttctatgatatcactcgcggctcagtaactatagacggacatgaccttcgagatttggatcttctctcactccgaaagttaattgcaattgtgactcaggacaccattctgttcaatgacactattgccaacaacatcacctacggtcagcctgactgttcaaaggagcgaatgtttgcagccgcacgtgcggcaaatgcacataatttcatcaatgagcaaccagaaggatatgatactttaatcggagaaaaaggcacacgactctccggaggacagagacagcgtctttctattgctcgtgcattggtcaaagatgccccaatacttattctagacgaagcaacttcggcacttgattctgagtcagaaattgaagtacaacaggctattgaacatctaatggaaaatcgaaccacgctagtgattgcacacagactatccacgatcaggagtgcagacaggatttgcgttatggaaaacggtcagattgttgaacaaggaaaacatgaagaactcctgcttgaaggaggacgttaccagcagctttatgagatgcagttcaagcaccagcctgaaggacacatacttgagggcactaaggaacatttggtttcctgaa

SEQ ID NO: 270424 - DNA, 727 bp, Unknown
  Bacterial polypeptide expressing nucleotide sequence isolated from the Sargasso Sea
agaaaaatatcacttgaaaatattacttttacttatcccactatagaggagccagccttaaatcaattaaatatttcaataccggctaatagcgtaattggtattgttggtccttctggttcaggtaaatctacactcattgatattttacttggtctcatagagccacaccatggcatgctgaaggttgataatacaatcataaattcaaaaaaccgtcgctcatggcaaaatactattggatttgttgcacaaagtatttttctatcagaaggaactattgctgaaaatgttgcattcggaataccaaaaaatcaaattaatttagatcaagttcatcaggcgcttaagcttgctcatcttgatgaattattacaaagccttgaaaatggtattcatacgaaagttggtgagcgtggcgtacaattatctggagggcaacgtcagcgagtaggaattgcaagagctttatactatgaagcagaggttcttgtatttgatgaagcaaccagttcacttgatggtattacagaaaaaatgattatggaagctatacataatttcagtggacaaaaaactattattatgattgcacaccgacttaaaacagtgcaaaaatgtgatcagatattttttattgataaaggtcaagtaattgataaaggcacttatcatgaattaattgagaagaatgaacattttaaaaacatggccaaacactcttaga

SEQ ID NO: 270425 - DNA, 571 bp, Unknown
  Bacterial polypeptide expressing nucleotide sequence isolated from the Sargasso Sea
atgtctaataagaaagaattcgttaaatttgcaaaagttgataaaagttacgatggaaaagttcttgtcgtaaaagatttaaacctagatatagaggaaggtgaatttgtcacaatgcttggaccatccggttcaggaaaaactacttgccttatgatgttagcaggatttgaaactccaacaaatggtgaaatttatttagatgggaatcctatttcaaatattcctccacacaagagaggtattgggatggtatttcaaaactatgcattatttcctcatatgacagtatatgaaaatttagcatttccattaagagttagaaaaattccaaaagatgaaattgataagaaagttgataaagcattatcaatggtttctttagctggttacgaatcaagaatgccaggccagctttcaggtggacagcaacaaagagtggctgttgctagagcgctagtttttgatccatcagttgtattaatggatgaaccacttggagctttggataaaaatttaagagaaagtatgcaatatgaaattaaacatattcatgaaagtataggagtaa

SEQ ID NO: 270426 - DNA, 816 bp, Unknown
  Bacterial polypeptide expressing nucleotide sequence isolated from the Sargasso Sea
gatgaataggttttatgtacttcttatctcctggcaggctttcaatgcaaaccttggtggagtagatgcttttgtctcaaattttgaagaaatcactaataacaaagaagctacaggagaaaatgaattaaaagaatttaaggaattgatttatctcaagaatgtctcacttagctttggggaatttaatgttttagaaaatattaatcttaaaattccaaaagataagatgattgctatagttggagaatcaggtgctggcaagtctacaattgttgatctgatttgtggtttagttaaaccatctaaaggttccattattattgatggaaaagattttcaagatttgaatattaatgatattagatcgctgattggttttgttgctcaagatacgatcatctttaatgattctatagaaaataatatttccttatggggtgatgataatcaagagaggattagtaatgtttcaagaattgccgatgcagaggattttataataaaaaaagaagagaaatatcaaacaattgttggagataaaggtgaaaagttatctggcggtcagagacaaagaatttctattgctagagagttatttaaggatccgcaaattttaatcttggatgaggcaactagtgcacttgatacaaaaacagagaatagaattaaacaaagtatagagtcacttcagggaagtaaaacaatcttagcaatatcgcatagaatctctactattaagaatgccgactacatatatcttattcacaatgggattcttgaagaggagggtactttcaatcaactttatgaatt

SEQ ID NO: 270427 - DNA, 444 bp, Unknown
  Bacterial polypeptide expressing nucleotide sequence isolated from the Sargasso Sea
ttatagcaaaaccaaatgcaagttaccttgaaatgaaaaaggccatccaaatggcatctttgacggaacttgtcgaaactctgcctcaggggtttgataccaaagttggagaaagaggaaccagtctttccgggggccaaaggcaaagggttgccatcgcgagagcctttctgaaagatgcaccgattttaattcttgatgaagccacctctcatttagattctttgagcgaaagtgaagtacgtggtgccctggacaaactcaaagaagaccgcaccaccatcatcattgcacaccggctttcaaccattcgaaatgctgacaacattatcgttctcgatggaggaaaaattaaggagtcagggaaccacgatcagttattgaagaagaacggactttattcccaactggtctataagcaaatgaatttttcaggaggataga

SEQ ID NO: 270428 - DNA, 646 bp, Unknown
  Bacterial polypeptide expressing nucleotide sequence isolated from the Sargasso Sea
ctgactaaaacctttcctggagtcaataacaccttccccgtggaagtactcaaaggtcttgaactcaaagtggaagagggagaaaccaccgccatcattggacaatccggaagcgggaaatcgacccttttgtcgttgttggcaggattggaccaaccgacttccggaacccttaaattgaaagaacgccatctggattcgatgtccgaggaagaattgactcaattccgggcagaaaacattggtatcatctttcagcagtttcatctgatgacccacctcaatgctctggaaaacgtaagtctccctttggaaatgaatcaccagcaggatgctcttgaacttgctgagaaagcactggagcaggtgggccttggctcgcgtatggatcattttccccaccaactcagtggaggggagtgccagcgggtggccattgcccgggcgatcgtcattcgcccagcgcttcttcttgcggatgagccgtcggggaacctggattatgacactggaaaacaggtggcagatctcttattcgatcttgttggaagaacaggaatgacgatggttttggtcacccacaattccgagcttgctttacgatgttccaaacagttgaccctcagtcaggggcttcttcagtgag

SEQ ID NO: 270429 - DNA, 535 bp, Unknown
  Bacterial polypeptide expressing nucleotide sequence isolated from the Sargasso Sea
atgaagttggagaaggaccgagacgttctgagtctcaagggagtttccgtccgctacgttgactcgaccgtggccttgcacccgacgagtctggatgtgaagcagggagagtttttggtgcttctgggcgcctcgggcgcagggaagtccaccttgttacgaagcatcaatggactggtgctgcccacaaaaggcgaggtatcgatacctggcctggcaggtggggtagtcaacgcaaagacgctgagagagcaccgcaagcgctgtgggatggttttccagcagcatcatctgattggacgtcagtcggtcctcaggaatgttctgatgggaaagctcggtgacaggggtgcattcgcttcgctatggccgtggagcaagaaggacaagctggaggcgctcacagtgattgagcgtgtcgggctgctcgaaaaggcgctctcccgggctgatgccttgtctggggggcagcagcagcgcgtaggcatagctagggcgctaatacagaagccacgaatcctgctggccgatgagc

SEQ ID NO: 270430 - DNA, 762 bp, Unknown
  Bacterial polypeptide expressing nucleotide sequence isolated from the Sargasso Sea
tcagacaagtcaccgaggcggcatctgcagccagagtcttggtgagatcgcacagcgtgccgtcgacggcaaccacaacaggttgacccgcatgggccggaacaacgccagcgctaattgccagagcaacacagatccccgccgattgagccaaggaaggacgcatgggcgacctagtgagaatgattatcattttgtccagtgcaggatccgttgccacgatggggtgtgcaaaacaacaagaggcccaagtcaggctgtcaagggactgatgaacgattccctgtctgtgctgagcacaaccgaactgagcttcagctacggggagcgcaacaccgtcgaccgcgtcaacctgcaacttcaagcgggaactctgacagcgctggtaggtcccaacggagccggcaagtcaacgctgttgcacctgttggaggggcgactgaaacccagccagggaacggtcaactccaataagcaaattggcctgatgccccagcgggctgccattgactggtcgtttccgatcaccgccagcgacatggttcagctgggggtgggcaaaaagggcaaagccacagcagagaaccactgcgaacagctgctggaacgcgtcggtatgggagccatgggatcacgacgcctcaaccagctctccggcggccagcaacaacgcgtcctactggccagagctttgatgcagcagaccgagatcctgctactggacgaaccctgcagcgctattgatccaccaacgcgcgagca

SEQ ID NO: 270431 - DNA, 838 bp, Unknown
  Bacterial polypeptide expressing nucleotide sequence isolated from the Sargasso Sea
tatgaatgatttaattttagatattaaaaatatttctaaatcttttccaagagtaattgctaataataaagttacttttggtattaaaaaaaattctgttcatgctatattgggtgaaaatggtgctggaaaatcaacatttgttaaaattttatatggtctgctagaaccagatgacggttccatagaatacaataataagccttttgaaataaactctccagcagaggctagaaaaaacggaattggaatggtttttcaacatttttctctattcgagtcactttcagtcagagagaacttaattttagggattgatgaaaaaatgtcatactcaaatttagaaaaaaaattagaaaatatcagttcacaatataatctcccattagatttagatgcaccaattacttctttatctgcaggagaaaagcaaagagtcgagattgtaaggattttgcttcaagatcctcaaattttaattatggatgaaccaacttcagtcctaactccacaagaagttgaaagtttatttgttactttaaatgctttagtaaaagaaggcagaacaatattatacattactcataagttagaagaagtaatatctatatgtgatacagttacaataatgcgcaatggtgaagttattgatacttcttctacatctaatttcacagcaaaatcacttgcaacaaaaatgttaggtcaaaaacttaatgatcttaaaactaattatgatcatattaatgatgaatttaattttgaagtaataatatttcttgtgaatttaatgatccttttccttactgatttaaaaaatatatcttttaaaagttag

SEQ ID NO: 270432 - DNA, 697 bp, Unknown
  Bacterial polypeptide expressing nucleotide sequence isolated from the Sargasso Sea
aaaccaaaagcactttctggtggtcaaagacaaagagtagctattggcagagcaatagttagagatccaaaagcatttttgtttgatgagcccttatctaatcttgatgctgagttaagagtaacaatgagaaaagaattatcagcacttcatgaaaaaatcggtggtacaatgatttatgttacacatgatcaagttgaagctatgacattggctgatcaaatagtagttttaaataatggttatgttgcacaagcaggagcaccacttgatttatataataatcccagtgatatttttgtagctggttttattggatctccaaaaatgaattttataaaagttaatgcaattgataagtctggttcatttaatttagtttcagatgcattgaatttacaaacaaatcataaaaatttacaaaataatacaccttattctcttgggatacggcctgaacatatagaagtttgtgaacagcaaaattcagatttgaaagtacatgttgattttactgaacagctgggaagtgaaacttatttttattgtcaaggcgaaggaataaaacaattaatcgttcatcatactggccaatataaaattaataagggagaagaattatatcttcgttttaaaagagatttagttcatctttttgaagagaatggcatgtctgtatcaaaaaaaaataattgat

SEQ ID NO: 270433 - DNA, 682 bp, Unknown
  Bacterial polypeptide expressing nucleotide sequence isolated from the Sargasso Sea
tacttcaattaatatatataaaaatactacaattggattagtgggcgaatcagggtcaggtaaatctactctaggaaaggccatagcaaatcttactccttatgaaggaaaaatatattatgacgggcaggacattgcatcatcctcaaaggaaattaaaaaacacatccaaatagtgtttcaggatccatatggatctttatcaccaagaatgactataggagaaatagttggagagggactaggagtgcattttaatctttcaaaaaaggaatcagatttaaaaattgataaggttttaacagatgtaggaattgagcttaatgcaaaaaataaatatccgcatgaattttctggtggtcaacgtcaaaggatagcgattgctagatcattaataatgaatcctaattttatgattctggatgaaccaacatctgctctcgatagatcaatacaaattcaagtgataaatcttttaaaagatatacaaaatgaatatgaattgacatatttgtttattagtcatgatttaaaggtaatacgctcaatgtctgattatatttttgtaatgaaagacggaataatagtagaatctggactgtcaaatgatgtttttgactatccaaaagaaaaatatactaaaaaattgctctcagctgcgttaagatacgcaaccgattga

SEQ ID NO: 270434 - DNA, 367 bp, Unknown
  Bacterial polypeptide expressing nucleotide sequence isolated from the Sargasso Sea
atatttaaaaagagttcaaattgacgatcaggctcacaagtacccagcacaattatcaggtggccaacaacaaagagcggcaattgctagagcattatgcatggagccaagaattatgctatttgatgagccaacttcagcactggatccagagatgattaaagaagttcttgatgttatggtagggcttgcagaaggaggtatgaccatgcttgttgtcacgcatgagatgggatttgcaaaagaagtagctgacaaaataatatttatggatgagggccagatagtggaaagtaaaaacccaactgatttcttctcaaatcctgagagtgagaggactaagacttttctcagtcagatactatag

SEQ ID NO: 270435 - DNA, 581 bp, Unknown
  Bacterial polypeptide expressing nucleotide sequence isolated from the Sargasso Sea
gggagaaataataattaacaataaaaatttaaataatttaaataaaaaagaacttttagatttaagaaaagatattcaagttgtatttcaagatccattttcgtcactaagtccaagaatgaatattgaagatattatttcagaaggattaatggttcattacccaacaataagtttaaaagaaaaaaaacatcgattgaataatatattgggaaaagtaggtttaaaatatgaagatacaattacaaaatatcctcatgaattttctggtggacaacgtcaaagaattgctattgctagagctttaatcttaaaaccaagtatattaattttagatgaaccaacttctgctttagatgtgacaatccaaaaccaaatattaggtctattaaataatttacaaaatgaactaggcttaagttatatttttataagtcacgatatgaaggttataagagctgttgcgaataaagtaattgttttaaaagaaggtttgatcgttgaagaaaatcgtagtgaagatatttttacttcaccaaaatcaaagtatactaagaaacttatatcttcagtcgcataaa

SEQ ID NO: 270436 - DNA, 472 bp, Unknown
  Bacterial polypeptide expressing nucleotide sequence isolated from the Sargasso Sea
gatgagccattcatcgtgcgtgctgagcacaacagagctgtgtttcagctacggaggtcgcaacaccgttgaccgcgtcaacctgcacctccaatcaggaacactgacggcgctggtggggcccaacggagccggcaagtcaacgctgttgcatctgatcgaagggcgactgaaacccagccaaggaacggtcaactccagcaagccaatcggcctgatgccccagcgggcagccattgattggtcgtttccgatcaccgcccgcgacatggtgcagctgggggcgcctagaaagggcaaagccacagcagcggaccactgcgaacagctgctggaacgcgtcggcatgggagccatgggatcccgacgactcaaccagctctccggcggccagcaacaacgcgtcctgctggccagaggattgatgcagcagaccgatatcctgctgctggacgaaccctgcagcgccatc

SEQ ID NO: 270437 - DNA, 766 bp, Unknown
  Bacterial polypeptide expressing nucleotide sequence isolated from the Sargasso Sea
agaaagctcgaaaaaaatataattaaagataaaattagcacagcagctgacgttttagggctaaccccctacttaaaaagataccctagagctctttctggagggcaaagacaaagggtagctatgggtcgagctattgttagagaccctcaagtatttctttttgatgagcccctatcgaaccttgatgccaaactccgtgtgcaaatgcgggcagaaattagagagcttcatcaaagattaaaatctaccactctttatgttacccatgatcaaattgaagctatgacaatggccgataaaattgttgttatgcaaaatggatttatcgaacaaattggctcacctttggagctttacgatcgaccaaataacatttttgttgccggtttcattgggtctcccgccatgaacttattaccaggcaccgtaaaaaaatcaggcaaaaatttcgtcgcagaaatatatggtggacagttttctttacccaaagctaaaaacttaactgcgggacaagatattatactgggtatccgccctgagcaattgagtcctgggaaaaaaggaattgctgccacggtctctgtggtcgaaccaacaggctcagaaactcacctaattgtccggagcggggaacaagaattaatttctgttgtccgtgagagaagcaactttagtattggagagaaaataaatcttttcgcagaaaaaaactttttgcatgtatttgatgcaaaatcatccgaaagattaaatgacgattaac

SEQ ID NO: 270438 - DNA, 556 bp, Unknown
  Bacterial polypeptide expressing nucleotide sequence isolated from the Sargasso Sea
cccggtcaacttgagacgcagtattgggtacgtttttcaaggaatcggattgtttcctcactacactgtgttggataatgtagcagcggtcccttccttgctccgttgggaagactctctcattcattcacgttgcgaagagattctagaaatggttgggctccccattaaggattatggtggtcgttatccttcgcaactgtctggaggccaacaacagagagttggggtggcgagagcgttaatagcaaagccggaggtgttactcatggacgaaccttttggtgctcttgacccaatcactcgggctggtttacaggaagaattcaagcgtattcagagattgttaaatttaacggtcataatggttactcatgatatgaccgaagccttgcttatggcagatcaaattgcagtcatgaggaagggacaaatacttcagatgggtcctccaaaagaattactgaatcggcccgagcacaattacgttagaaaattaatcgagttacctcgagacagggcaagccggttagaagaattaatggattcactatga

SEQ ID NO: 270439 - DNA, 580 bp, Unknown
  Bacterial polypeptide expressing nucleotide sequence isolated from the Sargasso Sea
gcggctgtgcggcgaggatttgcgtaatctcgcccttggcgacataaggcaatatatcgggctggtgccgcaggagcctgcgctgttctccaccagcgtgcgtgacaatatcggttttggccggccggacgcgaacgaggacgagatcatcgccgctgcgcggcaggcggaagctcatgatttcatcgccgcgctcgagaacgggtatgacacgccgataggggaaaagggcgtacggctgtcgggtggccagcgccagcggatcgccatcgcacgcgcgatcttgcgcgatccggggctgcttcttctcgatgaggcgacaagcgcactggatgcgcggtctgaggcagccgtgcaggcggcgctggagcggctgatgtgcaaccgtacgtccattgttattgcgcaccgtctggctactgtggttcgggccgaccggatccttttgatggatggtggcaggatcaccgccactggcacgcatgaacagctgattaacgagtcggcgctttaccgccatctggccgaccttcagttctcgaccccgcagagcggcacgcaaggcacgccgctgaactga

SEQ ID NO: 270440 - DNA, 583 bp, Unknown
  Bacterial polypeptide expressing nucleotide sequence isolated from the Sargasso Sea
gaatccgtcagtatccgtggtgagtcaggctgtggaaagacgacccttctcaacctgctcgccaggttggacaccgctgatgtgggcgagctctattggaatggcgaagcccatgatccgaagttgcccccgggaccacgggatgctgcacggcgtgcctgcctcctcggtgtcgtgtaccaagcatattacctcattcccgagatgaacgttctcgagaatgtcttgttggccgcccggttagccggatcaatcggcaaggatgccaagcaaagagctcgcgaacttttggatcgcgtgggggtaagcaaccgtgaaagacaattacctcagaagctctcaggcggcgaacgtcagcgcgtggccatcgccagagccttgctaaatcggcccaaagtcctcttggcagacgaacccacgggtaacttggacgagcattccgccggcgacgtcatggaacttcttctggaagcatctcgtgaagaggaagccggtcttgttctcgttactcataacccgtccttcgccaaggctaccgacgaggcccttcatttggttaagggagtattgggttccccttgaa

SEQ ID NO: 270441 - DNA, 760 bp, Unknown
  Bacterial polypeptide expressing nucleotide sequence isolated from the Sargasso Sea
agaattcggcttggaaaaattgagtgctggagaccgtcagattcgtgcaattgaggttctcgaccaagtcggtatgaaatgggcagtgtccagatacccgcacacgctatccggaggacagcagcaacgcgtggcattggcacgcgcccttgcgccgcaaccgcccgtcatcctgttcgacgaaccattttccggccttgatgcgcggctgcgcgataaagtgcgagatgaaacattacatattcttaaagatagtggcacggcagcgctcctggtgacgcatgatgcagaagaggcgatgttcatggccgatcggattggcttaatgcacgaagggtctctagtgcaattcggaaatccggaaaatttatattttaagccgaaaaatgcctttgtggcagaattttttggtgagataaataggataacgggtgtcgtagaatcgggcaggattagaacgccattgggcgaatttattggagagggattagaagagggtagagaggtgcagatattaattcgccctgaacttttgcagttgaaaagaaattcagacgtatctggcttgaaaggtcgggtaattacctcaagaatgctcgggcgaacaagcttgatacacctaagcgtgtgtaaacagggtagggatttgcatttgcattcccgtatgccagggcgctttctgcccgaggaagaggcagaagtgtatatcgaattcgatcctatccatgcatttgtttttcccttgggttcaaaacgctaa

SEQ ID NO: 270442 - DNA, 568 bp, Unknown
  Bacterial polypeptide expressing nucleotide sequence isolated from the Sargasso Sea
aatgtccaagaaagtcgcaagtctagaaaatatatctaaaacatatggtaaagaggatctaactgttaaagccttaaacagcataaacttagaaatttataaaggtgattatttagctgtaatgggagctagtggctcaggcaaaagtacagctatgaatattattggatgtctagatagaccctctgaaggggtctataaattaaatggtatccctgttgagaaactatctgatgatgagctggcagagatacgcaaccaaaaattaggcttcgtctttcaacaatttcatcttctttcagatgcaacagcacttgagaacgttattttacctatggtttacgctggaattgagcctgagcaaagattggagcgaggtaagaatgccttaaaaaaagttggcctctctgaaagaatgaataatcgccctaaccaattatcaggaggtcaacaacaaagagtggctattgcaagggctatcatcaataaccccgcaatattattagcagacgaacccactggagctttagattcaaaaacaactgaggatgtactagatcttttgaca

SEQ ID NO: 270443 - DNA, 881 bp, Unknown
  Bacterial polypeptide expressing nucleotide sequence isolated from the Sargasso Sea
tacaaaagaaattttagttaacccaaaagaaagatatacaaaaagtttagtaagttctgttccaccaactaataaaaaaatttcaagatttataattgttgaaaatgaaaataaaaaattaataagaaataacttcaagatattaaataggtggaaaaaaaaagatatcaaacaccaaaaattagttgaagttaaaaaacttagtaaaaattttgacgataatttttttaatgaaaatttaaaaaattctgtgatggctgttaataaagtttcttttgaaatcaaagagggtgagtcgtttgggttagtaggtgaaagtggaagtggaaaatcaacaattgctaaaatgattgtaagtttatttaaaccaacatctggggaaattttttttgataatgtttgtgtaacaaaattaaaacaaaataacgagatgatgaaatttagaaaacaaattcaaatgatatttcaagatccttactcatctttaaatggaaggttaaaagttaaagatattgtgtcagaaccaattaaacttcacaatccatctataagtagaagtgatttagaaaattatgtttttgatttgttagagtccgttgaactaacacaaaaatctgccgaacgttacccacatgaattttctggtggtcaaagacaaagaatttcaatagcaagagcattagcaactcaaccacgacttctagtttgtgatgagcccacttctgcattagatgttagtattcaagcacaaatacttaatttattaaaagatcttcaagaacaattaaatttaacaattctttttataagtcatgatttacctgttgttcgtcaaatgtgtgatagaattgctgtactaagaaatggtaaattgtgtgaag

SEQ ID NO: 270444 - DNA, 655 bp, Unknown
  Bacterial polypeptide expressing nucleotide sequence isolated from the Sargasso Sea
gctgcgccacatcaacaagatctacggctccggtgacactgaggtgcgggcggtcaatgacctcagcctcaccgtggagagcggggactacatggcggtgatgggggcctcaggctctggcaagagcacggcgatgaacatcctgggctgccttgatcgccccagcagcggcagctatgtgctgcagggccaggcggtggaggggctgggggatgacgatctggccggactgcgcaacagctgtctggggtttgtgtttcagcagttccacctgctcgggcacctttcggcccttgagaacgtggagctgccgatgatttacgccaacgttccagccgatgaacgacgccgccgtgccacagaagcgctgcaacgggtgggactgggggagaggctgcggaaccgacccaatcagctcagcggcgggcagcagcagcgggtggcgatcgcccgggccatcatcaatcgaccagcccttttgctggctgatgaacccaccggcgcgctggattcagaaaccacccgcgatgtgctggaaatctttgatcagctcaaccgtgatggcatgacagtggtgctggtgacccatgaacatgacgtggcggagcgggccaaacgggtgctgctgttccgcgacggacgcatcgccggctga

SEQ ID NO: 270445 - DNA, 638 bp, Unknown
  Bacterial polypeptide expressing nucleotide sequence isolated from the Sargasso Sea
cgatgtatcatttaatataaaagaaggagaatcatttggtttagtgggagaaagcggtagtggaaaatcaacaatcgcaaaaatgatagtaaatttatacagcccaagtgctggagatattgattttgataatgtttgtataacaaaaattaaaagtaataaagaaatgatgaaatttagaaaacaaatacaaatgatatttcaagatccatactcttcattaaatggtagattaaaagttaaagatatagttgctgaaccaattaaacttcacaatccctcaataagtacaaaagatatagatagttatatttatgatttactagagtcagttgaactaacccaacaatcagctgaaagatatcctcatgaattttcaggaggtcaaagacaaagaatatctattgcaagagctcttgctactcaacctagacttcttgtttgtgatgaaccaacctcagctttagatgtaagtatccaagcacaaatattaaatttattgaaagatttacaagaacaattaaatttgacaatattatttattagtcatgacttacctgttgtaagacaaatgtgtgatcgaatagctgttttaaaaaatggaaaactttgtgagatatcaaaaactgaagagttat

SEQ ID NO: 270446 - DNA, 477 bp, Unknown
  Bacterial polypeptide expressing nucleotide sequence isolated from the Sargasso Sea
aatgagtgcgattgaagtcaaaaacctggtgaaaaaattccatggccagacggtgcttcatggtatcgaccttgaggttcaacaaggggaagtggtggcgattatcggtcccagcggttcggggaaaacgacgctgctgcgcagtattaatctcctggagcagccggaaagcggcacgattcgcgtaggcgacgtgacgatcgatgccgggcgcagcatcaaccagcaaaaaacggccattcgccgcctgcgtcagcacgtgggctttgtgtttcagaattttaatcttttcccccaccgtacggtgatggaaaacattatcgaagggccggtcatcgttaaaggggaggataaaaatgaatccatcgcccgggcgcttgaactgctgacgaaagttgggcttaccggtaaagaaaatagctacccgcgtcgtttgtccggcgggcagcagcagcgcgtggcgattgctcgcgcgct

SEQ ID NO: 270447 - DNA, 688 bp, Unknown
  Bacterial polypeptide expressing nucleotide sequence isolated from the Sargasso Sea
ggacaaagacaaagggttgctattggaagagcattggttagagagccaagaatatttttatttgacgaacctttatccaacttggatgcaaaactaagagttgagatgagaagagagataaaaaaacttcaccaacaactgaaaacaacagttgtctatgtaactcatgatcaaactgaagcaatgagtttaggaacaagaattgcaatcatgaatcatggtgttattcaacaaaatgatacaccagaaaatatttacaacaaaccaagtaacacatttgtagcagactttattggatcaccatctatgaatttaattaagggaaatataaaagaaagttcaggtgaaataacattcacagcaagcggttctaattttgaaattccaattaaagattatgaatttaaaaataaatctaatttaaataataaagaaattttatttggtataaggccagagcatatttactttaaaaaatctaatgaaagtgattttgaagtcaatttaagagcggatttaagtgagtatatcggtcatgaacaaataataacttttgattatgctaatcaagaaattttagcaaagtttccttcaacaattaaaatagaattagcaaaagaaacaaaattgtattttgatttgacccaaatatctttatttgaagctcaaacagaggaaagaatgtaat

SEQ ID NO: 270448 - DNA, 691 bp, Unknown
  Bacterial polypeptide expressing nucleotide sequence isolated from the Sargasso Sea
ctcaagcgccgcccgcgcgagctctccggcggtcagcgccagcgtgtggcgatgggccgcgccatcgtgcgcgatccggcggtatttctgtttgatgaaccgctatcgaacctcgatgccaagctgcgcgtccagatgcgtcttgaacttcagcagctgcatcgtcgtctgaaaaccacctcgttgtacgtcacgcatgaccaggtggaagcgatgacgcttgcccagcgggtgatggtcatgaataaaggtattgccgaacaaattggcacccccgtcgaggtgtacgagaaaccggccagccgctttgtggcgagctttattggcagtccggcgatgaacctgctggacgggcgcatcagcgaagatggtcgtcgttttgaactggaaggcggccttcgtttaccgatgaatggcgagcatcgccgccatgccgggcgtaagatgacgttaggtatccgcccggagcattttgcattaagctcccaggcggaaggtggcgtaccgctggtgatggatacgctggaaattttaggtgccgataaccttgcccacggtcgctggggcgagcagaaactggtggtcaggctgccgcatcagcagcgtccgtcagcaggcagcacgctgtggctgcatctgcccgaggatcatctgcacctctttgatggtgaaacaggacaacgcgcatgag

SEQ ID NO: 270449 - DNA, 646 bp, Unknown
  Bacterial polypeptide expressing nucleotide sequence isolated from the Sargasso Sea
ttacccaatcagagaaggggctcttcaaagggtggttggccatgttagggccgttgatggtgttagttttgatatttttcctggtaaaactgttgggcttgtaggtgaaagtggatgtggaaagagtactttgggaaaggtagtggcaggtttgactgatccaactagcgggtctgttcgctacaattttgataaccaattagtttctataagtagtttagaaaaaaataaatttaagaattttcgacgaaactgccaaatggtctttcaagatagttttgcttctttaaatccgcgccatttagtttttgatattgtcggtagacctttgaaagtttataaagaggtctcgggttatgatcttgtggaaaaggtagtttcacttctaaatcaagtagggttgggccgcgagcatctttatagataccctcaccaattttctggaggacagaggcaaagaatatccattgcaagagcgctagctttaaatcccgaaataataattctcgatgaaccaacctcagctctagatgtttctgtgcaagcccagatattaaatcttttgaatgaacttcaaaaagctcgtaatttagcttatctatttgtgacgcatgatttatctgttgtaaggcacatggctgactct

SEQ ID NO: 270450 - DNA, 706 bp, Unknown
  Bacterial polypeptide expressing nucleotide sequence isolated from the Sargasso Sea
caatagatttcatgctgtaaaagatacgtcaatttatatatataaaaatactacaattgggctagtgggcgaatcagggtcaggtaaatctactttaggaaaggccatagcaaatcttactccttatgaaggaaaaatatattatgacggacaggacattgcatcatcctcaaaggaaattaagaaacacatccaaatagtgtttcaggatccatatggatctttatcaccaagaatgactataggagaaatagttggagagggactgggagtgcattttaatctttcaaaaaaggaatcagatttaaaaattgataaagttttaacagatgtaggaattgagcttaatgcaaaaaataaatatccgcatgaattttctggcggtcaacgtcaaaggatagctattgctagatcattaataatgaatcctaattttatgattctggatgaaccaacatctgctctcgatagatcaatacaaattcaagtgataaatcttttaaaagatatacaaaatgaatatgaattgacatatttgtttattagtcatgatttaaaggtaatacgctcaatgtctgattatatttttgtaatgaaagacggaataatagtagaatctggactgtcaaatgatgtttttgactatccaaaagaaaaatatactaaaaaattgctctcagctgcgttaagatacgcaaccgattga

SEQ ID NO: 270451 - DNA, 574 bp, Unknown
  Bacterial polypeptide expressing nucleotide sequence isolated from the Sargasso Sea
tctggatatatattaattgacaatcaagatataagaaaagtgacacaaaaatctcttcgtagacaaattgccgtagtaccccaagatacaattttatttaatgaatctttattttataatatcgcttatggaaatccaaattcttctaaagaggaaattattaaagtaacaaaaatggcaaaattacatgactttatcaagaacttaccagatggatataatactatagttggagaaagaggcttaaaactttctggaggagaaaaacaaagagttgctatagcaagagccttacttaaaaaacctaaaattttcttttttgatgaagctacgtcatcgttagatacaaaaacagaaaaagaaattcaaaataatctagaacatttatcagaaaatataacaactataataatcgctcatagactttctactattaaaaatgctgataatataattgtattaaataatggagtaatagaagaaacaggaaatcataaaaaattattagaaattaatggtttgtatgctagcatgtggaaacaacaagaaaaaaacttaaatgattacacctaaa

SEQ ID NO: 270452 - DNA, 843 bp, Unknown
  Bacterial polypeptide expressing nucleotide sequence isolated from the Sargasso Sea
tcaaaatattaaataggtggtcaaagaaagaaattataaatcaagacttagttcagataaaaaatttgaataaaagttttgatgataatttttttacagaaaattctaaaaattctgttatggctgttaatgacgtttcttttaacattaaagagggtgaatcttttggcttagtaggagaaagtggaagtggaaaatctacaattgctaaaatgattgtcaatttatttaaacctacatctggtgatattttctttgacaacgtttgtataacaaaaattaaacaaagatctgaattaatgaaatttagaaaacaaattcaaatgatatttcaagatccttattcttcacttaatggaagattaaaagtaaaagatataattacagagccaataacacttcacaatccatctatatctaatttagaattaaataattatatttatgatttgctggagtctgtagaattgactcaaaaatctgcagatcgatatccacatgaattttcgggaggacagagacagagaatatcaattgccagagcacttgccactcaaccgagacttttagtttgtgatgagcctacctctgcattggatgttagtatccaagctcaaatattaaatttacttaaagatcttcaagaacaattaaatttaacaattttgtttataagtcacgatctacctgttgttagacaaatgtgtgatagaattggagtattaaaagatggcaaattatgtgaagtttcaaacactgagcagttatttttaaaaccggcacatgaatacacaaaagaacttttacgattaatgcctaaaattgagtctatttataattaat

SEQ ID NO: 270453 - DNA, 633 bp, Unknown
  Bacterial polypeptide expressing nucleotide sequence isolated from the Sargasso Sea
attgcctgatccatctacagaaaatctccttgaagtccagggattgaagatgcactttccgatttcggaaggatttttcttcaacaagaatatttctctggtcaaagcggtggatggcatcaacttcagcatcaagagaggtgaaacccttgggttggtgggagaatccggctgcggaaagaccaccactggacgctgtattcttcaattggaaaaagccaccgagggaaagattgttttcgagggccaggacctgacccaacttgattctaatgagctctcaccgctgcggcagaaaatccaggtcattttccaggatccctacagttctctcaatccaaggttgaagattggagacaccatcagtgagccgatgaaggttcacaacatccaatccgatccgaagttacggaataaaagagttgctgaactcctgaacatctgcggacttccttcggtcatggcagaccgttacccccatgaaatgagtggaggtcagagacagcgtgtcggaatcgcccgggccctctccctgaaccccgaattcatcatttgtgatgaagcagtttcggcgctggatgtttcgatccaggctcaggtcatcaacttgttggaagacctgagggaagagtt

SEQ ID NO: 270454 - DNA, 655 bp, Unknown
  Bacterial polypeptide expressing nucleotide sequence isolated from the Sargasso Sea
ctatggaactgatgttgaagtgcatgccttgcaccaagtttcgttagatattttttcgagtgatttcatgtcaatagtgggtccctctgggtctggtaaatcaaccatgttagggctgttggggcttttggacgttccatcaaaaggaaatgtcaaagtaaaaggcgtagatgcaacgagtatgaacgattttcaacgttcacgtttgcgcggagacgcaatagggtttgtctttcaacagtttcatttgatcccacacttgagcgcattgggtaatgtggaaaccgctctgttgtataggggcttatcgcctaaagagcgtaagaaaaaagctgcggagtctttgaacaagttaggacttggaggcagggaaaatcatagaccggttcagttgtcgggcggagagcagcagagagttgcaatcgcaagagctatagtcacagaccctttagtggtgctggctgatgaaccaacgggagcactcgattccgaaaatgccgaaaatattatggaagtttttgcagatttaaaatccccagaaagagctgtttgtctagtcactcatgacatggaaatagcagattcgactgatcgaaaaatttccatgaaagatggagaaatagttgaagatttgatactgggttctgaaaagtga

SEQ ID NO: 270455 - DNA, 802 bp, Unknown
  Bacterial polypeptide expressing nucleotide sequence isolated from the Sargasso Sea
ctatcctcatatgagcgttacccagaatatggcttttctctcgatttacaaaagatgccaaagctcgaaattaaacagcgagtagaagaggctgcaaaaattttacagatggaagatctcctagaaaggcgccccgccgcactttctggtggtcagcgtcaacgcgttgcaattggacgtgcgatagtaagaaaccccgaagttttcttgttcgatgaacctctttcaaatttagacgctgctctacgtcatgacactcgggtggaaatagcaaaattgcatcgtcaattaggggccacaactgtatatgttactcacgatcaggtagaagcaatgacacttgcagacaaaatcgttgtcttaaaggatggagaagttatgcaggtgggcgcaccaatggatttatttaattatccggaaaacaagtttgtggcgggctttctcggctctccaaagatgaattttttcgaatgcaagctagcttcaaaaaatggtgcaaaaacgcttggcacggtggaatttgatggccataccactaactacatcagactggtgtcacaagaaaaaagcgctggtgacgctgtacatttaggaattcgacctcaggacctaaaaatcaaaactaatggtgcaataacgggtaacgttacattagtcgaacgacttggtacggaaactgttgtggaacttctctcaaaaaacggtttcccttttagatttgcttcaccagaaactctagatttagaaataggtagccaagtttgtttcagttatgaccgacaaaaggctcacatattttagt

SEQ ID NO: 270456 - DNA, 819 bp, Unknown
  Bacterial polypeptide expressing nucleotide sequence isolated from the Sargasso Sea
cctggaagtcgcaacgggtcttggcggtcttgcggtggtggtgaccggtgcgatgctggtcaacgcagggatgctcgaaggcgcgatgctgccattgctgacgttgcttgccatggcggcctttttgccgatctccgagatctcagaggtgagccgccagcttgccgatacgctgggctcaacccgccggctttacgccgtcgagcatgagcccgtgcccgtcaccgacggtcccggcgtgcccgttgcccgcgagggtggcggtgttccgattgtgctggacgaggtggatttcagatatgaaaccggcaaccgccaggcgctcgatgccaccgattttgaggccgaagcgggtaagacgattgccctcgtggggccgtccggtgccggcaagaccaccatcgcgcaccttctcatgcgtttttgggatcctcagcaggggtccattacgctcggcgggcatgatcttcgcgattaccgcctggatgatctgcgcggacagattgcgctcgtcgcacaggatacttttctcttcaatgacaccttgcgcgccaatattctgattgcccggccggaggcgacggaagaagaacttggcgcaacacttgagcgggcatcgctcagtgaactggtggcaggtcttcccgaagggcttgagaccatggtgggcgaacgcggtatgcggctttcgggcgggcagcgccagcgcgttgccatcgcccgggcgtttttgaaagatgcgcccgtgctgatcctggatgaagcgacgtcccatcttgatgccgtgaacgagcaggcggtgcgccaggcccttgaagc

SEQ ID NO: 270457 - DNA, 513 bp, Unknown
  Bacterial polypeptide expressing nucleotide sequence isolated from the Sargasso Sea
taacttctattaggaatcaaattacaattgtatcccaggacatagtattttttgatcagtcattagaggataacatccgatatgcagatccatcagctaataacgaaatgattattgaagcagctaaaaaagcacaaatagacaagttgctttcagaacgaaatggtagttccgttggtccaaatggcagccaattatcgggagggcaaagacagcggatagccttagcccgcgccttcctcaagccagctcctattctattattagatgaggcaacctctgcgttagatgccgtaaccgaagccagtataactaattcattgaaagaactcagcaaaaacagaacaacgatagtcattgctcacaaattaagtagtattaaggatgcagaagttatttttgttatggagggtggaaggctagttgagtttggtacccattcagaattaatgaaaaagaaaaaacactatgccaaggtggtgaaaactcaaaattcaagcacacaaaaataaa

SEQ ID NO: 270458 - DNA, 458 bp, Unknown
  Bacterial polypeptide expressing nucleotide sequence isolated from the Sargasso Sea
tccacatctttctattttagataattgtactttggctccaatctgggttaagaaaatgccaaaaaaagaagctgaagaattggcaatgaatcagttaaagcaagtacaaatagacgatcaatcgaataaatttcctggccaactatcaggtggacaacaacaaagatgtgcaattgcaagagctctttgtatgcaacctaaaataatgctttttgatgaacctacatctgcattagatcctgagatgattaaagaagtattggatgcaatggtaaatttagccaaacaaggaatgactatgattgttgtaacacatgaaatgggctttgctaaagaagtggctgatgaggttatttttatggatgaaggaatgatagtggagaaagctgtaacaaaagaattttttgctaaccctaaaagcgataggactaaactttttttaagccaaattttataat

SEQ ID NO: 270459 - DNA, 379 bp, Unknown
  Bacterial polypeptide expressing nucleotide sequence isolated from the Sargasso Sea
attagcacttcaacatttagagaaagtacaaatttcagatcaagctaataaatatcctggacaattatcaggaggtcagcaacaaagatgtgctattgcaagagcattatgcatggaaccaaaaataatgttatttgacgaaccaacatcagccttagaccctgagatgattaaagaggtattagatgcaatggttaatttagcaaaagcagggatgacaatgatagtagtaactcatgagatgggatttgctaaagaggttgctgatgaggttatttttatggatgagggtatgatcgttgaaagagctgaaactaaagagttttttgctaatccaaagagtgacagaacaaagctatttttaagtcagatcctttaa

SEQ ID NO: 270460 - DNA, 487 bp, Unknown
  Bacterial polypeptide expressing nucleotide sequence isolated from the Sargasso Sea
aatgtcagataaaataattcaaataaaagaaatgaacaaatggtttggagattttcaggtcttaaaaaacattaatttagacgttgaaaagaataaaaaaattgttgtttgtggtccttcaggctcaggtaaatcgacattaattagatgtattaatagacttgaagaacaccaagaaggatcaattgttgttgatggaactgaattaactgaagagacaaaaaatatagaacaaataagagctgaagttggaatggtatttcaacaatttaatttatttccacatttatcaatattagataactgcactttagcgcctatatgggtaaaaaaaatgcctaaaaaagatgctgatgcattagctttaaaacatttagaaaaagttcaaattgctgatcaagcatataaatatccaggccaactttctggcggtcaacaacaaagatgtgcaatagctagagcattatgtatggagccaaaaataatg

SEQ ID NO: 270461 - DNA, 799 bp, Unknown
  Bacterial polypeptide expressing nucleotide sequence isolated from the Sargasso Sea
ttgttttttattatctataagattgaagcactagcaagattctcagcctcaataggaagattagaaggatttcaaagcagcataaaagaagtaaaaaatttaaaatcaaatacatataaaaacactgtcaaagagaaagagactatttatataagaaatgtaaatgtagaaactccggataaaagcaaattattagtaaaagatctaaatttaagtgttgaatatggtgaaagtattttagttgtaggtccttctgggtgtgggaagacatcattacttagagttatcagcggactatggtcaactgacaaaggtgagatattctcaccacaaaaaggagacttattatttatacctcaaaaaccatatatgacattaggttccttgagagagcaattatgctacccgttaagaacaagcagatttagtgatgaacatttacgagcagttcttaaagaagtacaacttccaaatttaattgaaagatatcctgacttagatatcaaacaagattggcaaagaatattatctcaaggagaacagcaaagattagcatttgcaagattattattaaattcaccaaagtttgtaattcttgatgaagctacaagtgctttagatataaaaacagaacattatctttataatttattgaaagataggaatattgctcttgttagtgttggtcatcgtccaactcttaaaggctttcatgacaatgtccttgaattaagtggtaagggtaattggtctctaatcccttcaaataattttgatttcaactctagtataaattaat

SEQ ID NO: 270462 - DNA, 877 bp, Unknown
  Bacterial polypeptide expressing nucleotide sequence isolated from the Sargasso Sea
ttttccagtcactgaaggcattttcatccaaagtgtgatcgctcatgtcaaagctgtggatggtattagtttccagatcatgaaaggtgagacccttggacttgtgggcgagtccggctgtgggaaaacaacgactggccgatgcattcttaaattagaagatccaaccagtggcgaaattatttttcgcggacaggacctgatgaatcttgacgataaaaatatgattgatgttcgaaagaaaattcaagtgatttttcaagacccgttcagttccctgaacccacgcatgaaaatcggcgatatcatctcagaacccatgcgtgtccatggaatcgttccagatccaaacgcccgcgacgacagagtcgtcgagcttttaactacctgcggtttgaaagctaatttcgctgacagataccctcatgagatgtccggggggcagaggcagagggtgggaattgctcgtgcgcttgctatgaacccggaatttattatttgtgacgaggcagtatcggcgctagatgtttcgatccaagctcaggtggttaatctcctggaggatctgcgcgagaaatttggtctaacttatctatttatttctcatgatttaagcgtcgttcgacatatttcgcatcgtgtagcagttatgtacctcggccatatggttgaactagcggagtgcgacgagctatttgacaatccgcaacatccctacactcgagcgctcctagaagccgtacctattcccgatcctgatctagagaatggacgtgggcataaaattataaagggtgagataccaagtccgattaaccctccatcgggatgcgtttttcacccacgctgtccgatggcccatgatgggtgtaaaaaa

SEQ ID NO: 270463 - DNA, 682 bp, Unknown
  Bacterial polypeptide expressing nucleotide sequence isolated from the Sargasso Sea
tgtttttgaaaatgtgtcattttcatacccaaaaaataaaggtattattttaaaagatattaattttaaaataccatacaattctcttgtagctataattggcccatctggtgcaggtaaaaccacattaattgatttgataggtttaattcatcttcctacaaaaggaaaaattctctttgatgggttgccttcaaaagaattttctctaattgggttaagaaatcaaatggcttttgtaagtcaagagccatttatctttgatgaaacaattgaagagaatctaaaatatgtaagaccaaaagcaacgcaaaaggagattgaaaaagcaatagaacttggaaatttaaaagatgtagttaaagaatttccagagggtacgcaaaccaaaatgggtgaccaaggaagtagattatcagtaggccaaaaacaaaggttggcaatttcaagagcgtttcttagtggctcatcgattattcttatggatgaaccaacaagtgctttagatgttaagtcggaattagttattaaaaactctattgaatatttgattaagcatatgaataaaacaatcatagtagttgctcatagactttctactattgctaaatcagatcttgtaattaagattgataaaggtcgtgtagttaaaaaaggaagtccaaaaaaggttttagactaa

SEQ ID NO: 270464 - DNA, 685 bp, Unknown
  Bacterial polypeptide expressing nucleotide sequence isolated from the Sargasso Sea
ttttttaaacagaacaccaaaagagctgtcaggtggacaaaggcaaagggtagctatgggaagagcgttagttagagacccaaaggtatttttgttcgatgagcctttgtcaaatctcgatgcaaaattaagagctcatatgagattggaaattagaaaattacataatcaacaaaatgctactactatttatgtaactcatgatcaaattgaggctatgactatggctgatgagatagtgattatgaacaatggtattattgaacaaatagcaactccaaatgaaatttatgaaaaaccaaacaatttatttgttgccgattttattggcactcctgcaattaatcttcttgagggagttgtaacagataagagtagtattaaattaaagtcacaggatcttccacactcaaaaaaaaatgtaacaaataatcaaaatgtagtttatggcataagacctactgacgtgagtatagacccaagctcaaatataaaagcggaagtagttttagtagaaacaactggttcagagactcatattatagcaatgttagatgataacgaatttagagtagttcaaaatggtggacgtaccacaattaaaaatggtgatgtcattcctctttcaatcaatattgaaaaagcacatttatttgatcattcatcaaccaaaagaatagattaa

SEQ ID NO: 270465 - DNA, 583 bp, Unknown
  Bacterial polypeptide expressing nucleotide sequence isolated from the Sargasso Sea
atgctgctcgatattgaaaatctgactaaaacctttccgggagtcaataagacctcccccgtggaagtgctcaagggtcttgaactcaaagtggaagagggagaaaccaccgccatcattggacaatccggaagcgggaaatcgacccttttgtcattgctggcaggattggaccaaccgtcttccggaacccttaaattgaaagaacgccatctggattcgatgtccgaggaagaattgactcaattccgggcggaaaacatcggtatcatctttcagcaatttcatttgatgacccacctcaatgccctggaaaacgtaagtcttcccctggaaatgaatcaccagcaggatgctcttgaacttgccgtgaaagcactggagaaggtgggccttggatcgcgtatggatcattttccccaccaactcagtggaggggagtgccagcgagtggcaattgcccgggcgatcgtcattcgtccagcacttcttctggcagatgagccatcgggaaacctcgatcatgacaatggagaacaggtggcagacctcttattcgatctggtggaagtacaggaatgac

SEQ ID NO: 270466 - DNA, 475 bp, Unknown
  Bacterial polypeptide expressing nucleotide sequence isolated from the Sargasso Sea
atgtcagataaaataattcaaataaaagaaatgaataaatggtttggagatttccaagtattaaaaaacattaatctagacgtagaaaagaataaaaaaattgttgtttgtggcccttcaggttcaggtaaatctacattaattagatgtattaatagacttgaagaacatcaagaaggatcaattatcgttgatggaactgaactaactgaagagacaaaaaatatagaacaaataagagctgaagttggaatggtatttcaacaatttaatttatttcctcatttatcaatattagataattgcactcttgctcctatatgggtaaaaaaaatgcctaaaaaagatgcagaagcattagctttaaaacatttagaaaaagttcaaattgctgatcaagcatataaatatccaggccaactttctggtggtcaacaacaaagatgtgcaataaaaagagcattatgtatggagc

SEQ ID NO: 270467 - DNA, 466 bp, Unknown
  Bacterial polypeptide expressing nucleotide sequence isolated from the Sargasso Sea
atgattaatatcaattctctctcaaaagaatacatcatgggagataacaagctattagcgctcgataatattgatctttcaattaatgaaggtgattttgttagtattatgggttcatctggctctgggaaatcaaccttaatgaatattataggatgtttagatgtgccctctagtggagaatatcattttagagataataatgtatcaactttaaattcgaataaactagctgaattacgaaacaaggacataggttttgtttttcaaaattttaatttactaccaagactaaacgcacaagaaaatgttgtgctaccacttttgtattctggtaaaaatttaaaagaaagaaatcaattagcaatagaggctctagaaagtgttggattaaaagatcgtgttcatcacagaccaaatcagttatctggtggtcaacaacaaagagtatcaatgcaagagcaat

SEQ ID NO: 270468 - DNA, 651 bp, Unknown
  Bacterial polypeptide expressing nucleotide sequence isolated from the Sargasso Sea
aatgaatgattcacctaaagtagttgaagcgagcaaagtaaatttggtattcaaaactgcagatggccccgttcatgcgctgtctggtattgatctggagataaataaaggagatttcatctcacttattggaccatctggatgcggtaaaacaactctgctacgtttaattgccgaccttgaaaaaccaactggcggcatactccgggtgaacggaatttctccagaagaagcccgcctgaatcgagactatggttatgtttttcagtcacctgccctttacccttggcgcacagttgagggcaatctgaaattgcctctggaaatcatgggtgtagaaaaagttgatcagaacgaacgtaccagggaagcactggaaatggttgatcttaccggctttgaaaaaaaattcccctggcagctttccggaggtatgcagcagcgtgtttcaatagcacgtgcactgacattttatcctgatctcctgctgatggatgaaccttttggtgctcttgacgaaatcgtacgtgatcagctcaatgaacattttcacaggctctgggaacaaacacagaagactgtagtgtttgttacccattccattcctgaagcagcctatctttccacaaaaattgtcgtcatgtccccccg

SEQ ID NO: 270469 - DNA, 688 bp, Unknown
  Bacterial polypeptide expressing nucleotide sequence isolated from the Sargasso Sea
ttattagaacaaccgcttccgagttatttattggatgaagatataaaaagcgttgattttgaacatcatataaagcttaaaaatattaaatttaaatatttaaacaacaataaatatgttattgatgacataagcctaacgatagataagggaagcagagtgggttttattggatcaacaggttgcggtaaaagcaccttgttggacataataatgggccttattgagcctacagaaggaaaatttctgatagataacaatgaagtagattttcaaaataatcgcggctggcaaaaacatatagctcatgttcctcaagcaatttttttgtcagattcaagtattgctgaaaatattgcatttggtattccaaaaaatgaaatcgattatcatcgattggagttatctgcaaaacaggcacaactcactgatttgatagaatcatgggaagataaatatgattcttatgttggcgaaagaggggtaagaatttcaggtggtcaaagacaaagaattggaattgcaagagcattatatcaaaatgcagatgtaattatttttgatgaagcgactagtgcgctagataatgaaacagaaaaagcaataattgaatctattacagaattaagcaaaaatttgaccataattatggttgcccatagactaacaaccttggaaggttgttcta

SEQ ID NO: 270470 - DNA, 305 bp, Unknown
  Bacterial polypeptide expressing nucleotide sequence isolated from the Sargasso Sea
gagcggcggccagaagcagcgcgtcgccatcgcgcgcgccgtcatcaagcagcccgcggtgctgctcctcgacgaggcgacgtcggccctcgacaacgagagcgagggcattgtgcaggcggcgctcgacgagctcatggcgagtcagagtcgcacaacgatcgtgatcgcgcaccggctgtcgaccatccgcaacgccagcaagattgcggtgatctcctcgggcaaggtggtcgaggagggcacgcacgacgagctcatcgacaagcctgggatgtacgcgaacctggtgttgtcggcttagc

SEQ ID NO: 270471 - DNA, 658 bp, Unknown
  Bacterial polypeptide expressing nucleotide sequence isolated from the Sargasso Sea
ttagaagtttccaatgttacaaaaaaagttaccagccctgagggcgaactaaccattgtaaatgatatcagtctttccttggaggagggcgtttttgcgtccattttgggcccatctggatctgggaagaccacacttcttgcaatcatggccggcctagatctgccgagtagtggagccgtgaagcttcttgataaagaaatcacaagcttaaatgaggataagagggcacagattagaagcaaggatgttggttttgtttttcagtcttttcatttgctgcctcgattatcagccttagacaatgtgatgatgccactcgagatactcggcgctaaagacgcaaaggagagggcactaaaagctttggatgaagtgggtttatccaaaagaacaggacacgttcctcatcaattatctggaggagaaaagcagcgagtcgcaattgcaagagcaatggttaaagcgcccagcatcttatttgcggacgagcccactggaaatttagaccaatcaagcactgacaatattctcgaactattgctgggaatcaataaacaaacaaagacaaccttggttgttgtgacacatgatcagcagttagcctcacgatcggatatggtcttcgagcttcaagaaggaaaattaaaatgctgaa

SEQ ID NO: 270472 - DNA, 677 bp, Unknown
  Bacterial polypeptide expressing nucleotide sequence isolated from the Sargasso Sea
gctttcgggtggtcaatcccaaagagtcgccttggcaagatcccttatcaaagaaccaaaggttcttctgcttgatgagcccatggcggcacttgataagaagctcagacagagcactcaatttgaattgatggatattcatgatgagcttggcataacctttgtgattgttacccatgatcaagaagaagcgatgacgctctcagaccgaattgcaatcatggaagaaggacaatttgttcaaataggttctccgaatttaatttatgaaaacccaaaatctaaatttgtggctgacttcttgggcaatatcaatctcctagaagcaacgattactgagcaaaacgatagtcagattgttgtcaactgtgccgcacttggcggtgagctaaagtttaatcaaactgaacaatccaatgcgcttgaaatgaccgtggctctgaggccggagaaagtaatgattgaaaagagcctgctcacgaatgatgagcaaaaacatgtcaagggcattgttgaggactttgggtactttggcaacctttccatttatcgtgtcagaaccgaaagtggacatatcatacaggtcagcaaacagaatagagatcgcgtggagcaatccatcaaatgggaagatgaagtttacctttcttgggaaaatgacagtttgatgttactgg

SEQ ID NO: 270473 - DNA, 529 bp, Unknown
  Bacterial polypeptide expressing nucleotide sequence isolated from the Sargasso Sea
gatcatcataatcataaaaaatttcctaaaaataagattggtatggtttttcaaggtcatcatctatttcctcatatgagtgtgattgaaaatgtatcactttcattaaaattagttaaaaaaaacaattctaaactagctatagaaaaagcaattaaaactttatctgaagtaaaaatttctaaaaatttatataataaatcacctaatgatttatctggaggtgaaaaacagagagttgccatagcaagaatgttggttttagaaccagaaattatgatattcgatgaacctacggcatctttagatccagaattgatttatgacatcttggaactaattgattccttatctaggagtactaaaactatgatatttgtaactcatgagataaagtttgctgaaaaaatttctaccaaaatgggatacttagacaatggtaaatttttggaggttgatacccctaaaaaaataatatacgaaccagaatctgaagaacttaagaaatttttatcaaaaatcttataat

SEQ ID NO: 270474 - DNA, 401 bp, Unknown
  Bacterial polypeptide expressing nucleotide sequence isolated from the Sargasso Sea
ttatgatttattagaatcagttgaattgacacaacaatcagcagaacgttatccacatgagttttcaggtggtcaaagacaacgaatatcgatagcacgtgctttagctacacaaccaagattattagtatgtgatgagcctacctcagcactagatgttagtattcaggcacagatattaaatcttttaaaagatttacaggaacaactaaatttgacaatattatttataagtcatgatttacctgtagtaaggcaaatgtgtgatagaatagctgtattaaaaaatggaaaactttgtgagatatcaaaaactgaagagttatttaaaaacccatcacacgattatactaaagaactacttacgttaatgccaaaaattgaatcaatttataactaat

SEQ ID NO: 270475 - DNA, 943 bp, Unknown
  Bacterial polypeptide expressing nucleotide sequence isolated from the Sargasso Sea
tatgaatgaggtggtcattgatattaagcaggtgaaaaaatcgtttcgtaaacgccgagataaagaactactggtgctagatggggtggattttgctattcgagaaggggaagtgattgcgctattgggtaaatcggggtcgggcaagtcgacgttattgcgtatcattgccggattgattgcgcccagtggcggtcaggtgctttatcgtgataagccgattcatcaaccggtgccagggttgaccatggtgtttcagaattttgccttgttaccttggttaacggtgttggagaatgtggagctgggcttggaagcgcagggggttaagtcggctgagcggcgtgagcgtgcgttagaggccattgacgtggtggggctggatggttttgagtctgcttacccaaaagagttatcgggtgggatgtcacagcgcgtgggtattgcgcgtgctttagttgttaatcccgaagtgttattaatggatgagcctttttctgccttggatgtattgactgcggaaaacttgcgcggggacttggttgatatctggttgtcagaaaaaaccaatattaagagcatattgttagtgacgcataacattgaagaggcggtgtcgttggcagataaaattatgatattcggttccgacccgggccgtgtgttgcatacgattgatgtggatctgtcgcatccacgcaatgaccaagaggccacgtttcgtgccttggtggatcagatttacaccttaatgaccacaccagaacagcgacaagagcagacgcgtgatggagagttcacggtcttgggtatggattatcgtttaccgcagctggctatcgcggagatgacggggtttctcgaaaccttggcgtcaccagaatatgagaaacgagtggacttacccgagttggctgaagaactgcatttagaagtggatgat

SEQ ID NO: 270476 - DNA, 583 bp, Unknown
  Bacterial polypeptide expressing nucleotide sequence isolated from the Sargasso Sea
gatggaaaaatctaatttgaatgcagatacaatacgaattgattcagtaaagtttcattggtctaataaaaatgattttaagatctatgttcctgaatttaatgtagcaagaggtgaaaaagtattacttctaggtgaaagtgggtcaggtaaaacaactttactctcacttatatgtggttttttaaatccaatttctggcgatatttttttaaacgatgagcctattaataatttatcagctagaaaaaaagatcagtataggtgtgacaacattgggatcatattccaacaatttaatcttctaccgtatgccaaagtaattgataatatcttgctacccctttacttttcaaagaaaagagttgaaaatataaaagatcaaaaagaaacagctgcaaatatatgtaaatctcttcgccttcctgatgaagtgctaaacatgcaagcaagtaaactaagtgtcggtcagcaacaaagagttgccgttgcaagagcattaattggtaaccccccattaatcatagctgatgaaccaacatcagccttggataagaacgcacaaagtatatttcttgattta

SEQ ID NO: 270477 - DNA, 602 bp, Unknown
  Bacterial polypeptide expressing nucleotide sequence isolated from the Sargasso Sea
gctgcccaagagggtttacaaaattctagatgcaagtccggccgtaattgagaaacattttgaaaaaattgaaaacttccttgaacctacaattgcttttgattcagtaaaattcaaataccccggacacagtcatgttgttcacagttctttgagcttcaatataaaaaaaggagaacgagttggaattgtaggttcaagtggatgtggaaaatcatctatagttaagctattacttcgcttccatgacccagtaaatggatcagtacatattggtggaaaggatcttcgagatatttcattcgacaaaattagaggtatgatttctgttgtccatcaggatacatttttatttcatggcaccattgaagacaacattaaaatgggcaaccctaaagctgatgaagaagagattattaaagccgcaaaaaatgcaaacatacatgagtttgtatcaactctgcctgaaggatacaatacattaattggcgaaaagggaatcaaactatcggggggacaaagacaacgagtagccattgcaagagcactcttgagggatacaccaatactcatattggatgaggctctttctgcagtagatg

SEQ ID NO: 270478 - DNA, 833 bp, Unknown
  Bacterial polypeptide expressing nucleotide sequence isolated from the Sargasso Sea
attaacaaaaccaaaagaaatttatacaaaagctcttgtaagttccgttcctcctacaaataaaaaaataaatagatttaaaattattgaaaaggaaaataaaactcaaggtgaaaccaatattaaaattttaaatagatggacaaaaaaagaaattattgatcaagatttagttaaggtcaaaaatttaagtaaaacattcgatgataatttttttactgaaagtactaaaaactctgtaatggccgtagacgatgtgtcatttaatataaaagagggagagtcgtttggattagttggagaaagtggcagtggtaaatcaacaatagcaaaaataattgttaatttatatggcccaactgccggtgatatcgattttgataatgtttgtataacaaagattaaaagtaacaaagaaatgatgaagtttagaaggcaaatacaaatgatatttcaagatccatactcttcattaaatggaagattaaaagttaaagatattgtttccgaacctattaaacttcataatccttcaattagttcaaaggacatagatagttatatttatgatttattagaatcagttgaacttactcaacaatcagctgaacgttatccacatgaattttctggaggccaaagacaaagaatatcaatagcaagagctcttgcaactcaaccaaggcttcttgtgtgtgatgaaccaacttctgctttagatgtcagtattcaagctcaaatattaaatttattaaaagatttacaagaacaactaaatttaacaatactatttataagtcacgacttaccagtggtaaggcaaaatgtgtgat

SEQ ID NO: 270479 - DNA, 485 bp, Unknown
  Bacterial polypeptide expressing nucleotide sequence isolated from the Sargasso Sea
actggccaatgtccagcgcaattacgagcagggcggatccgttatcgaggtcctgcgtgacgctagtctcgaggtgcgcggcggcgaaatcacggcactggtcgggccttccgggtccggcaaatccacgcttctaaacattgccggcctgctggaaaagccgagcggcggcgaagtgaccatcgacggcatctcctccagcaagctgggcagcggaaagcgcggacgtttgcgcggctcgcatatcgggtttgtgttccagtttcaccgcctgctgcccgaattctcggcgctggagaatgttatgattccgcagatgctgaatggcctcggccgcgaggagtcggcggagcgcgccgaacagctgcttgccatggtcgggcttcgccagcgatgcgatcaccgtccgggtgcgctgtcgggcggtgagcagcagcgtgtcgccatcgcgcgggccgttgccaatgcgcggcgtatccttctgg

SEQ ID NO: 270480 - DNA, 729 bp, Unknown
  Bacterial polypeptide expressing nucleotide sequence isolated from the Sargasso Sea
gatggtggccaatcctactttgctgtttccgaacgacgccgttgcccaggccacaccggcgaccagcgaagggctgcttgcggtcgagaacgtcaaccttgaataccgcacgcgcgaccggatcgttcgcgcgacccataacgtgagtttcgatgtgtacggcggcgatcgcttcgtgctgctgggaccgtcgggttgcggcaagtcgactttgctcaaagcggttgccggcttcattcaaccggcctccggcagcatcgcgctcgacggcgagaccgtgcgaggtcccggcgccgatcgtatcgtcgtattccaggaattcgaccagttgccgccgtggaagacggttctgcagaacgtcgcgtttccgctgcgtgtcgcgagaaagctgtcgcgcgcggaagccaatgagcgtgcgctgcattatctggagaaggtcggacttacgtcatttgcgaaagcctatccgcacaccttgtcgggcggcatgaagcagcgtgtcgcgattgcccgcgcgctggccatgcagccgcgcgtgctgctgatggacgagcctttcgccgcgctcgacgcgcttacgcgccgcaagatgcaggaggaactgctgcgcctatgggaagaagtgaacttcacactgctgtttgtcacgcattcgattgaagaggcgctggtggtcggcaatcgcattctgttgctgtcgccgcatcccggccgtgtgcgcgcggagct

SEQ ID NO: 270481 - DNA, 766 bp, Unknown
  Bacterial polypeptide expressing nucleotide sequence isolated from the Sargasso Sea
tttgatgacaatttttttacagaaaattctaaaaattctgtattggctgtagacaatgtttcatttgaaataaaggaaggggagtcgtttggattggtaggggaaagtggaagtggtaaatcaacgattgcaaaaatgattgtaaatttatttaaaccttcttcaggagatatattttttgataatagatgtattacacaaataaaaaataaatcagaaatgatgaaatttagaaaacaaatacaaatgatttttcaagatccgtactcatcattaaatgggagattgaaagtcaaagatattattgccgaacctattacacttcataatccatctatatctaattctgatctaaataattatgtaaatgacttattggattcagttgaaatgacacaaaaatctgcagatagatatccccatgaattttcaggtggtcaaagacaaagaatatcgatcgcaagagctttagcaactcagccaagacttttagtttgtgatgaacccacatctgcactggacgttagtattcaagcccaaatattaaatttgttaaaagatcttcaagaacaattaaatttaactatattattcatcagtcatgacttgccagttgtaagacaaatgtgtgatagaattggagttttaaaagatggcaagttatgtgaagtttccaacactgaggatttatttttgaaaccttcacatgaatacacaaaggaacttttacacttgatgcctaaaattgagtctatttataattaat

SEQ ID NO: 270482 - DNA, 752 bp, Unknown
  Bacterial polypeptide expressing nucleotide sequence isolated from the Sargasso Sea
ttttactgagagttcaaaaaattctgttatggcggtcaatgatgtatcttttaatattaaagaaggtgaatcttttggattggttggagaaagcggaagtggtaaatcaacaatagcaaaaatgattgtaaatttatacaagccttcagagggggatattttttttgataatgtttgtataacaaaaattaagaataattcagaattgatgaaatttagaaaacaaatacaaatgatttttcaagatccttattcttcacttaatggacgattaaaagtaaaagatataatttcggaacctataaaacttcacaatccatctataagtagaaatgatttagaaaattatatttttgatttgctagaatcagtagaacttactcaaaattcagctgatcgatatccgcatgaattttcaggaggtcaaagacaaagaatatctattgctagagctttagctacacaaccaagacttttagtttgcgatgaaccaacttcagcactagatgtgagtattcaagctcaaatattaaacttattgaaggacattcaggaacaattaaatttaactatattatttattagccatgatttaccagtggttagacaaatgtgtgatagaattggagtattaaaagatggtaaattatgtgaagtttcaaatactgaggagttatttttaaaacctcggcatagttacacaaaagagcttttacatctgatgccaaaaatcgagtctatttataaatgat

SEQ ID NO: 270483 - DNA, 727 bp, Unknown
  Bacterial polypeptide expressing nucleotide sequence isolated from the Sargasso Sea
tatggcacgcaagcaatttacagcagttgatgatgtcactttcaagatcaatacaaattctactgttggactagtcggtgaatctggttcgggcaagtctacattgggtaaagcaattgctggattattaaattacgagggtgaaatattatttgatggaaaaaatcttgcaaagatttctggctctgaaagacaaagagttaaaaaagatattcagattattttccaagatcctttcggctcattatctcctagaatgaccgtgggcgagattattggcgaaggcctagatgtacattttgatttaaagaaaaatgaaaaggtatcgctaataaaagattcaatggaggatgttgggttaaatccagagcatatgttcaagtatcctcatgaattttcaggaggacaacgccaaagaattgctattgctaggtcgatcattttaaaacctaaattacttatacttgatgagccaacttctgcacttgatcgatccatccagattcaagtcttggagctgcttaaagaacttcagaagaaacttaaattaacctatttatttattagtcatgatcttaaagttatcagatcaatctcagatcatatttttgttatgcaaaatgggaaaattatagaaaccgggccatcaaaagttgtatttgaagatcctaaagatcaatatacagtagacttgttaaaagcagcattaaagtattcctctggttaa

SEQ ID NO: 270484 - DNA, 594 bp, Unknown
  Bacterial polypeptide expressing nucleotide sequence isolated from the Sargasso Sea
tcttttttgacaacgtttgtataacaaaaattaaacagagatctgaattaatgaaatttagaaaacaaatacaaatgatatttcaagatccttattcttcactaaatggaagattaaaagtaaaagatataattgcagaaccaattacccttcacaatccatctatatcaaatatagaattaaataattatatttatgatttactggagtctgtagaattaactcaaaaatctgcagatcgatatccacatgaattttcaggagggcagagacaaagaatatcaattgcaagagcactcgccacacaaccaagacttttagtttgtgatgaacccacctctgctttggatgtaagtatccaagcccaaatattaaatttacttaaagatcttcaagaacaattaaatttaacaattttgtttattagtcatgacctgcctgttgttagacaaatgtgcgatagaattggagtcttaaaagatggcaaattgtgtgaagtttcaaacactgagcatttatttttaaaaccaacacatgaatacacaaaagaacttttacgattaatgcctaaaattgagtctatttataattaat

SEQ ID NO: 270485 - DNA, 583 bp, Unknown
  Bacterial polypeptide expressing nucleotide sequence isolated from the Sargasso Sea
cgaacgcgtaggaatcatgggcactactggtagtggtaaaagttccatcctagacttacttatgggtttgcttttgccaacaagcggaagtattaaaattgatggtaaaaacttaaccccacaaaacatttatctctggcataaaaagatatcacacgtttcgcaaggtatttacttcttggatgcttctatcgttgcaaatattgcgctagggatacctgaaaacaaagtagattgggtgaaagttaaatcagtttgtcaaattgctgaaatcgcagaggatatagaaaatcttcctcaagagtatttaagtccaatgggagagaacggtgagctcttttcaggaggccaacggcaacgaattgcattggcaagagccctgtaccgtggttcggaagtattgctgctcgatgaagctacgagtgcgttagatgtggaaacagagagtaaagtgatgcaaaacttaataaattatagctctgataccaccataattatggttgcccacagaacagcagtactagagttttgtaataaattattcaaagttaaaaagggacgaattgttgagtccgatcattaa

SEQ ID NO: 270486 - DNA, 425 bp, Unknown
  Bacterial polypeptide expressing nucleotide sequence isolated from the Sargasso Sea
ttctaaagatatagatagttatatttatgatttattagaatcagttgaattaactcagcaatcagctgaacgatatcctcatgaattttcaggaggtcaaagacaaaggatatctatagcaagagctctagctactcaaccaagacttcttgtgtgcgatgaaccaacttctgctttagatgtaagtattcaagcacaaatattaaacttattgaaagatttacaagaacagttaaatttgacaatcttattcattagtcatgatttgccagtggtcagacaaatgtgtgatcgaatagctgtattaaaaaatggaaagctttgtgaaatttctaaaactgaagagttatttaaaaatccgtcacatgattacacaaaagaattgttaactttaatgccaaaaatagaatcaatttacaattaag

SEQ ID NO: 270487 - DNA, 451 bp, Unknown
  Bacterial polypeptide expressing nucleotide sequence isolated from the Sargasso Sea
atgagttttttagatttaaaaaatgtgactaaaatttacccaaatggaactaaggctgttcatgaaacttcattaagtattgatgaaggagaatttatggtttttgtaggacctagcgggtgtggaaaatcaactttattaagaatggttgcaggtttagaggatattacagagggtgatatcaatcttgatggaaaattaatgaatgaagttgatccatctgaaagagatgtagcaatggtgtttcagaactatgcattatacccacacatgaatgtttataataatttagcatatggtttaaaaaatagaggaattgacaaacaaacaatcgagcaaaaagtaaatgatgcagcaaagctgttacaaatttcagattatttacagagaaaaccttcaatgttatctggaggtcaaagacaaagagttgcaatgggcagagcaatgtaag

SEQ ID NO: 270488 - DNA, 394 bp, Unknown
  Bacterial polypeptide expressing nucleotide sequence isolated from the Sargasso Sea
ttattagaatctgttgaattaactcaacaatcagctgaacgatatccacatgaattttctggaggtcaaagacaaagaatatctattgcaagagcacttgcaactcaaccaagattacttgtttgtgatgagccaacttcagctttagatgtaagtatacaagcgcaaatattaaatttattaaaggatttacaggagcaattaaatctgacaatcttatttattagtcatgatttacctgttgtaagacaaatgtgtgatcgaatagcagtactaaaaaatggaaaaatttgtgaggtttcaatgacagaagaattatttaaaaatccatcacatgaatacacaaaagagttattaacattaatgccaaaaatagagtcgatttataactaat

SEQ ID NO: 270489 - DNA, 550 bp, Unknown
  Bacterial polypeptide expressing nucleotide sequence isolated from the Sargasso Sea
catgtctcaaaaagatagtttcgtaaaattcgagaaagtagataaaagctacgatggtgagatactggtcgttaaagatttaaatcttgatgttccgaaaggtgaatttttaactatgttaggaccatctggatcaggcaaaacaacagtattaatgatgttagctggatttgaaacgccaacaagcggagagatttatttagatggaaatccaataagtagtattccgccaaacaaaagaggcattggtatggtttttcaaaattatgctttatttcctcacatgactgtaaaagaaaatttagcattcccacttgaagttagaaaaatgcaaaaatctgaaatcgatgaaaaagttggaaatgcacttgcaatggttgaattacaagattttggaaatcgtatgccactacaattatctggtggacaacaacaacgtgtcgcattagctagatctttagtgtttgaaccaagattagttttaatggacgagccacttggagcgcttgataaaaatttaagagagcaaatgcagtatgaaataaaacat

SEQ ID NO: 270490 - DNA, 553 bp, Unknown
  Bacterial polypeptide expressing nucleotide sequence isolated from the Sargasso Sea
ggcagtattctaatgaaagatcaaattatttcagatcattttcatactgttttgactgaaaatagagatgttggattggttgttcaggaaagagctttatttcctcatttgacaataataaataatgtaatgttcggagtaagcggcagtaaaactgaaagacattccaccgccatgagacttcttaagctatttagagttgaccgatatgcttataattatccaaacgaaatctccagtggtgagcagcagcgagttgctattgcaagagcaatggcaccaaatccaaagatacttttgatggatgagccatttggaactttagaccaatcacttacgaatcagctgcgcgttgaaacaagaaaaattttaaaagataataatataacggcaattatcgtctcacatgactttgatgatgcgctgtcgatgtcggataaagtgattgttattgaagatggaacagttatacaaagtggctcagcaaaagatattactcatatatctagagaaaaatcagtagaattcagtagtattaaagcaaatacttaat

SEQ ID NO: 270491 - DNA, 316 bp, Unknown
  Bacterial polypeptide expressing nucleotide sequence isolated from the Sargasso Sea
tctgggtggtcaaaaacaaagggtagcaattgctcgagcgatattaagaaatgccccggtgctattattggatgaagccactagcgcgttagacgccgaaaatgaaagatcagtccaagaagctttcgaccgtttgttaaaaggtagaacaacaattgttgtggctcatcgattggcaactgtaaagaaagccgatagaattatagttctagataaaggcaggattgtagagcaaggaaagcatgaaaagcttataagtgaaaaaggggtttacgctcgtttagcaagtctacagtttactaatggagtgaattag

SEQ ID NO: 270492 - DNA, 1010 bp, Unknown
  Bacterial polypeptide expressing nucleotide sequence isolated from the Sargasso Sea
gtcgtcctcgcagaccatcttccagctgatggatgccaagccgatggtcaacgaatcaccttcgccgttggttgtggatgcgctcgagcccacggttgcgctcgaaggcgtgggctttgcctatcccggcggccggcgcactacccatgaaggattgagtttcgccgtggcggccggtgagcgcgtgggttttgtcgggccaagcggcgcgggcaagtcgtcgatcgtgcggctgctgttgcgtttttatgatcccgacgtgggaacggtaaagatcgggggtcacgatcttaaagacctgcgccttgaagatatccgcggccagatcgcggtcgtcaatcaggatacttatctttttcatggcacggtcgcggataaccttcgggtcggcaagcccgacgccacgcccgaagaactcgaagccgcctgccgcgcggccaacgcccatgagtttgtctcgctgctgcctcaggggtatgacaccgtaatcggcgagcggggcatccgtctttcgggcgggcaacgccagcgggtggcgatcgcccgggcgatcttgagagacgcgccgatcctgattctggatgaagcgctctcggcagtggatgccgagaacgaatcgatcatccaggaagcgctggatcggttgatgcgaggacgcaccacgctgatctttgcgcatcggctttcgagcgtcatcgatgccgaccgtatcttggtgctgaacgaggggggtatcgccgaagagggcacccacgctgaactcatggcgaggcacggtgtctatcaccagctgatggcggcgcaggcggaagaaagcgcgggtggggcagtcgaagtcgatcccgagcgggtacgcaaggctgagaagatgccgacctacagcgaggaggcgcagttcgcgcccacggacgccatcgtcaaggcgcaagggctcggctggtttgcggctgcgcgcgaactcatgagatacatcgtgccctataaaggcaggctcgcgatgacgtttggtt

SEQ ID NO: 270493 - DNA, 460 bp, Unknown
  Bacterial polypeptide expressing nucleotide sequence isolated from the Sargasso Sea
acatttaacaattctgaaaaatatcactttgccataaagaaagtaaaaaaaattaatagaattgaagcaaataaaatagctttggaagttttaaataaagttaaaattgaagaccaaaaagacaaatacccatcaactttgtctggaggtcaacaacagagatgtgccattgctcgttcacttgcaatgaaccctagtattatgttgtttgatgaacctacttcagccctagatcctgaaatgattaatgaagtgcttgatgttatgactgatcttgccaacttgggtatgacaatgattgttgttactcatgaaatgggttttgcaaaaaaacttgctagcaaagtcatttttatggacaatggtattattgtagagaataatacaccagataatttttttaattatccaaaagaagaaagaactaaaacttttttaaaacagatattgaaacattaat

SEQ ID NO: 270494 - DNA, 406 bp, Unknown
  Bacterial polypeptide expressing nucleotide sequence isolated from the Sargasso Sea
atgtcaaaaaaagaagatttcgtaaaatttgataaagtcgacaaaagttacgatggaaaagtattagtagttaaagatttaaatttagatatcgaagaaggtgagttcgtaacaatgctaggaccctctggttcaggaaaaactacgtgcttaatgatgcttgcaggttttgaaactccaactaatggagaaatttatttagataaaaatccaatttcaaatattcctccacacaaaaggggtattggaatggtttttcaaaattatgctctgtttcctcatatgacagtttttgaaaatttagcatttccattaaaggtaagaaaaatatctcaagtggaaatagaaaaaaaagtagataaagctttatcaatggtttcactcggtgggatttgcaaacagaatg

SEQ ID NO: 270495 - DNA, 634 bp, Unknown
  Bacterial polypeptide expressing nucleotide sequence isolated from the Sargasso Sea
cttggtcctaatggatctggaaaaacaacaactattggaatgttgctaggcttgcttaaacctacaagtggtcaaatatttatcaataattttaaacttgaagaaaatagaattcaaattcttgaaatgattaattttatatccccatatattgaattgcctaaaaaacttacagtaaaacaaaatttatatgtttattctaaactttataaagttaaaaatattaaggaacgaattgagtatttgtctgaaaagctaagaataggtgaattattaaacagtattactggggaactttcatcaggtcaaaaaaatagagtaagtttagctaaagctctagttaatgaaccaaaagttctgctacttgacgaaccaactgcttctttagacccagaagtaggagattttgttagaacatttttagaagattataaaaaagaaaaaaaaatttcgatacttttagcttctcataatatgaatgaagtcacacgtttatgtaaatctgtattaatgatgaaaaatggagaaataatagaccaaggcaaacctgaagatttaattgcaaaacatggaagagcaaatttagaggaagtttttttaaaactatcaaggagtaatagtgagtttaactaga

SEQ ID NO: 270496 - DNA, 568 bp, Unknown
  Bacterial polypeptide expressing nucleotide sequence isolated from the Sargasso Sea
atgggaccatctggctctggaaaaactactttgatgaatattattggatgcttagatacacctactcagggaacatataatttgaataataaatcagtaagtattcttaatgatgatgaattggcaaagataagaaatgaggaaattggctttgtttttcagtcatttcatcttttgcccagaagtactgcactaaataatgttatgttgcctttaaaatatgctggttgctcagaaagcgaagcaataaagagatctaaagatgttttagataaagtaggtctaattgatagaattgcacattctccatctgagctttcaggtggacagcaacaaagagttgctattgctagagctttagtgaataatccaagcattctttttgctgacgagccaacgggtaatttagattcaaagacaggagccgatgttatgaatttatttaaagaacttaataatcaaggacaaactattatattaattactcatgaagataatattgcagcacaatcaaacagaattatcacgattaaggatggtctgataaaatctgataacataaattaag

SEQ ID NO: 270497 - DNA, 437 bp, Unknown
  Bacterial polypeptide expressing nucleotide sequence isolated from the Sargasso Sea
catgtctcaaaaagatagtttcgtgaaattcgagaaagtagataaaagttacgatggtgaagttctagtcgttaaagatttaaatcttgatgttccaaaaggtgagtttctaacaatgttaggtccatctggatcaggaaaaacaactgttttaatgatgttagctggttttgaaactccaacaagtggagaaatttatttagatggaaatccaataagtagtattccgccaaataaaagaggtattggtatggtttttcaaaactatgctttatttcctcatatgactgtaaaagaaaatttagcttttcctcttgaagttagaaaaatgcaaaaatcagacattgataaaaaagttggaaatgcacttgcgatggtcgaattacaggattttggaaatcgtatgcctttacaattgtctggtggacaacaacaac

SEQ ID NO: 270498 - DNA, 733 bp, Unknown
  Bacterial polypeptide expressing nucleotide sequence isolated from the Sargasso Sea
cctgaccgtctcctatggcgagaaacccgcaatcttctcagtcgacgcaagcttcccggcaaacaagatgtcggccatcgtcggcccgaacggcgcaggaaaatccacgctcctgaaggccgcgctcggagtgatcccgcgcctgtccggcgaggtccatgttttcggcacggcgatcgcaagcgcgcgcaaacgcatcgcctatgtgcctcagagcgcgagcgtcgactgggactttccgacgagcgtcctggacgtcgtccagatggggctctaccgcaaggtcgggctgctggggcggctgtcgggccacggcaaaacatcggcgtttgcctgcctcgatcgcgtcggcatggccgacttcgcggcgcgccagatcggccagctctcgggcggccagcagcagcgcgtctttctcgcccgcgcgctggcgcaggatgccgacctctatctcctcgacgagccgttcgccggcgtcgacgccgcgaccgagcgcgcgatcatcgcggtgctaaagcagctgaagaccgagggcaaggcggttgtcgccgtacaccacgacctgtcgaccgtgcgcgactatttcgatcacgtgttcatgatcaacgtccgccgcattgccgaagggtcggtcgccagcaccttcaccgcggacaatctgcaggctgcctatggcgggcgcctcactacaacccatctggacgaactggcgatggtggacggggtgagatga

SEQ ID NO: 270499 - DNA, 548 bp, Unknown
  Bacterial polypeptide expressing nucleotide sequence isolated from the Sargasso Sea
catgtctcaagaaaaaccagcagtttctctagataaagtacacaagtcatttggagaactagaagtcctaaaaggaattacctttgatgtgatgaagggcgaggtaatttgcattataggtccttccggatcaggcaaatcaactctaattagatgtataaatgctctaaatgatattgattccggctctataaaggttcatggaatagaggtaaacgatccaaatctcaataaacttgaactgcgaaaaaatgttggaatggtttttcagcaatacaatttatttcctcacaaaacagctttagaaaatataatgatggcacctatgttagttttgaaagaaactaaacagggtgcatatgagaaagcattggaattagtaaaaaaagttaggcttgaagacaaacaacacagttatcctggagaactttcaggtgggcaacaacagcgtgttgctattgcacgatcactcgctatgaatcctgatattatgctttttgatgaggtgactgcagcacttgatccagaaacagttaaggaaagttttg

SEQ ID NO: 270500 - DNA, 424 bp, Unknown
  Bacterial polypeptide expressing nucleotide sequence isolated from the Sargasso Sea
agcgatgaagaaatatacgaagcagctagatcagcggcggcccatgattttataagtgagttgcccgaaggttatgatacatatgtgggtgaacgcggatttatgctctctggtggtcaaaaacaaagggtagcaattgctcgagcgatattgagaaatgccccggtgctattattggatgaagccactagcgcgttagacgccgaaaatgaaagatcagtccaagaagctttcgaccgtttgttaaaaggtagaacaacaattgttgtggctcatcgattggcaactgtaaagaaagccgatagaattatagttctagataaaggtaggattgtagagcaaggaaagcacgaaaagcttataagtgaaaaaggggtttacgctcgtttagcaagtctacagtttactaatggagcgaattaga

SEQ ID NO: 270501 - DNA, 785 bp, Unknown
  Bacterial polypeptide expressing nucleotide sequence isolated from the Sargasso Sea
aacatatgccctttatccccatatgacggtatataagaatatggcgtttggactgaaacaggcaaaaaccccaaaagatgaaatcgatcagcgtgtacgtaacgccgcagagattttggagatttccagccttttagatcgaacgcccaaggccctgtccggtggtcaaagacaacgcgttgcgattggtcgtgcgattgttcgcgaaccagaagtgtttttatttgacgaaccgctttcgaatttggatgctgcactccgtgttcaaacgcgcattgaaatcgctcgtttgcatgagcggctaggcacgactatgatctatgtcacgcatgatcaggtcgaggcgatgaccttagcagataaaatcgtggtcttgcgggatggtaacattgaacaaattggctcaccaatcgaattatatcgtaatccttcaaatatgtttgtggcacaatttattggaagcccgaaaatgaatttttttgattcagatgacttgacggatgctggccgcgcattgattaattcaagagcagatattctggggatccggcctgaacattttattgttgttccgacaggttcaggtgttattcaaggaaaaccaaatttagttgaacccctgggcgagtacgctcttgtgcattgtgaaactgttcgaggcagtccgttcatcgtcaaaacgactgacccagaaaatataaaaaaagggtctgtaatgagttttgatgtcgaccctgcggttacccatcgtttcgatcagttatcacaaggcagaattgtttaac

SEQ ID NO: 270502 - DNA, 808 bp, Unknown
  Bacterial polypeptide expressing nucleotide sequence isolated from the Sargasso Sea
acagtttatgaaaatttagcatttccgttaaaagttagaaaactttctaaagatgatatcgacaaaaaagttgataaggctttatcaatggtttcattatcaggcttcgagagaagaatgcctaatcagttgtctggcggacagcaacaaagagttgcagttgcaaggtcattagtttttgatcctcaattagttttgatggatgaacctttaggagctttggataaaaatttaagggaaagcatgcaatatgaaattaaacacattcatgaaaatataggagtaactgttgtttacgtaactcacgatcaaagtgaagctttaactatgtctagcaggatagctgtattcaacgacggaaaagtacaacaactatctagtccagataagctatacgaagaacctgtaaattcatttgttgcagaatttataggagaaaataatacatttactggtgaagtaactgatatttcaggaggcaaatgtaaagttaaattagcttcaggcgccgaaatattatcgaatccaattagagttaagtcaaaaggagaaaaaacaaaagtttctcttagaccagaaagagcaattatagatcctgaagataaaatggataacaaacataaaggcaaaatagaagaaattatttatcatggagaccatgctagagtaaggttaaatttacttggtaatgcagagtttattttaaaagttccaaatagttctgcgagaatggacattaaacgtggaaatgagattaatgttggctggaacagtcatgatgctagagcattagatccaaaatcaatct

SEQ ID NO: 270503 - DNA, 820 bp, Unknown
  Bacterial polypeptide expressing nucleotide sequence isolated from the Sargasso Sea
aaaaaaattgaaagatttaaaataatcgaaaaagaaaacaaaaatcaaagagaaactaatattaaaattttaaatagatggacgaaaaaagaaattattaatcaagatctaattaaaataaaaaatttaagtaaaacgtttgatgatagtttttttaccgaaagttcaaaaaatgctgttatggcagtagatgacatttcatttaacattaaagaaggtcaatcattcgggctagtaggagagagtggtagtggaaaatctacgattgctaaaatgattgttaatctatttaggccaagttcgggagatatttactttgataatgtttgtataacaaaaattaaaagcaacaaagaaatgatgaaatttagaaaacaaattcaaatgatattccaagatccatattcttcattaaatggaagattaaaagttaaagatatagttgctgaacctataaaacttcataatccttcaataagtgcaaaagacttaaatgattatatttacgatttattggaatctgtcgaactatctcaacaatcagctgatcgatatcctcacgaattttcaggcggtcaaagacaaaggatatcaatagcaagagccctagcaactcaaccgagacttcttgtttgcgatgaaccaacttctgctctagatgtgagtattcaagcacaaatattaaatttattaaaagatttacaggagcaattaaatcttacaatcttatttattagccatgatttaccagtagtaagacaaatgtgtgatagaatagcagtattaaaaaatggaaagctttgtgaaatctcaatgactg

SEQ ID NO: 270504 - DNA, 842 bp, Unknown
  Bacterial polypeptide expressing nucleotide sequence isolated from the Sargasso Sea
gaggggaagtattcctgatttagaggagtcattaaaaatacttgaattaaaaaaaactagatcatattcaaaaataaaagaagaaactgattttaattttccagtgaaaaatattgagcttttatctttaaattataagtattcttctcgtgatgaatttgctcttaaaaatataaatttaaaaattcctattggttcaaaaatagcctttgttgggaaaacaggaagtggtaaaagcacaatagccaatcatattctttgtttacttagacctaatacagggaagatattaatagataataaagaaataaaaaataatcatataggtttatggcaatcacaatgttcttatgttcctcaatcaattaatttacttaattcagacttcatagctaatgttgcatatggcttagaattagatgaagtagatgaatctaaaatatggcgttgtttagaagcagctcaacttggcgaattagtaaaagatcttccagatggattaaatacaaaaattggggaaaatggtattagattatctggtgggcaaagacaacgcatagcaattgctcgtgctttctacagagattcaaaactacttatattagatgaagcaacatctgctttagataataaaaccgaatcaaaattaattgattccttgtactttaaaaataaagaattaactatcatatttattgctcatagattatcaacaataaaaaaatgtgattgtatttatgaatttgatcaaggtgaaataaaagctcaaggtaaatttgaagaactaaaactaagatctcaaacttttaaagaaatgatcaggattgcggaaaataaataat

SEQ ID NO: 270505 - DNA, 340 bp, Unknown
  Bacterial polypeptide expressing nucleotide sequence isolated from the Sargasso Sea
gagaaaggtgtacggctgtcaggaggacaaaggcagagaattgcaatagcacgcgcaattcttcgaaatacccctttgctacttctagacgaagccacgagcgcgctagattcggaaagtgaacttagtgttcaattggctctagaaaaggctatgtctaaaagcacaacattagttatagcacatcggttagctacagttcttaaagccgatcgaataattgttatggataaaggtaagattgtggagagtggaacacataaaagcttactctcaaagggtgggctttacgcgcgattggccgctctgcaatttcaccttcaagggaatgatacctaaa

SEQ ID NO: 270506 - DNA, 895 bp, Unknown
  Bacterial polypeptide expressing nucleotide sequence isolated from the Sargasso Sea
ggccctccggctgcggcagaccacgacgctccgaatgatcgccgggctggagaacctctccagcggcgaactggccgtcggcgatcgcgtggtcgattgccccgagaccgcgaccttcgtcgcgcctgaaaagcgcggtatgggcctggtgttccagagctacgcgctgtggccgcatctgaccatcgagcagaatgtcgaattcggcctgaagctgcgcaaggtccccaaggccgagcgccagaagcgcaccgccgaggtgatggaggcgctcggcatcggcaagtatggcaaacgctatccctcgcagctttccggcggccagcagcagcgcgtggcgcttgcccgcatgctggcggtgaacccgagcgtcctgctgctcgacgagccgctgtcgaacctcgatgcccggctgcgtcttgaaatgcgggcggagctgaagcgcatccacacccagttctcgaccaccatcgtgttcgtcacccacgaccagtgggaagcgatgacgcttgccgacacgatcgcggtgatgaacgagggcacgttgcagcaactcggcacgcccgacgacatatacgagcgacccgccaaccgcttcgtcgcggaattcgtcggctcgccgccgatcaacatcctcgatttcgaccgcaaggacgaactggtccagaacgtgatgcgcttcctcgcaaggcgccacccggagatttccggcatcggctccgtcggcatccggcccgaggcgatttcactggtcgccggcaaggacgatctcgccgacagcgatttcggcgcgccggcgcgggtagccgcgatcctgcccaccggcggaagctggattatcgaactcgagaccggcaacgaggtgatcttcatgaacacgcatgtggcgccaagc

SEQ ID NO: 270507 - DNA, 454 bp, Unknown
  Bacterial polypeptide expressing nucleotide sequence isolated from the Sargasso Sea
agagaatattatttctgaaggtttgttaattcattatccaaaaataaataaaaaagaaaaagaggaaaaaataaaaaaaatattagataaagttggattagattacaaaaatacaattgaaaagtatcctcatgaattttcaggcggtcaacgccagagaattgcaattgcaagagctttaattttggagccaaaaattttaattttagatgaacctacatcagctttagatgttacaattcagaatcaaataataagtcttctagataaacttcaaaagcaacttcaactcagttacatatttattagtcatgatatgacagtaataaaagcaatatcagatagaataattgtattaaaagatggtttaattatagaagaaaatattagtagtaatatatttaattctcctaaatcagattatacaaaaaaactcatttcgtctgttgtatag

SEQ ID NO: 270508 - DNA, 835 bp, Unknown
  Bacterial polypeptide expressing nucleotide sequence isolated from the Sargasso Sea
tttgaacagatggacaaaaaaagaaattattgatcaggatctagttaaggttaaaaatttaagcaaaacatttgatgataatttttttacagaaagtactaaaaattctgtaatggccgtagacgatgtatcatttaatataaaagaaggagaatcatttggtttagtgggagaaagcggtagtggaaaatcaacaatcgcaaaaatgatagtaaatttatacagcccaagtgctggagatattgattttgataatgtttgtataacaaaaattaaaagtaataaagaaatgatgaaatttagaaaacaaatacaaatgatatttcaagatccatactcttcattaaatggtagattaaaagttaaagatatagttgctgaaccaattaaacttcacaatccctcaataagtacaaaagatatagatagttatatttatgatttactagagtcagttgaactaacccaacaatcagctgaaagatatcctcatgaattttcaggaggtcaaagacaaagaatatctattgcaagagctcttgctactcaacctagacttcttgtttgtgatgaaccaacctcagctttagatgtaagtatccaagcacaaatattaaatttattgaaagatttacaagaacaattaaatttgacaatattatttattagtcatgatttacctgttgtaagacaaatgtgtgatcgaatagctgttttaaaaaatggaaaactttgtgagatatcaaaaactgaagagttatttaaaaacccatctcacgattatacaaaagaattacttaagttaatgccaaaaatagaatcaatttacaattaa

SEQ ID NO: 270509 - DNA, 743 bp, Unknown
  Bacterial polypeptide expressing nucleotide sequence isolated from the Sargasso Sea
tatggaaaataaaaagtctgaggaatttatagtaaagttcgatgaggtaacaaaacaatatggtgatcttatagttttggacaagttaaatttagaaattaaaaaaaatgagatggtttctattattggaccatcaggctcaggtaaaacaaccgttctaagagttttaatgactttagaaaagattaatggaggagttatacatttagatggtgaaacacttactcatatgaattcaaatggaaaattagttgaagctgatgaaaaatatttaagagagagacgatctaagattggaatggtattccagcaatttaatttatttccacatatgacagctttacaaaactgcattgaagctccagttgaagtacttggtatgaaaaaggaagatgctgaacaacgagctctcgaactactcgagcttgttggtttaacagataaaaaagatcaacatccaacaagattatcaggtggacaacaacaaagggtagcaatcgctagagcattagcaatgagaccaaaagtaatgcttttagatgaaattacatcatcattagacccagaggttgttggagaagtattgaacgttataaggtctttaaataaagaacataacctaaccatgataatggtcacacaccaaatgggatttgcaagagaaatttcagaccgtgtgtgtttttttaatgaaggaaaaattttcgaacaaggtccaccagaacaattatttggcgacccaa

SEQ ID NO: 270510 - DNA, 883 bp, Unknown
  Bacterial polypeptide expressing nucleotide sequence isolated from the Sargasso Sea
tacaaataaagtaattgttatgagacatggagtaattgttgaacaaggtgatacaaaagatttattaactaaaccaaaatcgactgaagcacgtagtcttgtgatttctgtacccccaactaataaaaaaattgatcgattcaaactaattagtcctgatggaaaagaaattacttctagctcagctaatttaacaaaaaatattattaaaacatggggtataagaaaaactaccaatcaaaaattactaaagttatctaatattacaaaagtttttgatgatcgttctatttctatttataaaaaactcaatgatgaaaatatagttaaagcagttaataatgtttcatttgaattatttgaaggtgaaacacttggattggttggtgagtcaggttcaggaaaatcaactattgctaaaattataactgggcttgtaaaaccttcatcaggagaaatcatttatgataattttaaactttacgattcaaaaagaaaatatcaaattaaaaagagtagaggacaaatacagatgatttttcaagatccttattcttctttaaacccaagatttaaagtaaaagatatcatcggtgaacctttgaaatttttgcagaaaaaaataactagaaatgatttaaatcaaagtgtttttgatttgattgatattgttggtatgacaagacaatcattagatagatatcctcatgaattttcaggtggacagagacaaagaatttctattgctagagcattagcgactagaccaagattattaatatgtgatgagccaacatcagctttagatgtaagtatccaagctcaaatactaaatttattaaaagatattcaagatgaacttcatcttacaatgttatttata

SEQ ID NO: 270511 - DNA, 425 bp, Unknown
  Bacterial polypeptide expressing nucleotide sequence isolated from the Sargasso Sea
agcacctatttgggtaaaaaaaatgcccaaaaaagaagctgaagaattagcattaaaacaattaaaacaagttcaaattgatgaccaagcacataaatatccaggacagttatctggaggacaacaacaaagatgtgcaattgcaagggctttgtgtatgcaaccaaaaataatgctttttgatgaacctacttcggcacttgaccctgaaatgattaaagaagtactcgatgctatggtaagcttggctaaagctggaatgaccatgattgttgttacacatgaaatgggttttgcaaaagaagtagctgatgaagtgatttttatggatgaaggtatgattatagaaaaagctgatactaaagaattttttgccaatccaaaaagtgagagaacaaagctatttttaagccaaattctctaaa

SEQ ID NO: 270512 - DNA, 653 bp, Unknown
  Bacterial polypeptide expressing nucleotide sequence isolated from the Sargasso Sea
aatgagttttttagatttaaaaaatgtgactaagatttacccaaacggaactaaggctgttcacgaaacttcattaagtgtagatgaaggagagtttatggtttttgtaggacctagcggatgtggaaaatcaactttattaagaatggttgcaggtttagaggatgttacagaaggtgatattaatcttgatggaaaattaatgaatgaagttgatccatctgaaagagatgtagcaatggtgtttcagaactatgcattatacccacacatgaatgtttataataatttagcttatggtctaaaaaatagaggaattgacaaagaaacaatcgagcaaaaagtaaatgatgcagctaagctgttacaaatttcagattatttacagagaaaaccttcaatgttatctggaggtcaaagacaaagggttgcaatgggtagagcaattgtaagaaatccaaaaatattcttatttgatgaacctctttcaaacttagatgcaaaattaagaattcagatgaggcttgaaattaaaaaacttcaacaaaaggttggagtaacaagtatatttgttacgcatgatcaagttgaggccatgacgcttgctgatagattggcagtaattaataatggaattattgaacaacttggta

SEQ ID NO: 270513 - DNA, 871 bp, Unknown
  Bacterial polypeptide expressing nucleotide sequence isolated from the Sargasso Sea
tctggcgattttgtatgtcttcttggtccatctggttgcggtaaaacaactacattacgcatgatcgcaggtttagaaagtcccgacaatggtgagatttattacggtaaaaaaattttcttttcttctagaactggagaattcttaaaaacagaaaaacgtaatcttggtttaatgtttcaaagttatgcattgtggccacacatgacagtttttcaaaatatagtttttggattggttattaaaaaaaaatctatgaaggaaaaagaaaatcgttttagggaattggagcaactttttcatcttgaaggattaagaaatcgttatccatctgaactttctggcgggcaacaacaacgtattgctcttgcccgtatgttggctgttaaaccaagtttactgttactagacgaacctctttccaatttagactcaaatctacgtttggaaatgagagctgaattaaaaagattacatcaaactcttggttgtacaattatatttgttacacacgatcaaatggaagcaatgaccctcgctacttctattgccgttatgaataatggaattatagaacagcttgctaaacccatggatatttatagatacccaaaatctctttttgtgggaaaatttgtaggtagcccaccaatgaatgtgattcaaattgaaaatggaggagaaatttttgaatgtttggttaaagctacaaatttagataaaaataaaattaaaacttttggtgttaggccagagtcaatatctatggttccaagtgaaaaggctgatatcgtagcaatcgttgaaactattcaaccaactggcgctgattggattgttgggttaattgtttcaggtaaatctttttttg

SEQ ID NO: 270514 - DNA, 806 bp, Unknown
  Bacterial polypeptide expressing nucleotide sequence isolated from the Sargasso Sea
aattgatagatttaaattgattagccccgatggtaaggaaataacatctagttccaatgatttgactaaaaatattattaaaacatggggaataagagaaaataaaaatcaaaaattattaaaacttgaggaagtaacaaaagtttttgatgataattctttaggtagtggtttttcatttatttctaataaaagtttgaatgataaaatagtaaaagctgtcgacaatgtatcgtttgaactatttgaaggtgagacacttggattagttggagagtctggttcaggtaaatcaactattgcaaaaattattactggactaattggtcccaacaaaggtgatttaacttataataatgaacctctatacaattcaaataaaaaatatcaaattcataatagtagaggtcaaattcaaatgatttttcaagatccttactcatctctaaatcctcgtttcaaagttagagatattattgcagaaccaattaaattttttcaaaaaaatattagcaataatgatcttttacaaaatgtttatgacctaattgatattgttggaatgagcagacaatctctagatcgatacccacatgaattctcaggtgggcaaaggcagagaatatctattgctcgtgccttggcaacaagaccacgactattaatatgtgatgaaccaacttctgcattggatgtaagtatacaagcacaaatattgaatttattaaaagatatacaagatgaacttcatctcactatgctatttattagtcatgatctccctgtaattcgactaaatgtgtaac

SEQ ID NO: 270515 - DNA, 778 bp, Unknown
  Bacterial polypeptide expressing nucleotide sequence isolated from the Sargasso Sea
tgcgggtcttgaagattcactgaaggtgagatttcaattgtgtaaaaaaactgttaatgaagttgcaccaaaagatagagatatagcaatggtttttcaaaactatgctctttatcctcacatgtcagtctatgacaatatggctttctcattaaaactaagaaaactaccaaaagatgaaatagatcaaaaagtgaaggaggccgcaaaaacacttgaaataagcgagttgcttgataggaagccaaaagctttatcaggtggacagagacaaagggttgcaatgggtagagctattgttagaaatcctcaagcttttttaatggatgaacctctttcaaatttagatgcaaaattaagggtacaaatgagagcagagttaggacagcttcatacacaacttcaaacaactactttatatgtaactcatgaccaagttgaggctatgactatgggagatagagttgcagttataagaaagggtgaattacaacaaattgatacaccaagagaaatatactcaaatccaaaaaacatttttgtcgctggatttattggtagcccttccatgaattttgtttacgcaaacgtaaaaggtaaaaaaggatctatagaactgagttttggtgatgataaaatagcttacaatggtccaaacttagataaattaagagagtttgaaaataccgaaattgtaatgggtattaggccagaagcatttgaagatagtaactatgcaaataaaactgaattttctgagagtatgaaagtaacagta

SEQ ID NO: 270516 - DNA, 524 bp, Unknown
  Bacterial polypeptide expressing nucleotide sequence isolated from the Sargasso Sea
actgcatcctttagagccgcgcggttcgtggtctacgcgggggactgacgccatggcctcggttaccattgaagctgtgaccaaagtatttgggcgggtcaccgcgctagaccatgtgtccctcgacattgccgagggtgagcttctcgtgctcgtgggcccttcgggctgcggaaagacgacattgctgcgcctgattgcgggcctcgatcaggtgagcacgggcaacatctggatcgaccggaccgccatgaccaatgtgccggcgaaggcacgggatctggccatggtctttcagaattatgccctctacccgcatatgaccgtcgcggagaacatggatttcggcttgcgcatgcgtgggcagagcaaagcggcgcggcgcgtgccagttgcgcgggccgccgcgatgcttgggcttgatgcgctgttggagcgcgtgccggcagagctttcgggcggccagagacagcgcgtcgccatggggcgtgcgattgcccggcgcccggcggtctttctgatgg

SEQ ID NO: 270517 - DNA, 451 bp, Unknown
  Bacterial polypeptide expressing nucleotide sequence isolated from the Sargasso Sea
ggagagggcttggatatacattttgatttttccaatgaagaaaagatagaaaaaatatcaaatgtgatgaaagatgttggattagatgacagcctcatttttaaatatccacatgaattttctggtggtcaaagacaaagaatcgcaattgctagatcaataatcttaaacccgaaattcatgatccttgatgagccaacttcagcgcttgatagatccattcagattcaagtgatagacgttttaaaaagattacaagacaaatatgaattaacatatttatttattagccatgatctcaaagtaataagatctatgtgtgatcagatttttgttatgagtgagggaaagttagtagagtatggtaaagctgatgaggtttttgaaaatcctcaacaggaatatactcaaaaacttttaagagcagcactaaaatactcatcaaattaag

SEQ ID NO: 270518 - DNA, 903 bp, Unknown
  Bacterial polypeptide expressing nucleotide sequence isolated from the Sargasso Sea
gacaagaaaatgaggaagtcaaatttggtgaaatcaatgaagtgaataggcgtcatcatatgaagcttctcagaaccaaagcaattggagatgcattaaccatctttgtagcatctcttggggttgcaggcgttgtatatgtggcaaccttagacgaagtaaaaggctcaatgacagttggagatttcagtggatttataactgcgatggttttactcatgacaccattgaaacgactcacaaatgtcaatgccatgattcaaagaggcatagccgccgccgctagtattttttcattattggatgaacggaatgagatagatagaggaaccaaagatgctcaaaggctaatcggcgctgtccatttcaaggatgtaaatttctcttatggctcagaaaaagaaaccttaaaaaacatcaatacaaatattaaagcagggcaaactattgcaatagttggaaaatctggaagtggaaagaccacttttgtgaatcttatcccaagattttatgatgttgaaaaaggctctattgagattgatggtttaccgatagaagaatatacgcttgaatcactcagatcgaatatcagtttggtgacacaagaggtaacccttttcaatgacacaattgagaacaacatcatgtacggcggacattcaaaacaggaaatcacagatgcagttaaagcttctcatattgatgagtttattcatgatctaccagatggactgcaaactaaagtcggtgatcagggaatcttgctttcaggcggacagagacaaagaatcgccatagccagagcattgctaaaagatgcacctatattgattctagatgaggcaacttctgcacttgattcagagagtgagaaactcattcagaaggcttttgatcgatgat

SEQ ID NO: 270519 - DNA, 786 bp, Unknown
  Bacterial polypeptide expressing nucleotide sequence isolated from the Sargasso Sea
gtgtttttgaaaatatttcttttggtcttaaatcagaaaaaatttcaaaaaatgagattaaaagtaaagtaattgaggctgcaaaaatcttaaaaattgaagaacttttggatagaagaccaaaagaactatcgggtggacaaagacaacgagttgctattggaagagctataactagaaatccaaaattgtttttattcgatgagcctctttcaaatttagatgctgcccttaggtcagaaatgagagtagaaatttcaaaactacataaaaaattaaaaagtaatattgtttatgtaactcatgaccaaattgaagctatgacgttagctgataaaattgtaattatgaataaaggaaaaattgaacaatctggaactcctgatgacatctacagcaatccaaccaatatttttgttgctgaatttataggaaacccaaaaatgaatatttttaagattgaaagtaaggatattattaacaaaaacagtttcaaattattcaataatgaaattaaatttgaaaatataaattttaaaaatgggttttatgtcggtataagaccggaggatatttctttagaaaataaaagtgaatttgaggttaaaatttgtgttgatttaatagaaaatttaggatccgaaaagattatatattcacacttaaataatacggaaatcagaataaaaagctctaaaaatataaaagataaagatattacaatttacttaccaaaaaataagttatatttattcgatagtgataaaaatagattaaaaacgtgat

SEQ ID NO: 270520 - DNA, 793 bp, Unknown
  Bacterial polypeptide expressing nucleotide sequence isolated from the Sargasso Sea
ggctcaacagttttgacccctgcacaccgtggtacatccatgatgtttcaaaactacgcccttttcccacatctttctgtattagataatgttgcatttgctcttaaacttaaaggtgtatcaaaactagaaagatacgaaacagcttcgaaatttatcgaaatggtcagaatgcaagggtatgattcaaggtttccagatcaactttctggcgggcaaaagcaacgcgtggcactggctagagctttaatcacaaaaccgaaaattttattattggatgagcctttatcagcattggatcctgccttgcgaatagatatgagagcagaattgaaacaaatgcagcgtgatttaggtatcacattcatacatgttacacactcccaagatgaagcattggcgcttgcgactgttggtgtagttatgaacgaaggccgaattgaacaattcgcttctcctttagatttattcaacaggcctattaatgtgtttgtagcagatttcgttggaggacataatattttagaagttgacgactgtatttattctttaagaactgacaagctaatactgtccaaaataacaaatggtcaaaaaactggcaattcagctttcaaagtcaaagatattgagtttttgggaaatagtgtgagtgtcacagtgtctggcctcaaaaaatctactctgaaggcaaaattatctgatgcagatttctataatcaagaatttaagataggacaaaatgtaaactgtaaatggagcaaaaccgatttacataagctcaatgtataaa

SEQ ID NO: 270521 - DNA, 436 bp, Unknown
  Bacterial polypeptide expressing nucleotide sequence isolated from the Sargasso Sea
aatgaccttaaagttaaacaatgttggaaagaattttgataaagtagaggtgcttcgtaacatttctcttgagattgaagaaggagattttcttgtacttctaggtggcagtggttgcggaaaatcgactctattaaactgcatagctgggttagaggaagtctctagtgggactattgaaataaaagggcgcaatgttaatatggtggatccggcagaccgtaacgtggcgatggtatttcaatcctatgccctatatccaaccatgagtgtttcaagaaacattagcttcggcttagagtgcaaaggtgttggcaaagttgaaagggctaaagctgtaaatcgcatcagtaagcttttgcaaatagaggaactgcttgatcgcaagccgagccaactttcaggcggtcagagacaacgtgttgcaatagggcga

SEQ ID NO: 270522 - DNA, 622 bp, Unknown
  Bacterial polypeptide expressing nucleotide sequence isolated from the Sargasso Sea
tttgcttggtccaaatggatctggaaaaactacaactattggaatgatattgggtctgttaaaacctacaagtggcgaggtattaattaatggaattaaaatagaagaaaagccaattgaaattttacaaaaaataaatttcatttctccttacatagagttgccaaaaaagttaactgtaaaacaaaatttaattgtatacggtaaactttactcagtaaaaaatttaagtgaaaaaatagattatttagttagtaaattaagattagagaatttacttaacagagtaactggtgagttgtcatctggacaaaaaaacagaataagtttagcaaaagcaataattaatgatcctaaagtcttgctgcttgatgaacctacggcatctttggatccagagataggagattttgttagaacatttttagaaaattataaaaaagaaagaaaagtttcaattttattggcttctcataatatggatgaagtcactaggttgtgctcttcaatattgatgatgaaaaatggtttgataatagaccaaggcaaaccaaatgatttaattaaaaaacatggaagaaaaaatttagaggaagtttttttaaaacttgtaagaaattaa

SEQ ID NO: 270523 - DNA, 544 bp, Unknown
  Bacterial polypeptide expressing nucleotide sequence isolated from the Sargasso Sea
aatgaaatttagaaaacaaatacaaatgatttttcaagatccgtactcatcattaaatgggagattgaaagtcaaagatattattgccgaacctattacacttcataatccatctatatctaattctgatctaaataattatgtaaatgacttattggactcagttgaaatgtcacaaaaatctgcagatagatatccccatgaattttcaggtggtcaaagacaaagaatatcgattgcaagagctttagcaactcagccaagacttttagtttgcgatgaacctacatctgcactggacgttagtattcaagcccaaatattaaatttgttaaaagatcttcaagagcaattaaatttaactatattattcatcagtcatgacttgccggttgtaagacaaatgtgtgatagaattggagttttaaaagatggcaagttatgtgaagtttcaaatactgaggatttatttttgcatccttcccatgaatacacaaaggaacttttgcacttgatgcctaaaattgagtctatttataattaa

SEQ ID NO: 270524 - DNA, 457 bp, Unknown
  Bacterial polypeptide expressing nucleotide sequence isolated from the Sargasso Sea
catgtctaaaaaccaagaattcgttaagttcgacaaagtagataaaagttacgatggtaaagttttagtcgttaaagatcttaatttagatattgctgaaggagaatttattacgatgcttggaccttctggttcaggtaaaacgacatgcctaatgatgttagcgggatttgaaactcctactaatggtgaaatatatttagatgctaatccaatttctaatatacctccacacaaaagaggaataggaatggtatttcaaaattatgcattatttccacatatgactgtttatgaaaacttagcatttccgctaaaggttagaaaaatctctaaagaggatatagataaaaaagttgataaagctttatcaatggtttcgttatctggatttgaaaatagaatgccagcacaactttctggtggtcagcaacaaagagtagctgtgcaagggcat

SEQ ID NO: 270525 - DNA, 814 bp, Unknown
  Bacterial polypeptide expressing nucleotide sequence isolated from the Sargasso Sea
ctgcccgttatttcatggagctttgttgtgggccagaccccggttatcgaattttcagaggtgcagctacgcatccatcagcaacagatcttaacagcgctgaattttgtcattcagccgggccaatttgtcgctttacttggtcctaacggcgcaggtaaaaccagcttattgcgcttgctacaaaaagaatatcagccaagctttggacagattaagttgcaaggtcggccgcttagcgcttttagccaatccgaactggctgcgaaagtggcactggtcagtcagttatctggtcctttatttgatttaactgtagctgatgtggtgctgatggggctgatccctcataaagccttatggcaaaccaatacagaacaagacttgcagcaacttaaacacagccttgaactggttggtttagccaataaagagcgtcactcttttgctcatttatcaggtggtgaacaacaacgggtgttattggcccgcgctgtgatgcaaaagcctctgttgttactgctggacgaaccgactaaccatctggacttgtattaccagcatcaggtgctgcgtattgccaaagcgctggatattaccgtgattgccagtattcatgatctcaatctggcatcgcgttattgcgaccgtttattgctgttgaataaaggccaactggtcgcagatggcacagcagaacaagtgctgacgcagcagttgctcaccgaggtattccgcatcccctgccttattgatcaaaacccttttggtgattgtcctcgggtaagttttggttataaggacaatttatgag

SEQ ID NO: 270526 - DNA, 1312 bp, Unknown
  Bacterial polypeptide expressing nucleotide sequence isolated from the Sargasso Sea
atgacgcttctttcggtaagaaatctttctgttgcaattcacgagaaaccgatcgtcaaagatatttcctttaatcttggtactggtgaaattctagctctaactggtgagagtgggtctggtaaatcaatttctgcattggccctaatgggtctcttacccctcggctcaaaaaaagggggtataattaattttgacggaaatgaccttaataaaatatcagaaaacaagttttgtaagctcaggggaaaaaaaataagtatggtttttcaagaaccaatgacagctctaaatcctttgaaaaatattggaaggcaaatctctgaaacattagttcaacataaagcctgtgctccaaacgaattgaagaatcgagttcgaaatataatggaccgggttggattaagcggtatagacccgtcacgtttccctcatcaactatcggggggccaacgtcagcgtgtagtcattgctatggctgtttgtttggaaccaagcattttaattgcagatgagccgacaactgctttagatgtcacaacacaggcaaaaatcctagaacttctgaaaaagtttgctaaacaagatggtattagcattattctaatcacacatgatttggcgatagttgcaaatatcgctaattacttaattcttatgaaacagggtattctagtagatcagggagaaccaaaaagggtttttagagaccttgcacacccatatacaaaaaaattattttcagcctccagccaaaaattgattttaaaagaaaatgagatttccgaaggaaagctactagaagtaaattcagtatcggttaactataaatctcacaataggggacttttttcaaaaggtacatctatcgaggcggtgagcgatgtctcattcgatatcaaaagaggtgagcgcctagggttagttggggaatctggcagcggaaaatctaccctaacaagaaccattctgggtttgcaatcaaccagctccggctacataaaatttgaagggaaaaaaatttctaaagacaacagaagttttaaaaaaaatatacaggtagtttttcaggacccatacggttctttcaatcctaggcacaaagtcgaacgtttaattgcagaacccttttttgcattaggtaaagaagctcctcatgaaaccgagcaaaaaagtatcgttaaagaaatgctcgaagaagttagattaccgttaaacagtaccaaaaagtatattcatgaattctcagggggtcagagacagcgcatagcgatagccagggcacttgtgattaaaccgaaacttataattt

SEQ ID NO: 270527 - DNA, 451 bp, Unknown
  Bacterial polypeptide expressing nucleotide sequence isolated from the Sargasso Sea
ttgaataacccagaaaatttagaatttgcgattctcacaaaaaaatatggtgaaaccatagccgttgacagtataaatttaaaaataccagcaggaacatattgttgttttctgggtccttcaggttgtggtaaaacctcaactcttagaatgattgctggacatgaagaaatatcaggaggtgacattcttttaggttcaagtatcataaatgatttacccccagcaaaacgtgggactgcaatgatgtttcaaaattatgctctttttccacatttatcttgtctggataatgttgcctttgcattaaagatgcgtggcattaaaaaaaaagaaagatatgacaaatctctagaaattctgaaattagtacaaatggaagattattctaatagatatcctaaccagctatcggggggacaacaacaaagagtagctttagcgagagcct

SEQ ID NO: 270528 - DNA, 466 bp, Unknown
  Bacterial polypeptide expressing nucleotide sequence isolated from the Sargasso Sea
atggcaaatattaaattttcaaatgtaggcaaatctttcggagataataaagtaattaataacttcaattttctaggcaaagatgatgaatttttagttttagttggaccatcgggatgtggtaaatctacactccttagaatgattgctggcttagaacaaatagatgaaggtgaaattcaaattaacaatgaagtaattaatgaaatgcatccatctaaaagacataccgcaatggtattccagtcctacgctttgtatccacacatgaatgtttatgataatatgtcttttggacttaaaatagaaaaaaaaactaaagaagaaattcaaacaaaagttctaagtgcagccaaaacacttaaaattgaagatcttttagaaagaagaccaaaagaactttcaggtggccaaaggcaaagagttgctattggaagagcgataactcgaaatccaaaaatttttt

SEQ ID NO: 270529 - DNA, 475 bp, Unknown
  Bacterial polypeptide expressing nucleotide sequence isolated from the Sargasso Sea
ccggcgcatcagcgactttatcgaactggtgggcctcaccgatttcactcgcgcctacccccaccaactctccggcggcatggcgcaacgggtggcgattgcccgcggcctggtggccagcccgcgcatcctgttgctggacgaacccttcggcgccctggatgcactgacgcgccagcagatgcaggacgaactgctggcgattcgtgcccgcgccaggatcaccacggtactggtgacccacgatgtggaagaggcgattttcctcgccgatcgcgtggtggtgatggagccgcgtccggggcgaatcaagcaggtcgtcgagatcgccctgcctcatccgcgccagcgcagcagttttgaattccaccagctacgcgaagagctgttgcacgaattaaccagcgacgaccattaccaaccgccggtgcgcgaacagatccgcgacctgccattggcgttcattgcttgctga

SEQ ID NO: 270530 - DNA, 1639 bp, Unknown
  Bacterial polypeptide expressing nucleotide sequence isolated from the Sargasso Sea
ttgataatactaaaaaaaatttataccctacttaatccaaaagagcgaaaacaggcactattgctgttttgtcttcaccttttaatggcctctttagaggtattaggaatagcttcaatcatgccattcatggcagtagttgcaaatccacaaataattgaaacaaatttaatattaaattggatttttgaactcttagattttgacgaaattgtcaattttttattttttctagggctagtagtctttactttattacttgtagcgataaccgcaaaagccttgcactcttatgtttatttccatttttgccttcaacgggaagcaaatatcagttcccggctaattgaaggttatcttagacagccatactcatggtttttaaatcggaatagctctgaccttgcaaaatcaatattgtcagaggtaaacgaagttgtattcggtgcaattttaccattaatacatctaatctcacaatctatcgtaactttagcgatattaagtttacttttttttgttgatcctaagctagtcataattgttggtctttctattagttttgcgttcattacaattttttttatttcaacaaaatatttagttaaaattggttctggaagacttcaagctaacgaacaacgctttaaagcagtaggtgaaacttttggagccataaaagaaattaaaattacaggcgccgagcacatctacttgaataagtttataacagctacccaaatctgtgcgcaaacaagcgcttcctcgcaaataattaaggaacttcctaaatatatcgttgagagcatagctttcggaggaatcctaataatccttctttatcttttaaaccagcccggcggtatcacgacagcattaccattaatttcactttacgcattagctggctatcgtctacttccagctgtccaaagtatttatagcgcagcgtcacaactgaactttacaaaaccggcactagatgccttatttttggagttcaaaaatcttacaaataaagaagttcaaacgaaaaatattccaagtataagtttgaggcagaatattttattatcggaaatttcattcaaatatgaaaatgaaattaagcctgcacttaaaaacatcaatttaaacatagaggccaaaaagacgtttggtatcgtaggaacaactggtagcggtaaaacaacccttgtcgacattgtgcttggattgattacaccaacccaaggatgtttgacaattgacggtcaacaaataacgaaaaaaaatattaggcagtggcagaattctattggctatgtgccacaagatatttacctcaccgatagctccattgaggaaaatattgcgtttggtatagaaccgtcttttattgataaaaatgcagttagagaagctgcaaaagtttgttgtattcacgactttataatgtctgaactttctcaaggttacgccacgcttgtgggagaaagagggatacgcctttctggaggacagaggcaacggctaggtattgctcgagcattataccaaaaacccagtgttatggtcttagatgaggcgactagtgccttggacactataacggaacaggcgggtgtaaaagcaattcatactatgaagcacaccccta

SEQ ID NO: 270531 - DNA, 673 bp, Unknown
  Bacterial polypeptide expressing nucleotide sequence isolated from the Sargasso Sea
cttgatctgctgcagctgcaggaattacgccatcgcaagccggcaggcctttcaggtggccagcggcagcgggtagcgcttggccgagctcttttgcgccgcccgaggctgatgttgctggatgaaccgatgagcaacctcgacgccaaattgcgcgaggagctgcgcactgagctgcagcacatcctgcgcagcatcggtgcaccggtgatttacgtgacccacgatcagcacgaagccatggggctagctgatcgcatcgctgttcttgaacggggacacttgcaacaactcggcagtgcggaagatctctaccgccgaccagccaacagctttgtggctggctttctgggcaacccatccatcaacctgctgccgctgcggcctgggcaactgatcggtctgcgaccagaacagctcaacctggcagctcctgaaacccagccggcagctggcgtcagcctcagcgccaccctgcaaacgcgggaatggctcggcgaccggctgctgcttcatctgagcagcgcaagcggccctctcaaagtgatgcgcccaagcagcgacacgcttgctgctgaccttccaccaggtaccaacgtctgtgttgagtggaaccgagacgatgcgctcgccttcgatgcccgcaccggagcaaggatcaacgcctcgtgat

SEQ ID NO: 270532 - DNA, 500 bp, Unknown
  Bacterial polypeptide expressing nucleotide sequence isolated from the Sargasso Sea
gcaaaaaagtgggcatgtgttccaaaacttcaacctattccctcataaaaccgtattgcaaaacattaccttagcgccagtgagcctaaagttaatgacccaagccgaagccgataacaaggcgctggcgctgctcactcaagtgggtttgcaggataaagctaatgcctatccttcgagtctctcgggtggacaaaaacaaagggttgccattgcccgcgcgctggcgatggagccggatctgatactattcgatgagccaacctcagcactcgaccccgaaatggtcggcgatgtactggatgtaatgaaggacttagcgcaaaaaggcatgaccatggtgattgtcacccacgaaatgggctttgcacgcgatgtttccgacagagtcatctttatggatggcggctatgtggtggagtccaatatccccgaggaattatttacccgccccaaagaagccagaacccaaagctttttaagtaaagtgctaaggtaat

SEQ ID NO: 270533 - DNA, 1275 bp, Unknown
  Bacterial polypeptide expressing nucleotide sequence isolated from the Sargasso Sea
ccgcgtcggcgacttctccggtggctggcgcatgcgcctgaacctggcccaggcgctgatgtgcccgtccgacctgctgctgctcgacgagccgaccaaccacctggatctggacgccattctctggctggaaggctggctgcaaaactaccccggcaccttgctgctgatttcccatgaccgcgattttctcgatgcagtggtcgaccacgtcgcccatgtcgaacagcgcaagctgaccctttatcgcggcggctacacggctttcgagcggactcgtgccgagcgtctggcccagcagcaacaggcgtacgagaagcagcaggcgcagcgcgcgcacatggaaaagtacatcgcccgcttcaaggcccaggccaccaaggcccgtcaggcgcagagccggatcaaggccctggagcgcatggaagagctgagcgcggcgcatgtcgactcgcccttcgacttcgtcttccgtgaagccgacaagatctccacgccactgctcagcctcagcgaaggtcgcctcggttatggcgacaaaactgtgctgcagcaggtcaagctgagcctggtgcccggcgcgcgcatcggcctgcttggccccaatggggcgggcaagtcgacgctgatcaagaacctgtcggccgaactgcagccgctcggtggcagcctgacccgcggcgaaaacctggtgatcggctacttcgctcagcatcagctcgattcactggacgacaaggccagcccgctgctacatctgcaacgtctggcgcccagcgagcgcgagcagaccttgcgcgattttctcggcggcttcgacttccgtggcccgcgttgtgacgagccggtggtgaatttctccggtggcgagaaggcgcgcctggccctggcgttgatcgcctgggaaaagcccaacctgttgctgctcgacgaaccgaccaaccacctcgacctggaaatgcgcctggccctgaccatggccctgcaggagttcgccggtgctgtggtggtggtctcgcacgatcgtcatctgctcaagagcaccaccgatgaattcctgctggttgccgaaggacgggtggtgccgttcgacggcgatctggacgattacgcgcgctggctggtcgattaccggcagcgccaggcgccaccgagcgcaacggctgaaggggcggcgggacagacgacaagcgcgcccagcgccagggccgcgccgcgctgcgtcagcaactggcgccgcacaagaagcaggccgacaagctcgagcaggagctg

SEQ ID NO: 270534 - DNA, 1591 bp, Unknown
  Bacterial polypeptide expressing nucleotide sequence isolated from the Sargasso Sea
aatgaatgatactgttttatcagttaaaaacttatctattagctttaaaaataattctgacagcaaaactgttttaattaattcgaatttcaaaattaaaagaggcactacactttctttagttggtgaaagtggatctggaaaatctataacctccttagccctagtatcacttttacctttgaatgcatctatagttggctcaataaattttaatggtgaagagcttataggattaagtgaaattgaattacaaaaaattcgaggtaataaaattagtttcatttttcaagaacctatgacgtctcttaaccctcttcatacaattgaaaaacaaattggagaaagtttaagttttcatcaaaatttatctgggattgaaaaaacacaaaaagttattgagttattggaaaaggtaaaaattcctaacgctcacacaagactaaaagattaccctcaccagttatctggcggacaaaaacagcgagtaatgattgcaatagcacttgctaacaaaccagatttacttattgctgatgagccaacaacttctttagatgtaactatagaaaaagaaataattgatcttttaatggagattaaatcaactgaaaaaatgtcaattctatttattacccacaaccttcgaatagtgaaacaaatttcagactatgtttgtgtaatgcaaaatggtaaaataattgaacaaggatctacacaagaaatttttgaatcaccaaaatctaattatacaaaaaaacttttaaactcttcacctaaaggctttagaaaaaataattcagaaagaatttcaaaaattttaaatgttgaaaatttgaaagtttggtttcctattaaacggggctttttaagaagaacaaaaggctttataaaggcagtagaccaaatttcatttgatcttatggaagaggaaactcttggaatagttggtgaaagtggatctgggaaaacatcacttgcattggcaatacttaaattaatcaattcagaaggatcaattactttccaaaaccagagtttacaaaactttaaaagtagaaatttacttacatttcggaaaaatgctcaaataattttccaagatccttacggctctctttcaccaaaaatgaacattgaagctattgttggtgaaggtttggatgttcacaaaaaaatatccaaatctaaaagaacagaaatgatcttacaaatcttgcatgaagttggactagatgaagatatgattactagataccctcatgaattttctggtgggcaaagacaaagaattgcaattgcacgagcattaattttaaaacctaaactccttatactcgacgagcctacttctgcacttgatgtttctgttcaatcacaagtgataaatttattaaaaacaatccaaaaaaaatattctttatcgtatattttcattagccatgacattgcgcttattaaatctgtaagtgataaaattatcattatgaaagatggcattattgttgagtcaggagaaactaaaagcctattttcaaagcaaaaaaataattacacccaggaacttattgtttcatctacccttaaataa

SEQ ID NO: 270535 - DNA, 736 bp, Unknown
  Bacterial polypeptide expressing nucleotide sequence isolated from the Sargasso Sea
atgtctgaaccaataattaaaataaatgatgtaaataagtggtttggtgattttcaagttttaaaaaatattaatttagacgttaaaccaaaacaaaaaattgtagtttgcggtccatcaggatcaggaaaatcaactttaataagatgtataaatagacttgaggaacatcaagaaggtacaataattgttgatggtaatgaattaagtgaaaatacaaaaaatattgaggaaattagagctgaagttggaatggtttttcaacaatttaacttatttccacatttatcaatattagataattgcacattagcacctatatgggtaaaaaaaatgccaaaaaagaaggcagaagagttagctttaaaacaattagagcaagttcagatagctgatcaagcttataaatttcctggtcaattatctggtggacaacaacaaagatctgctattgcaagagcattatgtatggagccaaaaataatgttatttgatgaaccgacatctgcatttgatccggaaatgattaaagaagttttagatgcaatggtaaaccttgcaaaaggtggaatgacaatgattgtagtaacacatgagatgggatttgctaaagaagttgcagatgaagtaatttttatggatgaaggtatgattgttgaaaaaaataccactaaagaattttttgcaaatccaaaaagtgatcgtacaaagctatttctaagtcaaattttatgat

SEQ ID NO: 270536 - DNA, 688 bp, Unknown
  Bacterial polypeptide expressing nucleotide sequence isolated from the Sargasso Sea
gctacctgcacaatgttcaggtggagaatcgcaaagagttgccgtcgcacgaactttaatcactgaccctggtgcttttctccttgatgaaccattatccagtcttgatgccaagctaaggcgagaaatgagagctgaggttgatcggctacacaaagaattaaataaaacatttatttatgtaacccatgatcaagaagaagctatgacactcgctgatcgcatagtagttatggatggaggaaatatcaggcaggtaggatctccaatagatatatataataaccctaattcctactttgtcgccgatttttttggcagcccatcaatgaatttaatcgagggagatatagtcaccaaaggcaaaaaggttgtgtttcattctagtgacataaaattagatttacctacgtctcttgctaaaacaccacctggaccagccacattaggaataaggccagaacaaattttggtaaacaataaatcaggcacgaaaaagaaaatttatctcgtagagcctttgggcaaagatactctgctctactttgaaactgagacaggaaatgaattaatttctgtagtcgatagcaatagtaaatttaaagcaggagatacgcctggcataacttttccggatgaccaaatatttcttttcgatgaaaatggtaatagagtttctacaaaatag

SEQ ID NO: 270537 - DNA, 730 bp, Unknown
  Bacterial polypeptide expressing nucleotide sequence isolated from the Sargasso Sea
atgagtattcaattaaacggcattaactgcttctacggcgcgcatcaggcgctgttcgatatcacgctggattgccctcagggtgaaacactggtgttacttggcccaagtggagccgggaaaagctcgctactgcgcgtactcaacctgcttgagatgccgcgctcgggcacgctctctattgcgggtaaccgtttcgacttcacgaaaaccccgtcagataaagccattcgggatctgcgtcaaaacgtgggcatggtcttccagcaatataatctttggccgcatctcacggtggtgcagaacctgattgaagcgccctgccgcgtactgggtctgacaaaagagcaagcgatggcgcgtgccgagaaactgctggaacgactgcgtctgaagccgtacagcgatcgctatccactgcatctgtccggcggccagcagcagcgtgtggccattgcccgcgcgttgatgatggaaccacaggtgctgctgtttgatgagcctaccgcagcgcttgacccggaaatcaccgcccaaatcgtcagcatcattcgtgagctggcggaaaccaatattactcaggtgatcgtcacccacgaagtggaagttgctcgtaaaacggccagtcgcgtggtgtacatggaaaacggtcatatcgtcgagtttggggatgcgagctgctttgccaacccgcaaaccgaagcgtttaaaaactatctttctcactaag

SEQ ID NO: 270538 - DNA, 658 bp, Unknown
  Bacterial polypeptide expressing nucleotide sequence isolated from the Sargasso Sea
atggttcttaacttaaactctatacgaaaatcataccgcactaacgaaggcaacgtgtcagttctaaatgatgtaagcttaactcttctcgcaggcgaaacactcgcgctgagaggtgaatccggtagtgggaaaagtacccttttgcacattgccggcgcattagagttgcccgacgaaggcagcgtagaaataggcggcaaagagttatccaaaatggatgatacgggaagagcagccgtcaggcggaaagacatcgcaatagtattccaacactttaatcttatcccatctttgaatgttgccgcaaacatcaatttccaagcaaatttgtcagggccagtagacaaaattaaattagaaaaaattgtgtcttctcttgggttatccgaccaaatgggaaaatatccggaagcattgtctggcggacaacaacaaagagtcgcgattgctcgagcattagtaacagagcctaaacttttattggccgatgaaccaacgggaaacttagacgaacatagcgcacaatctgtgcttgagcaaatgctaacgttggtggcagaaactaacactgccttgatgattgtaactcactctcgaaatgttgcagctagaatggataaacagctccaattaataggaggacggctgaagtgat

SEQ ID NO: 270539 - DNA, 520 bp, Unknown
  Bacterial polypeptide expressing nucleotide sequence isolated from the Sargasso Sea
accatcatccgggtttcttatatgcttaataataaaacctgtatctgaccttagcgacgatgaacttgctaaaattagaaattcagagattggttttgtattccaatcatttcatctacttgcaagaaatactgcattagacaatgtaatgcttccattaaaatatgctggaaaacaaaaagcagaggcaatcacattagcaaaagacgtacttggacaagtgggtttatcagatagatatagtcattctccttctgagctttctggtggccaacaacaaagagttgcaatagcaagagcattagtcaacaaaccaagtattctctttgcagacgaacctacaggtaatcttgattcaaaaacaggttcagaaattatgaaactatttaaaaagctaaatgaagagggacagactataatactaattactcatgaagatgagatagcaaaaaagtccaaaagggtaataacaattatggatggtttaatagagtcagatgttgagaataataatgaataa

SEQ ID NO: 270540 - DNA, 766 bp, Unknown
  Bacterial polypeptide expressing nucleotide sequence isolated from the Sargasso Sea
acgaaaaatacctaaagatgaagctgataaaaaaatagataaagctttatctatggtatctttgtcgggttttgaaaatagaatgccaggtcaattgtctgggggtcaacaacaaagagttgcagttgcaagagctttagtgtttgacccatctgttgtcttaatggatgaacctattggcgctttagataaaaatttaagagaaagtatgcaatatgaaattaagcatattcatgaaagtattggggtaactgttgtatatgttacacatgaccaaggtgaagctttaacaatgtcaaatagaattgcagtgtttaatgatggaaaagtccaacaattatcctccccagatcaattatatgaaaaacctgtaaattcatttgttgcagaatttatcggtgaaaataatacttttgcaggagaagtttcagatatttcaaaagacatgtgtaaagtgagggttaatggtggagaaataatggctaatccaatttctgtcaaaaccaaaggtgaaaaaacaacagtttcaataagacctgaaagagctctaattaatccaaaaagtggcatggataataatcataagggtaagatagaagaggtaatatatcatggtgaccatacaagggtcagacttagtttattaggtaattcagattttatattgaaagttccaaacagctcagaaaatttagatattaagcttggtaatacaattaatatcggatggaacagtcaagacgcaagagcactcgacccaaaatag

SEQ ID NO: 270541 - DNA, 913 bp, Unknown
  Bacterial polypeptide expressing nucleotide sequence isolated from the Sargasso Sea
cagtggatcatgtgggaagtgtcgtctttgtttgaaaacattggagtcgtgcatgacggtatgagcatgatggcaaaacctcttgaggtggtggatcatgaacaagcagcgactctcaaaatcagtagcgggaaagtagattttgaccatgtcggatttcattatggacgtcctggtggaatcatggaagatttcagtctttccatagcggctggagaaaaagtcggtgtggttggacgttcaggtgccgggaaaaccaccctgatgaaccttctgctccgtttttatgatttggaaaagggcggaatccggatcgacggacagaatatatccggagttacccaggaaagcctcagagcccaaattggggtggtgacccaggacacctcgttattgcaccgctccattcgtgacaacattgcctacacttctcctgaaatttctgatgaaaatgtgatcgaggcagcaaagaaagcaaatgcctgggaatttattcaggaccttgaagattcttttggacgcaaaggactcgaagctcatgttggagagcggggtgtcaagctttccggaggacaacgacagcgtattgcgattgcacgtatgtttctcaaagacgctccgattctggtacttgatgaggcaacatctgctctcgattctgaagtcgaagccgccatccaggaaaatctgtttgaattgatggagggaaaaacggtgattgcgattgcccatcggctatcgaccattgcccaacttgaccgactggtggtgatcgacgcgggagccgtcattgaaaccggaacccatgaagaattggtcagaaattcactgatctatgctgatctttggaatcgtcagtcaggaggttttttggctccggaggaatatgagaaaaaacctgaagcagcgtgaa

SEQ ID NO: 270542 - DNA, 598 bp, Unknown
  Bacterial polypeptide expressing nucleotide sequence isolated from the Sargasso Sea
atggcagcagtgcaactgagcggcatcttcaaacgctatggcgacacgcaagtggtgcacggcatcgatctcgacatcgatgacggcgagttcgtcgtgctggtcggcccatcgggttgcggcaagagcaccttgatgcggatggtcgcggggctggaggaaatcagcggcggcgatctgatgatcggcggcacgcgcgcgaatacgcttgccccgcagcagcgcaatatctcgatggtgttccagagctatgcgctctatccgcatctgtcggtctacgaaaacatcgcgttcgggccgcggattcgcaaggaatcgtccgcgagtttcaagccgcggatcgaagccgccgcgaagatgctgaaccttggcggttatctggatcgcttgccgcgcgcgctctcgggtggtcagcgtcagcgggtggcgatgggccgtgcggtggtgcgcgagccgtcgttgtttctgttcgacgaaccgctgtccaatctcgacgccaaactgcgcgtgcagatgcgcacggagatcaaggcgctgcatcagcgtctgaagaatacggtgatctacgtcacgcacgatcacgtatcgaagcgatgac

SEQ ID NO: 270543 - DNA, 712 bp, Unknown
  Bacterial polypeptide expressing nucleotide sequence isolated from the Sargasso Sea
ttggaaactcggcagatctacaagcagtatcagtccgggtcaaccaccctggatgttcttcgtggcgttgacttcacacttgagcagggtggctttcttgcagtggtcggtcagagtggatctgggaaaagcacgctgcttcacgtcatgggactccttgatgctcctgacagtggtgaagtctggatcaatggacaacgaattgacaacctgcctgttcgagaaaaagaccggctccgaaacaactcgattggcatggtctttcaggcatatcatttactccctgaattcaccgctttggaaaacgtgctcgcacctctacttattcggcatggcatattcaattggttctcacaaaagcgagcagcacacgaacaggcagaagcgctccttgatcgatttggcctgagcgacaggctacatcatcgaccaagacagttgtctgggggcgaaatgcagcgagtagccatagcccgtgctttaattaccaagccgcgagtcttgcttgctgacgaacctacaggcaacctcgatgaagaaagtggtgcagggatcattgaagcgcttgctgagttgaaccaggacaacggtctatctatagtgctcgtcacacatgatgctgatatcgccagccaggctcgtggtattgttcggcttgctgctggtaccgttgatatgatcaacccgggggcaaccggatcagcagcttgat

SEQ ID NO: 270544 - DNA, 367 bp, Unknown
  Bacterial polypeptide expressing nucleotide sequence isolated from the Sargasso Sea
aaaatctgcagatcgatatccacatgaattttctggaggacagaggcagagaatatcaatagcaagagcacttgccacacaaccgagacttttagtttgtgatgaacctacttctgctttggatgtaagtatccaagcccaaatattaaatttacttaaagatcttcaagaacaattaaatttaacaattttgtttataagtcacgacctacccgttgttagacaaatgtgtgatagaattggagtcttaaaagatggtaaattatgtgaggtttcaaacactgaggatttatttttaaaaccatcacatgaatatacaaaggaacttttacgattaatgcctaaaattgagtctatttataattaa

SEQ ID NO: 270545 - DNA, 1147 bp, Unknown
  Bacterial polypeptide expressing nucleotide sequence isolated from the Sargasso Sea
atgccgcataccgaagttttattatctggtgaaaatataacaaaaatttttggcgattttaaagctaatgataatgttaacttttcaatttctaaaggtgaaatacatgctttattaggtgaaaatggagctggcaaatcaacatttgtaaagattatttacggtttgttaaagccagatagcggtaacgttatttggaaaaatgaaataattgaaatcaatggaccaaagcatgctagggagttgggtattggaatggttttccaacacttttcattgtttgaagcattaactgtattagaaaacatatctcttgcacttcctgaaaagaaccaatctgatgatttagaaaacagaattgaaacaatttctaatgagtatggattgcaaattgaccctagatcaagggtttttaatctctcagtaggagagcagcaaagggtcgaaatcataaggtgcttactgcaaaatcctgagttattaataatggatgagccaacatcagtgttgacgccacaggaaatctctaaattatttgaagttttggagaagttatcaaaaagtgggtgttcaattttatttattactcacaagcttgaggaggtaaggtcgcttactacaagagctactatactcagaagaggtaaaaacgtatcaacagtagaaacaaaagaccatacagctaagtctttttctcaaatgatggttggacatgaaataaacactaataaatataaaaaaaacaaaattgaaaacgaaaacttattgaaaattaataacctatcccgtccagcacaaaaccaattttctgtagggttaaaagatataaatttaagtgtgaggggtggtgaaatattaggtattgcaggaattgcaggtaatggtcaaagtgaattaatggaggcattaacaggcgaatatttaacaatggaagcggataaaattttatttaatggatttgatatttcaaattttaaaccaaatgaaagaaggaaacttggtatatcatttgttccagaagagagaataggtcatgctacagtttctagttttaacttatcagagaatttttacttaacagattatataaatgataatagttcaaattatggaattattaatacttcatttaattacgagaatgctc

SEQ ID NO: 270546 - DNA, 486 bp, Unknown
  Bacterial polypeptide expressing nucleotide sequence isolated from the Sargasso Sea
catgtcaaagaaccagcaatttgttagatttgataaagtagataaaagctatgatggaaaagttttagtagttaaagacttaaatctagatattgctgaaggtgagtttgttacaatgctaggaccttctggatctggtaaaacaacttgtcttatgatgttagcaggttttgaaactccaacaaacggtgaaatttatttagataaaaatccaatttcaaatattcctccacacaagagaggaataggaatggtttttcaaaactatgcattgtttccacacatgactgtatatgaaaatttagcttttcctttaagagttagaaaaacatcaaaagaagatatagataaaaaagttgataaagctttatcgatggtttcattatctgggtttgaaaatagaatgcctggacaattatctggtggacaacaacaaagagtagctgttgcaagagctttagtctttgatccacaagtagtgttgat

SEQ ID NO: 270547 - DNA, 1623 bp, Unknown
  Bacterial polypeptide expressing nucleotide sequence isolated from the Sargasso Sea
tatggccagtaaaaatacaaacctatcaggtgtccgcctttacggtagattactttcatatgtactgccttatatacctttatttattgtaagcatcataggatttgctatttactcaggctcccaagttgctgcaactgaatggcttaaaagagttattgattacgttaatgatcctgttggtgacatgagacttattctacctatagctttaattgctatagctttagttaggggagtgggtttttttgtaggaaattatcttctgtcttctatatcaaacagacttgttcataacattaggactgaactatttaataaactgactgttctgccaagctcttattacgatcaacatagctctgggcatttaatctcaagaataacctttaacgttatgcaggtaactggagcggctacaaatgcgctaaaaatatttatacgcgaaggtttactagtaataggtttaattacatatttaatgtttcttaattggaaattggctatgtttctttttatagctgcccctttcattgcaattatagttggagtggctgcacgaagacttagaaagattagtggaagaattcagacagctatgggagacgtcacgcatgtagcttcagaaactataactggacatgaagaagttaagtcttttggaggagaagaatatgaaatcagtagatttaatgatgcaagtgacaacaatagaaagcagaatttgaaactagaagctactaattcaattgcctcacctttagttcagcttttcgtgtctgctgctttagcgctaataacctggttagcgcttgatgcctccatagtctctaatatgactccaggtacttttattgccttttttagcgcagcagggatgttggcaaaaccagtaaggcaattatcggaaataaacagtcaaatacaaaaaggattggcggcagctgaagatatatttagtcaattggatgaaacacctgaaagaaatgaaggaacatatacttcggaagaagttaaaggagagatagtcttttcaaatcttaatttctcatatgaaggagaagggggagggaatacgttagaagatattaatttaaaaattaatcaaggtgaaaccgtagctttcgtaggaaagtccggtgctggtaaaactacattaatgcgcttgttacctagattttacgatggatacgaaggagacataaaggtagatgacatatctataagcgaatatgagataactgatttaaggtctcacatagccttggtaagtcaaaacgtgacactatttaatgacactattgccaacaatataagttatggatcttccaatgtagatttcgatcaaataaaaaatgcagcaaaaaaagctaatgctgactcttttattgaattaatggctgatgggtacgagacgcaagcaggtgacgatggtgttttactgtcaggaggtcaacgtcagaggatagctatagcaagagctatattgaaagatgcttccatacttatacttgatgaggccacttcggctttagattcagaatcagaaaattatattcaagaggcgctagtagaattaacaaaaaataagaccactttagttattgctcacccgtctttcta

SEQ ID NO: 270548 - DNA, 685 bp, Unknown
  Bacterial polypeptide expressing nucleotide sequence isolated from the Sargasso Sea
atgagcttgataagagtaaaaaatcttaaaaaacagtttcaaattggaagtgaaactgttaatgcaattaaagatataagctttgatgtaaaagctggtgagtttatttcaattatgggtccatctggttctgggaaaacaactttaatgaatatcatcggatgtctagatacaccaacttcaggagagtaccacctagatgataatgaggtaagtcttcttgacgataatgaattagcggcaatacgaaataaaaagattggctttgtatttcaatcctttcatcttttatcaagaaatactgcacttaataatgtaatgctacctttaacatatgcaggctttgataagaatgaagctcttaaaaaagctaaaagcgttttggataaagtaggtcttgaggatagggtaagccataaaccaaatgagttatctggtggccaacagcaaagagttgctattgcaagagctcttgtaaatgatccgagtattgtatttgctgatgaacccactggtaatcttgatacaaagacaggtgaagagattatgagcctatttaaagagcttcataaaaatggacaaacaataatagttataacgcacgaaaatgatattgcttatcaaactgaaagaataattacagtaaaagacggattaattgaatctgatgagaggagagtttaat

SEQ ID NO: 270549 - DNA, 742 bp, Unknown
  Bacterial polypeptide expressing nucleotide sequence isolated from the Sargasso Sea
gataaaaaaatagataaagctttatcgatggtttctcttcaaggatttgcttcaagaatgccaggtcaattatctggaggacaacaacaaagagttgctgttgcaagatcgttggtgtttgatccacaattagttttaatggatgaacctctaggagctttagataaaaatttaagagaaagtatgcaatatgaaattaaacatattcatgaaagtattggtgttacagttgtttatgtaacccatgatcaaagtgaagctttaactatgtcaaatcgaattgcagtatttaatgatggtaaagttcaacaattatcaagcccagatgaattatatgaaaagccagtaaattcttttgtagctgaatttataggagagaataatactttttctggtgaagtttcggacatctcaggaggaaaatgtaaagttaaattgtctaattcagaaatattagcaaatcctattcgggtaaaaggcaaaggagaaagaacaatcgtttctttaagacctgaaagagcattaattaatccaagtgataagatggataatattcatattggaaaaattgaggagattatttatcatggtgaccacacaagagttagaattaatcttctaggaaattcagaatttatactaaaagttccaaacagttcctctaatcttgatataaaacttgggaaagaaattaaaattggttggaacagcgaagacgctagggctttagacccaaaataat

SEQ ID NO: 270550 - DNA, 1426 bp, Unknown
  Bacterial polypeptide expressing nucleotide sequence isolated from the Sargasso Sea
tagttctttttatgatgctcatagttctggtcatctaatttctagaattaccttcaatgttatgcaggtgaccggtgcagcaactaacgcattaaaaattctaataagagaaggtcttttagtaattggattaattacttatctgatgtacttaaactggaagctagcattgtttctatttattgcagcacctttcattgctctaatagttggtatcgcagcaaaaagattaaggaaaataagtgggaaaattcaaacggcaatgggagatgtgactcatgttgcctctgaaactattaatggatatgaagaggttaaatcttttggtggtgaagattatgaaatagacagatttaataaggcaagtgataacaatagaaaacaaaacttaaaactagaggcaacaaattcaattgcttcacccttagttcaaatgtttgtttctgcggcgttagcactagttacttggttggctctagatgcttccgtagtatctgtaatgacaccaggaacctttatagccttttttactgcagcaggtatgttagctaaaccagttagacaactatctgaaattaatagccaaatacagaagggactagctgctgctgaagatatttttagtcaattagatgaagagattgaaaaaaatgatggcaaattcaaatctgatgaaataaaaggtgaaattcaatttagtaatgtttccttcgcctatgctaaatcttctcaaaatatactcaataatattaatcttgaaataggtataggagagtcggttgcctttgttggaaagtcaggtgcaggcaaaacaactcttatgagccttcttccaagattttatgatgattttgaaggagaaataaagattgatggagtgttgttgaatgaatttgaaataaagaatctaagatcacacattgccctagtaagtcaaaacattactttgtttaatgacacaatcgctaacaatataaattatggttctgaagaaagatcacttgaagaaattaaagttgctgcgcaaaaagccaatgctcatgatttcatagaagcccttcctgatgggtatgaaacaattgccggagatgatggtgttcttctatcaggtggccaaagacagagaatcgctatagctagagctctactaaaagatgctcctattcttatccttgatgaagctacttctgcgctggattctgaatcagagaattatattcaagaagccttaatagaattgacaaaaaataggacaacattggtaattgcgcacagattatcaactattgagaattcagataaaattgtggtacttgattctggtcatattgttgaaataggttcacatgaaagcttaatttctcaagatgggcactatgcagaattacacaagaatcaatttaaagatgatgaaggagatgtctaa

SEQ ID NO: 270551 - DNA, 1684 bp, Unknown
  Bacterial polypeptide expressing nucleotide sequence isolated from the Sargasso Sea
atgagcgataagtatgtgttcgtaatgaaagaattaaataaaacttggccgggtggtaaacaagttattaaagatggatggctatctttttatccaggagcaaaaataggtgttctagggcaaaatggtgcaggaaagtcaacattattaaaaattatggcgggtttagataaagagttttcaggagaagcatgggcggcagatggaataaaaataggatatttggctcaagagccaatattggataatgatttaaatgtgtttgataatattatgttaggtgtttcagaaataaaagatgcactaaaagaatttgaagatgttagtttaaagtttggagaagttgcttccgatgatgaaatgaatgagcttttatcaaagcaggctgagcttcaagaaaaaattgattctatagatggttgggatattgataggcatatagagatagctatggatgcattaaggtgtcctgctgctgaaagtaatatttccgatttatctggcggtgagaaaagaagagttgctttatgccaactacttttaacaaaacccgatatattattactagatgaaccaacaaaccatttagatgcagagtccgtagcttggttggaaagaacattagccgatttttctggcactgtagttgcgattactcacgataggtactttctagataatgttgctggttggatattagaaattgatagaggtaatttaattccttttgaaggaaactattcaaattggttagagcataagcaaaaaagactacaacaggaagcaagagaagaagtatctattcaaaaaacaattgctaatgaacttgagtgggttaggcaaaaccctaaagctagacagtcaaagtcacaggctaggatcaatgcttatgaagctttagttgcagagtctcaagctagagaaaaaggtccttctcctcaacagatagtaattccttcaggtgaaagattagggtcaaatgttattgaattaaaaaatataagtaaaggctttggagataaattattaatagatgacctttcacttaaaattccaccaggtgcaattgtaggaatcattgggccaaatggcgcaggaaaaactactttgtttaatatgatatccaaaaaagatacttcagattctggagccatagcaataggggaaagcgtaaaccttggatatatagatcaaaatagagattctttaattgataagaatactgtttggtcagagataagtggaggatcagaacaagtagatttaggtaaacaaagtgttccaagtagagcatatgtatcatggtttaattttaagggaggagatcaacaaaaaattatcggtcagttatctggaggagagagaaatagagttcatcttgctaaaatgctaaagtcaggagcaaatgtattattgctagatgaaccgacaaatgatttagatgtagatacattaagagcattagaagaagcattgacttcttttgcaggttgcgctttgataactagtcacgatagatattttttagatagaatagctacacatattttagcatttgaaggctctagtcacgtagaatggtttcaaggaaattatgaagcttatgaagaagatagaaaaagaagactaggagatttgtcagatagacctcatagaataaaatataaaccaattgctagatgat

SEQ ID NO: 270552 - DNA, 1030 bp, Unknown
  Bacterial polypeptide expressing nucleotide sequence isolated from the Sargasso Sea
ctgcataacgggcttataattgagaacctcgatgtatcaattgatcggcataagatactgcgtgacgtttccattgatgttgagccgggaactataaccaccctattaggtcctagtgggtgtgggaagagcactctcctcaaggccatagttggacttctttcgtcagacaagggcgatgtaactcttaatacaaagagtcttgtctcaactcctgcccataagagggggatagggctaatgttccaaaataacgccttattttcgcacatgaacgtagaacgaaatgtcgctttcggagtgcggatgcagggacagaaaccggaagagtatgaagaaaaagttatagaaatgttggatttggtagggttgtcgggattcaacaaacgcgagatcggtacattatctgggggtgaaagccaacgtgttgctctagctcgtgcactggtacccagtccaaaagttctgttactagatgagccgttcaattcactagatagatccctccgaacagccctccttgatgaagttcgtgatgttctaaaaacgttgggtattgtcgcaatccatgtgacccatgactgggatgaggccacacgtatcgccgacaacattgcgttcatgaatcagggtcagatcattcgaactggatcaatagaagaaataatagagaaacccaaatactctatcgtggctgacctaatcggactggaaagctgctgggccccagaactctttgaatcagcaggaatcaggtacttcgataccccgtggggacgaagggaagttgatacgcccaattctgaaagtattgctgcgctgataaggccagaaaatatctatgaaaaaccagatggtatcgacgtagagatccagacaaaaaaatccgtttacggagaatggatttacaaatgcagactagatactggttttatcgtctctttcaaaacaaggaagaactactcaataggggagaagatcagcctttatgcatccgtaaagaatgtcgagacattggaaattctctagc

SEQ ID NO: 270553 - DNA, 658 bp, Unknown
  Bacterial polypeptide expressing nucleotide sequence isolated from the Sargasso Sea
ttaacaaaagaatatgaggcaggatcccaaattgttaaagctcttaatggaatagatttatctgttgaaaaaggagagtttatatcaatcatgggtccatcaggttcgggaaaaacaactttgatgaatattattgggtgcctagattcccctacaaatggaacttattatcttaatgacaggtcagttagtgaattagatgatgatgagttagcaaaaataagaaatgaggaaataggtttcgtttttcaatcctttcatcttttaccgagaagtactgcattagaaaatgttatgctgcctttaaaatatgcaggttgtttagagaatgaagctattgagaggtcgaaaaaagtactagaaaaagttggcttacaagatagggtaaagcattctccatcggaactctcaggaggacaacagcaaagagtagcaattgcgagagctttagttaacaaacctagtattttatttgctgatgaacctacaggaaatttagattcaaaaactgggaacgaagtgatgaatttatttaaagacttaaataatcaaggacaaacaataattataattactcatgaggataatattgcttctcaatcaaatagaattattacaattatggatggtctgatagaatcagatactagaaattaat

SEQ ID NO: 270554 - DNA, 1341 bp, Unknown
  Bacterial polypeptide expressing nucleotide sequence isolated from the Sargasso Sea
tctggaaaaacattatctgcattaagtattttaaaattattaccaacaaatgctattataaaaaatggaagtataatatttaatgataaagatctgctaaaactaccacaaaatgaaattgaaaaaatcagaggaaacaaaatttcaactatttttcaagaaccaatgtccagtttaaatccattacataaaattgacaaacaaattaaagaaattattacaactcataataacaacgtaaattctaaagaacttgatcagtttgttttaaaattattaaaagaagtaaatttagataatataatgaatagaccaaatatctattcttatgagctttctggagggcagcgtcaaagagtaatgattgcaatgagtattgctaataaccccgacctattaatagctgatgaacctaccactgcattagatgtaacagttcaacaacaaattttagcacttttaaataaaattcaagaagaaagaaaaatgtcgattttatttattagtcacgaccttggggtagtaaatgaaatagctgattatatttatgttatgagagaaggtaaaattattgaacatggcaaaaaagctcagatttttaataacccacaagatacatacacaaaacaattagttagctttcaaaataagattcgaaaacatgaagaaaataaaggaatagaaattctaaaaattaaagacttaaaagtatggtatcctattaagaaaggtatttttaaaaaaacagttgattatgtcaaggcaattgatgttattaattttactttaagtcaaaaagagacattgggtattgtaggggaatcaggatcaggcaaaacttcacttgttctagctattttgaaattaataacatcatcaggaataatagaatttgataaaattgatttaaatttgataaaaaaaaataaacttaaacgtattagaaaaaatattcaaattgtttttcaagatccttattcatcattaagtcctagaatgaatgttgaggaaatattgaatgaaggaatagatgttcactttccaaaatattctgcgagtgaaaagaaacaaatcttaaatgatattttaaaagaaacaggtatggactatgagagagatcataataaatatcctcatgaattttcaggaggacaaagacaaagaattgcaattgcaagagctttgattttaaaacctaaaattcttattttggatgaacccacctcagcattagacattactatccaaaatcaaatattagatttactgcaaaacttacaagaaaaatattctcttagctatatattcataagtcatgatatgaatgttattcgatcagta

SEQ ID NO: 270555 - DNA, 571 bp, Unknown
  Bacterial polypeptide expressing nucleotide sequence isolated from the Sargasso Sea
gccatctggttccggtaaaacaacattgatgattataattggttgtttagacacaccgacaagtggagaatacgagttaaatggaaaccaagtaagtcagcttaatgatgacgaacttgcgagaataagaaacaaagagattggctttgtttttcaatcttttaatttattagcaaaaaattcaactttaaataatgtgatgttgcctcttaaatatgctggatttggtaaatctgaagcaattgaaaaatcaaaagaagtaattaataaagtcggactatcagacaggttgaatcattcaccagcagaactatcgggtggacagcaacaaagagttgctattgccagagctcttgtaaataatcctagtattatcttcgctgacgaacctactggaaacttagactcaaaaactggcaaagaggtaatgactttatttaaggaactgaacgatactggacaaacaataatattaattactcatgaagaaagtgtagccaaacagtcaaacagaattataactattaaagatggtctgataaaatcagacaatagagaaacatatgaataa

SEQ ID NO: 270556 - DNA, 1588 bp, Unknown
  Bacterial polypeptide expressing nucleotide sequence isolated from the Sargasso Sea
atgagtaatattgtagaagtaaaagacttaagcattgattttaatgttagagatggaaaatttcgtgctgtggaagaaattagctttaatattcaaaaaaataaaactcttgctttagtaggtgagtcaggttcaggtaaatctgtgactgctatgtctatcatgcagcttcttcctcatcctcaatcatcttattcaaatggatcgtcaattaagtttgaaaataaagaaataattaacgcctcaaagaaggaactcttaaacttaagaggtaatataatatcaatggtatttcaagaaccaatgacttctttaaatccatatcaccgagttggagctcaaattacagaatctgtgatactccattctgatatttcacagttaggagcaaaagaagaagcgattaatctaatgaaattggttgaaatagatgatgtcgaaagaagatttaattcatatccacatgagctatctgggggacaacgccaaagaataatgattgctatggctttagttaacaaaccaaagttgttaattgcagatgaacctacaacagcattagacgtaaccattcaagcacagatcttagatctaatgtacaaattaaaaagagaattaggtatgtcgatattatttatcacacatgaccttggactcgtaaaagagttttctgatcaagtttgtgtcatgcaaaatggaaatattgtagaaaaaggaaatacttcagatgtttttgagaaccctgaacatccttacacacaaaaacttcttaatgctgagcctaaaccaaaagaaataataaatcgtaaacacgcccctttgattgagattaaaaatcttaatgttttttacaatataccaactaagaatttttttaaaaaaaatagattccatgctgtaaaaaatacttcattaaatattcacaaaaatacaacaattggacttgttggtgaatcagggtctggcaaatctactcttggaaaggcaatagctaatttaaccccatatgaaggaaagatttatttcaatggacaggaaattgcatcatctttaaaagaaattaagagatatatacaaatagtctttcaagatccttatggatcattatcaccaagaatgacaataggtgaaattgttggagaaggattagatgtccattttagtcttacaaaaaatgaatcagaatataggattgataaggttttaagtgatgttgggattgatctaaaagcaaagaataaatatccgcatgaattttcaggtggtcaacgtcaaaggattgctattgctagatctttgattttaaatccaaattttataattttagatgaaccaacatctgcacttgatagatcaatacaaattcaagtaattaaccttttaaaagcaatacaagaagaatataagttaacttatctatttataagtcatgatttaaaagtaattcgttcaatgtctgactatatttttgttatgaaagatggaaagattgtagaatctggactttcaaatgatgtttttaacaatccaaaagaaaaatatactaaaaaattactctcagctgcgttaagatacgcatccaattgag

SEQ ID NO: 270557 - DNA, 900 bp, Unknown
  Bacterial polypeptide expressing nucleotide sequence isolated from the Sargasso Sea
tcaccttgcgcggccagatcctggacctgctgagcgacctgcagcgccagaccggcatggcggtgctgctgatcacgcacgacctgaacctggtgcgccgctttgccgaccgcgtggcggtgatggagcaaggcgtgctggtagagcaggggcctgtggccgaggttttcagcgcaccccagcatgcctacacccgccgtctgatcgccagccagccgcgccgcgatgtgatcgaggccgacccgcccgcaggcaccgcgccggtggtgcggacgcaagacctgcgcgtggtctaccccacgccgctgccgggcatcaagggctggttcaaaaaaggcgagtttgtggcggtgcagggcgccaccttgcaattgctgcctggacgaacgctgggcgtggtgggcgaatccggctcgggcaagtccacgctggcccaggccatcctggggctgttgccctcgacggggcaactgcaggtgggtgggcaggcgtggcagcagcccgccatgcgcaacacgcccaccaaccagcagcttcgccgccgggtacaggtggtgtttcaggacccgttctcgtccctgtccccccgcctcacggtcgaagaaatcgtgggcgagggcctgaaggtgcatgagcccacactcagcgtggccgaacgccgcgcccgtgtagaggcggtgttggccgaagtgggcctggccgaggcccagtacccgcgcctgctggagcgttacccgcatgaattttcgggcggccagcgtcagcgcctggccgtggcgcgcgcgctcattgtgcagccgcaggtgctggtgctcgacgagcccaccagtgcgctcgatgtgactatccagcagcaggtgctgggcctgctgcagcgttgcaaaaagaaaagagcctgag

SEQ ID NO: 270558 - DNA, 1414 bp, Unknown
  Bacterial polypeptide expressing nucleotide sequence isolated from the Sargasso Sea
gaccctcaaacatctcttaacccattatttaagattaaagatcagttagttgagacaatacaaacgcatcttaatttaaattatgaagaagctttaaaaaaatctattaaattattaaatgaagttggcattgaagatgcagaaaaaaggattgaagattatccgcatcaatttagtggaggaatgcgtcaaagagtagtgatagcattagctataagttgtgaaccagacctaattatagccgatgaacctactactgcactagatgtaagtatccaatatcaaattcttcaacttcttaaggatttaacaaaaaaaagaaatctaggtgttatcattattactcatgatatgggcgtgattgctgaaacaacaaataaagttattgttatgagaaatggtgtaattgttgaatatggtactactaaagatgttttaacaaatccaaaatccaatgaaggaaaaagtcttgttatctccgttcctccaacaaataaaaaaatatcaagatttaaattgattagtcctgatggaggagaaataactaataattctataaatcttactaatagcattattcaaaactggggaactagagatatctcaaatgaaaaattattggattttagaaatattacaaagatatttaatgaaggctcattcattaaaagaaataaagaagataataatctaaaagctctcaataatgtttcgttcgaaatttttgaaggtgaatcttttggactagttggagagtcaggttcaggtaaatcaacaattgccaagatcattaccaatctaattaagccaactgctggagaagttttttacgaaaatctttcattgcataaagataaaaacaaaaaaaataaaaataaatacagaggccagattcaaatgatatttcaagatccttactcttccttaaatccaagatttaaagtgagaaatattatcgctgaaccaattaaattttttcagaaaggtctaaataaaaaaataattaaagataatgtaaatgacttaattgatattgtcggaatgactagacaatctttagacaggtatccgcatgaattttctggaggtcaaaggcaaagaatctcaatagctcgagctttagcaacaagaccgcgattacttatttgtgatgaaccgacttcagcactagatgttagtattcaggcacaaattcttaatctgttaaaagatcttcaagaacaattaaatttaacaatactatttattagtcacgatttaccagtaattaggcagatgtgtgatagaatagcagttttaaaaaatggaaatgtgtgtgaaattgagaaaactgaaactttatttaatcaaccaaaacataactatactaaggaattgattaaattaatgcctaaaattgaatcaataatttaaa

SEQ ID NO: 270559 - DNA, 682 bp, Unknown
  Bacterial polypeptide expressing nucleotide sequence isolated from the Sargasso Sea
gatgataactgatacgaaaaccgtaatttcaataaataatatctcaaaaacttacgaaggaccacctcctgtaaaagcactggatgaagtttcactagaagtaaaccagggagatctggttgcaatcgttggtcaatcaggaagcggaaaatcaactttgttaaacatgattggcttacttgatagcgtaaccgctggttcaattcaaatagaaggaaaagatatatctgaattatctgacaatgaactctcaaaatttagaggtgagaagattggatttatattccaaagcttttttcttttaccaggtttaaatgcacaagaaaacgtcgcagaaggtcttttatatcagggcatttcgagaagtgacaggcttcttaaagcaggagaggtccttgaaaaagttggtttgggggatcgccttactcatctacctaaagaactttcaggtggacaacaacaaagagttgcaattgcaagagctctggtacaggacccagcattcgttttggcagacgagccaacgggaaacttagacaaagaatctggtattaatattttgaatattttgaaggatttaaataaccaaggtaaaacagtcataatgattacgcacaatcaagagcacgcaaacatgtttaaaaaagtcgttgagttggttgatggaaaaattgtaaaataa

SEQ ID NO: 270560 - DNA, 1520 bp, Unknown
  Bacterial polypeptide expressing nucleotide sequence isolated from the Sargasso Sea
aggtcttcatgcttggttagtgagaccagcacttgatgaagtattgattaaaggaaacaaagaaatgcttttggttattcctgttgcaattatagtagttacaatatttaaaggttttgcaacattcttgcactcttatcaaatgagcaaggtagctcactcagtaattgctaaattgcagtcagaaatgtttgaaaaactaatgtacttgaatttgaagttctttaacgattcaaaatctggaaatttaatttcaagattaataaatgacacatattttttacgtatggctattgtcaaatctgtcacaggcatcattaaagattttttagttattatttttttattaggaaatatgttttatcaaagttgggaattaactatattcgcattttttgcgtttcctttagctatctggcctataaaaaaaataggaaaaagtatacgaaaaatcacacataatattcaaagtgaaatagcagttttttcaaactctttaagtgaaagtattaagggtatcagacaagtaaaagcctataatcaagaagaatatgaaaagaaaaaatcatttaaaacaatcgaacaaataaaaaattattttatacgtgctgcatttgttagtaatcgtttaagtcctcttatggaatttattggaagcttggctattgctctttctatatatgttggtggagtttttgtacttgatgaaactatgactactggacaatttatgagctttcttgttagtttgctgttggcttatcagcctgtgaaagctctaggaaatttaaacataagtgttcaagagggtttagctggggcagataggatttttaaacttttagatacaaaagaagatttattggaaaaaaatgaaacaaataaaaatgaaataattgttaaaaaaggtaaaattgaaataaaaaatttaaattttgcttatgataatcaaaatattttagagaatttgaacatttcgatacctgaaggaaagaaagtagcaatagtaggtttgtcaggctctggaaagtcaactattattagtttattgcttaggttttttactgattacaaaggagaaattttaatagatgatcaaaatataaatcttacttctattaaatcattaagacaaaatatcggtcttgtgactcaggaaactattctttttaatgatacaattgaagctaatatcaaatatggtaacttaaaagcttcaacacaagatatagagaaagctgctgaagaggctggggtaaatgactttgctaatgtatttccaaataaacttcaaacaatagttggtgaaagtggaattaaattatcaggaggtcaacgtcaacgtattgcaattgcaagagcaataataaaaaacgcacctattcttctatttgatgaggcaacgtcagcattagataacttaactgaacaaaaagttcaatcatcaataaaaaaaataatgcaaaatagaacttctttgatcatagctcatagattaagtactatagaggattctgatt

SEQ ID NO: 270561 - DNA, 496 bp, Unknown
  Bacterial polypeptide expressing nucleotide sequence isolated from the Sargasso Sea
tatgccctttttagagtttgaagatatagataaatctttcggaaataataatgtaattagtaaatttaacctaaaggttgaaaaaggtgaatttcttgttttactaggtccatcaggttgtgggaagtctactttgctgagaatgatagcggggttggaaaaaatagacggaggcaaaattactttagagggtaccctcctaaacgatttacttccttcaaaaagaaaaattgctatggtcttccaatcttacgcactatacccgcacatgaatgttttccaaaatatatcttttggtttaacaactgaaaaaataaccaaagatgagattaaagaaaaagtcgatgtagcagcgaaaattttaaaaattggagatctccttgatagaaaaccaaaagaactatctgggggtcaaaggcaaagagtagctattggaagagctattacaagaaatcctaagttatttttatttgatgaaccactgtctaacttagat

SEQ ID NO: 270562 - DNA, 625 bp, Unknown
  Bacterial polypeptide expressing nucleotide sequence isolated from the Sargasso Sea
cctttgccccccaggatcaaataaaacaataattaaaaatttaaatttgagcatcgacaataaccaatcagttttggttgtaggaccatctgggtgcgggaaaacatctttactaagaatgattagtggtttatgggaacccgatcagggattaattaaaaaaccaaaaattggggaattattattcattcctcaaaaaccatatatgttacttggttctttaagggaacaattatgttatcccacagaagttaagaaatttagcgacgaacatcttacttctgtacttcatgaagtaaatttaaaaaccttagtagatcggtatcctaatcttgatatcaaacaagattggccacgaattctttccttaggcgaacaacaaagattggcttttgcaagactcttactaaattctccaagatttgcagtacttgatgaagcaacaagtgctttagatattaacactgagaaaaaactatatagtttactaaaggaacgagaactttctcttattagtgttggacatagacctagcttaaaagagtttcacgagaacattttagaattaaatggacaaggtgactggaaattattgacttctgataagtataattttaaagattaa

SEQ ID NO: 270563 - DNA, 613 bp, Unknown
  Bacterial polypeptide expressing nucleotide sequence isolated from the Sargasso Sea
atgttacaaatgaaaaacataagtaaagtataccaaactgaaatggttcaaactcacgcattaagagactttaatttaaatgtaaatgaaggcgaatttatagctgtcacaggccctagcggctctgggaaaactacttttttaaatattgccggaatgttagaaccctttagtgaaggtgattatattttagatggtgtaaacgtgggtagcctaaacgacaaccaacgtgccgattgccgaaatcaaaaaattggttttatctttcaaggttttaatttaataccagatttaaacctctatgaaaatattgaagtacctcttcgttatagaggtattaaagcaaaagaacgtaaacgtagaatagagcaatgtttagaacaagtaggcttagcctcccgcgctaagcatttacctctacaactttctggcggccagcaacaacgcgtcgctatagcccgcgcacttgccggcgaaccacgttttttacttgccgatgagcccaccggtaacttagacagcctaatggctcgccaagtgatggaattacttgagcaaataaatcgcgatggcgccacaattataatggtgacacatgacagcgaattagccc

SEQ ID NO: 270564 - DNA, 769 bp, Unknown
  Bacterial polypeptide expressing nucleotide sequence isolated from the Sargasso Sea
atgaaaaatgcagttgaatttgtaaatgtaagtttaaattttggtggcgtcaaagcattggataatatctcgtttgaggttaaagatggttctttattttcaatcataggtccaaatggagcaggaaagacatcagtatttaactgtgttaatggaatttataggccgacttcgggggaaataaaaatttatgatcaagaaataggagatttgaaacctgataagattgcaaatttgggagtctcacgtacttttcaaaatatagaattatttgaaaacatgactacattagacaatattttaattggtgcacataagcatataaattatggtccagtgacaagtatgcttcgaacaaaaaaagttaaaaatcaagaagatgaagcaagagatattgctgaggatgttattgattttttagaaatagaagaatatagattttcttatatattatcgctaccttatggaattcaaaaaagaattgaattaggaagagcactagcaatgaaaccaaaagttcttttattagacgaaccagcagcaggaatgaataatgaagaaacagaagatattgcaagatttatactagatatacacgaagaattaggagtaacaataatattggttgaccatgatatgaatatggttatggatatagcgacagatgtaatagttatggattttggtaaaaaattattttccggctcaccatctgatgctgcaaaagaccaatcagttatagaagcctacttaggagtaagtgattaat

SEQ ID NO: 270565 - DNA, 793 bp, Unknown
  Bacterial polypeptide expressing nucleotide sequence isolated from the Sargasso Sea
atgaaaaataaaaactcagaagaaacaattgtaaagtttgaagaagttacaaaacagtatggcagcctagtagttttggataaattaaatttagatattaaaaaaaacgaaatggtttctataattggtccttcaggttctggaaaaacaacagttctaagagttttaatgacattagaaaagattaatggaggtgttattcatttagatggcgaaacattaactcatatgaatgataatggaaaacaggttgaggctaatgaaaaatatttaagagagagacgatcaaaaattggaatggtttttcagcaatttaatttatttcctcatatgaccgcacttcaaaactgcattgaagccccagtcgaagttttaggcatgaaaaaagaagacgcagaagaaagagcattagaacttttagagctagtgggtctaacagataaaaaagatcaacatccttcaagattatctggcggacaacaacaaagggtagcaatagcaagagctttagctatgagaccaaaagttatgcttttagatgaaattacttccgcattagacccagaggtagtaggtgaggttttaaatgtaattagatctttaaataaggaacatagtcttacaatgataatggttactcatcaaatgggttttgcaagagaaatttcagatagagtatgtttttttaatgaaggtaaaatatttgagcaagggccacctgaaaaattatttggtgatccgcaaaatgaaagaacaaagcaatttttacatgcagttcttgatgctaattaaa

SEQ ID NO: 270566 - DNA, 661 bp, Unknown
  Bacterial polypeptide expressing nucleotide sequence isolated from the Sargasso Sea
aacactggggattattggagaatctggtagcgggaaaagcaccctagctaagatggttttgaatattttaagccgtgatgaaggtgaactggaattaattgcttcaaacgagagaataaaaaaccttacaatgccaaataaaaacattggagctgtgcttcaggacagttcggggtctttaaatccaagaatgactatccagcaaatattatcagagcctttaaaaatcttaggatattctgaaaagggtgaaataaaatcaaaaaccattagagcaattaatgaaataggattagatcaaggctttctagatagatacccccacactctttcagggggacaaagacagagagtgtccatagcaagggcgatgatgctggaacccagtgtgcttattcttgatgagcctacatcagctcttgatacagcaaccaaaaagaaaatattgcacttacttaaatcattacaaaacaagcaaaaaacatcatatcttttcatatcccacgatctgcatgttatatcagaaatagcaaacgaggtatcagtgttgtttcgtggggaaataatagaaactggaactattgaaaaaattatgagcaacccaaaacagaactatactaaaaagctagtagactctcatcgctacaataacgtattctaa

SEQ ID NO: 270567 - DNA, 781 bp, Unknown
  Bacterial polypeptide expressing nucleotide sequence isolated from the Sargasso Sea
catggctgaacatttcatcgctgaagggcttcactatcacgtagctggcagagcggtgattgacgacgtatcgctcgcccttacaaaaggtgaactggttgcactcatcggcccaaacggtgcggggaaatccaccctgctgcgcctgctgaccggttttctcaaaccagcaaccgggcgctgcgtgctggcggacaaaccgttgcatgaatggtctacccagaccctgtcgcggcatcgggcagtgatgcgccagcaaacactgctgggattcgactggccggtagaggctgtcatcgcgatgggccgcgcgccgtggacccaacagcaggagccccggcttatcgctcaggtgatgaaaatgaccggatgcacaccgttggcgggtcggcaatacgccgcgctttccggcggtgagcaacagcgagtacagttggcccgtgcgctggcacaactctggtgcgacggtgcgcctcacggttggttattccttgatgaaccgacctccgcgctggatctttaccaccagcagcatctgttgcgcatgctaaaaacgcttacctcttcgggagagctacatgtgtgcattgtgcttcacgatctgaacctcgccgcactgtgggcagacagaatagtgctgctgcacaacggcaggctggtatcgcagggaacaccggaaactgtgttacaggccgatgatctgaagcgctggtacggtgctcaggtacacgttgtccagcatccggccaacgcctccccgcaggtatttctggctccttag

SEQ ID NO: 270568 - DNA, 1051 bp, Unknown
  Bacterial polypeptide expressing nucleotide sequence isolated from the Sargasso Sea
catgttatcagttgaaataaaagatttaagttactcaattaaagataagaaagtattaaataaaattagtttagagttagagaaagataaaattgcctgtattcttggcccttcaggatgtggaaaaacaactttattaaaactcattgcaggtttatcacatgtccaagatggagaaatttttttaaatgacaatctagtaagttcaaacaatgttcatttaaaaacagaaaaaagaaaaatagggtttttatttcaagactatgctttatttccacaccaaacagttaaggaaaacttgcaatttgctataaaaaataaatctacttcacattcaattaaggaaatactagatgtaattaaactatcagatgctttagacaaatatccacacgaattaagtggtggtgaacaacaaagagtagctttggcacgttcaattatagctaaaccagatattttattgcttgatgaacccttttcaagtctagatttaaatttaagagaagaagttagagatgatactttacaccttcttcaaaagtctaatatttcagttttagttgttactcatgatccgttcgaagctatgtttatttctaataaaatttatataatggataaagatggcagaatcgtacaatctggatctccaaaagaattatataatcttccaaactcatcatatgttgcaaatttttttggagaaacaaataaatttactggagtggtaaaaaacaaaactgttgaaacgcctgttggagagtttaatgttgatgagagcctagagtcaaaacacgtaaatgtatacattaggcctgaagcagtcaaattaaaccaagaacaaactcctgttaatggaattaaaggaacagtcatggcgtcaaaattaatgggtggttatagttttgttcatttatcagtattaaataataataatgaaattgttcacgttcatagtcacatgccgccaaattttttaccaaatcaatcaagtgcagtaggcatagagatagataaagagcagacttttatttttcctgctaattaa

SEQ ID NO: 270569 - DNA, 793 bp, Unknown
  Bacterial polypeptide expressing nucleotide sequence isolated from the Sargasso Sea
tatgaaaaataaaaattctgatgaaattatagttaagtttgaagaagtaacaaaacaatatggtgatttagtagtcttagataaacttaatttagatattaaaaaaaatgaaatggtgtcaattattggaccatctggttcaggaaaaacaactgttttaagagttttaatgactttagaaaaaatcaatggaggtatcattcatttagatggtgaaccccttactcatatggactcaagtggaaaattagttgaagcaaatgaaaaatatttgagagacagaagatcaaaaattggaatggtatttcaacaatttaatttatttccacatatgacagctcttcaaaattgtatcgaggctcctgtggaagttttaggaatgaaaaaagaagaagcggaggaaagagctttagagttattagaattagttggtttaacggataaaaaagatcagcacccaaccagattatcaggaggacaacagcaacgagtagcaattgcgagagctttagcaatgagaccaaaagttatgctgttagatgaaataacatcatcacttgatccagaagtggtaggagaggtattaaatgtaattagatctttaaataaagaacacaatctaacaatgataatggtaactcatcaaatgggttttgctcgtgaaatttctgaccgtgtatgtttttttaatgaaggaaaaatttttgagcaaggtccaccagaccaattatttggtgacccaaaaaatgaaagaactaagcaatttcttcatgctgttcttgatgcaaattaa

SEQ ID NO: 270570 - DNA, 1054 bp, Unknown
  Bacterial polypeptide expressing nucleotide sequence isolated from the Sargasso Sea
atgagttttttagaattaaataaagttactaaggtatatccaaacggaacaaaagctgttcatgagacaagtatgaatgttgaggatggtgaatttatggtttttgttggtccaagtggatgtggaaaatcaacattattaagaatgattgcaggattggaagatataaccgaaggagatataaatcttgatggaaaattaataaataaagttgatccttcagaaagagatgttgcaatggttttccaaaactatgcactttatcctcacatgaatgtttataacaatcttgcgtatggtttaaaaaatagaggcattgataaacaaactattgaacaaaaagtgaatgacgctgcaaaacttttacaaatttctgaattcttgcaaagaaagccatcaatgttatctggtggacaaagacagcgagttgcaatgggaagagcgatagttagaaatcctaaaatatttttatttgatgaaccattatctaatttagatgcaaaactaagaatacaaatgagacttgaaattaaaaaacttcaacaaaaagttggagttactagtatttttgtgactcatgatcaagtagaagctatgactttagctgatagattggctgtaataaataatggtataatagaacaactaggcactcctattgaaatttataacaatcctaaatcgttattcgttgcaggatttatcggatcaccccaaatgaattttattgatggtgaattaaaaaacaaaactttatttgctgaaggatttgaaattaaaaatgttcaaagtgattttaatggtgaaattacattgggcataagacctgaacatatgtcacaatctgatagtggtttgataaatttatctgtagaattagttgaacaattaggatctgataatcttatttatggtgaattaaaaaataaaaaggatttttgttatagatgtcctggaaatcaattaattgaaaaagggagtaaaatatcactaaatatcaacgacaataattattatgtttttgataaaagtagcggtaacagagttaattaaa

SEQ ID NO: 270571 - DNA, 799 bp, Unknown
  Bacterial polypeptide expressing nucleotide sequence isolated from the Sargasso Sea
atgagcacgctggaagtccgtcaggtatcggtcgcctatccgggcgagcgcggcaggccgacgacgcaggcgctcgcgcgcgtcgacctgcgtatcgagtccggtgaattcgtcgtcgcgctcggcgcgtccgggtgcggcaagacgacactgctgaactgcatggccggcttcgtcgcgccgacgaccggcgacgtgtgcgtcgacggcgtgccggtcacgggccccggcgccgatcgcggcgtcgtgttccagaaatacgcgttgctcccgtggctcgacgtgctcgacaacgtcgcgctcgggctgcgtttcgcgcgcgtgtcgaaagccgaacgcgaagcgcgcgcgaaagagatgctcgcgctcgtcggtctcgagcgccatgcgcatgcgcgcgtgtatgaactctccggcgggatgcagcagcgtgtcggcatcgcgcgtgcgctcgcgagcgacccgcgcgtgctgctgatggacgagccgatgggcgcgctcgatgcaatgacgcgcggcacgatgcaggcactcgtgctcgacgtgtgggcgcgcaccggcaagaccgtgttcttcatcacgcacgacgtcgaggaggcgttgttccttgcgacgcgtctcgtcgtgatgacgcccggccccggccggatcgcggaaaccttcgagctgccgttcgcgcgccgctatgtcgaatcgcgcgacgcgcgcgcggtgaaatcgtcaccggacttcatcgcgtggcgcgagcggctgatcgcgtatctgcatcgcgacgaagcggtcgcggcggccgcgtgac

SEQ ID NO: 270572 - DNA, 790 bp, Unknown
  Bacterial polypeptide expressing nucleotide sequence isolated from the Sargasso Sea
aatggataaaaattctcaagaaataatagttaagtttgatgaagttacaaagcaatatggagatcttgtagttttagataagctaaatttgaatataaaaaaaaatgaaatggtttcaataattggtccatctggttcaggaaaaacaactgtgttaagagtattaatgacgttagaaaaaattaatggtggagttatacatttagatggcgaaccacttactcatatggattcaaatggaaaattaatagaagctaatgaaaaatatttaagagacaggcgttcaaaaattggcatggtatttcaacagtttaatttatttccgcatatgacagcactccaaaactgtatcgaggcaccagtggaagtccttggaatgaaaaaagaagaagcagaagaaagagcacttgaattattagagttagttggtttaacagataaaaaagatcaacatccatcaagattatcaggaggacaacaacaacgtgttgcaatagctagagctttagcaatgagaccaaaagttatgcttttagatgaaataacatcagctttagacccagaagttgttggagaagttttgaatgtaattagatcattaaacaaagaacataatcttacaatgattatggtaactcaccaaatgggttttgctagggaaatttcagatagagtttgtttttttaatgatggaaaaatttttgaacaaggtcctccagaacaattatttggtgatcctaaaaatgatagaacaaaacaatttcttcatgcagttcttgacgcaaattaa

SEQ ID NO: 270573 - DNA, 746 bp, Unknown
  Bacterial polypeptide expressing nucleotide sequence isolated from the Sargasso Sea
aatggataaaaatactcaagaaataatagtaaagtttgatgaagttactaaacagtacggagatcttgtagttttagataagctaaatttaaatattaaaaagaatgaaatggtctcaatcattggtccatcaggctcaggaaaaacaactgtactaagagtattaatgactttagaaaaaattaatggcggagttattcatttggatggtgaaccacttacccatatggatacaaatggcaagctgatcgaagcaaatgaaaaatatttgagagataggcgttcaaaaattggaatggtatttcaacaattcaatttatttcctcatatgacagcacttcaaaattgtattgaagcaccagttgaagttttaggtatgaagaaagaagaagcagaagaaagagcccttgaacttttagaattagttggattaacagataaaaaagaccaacatccttcaagactttcaggaggccaacaacaacgagttgcaatagcaagagctttagcaatgagaccaaaagtaatgttgctagatgaaataacttcagctttagatccagaagtggttggagaagttttaaatgtaattagatctttaaataaagaacatagtttgactatgattatggttacacaccaaatgggatttgctagagaaatttcagatagagtatgtttttttaatgagggaaaaatctttgaacaaggaccaccagaacaattgtttggtgatccaaaaaacg

SEQ ID NO: 270574 - DNA, 1777 bp, Unknown
  Bacterial polypeptide expressing nucleotide sequence isolated from the Sargasso Sea
aatgttaaaacaactttggcaccacttatctaagcgccggcaaagacaatttgtttttatgcaaattttaatcgttgtagcatctttttttgaaatggctagtttaggtgctgtaattccatttttaactgttctatctgaaccagaacttgtttatgagtatgaatatctaagaccttttattcaattttttagaattaatgatgctagtcagcttgcacttcctataactttgacattcattgccctaattcttttgtcagcaatagttcgtttagttttgctttggacaatggttagattatcacaaatggctggagcagatcttagtatagatatctatcgtcatactctttttcaggattactcaattcatgtagcacgaaatagcagtgaagttattaatggaataataactaaaacaactactgtgactaaaggcgtaatagctcctgtactaaatttgatcagtacatgcgtaacaattgttggaattattgctgttcttctattgattaatgtctcagtaactttgattggatttataggatttggaggggcttatttgttagtgatttacctcactcgcagagatctcaagaaaaatagtcagaacatagctgaaaaatctgacttaatggttaaatccttgcaagaagggcttgagggaataagagaggttcttattaataataatcaacaattctataccgaattatatcgtaattcagacctgcaaatgagaagagcaacttggagaaatgaagttatttattctagtccgcgatttgggatggaagctattggaataggaataattgcattatttgcttattcagcaaccctgaacttaggtggaattgatcagttcttgccagtattaggtgcttttgtacttggtgcgcaaaagttattacctgcaatccaaaaaggctatgcttcatacagtagaataaagggaggaaggtattctttaatagatgtcataaatcttttagatcagccaattccagaccatgcagatcttccccctccaactcctaattctttcaacgactcaatagatctaaaagatttatcttttagatattcagaagatacaccttgggtactcaagaatattaatcttaatatacctaaaggttcagttattggaatagtaggaactacgggttgtggtaaaagcacactacttgatgtcgtcatgggactactttcaccaacaagtggtgaattaaaagtcgataatctactcattgataatgaaaacaaaagggcttggcaaacacatatttctaatgttccgcaacatatttatttaactgatggaacaattgaagaaaatatagcttttggcattcctagagaacaaattgatcatcaaagagttgaaaaagcagcaaaacaagctcaaatagctgatctagtagagacatgggaaaacggctatcaaaccttggtaggtgaaagaggaatgagattgtctggaggtcaacgtcagagagtaggtgttgccagagctttctataaaaagtcagacgtattaattcttgatgaagcaactagtgcacttgatgatgaaacagagtcggcagttatggaagcaatagaaaatattgatgacgatgtcactgtaatcattatcgcccatagattaacgacattaaaaagttgtgacaagatagtcaaattcgaaaaaaatcattcaactcagatattaacttatgaagaagttatgagtttaagtaaaaatataggagatatcgatgttaaataa

SEQ ID NO: 270575 - DNA, 694 bp, Unknown
  Bacterial polypeptide expressing nucleotide sequence isolated from the Sargasso Sea
aatgcaagacgtgttactgcaagtgcaggcggtgagtaagagttatcacgatggcgatgtcactactcaggtgctgactgaggtggatttacaggtatttaagggtgaacagctggcgattgtgggcacttcaggctcgggcaagagtacgttactgcatattatggggacgcttgataaaccgtcatcgggtaaagtgttgttggcaggtgaggatttatatcaagtgagcagtgcccgacaggcgcagatccgtaatcaggatttaggctttatttatcaatttcatcatttgttgcctgaatttaccgcccttgaaaatgtggcaatgccggcatttatccaaggtcgtgatcgcagccaagcgcaagccgatgccaaggttttgctcgagagagtgggtcttgggcacagaatgagccatattccagctgagctttcgggcggtgaacggcaacgagtggcaatcgcccgtgcgcttatcaataaacccaaactcgtactggccgatgaacctacgggaaatctcgatgcgaagagcggcgaggccgtgtatgaacttattcgcgaattggccaatcaactcggtaccgcgtttgtggtggtcacccacgatcctaaattggcagcgcggatggacagacaactgaccatgaaaaatggttatctgcaagtaccggaaagcacccaatga

SEQ ID NO: 270576 - DNA, 607 bp, Unknown
  Bacterial polypeptide expressing nucleotide sequence isolated from the Sargasso Sea
atgaataaaaccatcttagaagtttccaatgttacaaaaaaagttaccagccctgagggcgaactaaccattgtaaatgatatcagtctttccttggaggagggcgtttttgcgtccattttgggcccatctggatctgggaagaccacgcttcttgcaatcatggccggccttgatctgccgagtagtggatccgtgaagcttcttgataaagaaatcacaagcttaaatgaggataagagggcacagattagaagcaaggatgttggttttgtttttcagtcttttcatttgctgcctcgattatcagccttagacaatgtgatgatgccactcgagatactcggcgctaaagacgcaaaggagaaggcactaaaagctttggatgaagtgggtttatccaaaagaacaggacacgttcctcatcaattatctggaggagaaaagcagcgagtcgcaattgcaagagcaatggttaaagcgcccagcatcttatttgcggacgagcccactggaaatttagaccaatcaagcactgacaatattctcgatctattactgggaatcaataaacaaacaaagacaaccttggttgtcgtaacacatg

SEQ ID NO: 270577 - DNA, 682 bp, Unknown
  Bacterial polypeptide expressing nucleotide sequence isolated from the Sargasso Sea
tctggaagacgtgagttttaccattcaaggtggtcaaacggttgctttggtgggaccttccggggcaggaaagacaactctggcgcaactgctgatgcgtttttgggatccttccgagggagccatcctactttcaggaattgatatcagagaatacggacttgaagcactccgctcaaaaatcgctctcgtcgctcaggatacctatctgtttaacagcactctcaaagaaaacatccttatagcaaaaccaaatgcaagctaccctgaaatgaaaaaggccattcaaatggcatctttgacggaacttgtcgaaactctgccgcagggttttgataccaaagttggagaaagaggaaccagtctttctgggggccaaaggcaaagggttgccatcgcaagagcttttctgaaagatgcaccgattttaattcttgatgaagccacctctcatttagatgctttgagcgaaagtgaagtacgtggcgccctggacaaactcaaagaagaccgcaccaccatcatcattgcacaccggctttcaaccattcgaaatgctgacaacattatcgttctcgatggcggaagaattaaggagtcagggaaccacgatcagttattgaagaagaacggactttattcccaactggtctacaagcaaatgaatttttcaagaggataa

SEQ ID NO: 270578 - DNA, 1117 bp, Unknown
  Bacterial polypeptide expressing nucleotide sequence isolated from the Sargasso Sea
gatggggacaatttctttaaagaacatcaataagtcatttggttcaactgaggtacttaaacaactaagccttgatatccaagatggtgaatttttaacattagtcggtccgtccggttgcggcaaatccactttgttaaaaattattgctggattggaacaacaaaatagtggcgatgtaattattgatgataagaatgttaacagcaccagagctagcaagagagacttagcaatggttttccaatcctacgctctttacccgcacctgactgtcagaaaaaatctagaaacacctttgaaattaagagactatagttttgtagagaggttgcctcttattggtaattttgtacctagtagaaaagaaaaaaagaaatcaattgatgaccttgtttttaaaacatctgaaactttaaaaataacagaactacttgataggaagccaggtcaactatcaggtggtcaaagacaaagagcggcactaggaagagcgatggtaagagaaccagttgcattcttaatggatgaacctttatcaaatcttgatgctgcattaagagttcatatgagatctgaactatctgagcttcataattctttaaagaccactttcatttatgtgacgcatgatcaagctgaagcacttacaatgtcaactcgaatggctgtaatgattgatggggaacttttgcaacttgatacaccaagtgaggtttataataatccatcatctttaagggttgcagaatttgtcggcagcccaaagattaacacatttgctgctcagattagctctgatggttctgttgaatttatgggtattaagcttgaaagaaaatttaatactaatagtcaaaaagctttagttgctgtgagaccagaacatttagaaattacaaaagactcaaacaaacctgcatttgaggctacagtttcatacagagaaaaccttggttcggatatattttaccatgttcaagttgatcaatctgactctaagatcatagtcagaggctcaccagctggactgatttcaaatggggaaacagttagaataagtccttctcatgcagaggctatgctttttgaaacatccggtgagcgtatccgataa

SEQ ID NO: 270579 - DNA, 1066 bp, Unknown
  Bacterial polypeptide expressing nucleotide sequence isolated from the Sargasso Sea
attgcttgaccatatttcttttaaaccaacagaggaataccatttaaatgatattagtttgagatttgactcaggaaaaatgtatacgatattaggtagaactttatcaggcaaaactacacttttgaaaactattgctggtcttcaaacacctgactcgggatctataaattttgaagatacagattttttgtcaattcctgtttggaaaagaaatgtagcgatggtgtatcagcaatttataaattatccgcatttaaatgtcagagataacatcgcctttccactaaaacaaaggaaaatggatgaaaatttaattgaaaaagaagtcaaagttgcgatggagaaagttggtttgatcggttttgagtcaagaaaaatccaagaactatctggtggacagcaacaaagagttgctctcgcaaggtctctggcaaaaaaagctaaaatacttttattagatgaacctctcgttaaccttgattacaaattaagagagggccttcgagaggaatttaaaaaacttttcaatgtatctgatgagtcaaactcaattttaatttatgctagcacagaccctttggaggcgatgcaactcaacggtgatattattgtaattgatgaaggtaaaatacttcagacaggtacagctaaagatgtatttgaaaatcctgcaactgctaaagttgctgaaattactaatgaccctgcaatgaatatcaataaatgtcttatacaagataattctttgataatgaatgatagcgttcaaatccaaatccctgatgaactcaagtctgtacctaacggaaagtatttagtaggcattagggctacagatatatttcttgatgatcaaggttttccttttgacgtagaaatttctgaaatatcaggttcagagacctttcttcacttacgtaataaaaatttaaaatgtgttgccacaattgaagaggtaaaaacctataatacaaatgaggttgtaaaaattaattttgataaatcaaaaatttatttatttgaggagtccggggaactgcgacattctccctatcaacaataa

SEQ ID NO: 270580 - DNA, 1669 bp, Unknown
  Bacterial polypeptide expressing nucleotide sequence isolated from the Sargasso Sea
aatggctcagtttgtttacagcatgctgcgggtgggcaaggttgttcctcctaagaagcagatccttaaagacatttccttaagctttttccccggcgctaagatcggtgtgttaggtcttaacggttcaggtaaatccaccctactgcgcatcatggccggtatcgataccgagattgagggtgaagcgcgcccaatgccagggttgaagattggttatctgccacaggaaccaaaactcgatccgacgcaaaccgtgcgtgaagccatcgaagaagcggtttctgaagccaaaaatgccctcaaacgcttagacgaagtctatgcggcttatgccgatcccgatgcagactttgacgcgcttgccaaagagcagggcgaactcgaagccatcattcaggcgcaggacgcccacaatctggataacatcctcgagcgtgcggcgaacgccctgcgtctgcctgattgggacgagaagattgaagtcttatcgggtggtgagcgccgccgtgtagcaatttgtcgtctgctgctggaaaaaccagagatgctgctgctcgacgaacccaccaaccacttggacgccgaatcagtcgcttggctcgaacacttcctgcaggaatactcgggcaccgtggtggcgattacccacgaccgttacttcctcgacaatgccgcgggctggattttagaacttgaccgtggtgagggtatcccatgggaaggcaactattcttcatggcttgagcaaaaagatgcccgtttgaagcaggaatctgccgcagaaagcgcgcgtcaaaagaccattgcgaaagaattagaatgggttcgccaaggtgcgaaaggccgtcagtctaagggcaaagcccgtatggcgcgcttcgaagagctgaacacctctgattaccaaaaacgtaacgaaaccaacgagctgtttattccgccaggacctcgcttaggcgacaaagttatcgaagtgaataacttaactaagtcctacggtgaccgcgtgctgatcgacaacctgtcgttctccattcctaagggcgcgatcgtcggtattatcggtgctaacggcgcgggtaaatcgaccctgttccgcatgctgtctggcagcgagcagccagatagcggcaccatagagctgggtgaaaccgtgcaattagcgtcagttgaacagttccgtgactcaatgaatgacaagaacaccatttggcaagaaatttccggtggtcaagacatcatgcgtatcaacaacatggaaatcccaagccgcgcctatgtgggccgcttcaacttccgtggtgcggatcagcaaaaggttatcggcaccctgtcgggtggtgagcgcaaccgtgttcacttagctaaactgctgcaagcgggcggtaacgtactgctcctcgacgaacccaccaacgacttagacgttgaaaccctgcgcgcactggaagaagcgattctcgaattccctggttgcgctatggtgatttcgcacgaccgttggttcttagaccgtattgcgacccacattctggactaccgcgacgaaggccaagtgaacttctacgaaggtaactacacagaatactcggcgtggttgaaaaacacctacggtgccgatgtagttgaaccacaccgcttaaaatataagcgtatgaccaagtaa

SEQ ID NO: 270581 - DNA, 514 bp, Unknown
  Bacterial polypeptide expressing nucleotide sequence isolated from the Sargasso Sea
atgacgtcttcaaaaagttttgtaaaatttgataaggtagacaaaagttatgacggtaaagttttagtcgttaaagacttgaatcttgacatcaacgaaggcgaatttattacaatgttgggaccatctggttcaggaaaaacaacttgcctaatgatgttagcaggttttgaaacgcctactaatggtgaaatttatttagactcaaaacctatttctagaattcctccacacaaaagagggataggaatggtttttcaaaattacgctttatttcctcatctaacagtttatgaaaatttagcttttcctttaaaagttagaaaactttcaaaagatgatattgataaaaaagtcgataaagctttatctatggtttctttatccggatttgaaaaaagaatgcccaatcaactatcaggaggacaacaacaaagagtcgctgttgcaagatctctagtatttgatcctcaattagttttaatggatgaaccattaggagctttagataaaa

SEQ ID NO: 270582 - DNA, 1072 bp, Unknown
  Bacterial polypeptide expressing nucleotide sequence isolated from the Sargasso Sea
atgtcggttaagccaaagctgttaattgcagacgaagtaacaaccgcgttagatgcaaacctacgaaatgacattcttgatttgattgacgagttgcgagaccaagaaaagacaagcgttttattgatttctcatgatttattacttgtaaaaaatcgttgtaaaaaaatagcagtaatgaaatcagggaaagttattgagtgctctaacacggagatgctgtttaagaacccaaaacaaaaatattcaagaaaactaattgatgctctggattataaaaagtcaaaagatgtaagcaaaaaacatgaaaccgatattcttttttcaataaaaaatctttataagacttacgtttcacaaggcaaagaccatgcagcattaaaaaatattaattttgatatttataaaaatgagattcttggaattgtaggtgaatcagcgagcggcaagtcaacattggcaaaaattttgcttcaaattgttccacaagacaaaggtgatataatgttttacagtacaggaacaacacccactatacatgaaaagccaaacaggttaataggcgctgtttttcaggatacgcttgggtcattaaaccctagaatgtctatctttgatatattaatggaacctcttgaccttactgacggtttagatttagatactaaattaaacaaattgaataaatgcatagaaagcgtaggtctaagcacagatctcttaaaaaggtatccccatatgttatctggaggccagcgccagcgggtatcaattgcaagagcgctaatgacggacccttctttattaattttagatgaaccaacttcagctctagatgtcaagtcacaaaaaactattttaaaattgttgagatccttaaataacgacaaaagattaacaatagtgttaatttcacatgatttacgaatcgttatggaaactgtagatcgattagctgtattatataaaggagaaataattgaaacaggcaacccaagtacaatttacaacaaccctcagaggtcgtatacagagagcctaattagatcagagcaggataatgaaaaataaa

SEQ ID NO: 270583 - DNA, 739 bp, Unknown
  Bacterial polypeptide expressing nucleotide sequence isolated from the Sargasso Sea
atgaaaaatttagtggaagttaaaaatataaaaaaaaattacggaaagaatgaagctgtcaaaggtataagttttaacataaaagaagacgaaattttaggtctattaggtccaaatggctcaggcaaaacaacaactataggtatgttattgggacttttaaaaccaactagtggagaaattttaataaatggtcaaaaattggaagggaatagaattgaaatcttggaacagattaacttcatatctccatatattgaattaccaaaaaaacttacagttaaacaaaatctaactgtttatggaaaattatacaaaataaataatattaatgagaggatcgaatttttatcagaaaaattaagattagaagatttgcttaatagcattacaggtgaattatcatctggacaaaaaaatagagtaagtttggcaaaagcattaatcaacgaaccaaaagtattactattagatgagccaactgcatcattagatccggaagtaggtgattttgttagatcttttttggaagattataaaaaagaaaaaaaaatatctatacttcttgcctctcataatatgaatgaagtcactaggctttgtaaatcaattctaatgatgaaggatgggattattatcgatgaaggaaatcctaaagaattaatcaataaacatggcagaaaaaacctagaggaagtttttttaaaattatcaaggagcaaaaatgagcttaactaga

SEQ ID NO: 270584 - DNA, 1062 bp, Unknown
  Bacterial polypeptide expressing nucleotide sequence isolated from the Sargasso Sea
tacagttcaaacaagagatacttaaattacttcaaagtcttcaacaaaaatatcaaatgtccattttatttattactcatgatctgactattgtcagacaaataagtgatagagtttgtgtaatgtataatggaaaaataaaagaaacaggtattacaaaagaaatttttgaaaatccaaaagatgattatacaaaacatttattgtcatcagagccagaagaaagagatttacattatgataaaaatggaagaagtatactttcaggagaaaatcttaatgtaacatttaatactaaagtaaaagtatcaggtagaaataaagttttatcaattaatgctgttaataatatcagtctctatcttaaagaaggtgagactcttggaattgttggcgaaagtggatctggtaaaactactttaggtcaaacattattaaggttagttgatagagaatctaacacagatgtagaaggtgaaattaagttttttgatgatcgaattgacagtttatctagaaagcaatttaagccatttagaaatcaaatgcagatagtttttcaagatccatatgcatctttaaatccacgattgtctgttaaacaaattatagaagagggattaattgtagcacttaatatgaaagataaaaacgaacggctaaataaaattgaaaacataatgagtgaagttggtttagaacctagttccatgcttagatttcctcatgagttttcaggaggtcaaagacaaagaatagctatagcaagatcatttgtcttaaatccaaaatttgttcttttggatgaaccaacatctgcgcttgatttatctattcaaaaacaaattctagaacttttactacaactacaaaaaaatcacaaaaccacttatatttttatcagccatgatttaagagttataagatcaataagccacaatttaatcgttatgaaagatggttcaattctagaacaaggtgtggcaaaaaatatattaaccaaccctcagaatgattatacaaagaatttaataaaatctgcttttgatattatttattaat

SEQ ID NO: 270585 - DNA, 1318 bp, Unknown
  Bacterial polypeptide expressing nucleotide sequence isolated from the Sargasso Sea
atggcgcaatacgtttacagtatgcatcgcgtgggcaaaatcgtcccaccaaatagacacattttaaaaaatatctcccttagctttttccctggcgccaaaattggtgtgctaggtctaaacggtgcgggtaaatctaccttacttcgcattatggctggcgtagataccgatatcgaaggtgaagcgcgccctcagccaggtttgaaggtgggctaccttccacaggagcctcagcttgatgaaacaaaagatgttcgcggcaacatagaagaagccgtcgccgacgttaaacacgcattaactcgccttgatgaagtgtacgcagcctatgcagaagcggatgctgattttgacgcccttgcaaaagagcaaggtgagcttgaagccattattcaagccaaagacggtcacaacctagaaaatgccttagagcgtgccgctgatgcacttcgccttccagcgtgggatgcggatgtaagcaaactatcaggtggtgaacgccgccgcgtggcgctgtgccgcctacttctagaaaagcctgaaatgttgcttctagacgaacccactaaccacttagacgcagaatcagtcgcatggctagagcgtttccttcacgattatgaaggtacggtagtcgctattacccacgatagatacttccttgataacgttgcaggttggattttagaacttgaccgtggtgaaggtattccgtgggaaggtaactactcttcttggttggagcaaaaagaaaaccgacttgagcaagaagagcgtaccgaaacggcacgtatgaagagcatgaaacaggaacttgagtgggtacgctcaaacccgaaaggtcgtcatgctaaaagtaaagctcgtatggcccgctttgaagaactatctaccagcgattaccaaaagcgtaatgaaaccaatgagcttttcattccaccaggtgaacgcttaggtgacaaggttattgaagtaagcaaccttaaaaagtcgtatggcgatcgcgtacttatcgacgacttaacgtttaaagtaccaaagggtgccattgtaggtatcgttggtcctaacggcgcgggtaaatcaaccttgttcagaatgcttactggtgctgagaaacctgattcaggcaccatcgatttaggtgaaaccgttcaaattgctgcggtagaacagttccgcgaccacatgaacgaaaacaacaccgtgtggaaagaaatttctgacgaacaagacattattcgcattggtaactttgaaattaacagccgcgcctactgcagccgttttaactttaaaggcaccgaccagcaga

SEQ ID NO: 270586 - DNA, 706 bp, Unknown
  Bacterial polypeptide expressing nucleotide sequence isolated from the Sargasso Sea
atgctaactatgaataaaatcagtaaatcttttatcacggacgatgtggccactcatgcgctgcgcgatattcagctgcatgttaacgaaggcgactttgtcagtgtgactggcccatcaggctcaggcaaaaccacctttttaaatattgccggtttacttgaaaccagcagcagcggcgaatacctgttggatggtgaagacatcgccaagctcaacgacagcggccgctcacggatgcgcaatcagaaaataggttttattttccaaagctttaaccttattccggatttaaacctgttcgacaatgtcgatgtgccattacgttaccgtggtttaaatgccagcgagcgcaaaaaacgtattgaataccatctggatcaggtcggtttagcctcccgaatgaagcacctgccaagccagctgtctggtggtcagcagcaacgtgtcgctatagcccgggctttagccacctcaccacgctttctattagcggatgaacctacaggtaacctcgacagccagatggcacaaagtgtgatgagccttttggaagacatcaataaagccggcaccactattttaatggtgacgcatgacccaagcctggccgcccgcgctaaacgtcaaatttatatcaaagacggtcatgtcagcgagctgaccaaccaaaactcgaacctgcatctggttggcgaagcttaag

SEQ ID NO: 270587 - DNA, 1588 bp, Unknown
  Bacterial polypeptide expressing nucleotide sequence isolated from the Sargasso Sea
tatgaaaaatatagtagaggtaaaaaatttaagtattaattttaaagttagagatggatcattctctgctgtaaaagacattagttttaacatcgaaaataataaaactttagctttagttggagaatccggctcaggaaaatcagtaaccgctatgtcgattatgcaattgttacccatgccacaagcgtcattcgatttgccttcatctataacattcaacggcaaagaaataattggtgcttcaaaaaaagatcttctctccataagaggtaatattatttctatggtttttcaagaacctatgacttcattaaatccttatcataaagttggcgatcagattactgaatcagttttacttcataccgataaatcaaaaaaagaagcttatgaagaagcaattgaattaatgaggcttgtagaaatcgatgatgttgagagaagatttaaatcttatcctcatgaattatctggagggcagagacaaagaattatgatcgcaatggctttggtgaataaacccaaactcttaattgctgatgaaccaacaacggcccttgatgtaaccattcaagcacagattcttgatttaatgtctaaattaaaaaaagaattaggaatgtcaattttatttattacacatgacttaggtttggtgaaagaattttctgatcaagtttgcgtcatgcaggatggaaaaattgtcgaacagggtaatacttctactgtctttgaaaatccgtcacatccatatactcaaaaacttcttaatgcagagcctcaaccaaaagaaaatatcaatggtgaactaaatcctttgattgaaattgatggcctaaatgttttttatacaatgccatcaataaattttctaaagaaaaataaatttcatgcagttaaagatgtatctcttaacatatacaagaatacaactattggtttagttggcgaatctggttctggcaagtcgactcttgggaaagccattgctaatttaattaattttgatggaaaaatagcatttaatggtcaagaaatcgcaaaatcttctaaggatataaagaaacacatacaaatagtatttcaagatccatatggatcattgtctcctcgtatgactgtaggagagatagttggagagggacttggagttcattttagattgagtaaaaaagaatccacttcaagaatagataaagttttaacagacgttggtattgaattgagctcaaaaaataagtatccccatgaattttcaggaggacaaagacaaagaattgcgattgcacgctcattaataatgaatcctgcatttatgattttagatgaacctacatcagctttagaccgctcaattcaaattcaagttataaacttattaaaagatattcaagatgagtataagcttacatatttatttatcagccatgatttaaaggttataagatcaatgtcagattatatttttgtaatgaaagatggaaaaatagtagaatctggcatctcgagtgatgtttttgagtatccaaaagaaaaatatactaaaaaattactcgcagctgcgttaagatacgcatccgattaa

SEQ ID NO: 270588 - DNA, 679 bp, Unknown
  Bacterial polypeptide expressing nucleotide sequence isolated from the Sargasso Sea
atgattcgtcttgagaaactgagcagaaagttccaagttggaaatcaagttgttcatgcgcttgacgaagttgaccttgaaatcaatacgaatgattatgtttctatcatgggcgtttcaggatcaggtaaatcaacccttctaaatatcttaggcctcttagatacaccaacttctggtgattacattctttcaggcatcaatacatcaaaaatggacgacgacgaaatggctggtattagatcagcaaagattggatttatatttcagtcttttcatttgatccccagattgacagcatttgaaaacatcgagatgccaatgatcctatcaggaataagcccaaatgagcgttcgatgaaggttgactcagcacttgaaaaagttggtttgaccgatcgcgctgaccataagcctgagcaattgtcaggaggacagagacaaagagttgcaattgccagatccatagtgatggagcccgatgttcttcttgcagacgaaccaacgggaaatcttgatacaacatcaggcaatgaggttgttaaattaattgaagagctcaactcagctggactgactctgatcgtagtgactcatgatcgagaaatgggagagagatccaatcgcttaattgagttgagagatggaaagataatcaatgatcagagaaagccttaat

SEQ ID NO: 270589 - DNA, 1054 bp, Unknown
  Bacterial polypeptide expressing nucleotide sequence isolated from the Sargasso Sea
atgagctttttagatttaaaaaatgtgactaagatttacccaaatggaactaaggctgttcatgaaacttcattaagtgttgatgaaggtgagtttatggtttttgtaggacctagtggatgtggaaaatcaactttattaagaatggttgcaggcttagaggatattacagagggtgatattaatcttgatggaaaattaattaatgaggtagatccgtctgaaagagatgtagcaatggtgtttcagaactatgcattatacccacatatgaatgtttataataacttggcttatggtctaaaaaacagaggaattgacaaagaaacaattgagcaaaaagtaaatgatgcagctaagctgctacaaatttcagattatttacagagaaaaccttcaatgttatccggaggtcaaagacaaagagttgcaatgggtagagcaattgttagaaatcctaaaatattcttatttgatgaacctctttcaaacttagatgcaaaattaagaattcagatgagacttgaaatcaaaaaacttcagcagaaagttggagtaacaagcatatttgttacgcatgatcaagtagaggccatgacacttgctgatagattagcagttattaacaatggaattattgaacagcttggaactcctattgagatatatgataatccaaaatcattatttgttgctggttttattggctcacctcaaatgaattttttagatggtaatataaaaaataaaacattatctgcagaaggttttgaaattaaagatattgatagtgactttgagggagaagtaaaattaggaataagacctgaacatttaagtcaaagtgaaaatagtttaattaatttaaaagtagacttagtggaacaacttggttcggataatcttgtttatggtcaattaaaagacaaaaaagacttttgttataggtgtccgggaaatctaactattgaaaaaggtgctgatctaagtcttaatattgagaacaataaatattatatttttgataaaagcactggcaaaagagttaattaat

SEQ ID NO: 270590 - DNA, 748 bp, Unknown
  Bacterial polypeptide expressing nucleotide sequence isolated from the Sargasso Sea
atggcttttcttgagataaattcactggttaaaaaattttctgagactacagctctaaatgatgtttctttaagaatatcagacggagagatggtaggtataataggtaagtctggggcaggtaaatcgacacttatgagattaattaatcgtctaatcgaaccaacaagcggatcaattagttatgatggagttgaagtcacttctttaaaaagaaaaaacttaagacaatggcgatcgaagtgtgcaatgatttttcaacaattcaatttaattgatcgcttagatgtattaacaaatgtcttaagtggaactttaggtataaactttaacttattgaaattatttaaattttatagcaaaaaagaaaaaattgaagctttaacataccttaataacttagatctctctgataaagcacttcaaagagtcggaacactttctggaggccagcaacaaagggtggcaatcgcaagagcaatgatgcaaaacccaatgattttacttgccgatgagcctatttcatctttggatccaaaaaactcaaaagttgtaatggaggatattaaaaagattaataaacaagacggtatcatggtgatatgcaatctgcactctcttgagatagctagagaatattgtgatcgtttgattggtttatctgatggaaaaatagtgtttgatggacatccatcctcgctaactaaggaattagcggagcaattatacgatttagaaaatgaatgat

SEQ ID NO: 270591 - DNA, 679 bp, Unknown
  Bacterial polypeptide expressing nucleotide sequence isolated from the Sargasso Sea
aatgattattaaaactgaaaacttaacaaaagactacgagacaggaactcaagttgtcaatgcgcttaagggaattaatttatcagttgaaaaaggtgagtttttatcaattatgggtccatcaggatctggcaaaacgacactaatgaatattattggttgtttagattctcctactaatggatcctattatctcaataataaatcagtaagtaagttagatgatgatgagcttgctaaaataagaaatgaggagataggttttgtttttcaatcatttcatttattagcaagaaatactgcatttgataatgttatgttgccattaaaatatgctggggtaagtaaagaagaggctacaaaaagatcaaataatgtattagatcttgttggtttatcaagtcgatcaaaacatacacctgcggagctttcaggcggtcaacaacaaagagttgcaattgcaagagctcttgtaaatgaacccagtattttatttgcagatgaacctactggaaatttagattctaaaactggtgaagatgtaatgaagattttcaaggatttaaataaaaatggccaaacaataattttaattactcatgaagatagcattgcaaaacaatcgaacagaattataactattatggatggtctgatagaatcagattttagggaatga

SEQ ID NO: 270592 - DNA, 967 bp, Unknown
  Bacterial polypeptide expressing nucleotide sequence isolated from the Sargasso Sea
ctggtggccgacggcctcgcgaaacactattcggtgaagcgcgggatgttcgggcagggtacggtgaaggcgctgaacggcgtgtcgttctcgctgaagcgcggcaagacgctcgccgtcgtcggcgaatcgggctgcgggaagtcgacgctcgcccgccagctgacgatgatcgagacgcccacgtcgggcagcctgaccatcgacggcaagaacgtcgccggcgcaagccgcgagacggtcgccgacctgcgccgccgcgtgcagatggtgttccagaacccgttcgcgtcgctgaatccgcgcaagaccgtcgagcagacgctttccgagccgctcgagatcaacgcgaacctgactgccgcggaacgtgcgcagcgcatcgcgcagatcatgcgcacggtcggcctgcggcccgagcacgcgaagcgttatccgcacatgttctcgggcgggcagcgccagcgtgtcgcgatcgcgcgcgcgatgatcctcgatccgcgcatcgtcgtggccgacgagccggtgtccgcgctcgacgtgtcgatccaggcgcagatcctgaacctgttcatggatctgcaggagcagttcaagacgagctacgtgttcatctcgcacaacctgtcggtggtcgagcacgtcgcggacgacgtgatggtgatgtacttcggcagcgtcgcggagctgggcgacaaggcgacgatctacgcgcggccgcgccatccgtacacgcgcgcgctgatgtcggcgacaccggcgatcttcgaggaagaccgccgcgtgcagatcaagctgcagggcgaactgccgtcgccgctcaatccgccgtcgggctgcgcgttccatcagcgttgcccgtatgcggtcgagcgctgccgggtggaggagccgcaactgcgcgaggtcgacggccggcgcgtggcctgccatcgggccgaggaagtcggggaggagaatgcctgaa

SEQ ID NO: 270593 - DNA, 1414 bp, Unknown
  Bacterial polypeptide expressing nucleotide sequence isolated from the Sargasso Sea
actcaaagacttctctggtggatggagagtaagactcaatctagcaaaaactttgatgcaacctgcagatctacttctcctagatgaacccactaatcacctagatttggatgcgattatatggcttggtaattggattaaatcctttaaaggggcaatgctattaatctctcacgatagagaatttttggatgaatgcgtaggttttatagctcatctgcacaacagtactattgaactatataaaggtaattattctcaatttgagattagaaaagctgcgcgattggctgaattagagagtaattacaataaacagcagcgtgaaatatctcatatgcaagattttgttagaagatttaaagctaaagcgactaaggctcgtcaggcacaaagtagaattaaagcactggaaaggatggagctgatagcaccagcacatattgactcaccattccaatttacaattcctaagacagaaaaaatctccaatccattgatcgtacttgaagatgctgatttaggttactctgatgcaattataaacaaagtaaaaattgccttccgtccaggagatagaattggattattaggagtaaatggagctggtaaatcaacgtttgtaaaaagcctcaaaggtgatctgcaactacttcaagggaataagacagaaggaaaaaatttaaaaataggatacttctcacaacatcaggtcgatgatcttatgttagataaaagtcctatagatcatttagccaaagtagaaaaaaaggcaacggaatctgaaataagaaattttttgggaggtttcaacttcagaggcgataaagcaaaagatgttataaaaaatttttccgggggtgaaaaagcaagattagcacttgcaattatagcctttcaaaaaccgaatcttttgttaatggatgaaccaactaatcatttagacatggacatgaggcaggcactaacagttgcccttcaagatttttctggcgcaattgtccttatatcccatgataggcatttactcgcaaacacagttgatgagtttttaattataaatgaaggaaagatagaaagatttaatggtgacttgttagattatcgaaaaatgattctacaagggccacataaagaaagttttaaaagcaaaaaagacaacgaagacaaagtcaaagacaaaaaggatcagaaaaaaattaaaaatcaaatcttagctatcgagaaaactctcaaaagattaaatagaaaattagctgaaacacaggaatttcttaattctccagagctatataatgactcttcaaaaatgaatttacatgatctcctaagagatcaggtaaatttagatacagaaatcaaatctactgaacaagagtggcttgaactgaatgaagaacttgaaaatggttaa

SEQ ID NO: 270594 - DNA, 1169 bp, Unknown
  Bacterial polypeptide expressing nucleotide sequence isolated from the Sargasso Sea
agccctgctcgaccgcgtgatcgtcaagtggcgtcaccgcacgcgccgtacatggattcgcggcacgatcaacggcggcttgcaaggcggcatgctggtcgcgatccaggccgccattctcggcgccgcgctgctgttgtggatgcgcggcgaagcgagtgtcggcgacatcacgttcgcgttgacaatgttcttcatgctgcagggctatctgcgcgacgtgggcatgcacatccgtaacctgcagcgctcggtcaacgacatggaagaactggtgcaactggagagccagccaccgggcatcgaagatcggcccggcgcgggtccgatcgcgatcggcaaaggcgaaatccgcttcgagcacgtcaccttccactacggtgcgaaagccacgccgctctacgagaatttctcggtacgcatcgcgccgggggaacgcgttgggctggtcgggcactcgggctccgggaagacgaccttcatcaagctgatccagcggctgtacgacatttcggaaggccggatcacgatcgatggccaggacattgcccgggtgcggcaggcgtcgttgcgcagccagatcgcgatcgttcagcaggagccggtactgtttcaccgctcgctggcggagaacatcgcctatgcacgacccggcgcgagccgcgccgagatcgaacgagctgcgaggctcgcgagcgcgcacgactttatcgcgacgctgcctcaaggttacgacacgctggtgggtgaacgcggcatcaagctctccggcggcgaacgtcagcgcgtggcgatcgcacgggcgtttcttgcggacgcgccgatcctgattctggacgaagcgacctcgagcctcgacagcgaaagcgaagtgctgatccagcaagccatggagcggctgatgacgggccgcactacgctggtcgtggcgcaccgcctttccacggtgcgtgcgctggacaggctgctggtgctggacaagggcaaagtgatcgaggaaggcagccacgatgccttgatcagactcgaaaacggcctttacaggcggctgttcgaacgtcaggcgctggaattgatcaagggcctgggcgattcggaggtcacgcgcaagaccgataacgcaaaggcgaatctgccggatgattcgagcttgctagtcgagaagtaaa

SEQ ID NO: 270595 - DNA, 1663 bp, Unknown
  Bacterial polypeptide expressing nucleotide sequence isolated from the Sargasso Sea
tatggctcagtatatttacagcatgtaccgcatgtcgaaagtagtgccaccaaaacgcactattttaaaagacatttcgctgtcgtttttcccaggtgcaaaaattggtgttttgggtttaaacggctcaggtaaatccagcttgctgcgcattatggctggcgtggacacagagtttgacggtgaagcccgtcctttagccgggatcaatattggttatctaccgcaggaacctcagcttgatccggaaaaaactgtgcgtgaagtggtagaagaagccgttgctgatgtgaaaaacgccttaacccgtttggatcaggtgtatgcagcttacgcagaagaagatgcagactttgacgctttagcccgtgaacaaggtgagctggaagccattattcaggctaaagaaggccataacctcgataatattcttgaccgtgctgccgatgcgctgcgtctgccacagtgggatgcgctgattaaacacttatcaggtggtgaacgccgtcgtgtggcgatttgtcgtttgctgttagaaaaaccagacatgttgctgctggacgaaccgactaaccacttagacgctgaatctgtggcctggttagaacgtttcctgcacgattacacaggcacagttgtggctattactcacgaccgttatttccttgataacgtagctggctggattttagagctggaccgcggtgaaggtattccgtgggaaggtaactactcgtcctggttagagcaaaaagatgcccgcctggagcaggaagaacgcagcgaaaacgcccgtcagcgctctatcaagcaagaattggaatgggttcgtaccaatccaaaaggccgtcatgccaagagcaaagcccgtatggcacgttttgaagaactgcaaagccaggacttccagaaacgtaacgaaaccaacgaactgtttattccgccaggaccacgtttaggcgacaaagtgctggaagtgaaaaacctgcgtaaaacttttggcgatcgcgtcttgattgacgatttaagcttcagcattccaaaaggtgccattgtaggtattatcggcccgaacggtgctggtaagtcgacgctgtttaagatgatcaccggtatggaacaggctgatggcggcactatcgaagtgggcgatacagttcaaatcgccagcgttgatcagttccgtgacagcatgaatccgaaaaacaccgtatggcaggaaatttccaacggtcaggatattctgcagattggtaacttccaaattccaagccgtgcttatgttggtcgctttaactttaaaggcaacgatcagcagaagtttatcggtgaattgtctggtggtgagcgtaaccgtgtgcatttggctgcgctgttaaaagctggcggcaacatgctgttactcgatgaaccaactaacgatttggacgttgagacattacgtgctctggaaaacgccatcctcgacttccctggctgtgccatggtgatctcgcacgaccgttggttccttgaccgtattgccactcatattctggattaccgcgacgaaggtaaagtgaacttcttcgaaggtaactattcagactacgagacctggatgaaagccacctacggttcggatgcaatgcaaccgcaccgcattaaatacaagaagatctaa

SEQ ID NO: 270596 - DNA, 808 bp, Unknown
  Bacterial polypeptide expressing nucleotide sequence isolated from the Sargasso Sea
atgagcggtcttgagatccggcggttgcatgtcgcctacgaaggtgtccgcggcgcggcgccgaccatcgcgctcgccgacgtcgatttgcgcatcgagcccggcgaattcgtcgtcgcgctgggtgcgtccggttgcggcaagacgaccttgctcaattgcatcgccggcttcattcaaccgaccggtggcgaggtgcggctgaacgatgcacccgtgcttgggccgggcgcggatcgcggtgtcgtgtttcagaaatacgcgctgatgccctggctcgacgtgctcgacaacgttgcgctcggtttgcgttttcagcgcgtgccgaaggcgcagcgcgaacgcatcgcgctggagaagctggccctggttggccttgagaagcatgcgcactcgcgcgtctacgcgctgtcaggtggtatgcagcagcgcgtgggcattgcgcgtgcgctggcaagcgatccgcaagtgctgctgatggatgaacctatgggcgcgctagacgcgatgacgcgcgagtcgatgcaggaactcgtgctggacgtctggggccgcacccgcaaaacagtgtttttcattacgcacagcgtggaggaggcactgtttctggcgacccgcctcgtggtaatgacgccggggcctggccgcatcgccgagagctacgacctgccattcgcgcggcgctttctcgagacacgcgatgcgcgcgcggtcaagtcgtcgccggagttcatcgaatggcgcgagcggctggtgcgccgtctgcacgagcgaaatgaacggaatcaggaagaggtgctgtcgtgac

SEQ ID NO: 270597 - DNA, 2182 bp, Unknown
  Bacterial polypeptide expressing nucleotide sequence isolated from the Sargasso Sea
ctagatggaatacagggacttgcaaccctgaaatcattcggacagagcaagactagagctgacttgcttacaaaacgtgcctatgaactttttcgaagcacaatgtgggtgcttgctacaaatgtattgtctcgtggaattacagatacatctatcgccctaggagcagcaacagcactaggatacggtgcatatcgcacaacaaccggagaaatggaacttactacattgctgataatacttatgatgggtgttgaaatattcagaccaatgcgagatcttcgcacagttttgcatcagggaatgatgggcctatcagctgcacatggggttttcaagattctcgatgcaagtcctgcagtaattgagaaaaaattagaaaatattgaaactgtcattgaaccttcagtttcttttgattcagtaaaatttaaatatcctggacacagtcatgttgtacacagctctttgagctttaatatcaaaaaaggagaacgcgttggaattgtaggttcaagtggatgcgggaaatcatctatagtcaaactgcttctccgcttccatgatccagtgcaaggatcagtacatataggaggaaaagatcttagagatatttcattcgaccagattagaggtatgatctctgttgtgcatcaggacacatttttatttcatggtaccattgaagacaacattaaaatgggcaaccctaaagccaatgaagacgagattataaaagcagcaaaaaatgcgaacatacatgagtttgtttcaacacttcctgacggatacaaaactttaattggtgaaaaggggatcaagctctcgggagggcaacgtcagcgggtagccattgcaagagctctcctgagggatacgcctatactcatattggatgaggctctttctgcagtagatgctgaaaatgaatttataatccaacaggcacttgatcgtttgatgaaagaccgcacaacactggtattggcacatcgactctcaagtattgttaaatgtgacagaatcctagtaattgaccagggaataattgcagagtcaggttcacatcagagcctgatgcaacaggacggtatttattcagttcttatgtctcagcaggtacgtgaatcagaatcaaagggcttgctggttaaagaaaaagaatcggttatttttgaagaaaaagaaagagagcagttaaaagagactgtaatgaatgttcctacagaaggtattgtaaaagcagaaggcctaaactggaaacaattaattattgagctgatgcgtcacatctttccctggaaagggagacttgctctatccttttgctttggtgttcttcgtgttctgtcttttataggtgtcggtatattcagcgcacttatagttctcgatttgaaaaatggtgatgattattcttctcaccttagctggcttattactgcagcaatactatctggcatacttcactggcttgaatcatggatagctcatgatatggcattcagattactttccgttatgcgtatcaacgtctttaagaaacttgacttacttgctccagcttatcttgtgagacggaggacaggtgatttgatgggcattgcaacacatgatgttgaactagttgagtatttctttgcacacacagtagctcctgtttttgtctctatcctgattccagccacagtagttgtcattttaagtgttaacagtttctggatgactcttgcacttttaccatttttaattgcagtcggattaagtccatttttgatgaggaaacgagtcgacatgctcggatctaaagccagagaagctgcaggagaactttcagcacatgcgattgattcagtacagggacttgcagaaattgttgcataccagcagggttcatacagaggaagatcttttgagggacttactgaccgacacatttcactgaggctcccttttttcaaagaactaacacttcaaagcaacatgctggaagtgctcacaggctggggtggtcttgctgttgtaagtacaggtgcactgcttacagcgaatggtcacttcgattcaggaatactgccgctcatgacaattttggcaatgtcagcattccttccagtttcagagatagctcagataggtaggcaactcgcagacacacttggtgctaccaggagagtgtacg

SEQ ID NO: 270598 - DNA, 794 bp, Unknown
  Bacterial polypeptide expressing nucleotide sequence isolated from the Sargasso Sea
attggcaacgcttgcgcctcgtcgatttgccgcttgcggtgccggtgattctcggcggcgtgcgcacagcggtggtgatgaacatcggcgtgatgacgatcgccgcggtgatcggcgcgggcggcctcggcacgctgatcatccgcgcgatcggccagagcaacatgatgaaactactggtaggcgcggtgcttgtgagcgtgctcgcgatcgtcgccgacttgctgctgcaagcgctgcaacgcttgctgacaccgaagggagtacaaaagacatgatcgaactcgacaaactgaccaagacgttcacgcagaaagacggccagccggtacgtgccgtcgactcggtgagcctcactgtcggcgaaggagaaatctgcgtgtttctcggaccgtcgggctgcggcaagaccaccacgttgaagatgatcaaccgtctgatcgcgccgacctcgggccgcgtgctgattaacggcgaggacacctcggcgttgaacgaagtggaactgcgccgccacatcggctatgtgatccagcagatcggcttgttcccgaacatgacgatcgaagagaacatcacggtcgtcccgcgtctgctcggctgggacaagaagcgctgccgcgagcgcgcaaccgagttgatgtcgatggttgcgctcgatccgaagcagtatctgaagcgctatccgcgcgagttgtcgggcgggcagcagcagcggatcggcgtgattcgcgcgttggctgccgatccgccggtgctgttgatggacgagccgttcggcgcggtcgacccga

SEQ ID NO: 270599 - DNA, 1735 bp, Unknown
  Bacterial polypeptide expressing nucleotide sequence isolated from the Sargasso Sea
atgaacaatggactacaaacatacttaagattgcttgattacggcaagaaatactggattgtttttacaatcggtgctttagcaatgctaattttcgcaatcactgatacaggatttgctttcctgataaaggttctcacggatagttttgccggtaatgtcgactcttttgagtctgtgaacctgaaatggttgctgccaatcggtgtgatcttaatcttttttgttcgaggactctcgggattcttttccacttacaacatgtcatggatcagtagacatgtgattcgaaggataagatcagacgtctatcagaagtttctttatttacccacatcatttttagatcagaagtccaatgcagacttactttctaaagtcattttcaacattgaacaggtttcagaatccactgccaatgttcttacagtgttgatacgagacagcctcactataattgccttaacaatttatatggtttatctcagtccgatgctttccgcagtaatatttacagcggctccagtcattgcaatcattgtaaaaattcttagtaacctttttagaagatacagtgagcggattcaggattcgatgggagatgtaacacatgcaatcaaagaaacacttcagaatcacagaattataaaaatatttaatgggcaagaagatgagggcgacaagtttggtgaaatcaatgagatcaataggcaacacaatatgaagttgttgagaaccaaagcgattggcgacgcattaaccatttttgtcgcatctctgggtgttgcaggcgtggtttatgttgcaacgctcaatgaggttaaaggatcaatgtcggttggagacttcagtggatttatcactgccatggtcttgctcatgacaccgttgaagcgactcaccaacgtcaatgctatgattcagagaggcatcgctgctgcctctagtatcttttcacttctggacgaaggcaatgagttggatttaggcacaaaagatgctgggagattaaatggttctgtttcatttaaagatgtcacttttgcttatgggaaagacaaagaaaccttgaaagacatcaatacaaaaatcaatgcaggacaaacaattgcaattgttggaaagtccggcagtggaaaaagtactattgttaatcttattccgaggttttatgacgttggaagtggctctatagagatcgatgatgtgccgatagagtcttatacaattaaatcattgagatcgaatatcagtttagtcactcaagaagtcacgctttttaatgacacgattgaaaacaacatcgtttatggcggacactcaaatcaagatatcagtgatgcaattcaagcctctcatatcgatgaattcatcgatgaattgcctgaggggttacagacaaaagttggtgatcagggcattcttctttcgggaggacagagacaaagaattgcaatagctagggcgctactgaaggatgccccaatactgattctcgatgaggcaacctctgcacttgattcggaaagcgaaaaacttatacaaaaggcttttgatcggttgatggaaaataggacaacttttgtcattgcccatcgtctaagcacaattgaaaatgcagacaaaatattggtcctatcaaacggaaaaatcgtcgaagagggaacccatgaagagttattgaatcgagatggagaatactctttgttgcataaaatgcagttcaatgactaaa

SEQ ID NO: 270600 - DNA, 1843 bp, Unknown
  Bacterial polypeptide expressing nucleotide sequence isolated from the Sargasso Sea
atgttttcattttttgaaaagctgacccagcctttccctgacacgccgcctacccaaccgccaacaggtatcgttgcattttgtaagtactacacaaaagggatgtggggcgtaatccttactgtttccgtgctaagtgccattgttgccatgttagaagtggcgcttttcggctttttagggcagttagttgactggttctctgatcaaaaccgagacacgtttttagcggatcaaaaatttacgctcattggcatgggtttaaccgttctcgtttttattccattatttattttgttgcgctcgctgttttctcgtcagtctctgatggggaactatcccatgcgcattagatggcaggctcaccgctatttgcttggccaaagtttaaccttcttccacgacgagtttgccggacgtgtcgctaccaaggtgatgcagacagcgctatcggtacgagaaaccgtgaccaaggttctcgatttgctggtgtacatcagcgtttattttatctctatggtagtgcttattttcagcactgactggcgcttagccatgccgcttatcgtgtggttttttgtgtatatcggtatcttgaaggtgctggtaccaaaactaaaagaagtgtcgcaaaagcaagccgacgcgcgctcattaatgactgggcgtattgtcgatagctataccaatatcacaacggtgaagctgttttcacatagtcgccgcgaagcggattacgcaaaagaaagtatggatggttttcttaagacggtttacccgcaaatgcgtttggttaccgtgttggaattctgcgtggaaatggctaacgccattcttattttcaccattggtgcgctatctgtgtatttgtggatggaaaacattgcgagcccgggcgatatcgccattgctattagtctgtgtttgcgactaaacggtatgtcgcactgggttatgtgggaagtatcaggtttgttcgaaaacttaggcacggtgcaggatggcatgaatacactagcgcagcctattgcagtgaaagacaagccaaaagccgacgcgttaaaggtaaatggcggcgggattaatttcgataatgtgcatttttcttattcaggtgcagacaacaaacctattgatgtgttcactaacttggatttagccattaagcccggagaaaaagtgggcttagtggggcgttctggggcgggtaaatcgacgctggttaatttgctcatgcgtttttacgacacccagagtggtcacattgtcattgatggtcaagatatcactgaagtaggccaagaaacccttcgcgccaaaatcagcatggtgacacaagatacttcactgatgcaccgctcggtacgcgacaatatcctttacggtcgaaccgatgcgacagaagaagatatgatctgtgcagccaaacaggccgaagcgcacgactttattcttaccctaaccgacagtcacggtagaacagggtacgatgcgcatgtaggtgagcgaggcgttaagctttcaggcggtcagcgccagcgcattgccatagctcgcgtattgttaaaagacgcgcctgtattagtgctggacgaagccacatcagcgctagattcagaagttgaagcggccattcaagcctgtctggataaagtgatggaaggcaaaaccgtgctggctattgcgcatcgactgtcgaccattgcgcaaatggacaggttacttgttctggataagggcaacattgtagagcagggaacccataccgagcttattgcgcacaatggcatatatgccaagctttgggcgcaccaaacgggcggatttataggcgttgaatagg

SEQ ID NO: 270601 - DNA, 941 bp, Unknown
  Bacterial polypeptide expressing nucleotide sequence isolated from the Sargasso Sea
tactaaaagtttagtaagttcagtcccaccaactaacaaaaaaatttcaagatttgtgattgtagaaaaagaaaataataataaaaaagaaaataatatcaaaatattaaatagatggtcaaagaaagaaattataaatcaagatttaattcagataaaaaatttaaataaaagttttgatgataatttttttacagaaaattctaaaaattctgtaatggctgttaatgatgtttcatttgaaataaaagaaggcgagtcttttggcttagtcggtgaaagtgggagcggaaaatctacaattgccaaaatgattgtaaatttatttaaacctacatctggagatattatctttgacaacgtttgtataacaaaaattaaacagagatctgaattaatgaaatttagaaaacaaattcaaatgatatttcaagatccttattcttcactaaatgggagattaaaagtaaaagatataattgcagaaccaattacacttcacaatccatctatatctaatttagatttaaataattatatttacgatttactggagtctgtagaattaactcaaaaatctgcaggtcgatatccacatgaattttcaggagggcagagacaaagaatatcaattgcaagagcacttgctacacaaccaagacttttagtttgtgatgaacctacttcagctctagatgtcagtattcaagcccaaatactaaatttgctaaaagatcttcaagaacaattaaatttaacaattttatttataagtcatgacttacctgttgttagacaaatgtgtgatagaattggcgtcttaaaagatggcaaattatgcgaagtttcaaacactgaggatttatttttaaaaccaacacatgaatatacaaaagagcttttacggttaatgcctaaaattgagtctatttataattaat

SEQ ID NO: 270602 - DNA, 676 bp, Unknown
  Bacterial polypeptide expressing nucleotide sequence isolated from the Sargasso Sea
tatgagtaacctcatagcagttcagtcagtaaataaaacatacaaaagaggagaagagactttagtcgttctagatgacttaagtcttgaagttcaaaaaggagatttcttagctttaatgggcccttcaggatcaggaaagtctaccttgttgaacttaatcggaggattagataccccaacatctggtcagatagtggttaatgaacaacatctagaaaccatgaatgcttctgctttaagtacatggagagctaacaacgttggctttatattccagttttataacttattaccagtactaaccgctcataagaacatagagataccacttctattgaccggattatctggatctcaaagaaaagaacacgtttccacggctctaaatgtagttggcttatccgacagaggaggtcataaacctaatgaactttcaggtggacaacaacaaagagtagctattgctagagcgcttgtttcggatcctgatatattggtttgtgatgagccgacaggtgatttagataggaacacagctactgaaattttggatcttctccaaatacttaatcgagatcacggcaaaacgattcttatggttactcatgatccagtagcggcagattcggccaaaagaacccttcatttagataaaggaaagcttactcactaa

SEQ ID NO: 270603 - DNA, 1735 bp, Unknown
  Bacterial polypeptide expressing nucleotide sequence isolated from the Sargasso Sea
tatggacaatgggttacaaacatatttaagattactcgaatacggcaagaaatactggcttgttttcacaatcggtgctttggccatgctaatttttgcaatcaccgatacaggattcgcctttctgataaaggttctgaccgatagttttgccggcaatgtagagtcatttgagtcagcagaccttaagtggttattgccagttggcgtgatcatcattttttttgttcgaggggtatcaggcttcttctcaacatacaatatgtcctggatcagcaggcatgtcattcgaagaataagatcagatgtgtacaagaaattcctttacttacccacatcatttttagatcaaaagtccaatgcagatttgctttcaaaagttatatttaacatagagcaagtttcagaatcgacagcaaatgttttgacagtattgatacgtgacaccctcacgatcatagccttgacgatttacatggtctatctcagcccaatgttgtctgctgtaatcttcaccgcagcgcctgtgattgcatttattgttaaaatcttaagcacactcttcagaagatacagtgaacgaattcaggattcgatgggggatgtgacacattcaataaaggagatacttcaaaatcatcgaattattaagatttttaatggacaagaaaatgaggaagtcaaatttggtgaaatcaatgaagtgaataggcgtcatcacatgaagcttctcagaaccaaagcaattggagatgcattaaccatctttgtagcatctcttggggttgcaggcgttgtatatgtggcaaccttagacgaagtaaaaggctcaatgacagttggagatttcagtggatttataactgcgatggttttactcatgacaccattgaaacgactcacgaatgtcaatgccatgattcaaagaggcatagctgccgccgctagtattttttcattattggatgaacggaatgagatagatagaggaaccaaagatgctcaaaggctaattggtgctgtccatttcaaggatgtaaatttctcttatggctcagaaaaagaaaccttaaaaaacatcaatacaaatattaaagcagggcaaacaattgcaatagttggaaaatctggaagtggaaagaccacttttgtgaatcttatcccaagattttatgatgttgaaaaaggctctattgagattgatggtatacagatagaagaatatacacttgaatcactcagatcgaatatcagtttggtgacacaagaggtcacccttttcaatgacacaattgagaacaacatcatttacggcggacattcaaatcaggaaatcacagatgcagttaaagcttctcatattgatgagtttattcatgatctaccagatggactgcaaactaaagtcggtgatcagggaatcttgctttcaggcggacagagacaaagaatcgccatagccagagcattgctaaaagatgcacctatattgattctagatgaggcaacttctgcacttgattcagagagtgagaaactcattcagaaggcttttgaccgattgatggaaaataggacaacttttgtcattgctcatagactaagtacaattgagaaagcagatcgaatattggttctctcagatggaaaaattgttgaagagggcactcatcaagatttattaagccaagatggagaatattctcttttgtataaaatgcagttcaatgattag

SEQ ID NO: 270604 - DNA, 1729 bp, Unknown
  Bacterial polypeptide expressing nucleotide sequence isolated from the Sargasso Sea
atgacgacccacgcaccggcaccgcacgccacgccgctcgtccacgtcgaacgcctgacgatcgggtttcgcggcccgcgcggcacgcgccccgtcgtcgggccgctcgacctcgtcgtccatgccggcgaatgcgtcgcgctcgtcggcgagtcgggttccggcaagtcggtcaccgcacgcagcctcgtcgggctgaacggcccgcacgccgtggtggacgccgaacgcctcgagatcgccggcgccgatgcgcggcgccatcgcgaacgcgactggcgcgccattcgcggccgccggatcggctacgtgctgcaggacgcgctcgtgtcgctcgatccgctgtggcgcgtgcgcgatctcgtcgccgaggcgctgcacgatacgcggcggcgcgacgtgcacgcgcgcagcgccgacctgctgcgctcggtcggcatcgacgagcccgaacggcgcttgccgcagtatccgcaccagctgtccggcggcttgcggcagcgcgtgctgatcggcaccgcgctcgccggcggcgcatcgctgctgatcgccgacgagccgaccacggcgctcgacatgaccgtgcagcggcagatcctgtcgctgctgcgcgcgcgccgcgaggccggcgatgcgctgctgctgatcagccacgatctcgcggtcgtcgccgaactcgccgatcgcgtgctcgtgatgcgggccggccaggtcgtcgagcaggggccggcgcgcgacgtgctgaccgcgcccgcgcatccgtatacgcgccagttgctcgccgcgattccgacgcccgcatcgcgcgggttccggctcgcgatggatccgcaggccgacgccgcagccgcagccgcaggcccggccgcgcgcatcccgctgccgcccaagcgaatcgaggcccgcgagaaagtgctcgccgtcgacgcggtgacgaagcgctacggcagccacgacgcgcctgtcgcggtggacggcgtgtcgttcgcgctggcgcgcggcgagacgctcggcatcgtcggcgaatccggttccggaaaatcgacgatcgcgcggatcgtgctcggcctgaccgagccggacagcggtaccgtcgcgctcgacggcgaaccgtggagcggcgtgcccgaagccgcacggcgcgcccgccgcgcgcggctgcaactgatcgcgcaggacccgtacagttcgttcgatccgcgctattcggttggccagatcatcggcgagagtctcgatgcgatcggcgtgcgcggcgatgcgcgccgccgccgcgtgctgcagctgctcgacgaagtgcggctcggcgccggctgcatcgaccgctatccacgcgaattgtcgggcggccagcggcagcgcgtcgcgatcgcgcgcgcattcgcgccgaacccggcgctgctcgtcgcggacgaacccgtcagcgcgctcgacgtgtcgatccaggcgcaggtgctcgacctgctcgccgacctgcaggccgagcacggcaccgcgatgctgttcatttcgcacgatctcggcgtcgtgcatcacgtcgccgaccggattctcgtgatgcggcgcggccgcgtggtcgaaagcggcccggtcggcacggtgttcgccgcgccgtcgcatccgtacaccgcgtcgctgctcgacgcgctgcccacgctgcccacgctgccctcgctgccctcgctgcccgctgcgcgcccgtcacccgcgcgcgccgcggtcgcatgac

SEQ ID NO: 270605 - DNA, 1081 bp, Unknown
  Bacterial polypeptide expressing nucleotide sequence isolated from the Sargasso Sea
gatggaatgtaggaatcttggaaaatcttatgaaactttcttggccttgactggagtcagccttagattggatgagcaggaattcctttctattcttggtccctctggctgtggaaaatcaactcttctaagactgattgccggtctagaagtccccagtgagggagaagtttttttgtatggtcaggaaatttcaggaaggaaaataatacttcctccggagcgcagaaaattcggaatgatcttccaggattttgctttgtttccacatcttagtgtaaatgacaatgtggagtatggtgctacaggatccaaaaaggaaaaacagcttcgggtccttgaactgcttgaactagtcagcctatctcatctcgccacaaaaatgcctcatcaaattagtggaggagagcagcagcgtattgctttggcaagagctcttgctccaaggccctgtcttatgttgatggatgagccttttagcaatctagattatcagttgcgacaacagctgcggggagaaataagggaaatattaaagaatgaaggtgttgctactgtacttgttactcatgatcaaattgaagcaattactttttcggaccgtatacttttgatgcaaaaaggtaaggtagtgcaggaaggaactccttcagaaatttatcaacttccacaaacaatttgggcatcctcttttgtgggtgaagcaaatcatttacctgttgaatggcataataattatttaaaaactcctttgggagaactcaatatcccgaatgaaattgccataaatgctcgaatcatgatggtacgtcctgaggattttaaaattgaatcagttcctgctgaaaaagcaaatgggattgttaaatcagtagatttttctggtcctgtgcagacagtgggtgtggctttaaaaagtggagtgagcgttatggtcagtggttctcctcatcttttatggaaccaggaggattatgttaaaatcacagccgaaagatatttgtgttttaatagcaatggaaacaggctagacggaactgcagaacaaaaaactaatagaaagggttgtgttccccgttga

SEQ ID NO: 270606 - DNA, 697 bp, Unknown
  Bacterial polypeptide expressing nucleotide sequence isolated from the Sargasso Sea
tatgagtggtgaagtggtgatggcgaggggattgactcgggtttaccaggaagaggcggttcctgtgcatgcattacgtggggtggacttttcactttcgtccagcgaattcgtcagtctgtccggtccttcgggctcaggtaagtcgaccttgttgaatattgttggtggacttgatcggcaggacgaaggaatcattgagctagatggtgaggaactagcacccttgtctgagggcgaccttgcagctctaagattacggaaaatcggttttgtgtttcaggcctataatcttgtaccagtgttgagcgctttggagaatgttgagttcattctgcagctacagggtgtgggttcggccgaacgaaaagagcgcgctggagaggctttgaagtctctgggtttgagtgagttgcaggatcggcgtcccggtgagatgtcgggtggccagcagcaacgcgtggcgatagcgagagcgattgtgactaacccggtattacttttggccgatgagcccagcgcgaacctcgacagcgagacgacaaaagagctcatggagttattgcgtaatctgaatgaaacccaaggtatgaccattatcacggcaactcatgatccgatggtgatgggttatgcgaagcgccaagtacaccttcgtgatggaacagttgagcgggatgaagtcgttacggactaa

SEQ ID NO: 270607 - DNA, 1036 bp, Unknown
  Bacterial polypeptide expressing nucleotide sequence isolated from the Sargasso Sea
tctgtcattagaatataaaggtaaaaaaggtttatccactttaaaaaatatcacttttgatcttaatgttgaagagataggttgcattttaggaccgagtggttgcggtaagacctctttgctaagagctattgccgggcttgaagatatatctgagggaagaattattgtggatggtagatgtattagtacaccaacctctaaggtaccttcaaatgaaaggtccatcggaatggtttttcaagattatgcattatttcctaaccttaacgtagaaaaaaatatagcttttagttttaataacaaaaatcaaccagacagccaaaagaaaataaaggagttgcttgatttaattggtctctcagggcaaaacaaaaaatttcctcacgaattatcaggtggtgagcaacaaagagttgctttagctagagccattgctaatgagccaaacatattattattagatgagcctttttctagcattgatactgaaataaaagaaaatttaatcagagatataaaaaatttattggatcatctttcaattacaacattaatggtgacacatgatcaatatgaggctttttctttagcagatacaattgctgttatgaacgaaggtaaatttcatcaaattggctccccgtatgatatttatcatgagccgttagatagatttgttgcagattttataggtatgggtacttttcttcctgcgacagttaacagtcatggagttgaaacaccgttaggcacttttcctatctttaaaaaagatataattaatttaaataaaaatcagcttgaaatttttgtgagacctgacgatgttgttcataatgatcaaagcaacctcaaagcaatagttaaagaaaagcattttagaggtgctgactttttgtatcacttaatgtttaaagatcagtatgagcttttgtgttatgctcccagtcatcataatcacgcaattggtgaatcaataggtattgaagttcatatgaaacatgcagtgctatttgagaaagaattaatttaa

SEQ ID NO: 270608 - DNA, 1915 bp, Unknown
  Bacterial polypeptide expressing nucleotide sequence isolated from the Sargasso Sea
atgaaaacaggaagtttaagaaggctgcttggttatacgtttagatataagtggtcattttttataagtgttgtaggttttataagttttgcttttgctgatatcgcagctgttgaatggataagaagaataatcggattcataaactcagaagaagaaaattttagttcttttttagcactttctttaattttgatagcccttggaagaggtgttggtttttttgttgggaactacttcatgtctagagttggttttggcattgtccatgatttacgagcagaattgtttcaaaagctacatgatcttccgaaatcatattttgatgcaaatcagtctggacaattaataaatagaattacatttacaacaacacaagtttcaggagcagcctctaatgcagttaaaactctcataagagaaggcttcctattaattggtttatttgtatatttgcttatattaaattttaaactcacccttttgttaatcggtacagctccacttatagcacttatagtttatgtagcaggaaagcgtttaaaaaaacttgctaagaaaatacaaacagcaatgggagatgttactcatattgcgtctgaagctgtggacggacatgttgagattaaaagttttaatgctcaagaatatgaaaattctagattctttgaagcaaattcttctaacaaaaatcaaaatttaaaacttgaagctacaggcaatatggcaacaccaattattcaagttcttgtatcaatatcattatcaatagttgcatatttcgctctaggtgcacaattaggtatatcacttgatgcagaaacttttgttgcttttttcactgctgcaggtttaatggctaagccaataaggcaattatctaatatcaatatgattgttcagaaaggcttagcagcagctgtagaaatttttgaacaactcgatcaagaaattgaaagtgatcttggtgataagagtgacataattgaaggaaatattgaattcgataatgttaacttttcttatgaaactggccgccaagtattaaatgatatctcattttctataaataaaaatgaaacagttgccattgtcggtaagtcaggatctggaaagtcaactatagccaatttaattccaagattttacaaccattcatctggtaatatattaattgatggaacacctgttagtgaattttcattagattaccttagatctcaaatatctattgttaatcaatctccttctttatttaacgatactatttcaaagaatattgcatatggtgatgatgaaatagatgtagacaaactaaaagaatcagcaaagttatcaggctgttctgaatttattgaagatttgccagatggttacgaatcagatattggagatgatggtgtattgctatcaggcggtcaaagacaaagacttgctattgctagagctttttataaagattcaccaataataattcttgatgaagcaacatctgcactagacactgaatctgaattaatcgtccaagaagcattagaaaaactaataattgatagaacaactattgttattgctcatagattatcaacaatcgaaaacgcaactaaaatcattgttcttgataatggatctattgtagaaactggaacacattcagaattaattgaaaataaagacatttatcattctttatataagaataaatttgaagattcacctgaagcacaaagtagaacttcaaaatctgttcaacttttcatgccagaatacgaggatgaagattcatcaagttttgttgtagatagttggtataaaaaaagtttatggctttatttactttatcctttttctcttatcttttcatatttaactactagaagaagaaaaagatatcttaataataaaattgaatctt

SEQ ID NO: 270609 - DNA, 817 bp, Unknown
  Bacterial polypeptide expressing nucleotide sequence isolated from the Sargasso Sea
atggaaagcatgagagtcaagaatgtgagcgtggtctttccgggccgcaagtccggccagacggtgcacgcgctcgacgacatcaatctgacgatcaattcgggcgactttgtcgtggcgctcggggcatcgggttgtggcaagaccaccctgctctcgctgatggcgggctttatcgcgcccagcagcggcgagctgctgctcggcggctcgccgatcgccgggccgggatctgaccgtggcgtcgtgttccagaagcatgccttgttgccctggctcaacgtaatcgacaacgccgagttcggcctgaagcttcagggcgtaccgaaagcgcagcggcgcgaaatagccgcgcgcaatctggcgctggtcggcttgcaggatttccacaagcacatgatctatcagctctccggagggatgcagcagcgtgtgggcattgcccgcgcgttgacctgcgaccccgccatgctgctgatggacgagccgatggccgcgctcgacgcgctgacccgcgaaacgattcaggaactgctgctcgacgtctggacgaagacgaacaagatgttcttcttcatcacgcacagcgtcgaggaagcgctctttctggcgagccgcctgatcgtgatgtcgccgcgccccgggcgtatcacgcatacctacgagctggatttcaaccgtcgctttctcgaaacacgcgatgcgcgcgccatcaagtcgagccccgatttcatcgaaatgcgcgagcgcgtgctcagcatcatttacggcgacgagaaaatgcacggcgccgcagccgaggtgacacatgtttagc

SEQ ID NO: 270610 - DNA, 1471 bp, Unknown
  Bacterial polypeptide expressing nucleotide sequence isolated from the Sargasso Sea
ggtggtatgcgcatgcgccagcagttgtttgaaaaatacattcatcttcctgtggcatttcacgataatcatgcggttggcgggcttatcagtaaagtcacctacgacacagagcaagttgctaatgcatctggtaaggcgctgcttacattggtgagggaaggcgcactggtcatcggtttgctgtgtgtcatgttctattactcatggcagctttcgctcatatttcttttaattggcccgattgtggcggtgattgtttctatcgtcagtaagcgttttcgcgttgtaagtaaaaacattcaacaatcaatgggcaacctaacatcgtcggtagagcaagcggtgaaaggtcacaaagttgtgatcatgtttggcggtcaagaaatagagcaaaagcgtttcgagcagaaaaacaatcacaaccgtcaacagtcaatgaagctgaatgtcacctctattttgagtgtgtcttcaatacaagtaatagcgtcaattgcccttgctgtcgttctgtttgttgccagcacgcctggtatgcttgaaaagcttactgcaggcgtatttattaatgtggtcttttgtatggtgatgctgcttaaacctcttaaacagctcactactattaataaccaatttcaaaaaggtatggcagcctgcgccagtatttttgaaattcttgatgaagcagacgaagaagataaagggaaaaccaaagtagagcgcgcaacaggaaaaattgaatttgacgacgttacgttctcttatccaggaaaacagacgcccgcgttatctaatgtgagctttatcgcaaaccctgggcagtcgattgctttggtagggcgctcgggaagtggtaaatcgaccatctcgtcgctgcttacacgcttttatgtaccgcaagaaggtgaaattcgcttggatgacacggcgctcaacgatattgatcttaaagatctgcgggcgcagttcgccgtggtatcgcaaaacgttacgctatttaacgataccatagctaacaatattgcttatggtgcgcgccaaaatgtatctcgcaaagacatcgagaatgcggcaaaaatggcgcatgttgaagagttcttatcgaacttacctgaaggactagatacggtaattggtgaaaacggcttgatgctttctggtggtcaacgtcagcgtattgccattgcaagggcaatacttgccgaagcgcccatacttattcttgacgaagcgacatctgcccttgatacagaatctgagcgtttgatccaagacgcattagaaacgctgcaaaaacggtgcaccagcattgttgtggcgcaccgcttgtctaccatcgaaaacgcagattgcattatggtagtggagcaggggcgcattattgaaaaaggtaaacacaacgaattgcttgaaaaaggtggtcactacgcgcaactgcacgcgttgcaatttggtgagactaagtgag

SEQ ID NO: 270611 - DNA, 1054 bp, Unknown
  Bacterial polypeptide expressing nucleotide sequence isolated from the Sargasso Sea
aatgagttttttagatttaaaaaatgtgactaagatttacccaaacggaactaaggctgttcatgaaacctcattaagtattaatgaaggagaatttatggtctttgtaggacctagtggatgtggaaaatcaactttattaagaatggttgcaggtttagaggatattacagagggtgatatcaatcttgatggaaaattaatgaatgaagttgacccatctgaaagagatgtagcaatggtgtttcagaactatgcattatacccacatatgaatgtttataataatttagcttatggtctaaaaaatagaggaattgacaaagaagcaatcgagcaaaaagtaaatgatgctgccaagctgttacaaatttcagattatttacagagaaaaccttcaatgttatccggaggtcaaaggcaaagggttgcaatgggcagagcaattgtaagaaatccaaaaatattcttatttgatgagcctctttcaaacttagatgcaaaattaagaattcagatgagacttgaaattaaaaaacttcagcagaaagttggagtaacaagtatatttgttacgcatgatcaagttgaggccatgacacttgctgatagattagcagtaattaataatggaattattgaacagcttggtactcctatagagatatatgataatccaaaatctttatttgttgccggttttattggctcaccgcaaatgaattttttagacggtagtttaaaaaataaaacattatctgcagaaggttttgaaattaaagatattaatagtgactatgagggagaagttacattaggaataagacctgagcatttaagtcaaactgaaaatggtttaattaatttaaaagtagacttagtggaacaacttggttcagataatcttgtttatggtcaattgaaagataaaaaagacttttgttacaggtgtccaggaaatcaaacaattgaaaaaagttctagcctaagtttgaatattgataataacaaatattatatttttgataagagtactggcaaaagagttaattaa

SEQ ID NO: 270612 - DNA, 673 bp, Unknown
  Bacterial polypeptide expressing nucleotide sequence isolated from the Sargasso Sea
atgaataaaaccatattagaagtttccaatgttacaaaaaaagttaccagccctgagggtgaactaaccattgtaaatgatatcagtctttccttagaggagggtgtttttgcatccattttgggaccatctggatctgggaagaccacactccttgcaatcatggcaggccttgatttgccaagcagtggctccgtgaaacttcttgataaagaaatcacaagcttaaatgaggataagagggcacagattagaagcaaggatgtcggttttgttttccaatcttttcatttactgcctcgattatcagcccttgataatgtcatgatgccactcgagatactcggcgcgaaagatgcaaaggagagagcgctaaaagctttggatgaagtgggtttatccaaaagaacagggcatgttcctcatcaattatctggtggagaaaagcaacgcgtcgcaattgcgagggctatggttaaagcgcccagtatattatttgcggatgagcctactggaaatttggatcaatcaagcacggataatattcttgaactattgctgggaatcaatcaacaaacaaagacgaccttggttgtcgtaacacatgatcagcagttagcagcacgatcggatatggtcttcgagctacaagaagggaaattaaaatgctgaa

SEQ ID NO: 270613 - DNA, 691 bp, Unknown
  Bacterial polypeptide expressing nucleotide sequence isolated from the Sargasso Sea
atgaaaaatgccgtggttgagatccgcgatctggcctttgcctggccgggtcacgaggttgtactcgatctgcccgccctcaccatcagcgagggggagcgggtgttcatcaagggaccgtcgggctccggcaagtcgaccctgctcggcctgctggccgggatccagaccgccaaccacggcaccctggaggtgctgggccagccgctggcccggctctctggccgtgcccgcgaccacttccgggcggccaatctgggttacattttccagcagttcaacctgctgccgtttttatccgtgcaggacaacgtcaccagcgccctcaccttctcccccgagaagcgagcccggctgcagggcagcccggccgatgaggcgcgtcgcctgctgcgggaattgcaactgcccgaggaggcgctgcacagacccgtccatgccctcagcatcggccagcagcaacgggtggccgccgcccgcgcgctcatcggctcaccgccgctggtgatcgccgacgagcccacctcggccctagataccgacaaccgggccgccttcatcaaactgttgttcgaggagtgcgacaagcagggctcgaccctggtcttcgtcagccacgatccctacctcgaaccgctctttccgcgggtggaaaacctgcaacaactgaacaggagggccgcatgctgat

SEQ ID NO: 270614 - DNA, 757 bp, Unknown
  Bacterial polypeptide expressing nucleotide sequence isolated from the Sargasso Sea
atggaactgctggttcagaacctctgcaaacgtttcggcgacaaaaccgtcctcgaggacatcaacttctcgatgcaatccggtgagttcgtcaccttcgtcggcagttccggctgcggcaaaagcacccttctgcggctgatcgccggcctggatcaccccagcggaggtcggatccaggtggatggatcccccgttgaagggcccggccccgaccggggcatggtctttcagaaatacagcctctacccctggctgaatgcagccgacaacgtcgccttcggcatgcggctacagggcatgacgtcggctgacgtgcgtaatcgcaccgcctatttcctcgaggtggtgggtctgcgggatgccgccaccaaactgccgcgggaactctccggtggcatgcagcaacgggtggcgatcgcccgcgccctggccaccaaccccagcgtgctgctgctcgatgagcccttcggtgctctggacctgcagaaccgcgaaaccatgcaggacttcctgcacaagctctggcaacgcaccggcctgaccgtgctgctgatcacccatgacgtggaggaagccctggtgctggcccagcgcgtgcacgtgctggcaccgaaccccggccggatcatccgctcgctggacgtgaccctggacaaaagcgatctggatcagctgcgcctcagcggtgagttcctgcagctgcgccggagcctttcaggttcacttcgacagttggagccgaccatcgggtgat

SEQ ID NO: 270615 - DNA, 676 bp, Unknown
  Bacterial polypeptide expressing nucleotide sequence isolated from the Sargasso Sea
atgtctaacttaattgaagttcagtccgtaaacaaaacatacgaaagaggaagagaaacgcttattgtgttagatgaccttagcttagaagtacccaaaggagattttcttgctctgatgggaccttctggttcgggaaaatcaacccttttaaaccttattggtggacttgattcacccacttctggacagattgtcgttaatggagagcacctagaagaaatgggcccatctggcttaagtgactggagagcaactaatataggttttatttttcaattctataatcttcttccagttttaactgctaataagaatgtagaaatacctcttctcttaaccaatctttctagctctcaaagaaaagaacatgtgactacagctctaaatgtcgtcggcctttctgatagaggaggacataagcctaatgagctttctggcgggcaacaacaaagagttgcaattgcaagagcgcttgtttcagatccaggcatattggtttgtgacgagccaacaggtgacctggacagagatactgcaactgagatattggaactcttgcagatattgaaccgcgaccatggtaaaaccattttaatggtgactcatgatccagtagctgctgagtccgccaagaggactttacatttagataagggaaaactcacaacttaat

SEQ ID NO: 270616 - DNA, 793 bp, Unknown
  Bacterial polypeptide expressing nucleotide sequence isolated from the Sargasso Sea
atggaaaataaaaattctgatgaaattatagtaaaatttgaagaagtcaccaaacaatacggtgatctagtagttttagataaactcaatttagatatcaaaaaaaatgaaatggtttcaatcattggcccgtcaggttctggtaaaacaacagttttaagagttctaatgaccttagaaaaaattaatggaggaattattcatttagatggacaaaaacttacacacatggagtctaatggaaaattaattgaagcggatgaaaaatatttaagagaaagacgatcaaaaattggaatggtatttcaacaattcaatctatttcctcatatgacagcacttcaaaattgcattgaagctccagtagaggtgttgggtatgaaaaaagaagaggcagaagaaagagctcttgaacttttagaattagtaggtttaacagaaaaaaaagatcaacatccttcaagactttcggggggacaacaacaaagagttgcaatagcaagagctttagctatgagaccaaaagttatgcttctagatgaaattacttctgcattagaccctgaagtagtaggagaggttttaaatgttatcaggtctttaaataaggagcataatttaacaatgataatggttacacaccaaatgggttttgctagagagatatcagatcgagtatgtttttttaatgaaggtaaaatatttgaacaaggcccaccagaaaaattatttggcgatccacaaaatgagagaacaaagcaatttttacatgctgttcttgatgcaaactaat

SEQ ID NO: 270617 - DNA, 772 bp, Unknown
  Bacterial polypeptide expressing nucleotide sequence isolated from the Sargasso Sea
aatggctactttagtcgctgaaaatttaacctttgcatacacaaaaaaaagtaagccagctttgaataaggtatcggttgagattaaacctggaactctaacagcattagttggcccaaacggcgctggtaaatcaactcttttgagaatattgcaaggacaaaatactccagataaaggcgaaataaaaattgacggtgaaaatttatatagatctagagctcttgtggcacttatgcctcaaagaagttctatgaattggaagtttcccatcacggttgaaaaattggtatctcttggtcaaataaagtattcaaaatcaaaaagtaacaacccctttcaaattaagactcttctagcatatcctaattcttggattaataaatgttgtgaattagaggcgacaatgcaaagagtaggcattgcaaatttggctaatagaagactcgattctctttcaggaggacagcaacaaagagctctattagcaaaaactcttatgtcccctgcaaaaatatttcttttagatgaaccttgtgcagctttggacccacctgcaaaggaagattttctaaaaattgttcgtcaacttgcggatgcgggactttctttgctcgtaagtagccatgattggggcgagtctttaaataactatgatcaagtaatcgttcttgataaaagtgttttggcagttggtagtcctgaccaaataaaagataaattagaggctataaacattagctctataaacgaaaataatttctgtgattag

SEQ ID NO: 270618 - DNA, 1687 bp, Unknown
  Bacterial polypeptide expressing nucleotide sequence isolated from the Sargasso Sea
gatgagttttttagaaattaaaaatttaaatattagttacttaaccaggaaagaaaaaatagtagctagcaaggatgtagaattttaccttgaaagaggagagatactaggaattgttggcgagtctggttcaggaaagtctacaatagcaaatgcaataataaatttaattgatccaccgggagaaatcactgatggatcaataaaaattgataatgaggaaatatgtaataatgaagaaattattcaaaaagctagaggaaaaaaaattggttttgtatttcaggatcctcaaacatcacttaatcctttgttcaaaattaaagaccaattaatagaaacgatacaaactcatttaaaattaaattatgatcaagccttacagagatcgattcaactattaaatgaagtaggaatcgaggatgcagaaaaaagaattgaagattatcctcatcaatttagtggtggtatgcgacaaagagtggttattgctttggcaataagctgtgagccagatttaattattgcagatgaaccaacaactgcacttgatgtaagtattcaatatcaaattctccaactacttaaagatttgacaaaaaaaagaaatcttggagtgatcattattactcatgatatgggagtaattgcagaaactacaaataaagttattatcatgagaaatggcgttattgttgagtatggtttaactaaagatgttttaactaatccaaagtcaaatgaaggaaaaagtctaatcatttctgttcctccaacaaataagaaaatttcaagattcaagttaatcaatcctgaaggaggagaaataactaacgaatctctaaatcttacaaatagtattattcaaaattggggcaaaagagctgtgacaaaagataaattattagaaataaagaatttaactaaaatatttgactcagattcaattattaaatcaaaaaaagaaattactgcactaaaagctctagataatgtttcttttaatatttttgaaggagaatcttttggattagttggagaatcaggttcaggaaaatcaacaattgcaaagattataactaatcttatcaaacctacttcgggtgaagttttttacgagaatatttctttaaatcaaaaaaacaataataaatttagaggacaaatccaaatgatttttcaagatccttactcttctttaaatccaagatttaaggtaaaaaatataattgcagaaccaattaaattttttcaaaaaaatttggataaaaaaacaattgaaaataatgttaatgatttaattgatattgttggaatgactaggcaatcattagatagatatcctcacgaattttcaggtggtcaaagacaaagaatttcaatagccagagcattagctacaagaccgcgcttacttatttgtgatgaaccaacatcagctttagatgtaagtatacaagcacaaatacttaatcttttaaaagatcttcaagagcaactaaatttgacaattttatttataagtcatgatttgccagtaattagacaaatgtgtgataggattgcagttttaaaaaatggaaatttatgtgaaattgaaaatacagaaatactttttaataatccaagtcatcaatatacaaaagaattaataaatcttatgcctaaaatagaaacaattttataa

SEQ ID NO: 270619 - DNA, 686 bp, Unknown
  Bacterial polypeptide expressing nucleotide sequence isolated from the Sargasso Sea
gatgaaaaccagtacaaagactgtaatctctataaataatatttcaaaagtatatgaaggtcctccaccagtaagagctttagacggtgtctcacttgaaattaaagaaggagattttgtctcaatagttggccaatcaggtagtggaaaatccacattcttaaatatgattggattattagatagcatcactgatggctctattgaaattgaaggaaaagacgtctctgaactctcagacaacgagctctcaaagtttagaggtgaaaagattggatttatatttcaaagtttttttctactaccaggattaactgctcaggaaaatgttgctgaaggtcttttataccaaggcatttcaagatcagagagattagaaaaagcaaaggaagttttagaacaagttggtctcggagacaggttgacccatttacccaaagaattgtctggtggtcaacaacagagggttgcgattgctcgtgctctagtacaagatccggcattcgtactagcagatgaaccaacaggaaatttagataaagaatccggcatcaacatactcaatattctgaaagacctaaacaatcaaggtaaaacggtaataatgattacccacaatcaggaacatgcaagtttgtttaaaaaagttattgaactagttgatggaaaaatagtaaatcaatgaa

SEQ ID NO: 270620 - DNA, 379 bp, Unknown
  Bacterial polypeptide expressing nucleotide sequence isolated from the Sargasso Sea
tggtttgcatgaatttattactgaagagctagatcaaaactattttacagaggttggtgaaataggtataagactttctggaggtcaaagacaaagaattggaatagcaagagctttatacaataatccatctttattagttttagatgaagcaacaagcgcgcttgataatttaactgaaaaaagaataattaaatcaattgctgatcatagtgaaattattaccacaattattattgcacacagattaaatacaatcaaaaactgtgattgtatttattaccttgaaaatggtggaattaaatcgagtgggacatatgaagaactaattctgaaaagcaaagaatttaaaaaacttgcaacttcattagtagtataa

SEQ ID NO: 270621 - DNA, 679 bp, Unknown
  Bacterial polypeptide expressing nucleotide sequence isolated from the Sargasso Sea
cctgaaaattccggcacttgaactcaaatctttagtgttcagttggccggaccaagcccctttattcaatattccgcagctgaagttagcgcaggggcagcatttattcatctatggttcgtccggttcagggaaaaccaccttactgaatttactcgcaggtatttacccttgccagcgtggcgatattgtcattgcaggccagtcgatggctgcgttatccgccgcaaaaagggatcaattgcgggcatcttctataggtgtcgtctttcagcagctgaacttaataccgtatttgactgtgttgcaaaacgtcttgctggtcagtgccttcgccaaaaaaattccgcaggccgagcaacgcgcccggtatttattacagaaactggggttagaacagcagttatggcaagcgccagctaaccgactgagcgtagggcaacagcagcgtgtggcgatagccagagctctgctaagccagccggctttattaattgcggatgaaccaacctcggctttggatcataaacacagggacagttttatgcagttgatgctcagtgaggctgaactttgtggcactacggtgattttcgtcagtcatgatcctgctttacgctcgtactttcacttcgagctggatatggaacaattacatcagggagttcagccatgttaa

SEQ ID NO: 270622 - DNA, 660 bp, Unknown
  Bacterial polypeptide expressing nucleotide sequence isolated from the Sargasso Sea
agttcagtcgtgttaataaaacttatcaacgcggaggtgagactctaaccgttttagatgatctaagtctagaggtccctaaaggtgactatctagctcttatggggccttctggttcaggaaaatcaactcttttgaatctcataggaggacttgattctcctacttcaggtcaagtcgtgattaatggcgagcaccttgaaaaaatgagtgcctcatctttaagcgactggcgtgcaagcaatgttggatttatctttcaattttataatctattacctgtcttaactgccaataaaaatgtagagatacctcttcttttaactaacttatcggggtctcaaagaaaaacgcatgtagaaacagctcttaatgtagttggtttatcagatagaggaggtcacaaaccaaacgaactatcgggtggtcaacaacaaagagtagccatagctagagcactagtttctgatcctgatatattagtttgcgatgaaccaacaggtgacctagatagggatacagctacagaaattttggaactccttcaaattttaaatcgtgatcatggtaaaacaattttaatggttacccacgatccagtcgctgctgaatcagctaaaagaacactacatttagacaaaggaaagctgactaattaaa

SEQ ID NO: 270623 - DNA, 529 bp, Unknown
  Bacterial polypeptide expressing nucleotide sequence isolated from the Sargasso Sea
tatgggagttatatctcctaatggcggagagataaaccttgataatatcccattagcaaatattgttgatgactggcagcattctattggttatgtagatcaaaatatattcatttcaaatggaacaatattgaagaatattgcgtttggtattcctaataaggaaattgataaaaatttaattgatgaggtgatccaaaagagttcattagataaatttgttaaaactttgaaagatggtttggaaactgaaattggagaacatggagctatgatatctggaggccaaagacaaagaattggaattgccagagctttatatagtaagcctaaaattttaattttagatgaggccacaagtgctttagacttagaaactgaaaatgaaatactagaggaaataaataagcttaaaaatgaaattacgatggtctcgatttctcatcgtataaatgcgataaaatattgtgatgaagtgtacaatttgagtgataatagattatcaaaaaagaattttaatgaacgataa

SEQ ID NO: 270624 - DNA, 301 bp, Unknown
  Bacterial polypeptide expressing nucleotide sequence isolated from the Sargasso Sea
atgatcctcattcaatgccaaggactgtccaaacactatggcagtaaaaaagcgctcaataacgttaacttaaccctcgaatcgggagcgcccatcgccttggttggccctaacggtgcaggtaaaaccacgctatttagcctactttgtggttacctcaccccaagcgcgggcacggttcgtattctgggagaagcgccaaatagtccagcattattagggcaaattgccgccctgccacaagatgcaacgctcgatcccaattttgacattatcagccagttaagcttctttgcgcgtc

SEQ ID NO: 270625 - DNA, 700 bp, Unknown
  Bacterial polypeptide expressing nucleotide sequence isolated from the Sargasso Sea
ttggctgagtcaacctcccaagctgttgctgaactgagtggcgtcagcaaggtctacggacagggtgatcttgaagtcagggcgctggatcaacttgatctcactgttcgcagcggcgactatttggcggtgatgggggcgagcggctccggcaagagcacggcgatgaacatccttggctgcctggatcgaccgaccggtggccgctaccggctcaatggaattgccgttgaacagctcgatgatgatgagcttgcggacctgcgcaaccagtccctgggattcgtgttccaacaatttcatctcctgccccatgcctcggccatggagaacgtgatgctgccgatggtctacgccggcatctcactggatgaacgcaaggaacgagcggcttcagccctggatcgcgtcggtctgagtcaacgtctggacaatcgtcccaaccagctctccggaggtcagcagcagcgggtcgccatcgccagagccatcatcaatcgcccgagtcttctcctggcggacgagcccaccggcgccctcgactcgaacaccacggctgaagtgctggaactgtttgatgaattgcaccggcagggaatcaccctggtgatggtgacccatgaagacgatgtagcagcccgagcccatcgaattgcccgttttcaggatggccgcatcgtgaatgaagcatcacaatgag

SEQ ID NO: 270626 - DNA, 798 bp, Unknown
  Bacterial polypeptide expressing nucleotide sequence isolated from the Sargasso Sea
aaacagacattaacctagatgaaactcctcttttagaaataaaaaatctagatgtatattatgagattcctaatattaattttttaaaaaagaaaagattccatgctgttaagaatacttcactaaatatctacaaaaacacaactataggtttagttggtgagtcaggttctggtaaatcaacattaggtaaagcaatagcaaatttaacgaaatttgaaggaaagatatattttgatgacaaggatattactagttctcctaaggggataaaaaaacatattcagatagtattccaagatccatatggatctttatcacctaggatgaccattagtgaaattgtaggagagggtttgggagttcactttaaattatcaaaactagaaactcaaaataaaatagataaagtcttaactgatgtaggaattgatttaagcgcaaaaaataaatatccacatgaattttcagggggtcagaggcaaagaatagcaatcgctagatctttaattatgaatcctacatttatgattttagatgaacctacttctgcattagacaggtctatacagatacaagttataaacttgcttaaagatattcaaaaagaatataaattaacatacttatttataagtcatgacttaaaagtaataagatcaatgtctgactatatctttgtcatgaaagatggaaaaattgtagaatctggaccttcaaatgaggtttttgactatccaaaacaaaaatatactaaaaaattactctctgctgcgttaagatacgcatccaattaaa

SEQ ID NO: 270627 - DNA, 766 bp, Unknown
  Bacterial polypeptide expressing nucleotide sequence isolated from the Sargasso Sea
catgtacaaactcgaagttcaggacctgcacaagcgctacggcagccatgaagtgatcaagggcgtgtcgatggcggccaaggccggcgacgtgatcagcatcatcggctccagcggctcgggcaagagcaccttcctgcgctgcctgaacctgctcgagcagccgcatgccggcaagattctgctcaacaacgaagagcttaagctgctaccggccaaggacggttcgctgcgcgccgccgatgccaaacagctgcagcgcatgcgctcgcgcctggccatggtgttccagcacttcaacctgtggtcgcacatgagcgccctggaaaacgtgatggaggcgccggtgcacgtactcggcgtaagcaaggccgaagcccgcgacaaggctgaacattacctggccaaggtcggcgtcgcgcaccgtaaggacgcctaccccgcgcacatgagtggtggtgagcagcagcgcgtggccatcgcccgtgccctggccatggagccggaggtgatgctgttcgatgaacccacttcggcgctcgaccccgaactggttggtgaggtgctcaaggtgatgcaggacctggccaccgaaggtcgcaccatggtggtggtgacccacgaaatgggttttgcccgcgaggtgtcgaatcagctggtgttcctgcacaagggattggtcgaggagcgcggttgcccgaaggaagtgctggtcaatccgcaatccgaacggctgcagcagttcctttccggcagtctcaaataa

SEQ ID NO: 270628 - DNA, 1075 bp, Unknown
  Bacterial polypeptide expressing nucleotide sequence isolated from the Sargasso Sea
aatggctaaaataattttagataatattgcacacacttatgagcccaatgcaagcaacccaatatttgctttgaaagaaatgtctctttcttgggcagatggtggacgttatgcactgcttggtccctcaggttgtggaaagacaacaatgttaaacattatgagtggtttagtaaatccttcccatggaaaagtatttttcgatgaaagagaagtaacctcaatgattactgaagaaagaaacatcgcccaagtgtttcaatttccagtaatttacggaacaatgacagtattcgaaaatcttgcttttcctctaaaatgtcgacagtttccagaggatcaaatagaaagaaaagtcaaagaagttgcagaaatactgaatttacaagattatttgaacaatcgagcaaaaggattaacagcagatcaaaagcaattaatttctctcggaagaggtttagttcgggaggatgtagctgctatattaatggatgaaccactgacagttattgatcctgacttaaaatttcgtcttagaagaaaattaaaagaaataaatgataagtacaagacaacattgatatatgtaactcatgatcagaatgaggctatgacatttgcagataatattattgtcatggatcaaggtgaagttgtgcaggcaggatcaccaaaggaactttttgaaagacctcaaacaacattcgttggttattttattggttcacctgcaatgaatttatatgaatgctccgcaagttctaaaaacgaaattagtataggagctaattcattcaaagttcaaacaaatattaataattctaattcggaaaacctaaaactaggaatccgttctgagtatattacagttgaaaatgaacatagtgataattcattagaagcagacgtaattgaagttgaagattttggaaattataaacttgttacagcatcttttgactcatttaaaataaaagcaaaagttaaaagagaattagacataccgtcagaaaaagttattctaaaattaccagcagaacattgctgtatatatgaagataataaactcatttaa

SEQ ID NO: 270629 - DNA, 652 bp, Unknown
  Bacterial polypeptide expressing nucleotide sequence isolated from the Sargasso Sea
atgaatgaagtaattctaaaaatacaaaacctaagtcattcttatgacgatgatcagttgtctttaaaaaaaattaatcttttagttaataagggtgagaggctttccattcaaggtccatcaggatgtggaaaaagtacattgttgagactgattgcaggtttggaagagccaaatgaaggtcagatattcatcaatgaggaagaggtttcaagccctggcttttccgttcctcccgagaagagacagattggaatggttgttcaagataaagcattatttccgcatttatcaatttacgaaaatatttgctttggcattaagaaaaataccaataaagagcaaatagctctagacctattaaatctttttaaaatcgaggaattaaaaaataaattcccacatcaaatatccggtggagaaaaacaaagagtagccttagcaaggtccatggcgcctaatcctaattttatcatgctggatgaggccttcagtgcattggattctgacttgaaagtttctatatatgatgaagtcttagaaatctttcaaggtaaaaatataaccgttattttagttactcatgacaccgaagaagccaaaatcctcagcactagacagctcaatatggataacggagagcttctataac

SEQ ID NO: 270630 - DNA, 685 bp, Unknown
  Bacterial polypeptide expressing nucleotide sequence isolated from the Sargasso Sea
catgagcctcctcaaagtcaccggtctgggcaaatcgttcggcggcgtcaaggcggtggatggcatccacttcgaactggcggctggcgagctgctggcgctcatcggccccaacggcgcgggaaagtccaccaccttcaacatggtcaacggccagctgcctgccgatgcaggctccatccagctcaatggccaggagctggtgggccgcaagccgcgcgacatctggcgcatgggcgtgggccgcacctttcagatcgctgaaacctttgcgtcgctgacggtggtggagaacgtgcagatggcgctgatctccaacgacggtctgctgttctcgatgtggcgcagggctgccgaccacaaacgcgacgaagccctggcgctgctcgaccaagtgggcatgaagtcgcaggccgatcggccctgtagcgtgctggcctatggcgatgtgaagcgtgtggagctggcgattgccatggccaattcgcccaagctgctgctcatggacgagcccaccgccggcatggcgcccaaggagcgcaacgaactcatggcgctgaccaagcagctggtgatcgaccgccacatggccgtgctctttaccgaacacagcatggaacgtggtgtttgcctatgccgaccgcatgatcgtgctggcgcgcgggcgcctgatttgcgagggtaa

SEQ ID NO: 270631 - DNA, 1594 bp, Unknown
  Bacterial polypeptide expressing nucleotide sequence isolated from the Sargasso Sea
cttgatctctaccgcaaatatcaccatgcaattcggccctgagccattatttgaaaatatctcggcaaaatttggcaacggcaaccgttatggtttgattggcgctaacggctgcggcaaatcgacttttatgaagatcttaagtggcgccctcgccccgacatcaggcaacgtgtccatcaccccaggcctaaaagtcggcaccctaagccaagatcaattcgcctttgagcaatacacggttatcgatgcggtgatcatgggtgatacccaactgtggaaaatcaaacaagagcgtgacgccatttacgccaagccagatatgagcgaagaagatggcatgcgcgtgggcgacttggagagtgagtttgccgagatggacggttacagcgccgagagccgcgcgggcgaaatcctcattgaagccggtatcgaagagtctttccactacggtcctatgtctcaggttgcgcctggttggaaactgcgggtgttattagcccaagcgctgtttgctaaccctgatatcttgctactcgacgaaccgaccaacaacttagatattcataccattagttggcttgaaactgagctgaataaacgcaaatgtaccatgatcatcatctcccacgatcgacactttttaaatgctgtgtgtacccatatggcggatatcgattacggcgaactgcgtatttatcccggcaactatgactactttttagcgcaatcggcattgttgcgtgaacaactcttagctggcaacgccaaaaagagcgccgagattgaagaattacaggactttgttaaccgctttggtgccaacgcttctaaggcaaaacaagccagctcgcgcgccaaacgcatggacaaaattaaactggatgaagtgaaatcctccagccgaattaccccatcgattcgtttcgctgctggcaagaaaatgcatcgtcaagccttagtgctggaaaatcttggccatggttttgatggcgaaaacttattcgaaggcggtgatttaattctcgaagctggcgcaaaactggcaattattggcgagaacggtgtgggtaaaaccaccctattacgctgtttagtcaatgaattaatccataatgaaggcacgattaagtggtccgaaaatgccgctatcggctattgcccacaggatagtaccagcgatttcgataatgacttgactattattgaatggatggaccaatggcgccaacccaaacataacgatttgatggtacgcgccatgttaggtcgtttgctgtttaccgaagatgatgccaataaaaaggctaaaaactgctccggcggagagaaaaaccgtttaattttcggtaagttaatgatgcaagatatcaacgtcatcattatggacgaaccgactaaccatatggatatggaagcaattgaagcgctcaataatgccctcaaagattttgaaggcacgctgatttttgtcagtcatgaccgcgaatttgtttcttcgttagcgactcgcattattgatattcgtgatagaaaattggttaactttcaagggacgtttgatgagtatctggcaaaccttgccagtgcgtag

SEQ ID NO: 270632 - DNA, 818 bp, Unknown
  Bacterial polypeptide expressing nucleotide sequence isolated from the Sargasso Sea
tcaaaacaagattcgaaaacataaagaaaataaagaaatagaaattctaaaaattaaagatttgaaagtatggtatcctattaagaagggtatttttaaaaaaacagttgattatgtcaaagcaattaatgttattaattttaccttaaatcaaaaagagacattaggtattgtaggggaatcaggatcaggcaaaacttcacttgttctagctattttgaaattaataacatcatcaggaaaaatagaatttaataaaactgatttaaattcaataaaaaaaaataaacttaaaagtattagaaaaaatattcaaattgtttttcaagacccttactcttcattaagtcctagaatgaatgttgaggaaatattgaatgaaggaatagatgttcactttccaaaatattccataagtgaaaagaaacaaattttaaaagatattttaaaagaaacaggtatggactataatagagatcataataaataccctcatgaattttcaggaggtcaaagacaaagaattgcaattgcaagagctttgattttaaaacctaaaattcttattttggatgagcccacttcagcattagacattactattcaaaatcaaatattagatttacttcaaaacttacaggaaaaatattctcttagctatatattcataagtcatgatatgaatgtaatccgatcagtatcagataaaatattggttttaaaaaagggaaggctaattgagtataacagtgctgaaaacgtttttaataagccaaaagatgaatatacaaaaaacctcattagttcagtagtttaat

SEQ ID NO: 270633 - DNA, 241 bp, Unknown
  Bacterial polypeptide expressing nucleotide sequence isolated from the Sargasso Sea
cttgtctggtggtcagcaacaaagagttgcaattgcccgcgcacttgcggtgcgccctaagttacttttagcagatgagccaactggaaacctcgacgaaagcactgcgtctgcagttctaactgctatgctggacttagttgggcgcactggcgcagcacttatggtcgtgacgcattctgctgctttggccggcaaaatggatcggcgagtacgattgaagggtggagttctcctgtga

SEQ ID NO: 270634 - DNA, 1629 bp, Unknown
  Bacterial polypeptide expressing nucleotide sequence isolated from the Sargasso Sea
cctgactgtctaccgggaaaatccagtagcgctctccattacaatagcccgactcacggcacgggaaggcatgtatttcgattcaaggctctggggattcacccggagtgtcacgcttcgtatttttggcgcggtggcggtgggtgtgcttgccgtgttttttggcatcgcgcgcctgggcctccttggctggctgatcatccaggtttttgagggcgcaccggttcaggacctggtgcttccttttataggtgtgggcgtggtcatggtggtccgcggctggctcgaatacttgcggaccatggtggcgcacaacacggccgcccgcgtgcaggtgcacctgcgccaggtggtcttcgatcaggtgacacgtttgggccctgctcacttcgggctggagcgcacgggtgatgccattgtggcgatgatcgagggcgtggagcagctcgagatttatttcgggcagtatctgccccagctcgccgtctcgatcctgacgccctttctgatttttgccgttgtggcgttttttgatgtgccgatcgccctggttatgctcggcgccgcactcttcaccctgatcgcaccgcagatttttcaccgctgggacagccagaagagccttgaacgcggcgaagcctacaaagcctttgccgcggaatttctggattcggtacagggtcttgccaccctaaagtcctttggccagagcaccgcccgcgcccgaaaactcaaagacaccgcccacgccctgtttaaatccacgatgtgggtgctcgcgaccaactcgctcgcgcgcggcatcaccgataccgggatcacgctcggtgtcgcggttacgctagccttcggcgcctttcgggtggctgatggcgagatgagtcttggcgtgctgctgatggtgctgatgctgggcgtcgaggtctaccggccgcttcgcgatatgcgcgcgcttatgcataacggcatgctggcgcagtcgtcctcacagaccatcttccagttgatggatgccaagccgatggtcaacgaatcaccttcgccgttggttgtggatgcgctcgaacccacggttgcgctcgaaggcgtgggctttgcctatcccggcgggcggcgcaccacgcacgaaggcttgagtttcaccgtggcggccggcgagcgggtaggctttgtcggcccaagcggcgcgggcaagtcgtcgatcgtgcggctcctgttgcgtttttatgatcccgattcgggaacggtaaagatcgggggtcacgatcttaaagacctgcgccttgaagatatccgcggccagatcgcggtcgtcaatcaggatacttatctttttcatggcacggtcgcggataacctccgggtcggcaagcccgacgccacgcccgaagaactcgaagccgcctgccgcgcggccaacgcccatgagtttgtctcgctgctgcctcaggggtatgacaccgtaatcggcgagcggggcatccgtctttcgggcgggcagcgccagcgggtggcgatcgcccgggcgatcttgagagacgcaccgatcctgattctcgatgaagcactctcggcagtggatgccgagaacgaatcgatcattcaggacgcgctcgatcggttgatgcg

SEQ ID NO: 270635 - DNA, 376 bp, Unknown
  Bacterial polypeptide expressing nucleotide sequence isolated from the Sargasso Sea
gcattaaaacaattaaaacaagttcaaatagatgaccaagcgaacaaatatcctggtcaattatcaggtggacaacaacaaagatgtgcaattgcaagagctttatgcatggaaccaaaaataatgctttttgatgaaccaacatcggcacttgaccctgaaatgattaaagaagtattagatgcaatggtcaacctagctaaagcaggtatgacgatgattgtagtaacccatgaaatgggttttgcgaaagaagtagcagatgaagtcatttttatggatgaaggaatgatagtagaaaaagcagatactaaagagttttttgcaaatccaaaaaatgacagaactaagctatttttgagccaaattctttaga

SEQ ID NO: 270636 - DNA, 2026 bp, Unknown
  Bacterial polypeptide expressing nucleotide sequence isolated from the Sargasso Sea
atgactgatataattcaaaaagtaaaaaatttatctattggatttagaagtaaaaagggtgaagaaatcttaattttaaaaaatataagcacaaatattaaaaagggtgagacagttggaatagtaggggaatctggttctggaaaaagcacattagcattagcaatgatgggatatgtcaaacatggactttatactattgaaggagaatgtcagtttaattcatcaaatctactgaaaatgaaaagtaaagatttggaaaaaattagaggtagaaagatagcaatgataccacaaaatgcaggtcaagcattgacaccaaacttaaagataggttatcaaattgatgaagctttacaattgcactcagatttagatgaaaaggaaagagaaaaaaaaatttctgagttgttaaataaagttagacttccttcaccagagacgattgctttaagataccctcatgaactctcaggaggtcaacaacagagagttgctgttgccatggcattagctggaacaccagatttacttcttttagacgaacctacaacaggattggatgtaacaacacaagctcatgttttggaacttctaaattatattgcaaaagaaactggaacatcgatggtttatgtaagtcatgacttaggggccattgctcaagtgagtgacagaattattgttatgtattcaggagaaatcgttttagaaggtccatcaagagatatccttaaaagaccaattcatccttatacccacggattgcttaaatctataccaaaattatctttagctggtctcccagagtcgatgcctggtagtcaacctcaaccgggtataattcaaagtggatgtagtttttttgatagatgtaacttttcagatgaaaattgtaaaaataattctcctaaattagaatttttaaaagatttaaatactagtgttagatgttttaattatgaaaaacttgtgaacgagagtcaagctagtcaaactgttaataaaattaagaataaatcacaagataaagaaatattaaatttatcagaagtatctattagttacgctaaacaaaaacttttagatcaaattttcaatagaatttctgatgataaccctacagttaaagatataaatattaatattaaaaaaggagagacaatagctttagtaggagagtcaggaagtggaaaatcaactatcctaaaatctattgctggactacttagaaccaaagatggtttaataaggtttgatgaaaatagaaatttatcgtctgatttgaaagaaagagatcccaatgatttaagaattattcaattaatatttcaaaatccagatgagtctttgaatccaaaccacacggtagaggaaattattgcacaaccattaaaattatattttggtttaaaaggtgaagaattaaaaaaaaatattatagatctacttcaaaaagtaagacttggagaattttatacgtctagatacccaagacaactatctggtggtgaaaaacaaagagtagctgttgcaagagcttttgctgctaaaccagatatcattttatgtgatgaggtaacgtctgctttagatgtttctgtgcaagctgctgtattaaacttattgcaacaactgaaagaagactttggaactacgtacatatttgtgtcacacgatttagcagttgtaagagcaattagtgatagagtagcagttctttatcaaggaaggctttgtgaagttggaccctcaaatgatgtttataagtttccatctcacccttatacagaagttttgctgggtgctgttttagaaccagatccagatataaaacctaaattagttgctgaggatattgttgaagaaagacctcctgaaaaagggtgcagttttcaaggcagatgctccagaattgttggagatatttgcaagaaagaaataccaccatggcaattaacagatagtggtaacgctatcagatgtcatatacctattaaagaattacaaaaagaacaattttaaa

SEQ ID NO: 270637 - DNA, 1068 bp, Unknown
  Bacterial polypeptide expressing nucleotide sequence isolated from the Sargasso Sea
ctctcgtgctgcgcgcggaaaaactctcgaagacattccacgtgtccggcgccccgctgcgcgccgtcgacgacgtctcgatcgatctcgccagcggcgaaacactcggccttgtcggcgaatccggcagcggcaagaccacgctcgcgaaactgatgctcggtctgctgacaccggatgcgggcagcgtgctcgaactcgacggcacgccactcgccgcgcgcgtcacgcgacgcaacgacgaacaggtcaagtccttgcagatcgtgtttcagaatccggactcggcactcaatcgcgcgcattcggtgaagcgcctgatcggccgcgcgttgtcgcgcctcaccgccctgcgcggcgccgcgatcgacgaacggctcgccacgttgacggccgccgtgcgcttgcccgagcgctatctcggctcgcgcacgcgccagttgtccggcggactcaaacagcgcgtggcgatcgcgcgcgcgttcgccggtgagccgcgcgtggtggtgtgcgacgaacctacctccgcgctcgatgtctccgtgcaggccgcgattctcaatctgctcgccgatctgcaacgcgagcgcggcgtgagctacgtgttcatttcgcacgatctgcatgtggtgcgctatctgtcggatcgcatcgcggtgctttacctcggccggctgctggagatcggaccggcggccgcggtcttcggtgggccgcatcatccttatacggaagcgcttctgtcttcagtgccgacgctcgacgcccacgacagccgcgcccgcatccgcctgtcgggcgatctgccgagcgccgccacgccgccttccggatgcgtgttccatacgcgctgtccgcgcaagctcggtgcgatttgcgagcagcaagatccgcccttcctcgaagccggcggcgacgactctactcagtcgtccgcgcatcgcatccgctgccatatccccgtcgacgaactgcgcgcgctccaggccgcgtcgcgcgacggtaccggcaaggccaccggccgtggttcggaagacaccccggaagatgccgcgcgcaacgaataac

SEQ ID NO: 270638 - DNA, 703 bp, Unknown
  Bacterial polypeptide expressing nucleotide sequence isolated from the Sargasso Sea
tatgaaatttgataaggatgtcctttccgatataaatctaaatatagattccggcgaatttgtatcaattttaggaccgtctggatgtggaaagtctacattattaagattagcatcaaatttagcaaagcctactaaaggtgttgtggattatatatctcctaaagatttatcaattggttttgtttttcaaaacccaacattaatgccatggcgtactgttatggagaatatcactttacctctagaattaaataaaaagaaattctcaaaggaagaagcattaatgtggctagcaagagtaggtttaaaagacaaagaaaagagttaccctaatgaattatctggcggccaaatgatgagagtttctatcgctcgatcactcatcaatggttgtaatcttttacttcttgacgagccttttgcagcattagatgagatcacaagaaggaaacttgaggatgatcttttagaaatatgggaaaaagaaaagtttactgttttgtttgttactcattctgtatctgaggcaatttatttatctcaaagagtgctcgttctttcatctgggccgggaaagatagtatatgaaaaaaatattagtcaatatatttcaaaagaagaatttagagaaagtaaagaatttcaagctataaatagtgaaatttttgaaaaattaaaaagtggagtaaataatgaataa

SEQ ID NO: 270639 - DNA, 795 bp, Unknown
  Bacterial polypeptide expressing nucleotide sequence isolated from the Sargasso Sea
ttgaaaatttagcatttccattaaaggtaagaaaaatctctcaagaggatatagaaaaaaaagtggacaaagctttagcaatggtttcacttggcggatttgcaaatagaatgccaggacaactatctggtggtcaacaacaaagagtggcagttgcaagagcgttagtttttgatcctgctgttgttttaatggatgagcctttaggcgcgttagataaaaatttaagagaaagcatgcaatacgaaattaaacacattcatgaaagtattggtgtgacagtagtttatgtaactcatgatcaaggtgaggctttaacgatgtcaaatagaattgcggtattcaatgatggcaaagttcaacaactatcaagtcctgataagttatatgaagaacctgtaaactcttttgttgcagaatttattggagaaaataatactttcggaggagaagtttctgaaatttcaaatggaacatgtaaagttaaattagaaaaaggtgaaataattgccaatccaatttcagttaaatctgttggagaaaaaactacagtatcaattagaccagaaagagctttgataaaccctaaagataaaatggataataatcaaaaaggaaaaatcgaagaggtcatttaccacggggatcatactagagtaagattaaatttacttggtaattcagaatttatattgaaagttccaaacagttctcaaaacctagatataaaacttggtaatgaaattaatattggctggaacagtcatgacgctagagctttagacccaaaataag

SEQ ID NO: 270640 - DNA, 352 bp, Unknown
  Bacterial polypeptide expressing nucleotide sequence isolated from the Sargasso Sea
aatgtcagataaaataatacaaatcactgagatgaataaatggtttggtgatttccaggttttaaaagacataaatttagaagttgaaaaaaataaaaaaattgtcgtttgtggtccctcaggttcaggaaaatcaactttaattagatgcataaatagattagaggaacatcaaaagggttcaataatagtagatggaaatgaattaaccgaagatactaaagacatagaaaaaattagagctgaagttggaatggtatttcaacaatttaatttatttcctcatctttctattttagacaattgtacattagcaccaatttgggtaaaaaaaatccaaagaaagaagcag

SEQ ID NO: 270641 - DNA, 622 bp, Unknown
  Bacterial polypeptide expressing nucleotide sequence isolated from the Sargasso Sea
atgagtatagaagttaaaaatttaagtttttcttataacgaaaggcctattgttaaaaacctatcttttagtgtatctaaaaatcaaataggtctaataagtggtgttagtggagttggtaagacttctttattcaatatcatttcaggtttaaaaatgcctgactcaggaacaatactacttaataatattactttaaatgatgagggtactaatttgcagacagaaaaaaggaacattggttatgtttttcaggactttgctttatttcctcacatatcttcaaaaaaaaatatgcaatatgctatgtctaaaaaagatgagaacttatttaaagatttggtatctgatttaaatatggatgaacatttaaataaaatgcctcatgaattatcaggaggacaacagcaaagagttgctttaattagagctattttaatgaaacctagtattctattattagatgagcccttctcaaatctagatgaaaaaaattttttaatctgcacaaatatgataaaaaaaattataaaattatttgaaataccatgccttttggtgtcacataactcatctcaaaataatgtcattggtatagatcatgagatattaattaaatagt

SEQ ID NO: 270642 - DNA, 309 bp, Unknown
  Bacterial polypeptide expressing nucleotide sequence isolated from the Sargasso Sea
aacagcaacgtgtggccatagctcgctcattatgcatgaatccaaaaattatgctttttgatgagcctacttccgccctagacccagaaatgataaaagaagtcctagacgtcatgatagaattagctgaaaccggcatgacaatgctagttgttacccatgaaatgggttttgcaactgccgttgctgaccgtgtaatatttatggatgatgggcagataatcgagcagaacaatcctaaagacttctttgaaaaaccgaagcataaacgtacaaaactttttctaagccagattttggcccattaaa

SEQ ID NO: 270643 - DNA, 376 bp, Unknown
  Bacterial polypeptide expressing nucleotide sequence isolated from the Sargasso Sea
ttgagtgaagtaggtttagatccatcaatgtcccaaagatatccacatcagttctcaggtggacagagacaaagaattgcaattgcaagagcactttcaatgaaacctaaacttataatttttgatgaacctacaagtgcactagatgtaatagttcaaaagaatatactaaaattaatagttgatttacaggagaaatattctcttagctattgctttattagtcatgatttaaaagtaataagctcaatttcacataggatatatgttattaaggattctaaaattgttgagactaatactactgatgagttgatctctaatccacagagcgattatactaaaaagctgatagaatcctcttttattgtttaga

SEQ ID NO: 270644 - DNA, 1144 bp, Unknown
  Bacterial polypeptide expressing nucleotide sequence isolated from the Sargasso Sea
tttaacaggtatccgagtggtacaggcgtttagccatgaagtatttgataaaattaagttttcaaaccgggtggaaagtgcatttgacaccgcagtagagagagttcggaaaagagctctgcttactgcggtcgttatcgcatttatttttggcgcagttgctgtcgtattatggattggtggtcgcgatgtgctcgcggggcgaatttctggaggggagctctctgcatttgtattttatgcaattattgtcgcaggttcgacaggcgctttatcggaagtcgtcggtgagttacaaagagcagccggtgcaatggatagattaactgaattattgttagtctcttcgaatattaaaattccttcagagcctaaagaacttccagaaaaagtgagcggcgctataaaattcactggaattaatttctattacccttcgaggccggggcagctagcgttggatgattttaatctagaaataaaaccaggagaaacggtcgcattcgtaggtccctccggtgctggaaaaagcacggtctttcaacttttacttcgcttttatgaccctagttcaggcgatataaaactagacgatatttcattggatcaaactgatcctcggactgtaagagagcagataggccttgttccccaagatggtattattttttcagagaatgttttagaaaatatcagatatggaaggcctgaggcatcaaaagcggaaattaaatcagcgtctaaatcagctaatgcaatcgactatattgaagaattacctaacgggtttgagacgaatttaggcgaaaaaggtgtccagttatcgggtgggcagcgacagaggttagcaatcgctcgtgcaattttacgcgatcctgctattcttttattagatgaagcgacaagcgcattagatgctgagagtgagcgctttgttcagcgtgctctcgatagtataatggtaggtagaacaacattgataattgcgcatagattggcaactgtcttaagcgcggatcgtataattgttatggaaaagggacgtgttatagcttcgggaggacatgataaattacttaaaacctgcccgctctatgctaggttagccaatcttcaatttgatttgaacactagtactaaatag

SEQ ID NO: 270645 - DNA, 685 bp, Unknown
  Bacterial polypeptide expressing nucleotide sequence isolated from the Sargasso Sea
tatgttgcgttttgagcaagtcacaaaaagttatagcggtggttttgtagcgctcgacagggttagttttcatctggaaaaaggtgaaatggcctttttaacaggacattcaggcgctggtaaaagtaccttattaaaactgatcagcctgattgagcgtccaagcacaggcaaagtctttatcaatggtgtggacttaagccgggtgaacaaagggcaggtaccttatgtacgccgtgatattggtatgattttccagaaccataagctgttgatgaaccatagcgtgttcgacaatgtggctttgcctttagtgattgaaggttttagcggcaaagacatgaccaaacgagtgcatgcggctttggataaagtcgggctgctggataaggtgcgttgcctgcctcacactttatccggtggcgaacaacaacgggttggtatagcccgtgctgtcgtcaatcggccacctttattgttagccgatgaacccacaggtaatctggatcctgatttatccaaagacattatgaacgtatttgaagcctttaatcaggtcggcgtgtctgtgctgattgccagtcacgatttaagtttattagcccggatgcgttaccgtaccctgactttaaaaaatggccgcatgatcaacgatggcttaacgtcctatggagccgacgaatga

SEQ ID NO: 270646 - DNA, 841 bp, Unknown
  Bacterial polypeptide expressing nucleotide sequence isolated from the Sargasso Sea
aatggtatttcaaaattatgcactattccctcatatgacagtttacgaaaatttagcttttccattaaaagttagaaaagtccctaaagatgaaattgataaaaaagttgataaagcattagcaatggtttctctttctgaatttggacaaagaatgcccggacaattatctggtggacaacaacaaagagttgctgttgctagagctttagtttttgatccaaaagttgtattaatggatgagccattaggagcattagataaaaatttaagagaaagtatgcagtacgaaataaaacatattcatgaaagtattggcgttacagttgtttatgttacacacgatcaaggtgaagctttgaccatgtcaaatagaattgcagtatttaatgatggtaaggttcagcaattatcgagtccagacaaattatatgaagaacctgttaattcttttgttgctgagtttataggagagaataatacttttgcaggtgaagtgacagatataagtaaaaatcaatgtaaagttaaattaggaaacggaacagaaattttagcaaatccaattagagtaaaagcaaaaggcgaaaaaacaattgtttcattaagacctgagagagcgattatagatcctaaagagaatatgcaaaataaacacaaaggtaagattgaggaagttatttatcacggtgatcacaccagagttcgagttaatatgttaggaaattcagaatttatattaaaagtcccaaatagttcggcaagaatggatataaaacttggtaatgaaattaatattggatgggatagtcatgattgcagagctttagacccaaaataa

SEQ ID NO: 270647 - DNA, 1622 bp, Unknown
  Bacterial polypeptide expressing nucleotide sequence isolated from the Sargasso Sea
tatgtttaaagtctttagaacaccagaatttaaaaaagcattaagtttttattttgaaggtataaaggaaaacaagaagcatttttatatctcaatatcatcagctgtactttggtgttttcttgtagtacttcacccatatatcattaaaagagttgttgatgacggtatccttacaggcaatgctcgaattattgtgattttattatcttcattaataatcattggttatacgcgtgcaatatcaattggaactagaagatattttggcatgtcagtatcttatagtgtggaagctggaatcagaaacaatattttttctcatatgcaaagacttgcatttcaatatcatgacaaagttcctactggagaacttatggcaagagcatctagtgacgcatctcaagttcgtcttgcttacgctattgctcctctagcttcagcaaaccttttcttattatttattctcagcattactttattgagcataagccttccccttggatctgttgtcctactttctattcctggagttttatgggttggtgctaaatttgctgaaaaagcaatggtagtttctctaagggtgaaagaagcagaagcaactatgacaactgaagttgaagaacagctaggaggaataagagtagtaaaagcttttggtaatgaaaattttgcgtcagataaagtagatagcgctattgacaatatatatgaaaaatctctgaattatctaaatctaagaactaaatttgttccaatttttgagcttattccaatgataattactttgtttgtattagtactaggaggatatttatcagtaaacgaattcatatctttgggtgatttcatagcttttaaccaatacgtatttttacttatgtggcctttaagaataactgcatggttcctttctgagataccaggtagtatttctgcagctaataggattcttgaattgctaaatgaaaaacctgaaatagtaaataaaaaagatcttcaaaaactacctatagatggaaatggcacaatcaaatttaataaagttaattttcaatatggaaatgaaaaaatatttaatgatttatctttttcagtagaaggtaaaaaaacggtagctgttgttggctctactggatctggaaaatctacccttggatatttaattccaagactataccaaattgactcaggaaaaattgaaattgatggagttgatattaataatctcgatttatcagaattaagaaacagtgtaagtttggcttttcaagaaagctttcttttttcaaatactgcaaaagaaaacattgctattggattaaaagatgcaacacaagaagaaattgaaaatgcagcaaatgttgcaagagctcacgaatttattgctgaattacctgaagcctatgaaactacagttggagaaagaggctatggtttgtcaggaggtcagagacaaagggttgcgttagctcgtgcaattttaagaaatccaagaatcttaatattagatgatgctttatcagctgttgacgcctccacagaggaagaaattaggaatgaacttaactctgcaatgaaagatatgactactttaataattacaaatagagtaccga

SEQ ID NO: 270648 - DNA, 685 bp, Unknown
  Bacterial polypeptide expressing nucleotide sequence isolated from the Sargasso Sea
tatgaatgttatcgaagtcaacaacatcacgaaacactatttactaggtactcagactgtagaagccttgagaggcgtaagttttggaataaagcagggagaatttatagcgattatgggtccatctggctcaggcaaatcaacacttatgaatattattggatgccttgatactccaaccaatggaacatatcacctgaacaataaggaggtaagtaccttagaaggtgatgagcttgcgggcataagaaataaagagataggttttgtatttcaaaattttcatttattagcccgaaatagcgcccttgataatgtaatgttgccattgaagtatgccggatttaataaacaagatcagttggataaagctaaagatactctttctaaagttggacttgagtcccgtatgagtcatcagccctctgagctttctggagggcagcagcaaagagttgctattgcaagggcacttgtaaataacccatctattttatttgctgatgagcctactggaaacttagatagtcagacaggacacgatgtaatgcagttatttcataatcttcatcaacaaggccaaactatcattcttataacgcatgagaatgaagttgcttcagaagcagaaagagtaatatatattagggatggtttggtagaatcagataccagaaaggattaa

SEQ ID NO: 270649 - DNA, 561 bp, Unknown
  Bacterial polypeptide expressing nucleotide sequence isolated from the Sargasso Sea
aatgaaaacattaaaaattgaagaattatcaaaaaactttggatcaacagaagttttaagaaaaattaatttagaaatagatgaaggaaatttcttagttcttttaggcccttcgggctgcgggaaatcaacacttttaaatattattgcaggattagagacaatcaatgaaggtaatgtatatatagatgattacaatgtaagcaaagtagaaccaaaagaccgaaatattgcaatggtttttcaatcatatgctttatatccatctatgaacgtacgtgaaaatatgatttttggtcttaaacaagcaaaagtgtcaaaagaaaaaatagaggaacagctagaaaaagtatcaaaatttttacaagttgatgctttattagaaagaaaaccttcacagttatcaggaggacaaagacaacgtgtagcaattggtagagcactagtgagagaaccaagaatatttttattcgatgaacctttatcaaatctagatgcaaaattaagagttgaaatgaggcgagaaattaaaaaacttcatcaacagcttaaaacaacagt

SEQ ID NO: 270650 - DNA, 1727 bp, Unknown
  Bacterial polypeptide expressing nucleotide sequence isolated from the Sargasso Sea
aatgaaagaaaacaatcttaaaaaattatttttgtattcccaaaaacaagatacaaaaattaaaagaggaataatttactctattctgaataaattatttgaccttgctcctcctgttttgataggagtagctatagatattgttgttgaaggatcagattcatttttaggaaatcttggctatgaagatagaaggcagcaattaattgtattggctgtactaacgtttgtaatctggggtttagaatctacttttgattatgttgctgcagtaacctggagaaatatttcacaagacattgaacacaaactacgaactgaaacttttcacaatgttttagatcttgatcttgaattttttgaaaataaatcatcaggaaggttgatggcaatcttaaatgatgatgttaatcaacttgagaagtttcttgatacaggagcgaataaacttttacaaacaatgactactgttcttgtaattggaggaacctttatttatatctcgcctctaattgctttatttgcctttatacctataccaataattatttttggttcctttaaatttactaaaacaattgcaaaaagatatacaaaaattcgaaacacaattgaatctttaaatgcaaatctatctaattctttaacaggtatattaactgttaaaagtttcaatagagaaggtaaagagactgagagaataactaagtcgtcagaagaagttaaggcagcaaattaccatgcaataaaactttctgctgcatttattccaataattagaattgctattttatttggatttacagcaacattgttaataggaggatttatggctttagatggtcaaataaaagtggcaatgtactctgttctcctgtttataactcaaagattgctttggccattaactgaactcggtgatacttttgatttatatcagcgtgctatggcttcttttaaaagaattacaacactaaaagatacgaagccaaaaataacaaatggcaataatgaactaaagaattttgaaaattcaatcgtattcgacaaagttaatttttcttatgttgaaggatttactgttttagataatgtttcagtagaaatcaataaaggccagacagtagcaatcgttggaagcacaggttctggtaaatcaacaatgattaagcttattttaaggctctatgatgtgactgaaggagatataaaattcgaccatataaatataaaggatttagatcttaaaagcctaagaaacaatattgcattagttagccaagatatatttctatttgaaggaaccgtatttgaaaatattgcatatggaaatctagaagcatctgaagaagagatttgggaagcagcaaggctctctgaatccgatgaattcataaatcaacttccaaataaagaacacacaattgttggagaaagaggacaaaaactttcaggggggcaaagacaaaggatctctatcgcaagagcaattctaaaaaatcctgaaatattaattttagatgaagctacttcagcagttgataacgaaacagaagctgcaatccagcgttccctcgatacccttaaagaaggaagaacagttattgcaattgcacatcgcctctcaacaataagaaatgctgacaaaatatatgttctagaagacggagaaattgttgaaaacggtacgcatgatgaacttgttacaatcggaaaagtttatcaaa

SEQ ID NO: 270651 - DNA, 703 bp, Unknown
  Bacterial polypeptide expressing nucleotide sequence isolated from the Sargasso Sea
ctgtctaaaaataagatgattattaatgtaaaagacataaaaaagtcttacacagttggaactcaagaagtaaatgctttgagaggaataaatctgtctgttgaaaaaggtgaatttatttcaatcatggggccgtctggttcaggaaaaacaacactgatgaatataatcggttgtttagatacaccttcaagtggtgaatacgaattaaatggaagtcttgttagtaaacttgaagacgatgaacttgctcgtataagaaataaagaaattggttttgtatttcagtcatttaatcttctcgcaaagaattcagtattagaaaatgttatgttaccgcttaaatatgctggctttgaaaagtctgaagctgtaaaaaaatctaatgaggtaattgataaagttggcctttctgataggttagcacatacgcctgcggagctctcaggtggtcaacaacaaagggttgctattgcaagagcattggttaataaaccaagtattattttcgcagatgagccaacaggaaatttagattctaaaactggtaaagaggttatgactatatttaaagaattaaatgctagcggacaaacaattattttaattacccatgaagaaagtattgcaaatcagtcaaatagaattataactatcaaggatggtctgataaaatcagataacaggggcacacatgactaaa

SEQ ID NO: 270652 - DNA, 495 bp, Unknown
  Bacterial polypeptide expressing nucleotide sequence isolated from the Sargasso Sea
cttgccacacctcgcggtcaacagcgtaaaagcaaagtacgcaacggttgaagttttaaagggcgttagtttttcactagaaaagggtgaagtcattgctcttgtaggtccctcgggttcaggaaaatcgactgttctgagaaccctggtgggtttaacaccaccgtcctcgggaagaatcgaaattcatgacaatgaaatcgattatagaaattctgcttcgttacgttcagcacgtgatcagatggccatcgtttttcaacagtataatctgttccaaaacatgacggttttgagaaatgttactcttgctcctcagaaaattaaaaagcgcccagctgaagaagttagagttgaggcagagcgtcttttgcaacttgtaggattggctgaaaagataaatgaatatcctgatcagctttctgggggacaacaacaacgagtagcgattgcaagagctcttgctttgaagcctgaaatccttctgctagatga

SEQ ID NO: 270653 - DNA, 1360 bp, Unknown
  Bacterial polypeptide expressing nucleotide sequence isolated from the Sargasso Sea
aaaagcaattctcgaccgttataccgatttgcaaatgaatattctgatgaaacagcagatgaaatggcaaaacttcaagaccaaatagatgctgaaaatttatgggatttagatagtcaaattgacgttagtatggaagccctccgctgcccccctgacgatgctaatgtaacaactctatctgggggtgaaaaacgccgtgttgcactctgcaaacttcttctggaagcaccagaaatgctgctacttgatgagcctacaaaccatttagatgcggaaacgatcgcttggttacagcaacacttgattgactataaaggtacgatcttaattgtaacccatgatagatatttcttggatgatataacaggttggatcttagaattagatcgcggtcgcggtgttccatacgaaggcaattattcaagctggttggagcaaaaggctaaaaggcttgaacaagaatcgcgagaagataaaacacgacaaaaaactttggagcgtgaattagagtggatgcgtcagggccaaaaagcacgtcaagccaaacaaaaagctaggatcaatgcctacaatgatttagcaacacaatcggaacgtgaaaaaatatcaagagctcaaattgttattccaaatggaccaagattaggtggcaaagtaatcgaagttgaaaacttaaataaagcaatgggagacaaacttcttattgaaggtctcagttttagtctgccaccaggaggaatagtaggtgtaattggaccaaacggcgcaggcaaatcaacactttttaaagttcttactggacaagaaagtgaagattcgggttcagtaagttatggggacacagttcaactatcttatgtagaccagtctagagatgatcttaaagatggtgagactgtatgggaagcgatttcaggtggagctgaagtaattgaactgggtgatgctcaagtaaattcgcgtgcctactgttcatcgtttaattttaaaggaggggatcagcaaaagaaagtttcattgttatctggaggagagcggaacagagtccatatggctcgtcttttaaagtctggcggtaatgttttgttgttagatgaacctacaaatgatttggatgtcgagaccctcagggcactcgaagatgcattagtagatttttccgggtgtgctgtagttatttcccatgatcgtttttttctagatagaatttgcacacacattatggctttcgaaggtgacgctcacgtagaatggtttgaaggaaatttcgaagattatgaagaagataagaaaagaagatttggcccggatgctcttgagcctaaaaggataaaacacaaaaaatttacccgataaa

SEQ ID NO: 270654 - DNA, 1177 bp, Unknown
  Bacterial polypeptide expressing nucleotide sequence isolated from the Sargasso Sea
atggctaaaatcgtctgtagaggcctcacgaaacgctacgatggcggccagccggtattgcatccgctcgatatggaaattgacgacggtgagttcgtcgtgttgctcggaccatccggatgtggcaagtccacgatgcttcgcatgattgcgggtctcgaaggaatcacggggggcgaactcgcgatcggcgacacggttgtgaacgacctgccggcgcgcgagcgtaacgtcgcgatggtgttccagaactatgcgctgtatccgcacatgagcgtgtacgacaacgttgcgtttggtttgcgccggctgaaggtgccggcggcggaaatcgaccgtcgcgtgcgggaagtcgctgcgatgctgaacctcgacaccttgctcgatcgcaaaccgcgagccatgtcgggcggccagcagcagcgcgcggcgattgcccgggcaatgatcaagacacctgaggtgtttctgttcgatgagccgttgtccaacctcgacgcgaaattgcgagcccagttgcgcggcgacatcaagcggctgcatcagcgcctgaagacgacgacggtatatgtcacgcacgaccagctcgaagccatgacgctcgccgaccgtgtcatcctgatgcggggcggacagattgagcaggccggcacgccgtccgatctctaccacttcccgcatacgctgttcgccgcggggtttatcggcacacccgcgatgaatttcatatccggaacggtcgagcgagccgctgaaacgtgtttcgtccaggtgcagggccagcgctgggcgcttgccggaccgcgtttcgccacgctgcaatccggccaggcggtgaaactggcgattcggccgaactatctgaaagtggcatcggcagacgatgaattcgactcgctaaggctgcgcggcaaagtggagttgatcgaactgctgggcgcggaggcacttgtcacgtttgaattcgccggcgaacgcctggctgccctgatgccggcgagtgacctgcctgaagtggatagcgtggtaacgtttcagttcaaggtggccgacctgcatgttttcgataccagaacggagcaaaacgtctcgttgcccgttcctaaggccgccagaacaatgcttgcgggttcgccacatcagaacacgggtgtgcagggagccgctttgcattgac

SEQ ID NO: 270655 - DNA, 787 bp, Unknown
  Bacterial polypeptide expressing nucleotide sequence isolated from the Sargasso Sea
aatgcaaaaaggtttaggaattactgttcaagatttaagttggtctgttaaacaaaaaaaacagaaaattctctatcctttaagttttgaattaagcccaagaaagatacttggcgtagtagggccaaatggtgcaggaaaatcaactcttttaagattgttgtatcgttattataagccaacaacaggaaaagttaaaattgatggtattgatatatggaaattgacttctcgtcaggtagcttgttctattgcaacagttttacaagaaaatttatcagatttttcattaactgtgaaagaaattgttactttagggcgtactccttattctaaatggttaagtaattcaaacagtaaaaatgataaaaaaattgtgcaatcatcaattgatcgtctttctttaaataaattcgaaaatcgacacttaaatactttatctggtggtgaacgtcagcgtgtaatgattgctagagcgttagctcaagaacctgatatattaattttagacgaaccaactaatcatttagatattcgtcaacaacttgaaatcttaaatcttttaaaagatttatcaattactgttattacatctcttcatgacctgaatatggctagaagtaattgtgatgaaatccttctattgaaggatggttacgctttagggtttggtaagccaaatcttattctttctgaaagtaacatttcagaagcttttagggtgaaagcgtgtcacgaattattgacaccaagtaactccaaacaaataacttttcacttacattaa

SEQ ID NO: 270656 - DNA, 673 bp, Unknown
  Bacterial polypeptide expressing nucleotide sequence isolated from the Sargasso Sea
aatgaataaaaccatcttagaagtttccaatgttacaaaaaaagttaccagccctgagggcgaactaaccattgtaaatgatatcagtctttccttagaggagggcgtttttgcgtccattttgggcccatctggatctgggaagaccacgcttcttgcaataatggccggtcttgatctgccaagtagtggatctgtgaagcttctcgataaagaaatcacaagcttaaatgaggataatagggcacagattagaagcaaggatgttggttttgtttttcagtcttttcatttgctgcctcgattatcagccttagacaatgtgatgatgccactcgagatacttggcgctaaagatgcaaaagagagggcactaaaagctttggatgaagtgggtttgtccaaaagaacagggcatgttcctcatcaattatctggaggagaaaagcaaagagtcgcaattgcaagagccatggttaaagcgcccggcatcttatttgcggatgagcccactggaaatttagaccaatcaagcactgacaatattctcgaactattgctgggaatcaataaacaaacaaagacaaccttagttgttgtaacacatgatcagcagttagcctcacgatcggatatggtcttcgagcttcaagaaggaaaattaaaatgctga

SEQ ID NO: 270657 - DNA, 1081 bp, Unknown
  Bacterial polypeptide expressing nucleotide sequence isolated from the Sargasso Sea
atattagatgtgaaagaccgattcaaaatgtctgtaattatgatcactcacgaccttggcgttgttgcaagaacatgtgaccgagtattggttatgaaagacggcgagcttcaggaaagtggcgacacagaagctatattttattcgcccaatgcagcatatacaaaagaactattggaaaaatcaaaagaaataaacctggatgatcagcagaaatacacagaaacacaagagacaagcatcaggaataacttggttaaatccagcaaggccaaagtcaactttaccctgccaaaaaagacactttttgcagcaaacaatgtcttaacagcagtcaatgaaatatcaatggaagccctagatggagaagtgttgggcattgttggcgagtcaggaagtggaaagtcaacgctcgctaaaacaattttgggactgcaaaaactcacatccggacaggtggaggtgtttggagaaaagctcactcaaatcaataaaaaagagctaaaagagattcgcaaaaaaatgcaagtcgtctttcaagacccattctcatcgcttaacccaaggatgacagtctttgagattttaaaagaaccactggattcattctttccctcaatgacaaaagagtcagcacaaaaagacatagaggatggcctaatggaggttggattgacgtcagattatttgggcaggtacccacatgaactctcaggcggacagtgccaacgagttgctattgcaagagcactgatgcctaagccacaactattgatatgtgacgaggcagtcagcgcacttgatgcatctatcaggggcgaaataatagacctactgctaagaataaaaagcgagaaaaaactaacaatgatatttattgcccacgaccttgctgtggttagaaagatatgcgaccgagttatagtgatgcaatcaggcaagatagttgagcagggcccaacagagaaggtgttttttgagccagaaaaggaatacactgcgaacctattgagcgcagtaccggttcccgacccaagaaaagagaaggaaaaatatattcaaagaactcaagcggattaaa

SEQ ID NO: 270658 - DNA, 1588 bp, Unknown
  Bacterial polypeptide expressing nucleotide sequence isolated from the Sargasso Sea
atgaaaaatattgttgaagtaaaaaatttgagtattgattttaatgttagaaatggcacttttagagctgtagataatattaattttgatatccaaaataataaaacgttagctttggttggtgagtcaggatctggcaaatcagtaacagccatgtctataatgcaattgctacctatgccacaggcatcttattctgaaaactcttctatcaaatttgaaagtaaagaaatcattaatgcctctaagcaagacttgttatccttaagaggtaatataatttcaatggtttttcaagagccaatgacttcattaaatccttatcacaaggttggcaatcaaattacagagtcagtgttgcttcattctaaagtctcgaaaaaagaggcaaaagatgaggcattaaacttaatgaagcttgttgaaatagacgatgttgaaagaagatttaattcatatcctcacgagctttctggcggtcaaagacaaagaattatgatagccatggccttagtcaataagccaaagcttctaattgcagatgagccaacaactgctcttgatgtaaccattcaggcgcaaatacttgacctcatgtctaagcttaaaaaagaacttggaatgtctattttgtttataacgcatgatcttggccttgtaagagagttttctgatcaagtatgcgttatgcaaaatggacatattgttgaaaagggaaatactgttgatgtatttaaaaatcctgaacattcatacactcaaaaacttcttaatgctgagcctcagccaaaattagatattaatactgaagaaattcctttaataaagattgaaaatgtagatatcttttatgatatgccaagcataaatttttttaacaagaatcgtttccatgctgttaaaaatgcatctctaaatatatacaaaaatactacaattggtgtggtgggtgagtctggctctggcaaatcaaccctaggtaaggcaatagcaaatcttattaaatatgagggagatattctttatgatgggaaggatatcagatattcctcaaaagaaataaaaaagcatatacaaattgtttttcaggatccatatggctctttgtcacccagaatgactgttggagaaattgtcggagagggactaggggttcactttaatttgactaaattagagacacaaaaaagaattgataaagttctagatgatgtaggaatagaaatagatgcaaaaaacaaatatccacatgaattttcaggaggtcagcgtcaaagaattgcaattgcaagatcattaataatgaatcctgcatttatgattctagatgagccaacttcagccttggatagatcaatacaaattcaagtaattaatttactaaaagatattcaaaatgagtatgagttaacttatttatttattagtcacgatttaaaagtaattagaagcatgtctgattatatttttgtaatgaaagatggaaaaattgtagaatcaggcttttcaaatcaggtttttgagtacccaaaagaaaaatatactaaaaaattactctcagctgcgataagatacgcatccgattgat

SEQ ID NO: 270659 - DNA, 661 bp, Unknown
  Bacterial polypeptide expressing nucleotide sequence isolated from the Sargasso Sea
atgtctgaaccagtaattaaatgtgaagctgtttataaaatttttggagaaaatgccaaaaaaatgcttcaagagtcaaatggcaatgtagacgcaaaaacctttcaagaaaatggatgcatagtaggtgtgaataatgcgtcatttgaagtttcaaagggagaaatgttagttgtaatgggtttgtctggctcaggtaaatcaactttattgagatgtatttctaggttaacagacgcaacaggtggaaaaatttttatagaaggtcaagatttacttcaattgaataataaagaactgatagaacttagaagaaataaaatgggaatggtgtttcagagtttcgctctacttccacacaaaacagttgtagaaaatattgctttcccactccaaattaagggaattaaaactgaagatagtattactaaagcaatggatatggttaaacttgttggtcttgatggaagagaaaactattttccaagagaactttctggaggtcaacaacaaagagtaggtattgcaaggtcattagcagtagagccagatatttggtttttggatgaacctttttctgcattagatccgcttatacgaaaagaaatgcaagatgagtttttaagacttcaggataaattacaaaaaacaattatgtttt

SEQ ID NO: 270660 - DNA, 1831 bp, Unknown
  Bacterial polypeptide expressing nucleotide sequence isolated from the Sargasso Sea
catgtttaaacgatttgaatcttgggttgaagccctgcccgatggcgaaccaaccaagccgcccacgggggtgtatgcgttttgccggcattacactaagggctatgaattaccgcttatcttaatgtcagtactgacggcattaatcgccatgctcgaagtctcgctatttggctttatggggcaattagtcgattggttagtgaaaaaaagccctgagacactctttcaagatgaaggctcaacgctgctattaatggggctgatggtcctagtggtgatgccattattagtgctattccatgcgctgatcatgcatcaaactttgctgggtaattatcccatgtcgattcgctggcttgcgcatcgctatctgctcaagcaaagcgtgtccttctatcaaaatgattttgccggccgcattgccactaaagtgatgcaaacttcccttgcggtccgtgaaaccgtgatgaaactcctcgatgtgctagtgtacattttagtgtatttcacctccatgctggtgatggtggccagtgccgatgttcgtctggtgatccccatgctgatctggctagcgctctatatcggtttacagtggtattttgtgcctaggctgaaaacggtttcgactgaacaagccgatgcgcgctcgacaatgacaggacgcattgtcgacagttacaccaatatcaccacggtgaaactcttcgcccatacggataaagaagccgagtatgccaaggcaagtatgcgcagtttcctcgacactgtgtaccgccagatgcgcctcgttacggggatcagtgtcagtgtgcaggtgattaactatatgctcgccttcagcattgccgctgtgtctatcctgctctggagtgacaatgccatctctgttggagcgattgcaattgccgtgagtttagcgctgcgtctcaatggtatgtcgcaatggatcatgtgggaaatcagttcgttatttgaaaatatcggcactgtgaccgatgggatgaacaccctttcgaaaacgacactgatccaagattcgcccaatgccaacactttagtggttgagcaaggacgtatcgattttaatcaggtgagtttccattacggcgaagaaaccggtgttatcgaagatctaaacctcaatatcaaagcgggcgaaaaagtcggtctcgttggccgctcgggcgcaggtaagtccacgctagtgaacctgttgatgcgtttttacgatgttgagaaaggccaaatttgtatcgatggtcaagatattaaaacggtcaagcaggactcactgcgttcacagattggcatggtgacccaagatacgtctctactgcatcgcacgattcgggagaatattctttacggtaatcctgatgcgagcgaaacccaactcgaacatgcaataaaacaggctcaggcccatgattttattaatgaactgaccgaccctaatggcaaccatggcttagatgcacaagtgggtgaacgtggggttaagctctccggcggacagagacaacgtatcgcgattgctcgggtactattgaaaaatgcgccgattttactgctcgatgaggcgacttccgccttggactccgaagtggaagctgcgattcaggaaagcttgtacgaactaatgcaaggaaagactgtgatcgcaattgcccatagattgtccactatcgcggctatggacagattaatcgtgctagatcaaggtcgtattgtcgaacaaggcactcatcaagagttaattgccgcaggcggtatctatgcccagctttgggcgcatcaaactggtggcttcctcgggattgagtag

SEQ ID NO: 270661 - DNA, 355 bp, Unknown
  Bacterial polypeptide expressing nucleotide sequence isolated from the Sargasso Sea
aatgagtagtttaattttgcaaggtgtcagctatcactataacggtacaaaggtgatcgaaaacttagacttaaccgtgggtaaagatgagattgtatgcttgcttggtgccagtggctgcggtaaaaccaccacattaaaagccattgcaggcttagttgaggccaagcacggaagtgtatttatagatggcaagctggtaagtgatgggtcaacatttattgcaccagagcaccgaaatataggtatgatgtttcaagattacgcgttgtttcctcatctaagcgtagcaaataacattgcgtttgggttaggtaaaatgagccaatccgaaaaacaacagcgtgtggatgaa

SEQ ID NO: 270662 - DNA, 706 bp, Unknown
  Bacterial polypeptide expressing nucleotide sequence isolated from the Sargasso Sea
gatgaaaaccgatacaaaaactgtaatttcaatcaatgatatttcaaaagtttatgaaggaccaccccctgtaaaagcactagatggagtttctttaaatgttaaagaaggagatttagttgcaattgttggacaatctggaagtggtaaatcaactttactaaatatgattggtttactggatagtgttacagacggttcaattgaaatagaaggcaaagatatatctgacttaacagataatgaactctcaaaatttagaggtgaaaaaataggattcatttttcaaagcttttttcttctgcctggattgaccgcacaagagaatgttgcggaggggttactatatcaagggatttcaaggtcagaaaggttagaaaaagccggagacgttttagaacaagtagggctaggtgataggttaagccaccttcccaaagaactttccggtggtcagcaacaaagagttgcaattgctagagcgctagtacaagacccagcatttgttttagcagatgagccaactggaaatttggataaagaatcaggaataaatattttaaatatcttaaaagaacttaatgaccaaggaaaaactgtaattatgattactcacaatcaagaacatgcaaatatgtttaaaaaagtaattgaattggttgatggaaaaattgtgaaaaatgaaaagaaaaaaactaagaactag

SEQ ID NO: 270663 - DNA, 3577 bp, Unknown
  Bacterial polypeptide expressing nucleotide sequence isolated from the Sargasso Sea
cttgacattcattatagatcagcaggcggtagacagtggaggtgttatcaacagtgtaattgttacaggggttagctcattaacctctgcagtagtaacagatgttagtgatgatggaaatgattctgatggcaatactgaagatgatccaacagttgtgaccattacagcaacaccatcgatactaattacgaaaacagcatctactactgatcttaattcaaatgggaaaattgacttaggcgatcgcattacttacagcataaccattgtaaatgatggagatgttactttaaccgatgtttcacttgttgatacgctcactgacgggaatagtagtacactaaacctagatagtggccctagctttgtttcagcaacaacaagttcaacctctagcacgcttcaagttagtggcgtttctacatacactgcagtttataacataactcagcaagcagtagatagcggtagtgtaataaatattgctaaggttactgcaagtagtccagggcagagtggtaatgtgtctgatacaagtgatgatcctaacacgggcgcagcaaatgatcctactgttgttagcatttctgcatcaccatctttagaggttcttaaaagggcttcgataacagataatggtgatggcgcaaatggaaaaggagatattatagaatatacaattacaattcaaaacaaaggaaatgttaccttaactggattaactgtcagcgatactattgttgatggtaatggagctactctttcgctgagtaatgggccatatttttcaggttcaaatcaagggtctgctcaaggaagtcttaaagttagtgaaacagcaacctatatcgcattttatatcgtcgagcaacaagcagtagacagtggcagtgtttcaaatgttgctatagcaattgcaagtagtcctggccagagtaacaatgtatctgatactagtgatgatccaacaactggtgcagctaatgatccaacagttacaagtataacggcttcaccttctttagaggtcacgaagacttcttctgttaatgatactaattcaaatggaaagaatgatcaaggggatattattacttattcaattaaagttgaaaataaaggaaatgtaactctaacaggattaaccattagtgatactcttaccgatggcaacggaggttctttaagcttaacatctggcccttcagttgaaggtgttggcggatcacttggatcgcctccaggaactataaagccaggggaggtgcagtcttacacggcattgtatgtcatatcagcccagactgcaagtacacctagtgtcattaatagtgctgtagctatagcaagtggtccaggtcaaagtaacaatgtgtctgatactagtgataatgggaacgacattgatggtaatacagtagatgatccaacagttgttattatatcatcaaatccatcgattgaagcgactaaaacagctacagtatccgatgttaattctaatggagttaacgaccctggagacattatcacctatactatagtcgttgtcaatacaggcaatgttactcttacgggaataacccttaccgataccatcaaagatgacaacaataatgtgctaagccttgacggtggtccaacgtttgtctcttcaagtggttcttcagcagcaggtacactagcctcttcagagagtgcaacttatactgcatcttatacaattgctcctgcagcagcattttctggaagtgtagataatagagtccttgttacggcaagtagtcctggaaacacaaacaatgttactgattatagtgataatgggaatgatagcgatgggaacatttacaatgactggactgaagttgagacttcagcagaagcttcaataaatgtgataaaatcagcaacggtaagtgatactaacgcgaacagtaaaacagatgctggtgatattattacttatactatagtggtttcaaatactggaggggtacctcttcaaggcttaactcttaatgacacactaaaagatggaaataatggtaatcttgctctagacagtggaccaacatttgtttcagcaacaacaagttcaacttcttcaacattagcaataggtggggtagtttcctttactgcagtttatactatttctcccgacgcttcatatactggaagtataaagaaccaggtagttgttcaagctactggacaggggggtagtggaatagttaatgataccagtgatgatccaaatactgctgcagtagatgatccgacaatagttacaatagacccattagcagcgatagaagttaccaagacagcttctgtgacagatgagggagatggtaatataggcgcaggagacgttataaattatgttatcactatagaaaataaaggaaatgtcactctcactggactaaccattagcgatacacttaccgatggtaatggaggagtgctccctatgagctcaggaccttccttctcaggctctaatagagggtctaatacaggaactcttgttgcaggtgaaacggctacatatatcgcttactacataataagtgatcttgccgcaaatactggttcaattataaacacggtttctgctacagctagtagtccaggaaacagtaatgatgtgagtgatataagtgatgatggtattgataatgacggtaatacggttagtgatacaaccgttgttgagattactcctctgccatcaatggagattacaaagacagctactgtgagtgatgtgaattccaatagtgttaatgaccagggagatattataacctatacaatcattgtttcaaatactggaaatgttactctatcaggaattaatttaactgacactttaactgacgctaacgctggatcacttagtcttaatagtagtcctacatttgtctcagcaacaactagttctacctcttctacacttcttgttggagggcggacaacctttacagcctcttacactatttcacaacttgcagcaaataccggaagcattgtaaatactgtatcaggaacggctagtagtcctggaaacactaatgatgtgactgatgtgagtgatgatggggatgatgcagatggtaacaccagtaatgattctactgtagttattactatttctgatgcttcgattgaagtttcaaaaaccgctactgttactcaaaatgatggtaatgcaacaaatgatacgggagatgtgattgtctatacaattgttgtaactaacacagggaatgttactctttcaaatcttaacctagttgatacactaaccaatggaaatggaggatcccttactcttagtagtgggcctacatttgtttcagcaactgctggatcaacatctaaaacacttatcgcttcaggagttgcttcatttactgctcagtataccatatctcaagcggctgcaaatacaggaagtgtaaacaatacggttactgtaacaggaagtagtccagggcagagtaatgatgtgacagatgttagtgatgatgggattgataatgatggaaacactacaaacgat

SEQ ID NO: 270664 - DNA, 573 bp, Unknown
  Bacterial polypeptide expressing nucleotide sequence isolated from the Sargasso Sea
aatgtccaagaaggttgcaagtttagaaagaatatctaaaacatatgggaaggatgatttaactgttaaagctttagattgcataaacttagaaatttataaaggtgactatttagctgtaatgggagcaagtggctccggtaaaagtactgctatgaatattattggatgtctagatagaccatctgaaggtatatataaattaaatggtaccccagttgagaatttatctgatgatgcgctagctgagatacgtaaccaaaaattaggcttcgtttttcagcaatttcatctactttcagatgcaacggcacttgagaacgtaatcttaccaatgatttatgctggtattgagcctgagcaaagattagagcgaggtaagaatgcattaaaaaaagttggtctttctgaaagaatgaataatcgccctaaccaattatcaggaggtcaacaacaaagagtagcaattgctagagctattattaataaccctgcaatattattggcagacgaacccactggagcacttgattcaaaaacaactgaggatgtgctcaatcttttgacaaactg

SEQ ID NO: 270665 - DNA, 424 bp, Unknown
  Bacterial polypeptide expressing nucleotide sequence isolated from the Sargasso Sea
atgaaggctgatcatcgcgttctgctgttgtcgcctgcttcgagtcccgttgaattgcgcggtctctggcatcgctacggcgattcggcggagtcctggacgttgagaggggtggatctgcagctctccgaaggagagctgatcggcctgctggggccctctggatgtggcaagaccaccctgctgcgcctaatcgccggcttcgagacaccgtccagaggcagcgtgcatctgcagaatcggcccgttgccggagaggggcgctggcttccccccgagcgcaggggtgtgggtatggtctttcaggactacgccctcttcccccatctcaccgcctggcagaacgcctgtttcggtcttcgccccggtcaggacgacagcagggccagctggcttctggatcttctcggtctggagggtctgc

SEQ ID NO: 270666 - DNA, 591 bp, Unknown
  Bacterial polypeptide expressing nucleotide sequence isolated from the Sargasso Sea
ctctgagtgctcttgatgcgcgcgtccgtgcttcacttcgtcaggaaatccgtgcactgcatcagcgtctgggcatcaccaccatcctcgtcacacacgatcaggaagaagcactttcaatggccgaccgcatcgtggtaatggatcatgggagcatcgaacaggtcggaactccggaggaaatctatagcactcccgcctcaccatttgttgcggattttattggcgtgatgaatttcatggaagcagaggttgtggcttccggaacgatacgggtaggagaaacctcgctttcctgcgacacgacgaacgtttccagcggagataaagcccggatgacggtgcgtcctgaagatttgcggtgtcacaccacaacggtagatttaccaaatggacttccagtccatgtcgaaaccctcgaatttctgggatcattctgtcgtcttaagctgaagggaccggaaggattcagtaccttgcgggcggacctttcgctccagcaggttcaccaactcaaggctgctccagacgttccgctgaccatcgaattaccacctgactccctcctccttttcccagacatccagtgag

SEQ ID NO: 270667 - DNA, 682 bp, Unknown
  Bacterial polypeptide expressing nucleotide sequence isolated from the Sargasso Sea
atgagtaagcttgaatgtaaagatttatcaaaatcgttctcgatttcaggagatactattgaggttataaataacataaatctttcaattaccgagggtgacaaagttgcaataacaggtaaatcaggtgctggtaagtccactttacttcaaatcttagcatctcttgatagcccaacttctggaagagtctatttagatcaaacagactttgcttctttgagtaatgatggcctatcacagattagattacataattttggtttcgtctatcaatttcatcatcttttagatgacttatctgttgaggaaaacatttcaattcctcttagcctcaaaaatgaattaaattctgaatcaaaaacacttgttaataaaataatgaaagaattagctatttatgaaagaaaaaatcatcttccatggaaattatctggtggtgaaaaacaaagagtagcaatagctagagctattgttacaaaacctaaatttttatttcttgatgagcctacaggtaatttagataaaaaaaatgcatcaataatccaatctttaatttttgaaatgtctgacagatacggtattgcattaatttctgcaactcatgataatgattttataagttcttttgaaaacatatatgaaattagtggaacaaaattgaataagatctatgaatgag

SEQ ID NO: 270668 - DNA, 1813 bp, Unknown
  Bacterial polypeptide expressing nucleotide sequence isolated from the Sargasso Sea
atggtgagcagcagatccctcgaaacagaagctgagcctgatactgaagttcaggttccagctaaaaaaataggcccgctttttagcttattaccttttttaactccttatgccagccgctggttgctgacttttattgctttaacagtagctgctgttgctactctgactttgcctgtggcttttcggtatctgattgatgcgggtttttccagcgatcaggcgggtcatatcgaccaatattttctggcgttatttggtctttccgtcgtccttgctgtggccactgcgctcagattttattatgtatcctggctgggggagcgggtgacagctgatttacgcagcgctgtctatgctcatgtggtgaaaatgagcccgcagttttttgaactgactaaaaccggcgaagttttatcacgtttaaccacagacaccaccttaattcaggccgtggtgggcactagtttgtctatgggtttacgcaatagctttttgctggttggcggtttggtgatgctttttgtcactagtgccaagttagccacttacattctgctgaccttagtcttggtgattttgccaattttcttatttggccgcaaagtccgtaagctatcgcgtgacagtcaggaccgtattgctgatgccagtgctgtggcaggtgaagtgttaaacgctattcccacagtgcagtcgtaccggcaggagcaacgggaaaccgcgcgttttaatggatctgttgaaactgcttttaccacagcgttatcccgtattcgcgcccgctctatgctgaccttagtggcgatagtactggtatttggtgctatctcttttgtgctgtggttaggggctcaggctgtgctggctaatgaaatgacaggcggcgagttgtcgcagtttattttatatgcggtattaacagctggtgctattggcgctattgccgaagtttggggcgatttacaacgtgctgccggtgcggcagagcgtttgatgcagttgttaaatgtacagtctcctgtggtggaaagagccgatcctttgcctttggttttgcctgaacataatctggcgggcagtggtattgagtttaacaatgttaatttcagctacccatcgcggcctgatactttggctttgcaggacttttcactgcaaattaaacccggtgaacatatagctttagttggcccttcaggcgctggcaaaaccaccttgttccagttgttgctgcgcttttacgatccacaaagcggccaggtgaaatttaacggcacagatttaaaagatctacgcttaacagatgcccgtcagccttttggcatagtgctgcaggacaccgtgatttttgcaggttctgtgctggataatatccgttatgcccgccctgaagcgtccgagcaagaagtgcaggatgccgcaaaaatggcggcagcacatgactttattctggctttacctgaaggctataacacttatttaggcgagcggggtgtgcgtttatctggtggtcagcgtcaacgtatttccattgccagagccatcttaagtaacccttcggtattattgctggatgaagccaccagtgctttggatgcacaaagtgaacgacaagtgcaacaggctttggataacgccgcacaaaaccgcactactctggtgatagcacacaggttggccaccgttttggcagccgatcgtattgtggtgctggaagcggggcaaattgtcgctcagggcacacatacagaacttttgcaaagcagtgaactttacgcccgtttggcggctttgcagtttagtcactaat

SEQ ID NO: 270669 - DNA, 417 bp, Unknown
  Bacterial polypeptide expressing nucleotide sequence isolated from the Sargasso Sea
aatgtcttcctctataataaatattgaaaatgttaataaatggtttggtgatttccaagttttaaaagatattaacttagaagttcaagcaaaacaaaagattgtagtctgtggaccatcaggatctggtaaatcaacgttaataagatgtattaatagattggaagaacaccaagaaggtaaaattatagtcgatggtacagaacttagtgaaaatacaaaaaatattgaacaaatcagggctgaagtaggtatggtttttcagcaatttaacttatttccacacttatctattttagataactgcactttagcacctatttgggtaaaaaagatgccaaaaaagcaagcagaagaacttgcaatgcaacaattagaacaagttcaaatagctgaccaagcacataagtacccagg

SEQ ID NO: 270670 - DNA, 1009 bp, Unknown
  Bacterial polypeptide expressing nucleotide sequence isolated from the Sargasso Sea
tggaactaaggctgttcatgaaacttcattaagtattgatgaaggagaatttatggtttttgtaggacctagtggatgtggaaagtcaactttattaagaatggttgcaggtttagaggatattacagagggtgatatcaatcttgatggaaaattaatgaatgaagttgatccatctgaaagagatgtagcaatggtgtttcaaaactatgcattatacccacacatgaatgtttataataatttagcatatggtttaaaaaatagaggaattgataaacaaacaatcgagcaaaaagtaaatgatgcagcaaagctgttacaaatttcagattatttacagagaaaaccttcaatgttatctggaggtcaaagacaaagagttgcaatgggcagagcaattgtaagaaatccaaaaatattcttatttgacgagcctctttcaaacttagatgcaaaattaagaattcagatgagacttgaaattaaaaaacttcagcagaaagttggagtaacaagtatatttgttacgcatgatcaagttgaggctatgacacttgctgatagattagcagtaattaataatggaattattgaacagcttggaactcctatcgagatatatgataatccaaaatccttatttgttgctggttttattggttcaccgcaaatgaattttttagatggtaatttaaaaaataaaatattatctacagaaggttttgaaattaaagatattaatagtgactttgaaggagaagttacattaggaataagacctgaacatttaagtcaaaatgagaatggtttgattaatttaaaagtagacttagtggaacaacttggttcggataatcttgtttatggtcaattgaaagataaaaaagacttttgttacaggtgtccgggaaatctaacaattgaaaaaggtgcagatttaagtctaaatattgagaacagtaaatattatatttttgataaaagtaccggcaaaagagttaattaa

SEQ ID NO: 270671 - DNA, 793 bp, Unknown
  Bacterial polypeptide expressing nucleotide sequence isolated from the Sargasso Sea
atggaaaataaaaattcagacgaaattattgttaaatttgaagatgtaacaaaacagtatggtgatctaattgttttagacaaactaaatctagagattaaaaaaaacgaaatggtatcaattattggaccttctggttcaggcaaaactacagttttaagagttttgatgacactagaaaaaattaatggaggtctaattcatttagatggagaacctctaactcatatgaatagtgaaggaaaattaacagaggcaaatgaaaaatatttaagagaaagacgttcaaaaattggaatggtttttcaacaatttaatttatttccacacatgacagctcttcaaaattgtattgaggcgccggtagaggtgctaggtatgaaaaaagaagaagcagaagaaagagctctagagctattagagttagtaggtttgaccgataaaaaagatcaacatccaagcagattatctggaggacaacaacaaagagttgcaattgctagagcattagccatgagaccaaaagttatgcttttagatgaaattacttctgctttagacccagaggtagtaggcgaagttctaaatgtgattaggtcattaaataaggaacataatttaactatgatcatggttactcaccaaatgggttttgctagagaaatatcagaccgtgtttgtttttttaatgaaggtaaaatttttgaacaagggccaccagaaaaattattcggcaatccacaaaatgaaagaactaagcaatttttacacgcagttcttgatgccaattaaa

SEQ ID NO: 270672 - DNA, 539 bp, Unknown
  Bacterial polypeptide expressing nucleotide sequence isolated from the Sargasso Sea
gatgactgaaatcatattaaaggacatttttaaaagttatgatcaaacagaagtaattcatggagttgatttgaaagttgaaagtggaaaatttctagttttagttggcccctctggatgtggtaagtcaacattattaagaattattgctggattagaaagaattacatcaggagaaattttaatcgacggaaatgaagtaagtaatatacccgcttcagaaagaggtttggctatggtttttcaatcatatgctttgtatcctcacatgtctgtttttaaaaatatggcctttgcattggaaaatctaaaaattgataaaaaaacaattgaagaaaaagttaatagcgcagctaaacttttacaaattgaagagtatcttcaaagaaaaccaaaagcactttctggtggtcaaagacaaagagtagctattggcagagcaatagttagagatccaaaagcatttttgtttgatgaacctttatctaatcttgatgctgaattaagagtaacaatgagaaaagaactatcagcacttc

SEQ ID NO: 270673 - DNA, 314 bp, Unknown
  Bacterial polypeptide expressing nucleotide sequence isolated from the Sargasso Sea
aaaggaacatgtgactacagctcttgatgttgtcggtctttctgatagaggaggtcataagcctaatgagctttctggcgggcaacaacaaagagtggcaattgctagagcgcttgtttcagatcctggcatattggtttgtgacgagccaacaggtgacctggaccgagatactgctactgaaatattagaactcttgcagatattaaaccgcgaccatggcaaaaccatcttaatggtgactcatgatccagtagctgctgaatccgccaagaggactttacatttagacaaaggaaaactgacatcttaat

SEQ ID NO: 270674 - DNA, 595 bp, Unknown
  Bacterial polypeptide expressing nucleotide sequence isolated from the Sargasso Sea
tgatatcagtctttccttagaggagggtgtttttgcatccattttgggaccatctggatctgggaagaccacactccttgcaatcatggcaggccttgatttgccaagcagtggctccgtgaaacttcttgataaagaaatcacaagcttaaatgaggataagagggcacagattagaagcaaggatgtcggttttgttttccaatcttttcatttactgcctcgattatcagcccttgataatgtcatgatgccactcgagatacttggcgcgaaagatgcaaaagagagagctctaaaagctttggatgaagtgggtttatccaaaagaacagggcatgttcctcatcaattatctggtggagaaaagcaacgcgtcgcaattgcgagggctatggttaaagcgcccagtatattatttgcggatgagcctactggaaatttggatcaatcaagcacggataatattcttgaactattgctgggaatcaatcaacaaacaaagacgaccttggttgtcgtaacacatgatcagcagttagcagcacgatcggatatggtcttcgagctacaagaagggaaattaaaatgctga

SEQ ID NO: 270675 - DNA, 271 bp, Unknown
  Bacterial polypeptide expressing nucleotide sequence isolated from the Sargasso Sea
tttgcaagatatcattgcaattctaggtatggatgaattatcagatgaagataagttggtagtttcaagagcaagaaaaatgcagaaatttatgtcacaaccattctttgtcgctgaacagtttactggaattgaaggtagatatgttaaactggaagactcaattgctggttttgaagcaatattaaatggtgaagttgacgatttacctgaaaatgctttttcatatgttggttctattgatgaagctattgagaaaggtaaaaagtga

SEQ ID NO: 270676 - DNA, 594 bp, Unknown
  Bacterial polypeptide expressing nucleotide sequence isolated from the Sargasso Sea
taaatatatttggccataatgttttgcagaaaactcaaaaaacaaaaacttctttaattagaagaaaaatgcaaatgattttccaagacccctattcttctttaaattccagaatgaccgttgaggatataatatctgaaccaattcgttttcatcgatcaactggaaattcaagcgaaacattaaaagtagtccgggatttaatctcttttgttggtatgcccatcacttcactcaaaaaatacccacatgaattttctggtggtcaacgacagagaatttctattgctagagcacttgcatcaagacctgaaattctcatttgtgatgagccaacttcagcattagacgtttcagttcaagctaacatattaaatttattaaaagatttgcaggaagagttaagtcttaccatgctattcatttctcacgatctaccagtaatcaggcaaatgtgtgatcgggttgctgtgatgcaaaatggtaaaatttgtgaaattgcgaaaacagataagttatttgaccacccagagcacgattatagcaaacaccttttgggcttaatgcctagaatggatttatttaggctttaag

SEQ ID NO: 270677 - DNA, 1486 bp, Unknown
  Bacterial polypeptide expressing nucleotide sequence isolated from the Sargasso Sea
gcgccgagacaaggccgtccaacgcgtgctcgcccagatgcagctcgatggcggggcggaattcaactgcctttcctccggtatgaaacgccgggtgctgctggcgcaggccattgtcgatcggccggatgtcctgttactggatgagcccaccaaccatctggatatcgattctattacctggctcgagggatttctaaaggcgtaccccggcacgctgctgttcgtcacccacgatcgcgcttttctacaggcaattgccacccgcattctggaaattgatcgcggccatctatttgattggacctgcgattaccagacctttctagagcgcaaacaagccgcgctggaggccgaagaaaaacagaacgcgcagttcgacaagaaactcgcgcaggaagaggtgtggatccgcaagggcattcaggcgcggcgcacgcgcaatgaaggccgtgtgcgggcgctcaagaaaatgcgcgccgaacgcagccaacgccgagagcgccagggcactttgcaaatgcaggccgccgaggccgatcgctccggtcagctggtggtcgaaacacgggagctcacatttgcttacgacggtccgccagtggtccgggatctttccacgctcatcaccgccggcgacaaggttggtatcatcggtcccaacggtgctggtaagaccacgctcatcaagcttctgctcggcgaactgcagcccacggacggaaaagtccgccgcggcaccaagctggagatcgtgtatttcgatcagttgcgcgagcagattgatgatcggttgagcattctggagaatgtcgccgacgaccgcaaaacggttatcgttaacggtcgcagccgcaatgtctatagttacctgcaggactttcttttcacgcccgatcaagcccgcaagccagcgagcacgttgtccggcggcgagaaaaaccgcctcttgctcgccaagcttttccagcaaccggccaatctgatcgtgatggatgaacccaccaatgatctcgatgcggaaactctcgagctgctcgaagaggtcatcggtgccttcaacggcacgctgttgctagtcagccacgatcgcgcttttctcaacaacgtcgtgcaaagcaccctagtgtttgaaggtaacgggttcgtgaaggaatacaccggtggctacgacgattatctcgcccaacaccagcccgcgcccaacgccgccaagccaacgcgtcaacccaagcccaaaccggcgggcgatcccgacaaacccaagaaattgtccttcaaagaaaaacgcctgctcgaatcattgcctggccgaattgctgaactggaggcggagcaagaaacgctgcaacagcaaatcaacgatccggattttttcaagcgaccgcacgaagagacgaccgcggtcaccgagcgtctcgaggcactggaaaacgaattgctcgaaatctacggccagtgggaaacactcgacgctcgcgcctga

SEQ ID NO: 270678 - DNA, 424 bp, Unknown
  Bacterial polypeptide expressing nucleotide sequence isolated from the Sargasso Sea
ataggggtggtattccagcaactgaacttaattccgtatttgtcggtattgcaaaatgtattactggtcagtgcttttgctaaaaaaattccacaggcagagcagcgtgcccgttacttattgcagaagctgggtttagataagcagttatggcaagccccggcgaatcagttaagtgttggccaacagcagcgtgtggcgatagcccgcgctttattaactcagcccgctttgctgattgctgatgagccaacctcggcgctggatcataaacacagagatggctttatgcagctgatgctgagtgaggctgaactttgtggcaccacagtggtttttgtcagtcatgatccggcattgcgctcgtatttcaaattcgagctggatatggagcagttacagcagggagttcagccatgttaat

SEQ ID NO: 270679 - DNA, 743 bp, Unknown
  Bacterial polypeptide expressing nucleotide sequence isolated from the Sargasso Sea
tatgaaaaattcatcagaagaaataattgttaaatttgatcaagtaacaaaacaatatggtgatttagtagttttagataaattaaatttagatattaaaaaaaatgaaatggtttcaattataggaccatctggatctggtaaaactacagttctcagggttttgatgactctagaaaaaataaatggaggagtaatcaatttagatggtgagccattaactcatatgaatgaaaatggtaatctaattgaggcaagtgaaaaatatcttagggaaagacgttctaaaattgggatggtttttcaacaatttaatttatttcctcatatgactgctttgcaaaattgtatagaagctccaattgaggttttgggacttaaaaaagaggaagctgaggaaagagctcttgatttactcgagctagtaggactgactgataaaaaggatcaacatccaagtagactttcaggagggcaacaacaaagagtagctatagcaagagcacttgctatgagacctaaagttatgcttttagatgaaataacttctgcacttgatcccgaggttgttggagaagttttaaatgttatacgttctctaaataaagaacataatttgactatgataatggtaactcaccaaatgggatttgctcgtgaaatatcagatagagtttgtttttttaatgaaggtaaaatatttgaagaaggtccgccagaaaaattgtttggtgatccaaaaa

SEQ ID NO: 270680 - DNA, 793 bp, Unknown
  Bacterial polypeptide expressing nucleotide sequence isolated from the Sargasso Sea
cctgcgcgacgtgcatctgtcctacggcacgacgcccgtgctgcgcggtatcgatctcgacgtgcaccgcggccaggccgtgtcgatcatcgggccgtccggctccggcaaatcgacgatcctgcgctgcatcaccgggctgttgcggccgcagcgcggcctgatagacgtcgacggcacgcgcgtcgaccggctcgcatccgagcgcgacgaaatcgcgctgcgcaagcgcgtcggcttcgtgttccagcaatacaacctgtttccgcacctgagcgtgctcgacaacctcgtcgccgcgccggtcaggattctcggccgcgatcgcgccgaagcggtgcgcaccgcgcacgcgctgctcgaacgcgtgcgcctcgccgacaaggcgcatgcgtaccccggcgagctgtcgggcggccagcagcagcgcgtcgcgatcgcccgcgcgctcgcgatgcagcccgacctgatcctgttcgacgaggtgacgtccgcactcgatccggaaaccgtcggcgacgtgctggcggtgattcgcgacctcgtgcgcgacggcatgacctgcgtactcgtcacgcacgagatgcggttcgccgaggaaatcagcgacgtcgtctacttcaccgaggcgggcgtgatcgtcgagcacgggccggccacgcaactgttccgcgcgccgcaaagcgcgcgcacgcgggctttcctcgcgcatgcgctcggcccgaccgggagcccgcaccccagccgcgacagcgcgccgatcgcactcgacctgacgcgcttcgcggtctga

SEQ ID NO: 270681 - DNA, 673 bp, Unknown
  Bacterial polypeptide expressing nucleotide sequence isolated from the Sargasso Sea
gatgaaagaagtcgccaagcttatccaagtaagtaaaagttttcgcgacggcgagcagcgccacactgtactgcaagcggtcgatttaactttgcatcaaggggagactatcgcactcaccggcccaagtggcagcggcaaaagcactttactgaatctgattgcgggctttgaaacggcagacagtggccagattgtgttgaatcatcaatccaccaccaagtggcaagataagcaatggagtgagtttaggcgtacccatttaggcgtggtattccagcaatttaatttactcactccgctgaatgttaaaaataatatcggcttttccctgcaccttaacggtgatagctggaatccttggtgcgattatttggtggaaaaactcgggttagcggcattgttaaaccggcaggttgaagcgctttccggcggacaacaacagcgggtcgcgatagccagggcattagcccacaatccgagtttactgctggccgacgaacccacgggtaacttagatgacgaatctggtaaacaggtgatgtcactgctatgcgaactcgccaaagagagccaaaccagcattttgatggtcacccacagcgaagagtgcgccgcctttatgaacaaacgctggcatctgtcccacgccgcagtgtcgatctccggctag

SEQ ID NO: 270682 - DNA, 956 bp, Unknown
  Bacterial polypeptide expressing nucleotide sequence isolated from the Sargasso Sea
gccccgctcggatgtgaagctggtgcgcttcccgctggtctcctatatcgaggacgccggtgcggcggataccagcatcgatctcaagacccactggcttggccagagtcaggacgagcgcgcctatgaaggggcgctgctgcgggtggagaacgtggatctgaagttcgtcaccaaggattccctgttcccgagccgccgccagtacgtgcgggcctgcaacaacatcagcttcgagatcttcgagggtgaaaccttcggcctggtgggggagtctggctccggcaagtcgaccatcgcccgtgccatcaccggcctctatccgcccgataccggcaagatcttcttcgaggggatcgatctgaccgcgctcaagggcgagcatgagcgccgcccgctgcgtcgccagatgcagatggtgttccagaacccctactcctcgatgaacccgcgcatgaaggtgcgcgacatcatcgcagagccgatccgctttcataagctggcgggcagcgagagccagatcgaggggatcgtgggggatctgctggatcacgtcggccttggccgtggtgccggggttaagtatccccacgaattctccggcggccagcgtcagcgcatctccattgcccgcgccctggcgacccggccacgcttcctcatctgcgacgagcccacctcggcgctggatgtgtcggtgcaggcccagatcctcaacctgctcaaggatctgcagcaggagcttggcctcaccatgctgttcatcagtcacgatctgccggtgatccgccagatgtgcgatcgcatcggggtgatgcagcacggtcatctggtggaagtggcggagaccgagaaactctttaccaatgccgagcatgagtacagccgcaagctgatctccctcatgccggagttcaagggaatgtcccgcgaggggctggaaatcgcaagctagg

SEQ ID NO: 270683 - DNA, 503 bp, Unknown
  Bacterial polypeptide expressing nucleotide sequence isolated from the Sargasso Sea
aatgggaaaaattatagaattaaaaaatgtaaacaaatggtttgataaatttcaagcattaaaaaatataaatcttgaagtaaatcaacaagaaaaaattgtaatttgcggcccttcaggctctggtaaatcaacattaattagatgcattaatagattagaagaacatcaagacggacaaattatagttgatggaaatgaaatttctgaaaacacaaaagatatagaaaaaatacgtgcagaagttggaatggtttttcaacaatttaatttatttccacatttatcaatattagacaattgtaccttggcaccaatatgggtgaaaaaaatgcccaaaaaaaaagcagaggaaatcgctatgaataatttagagagagttcaaattgcagatcaagccaaaaaatttcctggacaattatctggaggtcagcaacaaagatcaacattagctcgagcattatgcatggaaccaaaaaataatgttattgacgaaccaacat

SEQ ID NO: 270684 - DNA, 1034 bp, Unknown
  Bacterial polypeptide expressing nucleotide sequence isolated from the Sargasso Sea
ttgtgtgcagggtctgaattatctgttggtattctctatcgctactctggcgatatggttatggtcggtcaatgctgtcactgtgggttctattgccatcgccgtcagtctggcgttgcgtttaaacggtatgtcgcaatggatcatgtgggaagtcagtgccctgtttgaaaatataggtactgtggctgatggcattgccactttgtctcagcctcagcaaatcgttgacatagcaacggctaagcctatcgaagtaccacagggacagattgattttaaacaactgaactttaactacggtaaagccgcaggcgaacatggccccgtcattgatggccttgaattatcgattaaaccgggtgaaaaagtaggattagtaggtcgctctggtgcaggtaaatcgacgctggtgaacttgttactgcgtttttatgatgttaattccggccagattttaatagatggtcaggacataaaaaccgtatcacaggaaagcttacgtgctcatatcgcaatggtgacgcaggatacctctttgctgcaccgcactgtgcgtgaaaacattctgtatggtcgccctggtgcaaccgaagcagaaatggttgaagcagctcgcttggccgaagccgatgcttttattcaggaactgactgaccctaaaggcaatagcggctacgacgctcaggtcggcgaacgtggtgtaaaactatcaggtggtcaacgtcagcgtattgctatagcgcgggtgttattgaaaaacgcccctatccttattctggatgaagcaacctcagcactggattcagaagtggaagctgctattcagcacagtctgactcagctgatgataggaaaaactgtgatagcgatagcacaccgtttatctactatagctgccatggacaggctgatagtgctggaccagggtcgtatcgttgagcaaggcagccatcaggaactgatcgccaaaggtggtatttatgcgcagttatgggcgcatcaaaccggtggttttattggtgtggaatagt

SEQ ID NO: 270685 - DNA, 619 bp, Unknown
  Bacterial polypeptide expressing nucleotide sequence isolated from the Sargasso Sea
atgaatttaattataaaatccctagatttttcttatcaaaatgaagaagttttcaaagatttaaatcttaactttaattctggagtcttaaatctagtctcaggaccgagcggctctggaaaaactacattgttaaatttaatcgctggattagaaaaaccctcatctggtttaataatgcttgataacaatattcaatcaagtatcgataaatttgttgagcctgaaaaaagaaatatcggctttgtttttcaagattttgctttatttccgcatttaaatattaaacaaaatattgaattttctgaaaatggaaataaagaattatttaatacattaattgataatctttctattaagaaccatctctctaaataccctcatgaactatcaggagggcaacaacaaagggcttcaatagcaagagcaatatactcagaaccaaaaatccttttaattgatgagcctgtttcaaatcaagataaaaataataaaattgaaataataaaaattatttcagattttgcaaaagatagagaaattgtatgtattttagtttctcacgaagaaataaatagtattgctcaggttgagactagatcttataccctttcttaaa

SEQ ID NO: 270686 - DNA, 739 bp, Unknown
  Bacterial polypeptide expressing nucleotide sequence isolated from the Sargasso Sea
aatgaaaaatttagtggaagttaaaaatataaaaaaaaattatggaaagaatgaggctgtcaaaggtataagctttaacataaaagaagacgaaattttaggcctgttaggtcccaatggttcgggtaaaacaacgacgataggcatgttattgggacttttaaaaccaactagtggagaaatttttataaatggtcaaaaattggagagtaatagaattgaaatattggaacaaattaacttcatatctccatatattgaattaccaaaaaaacttacagtcaaacaaaatctaactgtttatggaaaattatataaaataaataatattaatgaaaggattgaatttttatcagaaaaattaagattagaaagattgcttgatagtattactggtgaattatcatctggacaaaaaaatagagtaagtttggcaaaagcattgatcaacgagccaaaagtattactattagatgagccaactgcatcattagatccagaagtaggtgattttgttagatcatttttggaagattataaaaaagaaaaaaaaatatctatacttcttgcctctcataatatgaatgaagtcactaggctttgtaagtcaattctaatgatgaaggatggaattattatcgatgaaggaaatcctgaggaattaatcaataaacatggcagaaataacctagaggaagtttttttaaaattatcaaggagcaaaaatgagcttaactag

SEQ ID NO: 270687 - DNA, 1720 bp, Unknown
  Bacterial polypeptide expressing nucleotide sequence isolated from the Sargasso Sea
gatgagttttttagaagttaaaaatttaaacataagttatccaacacgaaaggaaactattgttgcaagcaaaaatgtagaattttctttagaaagaggtgaaatattaggaattgtaggtgagtctggatctggaaaatctacaattgcaaatgcgataattaacttgattgatcctccaggtgaaatcacagatggctcaataaaaatagacaatattgaattaagaagtaatgaagaaataattcaaaatattagaggaaaaaaaataggatttgtctttcaagaccctcaaacttcattaaaccctctatttaaaataaaagatcaattaattgaaactattcaggctcatttaaatttaagttatcaagattcacttaaaaaatcaattcaactacttaaagaggttggaatagagaacgctgaaaaaagaatagaagactatccacaccaatttagtggcggtatgcgtcaaagagttgtgatagctttagcgataagttgtgaacctgacctaataattgcagatgaaccaacaacagctttagatgtaagtattcaatatcaaatattagaactactcaaagatcttacaaagaaaagaaatcttggtgttataattattacccatgatatgggagtcatagcagagacgactgataaagttattgttatgagatacggacatattgttgaacaaggtgaaactaaagaattattaacaaatccaaaatcaacagaagcaagaagcttagtaatttcagtgccaccaacaaataagaaaattaatagatttaaattgattagccccgatggtaacgaaataacatctagttccaaggatttgactaaaaatattattaaaacatggggaataagggaaaataaaaatgaaaaattattaaaacttgaggaagtgacaaaagtttttgatgataattctttaggtagtggtttttcatttatttctaataaaagttcgaatgataaaatagttaaagctgtcgacaatgtatcttttgaattattcgaaggtgagacacttggattagttggagagtctggttcaggtaaatcaactattgcaaaaattattactggattaattagtcctaacaaaggtgatttaatatataataatgaacctctatataattcaaataaaaaatatcaaattcataatagtagaggtcaaattcaaatgatttttcaagatccttactcatctctaaatcctcgtttcaaagttaaggatattattgcagaaccaattaaattttttcaaaaaaatattagcaataatgaacttttacaaaatgtttacgacctaatagatattgttggaatgaccagacaatctctagatcgatacccacatgaattctcaggagggcaaaggcagagaatatctattgctcgtgccttggcaacaagaccacgattattaatatgtgatgaaccaacttctgcattggatgtcagtatacaagcacaaatattaaatttattaaaagatatacaagatgaacttcatctcactatgctatttattagccatgatctccctgtaattcgccaaatgtgtaaccgaataattgtactaaaaaatggtgctgtttgtgaaacaaaagatacagaggaattatttaataatcctgagcatgaatatacgaaggaattaattagacttatgcctaaaattgaatcaataatttaa

SEQ ID NO: 270688 - DNA, 636 bp, Unknown
  Bacterial polypeptide expressing nucleotide sequence isolated from the Sargasso Sea
tttgttagaatttaaaaatataaatttttcttacaataatcatcaagttattaatgacttttctttaaaagtacctcatagaaaagtaacatccattctaggcccttctggctgtggaaaaacaactttactaagattattaagtggattagagcaaatacaagacggtcaaataatgtttgaaaataatcttctttctgcaaattcatttgatttaccgcctaacaaaagaaaaattggatatgtttttcaagattgtgctttatttcctcatttaaatgttattgaaaatatatattacggtatttcaaaaaatgaagaagaaattaaaaagaaagtagattttattttaaaggaaaataatttttataaatactctgaaagatatccccatgaattatctggagggcaaaaacaattggttgctttatttagggccatagcatgtgagccaaagataattcttatggatgaaccattttcaaatttggatactagattaagagaatctctaagagaccaagtcctacacatacttaaagcgaatgaaattacaacattattggtaacacatgacgcagatgaagcaatgtttatgtctgattttattgcattattaaataaaggtgaagttac

SEQ ID NO: 270689 - DNA, 760 bp, Unknown
  Bacterial polypeptide expressing nucleotide sequence isolated from the Sargasso Sea
atgagttttttaagtttagagaatgttacaatcagttttggcggcattagggcggtcaagagtgtttcattggatatcaaagaaggtgaaatcttcgccttggtgggtccaaatggtgctggaaagtcaacaatctttaacttgatctccaggctttataaacaaaatgaaggtaacattttttttgatggaaaatcattaaaccagctaaagccatttgatatgcctgatattggcattgcaagaacctttcaaaacatcgaactttttggaaatgctactgtcttacaaaacctcctagtaggaaccaacgttaggaaatctagtaatttcctttcagaaatacttttcactcggtctgtacgtaaagaagaagtaacgagcagagttatggttgaagaggtcatggactttttagacctacagcaatatcgggaaaaatacataatgggtctatcctatgggactagaaaaattgtcgagttaggtagggctttggctctaaaacccaaggttttacttttagatgaacctgcgtcaggtctatcagccgaagagacagaagatctagccttttggattgaagatattaaaaagataatggggattactgttttaatggtcgagcataatctaaatttggtaaataaggttgcagatagagttgcagcacttgtagatggtgaaataattagcgttggaaacccaaaatctgtgcagagtgatccaaaagttattgaagcgtacattggggtctgaa

SEQ ID NO: 270690 - DNA, 761 bp, Unknown
  Bacterial polypeptide expressing nucleotide sequence isolated from the Sargasso Sea
aatgatagaatgtaaaaatattggtaaattttatggtactttgcgagcattaagtggaattaatctaagattgtatgagcacgaatttctttctatacttggtccttcgggctgcggtaaatcaactcttctgagactaatagctggtattgaagttccgtgtcagggtcagatttttttggatggtaaggaaatttcaggcaggaaaataatagttccaccggaacgcagaaaattcagtatgattttccaggattttgctttgtttccacaccttagcgtaaatgacaatgtgcggtatggtgcatctggatccaaaaaggaaaagcaacagcgtgttaatgagctactcgaacttgtcagcttacctcatcttgccgaaaaaatgcctcaccaaattagtggtggtgaacagcagcgtattgccgtggcgagagctcttgctccaaggcctagtctgatattgatggatgagccattcagcaatctggactatcagttgcgacaacaattgaggcgtgatatcaaggaaattttacagcatgaaggtgttgctactatacttgtaactcacgatcaggttgaagcaattactttttcagatcgtatgcttttgatgcaaaaaggggcgatagtgcaagctggaacaccatcagaaatctaccagcgtccacaaacgatttgggcatcctcttttattggtgaagccaaccatctgattgttgagtggcagaatgattctttacaaactccatttgggg

SEQ ID NO: 270691 - DNA, 559 bp, Unknown
  Bacterial polypeptide expressing nucleotide sequence isolated from the Sargasso Sea
aaagtgctaataaatggaatttcaattgaagaaaaaagagtagagctattgaataatttaaactttatttctccatacatagaattaccaaaaaaattatctgttatgcaaaacttggaagtttacggcagactttatgatgtaaagaaccttagatcaaagattgaagagcttaccgaaaaactaagacttaatgaaatcataaataaaattactggtgagctttcttctggccaaaaaaatagagtgagtcttgccaaatcaataattaataaccccaaagtgttacttctggatgaaccaactgcatctctagatcctgagactggagattttgtcagaaattttttggaagattatcaaaaagaaaatgaagcttctattttactagcttcacataacatgactgaagttgaaagattgtgctcgtacgtttttatgatgaagaatggaactattatagatcaggatagtcctaatgaattaattaaaaaacatggtcgaaaaaacttagaagaagtttttttaaaacttaccagagagaaatatgaatcttaat

SEQ ID NO: 270692 - DNA, 607 bp, Unknown
  Bacterial polypeptide expressing nucleotide sequence isolated from the Sargasso Sea
atggaaaataaaaattctgatgaaatcatagtaaaatttgaagaagtaacaaaacaatatggcgatctagtagttttagacaaacttaatttggatatcaaaaaaaatgaaatggtatctataataggaccatctggatcaggcaaaacaacagttctaagagttttaatgactttagagaaaataaatggaggagttatccatttagatggtgaaactcttacgcacatgaattcaaacggtaaacaaattgaagctgatgaaaaatatttacgagagagacgttcaaaaattggaatggtatttcaacaatttaatctttttccacacatgacggctctacaaaattgtatagaggctccaattcaagttttgggaatgaaaaaggaagaggcagaggagagagcgcttgaattactagaacttgtaggtttaacagataagaaagatcaacacccctcaagattatccggcggccaacaacaaagagtggcaatcgcaagagctttggctatgagacccaaagtaatgcttttggatgaaataacttctgcgctcgatccagaagttgttggagaggtattaaatgttattagatctttaaata

SEQ ID NO: 270693 - DNA, 1138 bp, Unknown
  Bacterial polypeptide expressing nucleotide sequence isolated from the Sargasso Sea
ttgcaaagctataaatatctttctgcaactaatcagataaaatctttgagaaaaaatgttattcattccataaaaaaattaactgggtttcaagttaagacaactatcgcagcaggatttactcagtcagtaagagagccaatagcagtaatctttattatgctgatcatctacatacaaatatatattttcaatggaaaaatagaaccaatttttgtagcaattattttattttacagagccttgactgctgcgttgcaagtccaaagtttttttcagggaacatatcagtatattggtagcatggaacttatcaacaaagaatttaaaaatcttaatttaaatcgtatcgaagaaggtgaaaatgatattaatgaattaaaaaaaatgattaccttgcaaaatatatccttttcatatgatagttctgatgactatcagcttaaagatatatcattaaatattcctgcactttcatcagtcgcctttgttggagagtctggatcgggaaaatcaacaattctagacgttattactctcttgaatgaaccaaacttaggtaatttaataattgatgatcttgattctagaagcattaaaaaggaaagctggagacaaatgattggctatgtttcgcaggaaacaataatatttgatgcaacaattggagataacataagtatgtggtctggagattacaaaaaaaataaagagattgaaagtaaaataaaggaagctgcagagaaagcaaatatcttagattttattaataatctgccagatggattagatacaaatgttggagatagaggtgtcttgctatcgggcggtcaaagacaaagattatttatagctcgtgaactttataaaaatccattagtacttattttagatgaagcaactagtgcacttgatacatcatctgagagagctattcagcatagcatcgagagtcttaaaggttatattacagtaatacaagtagctcatagactctctacaataaaaaatgttgatttaatatatgttcttaaaaatggcaaactcatcgaaaaaggcacatataaggatcttactaaagatcaagattcaaattttagcaaaatgattgaactacaatctttaagtgattcgtaac

SEQ ID NO: 270694 - DNA, 655 bp, Unknown
  Bacterial polypeptide expressing nucleotide sequence isolated from the Sargasso Sea
gctgctcgagttaaaagatataacaaagtcattttccggtgtagatggagacgtggaagttctgcgcggcgtttcacttgcactcgatgcaggtgagactttagctttaaccggtgagagtggaagtggtaaaagtacaattttacatatatccgctggcctagaagttcctgatggcggcagtcttcacctggagggtgttgagattaatgggcttggcgaggctgaaagagccaacttacgccggtccgaggtagggattgtttttcaacaattcaatctaatcccgtcacttacggtggaagcaaatattgggtttcaggcggctttagctgggcggcgcgataagatatttgaaagtgagttagtagaagctttagggcttgaagatcaactaaaaaaataccctgagtcgttatctggcggtcagcaacaaagagttgcaattgcccgcgcacttgcggtgcgcccaaagttacttttagcagatgagccaactggaaacctcgacgaaagcacgtcgtctgcggttctaactgctatgctggacttagttggtcgcactggagcagcacttatggtcgtgacgcattctgttgctttagctgagaaaatggatcggcgagtacgattgaagggtggagttctcctgtga

SEQ ID NO: 270695 - DNA, 739 bp, Unknown
  Bacterial polypeptide expressing nucleotide sequence isolated from the Sargasso Sea
aatgaaaaaattagtcgaagtaaaaaatattaaaaaaaattatggaaggaatgaggctgtaaaaggtataagctttaacataaaagaagacgaaattttaggcctattaggtccaaatggctcaggcaaaacgaccaccattggtatgttgttaggacttttaaaaccaactagtggagaaattttgataaatggtcaaaaattggagggaaatagaattgaaattttggaacaaataaacttcatatctccatatattgaattaccaaaaaaacttacggttaaacaaaatctaaccgtttatggaaaattatataaaataaataatattaaagagaggatcgaatttttatcagaaaaattaagattgggaggattgcttaataacattacaggtgaattatcatctggacaaaaaaatagagttagtttggcaaaagcattaattaacgagccgaaagtattactattggatgaaccaactgcatcattagatccagaagtaggtgattttgttagatcttttttggaagattataaaaaagaaaaaaaaatatctatacttcttgcctctcataatatgaatgaagtcactagactttgtaagtcaattctaatgatgaaagatggaataataattgataaaggaaatcctgaagaattaatcaataaacatggcagaaaaaaccttgaagaagtttttttaaaattatctaggagtaaaaatgagcttaactag

SEQ ID NO: 270696 - DNA, 622 bp, Unknown
  Bacterial polypeptide expressing nucleotide sequence isolated from the Sargasso Sea
atgggtattcacattaataatttaactttttctcatgatgattcttcgctattgcacgatttatctttctcagttgaaaaaaatcaaataggtttcgtgtcaggaagtagtggtattggtaaaagcagcctctttaatataattgcaggacttattctgcctgaaaatggcaaaataatgcttgatgatattcttttcaatgataaaaatttttcactagagactgaaaaaaggaagattggttatgtttttcaagattttgcattattccctcacataaatgttaaaagaaatattcaatatgcaatgtcttccgaagaaaatgaactgtttgatgaattaatatcaaaactgggtctattagagtttttagataaaatgcctcatgaattatctggtggtcaacaacaaagagcggctcttctgagagctattttaatgaaaccaaaaattcttctgttggatgagccgttctcaaatcttgataaagataatattattgctgctcaaaaaataattagtcaaatcataagcttatttgatataccttgcctactcatatctcatgacattcaatcatctgaaaattttcaagtagataaagaaattataatcagctagt

SEQ ID NO: 270697 - DNA, 775 bp, Unknown
  Bacterial polypeptide expressing nucleotide sequence isolated from the Sargasso Sea
aatgattaagatacgaaatatttcaaaacaatttacaattaaaaataatatagtgaaagcactatcaaatataaacttagaaatattagagagagattgttttgcaattgttggagagtcaggttctggtaaaacaacattagctaatattatattaggtatctatcaacaagatgagggggaagttttatttgaaaataaaatactaattaaaaacagaagtcttcatcttaggaaactaatccagtttgttcagcaaaatccaatgtcgacattaaatcccaaaaaaactatctacagcactatagccttgccattaaagattcataaaattgtagaaaataataaatacaaagaaaaagttgaggaactcttatcttttgttggtttagaaagaaattttatggatagatatccggatacattatctggagggcagaaacaaagagttgcaatcgcaagagctttagcaacagaaccaaaagttttaattcttgatgaaccgacttcagctttggacgttattgttcaatcaaaagtattaaatttattattggacataaaaaagaaatttgatcttacatacatttttattacccatgatttaagtgttgtaaaaaatatcgctaataaagtagttgtaatgaataaaggtaaaattgaagaaactggtgaaacaataaaaattttccaaaacccaaaaagtgaatacacaaaaactcttataagagctataccaaccgtaactgatgaagaagatgcaacaaaaccataa

SEQ ID NO: 270698 - DNA, 685 bp, Unknown
  Bacterial polypeptide expressing nucleotide sequence isolated from the Sargasso Sea
tatgttgcgttttgagcaggtcacaaaaagttatagcggtggttttgttgcgctggacagagtgagttttcatctggaaaaaggcgaaatggcttttttaacgggccattcaggtgcgggtaaaagtaccttattaaaactgattagcctgatcgagcgtccgactacgggtaaagtttttatcaatggtgtggatttaagtcgggtgaacaaaggccaggtgccttatgtgcgccgcgatatcggtatgatcttccaaaaccataagctgttgatgaaccatagcgtgttcgacaatgtggctttgcctttagtgattgaaggtttcagcggcaaagacatgaccaaacgtgtgcatgcggctttagataaagtcggtcttttggacaaggtgcgttgtctgcctcacactttatccggtggtgagcaacaacgggttggtatagcccgcgctgtggtgaaccgtcctcctttattgttagcagatgaacctacaggtaatttggatcctgatttgtctaaagacattatgaaagtatttgaagcctttaatcaggtgggggtttctgtattgattgccagccacgatttaagtttattagcccggatgcgttaccggactctgactttaaaaaatggccgcatgatcaacgatggcttaacgtcctctggagccgacgaatga

SEQ ID NO: 270699 - DNA, 682 bp, Unknown
  Bacterial polypeptide expressing nucleotide sequence isolated from the Sargasso Sea
tatgtctgatcgcggtgtgctcgaggctgcgggcctgggtaaaacctatcacgacgcccggcgagaaatcgttgtgctcaatgacttggcgctgtcggtgtcgacgggtgagtggctggcgattgtgggcgcctcgggtgccggtaaatccaccttgctgaacttgctgggtggcttggacacgccgagtgcgggtgacgtgtcagtcgccggagagttgctctcccgtatgtcggaaaacgagcggagtcggtggcgaaatcagcgactgggttttgtgtttcagatgcatcaccttttgcccgagttcacagcgctcgagagtgtggccatgccggcacggattggtggtgcccctaagcagcaggccgaagcaaaggccaagacgttgcttgagcaattgggtttgtcagagcgcctgaaccatcgcccggcggcgctgtcaggcggcgagcggcagcgggtggcgattgcacgagcgttagtgaacgaacccgcctgtgtgttgatggatgaacccacgggcaatttagacccggatacggccgagcaggtgctcgctgctatgagcgcgctccgtgatcgtgataccgcctttgtcgtggtcacccatgatcctgtaatcgcccagcgtatggatcggcagctgactctcgcgaacggccgactggagccgcgctag

SEQ ID NO: 270700 - DNA, 421 bp, Unknown
  Bacterial polypeptide expressing nucleotide sequence isolated from the Sargasso Sea
tatgaaagaagttccaattaaagaaaaacagcaaatgatagtagatatattaaatgaagttggattaaattatgctgatgttagaaatcgttttcctcatgagttttctggcggacaaagacaaagaatagctatagctagagcaataattctaaaacctaaacttttaatattagatgagcctacctcagctttagatgtgagtatacaaaatcaaattattaaacttttaattaaattacaaaaaaaatatgaattaagctatatattcattagtcatgacataaaagttattcgttcagtatctgattatataattgtactcaaaaaaggtgaaattgtagaagaaggttctgctgaagaagtttttaatttacctaaaagtaactatacaaaagaattattaacatctgtaatttaa

SEQ ID NO: 270701 - DNA, 337 bp, Unknown
  Bacterial polypeptide expressing nucleotide sequence isolated from the Sargasso Sea
gatgccggcgagtctgtcgggcggtcagaaacaacgcgttgccattgctcgcgcgctggcgatgcagccgcgcgtgatgttgttcgacgagccgacttccgcactcgatcccgaactggtcggcgaagtgctgcaggtgatgaagctgctcgcgagcgaaggcatgacgatggtggtcgtgacgcacgaaatgggtttcgcgaaagaagtcgccgacgtggtggtggtgatggacggcggcgtaatcgtcgaagctggaccgcctgccgagattttctcggcgccgtcgcagccgcgcacgcgggctttcttgcaggcggtgttgtcgcgcgcatga

SEQ ID NO: 270702 - DNA, 1864 bp, Unknown
  Bacterial polypeptide expressing nucleotide sequence isolated from the Sargasso Sea
aatgaccagaaaaacctcccatctgggcggccaggcattccaggccgtcttcggcttcaccttccgctactggcgcaagcagccgggtcgcaccgccctggtcgcgagcctcgcactgctcgccgcgctcgccgacgtgctcacgccgctgttcgcgggccgcctcgtcgatgcgctgtcgaccggcctgaccgatcgcgccgccgcgtggcatgcggcgctcgtcgcgttcggcacgctcgccgcgctcggcctcggcgcgacggtgctgcggcaaggcgtctacctgaacatcatcacgctcacgttgaagatgatgagcgagatcgcggccgcgtcgttccatcgcgtgcagcgcttctcgaccgactggcacgcgaacagcttcgcgggctcgaccgtgcgcaagatcacgcgcgggatctgggcgctcgacctgctgaacgacaccgtgctgatcgcgctgctgccttcggtcacgatgctcgtcggcgccaccgtgctgctcggcacgcactggcccgtgatggggctcgtcgtcggcgcgggttcgctgctgtacatcacggtgacggtggccgtgtcgctcggcatcgtcgcgccggccgcacggctcggcaacctgtgggacacgcgcatgggcggcgcgctcgccgatgccgtgagctgcaacgcggtcgtcaaggcgttcggcgcggaaacgcgcgaggaagcgcggctcgcgcgcgtgatcggcaagtggcggcaacgcacgcgccgcacgtgggtgcgcggcacgctcaacggcgggttgcagggcgcgatgctcgtcgcgatgcaggccgcgatgatcggcgtcgcgctgcggctgtgggtgaacaacgaggcgagcgtcggcgacatcgcgttcgcgctgacgatgttcttcatgctgcagggctacctgcgcgatgtcggcatgcacatccgcaacctgcagcgctccgtgaacgacatggaagaactcgtcgcgctcgaacgccagccgctcggcatcgacgatcgtcccggcgcgccggcgatccggatcgaacaaggcgagatccgcttcgagcacgtgacgttccgctacgacaaccatccggtgccgctgtacgacgatttctcgatgcggatcgcgccgggcgagcgcgtgggcctcgtcggccactcggggtcgggcaagacgtcgttcatcaagctgatccagcgcctgtacgacgtgtcgggcggccgcatcacgatcgacggccaggacatcgcgcaggtcaggcaggattcgctgcgcagccagatcgcgatcgtccagcaggagcccgtgctgtttcaccgcacgctcgcggagaacatcgcgtatgcgcgccccgatgcgagccgggccgacatcgagcgcgccgcgcggctcgccagcgcgcacgacttcatcgccacgctgccggacggctatgacacgctcgtcggcgagcgcgggatcaagctgtcgggcggtgaacgccagcgggtcgcgattgcacgcgcgttcctcgccgatgcgccgatcctgatcctcgacgaagccacgtcgagcctcgacagcgaaagcgagctgctgatccagcaggcgatggagcggctgatggtcggccgcacgacgctcgtggtcgcgcaccggctgtcgaccgtgcgcgcgctcgaccggctgctggtgctcgatcgcggcaaggtgatcgaggaaggcagccacgacgcgctgatccggatcgacggcggcatctatcgccggctgttcgagcggcaggcgctggaactggcgaagggcttgatcgatacgccgcgacgcatggtgaacggtgacgccggcccgctgggggagccggcggaggcttga

SEQ ID NO: 270703 - DNA, 568 bp, Unknown
  Bacterial polypeptide expressing nucleotide sequence isolated from the Sargasso Sea
atgtcaaagaaccaagaatttgtaaaatttgataaagtagacaaaagttatgacggcaaggtcctagttgtaaaagatttaaatctagatattgctgaaggagaatttattacgatgcttggaccatctggttcaggtaagactacctgcttaatgatgttagccggttttgaaacaccaacaaacggtgaaatttttttagataaaaatcctatatcaaacataccaccccataaaagaggtattggaatggtttttcaaaattatgcattgttcccacatatgacagtttatgaaaacttggcctttcctcttaaggtaagaaaaataaataaagatgatatagataaaaaagttgataaagcattatcaatggtatcattatccggttttgaaaacagaatgccaggacaattatcaggtggacaacaacaacgggtcgccgtcgctagagctttagtgtttgatcctcaggtagttttgatggacgagcctttaggagccttagataaaaatcttagagaaagcatgcaatatgaaattaaacatatccatgaaagcattggtg

SEQ ID NO: 270704 - DNA, 622 bp, Unknown
  Bacterial polypeptide expressing nucleotide sequence isolated from the Sargasso Sea
tatgagtattcacattaataatttaactttttctcatgatgattcggcgctattgcacgatttatctttctcagttgaaaaaaatcaaataggattcgtgtcaggaagtagtggtattggtaaaagtaccctctttaatataattgcaggacttattctccctgaaaatggaaaaataatacttgatgatattcttctcaatgataaaaatttctcactagagactgaaaaaagggagattggttatgtttttcaagattttgcattattcccacatataaatgtcaaaagaaatattaaatatgcaatttcttcagaagttagtgaactctttgatgaattaatatcaaaactgggtctattagagcttttagataaaatgcctcatgaattatctggtggtcaacaacaaagagcggctctgctaagagctattttaatgaaaccaaaaattcttctgttggatgaaccgttttcgaatcttgataaagataatattattgctgctcaaaaaataattagtcaaatcataggcttatatgatataccttgcttaatcatatctcatgacattcaatcaactgaaaattttcaaatagataaagaaattataatcagctag

SEQ ID NO: 270705 - DNA, 661 bp, Unknown
  Bacterial polypeptide expressing nucleotide sequence isolated from the Sargasso Sea
atgagtgaaccaataattacacttcagaatgtttccaaatcctttggacaaaatagttcgtctattcaggttttagaagacctttctctggatttgaagaaaggagaaagcctagctcttgtgggagcttcaggttcaggtaaatcaactcttttgcacgtcatttgtggtttagagaaacccaacaaaggaaatgtttatattaagggagtgaatattactgaccttagtacagacgaaagatcattatttagaggcaaagaggtggggtttgtatatcaatttcatcatttacttcctgatttaactgcattagagaatattgctctgccagctatgctttcaggtattggaaaagaagaagcttttgagatatctgcctctttattagaacaggtaaatttaaacgataaaaaagaaaataggcctaatgaattatcaggtggagaaagacaaagagtggcgatagctagagcaatgtccaacaacccttcgtgcttaattatggatgaaccaactggtaatctagataagaaaaatgtagaaaattttatgaatcttcttatggatatggtctcaactagagaaattgctttgataattgcaactcatgacaataatgtctctagtcgactggataaattattaaacttagaataga

SEQ ID NO: 270706 - DNA, 988 bp, Unknown
  Bacterial polypeptide expressing nucleotide sequence isolated from the Sargasso Sea
aatgaacctatattagatgatttttctatagatgttaatgaaggtgaatttgttacagtgctaggtgatagtggtgttggtaaaacaactctatttagagcaataaatggtctagaaaaaatagaaaatggatatattagagttgatggtaatttgatgtcttcttcgttctatcatttaccaccagaaaaaaggccagtaggaactatttttcaagattatgctctattccctcattttaatgttgaaaaaaatatttactatggccttgataagataaattttgataaaaactttgttgatgaaatagttaatttattgagggttgaaaatttatttgatagatacatagatcaactttctggtggtcaaaggcaaagagtttctttagcaagatctcttgtaagaaaacctaagcttttattaatggatgaaccctattcaaatttagataaaaatttgcgtcaagatattaggagagatcttaaaaaaatcttttctaaaatgggtagcactgttctcctaataactcatgattctgaagaagcacttagtctatctgataaaattggatatctttacaaaggtaaaattattcagtttgattctccctatgaaatctttcataatccattacataaaataatagcaaagagtatttctaattctaatattttagaaggcactccttcgaatggaaaaataataactaaaataggagaattcataatctctgaaaaaattactagttcaaataatataagtataaatgtcagaccaaatcaactatccttggatcatacaggtaataaatatgagattgtggaagaagaatttcttgaaggaagtcagctttatttagttaaggatactgaaaataaccagataataagcataagtatgattggtgaaaatgatttttctgttggagataaagttggagttcaaataatcaataacaatgcaaatcttattgatatttcttaac

SEQ ID NO: 270707 - DNA, 811 bp, Unknown
  Bacterial polypeptide expressing nucleotide sequence isolated from the Sargasso Sea
ttcggaatggtggagggatcgctgttctatgtggtgaatcaaattgaggaattggcgcagttcacggccggaatttcccgtcttgagggtttccagagcgaggtggagcagttgagccgtgaggccaggggtgcagaccctgtgcagcagggagctgagtcgatcgtggtgcgccatgccgatctcaccccacccggtgctgatcagccgatcgtgcgggatctcagtctcagcgttggcgaaaccgacaggttgctggtggtgggtccctccggctgcggaaagacctcactgttgcggatgatcagtggtctttggtcccccagtcagggggacgttgaacgtccacccacaggcgagctcctgttcatcccccagaagccctacatgctgctggggtcgttgcgggaacagctctgttaccccaccgatgaaggccggttcagtgacgaccaacttcgccatgtgctggatgaggtgaacctcagcaccctctcgacccgctaccccgacctggacgtcaagcaggactggcctcgcatcctgtccctcggtgagcagcaacggctggcctttggtcgattgctgctgaatgccccacggttcgtggtgctggatgaagccaccagtgccctggatgtagccactgaggatcatctctatgccttgttgcgccagcgggaactggcggtgatcagcattggccaccgtcccactctcaagcagttccacgattcagtgctcgagctcagcggcaacggtgactggcggctgatgccggcgaccagctatgacttcgggcgttcctgat

SEQ ID NO: 270708 - DNA, 1753 bp, Unknown
  Bacterial polypeptide expressing nucleotide sequence isolated from the Sargasso Sea
tatgactagaaataaacacactaataagaaaataatttttagattaataaaagattatatttttcctcataaatttaaaatttttttagcattaattatgatgattatttcagctgcagcaactggcttacatgcatggttagttcgtcctgctttagatgaagtgttaattaaaggtaataaagaaatgttatttttaataccaattgcaataatattggttactttatgcaaggggttagcaacttacacacactcatttcaaatgagcaaagttgcccacttagtaatatctaaattacaatctgaaatgttcgagaaattaatgttttttaatataaaattttataatgattcaaaatcaggaaatttaatttctagattgataaatgacacatattttttaagaatggcaatagtcaagtctgttactggcgtcattaaagatgttttggtaattatatttttattaggaaatatgttttatcaaagttgggaattaactatttttgctttttttgcctttcctttagcattgtggccaattagaaaaattggcaatagtataagaaaaattacacgcaacattcaacaacaaatagctatattttctaattcattaagtgaaagtattaaatctataagacaagttaaggcttacaatagagaagattttgaaaaacaaaaatcatttgagacaatcaatcagataaaagattattttataaaatctgcatttatcagtaatcgcttgagtccacttatggaatttataggcagtttagctatagctctttcaatttatgtaggaggagtttttgtattaaatgaatcaatgactactggccaatttatgagttttttagttagtttattattagcttatcaaccagttaaagctctaggaaatttaaatattagtattcaggagggattggctggtgccgatcgaatttttcagcttatggattctgaagatgaaaataaagaaactgataatttcaaagatgaattattggtaaaaaagggaaaaatacaaataaaaaatttaaattttgcatatgaaaatataaatgttttagaaaatctcaatatcactattcctgaaggtaaaaaagttgctatcgttggtttatctggatcaggaaaatcaacaataattagtcttttactaagattttataataattatgatggagaaatatttatagatgaacaagatatcagtaagtattctttaaaatcattaagagacaatttttctttagtcagtcaagaaacgatactttttaaccaaagcataaaaacaaatatagaatatggaaatttaaaagctaatactgctgaaattttaaatgcagcagaagaagcaggagttaatgaatttgctaattcttttccaaataaattagatacaatagttggagaaagtggtgtaaaattatctggagggcaaagacaacgtatagctatagcaagagcgatattaaaaaatgctcctatacttttatttgatgaagctacttcagctttagataatttaacagaacaaaaaatacaaaattctattaataaattaatgaaaaataaaacctctgttattatagcacatagacttagttcaattgaagatgccgatttaatatatgtattagataaaggaaaaattgttggagaaggtcagcataaagaattattgaataaatgtaatttatattcaaaattacaattacaacaagaacttaacttataa

SEQ ID NO: 270709 - DNA, 277 bp, Unknown
  Bacterial polypeptide expressing nucleotide sequence isolated from the Sargasso Sea
tttgtcaggcggtcaaagacagcgaattggtattgcgagagctctttacaataagcctgatgttctagtgttagatgaagctacgagtgctctagatgatgaaaccgaacaggcagttatggatgctgtaaacaatctaggaagagaattaactattgtaataattgctcacagattgagcacgctctctaaagcagacatcgtttatagattagaaaagggaaggctgcattctaaaggatcttatgaggaaatgtgtaaaatttctggggattaa

SEQ ID NO: 270710 - DNA, 1834 bp, Unknown
  Bacterial polypeptide expressing nucleotide sequence isolated from the Sargasso Sea
cggggcgataagggaaccaaggctgagaacgagcggacgcccgcggagtacctgtggcgggtcatggcgctcgccaagctcgagtggcagctcatcgcgctggccatctgtaccaccttcgtgacgtccgcggctgcgctcttcgtgccgcactttcagggcggcgcaatcgacgcggccatcgcggttgacaaggagaggttcaatcgcaccgcgctgatgctgctgatttcgtccgcgggggtgtcgctgttcagcgcgttcaagggggtgtgtttctccctggtcggcaggcgcctggcgtacaaggttcgcacgggcttactgaggaacatactctcgcaggacatcgcgtactttgacggcgtcaacaccggcgatttgctctcgaggctgtcgtacgactgcgccaacctcacggcgccgtgcaacaccgtgctgtcgctggcggcgcaaaacctcgtggtgatttgcggcggcctcgtgatgtgtttctgggtgtcctggcgcctggcgatggtgtccttcgcggtcgtgatgcccatcactttcctgatcaagaggtacgcgcggtggagccaatcgctgaatcgagagatttccgcgatgctcgggttagcttccaacgccgcaaacgaggcgttggggaacataaggacggtgcgcgcggtgtccacggaggacgtggagttcaagcggtacgaggagcacgctcgggcggcgctgaacgcggggatcaaggacgccttcggcggggcgctgacggtggcgctgaccaacctgttggagctcgggacagccgtcctcatcctctggctcggcggcgggatgacgatggagcgcccgaacccgcgcctcaccatcggatccctcatcacgttccagctgtacttcaactcggtgaccagctcgtacacggccctgagcaactgcctcacgaccctcgtccgcgcggccggcagcgccagccgggtgttccagctccaggacaacctccctgacatctcgccacacgccggcgagatattccggccggcgccttcgcgcgcccccgcggggcccgagattaggttcgagaaggtgaagttctggtaccagatgcgccctaacacgatggtcatagacgacatggacatggtcgtcgccgccgggtccaccgcggcgctggtcggtaagagcggcggcggcaagaccaccgtcgtctctcttctgcttcgctactacgacgtaaaggctggcgcgatattgctcgacggcaaagacatccgctcgctgaacctcgcgagcacgcacaggcacatcggactcgtcgcgcaggacatgcagatgttcaaccacagcatcgggggtaacatcgggtacggtttggacccggagacggaggcgacgagggagagggtcgaagccgccgccaaggctgccaacgcgcacgacttcatcatgaccttcccggacgggtacgagacgaggctcggcgagcgcgggattcggctgagcggcggtcagaggcagaggctcgccatcgccagggtgttcctcaggaatcccacgctgctgttgctcgacgaggcgaccagcgcgctggatttggagtcggaagccgcggtgcaggaggctctcgacaggttgatcgcgacgggcgggcacacggctgtcgtggtggcgcacaggctgagcaccgtgcgccacgcgacgaacatcaacgtcatctccgccgggaaggtgtgcgagagcgggacgcacgaggagctggtgggcaaagatgggggcgtttacgccgggttactcgcgctgcagcagcggaaaaaagaggagaccatcgccgaccaatgac

SEQ ID NO: 270711 - DNA, 739 bp, Unknown
  Bacterial polypeptide expressing nucleotide sequence isolated from the Sargasso Sea
tttgaatgataaaatagttaaagctgtcgacaatgtatcttttgaattattcgaaggtgagacacttggattagttggagagtctggttcaggtaaatcaactattgcaaaaattattactggattaattagtcctaataaaggtaatttaatttataataatgaacctctatataattcaaataaaaaatatcaaattcataatagtagaggtcaaattcaaatgatttttcaagatccttactcatctctaaatcctcgtttcaaagttaaggatattattgcagaaccaattaaattttttcaaaaaaatattagcaataatgatcttttacaaaatgtttatgacctaatagatattgttggaatgaccagacaatctctagatcgatacccacatgaattctcaggagggcaaaggcagagaatatctattgctcgtgccttggcaacaagaccaagattattaatatgtgatgaaccaacttctgcattggatgtcagtatacaagcacaaatattgaatttattaaaagatatacaagatgaacttcatctcactatgctatttattagccatgatcttcctgtaattcgccaaatgtgtaaccgaataattgtactaaaaaatggtgctgtttgtgaaacaaaagatacagaggaattgtttaataatcctgagcatgaatatacgaaggaattaattagacttatgcctaaaattgaatcaattatttaa

SEQ ID NO: 270712 - DNA, 634 bp, Unknown
  Bacterial polypeptide expressing nucleotide sequence isolated from the Sargasso Sea
gatgagtaatttaatacttgaaataaaagatgtaagccactcttatgatgataaggaaactacgttaagtaatatcaatctagaggttgatcaaggtgaaaaggtctcgatcttgggaccttctggctccggtaaaactactctgcttaggttgattgctggactggaaagaccaaaaagtgggtctattaacttacaaggagcagttgtttcgacgaaaaattttatacttgcgcctgaaaaaagaaacctgggcctggtagttcaagagaaggctctcttcccccatcttacggttaaagaaaatattacatttggtatcagaaaggaaaaaggaaagaatgatactgctttagatctatgctctcttttcaagattaatcatttagctgataaatatcctcatgaaatctcggggggcgagcaacagcgtacagccttagctagatcaatggcaccaaatcctgaaatattgcttctagatgaaccctttagtgccttggatcaagagcttaaagaagagctttacactgagttaagccatatatttaaagaaagggaacaaagcatccttttagtaactcatgatttgaaagaagcagaaattttaagcaatagaaaaatcaatatctaa

SEQ ID NO: 270713 - DNA, 647 bp, Unknown
  Bacterial polypeptide expressing nucleotide sequence isolated from the Sargasso Sea
tatggaaaatgaaaattctgatgaaattatagtaaaatttgaagaggtcaccaaacaatacggtgatctagtagtattagataaactcaatttagatatcaaaaaaaatgaaatggtatcaattataggaccatctggttcaggcaaaacaactgtactaagagttttgatgactttagagaaaattaatggaggagttattcatttagatggtgaaagtcttacacatatgaatttaaatggtaagcaagttgaggcagatgaaaaatatttaagagaaagacgctcaaaaattggaatggtatttcaacaatttaatctctttcctcacatgacagctctacagaattgtattgaagcaccaattcaagttttaggaatgaaaaaagaagaggcagaggaaagagcacttgaattaatagagcttgtaggtttaacagacaaaaaagatcaacatccttcaagactatctggaggtcaacaacaaagagttgcaatagcaagagctttagctatgagaccaaaagttatgcttttagatgaaataacctcagcactagatcctgaagttgtaggagaagttttaaatggtattagatcattaaataaagaacatagtttaacaatgatcatggtaacccatcaaa

SEQ ID NO: 270714 - DNA, 1682 bp, Unknown
  Bacterial polypeptide expressing nucleotide sequence isolated from the Sargasso Sea
catgagtcccttaaaaagattattctcatatacttatagatttaaattttcattttttttaagtattttaggttttattctttttgcatctgctgatattgcagctgttgaatggataagaaggattattgaatttattaattctgatcaacaagatttcagcatttatcttgttttagcattaatttttatcgctgtaggaaggggtttaggtttctttgttggtaattatttcatgtcaagagtaggttttggaattgtgcatgatttaagatccgagcttttttcaaaattaattaatcttccaaaaacttactttgaccaaaaccagtctggtcaacttattaatagaattacttttacgactactcaggtttctggagctgcatcaaatgcaatcaagactcttgtaagggaaggatttcttcttattggattgttactatatatgctcacattaaattggaagcttaccttgcttttgttaattacaactccctttatagcattgattgtttatttagcaggacgaaggctgagaaaattagctaagactattcaaactgctatgggtgatgtaactcatgttgcatctgaggctgtcgatgggaatcttgagatcaaatcatttaatgcagaaaaatatgaaaaagatagattttttgatgccaatgcctccaataaaaatcaaaatttaaaattagaagctacaagtaacctggctactccaattattcaacttttagtctcaatatctttatcaatagtggcttattttgctttaggctctcaattaggtatagagttgaaagcagaagattttgttgcatttataactgctgctggattaatggctaaaccaattaggcagctctcaaatattaatgcagttatacaaaagggtttagcagcagcattagagatatttgatcaattagatgaaaaagatgaagaagattcaggcaaagttgattcaagtatccttggaaatattaaatttttagatgtcagtttttcatataactctaaggaatttgttctgagcaatttaaattttgaaatttctcagaacgaaactgttgccattgtaggaaagtcaggatctggaaaatcaactatcgcaagtctaatatctaggttttactctaattactcaggtgatatctctatagatggcattagtattcatgattataagctatcacatcttcgtcgatgtatttcaatcgttaaccaatctccaacattatttaatgataccatcgaaaaaaatattgcttatggagaaagtgatattgatcaagataaattaattgaagctgctgaaatttcaggttgcaatgaattcatttctaaacttcctgagggttataaatctgaaattggcgatgatggtgttcttctctctggtggtcaacgtcaacgaatagccatagcaagagcattctacaaagattcgcctattatcattttggatgaggcaacatctgctttagataatgaatctgaattaatagttcaagaagcaattgaaaagttaataaataacaggactaccattgtaatagctcacagactttctaccattgaaaatgctgacaaaattttagtgcttgatcaaggttcagtggctgaatcaggcactcactcaatattgttagatcaagatggaatctacaaaa

SEQ ID NO: 270715 - DNA, 386 bp, Unknown
  Bacterial polypeptide expressing nucleotide sequence isolated from the Sargasso Sea
agcctctcatatcgatgaattcatcgatgaattgcctgaggggttacagacaaaagttggtgatcagggcattcttctttcaggtggacagagacaaagaattgcaatagctagggcgctactcaaggatgccccaatactgattctcgatgaggcaacctctgcacttgattcggaaagcgaaaaatttatacaaaaggctttcgatcggttgatggaaaataggacaacttttgtcattgcccatcgtctaagcacaattgaaaatgcagacaaaatattggtcctatcaaacggaaaaatcgtcgaagagggaacccatgaagagttattgaatcaagatggagaatactctttgttacataaaatgcagttcaatgactaga

SEQ ID NO: 270716 - DNA, 952 bp, Unknown
  Bacterial polypeptide expressing nucleotide sequence isolated from the Sargasso Sea
agtggcgatgtaattattgatgataagaatgttaacagcaccagagctagcaagagagatttagcaatggttttccaatcttacgctctttacccgcacctgactgtcagaaagaatctagaaacacctttgaaattaagagactatagttttgtagagaggttgcctcttattggtaattttgtacctagtagaaaagaaaaaaagaaatcaattgatgaccttgtttttaaaacatctgaaactttaaaaataacagaactacttgatagaaagccaggtcaattatctggtggtcaaagacaaagagcggcattaggaagggcgatggtaagagaaccagttgcatttttaatggacgaacccttatcaaatcttgacgctgcattaagggttcatatgagatctgagctatccgagctccataactctttaaagaccactttcatttatgttacgcatgatcaagcagaagcacttacaatgtcaactcgaatggcagttatgattgatggtgaacttttacaactagataccccaagtgaggtttataacaatccttcatctttgagggttgcagaatttgttggtagcccaaagattaacacatttgatgctgagattagatctgatggtttcgctgaatttaacggcatcaggctagagaaaaaatttaatactaatagtcaaaaagccttagttgctgtgagaccagaacatttagaaattacaaaggattcaaacaaacctgcatttgaggctaaagtttcatacaaagaaaatcttggttcagatatattttaccatgttcaagttgatcaatctgactcaaagattatagtgagaggctcaccacaagccggactgatttcaaatggggaaacgattaaaataagtccctctcattccgaagctatgctttttgaaatatctggtgagagaattagataaa

SEQ ID NO: 270717 - DNA, 766 bp, Unknown
  Bacterial polypeptide expressing nucleotide sequence isolated from the Sargasso Sea
tttgaataagaaaaacttagtgaaaaatgatgcgctaataattgatgatttgcatcataaatatgataagcgagaatgttcaaaatggatattaaactcaattaacctgaaaattgaaaatggcgaattgttagggttgcttggtccttctggttgcggaaaaactactcttttaagattaattgcggggttcgaatatccctctagagggaggatttctctaaatgataaggaaatttcaagtgaaaaaaaatttcttagtcctgagaaaagaaatattggtatggtttttcaagactatgcacttttccctcacttaactgttttggaaaatgtaatttttggtttaaaaaacaaaaaagatagatctagagttgactatttattaaatgttgtaggtcttgatagttttattggaagataccctcatgaattatctggaggccaaaaacaaagactagcaattgcgagagctcttgctcccggtactaattttattttattagatgaaccattttgtagtcttgatatgcatgtcaaactaaaattgagaagtgaactcccaaatatcctaaaaggttgtaatgcaagtggattgatggttactcatgatcctgaagaggcaatgtcaatttgcgataaagttgccgtcatgaatgaagggaaaatacatcaaattgatacaccaattaaccttctaaacaatcccaagaccctatttgttagtagttttattttgggtaataatattattaatcttcaaaaa

SEQ ID NO: 270718 - DNA, 592 bp, Unknown
  Bacterial polypeptide expressing nucleotide sequence isolated from the Sargasso Sea
taattttgataatgtttgtattacaaatattacaaataataaagaaatgatgaaattcagaaaacagattcaaatgattttccaagatccgtattcgtcattgaatggaaggctaaaggttaaagatattatctcagaaccaattaaacttcataacccatctattagttcccaagaaatagatagttatatttatgatttattagaatcagttgaattgacacaacaatcagcagaacgttatccacacgagttttcaggtggtcaaagacaacgaatatcgatagcacgtgctttagctacacaaccaagattattagtatgtgatgagcctacttcagctctagatgttagtattcaggcacagatattaaatctcctaaaagatttacaagatcaactaaatttgacaatattatttataagtcatgatttacctgtagtaaggcaaatgtgtgatagaatagctgtattaaaaaatggaaagatttgtgagatttctgaaactgaaaatttatttaagaaaccttctcatgagtatacaagagaattattaacgttaatgccaaaaattgaatctatctataactaa

SEQ ID NO: 270719 - DNA, 457 bp, Unknown
  Bacterial polypeptide expressing nucleotide sequence isolated from the Sargasso Sea
atgaaaaaagcagaagtaaaatttgagaatataactaaaaagtttaacgaaacagttgctgtagataatgtaagttgtagctttgaggcaggaacattaactacattattaggaccttctggttgtggaaagactacttcattaagaattattgctggtcttgaaagagcaacaagtggaaagattcttgtagacaatgaagacgtaactttattgcccgcaactgaccgtgatgtttcaatggtttttcaatcatatgctttatttcctcatatgaatgttattgaaaatgtttcatatggtttaaaaatgatagatattgataaaaatgagtatactcaaaagtccttagaaactttaaagttggtaaatttagaaggatacgaaaatagaatgccatctgaattatctggcggtcaacaacaacgagtagcagttgcaagagcaattgttttag

SEQ ID NO: 270720 - DNA, 796 bp, Unknown
  Bacterial polypeptide expressing nucleotide sequence isolated from the Sargasso Sea
catgacaccggatggtcgacaaatcggcggcgtggtaatggagatgaaaaatataactctaaagtttggtggtgttactgcgatagaagatatatcttttgatatccacgaaggtgaaataagagcaattattggtcctaacggtgctggcaaatcctctatgttaaatgtaatttctggattttatgtacctcaaaaaggcgaagtttttttccggggtaccaaaagagctcaattgaagccttttcaagtggctaggcaagggattgctagaacctttcagaatattgctttgtttgagggtatgagcgttttagacaatgtgatgacgggccggctaactcatatgaaggctggaataatttctcagtccttatggcggggttcagcagaacgggaagaaactgaaaatcgtgagatttgcgaacgtgtcattgattttcttgagattcaatccatccgaaagacgcccgtatctcgcctgccatatggtttaaagaagcgtgtggagctagcaagggcacttgcttcagagcccaaactgttacttctagacgagccaatggcggggatgaatgttgaagaaaaggaagatatgagtcgcttcatcttagatgttaacgatgagtttggaacaacgatagcactcattgaacacgatatgggtgttgttatggatttatctgatcgagtggtagttatggattatggtaagaaaattggtgatgggacgccaagtgaagtgaggaataatcaagctgtgatagacgcttacttgggtgtcagccatgactaa

SEQ ID NO: 270721 - DNA, 919 bp, Unknown
  Bacterial polypeptide expressing nucleotide sequence isolated from the Sargasso Sea
gttggccggcgtccgtttcgaagccctcagcaagacctatcccggacgccgtggctcggaccccgtgcctgtgatccgcgagctggacctcagcatcgaggacggtgaattcctggtgctggtgggtccgtcggggtgcggcaagagcaccttgctgcgactgctggccggcctagagagccccactgcgggtgaaattgtcatcggcgagcgccctgtaagccaggtgcggcccgggcgtcgcgacgtggccatggtgttccagagctacgcgctctatccgcacctgagcgtgcgcgacaacctcagcttcggactgcgacgcagccgccatcgcagcctgcctcagcaactgcaggatcaactcagccagctcagccgcggacttcccgcgttcctgagggtgcgctccccgcgggaagagctgattgaacagcgcgtccacaccgtggcccaggccctggagctggaaccactcctcgaccgcctgccgaaggagctctccggcgggcagaaacaacgggttgccctggggcgtgccatggcgaggaaaccagcggtgtttctgatggatgaaccgctcagcaacctggacgccaagctgcgcaacagcacccgcacccgcatcgttgacctgcagcgggagctgggcaccacaacggtctatgtgacccatgaccaggtggaagccatgacgatgggtcaccgcatcgccgtgctcaatcaggggcgcctgcagcagctcggaaccccgatggagctctaccggtggccctccaatctgttcgtggcgcagttcatcggcagcccaccgatgtcgatgcttcccgtggtgatcggtccaggtgccaccctgcttctcggcgccaagcggctgtcggtggagggtcctctggcaacggctttaccggtattggaa

SEQ ID NO: 270722 - DNA, 1393 bp, Unknown
  Bacterial polypeptide expressing nucleotide sequence isolated from the Sargasso Sea
tttaatcttagagattcagtttttcatgctgttaaaaatgcttcatttgaaatatcagaaaatgagatcgttggtcttgttggagaatccggatcaggcaaatcagtaactgctatgtcactgatgaggttactgcctgagcctaaggcagagtttggaccaaactcaaagatatcctttagagataatgatgttctatcgctcgctgctaaccaacttcgattaacaagaggcagtgaaataagcatgatatttcaagaacctatgacttctttaaacccatttcataaagttggaaagcagatacaggaatcaattcgtttgcatcaaaaattaacaaaagaaaaatcaaaaaatgaagccattaacttaatgaagctcgttgaaataccaaactcggagaatagatatcattcatatccatatgaactatccggaggccaaagacaaaggattatgattgcaatggctttagctaataaaccaaaattgctcattgcggatgaaccaactaccgctctcgatgtaactattcaagctcaaattttggacctaatctcaaaattaagaaatgaggttggcatggcggttttatttatcacacatgatctcggactgattgaatctttttcagaaaaggtaattgtgatgaaggagggcgaaattgtagagcaaggccaaacaaaagaaattttctcaaatccacaacatgcctatacaaaaatgcttttagcctctgagccaaaaccgctagagagtaatcaaaaagaagagtctatatcacttgaagttaagtctttgtcagtaagatttaatcttaaaagtgatttttttttaacacgcaagcaatttacagcggttgatgatgtaactttcaagattaatacaaattctactgttggattagtcggcgaatctggttcgggcaagtctacattgggcaaagcaattgctggattattaaattacgagggtgaaatattatttgatggaaaaaatcttgctaacatttctagctctgaaagacaaagaattaaaaaagacattcagattattttccaagatcctttcggttcattatctcctagaatgactgcgggtgagattattggtgaaggactagatgtacattttgatttaccgaaaaaagaaaagatctcgctaataaaagattcgatggaggatgttggcttaaatcctgagtatatgttcaagtatcctcatgaattttctggaggacaacgccaaagaattgctattgctaggtcgatcattttaaaacctaaattacttatccttgatgagccaacttctgcactcgatcgatccatccagattcaagtcttggagctgctaaaagaccttcagaagaaacttaaattaaccttattta

SEQ ID NO: 270723 - DNA, 421 bp, Unknown
  Bacterial polypeptide expressing nucleotide sequence isolated from the Sargasso Sea
acctatttgggtaaaaaaaatgccaaaaaaagaggctcaagaactagcattagaccaacttaaaaaagttcaaattgatgatcaagcaaacaaatttcctggacaactttcaggcggtcaacaacaacgttgtgcgattgcaagagcattatgcatgcagccaaaaattatgttatttgatgaaccaacatcagcattagatccagaaatgatcaaagaagtacttgatgcaatggtaagtcttgcaaaaggtggaatgacaatgattgttgttacacatgagatgggttttgccaaagaagtagctgatgaagtcatttttatggacgagggtatgattattgagaaggctgatacaaaagagttctttgccaatccaaagagtgacagaacaaagctttttttaagccaaatcctttaa

SEQ ID NO: 270724 - DNA, 1051 bp, Unknown
  Bacterial polypeptide expressing nucleotide sequence isolated from the Sargasso Sea
atgttatcagttaatataaaagacttaagttactcaataaaagataaaaagatattaaataaaattaatttagaattagagaaagataaaattgcttgcattcttggtccctcagggtgtggaaaaacaactttgttaaaacttattgcaggcttatcacatgtccaagatggagaaatttatttaaataacaatctggtaagctcaaataatattcatttaaaaacagaaaaaagaaaaataggttttttatttcaagactacgctttgtttcctcaccaaacagttaaagaaaacttgcaatttgctattaaaaataaatctatctctcatacaattaaggaaatattagacgtaattaaactatctgattctttagataagtatccgcacgaattaagtggtggggagcaacaaagagtagctttggcacgttcaattattgcaaaaccagatattttattacttgatgaacctttttcaagtctagatttaaatttaagagaagaagttagggatgatactttacacttgcttcaaaagtctaatatttcagttttagttgtaacacatgatccatttgaagctatgtttatttctaataaaatttatattatgaataaagaaggtagaatagtacaatctggatctccaaaagaattatataatctgccaaactcatcatacgttgcaaatttttttggagaaacaaataaatttagtggaatggtaaaaaacaaaactgttgaaacacctgtcggagaatttaaagtcgatgaaagcctagagtctaaaaatgtaaatgtatacattagacctgaggcagttaaattaaatcaagaacaaactcctgttaatggaattaaaggaacggtgatggcatcaaaattaatggggggttatagttttattcatttatcagtattaaataatgataatgaaattgttcacgttcatagtcatatgcccccaaattttttacccaaccaatccagtgcagtaggcatagagattgatacagagaagacttttatttttcctgctaattaat

SEQ ID NO: 270725 - DNA, 661 bp, Unknown
  Bacterial polypeptide expressing nucleotide sequence isolated from the Sargasso Sea
atgaataaagagattattagtattgagaacatagataaatcttttggagaaggtgatgaaattctgcaggtttttaaaaatttttctttaagtcttcatcaaggtgagagtattggattagttggtgcttcgggatcaggcaagtcaacacttctgcatattatttgtggactagacagaccagattcaggttctgtaaagatacaaggtatagatattacagaactaaactatgatgaaagatctgaacttagaaatacggaaataggatttgtttaccaatttcatcatctgttgcctgaattgacagcattagaaaatattgtattaccagcattactagcaggaactaaccaagctgaagccattaaaaatgcttctttacttctggaacaagtgaatctatctggtaaagaaaacaatactccaaatgagttatcgggaggtgaaagacagagagttgccatagcaagagctatgtcaaacaacccatcatgcttgattatggatgaaccgactggaaacttagatacaaagaacgttgaaaattttatgacacttttaatggatatggtttctataaaaaacgtaactctattaatagctactcatgatacaaaggtctctagtcgactggatagattgttaagtttagaataac

SEQ ID NO: 270726 - DNA, 703 bp, Unknown
  Bacterial polypeptide expressing nucleotide sequence isolated from the Sargasso Sea
tatgaaatttgataaagaaattctttcaaatataaatttaaatatagattcaggtgagtttgtatctattctaggtccatcaggttgtggaaaatctacattattaagattagcatcaaacttagttcagcccaataacgggactgttaattataatttagaagaaaaattatctattgggtttgtttttcaaaacccgacattaatgccttggagaaatgttcttgaaaatgttttgctacctttagagttaaataagaaaaattcatcaaaggaagaagcaatgttattactcgaaagggtagggttgaaagataaagaaaaaaactatccgcatgaattatctggcggacaaatgatgagagtttcaattgcacgatcacttattaatggatgtaatcttttacttcttgatgagccttttgcagccttagatgaaataactagaagaaaactagaggatgatctattagaaatatggaaaaaagaaaagctcactgtattgtttgttacacattctgtttcagaggcaatttatttatcacaaagaataattgttctttcatcgggtccaggtaggattatatatgaaaagaatattgattataacttctctaaaaaagattttttggcaagcaacgaataccaaataataaataatgagatctttgaaaaattaagaactggagtaaataatgagtaa

SEQ ID NO: 270727 - DNA, 1162 bp, Unknown
  Bacterial polypeptide expressing nucleotide sequence isolated from the Sargasso Sea
gaaagaagatataaatcctatcctcatgaactctctggagggcagcgtcaaagaataatgattgcaatgtcacttataaatgaacctgagcttttaattgctgatgaaccaacaacagccctggacgtaactattcaagcccaaattcttgatttaatgaataggcttaaagagaagcttggaatgtcaattttatttataactcatgatttaggattagttgagaagtttagtgacagggtttgcgttatgaaagagggaaaaattgttgaacaaggcgtaacaacggaaattttctctaatccaaaacatgaatataccatcaagctattaaaatcagagcccaaagaaaaagatcatttacttatttcagaggataatattttagatatttcaaacctaagtgttttttacaaaataccatcaaaaaagctatttaaaactgatagattttgtgcggtttctgatatttctttaaaaattccaagaaattcaacagttggtgtggttggagagtcaggttctggtaaatcaacactaggaaaagcgattataaatcttcttgattttgaaggatcaattaaatttaatggtaaatcaattaaagatctcagctcagttgaaaagaaattattaaaaaaagacattcaaatagtttttcaagatccatatgggtccctgtcgccaagaatgacagttggcgaaatcataggagaaggcttggatatccattttgatttttccagtgaagagaagatagaaaaaatatcaaatgtaatgaaagatgttggattagatgatagcctcatttttaagtatccacatgaattctcaggtggccaaagacaaagaatcgcaattgctagatcaataatcttaaacccgaaattcatgatccttgatgagccaacttcagcgcttgataggtctattcagattcaggtaatagatgttttaaaaagattgcaagacaaatataaattaacatatttatttattagtcatgatctcaaagtaataagatctatgtgtgatcagatttttgttatgagtgagggaaagctagtagagtttggtaaggctgatgaggtttttgaaaatcctcaacaggaatatactcaaaaacttttaagagcagcactcaaatattcatcaaattaag

SEQ ID NO: 270728 - DNA, 502 bp, Unknown
  Bacterial polypeptide expressing nucleotide sequence isolated from the Sargasso Sea
aatgataatctcaacaaaagatattaagaaaagctataaagttggtccacaaaacgtgcatgctcttaagggtattaatttgtcggttgaaaaaggagaatttatttcaattatgggtccatctgggtctggcaaaagcactttgatgaacataattggttgtttagatactccaactagtggcaattacctacttaataataaacaagttagtagtcttacagatgatgagttagccaaaattagaaataatgagattggttttgtctttcaatcatttcatttgttaccaaggaactcagcttttgaaaatgtaatgcttccacttagatatgctggtataaaaaaagacgaggcagtaactttatccaacaaagctcttgatcaagtgggtttatctgatagggccgatcattctccatctgagttatcaggtggtcaacagcaaagagtagctatagcaagggctttggtaaataagcccaagcattctatttgctga

SEQ ID NO: 270729 - DNA, 901 bp, Unknown
  Bacterial polypeptide expressing nucleotide sequence isolated from the Sargasso Sea
atgagttttttagatttaaaaaatgtaactaagatttaccctaacggtacaaaagcagtacatgaaacttcattaagtgttgatgaaggagagttcatggtctttgtaggacctagtggatgtggaaaatcaactttattaaggatggttgcaggcctagaggatataactcaaggtgatattaatcttgatggaaaattaattaatgaagttgatccatcagaaagagatgtggcaatggtatttcagaactacgcattatatccgcatatgaatgtttataataatttagcttatggtttaaaaaacagaggaattgacaaagaaaaaatcgagcaaaaagttaatgatgcagctaaacttttgcaaatctcagattttttggaaagaaaaccatcaatgctatctggtggacaaagacaaagagttgctatgggtagagcgattgtcagaaaccctaaaatattcttatttgacgagcctctttcaaacttagatgcaaaattgagaatccaaatgagacttgaaattaaaaaacttcagcagaaagttggagtaacaagtatatttgttacacatgatcaagttgaggctatgacacttgcagatagattggctgttataaatgatggaattatagaacaacttggaactcctattgaaatttataataatccaaaatctttatttgttgctggtttcattggttctccacaaatgaattttttagatgctaatttaaataacaaaacgctatcagcagaaaactttgagattaaaaatatagatagtgattataatggtgaggttactttgggaataagaccagagcatttaacagagtctgaaaatggtctgataaatttaaaagtagaattggtagaacagctaggttcagata

SEQ ID NO: 270730 - DNA, 904 bp, Unknown
  Bacterial polypeptide expressing nucleotide sequence isolated from the Sargasso Sea
gctgccgccgtatgcggcacgcggcggcgcggcgcctgccggccaccccgtgcccgatgcgccggtcgccggccggcccgcgccggatgccgcgcaggccggcgcgcacagtgaacgcctgctcgcgatcgaccgcgtgaacctcgaataccggagcggcgcgcggatcgtgcgcgcgacccaccaggtcagcttcgacgtgtacggcagcgaccgcttcgtgctgctcggcccgtcggggtgcggaaagtcgacgctgctgaaggcgattgccggcttcatcgagcccgtatcgggttcgatcgcgctcgacggtcggccggtgcgcggtccggggcctgaccgcgtcgtggtgttccaggaattcgaccagttgccgccgtggaagacggtcgtcgaaaacgtcgcgtttccgttgcgtgccgccgcaaagttgtcacgcaccgaagcaagggagcgcgcgctgcattatctcgacaaggtcgggttgagcgggttcgccgacgcctatccgcacacgctgtcgggcggcatgaagcagcgcgtcgcgatcgcgcgcgcactggcgatgcagccgcgcgtgctgctgatggacgagccgttcgccgcgctcgacgcgttgacgcgccgcaagatgcaagaggaactgctgcgcctgtgggacgagttccgcttcacgctgctgttcgtcacgcattcgatcgaggaagcgctcgtcgtcggcaaccggatcctgctgctgtcgccccatccgggccgcgtgcgtgcggaactcaacagccacgagcattcgctcgacgacgtcgacaccggcgacttccgcgacaacgtcgcgcgaatacatcgcctgctgttcgataccgacacgaccagcgccccgacgacggaggaagccgcatcatga

SEQ ID NO: 270731 - DNA, 718 bp, Unknown
  Bacterial polypeptide expressing nucleotide sequence isolated from the Sargasso Sea
atggtactcgtaaaaatcagtgggttggagaggcactaccaaatggcttcagagacagtaagagctctggatggggttgatttggagataaatgaaggtgaaagaatcatacttctgggaccatctggttctggaaagaccacgcttctcaactgcttatctgcattggacagcccgacatccggagaataccaattctcgggcaacaaggtcccaaagaacgaatcagaggccatgactacattcagaagagagaacattggatacgttttccagttcttcaatcttctacaggaccttactgttttggagaacctactgctaattcaggagttggcgggaagcagagacgaagatagggctcgtaatctactagcacttgtaggactggaaggcgaggtcgaccgctttccagcagagataagtggtggccagcagcagagagtagccattgctagaagcctagcaaagaggcccaggcttcttcttggggacgagttgacggggaatcttgactcatggacatcatctgttgtgatggaagtcctagtcaaggcgtgcgactcagagggaatcacatgtgtattcgtcactcatgacgagtctctggtgcaatatgctaccagagtcattaggatcgatagtggcaaaatcatctccgatgaaagcggcggagggcatgcccccccctcatccccaatacacattgtaggatagg

SEQ ID NO: 270732 - DNA, 1117 bp, Unknown
  Bacterial polypeptide expressing nucleotide sequence isolated from the Sargasso Sea
catgagcgactcctcttcctcgcgccctttggtgacctttgacggcgtatccaaaagatacggcgacgtcaccgcggttcatacgatgaacctcgagatctacgaaggagagtttttggccatcatggggccctcgggctgcggaaaaaccacgtccctgcggatgttggccggcctggaagatcccagcgacggcgaaatccgtcttgatggtcaacgaatcaatgaaatcagcagtgtcgaaagagacacgccaatggtctggcaaagcctcgcgctgtttccctttttaaacgtgcagaagaacgtcgaattcggattaaaaatgcgccaggtcccatcggaggaacgccaagcacgtgcgcgtaaatggctggaacgaatggagatcctcgaactggctgagcgtgatatcagtcaactctccggaggacagaaacagcgcgtagcactcgcgcggtctcttgtgactgagccacgtattctcctgctggacgaacctttgagtgcgctggatgccaatctcgtgatccgcatgcagggcgtcctgtctcggctgcaaaaagaattgggcattacctttgtctatgtcacacatagccaatcagaggccttcgccatgtctgacagagtcgtgatcatgagtcagggacgcattgagcaactcggatcgccaaaagagatctaccgaagtccggcctcacgtttcgtggccgactttgttggagcgaacaacattctttccggaaccgttgctcaagtgggggacaatctcgaaattgagaccacgctgggtatgtttcagtgtgacgccggtaccaaaggcgctcgtcacgtcggcgattcgctcgatatggtgatcagtgctgatctcgtccagatctctctggacgatcccaaaacccagaacagcttgcaatgccgctttatcagcgaagagtttgtggggtcgattgtcacgctattcgccgaactgcaggacggatcagacttcaaaatccaaaccagacaaagagatctcgccaagatctcgctcgaggagggaaacactttcttcgtctcctggaatccaacggatacacacctgatcagttccgggagatcttcggatgcttga

SEQ ID NO: 270733 - DNA, 1588 bp, Unknown
  Bacterial polypeptide expressing nucleotide sequence isolated from the Sargasso Sea
atgaagaatatagttgaagtaaaagacttaagtataaattttaaagtacgggatggctcatttcgtgcagtagataaaataagttttgatattgaaaccaataaaaccctcgcacttgtaggtgagtctggttctggtaaatcagttacagcaatgtcaattatgcaattgctcccaatacctcaagcatcatattcacaagaatcgtctataaaatttaataatcgagaaattattaatgcttcaaaaaaagatttgttatctataagaggaaatataatttctatggtattccaagaacctatgacttctttaaatccatatcatagagttggagaccaaataacagagtcagttcttttgcataccaaggccacaaaacaagaagctaaagatgaggcaatcaagcttatgaatttagttgagattgatgatgtggaaaggcgctttaaagcttacccacatgagctttcaggggggcaaagacagaggattatgattgcaatggccttggttaataaaccgcaattactcattgctgatgagccaacaactgcgttagatgtaacaattcaagcacaaatattggacttgatgtctaaactaaaaagagatctaggaatgtcgatcttatttataactcatgaccttggattggttaaagagttttcagatcaagtttgtgttatgcaaaatgggaatatagttgaaagtggtgatacaagcaatgtatttgagaaccccaaacacccctatacgcaaaaacttttaagcgcagaacctcagcctaaagaagacattaattcagaagaagctccttttctagaaatacaaaacttagatgtttattacgacataccaagcattaatttttttaaaaaaaatagattccatgctgtaaaagatacttcgcttaatatttataaaaataccactataggcttggtgggagagtcaggctccggcaaatctacattaggaaaagcaattgcaaatctaactaagtttgaaggaaatatatattttgaaggtaaaaacataataagctcttcaaaagaaatcaaaaaacatattcagattgtattccaggatccatatggatctttatcaccaagaatgacaattggtgaaattgttggagaaggcttaggcgttcactttaaattatcaaaactggaaacacaaaataggattgataaagttttatctgatgtgggtattgagttgagtgctaaaaataaatatcctcatgaattttctggtggacaaaggcagagaatagcaatagccagatctttgataatgaatcctgcttttatgattttagatgaaccaacttctgcattagatagatctatacagatacaagttataaatttacttaaagatattcaaaatgaatataaattaacctatttatttataagtcatgatttaaaagtaataagatcaatgtcagactatatttttgttatgaaagacggagaaattgttgaatctgggctgtctaacgaggtttttgactatccaaagcaaaaatatactaaaaaattactctctgctgcgttaagatacgcatccgattaaa

SEQ ID NO: 270734 - DNA, 739 bp, Unknown
  Bacterial polypeptide expressing nucleotide sequence isolated from the Sargasso Sea
aatgaaaactttagttgaagtgcaaaatctaaaaaaaaactatggtgataagcaagccgtaaaatcaatatcatttaaaataaatgaaaatgaaattttaggccttttaggcccaaatggatctggaaaaacaactactattggtatgatgttaggtttactaaaaccaacaagtggagaaattttaattgagggcgataaaatagaggaagatagaattagaatacttcaaaaaattaatttcatatctccctatattgaacttccaaaaaaattaactgtgaaacaaaatctaattgtctttggaaaactttataaaattaaaaatttaaatgatagaattgactacctgacatcaaaacttcgtttaagtgatatactaaaccgaataactggtgaactttcatctggacaaaaaaatagagcgagtttagcaaaatcattaataaatgatcctaaggtgctattattagatgaacctacagcatctctagatccagaaattggagattttataagatcttttttagaagattataaaaaagaaaaaaaaatatctattttgcttgcttcacataacatgaatgaagtcactagattatgcaaatcaattttgatgatgaaagatgggataattgttgacagtgggagtcctgctaaccttatagagaaacatggtagaaaaaatttagaggaagtatttttaaaactttcaaggagacctaatgagcataattaa

SEQ ID NO: 270735 - DNA, 802 bp, Unknown
  Bacterial polypeptide expressing nucleotide sequence isolated from the Sargasso Sea
cttgagtgtagcatcgacctctgcggaggctaacgccgttgaagccaaaaacctggatttggtgttccaaaccagggacagtcccgtccacgctctttccgaagttaatcttgaaatccgtcgtggagatttcatcagtttcattgggccttcgggatgcggaaaaaccacccttttaagggtcattgccgatcttgaaaaaccgactggtggcagcattgtcgtcaacggggtcagccccgaacaggcgcgtcttcaacgggcttacggatatgtgttccagtcccctgctttatttccctggcggactgtggagggaaacctcaaattgcccctggaaatcatgggcatcgatgctgctgaaagaactcgacgggcaaaagaaagcctgaaaatggtcaaccttgaaggcttcgagaaaaagttcccttggcagctttccggcgggatgcagcaacgagtttcgattgccagggcattgacctttgatccggaactgcttctgatggacgagcccttcggcgcgctcgatgaaatcgtcagagatcaactgaatgagcatttcctgagactctgggaaaagaatcggaaaaccgttgtttttgtcactcattcgatcccggaagctgcatatctttccaccaggatcgtggtgatgtctccaagaccgggtcggatcatcgaatgcatcgacagtgaccttccttcggaccggactctggacatccgggaaacctcggaatttttggatctttctcaccgtatccgggaaggacttcgtgccggacacagttatgattga

SEQ ID NO: 270736 - DNA, 436 bp, Unknown
  Bacterial polypeptide expressing nucleotide sequence isolated from the Sargasso Sea
catgggatctttaaattcccatccaaatcctagattatggtatcaggcatttgctccctctgaaattagatctagggctctgaattgtttagatcaagttggattaaaaaattttgcaaagaataacgttaatacactttctggaggggaatctcaaagggtagcaatagcgcgtgctctaatgcaaaaacccaagttaatgatcgctgatgaacctgtcgcaagtctagatccaaaggttggaattgaagttatgaaccttctaaaagatctcactttaaagcaaggaattacgctattttttacaactcacgacctaaagcatgctgaacattatgcaaatagagtaattggtttgaaagatggagtaatcaaaataaatattaaatctaaagaacttaatgaacttgatgttgatgaattttatgctgcataa

SEQ ID NO: 270737 - DNA, 985 bp, Unknown
  Bacterial polypeptide expressing nucleotide sequence isolated from the Sargasso Sea
atgtacctcaaaaaattagaatttatttcattattaaagaattacgaaaacattacagctgttgatagaattaatttaaaaataaattctgggacttattgctgtttacttggtccgtcaggttgtggcaaaacatctactttacgaatgattgcgggtcatgaagaaataactgatggaaaaatattgttgggggacctaattataaatcggctacctccttctaaaagaggtacctctatgatgtttcaaaattatgcgttattccctcatttaaactgtattgataatgttgcgtttgcattaaaaattaaagatgtaaaaaagaaagataggtacattgaggcaagtaaaattttaaaaatggtacaaatggaaaattttgccgatagatttccaaatcaactatctggtggacaacaacaaagaatagccttagctaggtctctaataactaaaccatctatattactattagatgaaccattatcagctttagatccatttcttagaataaaaatgagaactgaattaaaaaatctacagaaaaaacttggaataacttttattcatgtaactcactctcaagaagaagcacttgcattagctgatcttgtagttgttatgaataaaggagtgatagaacaatcagatactccttataacgtttttaataaacctaaaaatgaatttatagctcattttgttggcagtcataatgttgttcaagttggagccaaaaaatacgctgtaagaatggatcaaattaaaataaatatttcaaaaaaaccagaaaatgatgatataaaaattaatgatattgaatttcaaggagaaaaagtaaaaattacttgtatagataaaaataataatgagatttatgttttagtagatgacagttttttttataaaagcaattttaaattagcacaaaatgtaaatttaaattggagcaaaaatagagctcatcttctgaaagaataat

SEQ ID NO: 270738 - DNA, 1783 bp, Unknown
  Bacterial polypeptide expressing nucleotide sequence isolated from the Sargasso Sea
cttggaaacccagaacactcttcgcaaaccgatggacggcacgggcacctcgcccgtgacggtcctcaagcgcctgtggccgtacatccggccgctgatcggcatcgtggtgctcgccgtgatgacgatgggcgtcgtcgcggccaccgaggccggtatcccggcgctgctcaagccgctgctcgaccacggcttcggctcgcacggcagcgaccgcgcgaaatggtacgtgccgatggccgtgatcgggctcgcgctcgtgcgcggcgtatcgcagtacgcatcgaattacctgctcaactacgtgtcgaaccgcatcctgctgcagctgcggctcgagatgttccagcggatgctgcacacgggcgcgtcgttcttccagcgcgagacggcgagcaccgtgatcaacgcgatcgtgttcgaggtcaaccagatcctgtcggtgctgaccggcgtgatggtcacgctcgtgcgcgattcgctgacggtgatcttcctgctcggctacctgttctacctgaactggcgactcacgctgatcgtcgcggtgatcctgccgggcatcggctggctcgtcagcaagatcaaccggcgcctgcgccgcctgaaccgcgagcaccagacgttgaccaacgagctgtcgtacatcgtcgaggagacggtcggcggctacaaggtcgtgaaggtgcacaacggcgaagcgtacgagatggaccgcttcacgcagatgagcaagcgcctgcgcggctacgcgatgcgcatgacgatctccggcggcctcgcgcagccgctcacgcagttcctcgcgtcgatcgcgctcgcggtcgtgatcacgatcgcggtcgtgcagtcgtcgaacgaccagacgacggtcggcggcttcgtcgcgttcgtcacgtcgatgctgctcgtgatctcgccgctcaagcacctgatcgacgtcaaccagccgctgcagcgcgggatgacggcggccgagctgatcttcgggctgatcgacgaaccggccgagccgcagggcggcggccggccgctggaacatgcgcgcggcgacatcgagttccgcaacgtgacgttcgactacggcacggccgagcgaccgacgctcgaccgcatctcgttcaaggtcgcgcctggcgagatgatcgcgctcgcgggcccgtccggcagcggcaagacgacgctcgtgaacctgctgccgcgcttcttcgacccgaccgacggggcgatcctggtcgacggcgtgccggtggccgactacgatctccatgcgttgcgcggccagatggcgatggtcagccaggacgtcgtgctgttcaacgacacgatcgccgcgaacgtcgcatacgggcagacgcccgaccgcgcgcgcgtgcaggccgcgctcgaggccgcgaacctcgccgatgcggtcgccgcgatgcccgacgggctcgacacgctcgtcggcggcaacgggatgcggttgtccggcggccagcgccagcggctcgcgatcgcgcgcgcgatctacaaggacgcgccgatcctgatcctcgacgaagcgacgtcggcgctcgactcggaatcggagcgccacgtgcaggcggcgctcgaacggctgatggagggccgcacgacgctcgtgatcgcgcaccggctgtcgacgatcgagcgtgcggaccgcatcctcgtgctcgaggccggcaagatcgtggaggagggcagccacgacgaattgctgcgccacggcggcctctacgcgcacctgcaccggatccagtaccagcagcaggcggcttaa

SEQ ID NO: 270739 - DNA, 643 bp, Unknown
  Bacterial polypeptide expressing nucleotide sequence isolated from the Sargasso Sea
cacaatagcgaaaatgattgtaaatttatttaaacctagttctggtgatattttctttgataatatttgtattacaaagattaaaaaaagttcagaaatgatgaaatttagaaaacaaatacaaatgatatttcaagatccttattcatctctaaacggaagattaaaagttaaagatatagtttcagaacctattaaactacacaatccttcaattaacagaaaagatttagataattatatttttgatttattagattcagttgaacttacacaaaattcagcagatcgttaccctcatgaattttctggcggtcaaagacaaagaatatctattgcaagagctttagcaactcaaccaagacttcttgtttgtgatgaaccaacttcagctttagatgtgagtattcaagctcaaatattaaacttgttaaaggatcttcaagaacaactaaatttaacaatattatttataagccatgatttaccagttgttagacaaatgtgtgatagaattggagtattaaaagatggtaaattatgtgaagtttcaaatacagaagaattgtttttgaaaccgcaacatggttatactaaagaacttttacatctaatgccaaaaattgagtctatttatagctaa

SEQ ID NO: 270740 - DNA, 1291 bp, Unknown
  Bacterial polypeptide expressing nucleotide sequence isolated from the Sargasso Sea
aatgacaagcttgaatcctctacatacaataaataaacaaattgaagaagttattactactcataatacaataagtaaaaaagaagttaaaaaaagaacaatcaaattactaaatgaagttgggcttaatgatatttcatcaagaccaaaaatatatccatatgaactttctggtggacaaagacaaagggttatgattgcaatgagcattgcaaatgaaccagatctattaatagcagatgagccaactacagctttagatgtaactatacaattacaaattttagagttattgcaaaatattcaaagaaaaatggggatgtctttgatctttataagccatgatctttcagttgtaaaaaaattatcagattacatatatgttatgaaagatggtaaaataattgaatttggttcaagtgaaaaaatttttaacaaccctaaacataaatatactaaagaattagtatcgagtcaaaataatataaaagaaattaaaagtaataaaagtaaatctattataaatataaagaatctaaatgtttggtacccaataaaaaaaggtttgcttaaaaggacaatagattacgtaaaagcaattaacaacatcagttttaatttatatgttggagaaactattggaattgtaggagaatctggttctgggaaaacttcattaattttagcaatgcttaatttaattaaatccaaaggagaaataattattaataataaaaatttagagcatttaagtaaaaaagaaattttagatttaagaaaagatattcaagttgttttccaagatccattttcgtcacttagtccaagaatgaacattgaggatattatctctgagggtttgatggttcattatccaactataggtttggaagaaaaaaaacaaaagttaaaaaatattttagaaaaagtcggtttagagtatgaaaatacaattgaaaaataccctcatgaattttctgggggacaacgtcaacgaatagctattgctagagctttaattttagaaccaaaaatactaattttagatgaaccaacctctgctttagatgtaacaattcagaatcaaatattaagtttattaaatagtttacaaaaagaattaagtttaagttatatttttataagtcacgatatgcgagttataagagctgtttctaataaaataattgttttaaaagatggtttaattgttgaagaaaattatagtagagatatttttatttcacctaaatcagaatatacaaagaaactaatttcttcagttatataa

SEQ ID NO: 270741 - DNA, 685 bp, Unknown
  Bacterial polypeptide expressing nucleotide sequence isolated from the Sargasso Sea
atgaaaaccagtacaaagactgtaatctctataaataatatttcaaaagtatatgaaggccctccaccagtaagagctttagatggtgtctcacttgaaattaaagaaggagattttgtctcaatagttggccagtcaggtagtggaaaatctacattcttaaatatgattggattactagatagcgtaactgatggctctattgaaattgaaggaaaagatgtctcagaactctcagacaatgagctctcaaagttcagaggtgaaaagattggatttatatttcaaagtttttttctacttccaggattaaccgctcaggaaaatgtagctgaaggtcttttataccaaggcatctcaagattagagagattagaaaaagcaaaggaagttttagaacaagttggccttggagacaggttgacccatttgcctaaagaattgtctggtggtcaacaacagagagttgcgattgctcgtgctcttgtacaagatccggcattcgtactagcagacgaaccaacaggaaatttagataaggaatctggcataaacatactcaatattttgaaagacttaaacaatcaaggtaaaacagtaataatgatcactcacaaccaagaacatgcaagtatgtttaaaaaagttatcgaactagttgatggaaaaatagtaaatcaatgaa

SEQ ID NO: 270742 - DNA, 319 bp, Unknown
  Bacterial polypeptide expressing nucleotide sequence isolated from the Sargasso Sea
caattatctgggtggtcaacaacaaagagtagctatagctagagctttgtgcatggaaccaaaaataatgttatttgatgaacctacatcagccttagatccagagatgataaaagaagttcttgatgttatggtaaatttagctaatcaaggcatgaccatgatcgtagttactcatgaaatgggatttgcaaaggaagttgctgataaaatgatattcatggatgagggtatgatagtagaaaaagctgatactaaagaattttttgctaatccaaagagcgaaagaaccaaactattcctaagtcaaattctttaa

SEQ ID NO: 270743 - DNA, 622 bp, Unknown
  Bacterial polypeptide expressing nucleotide sequence isolated from the Sargasso Sea
tatgagtattcacattaataatttaactttttctcatgatgattctccgttattgcatgatttatctttctcagttgaaaaaaatcaaattggtttcgtgtcaggcagaagtggaattggtaaaagcacactctttaatataattgcaggactcattctgcctgaaaatggcaaaataatgcttgatgatattcttctcaatgataaaaatttcgcactagaaactgaaaaaaggaaagttggttatgtttttcaagattttgcactattccctcatataaatgttaaaagaaatattcaatatgcaatttctttagaagttagtgaactttttgatgaattaatatcaaaactgggtctacttgagcttttagataaaatgccccatgaattatctggtggtcaacaacaaagagcggctctgttaagagctattttaatgaaaccaaaaattcttctcttggatgagccgttttcgaatcttgataaagataatattattgctgttcaaaaaataattattcaaatcataagtttatttgatataccttgtctattaatatctcatgacattcaatcaactcaaaattttccaatagacaaagaaattataatcagctag

SEQ ID NO: 270744 - DNA, 682 bp, Unknown
  Bacterial polypeptide expressing nucleotide sequence isolated from the Sargasso Sea
ccaggtcagttatctggaggacaacaacaaagggttgctgtagcaagatctttggtatttgatccacaattagttttgatggatgagcctcttggtgctttagataaaaacttaagagaaagtatgcagtatgagattaaacatattcacgaaagtattggagtaactgttgtttatgtaactcacgatcaaagtgaagctcttacaatgtctaaccgtattgctgtattcaatgatggtaaagttcaacaactttctagtccagatgagctttacgagaagccagttaattcttttgttgctgagttcattggagaaaataatactttcgcgggtgaagtttcagatatttcaggaggcaaatgcaaagttaagttagctaatgcagaaattatggcaaatcctatttcagttaaaggaaaaggtgaaaaaacaactgtctctttgagacctgaaagagctttgattaatcctagcgacaaaatggacaacattcataagggaaaaattgaagaagtgatatatcatggagatcatacgagagtcagaattaatcttttaggtaatgatcaatttattctaaaagttccaaatagctcctctaatcttgatattaaattaggtaatgaaatcaaaattggatggaatagtgaagacgctagggctttagacccaaaataaa

SEQ ID NO: 270745 - DNA, 571 bp, Unknown
  Bacterial polypeptide expressing nucleotide sequence isolated from the Sargasso Sea
agtatctatatctggtaagtctggatcaggtaaaagcacactctttcatattatgagtggtctcgagaaattcacatctggagatgtgcttattgatggcaaaaatgtcaaaaaccttaatgataaagatatgagtgcatttagaaaagatcacattggttatatttatcaatttcatcatttactttatgaatttagtgtaattgaaaacgtcatgatgcctcttcatattaaaggtatgaataaagatttagcatatgaagcttctatagaaatacttaaaagggtagctttagaaaaaagattagattttaatataaataaactttctggcggtgagaggcaacgtgttgcaattgcgagagcattagttggtagtccaaaatatatatttgcagatgaacctactggcaatcttgataaaaaaaatgcgttaaatattttttctataatgaaagaacttgttgtggaaaataattccactttccttttagcaactcacgattctgaaatttcaaataaaatgtcgcataagtatttattggaaaatggagaaatgaaagctatttaa

SEQ ID NO: 270746 - DNA, 1591 bp, Unknown
  Bacterial polypeptide expressing nucleotide sequence isolated from the Sargasso Sea
aatgagtatcttatccgttgaaaatttaagcctcaaaatcggcacagaaaacatactgggtggtatttcattcagactggatcaaggtcgaattcttgcgataactggtgagagtggctctgggaaatcgatgacagcactctcaataatccaacttcaacccaaaaatgcaaaattggaaggagaaatatttttccatgatcaagagataaccaaaaaagatgagtttgaattatgtaagattcgtggcgcaaaaataggaatgatatttcaagaaccaatgacagcactcaaccccgtaaaaactgttggagatcaaataagcgaaacaattattttgcacagtacaaaaaataaaaaatccgcggataaagaaactctgaaaattctagaacgagtgggtttaagtcctgcagctgaagtgaaaaaacgctatccacatgagttatcgggaggccaacgtcagagagttgttattggaattgcaattgcattaaaaccctcaattataatcgcagacgaaccaacaacagctcttgatgtaaccacccaggcccaaattctcttacttctcaaaaaattagttacagaagataatatagccatggttttaattactcatgatctagctgtcgttgcagatatggcagatgaaatagcagttatgcaaaacggaataattgttgaaattgatgagacagataacttgtttcaaaatatgaaacaccagtatactcgttctctttttgcagcatctgggcattcagttaatttgcccgtcacagaggtaaattctgaccctcttttgactatcaataacgttacttgcagatataggttggcgcgtactaaaattttttcaaaaagtgattatttcaccgcagtttctaatgtttcattcgatattaaaaatggcgaaagggttggtttagttggcgagtctggttgtggtaagtcaactcttaccagggctatacttggtcttgagccaatttataaaggtgaaataaatgtcgataatcaaaacattttgaaagccacatcaagtacgaggaaaaatattcaagtcgttttccaagatccatacggctctttcaatccaagacacaaagtctcaactcttataaaagagcctttttaccttattaaagactctccagaatctaaaaatattgagagtaaaatagataaagttttagaagatgtcggactttcagctacagataaaaacaagtatatacacgaattttctggtgggcagaggcaacgaatagcaattgcacgcgctttgatcataaaaccaaaacttgtaatttttgatgaagcggtatcagctcttgatgttacggtcagagcacaaattttagacctaatcgctgaacttgccgccgaatacggtcttagttacctgttcattagccatgacctttctgtaattcgctcaataaccgatcgttgcctagtcatgaaagatggcaagattatcgaagagggatctaccaaaaaggttttggaacaacctcaaaatgcatatacacaaacattaattaacgcggcacccaaattacccaattttcaactggagttataa

SEQ ID NO: 270747 - DNA, 574 bp, Unknown
  Bacterial polypeptide expressing nucleotide sequence isolated from the Sargasso Sea
agcgggaaaagtactttaatagatttattgatgcttttgcttcatccaaataatggagagattttggtagacggaaatccactcaaagataatgaaattagaccctggcaattatctatagctcacgtgcctcagaatatctttctttctgacaaatcaataactgaaaatattgcatttggaattccaaaagaggacattgatcatgaaaaagttttggaagcttcaaaaaagtctcaaatatttgaatttattagccagtcaccagacggtttcaaaacgttagttggagaacgaggggttagactcagtggtgggcaaagacaaaggattgctctagctagagcattctatagaaatgcttcaatactcatttttgatgaagctacaagtgctcttgatagcaaaacagaggatgatgtaatgaattccataagagaattagattctgacttaacattaattataattgctcatagaataactacgctcagtcatgcagaccaagtaattcagcttgagcatggaaagataacatattcaggtccttatgagggcctatcagcactataag

SEQ ID NO: 270748 - DNA, 517 bp, Unknown
  Bacterial polypeptide expressing nucleotide sequence isolated from the Sargasso Sea
aatgaaaacattaaaaattgaagaattgtcaaaaaattttggagcaacggaagttttaagaaaaattaatttagaaatagacgaaggtaatttcttagttcttttaggtccatcaggttgcggaaagtcaacattgttgaacataattgcaggtttagaatcaataaatgaaggtaatgtttacatagacgattacaatgtaagcaaagtagaaccaaaagaccgtaatattgcaatggtttttcaatcatatgctttatatccatctatgaacgtacgtgaaaatatgatttttggccttaaacaagcaaaagtatcaaaagaaaaaatagaagaacagttagaaaaagtatcaaaatttttacaagttgatgctttattagaaagaaaaccttcccagctatctggtggacaaagacaacgagtagcaattgggagagcacttgtgagagagccaagaatatttttattcgatgagcctttatcaaatctagatgcaaaattaagggtgaaatag

SEQ ID NO: 270749 - DNA, 1513 bp, Unknown
  Bacterial polypeptide expressing nucleotide sequence isolated from the Sargasso Sea
gtgagcttttgcgttaactccaatgcaattaccgcaatcataggggagagtggttccgggaagtcggtaacctgctatgcgattttagggctacttccaaaacctgcagggcgactcgatggcggtgaagccaaattcctagaaagggatcttttggccacgtcggagaccgatttgcggaaaattaggggttcagacataggaatggtttttcaggatcctatgacttgtctaaatccctacatgcgtattggtaaacaattgatggagcctctcctcatacataccgaaaccaacgcacggatagctaagagtcaggcaatagaaatgctcgatgaagtgggaattaaagatccctctataacgatggatgcttacccttttgagttgtcaggaggcatgagacaacgcgttatgattgcgatggcgttgataaatagccctaagcttttaattgcggatgaacctaccactgctctagacgtaactatccaggctcagatactcaggctaataaagtcgttacaaagaaaaagaaatattggtgttctcttagtgagtcatgaccttgcggtggtggctgatatcgcagacgaaatagtagtgatgcagaatggccgaatcgttgaaagtggagaacctgattcgatattcaacgatcccaaacacgactatacgaagaaattaattagtgctattccgagaggtaaatctgaaatatcgactcagagtcgtgaaacactgctggaggttaaaaacctcaaaacctggttttatcgtgaaagcaaccaagaacctattcgggccgttgatgacgtgtcgcttacaattgataagggagaagtgcttggactagtcggggaatcaggaagtggcaaatcgaccctagggcgctcaattttgcgattgacatcgatcaccggaggaaaagtcttttttggcgaaaccgatttatctaatctaaaaaagaatgacctgaaggtgtttcgcaagcgtatgcaaatgatctttcaagatccttatgcttcgttaaacccaagaatgacggtctttgatacgttagcagaaccattgctgttgcacacaagtgttgaaaagcaaaatctttcgcggtcagtaaaaaaattaatggaagatgtggggttacaatgggcttttgctaagaagtatcctcacgagttttcaggggggcaaagacaaagggtggcgataggaagggccttagcgacgagacccgaattcatagtcgccgatgagccggtttcggcattagatgtaaccatacaagcacaaatactcgatctattgaaagcgctcaaagacgaacacaacctaaccatgctttttgtttcccatgatttggcggtcatcagacagattgcggatcgagtcgccgttctttatcaaggaaagatcgtcgaaaagggaataactcacgaggtatttgagcggcctaaagaaaagtatacccaggaattgattgcttctattcctggaaaactattgtattagt

SEQ ID NO: 270750 - DNA, 532 bp, Unknown
  Bacterial polypeptide expressing nucleotide sequence isolated from the Sargasso Sea
atgaaaaataatcaaaccaatgatgatctttttaatttagtcaatgttaacaaaactgtcctaagtcctgaaggcagcttaacaattctatccgatatcagcctgagaataaaagagggcgagagtgttgcgattattggcacatcaggagccggtaagtcaactcttctaagtttgatggcaggattggacgttccttcaagtggacagattaattttaaaggcaatgatttagttaccttgaatgaagatcaaagagctgaaattagagccaagaatgttggcttcgtatttcaatcttttcatttaattccatcattaaatgcccttgaaaatgtcatgtttccaatggaaatgaacaatgtaagtgattacagaaataaagccactgaaatattaaccaacatgaatatgaaagaccgcctaacacactatccaagccaattatctggcggagaaaaacagcgtgttgccatcgcaagagcttttgccagtaatccctcagttttatttgccgatgaacaaactggaa

SEQ ID NO: 270751 - DNA, 742 bp, Unknown
  Bacterial polypeptide expressing nucleotide sequence isolated from the Sargasso Sea
atgggtattgaattaatcggtatcgaaaaatcttggcacaaggtgccggtactgcaacaggtcagctttcggaccgctcccggtgagaccttggtgctgctgggcccgagcggtgccggcaagagttctctgctgcgcatgatgaacctgctggacaccccggatgccggtgttctgcgcatcggtgaaagtgaattttctttcccgtccagcctctccaccgccgagttcaaccgccagacccaggcgctgcggcgcaaggtgggcatggtgttccagcagtacaatctgtggccccatctcaccgtgatggagaacctcatcgaggcgccggtcaaactgctcggcatgagcaaggcagcagccatggagaaggggggctatctgctggcccagctgcaactggccgacaagcgcgacgcctggccggcgcggctgtccggcggtcagcagcagcgggtggccatcgcccgtaccctgatgatggacccccaggtgctgctgtttgacgagccgacggcggccctcgaccccgagatcaccaaggaagtggcggagatcatccgcaacctgggccagaccgggatcacccaggtggtggtgacccacgaggtggagttcgcccgcaaggtggccagccaggtgatctatctggagaaggggcggatcatcgaagccggctccgccgccattttccaagccccgcaaaccagccggtttgccgaattcttgatgcattgat

SEQ ID NO: 270752 - DNA, 700 bp, Unknown
  Bacterial polypeptide expressing nucleotide sequence isolated from the Sargasso Sea
atgttatccatgaaaaacatcaacaaagtgttcaaaactgacttagttgaaacccatgcactacgcgattttagccttgaagtgaacgaaggcgagtttgttgcagttaccgggccttctggctcaggtaaaaccacctttttaaatattgcaggtctgcttgaaggctttagctcgggcgaatacagccttgatggcgtgaatgtgtctaatttaagtgataaccacagcgctaaagtacgtaatgaaaaaattgggtttatctttcaggggtttaatttaattcctgatcttaacttagccgaaaacgttgaagtgccactacgttatcgcggtatgaatgccagtgagcgtaagcgccgagtcgagtctgccttagagcaagtgggtttaggcgcgcgaatgaagcatttaccgacgcaattgtctggcggacagcagcaacgtgttgccattgcgcgggcgttagctggcgaaccacgctttttactcgccgatgagcctaccggaaacctagacagcttaatggcgcgccaggtgatggagcttttagagaatattaatcagcaaggtaccaccattattatggtgacccacgacccagaattggctcgccgtgctcagcgtaatattcaaattgttgatggccaggtgtgtgacttttcgatgtaccaacctgctgcaaccggcactcgctaag

SEQ ID NO: 270753 - DNA, 712 bp, Unknown
  Bacterial polypeptide expressing nucleotide sequence isolated from the Sargasso Sea
catgacgaccgccacgctcacgccggtgctcgaactgcgcgacgtctcgcgcgtgtacgagggtgcgggccgcgtcgtcgcggtgcgcggcgcgacgatctcgatcggccagcgcgacgtcgtcgcgctcgtcggcccgtcgggcagcggcaagagcacgctgctcaacctggccggttttctcgacgtgccgagcaccggcgaacgctggctcgaaggccgccggatcgacgatgcgcccgacacgctcgagcggattcgccgcgagcgcatcggcttcgtgttccagcagttcaacctgattccggtgatgtccgcgctcgaaaacgtcgaactcggctgcttcgcatggggcacgccgcgcacgcggcgcgagcgcgcccgcgcgatgctcgacgcggtggggctcgccgcgcgcgaacgccaccgcccaggcgagctgtccggcggcgagcagcaacgggtcgcgctggcccgcgcgctcgcgaaggagccggcgatcgtgatcgcggacgaacccaccgccagcctcgacagcaccaacgcacgggcggtggccgagctgatcctcgacaccaatcgcacgctgggcaccgcctttctgattgcgtcgcacgacgatcgtctgtgcgcgcacctgccgcgccgcatcgagatgcgcgacggcgtaccgggagtgaatcgtgaactggtcgacgtttgcgtggcgtaa

SEQ ID NO: 270754 - DNA, 670 bp, Unknown
  Bacterial polypeptide expressing nucleotide sequence isolated from the Sargasso Sea
tatggcatcagtagttgttgaaaatttaactaaagagtttggtaacgtcaaagctgttaatgatattaacttaaaagtaaacgatggcgaattcttagttcttctgggaccttcgggttgtggtaaaagtactttacttagaatgatttctggacttgagtttccaacttatggaaaaattttaattggtgataacgacgtaacgagaacaattcctaaagatagaaatatttctatggtttttcagaattatgctctgtaccctcatatgacaattggagaaaatattcagttcccactagagtctagaggttataataaaagtgaaattaaggaaaaagttgaatgggcttctgaattattaaaaatatcagatttattagacagaaaacccagagaaacatctggaggtcaaagacaaagaactgctctagcaagagcactggtgagagatccagaagcatttttaatggatgagcctttatcaaatttagatgcaaagctaagacattctgccagggaggaaattagacagtttcaaaaccaagttaaaataacaaccatttacgttactcacgatcaaattgaagctatgggattaggtgatcgtatcataataatggaagatggaattataaaacaaattggaactccccaaagaaatttatga

SEQ ID NO: 270755 - DNA, 1432 bp, Unknown
  Bacterial polypeptide expressing nucleotide sequence isolated from the Sargasso Sea
tttcaaggcccgccagaccggccagatcatcgcccgggtcaaggagatggcccagatccgccagttcctcaccggctcgaccctgatgctggtgctggatctgctgttcatcctgctgttcgtcggggtcatgtttcactacgccccgcgcctgaccgcctgcgtgctgggctcgctgctgatctacttcctgctctggctgctgatagggccgctggtgcgcagaaaggtcgaggcggagtatcaggcggatgccgatgccaccagctttctgaccgaggcggtcaccggcatcgaaaccatcaagaccacggccaccgaacgccgcttctaccaggaatggcagcgcctgctggcacgccagctcaggcgcggttttcaggccaagaaggtggggttggcggccggtcagggcatcgatctggtgcaaaaactcaccgccgccctgctgctctggctcggggtcggcgaggtactgaacggtcgcatgagcccgggggaactggtcgccttcaacatgctggccggccacgtcacccagccggtgctgcgcctggcccaggtgtggcaggattttcagcacaccctgattgctctgcgccgggtcggcgacatcctcgacgaggcgccggagcatggcaacaacgggctcgcctccgtgcccgcccttcagggtgccatcgagtttcgccacatccgctttcgttaccagccggatgcccccgaggtgctggccaacctctccctcaccgttgagccggggcagttcatcggcatcacggggccatccggctgcggcaagagcaccctgacccgtttgctgcagcggctctatgtgccccagcacggtcaggtgctggtggacaacatggatctcgccatcgccgaccccgtctccctgcgccgcaacatgagcgtggtgctgcaggagagcgtgctgttctccggcaccatcgccgacaacatccgcatctgccgccccgatgccagccaggccgagctggagcaggcggcgctgctggccggtgccctcgccttcattcgcgagctgccccagggcttcgagcaacaggtgggagagaaaggcgcccgcttgtcgggcggccagcgccagcgcattgccctggcccgcgccctgctggtcaaccccaggatcctgctgctcgacgaggccacctcggccctcgactatgagtcggaagcggccatcatggccaacatggcggccatccgccgcggccgcaccctcatcagcatcgcccatcgcctcaataccctgcgcgaggcggaccgcatcctggtgatggaggcagggcagatagtggagtcgggcagccatgatgaactgctggcctgcgaggggctctatgccaggctgtggcgtcagcagaccggtgctgagacgagtcagaccctgactcacactggctag

SEQ ID NO: 270756 - DNA, 875 bp, Unknown
  Bacterial polypeptide expressing nucleotide sequence isolated from the Sargasso Sea
attaataactgatagattgggattatttttttttaaagtattttctaataaagatggccaggattcttctgcttttactccgtatcctgcactcagactatcacctaaaacaacaatggtgttttcatttaatgataagctttctgaagcatttactgtcatgaaaactgaaagtaaaatagctgagaatacacctaggcacccattgaaagaccttattttagaagttaaaaacattacaaaagaagttaacagtccagaggggcctttgacaatagttaaagatataaatttatcagttgaacgaggaaagcccatctctttagttggtccttcaggttcgggaaaaacgacgttgttggccattatggctggtttagatacaccaaccaagggatctgtaaaacttttgggttctaatatctctttaatgaatgaagatcaaagagctcaaatccgtgctaaggatgtaggttttgttttccagtcttttcaccttatgccaagattatcagcattagataatgttatgttgcctttagaaatagcaggagatcctgaggcaatcgaaaaatcacaaattgctcttgaccaagttggcttaagctcaagggcaaaaaactttgccactcaactcagcggtggtgagaaacaaagagtagccattgcaagagcgatagtaaataaacctaaaattttatttgctgatgagccaactggcaatttagatcaaaaaagctctaatgctgtgactgatttacttttttcaattaatgaattaattaacaccacattagtacttgtcacacatgatttgcttttagcagaaaagtgcaaagatttatatgagttatccgatggttcacttttgtgat

SEQ ID NO: 270757 - DNA, 1585 bp, Unknown
  Bacterial polypeptide expressing nucleotide sequence isolated from the Sargasso Sea
atgtctaaattacttgaaataaaaaacttatctgtagattttaagttaagagaaaatgtctttagagcagtagataatatttcgtttgagattgataagaatcaaactttagcgttagttggtgaatcaggttctggaaaatctgtaacagcaatgtcgattttaaaacttcttccttatccaaaggcaatgcatccaaagaattcaaaaataatatttgagggagaaaatattttagaattcgataacaaaagcttgaggcaagtaaggggaaatattgtatcaatgatttttcaagagcctatgacatcattgaatccatttcatcgagttggtgatcaaattattgaagctattattactcatagcaaaacctctaaaaaagaagcaaagaataaagcatttgaattattagatcttgttgaaatacctgatctctcaagaaggtttaaatcttttcctcatgaactttcaggaggtcaaagacaaagagttatgattgctatggctttagtaaataatccaaaactacttattgcagatgagcctacaactgctttagatgtaacaattcaagcacaaatactagatttaatgtctaaacttcaaaaagaacttggtatgtctattcttttcattactcatgaccttggtcttgttgataaattttctgacaaagtagcagtaatgaaagagggaaagattgttgaaataggtgaaacaaaaaaagtcttcactaatcctaaagaggaatacactaaacttctacttgcatcaattccaaaagaaaaaactaaaattaaatcagaacccaaacctcttgttgaaataagtgatcttgatgttttttatagaatcgagtctcaaaatatttttaaagaaaattattttcatgcagtgaaaaatgtaaacctaaaaataaataaaaaaaccactattggtcttgttggggagtcaggttcgggcaaatctacacttggaagagctattgccaatttacttccttataagggttcagttatttttgatggaaaggaaatttcatctattaatgatcgcagcatcaggaaagatatccaaattatttttcaagatccttatggatcactttccccaagacttactgtaggagatattatcggagaaggtttagatattcatatgaacctgagtaaaaaagaacgaaatgatttgatagaacaaactatgaaagaagttgagcttgatccaaaatatagattcaaatatccacatgagttttcaggaggtcaaagacaaagaatagctatagctagatcaataatacttaaacctaaatttattattttagatgaaccaacttctgctttggataggtctattcagattcaaattattgatttactaaaatcacttcaagagaaatacagtttgacttatttatttataagtcatgatttaaaagtaattagagcaatgtctgataggattcttgtaatgcaaaatggcgaaatggttgaagaaggtaatgccaaatcaatttttgaaaaacccaaagaagaatatacaagagagcttttatctgcagcaatcaaatattcttaat

SEQ ID NO: 270758 - DNA, 451 bp, Unknown
  Bacterial polypeptide expressing nucleotide sequence isolated from the Sargasso Sea
tataaagcttcacaacccttcaattagttctaatgatttagacagttatatttatgatttattagaatctgttgaactaacccaacaatctgcagaacgttatcctcatgaattttcaggaggtcaaagacaaagaatatcaatcgctagagctcttgcaacacagccaagattattagtatgtgatgaaccaacttctgctctagatgtgagtattcaagcgcaaatattaaatttattgaaagatttacaagaacaattaaatttgacaatcttattcattagtcatgatttaccagtggtaagacaaatgtgtgatcgaatagcagtactaaaaaacggaaaactttgtgaaatttcaaaaactgaagagttatttaaaaatccatcacatgattatacaaaggaattactaacattaatgccaaaaatagaatcaatttataactaa

SEQ ID NO: 270759 - DNA, 292 bp, Unknown
  Bacterial polypeptide expressing nucleotide sequence isolated from the Sargasso Sea
tttggatgaagtgggtttatccaaaagaacagggcatgttcctcatcaattatctggtggagaaaagcaacgcgtcgcaattgcgagggctatggttaaagcgcccagcatattatttgcggatgagcctactggaaatttggatcaatcaagcacggataatattcttgaactgttgctgagaatcaatcaacaaacaaagacgaccctgattgtcgtaacacatgatcagcagttagcagcacgatcggatatggtcttcgagctacaagaagggaaattaaaatgctga

SEQ ID NO: 270760 - DNA, 286 bp, Unknown
  Bacterial polypeptide expressing nucleotide sequence isolated from the Sargasso Sea
tgttcaagttggccttggctccagagctaagaattttgcaacacagctcagtggaggcgaaaaacaaagagttgcaattgctagagcaatagtcaatcagcccaaaattttatttgccgatgaacctacaggaaacctagattcgaaaagctcatctgccataacagatttattattttcaattaatgagttaatcaaaacaacgctagttctcgttactcatgacctatcattagctaaaaagtgtgacgaaatatatgagctttcagatggttcaattttatga

SEQ ID NO: 270761 - DNA, 571 bp, Unknown
  Bacterial polypeptide expressing nucleotide sequence isolated from the Sargasso Sea
atattttatgacgggcaggacattgcatcatcctcaaaggaaattaagaaacacatccaaatagtgtttcaggatccatatggatctttatcaccaagaatgactataggagaaatagttggagagggactgggagtgcattttaatctttcaaaaaaggaatcagatataaaaattgataaagttttaacagatgtaggaattgagcttaatgcaaaaaataaatatccgcatgaattttctggcggtcaacgtcaaaggatagcgattgctagatcattaataatgaatcctaattttatgattctggatgaaccaacatctgctctcgatagatcaatacaaattcaagtgataaatcttttaaaagatatacaaaatgaatatgaattgacatatttgtttattagtcatgatttaaaggtaatacgctcaatgtctgattatatttttgtaatgaaagacggaataatagtagaatctggactgtcaaatgatgtttttgactatccaaaagaaaaatatactaaaaaattgctctcagctgcgttaagatacgcaaccgattgag

SEQ ID NO: 270762 - DNA, 940 bp, Unknown
  Bacterial polypeptide expressing nucleotide sequence isolated from the Sargasso Sea
gttcgcccgagtgagcgcaatcttgccatggtgtttcagtcgtatgcgctctatccgcatctaagtgttcgggaaaatatgatggttcctttacgtcttcgtgacctgtctgctgccgaacgcatgccgcttttgggaaacctgcttccgtcgcgcgctactaagatgcacgctatccgctcgaaaatagaccatgcggcagaaacgctgcagatcagccatttgcttgagcgaaaacccggtgagttatcggggggacaacgccagagggtggcggttggcagagcaatggtgcgccagcccaccgctttcttgatggatgagccactgtccaatttggatgctgcacttcgggttcacatgcgcgcggagatcagtggactgcatcgttccctcaagaccacgttcatttacgtcacacacgatcaggccgaggcattgaccatgtcctcgcggatggccgtcatgatggacggtcagattctccaggtcgatacgcccgagagaatctatcgaaaccccgcagatcttcgagttgcgcagttcgtcggcagtccgcgcatgaacattttccccggcgaggttgatagccttggtcgcatccagactctcgagttcagcctagatcacgtgcctagtgagccagtccagggcaatgtcagtgttggatttcggcccgaacacctgcggattgtcaatggcagcggcggccacgacttcacgctcaaagtcactcacaaggaaaacctcggcgctgactactttatccatggggccgtcgccgacggcaaccatcaagttattgttcgggcgacaccggaagaggttacgggggtgagtattggtgatgaactcggcgtcggttgcgataaatcatccagtctggtgtttggagacagtaacaagcgaattgatctacggcccggtttgactcagtgat

SEQ ID NO: 270763 - DNA, 529 bp, Unknown
  Bacterial polypeptide expressing nucleotide sequence isolated from the Sargasso Sea
atgtctgatcgcggcgtgctagaggctgttggtctgggtaaaaactatcatgacgcccggcgagagatcgttgtgcttaacgacttggcgctgtcggtgtcagtcggtgagtggttggctattgtaggcgcctcgggtgcaggtaaatccactttgctgaacttgctgggcggcttggatacaccgagcgcgggtgacgtgtcagtcgccggagagtcgctctccggtatgtcggaaaacgagcggagtcagtggcggaatcagcgattgggttttgtgtttcagatgcatcacctgttgcccgagttcacagcactcgagagcgtggccatgccggcaaggattggtggtgcccccaagcaggaggccgaagcaaagtcgaagacgttgcttgagcaattgggcctggcagagcgtctgaaccatcggccggcggcgctgtcagggggcgagcgtcagcgggtggcgattgcacgagcgttagttaacgaacccgcctgtgtgctgatggatgaacccacgggcaatt

SEQ ID NO: 270764 - DNA, 339 bp, Unknown
  Bacterial polypeptide expressing nucleotide sequence isolated from the Sargasso Sea
tttccggaggacaaagacaaagaatatcaatcgcaagagctcttgcaactcaacctagattacttgtttgtgatgaacctacatccgctttagatgtaagtatacaagcgcaaatactaaatttattgaaggatttacaagaacaattaaatctgacaatcttatttataagtcatgatttaccagtggtaagacaaatgtgtgatcgaatagcagtattaaaaaatggaaaactttgtgaaatttcaaaaactgaagaattatttaaaaatccatcacacaattacacaaaagaattattaaaattaatgccgaaaatagaatcaatttataactaag

SEQ ID NO: 270765 - DNA, 787 bp, Unknown
  Bacterial polypeptide expressing nucleotide sequence isolated from the Sargasso Sea
atgaaagatatcccaccggtagttgaagctagtaaagttgatttgattttccaaacagctgatgggccagttcatgcgatatctgatattgatttggagatcaataaaggagattttatctcacttattggaccatctggatgcgggaaaacaactttgctgcggttaattgcagaccttgaaaaaccaactggcggtatgctcagggtaaatggaatctctccagaagaagcccgccttaaccgagactatggctatgttttccagtcaccggctctgtatccttggcgtactgttgatgggaatcttaaattgcctctggaaatcatgggtgttgataaaaatgatcaagaaaaacgtgctagggaagcactggaaatggttgatcttgcaggctttgaaaaaaaattcccctggcaactttccggagggatgcaacaacgcgtttctatagctcgtgcacttacatttcatccagacctccttttgatggatgaaccattcggagctttggacgaaattgttcgtgaccaactaaatgaacactttcacaggctctgggagcagactcaaaagaccgtggtgtttgttacacactccattcccgaagcggcctatctttccacaaaaattgtggtcatgtctcctcgtccaggaaaaataattaaagtcatagaaagcactcttcctgaaaaacgtactcttgatatccgtgaaactaaggaatttttggaactttctcaaagaattagaaaaggcttacgtgctggacacagttatgattaag

SEQ ID NO: 270766 - DNA, 1078 bp, Unknown
  Bacterial polypeptide expressing nucleotide sequence isolated from the Sargasso Sea
caccaccgcagttgatgtcaccacacaggcgcagattcttgtgctcctcgatgagctctgccaacaactcaatatggcactgctgctcattacgcatgatcttggggtggtacgcaaaactgccgaccgggtgtatgtgatgcagggaggcaaggtagtggaatcgggcaatacggatcagatctttcaggcaccctcacaaacatacacccggacgctgattgaggcagaacccaaaacccggcgagcggcgggcgcagcatcgggcaaactgcttcttgaagccgatgagcttggcgtgtggtttgatgtacgcaagggtctgttgcggcgtaccgtggattatgttcgagcagtggatggtgtcagtcttacgctgcgggccgggcgtaccgtgggggtggtcggcgagagtgggtccggcaagacgacactggcgctggcgctgctgcggcttacccaaagccgcggggccatctgctttaaagaccagcgtattgatggcgtgtcccgcaaagcgctacagcccctgcgccgtcaaatgcagatcgtcttccaggatccgttcggcagccttagtccgcgcatgaacgtcggggatattgtggcggaaggccttgaagcccacggtgtcgtcgaaagacccgatcaggattcgaaggttatcgaggctttgcgggaagtcggattggatcctgatacccgactgcgctatccccacgaattctcaggaggacagcgtcaacggatcgcgcttgcccgggcgctgatcctgaaacctgaactgatcgtcctcgacgaacccacatccgcgctcgaccgggccgtacagtcacagatgattgacctgctgcttcgactgcaggagacctacgggctgagctatctttttatcagccatgatcttcgagtggtgcgtgcactcgcggacgagatcattgtgatgcgatcgggtcgggtagtggagcaaggcggtgcggaacagatattctgtgcaccgcaagacgactacacccgctcactgatcaaggcggcgatggattttgaggtctggaaaggcgaagcgctcgagcagtaa

SEQ ID NO: 270767 - DNA, 417 bp, Unknown
  Bacterial polypeptide expressing nucleotide sequence isolated from the Sargasso Sea
tttctcgagttggtggtagtgctcagattaaagctatgaaaaaaatcgcaggtaaattaaggttggatttagctcaatttagagaattagaagcttttgcaaaatttgcttcagatttggatgaatcaactgcagctcaaattacaagaggaagaagaatggttgaaatccttaaacagaatcaatatgtaccaatgacaaccgaaaagcaggttgcaattatttatgctgcgagtcaaggttatttggatgatattgaattagagtctgtaaaggaatttgaaattggtcttttagagcattttgagtcaaaacattctgaatgcttagaagaaataaatagttcaggagatatttcagacgatctaggtaaaaagatgaataaggcaatagaggaatttaagaagagcttctaac

SEQ ID NO: 270768 - DNA, 949 bp, Unknown
  Bacterial polypeptide expressing nucleotide sequence isolated from the Sargasso Sea
atgagttttttagatttaaaaaatgtgacaaaaatttaccctaatggcacaaaagcagtacatgaaacttcattaagtgttgacgaaggagagttcatggtttttgtaggacctagtggatgtggaaaatcaacgttgttaagaatggttgcaggtttagaggatataactgaaggtgatattaatcttgatggacaattaataaatgaagttgatccatctgaaagagatgtagcaatggtatttcagaactatgcattgtatccacatatgaatgtctataacaatctagcttatggtttaaaaaacagaggaattgacaaagaagcaatcgagcaaaaagttaatgatgcagctaaacttttgcaaatttcagattttttacaaagaaaaccatcaatgttatctggtggtcaaagacaaagagttgctatgggtagagcgattgttagaaaccctaaaatattcttatttgatgagcctctttcaaacttagacgcaaaactaagaatccagatgagacttgaaatcaaaaaacttcagcagaaagttggagtaacaagtatatttgttacacacgatcaagttgaggccatgacccttgctgatagattggctgttataaataatggaattattgaacagcttggaacccctattgaaatttataataatccgaaatctttatttgttgctggttttattggttctccacaaatgaattttttagatgctaatttaaataacaaaacgctgtcagctgaaaattttgagattaaaaatattgaaagtgattataatggtgaggttactttaggaataagaccagagcatttaattgagtcagaaaatggtttgataaatttaaaagtagaattggttgaacagctaggttcagataatcttgtttatggacaaataaaaaatataaaagatttttgttatagat

SEQ ID NO: 270769 - DNA, 688 bp, Unknown
  Bacterial polypeptide expressing nucleotide sequence isolated from the Sargasso Sea
atgagtataataaaaaccgaaaatttggtacgtcactttactgttggaactcaaactgttgaagctctaagaggagtttcacttgatatcgatagaggagaatttgtagcaataatgggtccatccggttcaggtaaatctactttaatgaatattattggatgcttggatagccctaccagcggaacataccaccttaacgataaaaatgtaagcacgctcgatgatgacgctctcgcattaattagaaatcatgagattggatttgtatttcaaaatttccatttattggcaaggaatacagctttagacaatgtcatgttgccattaaaatatgcaggaatagacaagtctgagcaggaagaaatcgctatggaggtaataaaatctgttgatcttgaatctagggctcatcaccaaccctcagaattatctggaggtcaacaacaaagagttgctattgcaagagcattagttaataagccatccattctctttgctgatgaacctactggaaatcttgatagcaagacgggtgatgatgttatgaatctctttacaaattttcacaaacaaggccaaaccattattgtaattactcatgaaatagaggttgcaaatcaagctgagagaataatatctataaaagacggtaaaatatttgaggatcaaaaggtattaaaatgaa

SEQ ID NO: 270770 - DNA, 361 bp, Unknown
  Bacterial polypeptide expressing nucleotide sequence isolated from the Sargasso Sea
ctgagcattgagggggtcagtaaaaaatttgaacaattccaggccgttcggcatacgaatctgaagatccggaagggagaaattttctgtctgctgggaccttcaggctgcggaaaaacaactctgctccggatgcttgccggattcgaacaacccagtgaaggaaagatctttctggatggatcggaactcacaggaatccctcctttccgaagacctgtcaacatgatgtttcagtcctatgccatctttccacatatgacagtggagcaaaatgtggcttttggattgaaacaggatcaggttgcaaaagacaaaatccggggaaaagtccaagaagccctggagttggttgaaatgc

SEQ ID NO: 270771 - DNA, 313 bp, Unknown
  Bacterial polypeptide expressing nucleotide sequence isolated from the Sargasso Sea
atcaggaggtcagcgtcaaaggatcgctatagcaagagaattatacaaaaatcctcaattactcatatttgatgaggcaacaagtgcattagattcggatacagaaaattatatcaaggatgaaatttctaatatgaaaggtaaaaaaacaatgcttataattgctcatagactgtcaacaattatggactgcgatagagtttatgtattatcaaatggagctattcttgaaacaggcacagttaacgaactttataaaaacaaagacagcaagttttttagtatgtgccaaaagcaaggcgtcatattatga

SEQ ID NO: 270772 - DNA, 1492 bp, Unknown
  Bacterial polypeptide expressing nucleotide sequence isolated from the Sargasso Sea
ggagggtcaataattttagatggaaccgatatttatgagaatcctgataatattcttaaattaagaggaaaaaaaataggtcttatttttcaagacccgcaaacttctttaaatcctatacttacaataggagatcagttaatagaaacaatccaaactcatttgaaattaactaccgaagaagcaaaaaacaaagctactagcttattaaaagaggtaggaataaaagatgctgaaactagatttaataattatcctcatcaattttcaggaggaatgagacaaagagttgttatttcattagctctttgttgtgagcctgaacttcttatagctgatgagccaacaacagcattagatgtatcaatacaatctcaaatattagatttaatcaaaaggttaaccaaagaaagaaatttagcagttatattaatcactcatgacatgggagtaatttctgaaacaacagacagggtagcagtcatgaaaaatggtgatttagtagaaattggcccaactaaagaaatattaacaaaaccaaaagagatttatacaaaagcacttgtaagctctgttcctcctacaaataaaaaaataaatagatttaaaattattgaaaaggaaaacaaaactgaaggtgaaactaatattaaaattttaaacagatggacaaaaaaagaaattattgatcaggatttagttaaagttaaaaatttaagcaaaacgtttgatgataattttttcaccgaaagttctaaaaattctgtcatggctgtagatgatgtatcatttaatataaaagaaggtgagtcttttggtttggttggagaaagcggaagtggtaaatcaacaatagcaaaaatgattgttaatttatatagcccaagtgctggagatattgattttgataatgtttgtataactaaaattaaaagtaataaagaaatgatgaagtttagaaaacaaattcaaatgatattccaagacccttattcatctttaaatggaagattaaaagttaaagatatagtttcagaacctataaaactccataacccttcaataagctctaaagatttagatagttatatttatgatttattagaatctgttgaattaactcaacaatcagctgaacgttacccacatgaattttcaggaggacaaagacaaagaatatcaatagcaagagctcttgcaactcaacctagacttcttgtttgtgatgaaccaacttcagctttagatgtaagtattcaagcacaaatattaaatttattaaaagatttacaagatcaattaaatctgacaatcttatttattagtcatgatttaccagtggtaagacaaatgtgtgatcgaatagcagtattaaaaaatggaaaactttgtgaaatttcaatgactgaagaattatttaaaaatccatcacatgaatacacaaaagagttgttaaatctaatgccaaaaattgaatcaatttataactaat

SEQ ID NO: 270773 - DNA, 511 bp, Unknown
  Bacterial polypeptide expressing nucleotide sequence isolated from the Sargasso Sea
atgaattcaaaaaagtccgattttgttaaatttgaacaagttgacaaaagttacgatggcaaagagcttgttgttaaaggtctcgacttagacatagctgaaggagagtttctaaccttacttggtccatctggatcgggcaaaacaacaactctcatgatgcttgctggttttgaaactccaacgaatggagagatatattttgatggacgtccgataaacaatatcccgcctcacaaacgtggaataggaatggtctttcaaaattatgctctgtttccgcatttatcagtttatgaaaatttagcttttcctctcaaagtaagaaaagtggataaatcagaaattgaagaaagaattaataaaactttgaaaatggtttcattaacaggttttgaaaacagaatgcctgcacaattatctggtggtcagcaacagagagttgctgttgcccgcgcacttgtgtttgatccaaaacttgtattaatggatgaacctcttggagctcttg

SEQ ID NO: 270774 - DNA, 991 bp, Unknown
  Bacterial polypeptide expressing nucleotide sequence isolated from the Sargasso Sea
ttgcctgatccatctgcagaaaatctcctagaagtccagggattgaagatgcacttcccgatttcggaaggatttttcttcaacaagaatgtttctctggtcaaagcggtggatggcatcaacttcagcatcaaaagaggtgaaaccctggggttggtgggagaatccggctgcggcaagaccaccactggacgctgtattcttcaattggaaaaagccaccgagggcaagattgttttcgagggccaagacctgacccagcttgattcttctgagctctccccgctgaggcagaaaatccaggtcattttccaggatccatacagttctctcaatccaaggttgaagattggggacaccatcagtgagccgatgaaggttcacaacatccaacccgacccgaagttacggaataaaagggttgccgaactcctgaacatctgcggacttccttcggtcatggcagaccgttacccccatgaaatgagcggaggccagaggcagcgtgtcggaatcgcccgggccctctctctgaaccccgaattcatcatctgtgatgaagcagtttcggccctggatgtttctatccaggcgcaggtcatcaatttgttggaagacctgagggaagagttcaacctgacttatttgttcattgcccacgatttgagtgtggttcgccacctctgccagaaagtggcggtgatgtatctgggcaaaattgtggaaatggcggattgtgatgaactttatgacaatccccaacatccctacaccaaagcattactgaatgcggttccggttccggatcctgaagttgaaaaaaacagggaacacaacatcatgacaggggaagtgccaagcccgatcaatccaccttcgggctgtgtctttcatccgcgttgttcccttgcagtggaatcctgtaaatcggatatccctgttttggaagataaacgtgcaggccattttgtcgcctgcacccaggtctgac

SEQ ID NO: 270775 - DNA, 616 bp, Unknown
  Bacterial polypeptide expressing nucleotide sequence isolated from the Sargasso Sea
ggcgactttgtcagtgtgactggcccttcaggctcaggcaaaaccacctttttaaatattgcaggtttgctggaaaccagcaccagcggcgaatacctgctggatggtgaagacatagccaaactcaacgacagcggccgctcccgtatgcgtaatcagaaaataggctttattttccagagctttaaccttattccggatttaaacctgttcgacaacgtcgatgtacctttgcgttaccgtggcctgaacacagctgagcgcagaaaacgcattgaataccatctggatcaggtgggtttagcctcccgcatgaaacacctgccaagccaactgtcaggtggacagcagcaacgtgtggctatagcccgagctttggcaacctcaccacgctttttactggcggatgagccaactggtaaccttgatagccagatggcccaaagtgtgatgagcctgctggaagatatcaataaagccggcaccactattttaatggtgacccacgatccaagtctggccgcccgtgctaagcgtcagatctatatcaaagatggccatgtcagcgaactgactaacaaaaactcaaacctgcatgtggttggcgaggcttaag

SEQ ID NO: 270776 - DNA, 1075 bp, Unknown
  Bacterial polypeptide expressing nucleotide sequence isolated from the Sargasso Sea
atgagtttactgaaaatagaaaatttatcggtaagtattaattctcaaagaattctggacaaaatttcacttgatgttgaaaaaggggaaattactgcaattactggagaatctggatcagggaaatccatgactgcatttgcagttatgcaactcttgccaaatggttcatttcagagcggtgagattttactcagcggcctaaatctgccctctttaacagaaactgagctgtgcgagattcgaggaaatcagataggaatggtttttcaagaaccaatgacggccctaaaccctcttaaaactattggaaatcaagtagctgaaacagttaggttacataggagtgtaacttattttgaagctctagaaattgccaaagctacattaaatcgcgtagaactacctcctgaaaattttcctctatccttatatccataccaactatctggaggtcaaaggcaaagggtcgtcattgcgatggccattgcgtctatgccaaaattgttaatagcggatgaacctactactgcactggatgtcactactcaggctcaaattcttaaattattaaaggatcttgtagatgatcttaatatgggaatgataatgatcacccacgaccttgcagtagtaaataacatggccagcaatatatatatcatgcacaaaggaaaaattgtagaaaaaggactagccgaaaatattttcactgaaatgaagcatccttataccaagatgttattcaatgcttctaatcacaaagtgaacctcccaaagcaaaatactaacaaaccactattagaagtaagaaacttaagtagagattatgttcttccacgtactaaaattttttcgaagccaaaaattgttcgagctgttaataatgttagctttacactaaataaaggcgagcgtttaggtcttgtcggtgaatcagggtgtggaaaatccactttgacaagagctttactaggtctagaagaaattcagagggagaaattagagtttcaggtggtgtggtatcaaaaaataatgaaaccagttttgcctcaaaaaaaaatatgcaggtagt

SEQ ID NO: 270777 - DNA, 1054 bp, Unknown
  Bacterial polypeptide expressing nucleotide sequence isolated from the Sargasso Sea
aatgtctgcattaaaaataaataatcttaatcatcaaattaatcagaatttgattttaaatgatatttctcttgatattgaagaggataaaattacatgtattttgggtccatcaggaagtggcaaaacaactctattaaaacttattgccggtctagaaaaaactcaaaaagggaaaattcatattaaagataagttggtaagttcttcagatactcacttaaaaactgaatcaagaaatattggatttttattccaagactttgcattattccctcacttaaatgtaaaagaaaatttaaaatttgcaataaatggaaagtctgatgctaatatagaaattgatgaaataatgaaacttataaaactacctaatgctttacacaaataccctcatgaattaagtgggggtgaacaacaacgagtagcattagcaagagctataatttcaaaaccacaactacttcttttagatgaacctttttctaatcttgatttaagtttaaaagaagaaataagagatgacactttgcatttattacaaaaatttaatacttctgttattattgttacacacgatccctttgaagcaatgtttatttctaataaaatttatattttagagcaaagaggaagtattgttcaagctggatcgccaaatgatctttataatcatccggtatcttcatatgttgcggaattttttggagaaacaaataaattttcaggaaaggtcaaaaattcaaaaattgaaactgctgttggagaaatacctatagatagctcttatgaatctaaattagtagatattcacattaggcctcaagcaataaagctatcggaagaaaaaactcctgtaaatggtgttaaaggaactgttatggcatctaaactaatgggttcttatagttttattcatctttcagtattggatgaaaataaagaggtgattcatgtacacagccatatgcctgccaattttaatcctaaacaatctactgctgttggaattgaaattgatgaagaaaaggtttttgtatttccaaaaaaataa

SEQ ID NO: 270778 - DNA, 451 bp, Unknown
  Bacterial polypeptide expressing nucleotide sequence isolated from the Sargasso Sea
actgcaatttaataaaatgagaaataaattgtttggttatgcatatcaatttcactatctattggatgatttaactgtttttgaaaattgtaatcttgtttttaaaatatcaaataataaaaatattgaaaaaaactcaaaaaaaatatttcaaattttaaatgagctaggcatagaagatttaaaaaatagttatccctcgatgctttcagggggtgaaaggcagcgcgttgctattgcgagagcaattgttcatgaacccatgtttatattgatggatgaaccaacaggtaatctagatcatgaaaatgcaaatgtaattcaagatttaacaataaaattagctaaaaatcataatataggtattatggtggcaacccatgatttaaattatgctaataaactggataaagtatttcgcatagagaatgagggcttggtaaaaaaataa

SEQ ID NO: 270779 - DNA, 1225 bp, Unknown
  Bacterial polypeptide expressing nucleotide sequence isolated from the Sargasso Sea
aatgttgcaggccgtagattaagaaaaattgctaaatctatccaaactgttatgggtgatgtaactcacatagcctctgaggctgttgagggcaataccgagataaaatctttcaatgccgatagctatgaaaaagatagatttaaggatgctaatctttcaaacaaaaatcaaaatttaaaattagaagcaacatcaaatttagctactccaataattcaggtattggtctctatatcattggcaattgttgcatatttcgctttgggtgatcagttaaatattaatcttgattcagaaacatttgtggctttctttaccgcagctggattaatggcaaaacctgtgagacaactctcaagtataaatgcgattatccaaaaaggtttagctgcttctgaagaaatatttgaacaacttgatcatgatgaagaagatgaccaaggtaatgttgattctaaaattacgggtgaaattatatttaaggatgtttcattttcttatgatcaagaaaaattaattcttaataaaattaatttattcataaataaaaatgatacggttgcattagttggcaaatccggatctggaaaaaccacaattgcaaatcttatttcaaaattatattcccctgactcaggaaatataacaattgattctgtaaatattgaagactataaattaagtcacttaagaaataatatttctatagtaagccaaaatcctactctatttaatgattcaatagaaaaaaatattgcttatggagccaatgatattaatcatgaaaaagttgaagaagcagcaaagctatcaggctgtatagaatttatagaaaaattacctgagggttttgatacagaaattggagatgatggagtcttattgtcaggtggtcaaagacaaagaattgctatagctagagccttttataaagatgcaccaataataatacttgatgaggcaacctcagcacttgattcagaatctgaaaaaattgttcaatctgcaattgatagattaattaaagaaaaaacaaccatagtgatagctcatagactaagtacaattgaaaatgctgataatatatttgttattgataatggatcagttgttgaagcaggtactcatggtgaattgattgaactcaatggtttgtacaagtctctatataaaaatattgattctgagattgtagacaagtcaaataattcagataaatcaa

SEQ ID NO: 270780 - DNA, 745 bp, Unknown
  Bacterial polypeptide expressing nucleotide sequence isolated from the Sargasso Sea
gctgatcaatcagcagcagatattaactgggctgatttttgctatcgagccaggccagtttgtcgctttgcttggtcctaatggagccggtaaaaccagcttattgcgactgttgcaaaaagagtatcagccaagctccggccagattaaattgcaaggccagcccatctccacttttagtcaaaacgaattggcggccaaagtagcgctcgtcagtcagttatccggtcctttatttgatttaacagtgaccgatgtggtgctgatggggctaattcctcataaagctttatggcaaaccaatacagagcaggacctgcaacaactcaagcagagcctggaactggtcggcctggttgataaagaacgtcattcttttgcccatttatccggtggtgaacaacaacgggtgttattggcgcgcgcagtgatgcaaaaacctctgctgttattgctggatgaacccaccaaccatctggatttgtattaccagcatcaggtgctgcgtattgccaaggctctgaatattacggtgatcgccagtattcatgatttaaatctggcgtcacgttactgcgaccgtttattgctgctcaatcaaggccaactggtggccgacggcacagcagagcacgtactaacgcaggagttgcttacggaggtgttccgtattccttgtttaatcgatcaaaacccttttggtgattgtccacgggtcagttttggctacaaggactatatatga

SEQ ID NO: 270781 - DNA, 200 bp, Unknown
  Bacterial polypeptide expressing nucleotide sequence isolated from the Sargasso Sea
attcttatcacaacctatgtttgttgctgaacagttcacaggttttgaaggtaaattcgtatctattaaagacacagttgaagcgtttaaaacaattttaagtggagagctagactcagtccctgagcaggctttttatatgactggtggacttgatgaagtcatgtccaaagctaaagaactagaagaaagcgtttaat

SEQ ID NO: 270782 - DNA, 619 bp, Unknown
  Bacterial polypeptide expressing nucleotide sequence isolated from the Sargasso Sea
gctgttcaaggcgaagcgggcgtttggcgcctttaccctcgactgtgaactggccctggagctgggggggattctcggtctgtttggcccctccggctgcggcaagagcagcctgctgcgcatcatcgccgggctggacagggcgccgggcgacaagctgaactggcagggtagggcgctgagcgcgctgctgcccgaggcgcgccgcatcgggctggtgtttcaggattcgcgtctcttcccccatttgagcgtgctcggcaacctgcagctggcggctcgcaaggggcgagggcgctggcaacccgaagtgctggcgacccggctcggctttgccgaactgctgccccaaccggcccacggcctctccggcggccagcgccagcgggtggcgctggcccgggccctgttggccgagcccgatctgctgctgctggatgaacctttttctgcgctggacaggcgcagccgcatccaccaggcccacgtgctcaagggcttgcagcaagagagcggcatccccatgatcttcgtcagccacgccatggaggaggtgagcctgctatgcgatcagctggtgctgctggcggatggccgggtggaggcgcaaggccggccg

SEQ ID NO: 270783 - DNA, 1771 bp, Unknown
  Bacterial polypeptide expressing nucleotide sequence isolated from the Sargasso Sea
atgaataaatcactaccagaattagttagacaactttggaaacatttagataaaaataaaagaataaagttttttttccttgtaattataatgatctttgcatcattcgctgaagttatcagtattggagctgtaattccatttcttggagcaatgactactcctgaagcaataatggagatttcatatcttcagcctgtgattgcatatttgaatatcacagattcaaaagatcttttattattttttactgttatttttgttgctgctgctttattttcaggtggcatgaggttatttttgttgtggtttcaaactagacttggccactctgttggtgcttcaataggcattgaaatatatagaagaacattatttcagccatattcacttcatgtgacaagaaatagtagcgaagttatttctggcattactcaaaaagcaagtgtagttgttgagttaatattaataccagcatttacactaattggatctacattgatacttttaagtattttaaccgcactaatactaattgacccttttattgctatattttcatttattggttttggatcaatatattttttaattattaaactaactcaaacaggactattaaaagatggagacagaataaattatgaaagagtaaaaataataaagtcactacaagagggtttgggtggaattcgagatgtattattgagtggttcacaaatgatgtatgttgaaaactataaaaaatcagaaattcctatgcgaagagcatatgcaagaataaatatattaaccatgagtccaaggtttataattgaatcattgggaatgatattaatagcatttatggcctactcattatcaaatagacccgagggtatatcttcagctattcctatcttgggagcatttgctcttggagcacaaagattgttgccaattcttcagcaagcatatggtggttggcaaactataagaggaggacaagctcaatttagcgacgcaataaatctcttgaatcaacctatccctgatcacctaaatgatactgaaacgtcagataacaaaatagaatttaatgaatatattgagtttaaaaatatttcatttagttatacctcaaaatcaccgcaagttttaaaaaacatttctttaaaaattacaaaaggtcaaaaaattggctttattggtgaaactggaagtggcaagagcactttattggatattatcatgggccttctaaatccatctgatggtgattttattgtagatggtcaagtaatttcttcagagcattatagattctggcaaaagaatattgcacatgttcctcaaacaatttttttatcagatagctctattaaagaaaatatagcatttggtgtatcaaaaaataaaattgatgatgagcttgttaaagactcagcaagaaaagcacaaatatctaaaactatagaatcttggcagaaaaaatatgatactagcgttggagaaagaggaattaagctctctggaggacaaaggcagagaataggtattgcaagagctttatataataaagctaatattcttatattcgatgaagcgactagcgctcttgacaacaagactgaaaaattagtaatgaatgagctcgaatgcttagatgagaatctaacaataattatggtggcacataggctaacgactcttaaagaatgcgatttaattattgagctaaaggatggtgaaataaagtcacaagggacttattctgaaattgtaaaataat

SEQ ID NO: 270784 - DNA, 763 bp, Unknown
  Bacterial polypeptide expressing nucleotide sequence isolated from the Sargasso Sea
aatgaagatattgaaaaaaaaataaataaagccctatccatggtttctttaacaacttttgaaaatcgaatgccgaaccagttgtctggcggtcaacaacaaagagttgctgttgcaagagcattagtatttgaacctaagttggttctaatggatgaacccttaggtgctttagataaaaatttaagagagagtatgcaatatgagttaaaacatattcatgaaagtctaggtgttactgtcgtatatgtaactcatgatcaaggtgaggcgttaacaatgtctaatagaatagcagtttttaatgatggctatatccaacaattatcaagccctgatgagttgtacgaaagacctaataattcttttgttgcaaaatttattggagaaaataatacaattaatggtgaaattgttgaaagtagtcaaaatgaatgtaaggtaaaaacaaaaactggagaacttatttctgcaaaccctattaccgttaaagaagttggtcaaaaaacaagtttgtcacttaggcctgaaagagtaattattaatcctgaaggaaatgtcaaaaattctttcgattcctcaattgaagaaattatttaccatggagatcatacaagattacgtgttaatgtattaaatcagaatgatttcattttaaaagtaccaaatgctaacaattcaatttccttaacaaatggaaataagatcaaaattggctggaattctgaggattgtagagccttagacttaattgataactaga

SEQ ID NO: 270785 - DNA, 1249 bp, Unknown
  Bacterial polypeptide expressing nucleotide sequence isolated from the Sargasso Sea
tccattttaagtcatgaagatgtttcaaaaaaagatgcagaaaaaaaagcaaaagagttgatggagcttgttgagattcctgacctagaaagaagatataaatcctatcctcatgaactctctggagggcagcgtcaaagaataatgattgcaatgtcacttataaatgaacctgagcttttaattgctgatgagccaacaacagccttagatgtaactattcaagcccaaattcttgatttaatgaataggcttaaagagaagcttggaatgtcaattttatttataactcatgatttaggattagttgagaagtttagtgacagggtttgcgttatgaaagagggaaaaattgttgaacaaggcgtaacaacggaaattttctctaatccaaaacatgaatataccatcaagctattaaaatcagagcccaaagaaaaagatcatttacttgtttcagaggataatattttagatatttcaaacctaagtgttttttacaaaataccatcaaaaaagctatttaaaactgatagattttgtgcggtttctgatatttctttaaaaattccaagaaattcaacagttggtgtggttggagagtcaggttctggtaaatcaacactaggaaaagcgattataaatcttcttgattttgaaggatcaattaaatttaatggtaaatcaattaaagatctcagctcagctaaaaagagactattaaagaaagacattcaaatagtttttcaagatccatatggatccctatcaccaagaatgacagttggtgaaatcattggagagggcttggatattcattttgatttttccaatgaagaaaagttagaaaaaatatcaaatgtaatgaaagacgttggattagatgatagcctcatttttaaatatccacatgaattttccggtggtcaaaggcaaagaatagcaattgctaggtctataattttaaatccagaatttatgattcttgatgagccaacttcagcgcttgatagatctattcagattcaagtgatagatgttttgaaaaggttacaagacaaatataaattgacatatttatttattagccatgatcttaaagtaattagatctatgtgtgatcagatttttgttatgagtgaggggaagttggtagagtttggtaaagctgatgaggtatttgaaaatcctcaacaggagtatactcaaaaacttttaagagcagcactcaaatactcgtcaaattaag

SEQ ID NO: 270786 - DNA, 491 bp, Unknown
  Bacterial polypeptide expressing nucleotide sequence isolated from the Sargasso Sea
aatgagtaaaataatagagcttaaaaacgttaataaatggtttgacaaatttcaagcattaaaagatgtaaaccttgaggtgaaccaacaagaaaaaattgttatctgtggtccttcaggatcaggtaaatctactttaatcagatgtattaatagactagaggaacatcaagacggtcaaataatagtagatggaaaagaaatatctgaaaacacaaaagatattgaaaaaatacgtgcagaggttggaatggtgtttcaacaatttaatctatttccacatttatcaattttagataattgcacacttgctccaatatgggttaaaaaattaccaaaaaagcaagcagaggaaattgcaatggaaaatttaaagagagttcaaatagcagatcaagctagaaaatttccaggtcaattatcaggcggtcaacaacaaagaggtgccttggctcgagcattatgcatgaaacctaaaataatgttatttg

SEQ ID NO: 270787 - DNA, 1774 bp, Unknown
  Bacterial polypeptide expressing nucleotide sequence isolated from the Sargasso Sea
ttggaaaaaatcagaggtaggaaaatcgcaatgataccacaaaatgctggacaggcattaacaccaaatttaaaaataggttatcaaattgatgaggcattacagttgcattctgatttaaaggaggaggaaagagagaaaaaaatttctgaattgttaaataaagtgagacttccttccccagaaacaattgctcttcgatatcctcatgaactttcaggtggacaacaacaaagagttgctgttgcaatggcattagctggaactcctgaccttttactgttggacgaacctaccactggcctagacgtaacaacacaagctcacgttttagaactgcttaatttcattgccaaagacactggaacatcaatggtttatgtgagccatgacctaggagcaatagctcaagtaagtgaccgtattattgtaatgtactctggtgaaatagttttagagggcccctctagagatattcttaaaaaaccaattcatccatatacatatggtttgcttaaatctataccaaaattatcactagcagggcttccacaatcaatgcctggtagccaacctcaacctggaacaatgcatagaggctgcagtttctttgataggtgcgatttttcagaagaaaaatgtaaaaataactctcctcaacttgagtacttagaagaattaaacacaagtgttagatgttttaattataagagtttaatgaatgacagtcaggttaatcaaactgttaataaaattaagacgagtttacaagataaagaaatattaaacctttcagaagtttcaataagttacgctaagcaaaaacttttagatcaagtgttaaatagaatttctgacgataatccaactgtaaaagatattaatattaatattaagaagggtgaaaccatagctcttgttggagagtcaggtagtggaaagtcaacaattctcaaatctattgctgggttactcagaactaaaggtggaataataaaatttgatcaaaatagaaatttatcctctgacatcaaagagagagatcctaatgatttaagaattattcaattaatttttcaaaatccagatgagtctttaaacccaaaccatactgttgaagaaataatagcgcaaccattaaaattatattttggtttaaagggtgaagaattaaaaaaaaatattatagatctattacaaaaagtaagacttggagaattttatatgtctaggtatcctagacaattatctggaggtgaaaaacagagagttgcagttgcaagagcttttgcagctaaaccagatataatattatgtgatgaagtaacatctgcgttggatgtgtcagttcaggcagctgtattaaatttattacaacaacttaaagaagattttggaactacatatatatttgtttcacatgatttagctgttgtaagagctataagtgatagagttgctgttctttatcaaggaagattgtgtgaagtgggaccatcaaaagatgtttatcaatttccatcacacccttatacagaggttttattaggagccgtgttagaaccagatccagatatcaaaccaaaattagttgctgaggatattgtagaggaaaagccacctcaaaaggggtgtagttttcaggggagatgttcaagaatattaggtgatatttgtaaaaatgaagtaccaccttggcaaataactaatagcggaaactctatcagatgccacataccactaaaagaattacaaaaagaccagattaattaaa

SEQ ID NO: 270788 - DNA, 667 bp, Unknown
  Bacterial polypeptide expressing nucleotide sequence isolated from the Sargasso Sea
tatgctgctcgatattgaaaatctgaccaaaacctttcctggagtcaataacacctcccccgtggaagtgctcaaaggtcttgaactcaaagtggaagagggagaaaccaccgccatcattggacaatccggaagcgggaaatcgacccttttgtcattgctggcaggattggaccaaccgacttccggaacccttaaattgaaagaacgccatctggattcgatgaccgaggaagaattgactcaattccgggcggaaaacatcggtatcatctttcagcagtttcatttgatgactcacctcaatgctatggaaaacgtgagtcttcccctggaaatgaatcaccaacaggatgctcttgaacttgccgggaaagcactggagcaggtgggccttggatcgcgtatggatcattttccccaccaactcagtggaggggagagccagcgagtggctattgcccgggcgatcgtcattcgcccagcgcttcttctagcggatgagccgtcggggaacctggatcatgatactggagaacaggtggcagatctcttattcgatctggttggaaggacaggaatgacgatggttttggtaacccacaattccgagcttgctttacgatgttccaaacagttgacactcagccaggggcttcttcagtga

SEQ ID NO: 270789 - DNA, 1831 bp, Unknown
  Bacterial polypeptide expressing nucleotide sequence isolated from the Sargasso Sea
atgtttaaacgatttgaatcttgggtggaagccctaccggatggcgaaccaaccaagcctcccacgggggtgtatgcgttttgccgtcactacactaagggttatgaattaccgctgatattaatgtcagtgctgacggccttcatcgctatgctcgaagtttcactctttggctttatgggacaattagtcgattggttagtgaaaaaaagcccagagacgctctatcaggatgaaggttcaacgctgatattaatgggtgtaatggtcctagtggtgatgccattattagtgctatttcatgcactaatcatgcatcaaaccttgctgggtaattatcccatgtcgatccgctggcttgcgcaccgctatctgctcaaacaaagcgtctccttctatcagaatgactttgctggccgtattgccactaaggtgatgcaaacctcccttgcggtgcgtgaaaccgtgatgaaactcctcgatgtactggtatacattttagtgtacttcacctccatgctggtgatggtggccagtgccgatgtgcgcctagtggtcccgatgctgatttggctagcgctctatattggtctgcaatggtactttgtgccgcggcttaaaatggtctcaaccgaacaggccgatgcccgctcgacgatgactggccgaattgttgatagttacaccaatatcaccacggtaaaactgtttgcccatacggataaagaagctgattacgctaaagcgagtatgcgcagtttcctcgacacggtttatcgccagatgcgcctcgtcacagggatcagcgtcagtgtacaaatcattaactacttactcgcgttcagcattgccgccgtatcaatcacgctctggagtgacaatgctatctcggtgggtgcaattgcaattgcagtgagtttagcactgcgcctcaatgggatgtcgcagtggatcatgtgggaaatcagttcattatttgaaaatattggtacagtcaccgatgggatgaacaccctttccaagacaacactcattcaagactcgccagatgcaaacaccttagtagtggaacaaggtcggatcgattttaatcaggtgagctttcattatggtgaaaatactggcgtaatcgacgaactcaacctcacgatcaaagcgggcgaaaaagtcggtctagttggccgctcgggcgcgggtaagtctaccttagtcaatctgttaatgcgcttttacgatgttgagaaaggccaaatttgtatcgatggacaagacattaagtccgtcaaacaggattcgctacgttcacagattggtatggtcacccaagacacttccctactgcaccgcacgattcgtgaaaatattctgtacggcaatccaggggcgagcgaaacccaactcgaacatgcgattaaacaagctcaggcccatgattttattaatgaactaaccgaccctaatggcaatcatggtttagatgcacaagtcggtgaacgcggcgtgaaactctctggcggacaaagacaacgtatcgcgattgctagggtgctattaaaaaatgcccctattttactgctcgatgaggccacttctgccttggactctgaagttgaagctgcgattcaagaaagcttgtacgaattgatgcagggcaaaaccgtaattgcaatcgcccatcgattatcgactattgccgcaatggatagattaatcgtgcttgatcaaggtcggattgttgaacaaggaacccatcaagagctgattgctgctggcggtatctatgcccagttatgggctcaccaaactggcggatttttaggggttgaatagt

SEQ ID NO: 270790 - DNA, 490 bp, Unknown
  Bacterial polypeptide expressing nucleotide sequence isolated from the Sargasso Sea
ttggaatggtttttcaacagttcaatttatttccctcacttatcaattcttgacaattgtacgttagcccctatctgggtaaaaaaaatgccaaaaaaagatgcagaagctctagcaatgaaaaatcttgaaagagttcaaattgctgatcaagcgaaaaagtttcctggacaattatcaggtggacaacaacaaagatccgctcttgcaagagcactgtgtatggaaccaaaaatcatgttgttcgatgaacccacatcagcgttagatccagaaatgatcaaagaagttttagatgctatggtagatctagctaaagcaggaatgacgatgatagttgtaacacatgaaatgggttttgctaaagaagtagctgataatatgatttttatggatcaaggtcaaattgtcgaaaaagcaaaaacaaaagatttttttgaaaatcctaaatctgacagaacaaaattatttttgagtcaaattctataac

SEQ ID NO: 270791 - DNA, 766 bp, Unknown
  Bacterial polypeptide expressing nucleotide sequence isolated from the Sargasso Sea
ttgagtaaagtaatctcttttcaagatgtaagcctaagctttggaggtgtacaggcattaaaaaatgtttcttttgatattgaggaaaactcattatttgcaattattggaccaaatggtgctggtaagacatcattattaaattgtataaacggaatatataagccaacagatggtttgataaatattttcgaacaaaacagcaatgatttacatcctgatgaaattgcaaatctaggtatctctagaacgtttcaaaatattgaattatttgaaaacatgaccgctcttgataatattttgatcggagcacatagacatgtcgaatatggtccagtaagtgggatgttgttttcaaaaaaagttagaagtgaagaagaaaaagctagaaagattgcagaagatgttatagattttttagaaatagaggaatacagatattctttcatactttctttaccttatggaatacaaaaaagaattgagctcgcaagagctttggcaatgcaaccaaaagtattacttttagatgaaccagctgcaggaatgaataatgaagagacggaggatattgcaagatttatacttgatattcatgaagaattagggattacagtaattcttatcgatcatgatatgaacatggtaatggacattgcaactgaagttgttgttatggattttggtgaaaaattatttcaaggaaatccgcaggatgcagcaagagatcaaaaagttatagacgcatatttaggagttggttaga

SEQ ID NO: 270792 - DNA, 1594 bp, Unknown
  Bacterial polypeptide expressing nucleotide sequence isolated from the Sargasso Sea
ttgatctctaccgcaaatatcaccatgcaattcggcccagagccattatttgaaaatatctcggcaaaatttggcaacggtaaccgttatggtttgattggcgcaaacggctgcggcaaatcgacttttatgaagatcttaagcggcgccctcgccccaacctcgggcaacgtgtcgatcacgccgggcttaaaggtcggcaccctaagccaagatcaattcgccttcgagcaatacacagttatcgatgcggtgatcatgggcgatacccagctgtggaaaatcaagcaagagcgtgatgctatttatgccaaacccgatatgaccgaagaagacggcatgcgtgtgggcgatctcgagagtgaatttgccgagatggacggttacagcgccgagagccgcgcgggcgaaattttgattgaagccggcatcgaagaatccttccactatggccctatgtcacaggttgcacccggttggaaactgcgcgtactgttagcccaagccctgtttgctaaccccgatattctgctgctcgacgagcccaccaacaacttggatattcacaccatcagttggctcgaaactgagttgaataagcgcaagtgcaccatgatcattatttcccacgacagacacttcttaaatgctgtctgtactcatatggcggatatcgattacggtgagctgcggatttaccctggcaactacgaatacttcctcgagcaatcggccttgcagcgcgaacaattgctgtcgagcaacgccaaaaagagcgccgagattgaagagttgcaagacttcgtaaaccgcttcggcgctaacgcctctaaggcaaaactcgccagttcacgcgccaagcgcatggacaaaattaaactggatgaagtcaaatcctccagccgtattgcgccatcgattcgcttcgcgccgggtaagaagatgcaccgccaagcattggtgcttgagaacctcgcccacggttttgacggcgaattgctattcgaaggcggcgatttaatcctcgaagccggcgcaaagcttgcgattattggtgagaacggtgtcggcaaaacgaccttattacgctgtttagtcaatgagttaatccataatcagggcgtgattaagtggtcagaaaacgcttccattggttactgcccacaggacagcaccagcgattttgataatgatttgactattattgaatggatggatcaatggcgtcagccaaaacacaacgacttgatggtacgcgccatgttaggtcgtttgctgttcaccgaagatgatgccaacaaaaaagccaaaaactgctcaggcggtgagaaaaaccgtttaattttcggcaagttaatgatgcaagatatcaacgtcatcattatggacgaaccgactaaccatatggatatggaagcgattgaatccttaaataatgccctcaaagattttgaaggcacattgattttcgtcagtcacgaccgtgaatttgtgtcctcgttagcgacccgcattatcgatattcgcgatagaaaattagtcaacttccaagggacctttgatgagtatctggcaaaccttgccagtgcctaat

SEQ ID NO: 270793 - DNA, 910 bp, Unknown
  Bacterial polypeptide expressing nucleotide sequence isolated from the Sargasso Sea
tatgatcctcattcaatgccaaggactttccaaacactatggcagtaaaaaagcgctcaataacgttaacttaaccctcgaatcgggagcgcccatcgccttagttggccctaacggtgcaggtaaaactacactgtttagcctgctctgtggttacctcaccccaagcgcaggctcagttcgtattctgggagaagcgcccaatagtccagcattattagggcaaattgccgccctgccacaggatgcgacgctcgatcccaatttaaccattattagccagttaagcttctttgcgcgtcttcaagggatggatagcaagcaggcaaatcaagaagccctgcgggtgctgaatttagtagacttagccgaggtggcgcagcaaaagccaccgagcctaagccatggaatgagtaaacgtgtggcgattgcccaagccctaatcggctcgcctaagctggtactgttagatgaacccacagcaggactcgatcctgccaatgcgaagaaaatccgtgaacttgtcagaagcctttcacccaccacgacctttgtgattagctcacataatttggacgagctcgaaaagctctgtgaccaagtgctgtatctagataaaggtgagctgggccaatccatttcgatgcgctcatccaatagcggcagtgattatctcaccctcaccatggaacactgcgacagtgaaacgcttatccaaacagtaggtcaaatacccggtgtagtgaatatcacctcaaaacaagcccatgtatttgttatccaattggatgacacggcaaatcgccattacgaatttgaaaccgccctgctcaccctatttaagcagcagcattggcaatataagatgctgctgaaagggcgcacattggaagagacgttattttcttaa

SEQ ID NO: 270794 - DNA, 1669 bp, Unknown
  Bacterial polypeptide expressing nucleotide sequence isolated from the Sargasso Sea
aatggctcagtttgtttacagcatgttgcgggtgggcaaggttgttccgcctaagaagcagatccttaaagacatttccttaagctttttccccggcgccaagatcggtgtgttaggtcttaacggttcaggtaaatccaccctactgcgcattatggccggtatcgataccgagattgagggtgaagcacgcccaatgccaggtctgaagattggttacctgccacaggaacccaaactcgacccaacgcaaaccgtgcgtgaagcgattgaagaagcggtttctgaagccaaaaatgccctcaaacgcttagacgaagtctatgccgcttatgcagaacccgatgcggacttcgacgcgcttgccaaagagcaaggcgaacttgaagcgattattcaggcgcaggacgcccacaatctagacaacatcctcgagcgcgcggcgaatgcgctacgtctgcctgattgggatgaaaagattgaagtcttatcgggtggtgagcgccgccgcgtggcgatttgtcgtctgctgctggaaaaaccagaaatgctgctactcgacgaaccaaccaaccacttggacgccgaatccgtagcgtggctcgagcacttcctgcaggaatacacgggcaccgttgtggcgattacccacgaccgttacttcctcgacaatgctgctggctggattttagaacttgaccgtggtgagggtatcccatgggaaggcaactactcttcatggctagaacaaaaagatgcccgtttgaagcaggaatctgccgcagaaagcgcacgtcaaaagacgattgcgaaagaattagaatgggttcgccaaggcgcgaaaggccgtcagtctaagggcaaggcccgtatggcgcgcttcgaagagctgaacaccactgattaccaaaaacgtaacgaaaccaacgagctgtttattccgcccggaccacgtttaggtgacaaagtgattgaggttaaaaacttaaccaagtcctacggtgaccgcgtgctgatcgataacctgtcgttctcgattcctaagggcgcgatcgtcggtattatcggtgccaacggtgcaggtaaatcgaccctgttccgcatgctgtcaggcagcgagcagccagatagcggcaccattgagataggtgaaacagtacaactggcgtcggttgaacagttccgcgattcgatgaatgacaaaaacaccatttggcaagaaatctctggtggtcaagacatcatgcgcatcaacaacatggaaattccaagccgcgcctatgtgggccgcttcaacttccgtggtgcagatcagcaaaagattatcggcactctgtcgggcggtgagcgcaaccgtgttcacttagctaaactgttgcaggctggcggtaacgtactgctcctcgacgaaccgaccaacgacttagacgttgaaaccctgcgcgcactggaagaagcgattctcgaattcccaggttgcgctatggtgatctcgcacgaccgttggttcttagaccgtatcgcgacccatattctggattatcgcgacgaaggccaagttaacttctacgaaggtaactacaccgaatactcagcgtggttgaagaacacctatggcgccgatgtggttgaaccacaccgcctgaaatacaagcgtatgacgaaatag

SEQ ID NO: 270795 - DNA, 913 bp, Unknown
  Bacterial polypeptide expressing nucleotide sequence isolated from the Sargasso Sea
acctacaaataaaaaaatagatagatttataattattgaaaaagaaaataaaaaacaaagtgaaacaaatattaaaatattaaatagatggacaaaaaaggaaattattaatcaagatttagttcaggttaaaaatttaagcaaaacatttgatgatagtttttttacagaaagttccaaaaattctgtaatggctgtagatgatgtgtcatttaatattaaagaaggccaatcatttggactagtaggagagagcggcagtggaaaatcaacaattgctaaaatgattgttaatttgtttaggccaagcgaaggagacatatattttgacaatgtttgtataacaaaaattaaaagtaacaaagaaatgatgaaatttaggaaacaaattcaaatgatattccaagacccatactcttcattaaatggaagattaaaagttaaagatatagttgctgaacctataaaacttcacaatccattaataagttcaaaagatatggatagttatatttatgatttattagaatctgttgaattaactcaacaatcagctgaacgatatcctcacgaattttctggaggtcaaagacaaagaatatcaatcgcaagagcgctcgcaactcaacctaggcttcttgtttgtgatgaaccaacgtcagctctcgacgtgagcattcaagcacaaatattaaatttattaaaggatttacaagaacaattaaatctgacaatcttattcatcagtcatgatttacctgtggtaagacaaatgtgtgatcgaatagcagtattaaaaaatggaaaactttgtgaagtttcaatgactgaagaattatttaaaaatccaaatcacgaatatacaaaagagttattaactctaatgccaaaaattgagtcaatttataattag

SEQ ID NO: 270796 - DNA, 772 bp, Unknown
  Bacterial polypeptide expressing nucleotide sequence isolated from the Sargasso Sea
atgagtagtccaattttagaaattaaaaatgttacccttacctttggtggtgtaaatgcgattacagacatcagttttaatgttatggaaggtgaaatctgtgcagtaattgggcctaatggagctggtaaaagctcaatgttaaatgtgattaacggtatttatttaccgcaagagggaagcgtcacatataatggaaacgtcattactaaaataaaacctcgagatgcagcgatttctggcatggctaggacttttcaaaatattgctctttttcagggtatgactgtattagataatattatgaccggcagaaatttatttatgaaatcaacttggcttgaacaaggattaaatattggtagggcaaaaaaagaagaagttgaaaataggattgaagttgagaaagttattaaatttcttcagatagaagcgataagaaaaactccagttgcaaaattaccttatggattgcaaaaaagagttgaactagctagagccttagttgcggaaccaaaagttttacttttggatgaaccgatggctggcatgaacttagaagagaaacaagatatgtcttgttttatcctagaaataaataaagaatttggagttactactgtaattattgaacatgacgttggagttgtgatggacatttcagatcatgtggttgttttggattatggtaaaaaaataggcgatggaactccagaagaggtaatgaataatcaagatgttattgatgcatatttaggagtaagtcattaat

SEQ ID NO: 270797 - DNA, 1132 bp, Unknown
  Bacterial polypeptide expressing nucleotide sequence isolated from the Sargasso Sea
tgtttcaatacaatctcaaattttagatttaattaaaagattaaccaaagaaagaaatttagcagttatattaattactcatgacatgggtgttatttctgaaaccacaaacagagtggcagtcatgaaaaatggagatttagttgaaattggatcaactaaagaaatactaactaaaccaaaagagatttacacaagagcacttataagttccgttcctccaacgaacaaaaaaataaatagatttaaaattattgaaaaagaaaacaaaaatgaaggtgaaactaatattaaaattttaaaaagatggacaaaaaaagaaattatcgaacaggatttagttaaagttaaaaatttaagtaaaacatttgatgataatttttttactgaaagttctaaaaactctgtcatggcagttgaagatgtatcatttgctattaaagaaggagagtcatttggtctagttggagagagtggtagtggcaaatcaacaattgcaaaaatgatagtaaatttatacagccctagtgctggagatattgattttgataatgtttgcataacaaaaattaaaagtaataaagaaatgatgaagtttagaaaacaaattcaaatgatatttcaagatccttattcatctttaaatggaagattgaaagtcaaagatatagtttcagaacctataaaacttcacaatccatcaattagttcaaaagatatagatagttatatttatgatttattagagtcagttgaattaactcaacaatcagctgaacgatatcctcatgaattttcaggaggtcaaagacaaagaatatcaatagcaagagctcttgctactcaacctagacttctcgtttgtgatgaaccaacttcagctttagatgtaagtattcaagcgcaaatattaaatttattgaaagatttacaagagcaattaaatttgacaatattatttattagtcacgatttacctgttgtaagacaaatgtgtgatcgaatagctgttttaaaaaatggaaaactttgtgaaatatcaaaaactgaagagttatttaaaaacccatcacacgattatacaaaagaattacttacgttaatgccaaaaatagaatcaatttacagttaa

SEQ ID NO: 270798 - DNA, 685 bp, Unknown
  Bacterial polypeptide expressing nucleotide sequence isolated from the Sargasso Sea
atgagcttgataaaagtaaaaaatcttaaaaagcagtttcaaattggaagcgaaacagttaatgcaattaaagatataagttttgatgtaaatgcaggtgagtttatttcaattatgggtccttccggatctggaaaaacaactttaatgaatattataggatgtcttgatacaccaacttcaggagagtatcacctagacgataatgaggttagtcttcttgatgataatgaattagcggcaataagaaataagaagattggttttgtatttcaatcttttcatcttttatctaggaatactgcgcttaacaatgtaatgctgcctctcacatacgcaggatttgataaaaacgaagcgttaaaaaaggctaaaagcgttttggataaagtgggtcttgaggatagagtaagtcataagccaaatgagttgtctggcggccaacagcaaagagttgctattgcaagggcgcttgttaatgatccaagtattgtatttgcagatgagccgacaggtaatcttgacaccaaaacaggtgaggagattatgagcctttttaaagagctgcataggaatggacaaacaataatagttataacccatgaaaatgatattgctgatcaaactgataggataataacagtaaaagatggattgattgaatctgatgagaggagagtttaat

SEQ ID NO: 270799 - DNA, 1051 bp, Unknown
  Bacterial polypeptide expressing nucleotide sequence isolated from the Sargasso Sea
aatgttggcagtaagtataaaaaacctcagtcacaaaattaataataaatcaattttaaatgatgttaattttgaattaaaaaaagattctattgcctgcattcttggcccttcagggtgtggaaaaacaactttattaaaactcattgcaggtttatctcatgtccaagatggagaaatttttttaaatgacaatctagtaagttcaaatgattttcatttaaaaacagaaaaaagaaaaataggttttttatttcaagactatgctttgtttccacaccaaacagtaaaagaaaacttgcaatttgctatcaaaaataaatctacctcacatacaattcaggaaatactagatgtaattaaactatcggattctttaaataaatatccacacgaattaagtggtggtgaacaacaaagagtagctttggcacgttcaattatttcaaaaccagatattttgttacttgatgaaccattttcaagtctagatttaaatttaagagaagaggttagggatgatactttacatctacttcaaaagtctaatatttcagttttaattgttactcatgatccttttgaagctatgtttatttctaataaaatttatattatgaataaagaaggcaagatagtacaatctggatctccaaaagaattatataatcttccaaactcatcatatgttgcaaatttttttggagaaacaaataaatttagtggaatagtaaaaaacaaaaccgttgaaacacctgttggagagtttaaagttgatgacagcctagagtctaaaaatgtagatgtatacattaggcctgaagcagtaaaattaaatcaagcacaaactcctgttaatggaattaaaggaacggtaatggcttcaaaattaatgggcggatatagttttgttcatttatcagtattaaataatgataatgaaattgttcatgttcatagtcacatgccaccaaattttttaccaaatcaatccagtgcagtaggcatagagatagataaagagcaggcttttatttttcctgctaattaa

SEQ ID NO: 270800 - DNA, 793 bp, Unknown
  Bacterial polypeptide expressing nucleotide sequence isolated from the Sargasso Sea
atggaaaatcaaaattcaaatgaaattatagttaaattttcagatgttacaaaacaatatggagatttagtagttttagataaattaaatctagaaattaaaaaaaatgaaatggtatcaattatcgggccatcaggttctggaaaaacaacagttcttagagttttaatgactttagaaaaaattaatggaggagttattcatttggatggtgagacacttacacatatgaattctaaaggaaaattaattgaagctaatgaaaaatatttaagagaaagacgttcaaaaattggaatggtattccaacaatttaatttatttccacacatgacagctcttcaaaattgtattgaagctccaatagaagttcttggaatgaaaaaagaacaagcagaagaaagagcgcttgagttattagagttggtaggtttgacagataaaaaagatcaacatccgagcagattatcaggtgggcaacaacagcgtgttgctatagctagagcattagctatgagaccaaaagtgatgcttttagatgaaattacatctgccctagatccagaggtggtaggtgaagttttaaatgtcattagatcattaaataaagaacataatctcacaatggttatggttactcaccaaatgggatttgccagagaaatatccgatagggtatgtttttttaatgagggaaaaatattcgagcagggacccccagaaaaattatttggagacccaaaaaatgagagaactaaacagtttctgcatgcagtactcgatgcaaactaag

SEQ ID NO: 270801 - DNA, 697 bp, Unknown
  Bacterial polypeptide expressing nucleotide sequence isolated from the Sargasso Sea
gatgaaattaaaaatggaagattagaagaaataattaacatgactaacttgcaaccatatagaaaaaagtatccacaagatatttctggaggccaacaacaaagagtatctattgcaagagccttagccccaaaaccagaagtcatattattggatgaaccttttacaagtttggatgcacaaatggccagggacttaagagaagaggttgtttctttattgagagcaacaaaaactaccggaattatcgttacacatgatcaagaagaagcactatcagtttgtgatattgtaagtgtccttgaaaacggaaaagtcatacaaagtgcaactccgcaagagatttacttaaatcctatcagccaaacagtagcaaactccgtgggtgatccaaatatcataaaaggaacatctacaaatggaagagtaaaaacttcgcttggtacattcaattcagcatatgatggagacttagatgtatcaattagaccagaatgtatagaagttaatttagactctaatggggattacattgtaaaagaatgtatattctatggacatgatcaagtaatctcatttgaaaacaaaaatggtgaagtttttagagcaagatccttaccttcaatgatttttgagccaggggatcaagtatgtatcgatgtaactgaagttactacttttccctcaaagcgctgaa

SEQ ID NO: 270802 - DNA, 763 bp, Unknown
  Bacterial polypeptide expressing nucleotide sequence isolated from the Sargasso Sea
tatgacacctctgcttgagctcaatgctgtcaacaaacaattcggccaaaaccgggtactggacgaggtcagcctcacggtgaacgccggggaagtgatcgtcattctggggccgagcggctgcggcaagagcaccttgctgcgcaccctcaacgggctcgaatcgattcaggggggagacattcgcttcgatggagagcggctggatgccaacaccgactggcagcggctgcgccagcgcatcggcatggtgttccagagctatcacctcttccccaacctgacggtgctggagaacgtgctgctcggccctctgcaggtgcaaaaacgggagcggcaggaggccctgctgcaggcggaacagctgctgacccgcatcggcctgtgggagcggcgccacgactatccgcgccagctctccggcggccagcagcagcgcatcgccatcgtgcgggccctgtgcatgaacccgcaggtgatgctgtttgacgaggtgaccgctgcgctggatcccgagatggtgcaggaggtgctggaggtgatccgcgatctcgccggcagcggcatgaccctgctcatcgtcacccacgagctggcgttcgcccaggcggtggccgatcgcatcgtcttcatggacggcggccacatcctggagcaggccgccccccaccaatttttcgagaacccacgcagccagcgtgcccgccagttcctcgccaagttttcttatacaactgtcatcaaacgaaaggagtcagcatga

SEQ ID NO: 270803 - DNA, 1078 bp, Unknown
  Bacterial polypeptide expressing nucleotide sequence isolated from the Sargasso Sea
tttgaataagaagaacttagtgaaaaatgatgcgttaataattgatgatttgcatcataaatatgataagcgagaatgttcaaattggatattaaacgaaattaacctgaaaattgaaaatggcgaattgttagggttgcttggtccttctggttgcggaaaaactactcttttaagattaattgcggggttcgaatatccctctaaagggatgatttctctaaatgataaggaaatttcaagtaggaaaaaaattcttagtcctgagaaaagaaatattggtatggtttttcaagactatgcacttttccctcacttaactgttttggaaaatgtaatttttggtttgaaaaacaaaaaagacagatctagagttgattatttattgaatgttgttggtcttgatagttttgttgaaaggtacccacatgaactgtctggaggccaaaaacaaagactcgcaattgcgagagctcttgctccaggtacaaattttattttattagatgaacctttttgtagtcttgatatgcatgtcaaactaaaattgagaagtgaactccctaatatccttaaaggttgtaatgctagcggattgatggttactcatgatccggaagaagcgatgtcaatttgtgataaggtcgctgtgatgaatgatggaaaaatacatcaaattgatacgcctattaaccttctaaataatcccaagaccatatttgttagtagttttattttgggtaataatattgttaatctcaaaaaaaatggtaattcatatatttcttgtttgggtgaaataaattgttcagagtattcgaaaaatacaggtatcaaaagtatgtcaatttcgccaaaatttatttcaattaaaagatcagaatctggtgatgcgattgttatatctaaagagtttcttggagaatttcttatatataaagtatctattaatggaaacatattaagggttagaagtgatattaataatctccttaataatggcgataaatgttctctttctattaataaaaatagtcattattttttatatcctggcgcatataaggaatatttatag

SEQ ID NO: 270804 - DNA, 679 bp, Unknown
  Bacterial polypeptide expressing nucleotide sequence isolated from the Sargasso Sea
atgattataaaaactaaaaatttaacaaaagaatatgaggcagggtcacaaattgttaaagctcttaatggaatagatttatcagttgaaaaaggagagtttatatcaatcatgggtccatcaggttcgggaaaaacaactttgatgaatattattgggtgcctagattcccctacaaatggaacttattatcttaatgacaggtcagttagtgaattagatgatgatgagttagcaaaaataagaaatgaggaaataggtttcgtttttcaatcctttcatcttttaccgagaagtactgcattagaaaatgttatgctgcctttaaaatatgcaggttgtttagagaatgaagctattgagaggtctaaaaaagtactagaaaaagttggcttacaagatagggtaaagcattctccatcagaactctcaggaggacaacaacaaagagtagctattgcgagagctttagttaacaaacctagcattttatttgctgatgaacctacaggaaatttagattcaaaaactgggaacgaagtaatgaatttatttaaagacttaaataatcaaggacaaacaataattataattactcatgaggataatattgcttctcaatcaaatagaattattacaatcatggatggtctgatagaatcagatactagaaattaat

SEQ ID NO: 270805 - DNA, 1258 bp, Unknown
  Bacterial polypeptide expressing nucleotide sequence isolated from the Sargasso Sea
gttgatcgtcgcggtgctgctgccggggatcggctggctgtcgcaaaagatcaaccgccgtttgcggcgcctgaaccgcgagcatcaactgttgaccaacgaactgtcgtacatcgtcgaagaaaccgtgggcggctacaaggtcgtcaaggtgcacaacggcgagcagtacgagatggaccgcttcacggcaatgagcaagcgtctgcgcggttacgcgatgcgcatgaccgtctcaggcggcctggcacaaccgttgacccagtttcttgcgtcgatcgcgctcgccgtggtgattacgatcgcggtagtgcaatcgtcgtcggaccagaccacggtcggcgggtttgtggcgttcgtcacgtcgatgctgctgatcatctcgccgctgaagcacctgatggacgtgaaccagccgctgcaacgcggcatgacggcgtgcgaactgatcttcggcctgatcgacgagccgtcggaaccggcgggcggcggcaagccgctcgagcgcgcccgcggcgaagtggagttccgcgacgtctcgttcagctacggcagcaatgccacgcataaccgccacacgctcaccgaggtgtccttcaaggtggcaccgggcgagatggttgccctggcgggcccgtcgggcagcggcaagaccacgctggtgaatttgctgccgcgcttcttcgatcccaccggcggcgagatcctggtcgacggcgtcgcactgccggaatacggcctgcacgcattgcgcagccagatcgcgatggtgagccaggacgtcgtgctgttcaacgacacggtggccaacaacgtcgcctatggccagacggcggatccggacagggtcaaggcggcgctgcgcgcggcgaacctgtgggataccgtcgaggcgatgcctgaaggcatcgacaccctggtcggcgacaacggcatgatgctctcgggtggtcaacgccagcgtctggcgatcgcgcgcgcgatttataaggacgcgccgatcctgattctcgacgaggccacctcggcgctcgattccgagtccgaacgccacgtgcaggcggcgctggaaaccttgatgaagggccgcaccacgctggtaatcgcgcaccgtttgtcgaccatagaacgcgccgaccggattctggtcatggaagccgggcgtattgtcgagagcggcagccaccgggagctgctgacccagggcggcctgtacgcgcatctgcatcgcatccagttccagaaggacgccgcgtaa

SEQ ID NO: 270806 - DNA, 1054 bp, Unknown
  Bacterial polypeptide expressing nucleotide sequence isolated from the Sargasso Sea
atgagttttttagaattaaataaagttactaaaatctatccaaacggaactaaagctgttcatgagacaagtatgaatgtagaaaatggtgaattcatggtttttgttggaccgagcggatgtggaaaatctactcttttaagaatgattgctgggttagaagacataactgaaggtaatataaatcttgatggaatattaattaataaagttgacccttcagagagagatgttgcgatggtttttcagaattatgcactctatcctcacatgaatgtttacaacaatttggcttacggattaaaaaatagaggtatttcaaaagaagatattgaaaaaaaagttaatgaggcagcaaagctattacaaatttctgaatacttgcaaagaaaaccatccatgttgtcaggaggtcaaaggcagagagttgctatgggaagagctattgtaagaagtcctaaaatatttttatttgatgagccattatctaatttagatgcaaaactaagaatacaaatgaggcttgaaataaaaaaacttcagcaaaaagttggagtgacaagtatatttgtaactcatgaccaagtagaagctatgaccttagctgatagactggcagtaataaataatggccttattgagcagcttggaacaccgatagaaatttataataatcctaaatctatgtttgtcgcaggatttataggttcgccacagatgaattttcttgaaggagaattaaaaaataaaactcttacttcagaaggttttgaaattaataatgttacaagtgattttaatggaccagttatattaggaattagaccagagcatatgtcgcaaactgataaaggtttaataaatttatctgtagatctggtagaacaattaggttcagataatttgatttatggagaaataaaaaataaaaaagatttttgttttagatgtcctggaagtcaaattattaaaaaaggaagtaaattatctttgaacataaatgataacaattattatgtttttgataaatctaatggtaatcgagtaaattaat

SEQ ID NO: 270807 - DNA, 596 bp, Unknown
  Bacterial polypeptide expressing nucleotide sequence isolated from the Sargasso Sea
ggcgcagtgttccggcggccagaagcagcgcgtcggcatcgcccgcgcgctcgccacgcgcccgcagatcttgctgtgcgacgaggccaccagtgcgctggacccgcagaccaccgcgtccgtgctgaagctgctgggcaggatcaaccgcgaactgggcctgaccatcgtgctgatcacgcacgagatggatgtgatccgccgcgtctgcgaccgcgtggccgtgctcgatgccggcgcactggttgaaaccgggccggtcaccgaggtcttcctgcacccgcagcacccgaccacacgccgcttcgtgaccgaatcggagcaggtggacgagggcgagctgcacaaggatttcgacgcggtcgccgggcgcatcgtccgcctgaccttcctcggcgcggacacctacgagccattgctcgggcgcatcgcgcgcgacaccggcgtggactacaacatcctgtccggccgcatcgaccggatcaaggacaccccttatggccagctgacggtgtcgctggtcggaggcgacgtacaggccgcgcaggcgggctttgtcgctgccggtgtccaccttgaggagctgcgccgatgat

SEQ ID NO: 270808 - DNA, 1576 bp, Unknown
  Bacterial polypeptide expressing nucleotide sequence isolated from the Sargasso Sea
tatggctcagtatatttacagcatgtaccgcatgtcgaaagtagtgccgcccaagcgcactattttaaaagacatttcgctgtcgtttttccctggtgcaaaaattggtgttttaggtttaaacggttcaggtaaatccagcttattgcgcattatggcgggtgtggataaagagtttgacggtgaagcccgtgctttgtccggtatcaatattggctatttgccgcaggaaccagaactggacccggaaaaaactgtaagggccgtggtggaagaagctgtcgctgatgtgaaaaacgccttaacccgtttggatcaggtgtacgctgcctacgccgaagaaaatgcagacttcgacgccttagctcgtgaacaaggtgagctggaagccattattcaagccaaagacggtcataacctcgacaatattctcgaccgtgctgccgatgcgttgcgcctgccagcctgggatgctctgatcaaacacttatcaggtggtgaacgccgccgtgttgccatttgccgtttattgttagaaaaaccagacatgctgctgctggacgaaccgacgaaccacctggatgctgaatctgtggcctggttagaacgtttcctgcacgattacacaggcactgtggtggctattacccacgaccgttatttcctcgataacgtcgcgggttggattttagagctggaccgcggtgaaggtattccatgggaaggtaactactcgtcctggttagagcaaaaagatgcccgtcttgagcaggaagagcgcagcgaaaacgctcgtcagcgctctatcaagcaagaactggaatgggttcgtactaatccaaaaggccgtcatgccaaatccaaagcacgtatggcccgttttgaagaactgcaaagccaggacttccagaaacgtaacgaaaccaacgagctgtttattccgccaggacctcgtttaggcgacaaagtgctggaagtgaaaaacctgcgtaaaacttttggcgatcgcgtcttgattgatgatttaagcttcagcattccaaaaggcgccatagtgggtattatcggcccgaacggtgcaggtaaatcgacgctgtttaaaatgatcaccggcatggaacaagcggacgctggcactattgaagtaggtgatacagtacaaattgccagtgttgatcagttccgtgacagcatgaacccaaaaaacaccgtgtggcaggaaatctccaacggtcaggatattctgcagataggtaacttccaaattccaagccgtgcttatgtcggtcgttttaactttaaaggcaacgatcagcagaagtttatcggtgaattgtccggtggtgagcgtaaccgtgtgcatttagctgcgttgttaaaagctggcggcaacatgctgttactcgatgaacccaccaacgatttggatgtggagactttacgggctctggaaaacgctatcctcgacttccctggctgtgccatggtgatctcgcacgaccgttggttccttgaccgtattgctactcatattctggattaccgcgacgaaggcaaaggaattcttcgaaggtaa

SEQ ID NO: 270809 - DNA, 859 bp, Unknown
  Bacterial polypeptide expressing nucleotide sequence isolated from the Sargasso Sea
atgaaaatagaagataatatatctgatgaaaaaattgttaatgtagtaaatgttaaaaaatattttcccataaatagtggaatactatttcaaaaaaaaattggtgatattaaagctatagatgatattagttttagtgttaataaaggagagacattagggctagtaggagaatcaggttgtggtaaaacgactacaggtaatatagtagtacgattgttccaggcaaccgagggtgaagtctggttcaaagggcaaaatattactaatttgaaaggatcaaaacttcgtagaataagaagaggtatgcaaatgatatttcaagacccatactcttcactaaatcgtcgaatgaatataggtgatatcataggtgaaccactacaagtgcatggaatagaagaaggaaaaaataaagtagaaaaggtaaagtatctcctaaatactgttggacttagtagtttatttattaatagatatcctcatgaattttcaggtggacaaaggcaaagaataggaatagcgcgtgctcttgcagttaaccccgaatttattgttttagatgaacctgtttctgcactagatgtttcaattcaagcccaaattattaatttgttgatgaagctacaggatgaattaaatttgacttatttatttattgctcatgacctttcggttgtaagacatatttcaactagagttgcagtaatgtatttaggtaaaattgtagaattaacagatacagttgaattatataataatccaaaacatccatatactcgtgctttgctttctgctgttccaattcccgatcctgatatagaagaaagtcgagagagaattatcttaagccggtgag

SEQ ID NO: 270810 - DNA, 790 bp, Unknown
  Bacterial polypeptide expressing nucleotide sequence isolated from the Sargasso Sea
atggataaaaattctcaagaaataattgtaaagtttgacgaagttaccaagcaatatggagatcttgtagttttggataagctaaatttaaatattaaaaaaaatgaaatggtttcaattattggtccttctggttcaggtaaaactactgttttaagagtattaatgactttagaaaaaatcaatggtggagttattcatttagatggcgaaccacttactcatatggatacaaatggcaaattagtagaagcgaatgaaaaatatttgagagatagacgttcaaaaattggtatggtatttcaacaattcaatttatttccacatatgacagctcttcaaaattgtattgaagctccagttgaagttttaggtatgaaaaaagaagaggcagaagaaagagcacttgagcttttagaattagtggggttaactgacaaaaaagatcaacatccttcaagattatctggaggccagcaacaacgtgttgcaatcgcaagagctttagcaatgagaccaaaagtaatgttgttagacgaaataacttcagctttagatccagaagtggttggagaagttttaaacgttataagatcgttaaataaggaacacaatttgactatgattatggtcacacaccaaatgggatttgctagagaaatttctgacagagtatgtttctttaatgaaggaaaaatttttgaacaaggtccaccggaacaattatttggagatcctaaaaatgagagaacaaaacaatttctacatgctgtacttgatgcaaattaaa

SEQ ID NO: 270811 - DNA, 1135 bp, Unknown
  Bacterial polypeptide expressing nucleotide sequence isolated from the Sargasso Sea
ttttgcgcataattatcacgaagatagagctgctttaaacgctatggcatattttcgtgatcggtctctagagtatgggacagtggcggcatggttccgattttccttaaatggattggctgggattcttcccgtaataatggtaggcggaagtctttggttttggagtaaaggcggagttacagctggtgatattgctgctgctggggcgatttccttgaggttgtcgcagatgactggttgggttagctacactttgatgagtctttataccaatattggagaggtagaagatggtatgaggaccttatcgcctcctcatgatttgatagatgcccataatgcggagcctcttcgggttgcttcggggaaaattcattttaagggaatttcatttgcttataatcgtgagattggtggcgttgatgatatatctttaactattggggcaggggaaaaggttggattggttggtgcgtcaggtgcaggaaaatcaacactggtatctctcttgctccgtctgtacgacccagaaaaaggttcaatttatattgatgatcagaatcttcgttcaattacacaggaaagcttgcgtagtcagattggtatggttacccaagagactgctttatttaatcgctcggctagagataacatactttatggacgggctgaagctaaagaacaagaggttgttagtgcggctaagcaagccgaggcgcatcagttcattttaaacctaaaagaccacaacggtcggacaggttatcaagcacatttgggtgagcaaggagtcaagctctctggtggccagcgccaacggattgcactagcgcgtgcaattttgaaggatgctcccattctagtacttgatgaggcgacgagtgctctcgacagcgaagttgaggcatgtattcaaactgcgcttgatcgtgtaatgaagggaaaaactgttttagcgattgctcatcgactgtcaacgctcagtaaaatggacaggataattgttatggatcaagggcgcattgtcgaaaccgggacccataagcagttgttggccttagatgggctgtattgtcgttactggaggcgtcagtcgggcggctttatcgaaactcggcaagccgctgaatag

SEQ ID NO: 270812 - DNA, 980 bp, Unknown
  Bacterial polypeptide expressing nucleotide sequence isolated from the Sargasso Sea
tgaaacaaaaaaaatattaaccaatccacaagaaaattataccaaaagtttagtgagctcagttcctccaacaaataaaaaaatttcaagatttgtaatagttgaaaaagaacacaataaaaaaaaagaaaataatatcaaaatactaaatagatggtcaaagaaagaaattataagtcaagatttagttcagataaaaaatttgaataaaagttttgatgataatttttttacagaaaattctaaaaattctgtaatggctgttaatgatgtttcatttgaaataaaagagggagaatcttttggtctagtaggagaaagtgggagtggaaaatctacaattgctaaaatgattgtaaatttatttaaacctacatctggcgatatcttctttgataacgtttgtataacaaaaattaaacaaagatctgaattaatgaaatttagaaaacaaattcaaatgatatttcaagacccttattcttcactaaatggaagattaaaagtaaaagatataattgcggaaccaatcacacttcacaatccatcaatatcaaatatagatttaaataattatatttacgatttacttgagtctgtagaattaactcaaaaatctgcagatcgatatccacatgaattttcaggaggacagagacagagaatatcaattgcaagagcactcgccacacaaccaagacttttagtttgtgacgaacccacttctgctctagatgttagtattcaagctcaaatattaaatttacttaaagatcttcaagaacaattaaatttaacaattttatttataagtcatgacttacctgttgttagacaaatgtgcgatagaattggcgtcttgaaagacggcaaattatgcgaagtttcaataactgaggatttatttttaaaaccaacgcatgaatacacaaaagaacttttacgattaatgcctaaaattgagtctatttataattaat

SEQ ID NO: 270813 - DNA, 766 bp, Unknown
  Bacterial polypeptide expressing nucleotide sequence isolated from the Sargasso Sea
catgagtaaaattatttcttttgacaatgtaagtttaaaattcggtggtgttcaagctcttaaagaaatttcgttcgacattgatgaaggttcattatttgccattattgggccgaacggtgctggtaaaacttctatactcaattgcattaatggaatatataagccatcgagtggcaagataaatatatttggagaagatagtgcaaatttaaacccagatgaaatagcaaacctaggtgtatcaagaacatttcagaacatagaactttttgaaaatatgacaacgttagacaacattttaattggggctcataagcatgtaaattatggacctatccgaagtcttatctattcaaaaaaagtaaggatagaggaagaaaaagcaagaaaaatatccgaagatgtaattgattttttagaaatcgaggaatacagatattcatatatattatctcttccatatggtattcaaaaaagaatagaactaggtagagctctcgcaatggagccaaaagtgctcttgttagacgaacctgcagcaggaatgaataatgaggaaactgaagacattgcaaggttcatcttagacatacacgaagaactaggaatcacagttatattaatagaccacgacatgaacatggttatggatatagccacagaggtagtggcaatggattttggtgaaaaattatttcaaggcgatccgaaagatgctgcgaaagatcaaaaagtaatagatgcgtatttaggagttggatga

SEQ ID NO: 270814 - DNA, 859 bp, Unknown
  Bacterial polypeptide expressing nucleotide sequence isolated from the Sargasso Sea
tttgacaaaaaatataattaaaacttggggtattcgagagaatactaaccaaaaattattaaaactatcaaatattacaaagatctttgatgatagatctatttcttacagaaaaaaactgattgatgaaaaggcagttaaagcagttaatgatgtttcattcgaattatttgagggagagacacttggtttagttggggagtcaggttcaggcaaatcaacaattgccaaaataattacaggactagtaaggcccactgcaggtgaattagaatacaataatttttcactttataattcgaaaaaaaaatatcaaatcagtaagagtagagggcaaattcaaatgatttttcaagatccttactcttctttaaatccaagatttaaagtaagagatattatagctgaaccactaaaattttttcaaaaaaatattactaaaaatgatttagatcaaagtgtttttgatttaattgatatagcagggatgacaagacaatctttagatcgatacccgcatgagttttctggaggtcaaagacaaagaatttctattgcaagagctcttgcaacaagacctaggttgttaatatgtgatgagccaacatcagcactagatgttagtattcaagcgcaaatattaaatttattaaaagatattcaagacgaattgcatttaacaatgttatttataagtcatgatctaccggtcatcaggcaaatgtgtaatagaattatagttttaaaaaatggtattatttgtgaaacaaacgaagccgaaacactttttaacaaccctaaacatcaatatacaaaagaattaataaatttaatgccaaaaattgaatcaattatttaa

SEQ ID NO: 270815 - DNA, 1099 bp, Unknown
  Bacterial polypeptide expressing nucleotide sequence isolated from the Sargasso Sea
gaacaatataggtcttgtaattataacccatgatatgggtgtagttgctgagactgctgataatgtacttgtcatgaaaggtgggaaagaagttgagcacgcagaagtcaacaatctattcaaaaaaccgactaaaccctatacaaaatctttacttgctgctgtgccacgtttagatattaaaacatttgaaaatcaaaccagttctaacacttcaacaataccattagttaaaatcaatcaggtatcaaaaactttttcaaaagataattatttattttttgattctttgaaaacacatgctttagataatgtaagtctggaaattaaatatggtgaaacagtagctttagttggagaaagtggctctggtaaatccacacttggaagagcaatagtaaaactagaaaatattgattctggagacattatagttgatagtctaaatattaattcatctaaatctgatgatttgaaaattcttagatcaaatgctcagataattttccaagatccatactcatctcttgaccctaggtattcagttgggagaagtattgccgagcctatcctaattcaaagacaatgtagtcgatctgaagcaaaagacagggtatcagatcttttaaaaagtgttgggctaacgaacgaaatggcaaatcgttatccacatgagttttctggtggtcaacgtcaacgtattgcaatagcaagggctctagcttcagaaccaaagtttatcgtagctgatgaaccaacatcggctctagatgtaactatacaagctcaaatacttgaactgctgaataacctaaaaaatgaaagaaatatctctcttctgtttattacacatgaccttgctgttgttaggcaaatttctaatcaagttgctgttatgtgtcaggggaaaattctagaaaaaggtcctaccgattctgttttagataaccctcaaaatgattatacaaaatctttacttagtgctgctccttatcctgatccggaaaaaagaaaaaaattaaaaagaaatattgatttaaaatcatttaatacaggaccactaattgaaattgcaaacaatcattgggcggcatcatga

SEQ ID NO: 270816 - DNA, 793 bp, Unknown
  Bacterial polypeptide expressing nucleotide sequence isolated from the Sargasso Sea
atgaaaaataaaaattctgatgaaattatagttaagtttgaggaagtaacaaaacaatacggtgatctagtagtcttagataaacttaatttagatattaaaaaaaatgaaatggtgtcaattattggcccatctggttcaggaaaaactactgttttaagagttttaatgactttagaaaaaatcaatggaggtgttattcatttagatggcgaacctcttactcatatggattcaagtggaaaattagttgaagcaaatgaaaaatatttaagagatagaagatcaaaaattggaatggtatttcaacaatttaatttatttccacatatgacagctcttcaaaattgtattgaagctcctgtagaagttttaggaatgaaaaaagaagaggcagaagaaagagctttagagttattagaattagttggtttaacagataagaaagatcagcatccaaccagactgtctggaggacaacaacaacgagtagcaattgcaagagctttagcaatgagaccaaaagttatgcttttagatgaaattacttcatcacttgatccagaagtagtaggagaggtattaaatgtaattagatctttgaataaagaacataatcttactatgataatggttactcaccaaatgggatttgcaagagaaatatcagatcgtgtttgcttctttaacgacggaaaaatttttgaacaaggtccaccagaaaaattatttggcgatccacaaaatgaaagaactaaacaatttttgcatgcagttctggatgcaaattaat

SEQ ID NO: 270817 - DNA, 703 bp, Unknown
  Bacterial polypeptide expressing nucleotide sequence isolated from the Sargasso Sea
tatgccgcttgctgtcgacatccgcaagaccttccagagcgccgagcgctgtttcacgctcgatgtcgcattcaggacgaccacgcagcgcgtcgtgctgttcgggccgtccggcgccggaaagagcctgacgctacaggctatcgccggcttgctgcgtcccgacgaagggtcgatcacactgcatggcaacgcgctattcgacagcgcgcgcggcgtcgatcagaaaccgcaggcacgcaagatcgcctatctgtttcaggactacgcgctatttccgcatctgaatgtgcggcaaaacatcggcttcggcttgcagcagggttggctcaatccgcgcgcgcgattctcgcatccacaagtggattactggctcgaagcgctcgaattgaaaagcgtggccggcaattatcctgcgcagctttcgggaggacagaagcagcgcgtagcactagcgcgggcactggtcgcgcagcctcagttgctgctgctcgacgagccgttttccgcgctcgatagcgcgctgcgtcagcgcatgcgcagcgagttgtcggacctgcaaacgcggctcgatatcccgatggtgttgatcacgcacgatcccgacgacgtcgccgccttcggcgatcaggtcgtaaaggtcagcgatggctgcgtgcgcgagaatcagacgttcgcgggctacgtacgcagtgagtcttga

SEQ ID NO: 270818 - DNA, 472 bp, Unknown
  Bacterial polypeptide expressing nucleotide sequence isolated from the Sargasso Sea
taaagatatagtttcagaacctataaaacttcataacccttcaattagttctaaagatatagatagttatatttatgatttattagagtcagttgaactaactcaacaatcagcagaacgttatcctcatgaattttcaggaggtcaaagacaaaggatatctatagcaagagctcttgcaactcaaccgagacttcttgtttgtgatgaaccaacttcagctttagatgttagtatacaagctcaaatactaaatctattaaaagatttacaagaacagttaaatttgacaatcttattcattagccacgatttacctgttgtaagacaaatgtgtgatcgaatagctgttttaaaaaatggaaaactttgtgagatatcaaaaactgaagagttatttaaaaacccatcacacgattatacaaaagaattacttacgttaatgccaaaaatagaatcaatttacaattaa

SEQ ID NO: 270819 - DNA, 526 bp, Unknown
  Bacterial polypeptide expressing nucleotide sequence isolated from the Sargasso Sea
atgattaaaattaaaaacatttcaaaaagattttttataaaaaatagtgaagttcaggcgctaaataaaataaatttattaatagaagaaaaagattgttttgcggtagttggtgaatctggctcaggaaaaactactttagcaaatataattttaggaatttatcagcaagacgaaggtgatatttcattttttgaaaaacaattatttaaaaaaagaaatttagaagaaagaaaattaattcaatatgttcaacaaaatcctatgtctaccctaaatccaaaaaaaacaatatttagtacaatttcattacctttaaaaattcataaaatagttaaaaaagataaaattgaagaaagagttaaaaaattgttatcctatgtggggttaaatccagaatttatggttagatatcctgatactttgtcaggagggcaaaaacaaagagtagcaattgcaagagcattagctgccgagccaaaagttttaatattagatgagccaacatcagcacttgatgtaatag

SEQ ID NO: 270820 - DNA, 700 bp, Unknown
  Bacterial polypeptide expressing nucleotide sequence isolated from the Sargasso Sea
catgaaaaataatcaaaccaatgatgacctttttaatttagtcaatgttaacaaaactgtcttaagtcctgaaggcagcttaacaattctatctgatatcagcttgagaataaaagagggcgagagtgttgcgatcattggcacatcaggagctggtaagtcaactcttctaagtttaatggcaggattggacgttccttcaagtggacagattaattttaaaggcaatgatttagctgccctgaatgaagatcaaagagctgaaattagagccaagaatgttggcttcgtatttcaatcttttcatttaattccatcattaaatgctcttgaaaatgtcatgtttccaatggaaatgaacaatgtaagcgattatagaaataaggccactgaaatattaaccaacatgaatatgaaagaacgcctaacacactatccaagccaattatctggcggagaaaaacagcgtgttgccatcgcaagggcttttgccagtaatccctcagttttatttgccgatgaaccgactggaaatttagactcaaaaacaggcgaaaatattatagaaacgatgttttcattaaataagctttcatcaacaacacttattttagtcactcatgaaaagagattggcgaagatgtgcgatagagagatttgtttggatgccggtaaattgtcctcaaattcagagcactaa

SEQ ID NO: 270821 - DNA, 480 bp, Unknown
  Bacterial polypeptide expressing nucleotide sequence isolated from the Sargasso Sea
cattcatttatttcccatatgacagctcttcaaactgtatagaggctccagtagaggttttaggaatgaaaaaagaagaagcagaagaaagagcacttgaacttttagaattagtaggattaacagataaaaaagatcaacatccttcaagattatctggaggccagcaacaacgtgttgcaatagcaagagctttagcaatgagaccaaaagtaatgttgctagatgaaataacctcagctttagacccagaagttgttggtgaggtcttaaatgttattagatctttaaataaagaacatagtctaacaatgataatggtaacccatcaaatgggatttgctagagaaatttcagatagagtatgtttttttaatgaaggaaaaatttttgaacaaggaccgccagaacaattatttggtgatcctaaaaacgaaagaacaaaacaatttcttcatgcagtgcttgatgcgaattaaa

SEQ ID NO: 270822 - DNA, 1555 bp, Unknown
  Bacterial polypeptide expressing nucleotide sequence isolated from the Sargasso Sea
atgttattatctttacaaaacgtaactctaaaatcatataataggaatattgaaacagtgatccttgattcaattaacctagatattgagcctggagaatctgttggtcttgtaggtgaaaccggtagtggaaaaactatgttagcctggacaatattaaatcaattaccaatcacaaatcacaccttaagtggcaatgttgtttttaacaaacaagaattaactcttgatacaaaaaatataaaagggaaccaaatatcaatagtattccaaagccctatgcaatcattaaacccaattcaaactgttggcaaacaattttctcttatcttaatgaaaagatttcaaattaataaaacagatacattgtctttagaaaaagaatggatgaaacgagtgcacttggatgatcaagatattttaagtcgctacccacatcaactatcaggagggcaaatgcagagagttatgattgcaattgccatgtcggttaagccaaagctgttaattgcagacgaagtaacaaccgcgctagatgcaaacctacgaaatgacattcttgatttgattgatgagttgcgagaccaagaaaagacaagcgttttattgatttctcatgatttattacttgtaaaaaatcgttgtaaaaaaatagcagtaatgaaatcagggaaagttattgagtgctctagtgcagagatgttatttaagaacccaaaacaaaaatattcaagaaaactaattgatgctctggattataaaaagtcaaaagatgtaagcaaaaaacatgaaactgatattcttttttcaataaacaatctttataagacttacgtttcacaaggtaaagaccatgcagcattaaaaaatattaattttgatatttataaaaatgagattcttggaattgtaggtgaatcagcgagcggcaagtctacgttggcaaaagttttgcttcaaattgttccacaagacaaaggtgatataatgttttatagtaaaggcacagcacctattatacatgaaaagccaaacaggctaataggcgctgtttttcaggatgcgcttgggtcactaaaccctagaatgtctatctttgatatattaatggaaccccttgaccttgctggcggattagatttagatactaaattaaacaaattgaataaatgcatagaaagcgtaggtctaagcacagatctcttaaaaaggtatccccatatgttatctgggggtcagcgccagcgggtatcaattgcaagagcgctaatgacggacccatctttattaattttagatgaaccaacttcagccctagatgtccagtcacaaaaaactgttttaaaattattgagatccttaaataaggacaaaagattaacaatagtattaatttcacatgatttacgaatcgttatggaaactgtagatcgattagctgtattatataaaggagaaataattgaaacaggcaacccaaatacaatttacaacaacccccagaggtcgtatacaaagagcctaattagatcagagcatgataatgaaaaataaa

SEQ ID NO: 270823 - DNA, 619 bp, Unknown
  Bacterial polypeptide expressing nucleotide sequence isolated from the Sargasso Sea
aatgaatttaattattaaatcgctaaatttttcttatcagagtgagggtgttttcaaagatttaaatctcaattttaattctggaatcttaaatctagtctcaggaccgagcggctctggaaaaactacattgttaaatctaatcgctggattagaaaaaccctcatctggtttaataatgcttgatgataatattcaatcaagtatcgataaatttgttgagcctgaaaatagaaatatcggctttgtttttcaagattttgctttatttccgcatttaaatgttaaacaaaatattgaattctcagaaaatggaaataaagaattatttaatacattaattgataatctttctattaaaaaccatctttctaaataccctcatgagctatcaggagggcaacaacaaagggcttcaatagcaagagcaatatactcagaaccaaaaatccttttaattgatgagcctatttcaaatcaagataaaaataataaaattgaaataataaaaattatttcagattttattaaagataaagaaattgtatgtattttggtttctcacgaagaaataaataatattgctcaggttgagacaagatcttataccctttcttag

SEQ ID NO: 270824 - DNA, 1573 bp, Unknown
  Bacterial polypeptide expressing nucleotide sequence isolated from the Sargasso Sea
atgccatatttatggcctaaaaataataaaaattttaaaataagattgattttagcaatatgttttttaatctttgccaaattagcaaatgtttctgtgccaatttttttagggaaagccgttgattcattagatgggcttaataaaaattctttaatcatctttgtccctatagtttttattgccgcatatggaattgcaagatttttgcatgttggttttggtgaaatacgagatgctttatttgcaagaattggacaaaatgcaattagaagagctgctttaaaagtatttgagcatcttcataatttatcattaaaatttcacttaaatagacaaacaggagctttaagtagaattatagacagaggaataggtgcaatagattttatacttcgctttgtaacatttaatatttttccaacattattagaaatgattttagtttgtcttattcttttaaatttatttagttggtatttctcaattattactttttttgtaatccttttttacatatcttttacatttatagtgacagaatggagagttcaaattagaaaaaaaatgaatgatgctgataatgttagaggtcaaaaatcaattgatagtttattaaattatgaaacagtaaaatactttaataatgaaaattttgaatcttcaaattatgataaatctttagaagaatatgaaaaatttgctatcaaaagtgcaataagtttaaattttttaaatttaggacaagcattaattatcactattggaataattggaatgatggtcctaaccgtatatgaaattcaatcaaataaaatgagtattggtgatttcattatagtcaatacctatttaattcaattatctattcccttaaactttataggttttgtatattggcaaatcaaacaatctttagttgatatggaaaatatgtttactcttttaaatgaaaaaacagaaataacagacaatattcatgcaaaagatttaataatttcagatgcatcagttacctttaaaaatgtttcttttcattatgatgaaaaaagaaaaattattaaagatatatcttttaagatttatcctaatcaaactgtcgcaatagtgggacctactggagcaggaaaatcaacaataagtaaaattttttttagattttttgatcctatctctgggtcaatattaattgataatcaagatataagaaaagtaacacaaaaatctcttcgcgaacaaattgctgtggtacctcaagatactgtcttatttaatgaaactttattttataatatttcttatggcaatccaaattcctctaaagaagaaattgttcaagttacaaaaatggcaaaattacatgaatttattgagaacttacctgatggatataatactatagttggagaaagaggtttaaaactttctggtggtgaaaaacaacgagttgctatagcaagagccttactaaaaaaacctaaaattttcttttttgatgaagccacttcttcgttagatacaaaaacagaaaaagaaattcaaaataatctaagaacatttatcaaaaaaatat

SEQ ID NO: 270825 - DNA, 475 bp, Unknown
  Bacterial polypeptide expressing nucleotide sequence isolated from the Sargasso Sea
aatgtctgatccaataattaaaatagaaggtatgaataaatggtttggagattttcaagttttaaaagatattgatttagaagtagaaaaaaataaaaaaattgttgtttgtggaccttcaggatctggaaaatcaactctaattagatgtattaatagattagaggaacatcaaaaaggtacgattacagttgatggaacagaacttacagaaaatacaaaaaacatagaagctataagagctgaagttggaatggtatttcaacaatttaatttatttccacacctatcaattttagataattgtacattggcaccaatatgggtaaaaaaaatgcccaaaaaacaagcagaagaacttgcaatgaaacaattagaacaagttcaaatagctgaccaagctcaaaaatttcctgggcaattatcaggtggacaacaacaaagatgtgcaattgcaagagctttatgcatggaa

SEQ ID NO: 270826 - DNA, 622 bp, Unknown
  Bacterial polypeptide expressing nucleotide sequence isolated from the Sargasso Sea
atgtcaaatttaattgaagttcagtctgttaacaaaacctataaacgcggtgaagagactttggtagttttagatgaactgagcctagaggtgcctaaaggtgactatttggctcttatggggccatctggttctggtaagtcaacactattaaatttaatagggggtctcgatactccaacttcaggacaagttgtcattaatggcgaacaccttgaaaaaatgggtgcttctgccctgagcgattggagggcgagtaatgtaggttttatttttcaattctataatttattgccagtactgactgcaaacaaaaatgtagaaataccccttcttttaacaaacctttctggttcccagagaaaaatgcatgttgaaacagctctaaatgtagttggcttagctgacagaggagggcataagccaaatgaattatctggaggtcaacagcaaagagttgctatagctagagccctggtttctgacccagatattctggtttgcgacgaaccaacaggtgacttagatagagatacggctactgaaatattggagttactacaaatcttgaatcgtgatcatggaaaaaccattttaatggttactcatgaccctgtagctg

SEQ ID NO: 270827 - DNA, 748 bp, Unknown
  Bacterial polypeptide expressing nucleotide sequence isolated from the Sargasso Sea
atggcttctcttgagattaattcactagttaaaaaattttctgaaactacagctataaatgatatttcgataagaatattagatggggaaatggtaggtattataggcaagtcaggtgcgggtaaatctacactcatgagattaattaatcgattaatcgaaccgacaagcggatctattgcttataatggaattgaaattacctctcttaaaggtaaaaacttaaaacaatggcggtcgaaatgtgcaatgatttttcaacaattcaatctaatagatcgcttagatgtattaacgaatgtcttaagtggaacattaggtattaattttaaattactgaaattattaaagatttacagtaaaaaagaaaaaattgaagcgctaacatatttaaataatttagatctttcagataaagcgctgcaaagagttggaacgctctctgggggtcaacagcagagagtggctatcgcaagagcgatgatgcagaatccatcaattttacttgcagatgaacctatttcttctttggatccaaaaaactcaaaggttgttatggatgacataaaaaagattaataaacaagatggcatcatggtcatatgtaaccttcactccctagaaatagctaaagaatattgtgatcgtttgattggtttatctgatggaaaaatagtctttgacggccatccatcctctctcactaaagaattagcagaacaattatacgatttagaaaatgaatgat

SEQ ID NO: 270828 - DNA, 2029 bp, Unknown
  Bacterial polypeptide expressing nucleotide sequence isolated from the Sargasso Sea
atgaatgaaataattgaaagtgttaaaaatttatcaattggatttaacagtcagaagggcaaacaaatttcaatacttagaaatgtttcaactaatataaaaaaaggagagactgtagggatcgtaggggagtcgggttctggaaaaagcacattagcacttgctatgatgggctatataaaacaaggcttatttcctcttaagggtgaatgcctctttaaatctgaggatttattgaagatgagcagtagacagctagaaaaaattagaggtagaaaaatagccatgatacctcaaaatgcaggacaagcactaacaccgaatttaaaaattggataccaaattgatgaagcattaagattacatacagatctaaacaaaacagagagagataaaaaaatttcagagttactaaataaagttagacttccttcaccagaaactatggcttttcgttatccacacgagctttctggagggcagcaacaaagagtggctgttgcaatggcattggctggcaaaccagatttacttttattagatgagccaactactggattagacgttacaacacaagcgcatgtattagaactattaagatttatagcaaaagatactggaacatctatgatctatgttagtcatgaccttggagccatagcacaagttagtgatagaatagttgtaatgtatgcgggagaaattgttttagaaggaccagcaagaaaaatattaaaggaacctattcatccttatacttatggattgttaaaatcgatacctaaactttcactagctggacttccagcttctatgccaggaagccaacctcagcctggaagcataaatgaaggttgtagtttttatgatagatgtaacttagcaactgataattgtaaaaaaaattcaccagatctggaacatattaaagaattagataccaatgtcagatgttttaattataaagaattaataaaccaaaataataatttacaaacttcaataacaaaaaaatcaaataatagtgaagcaaatgaagttttaaaattaaaggatgtttcaattagttatgcaaagcagaaattttttgatcaattattaaataaaatttctgatcaaaacccaacagttaaagatataaatatagatataaaaaaaggagagactattgccctggttggtgagtctggaagtggcaagtctaccatcttaaaatcaattgctggcttactcaaaacaaaagatggtcaaattaaatttgaaaatgatcgtattttatcttctgatttaaaaatgagaaatccaaatgatctgcgagcaatacaacttatatttcaaaatccagacgagtcattaaatccaaaccacacagttgagcaaatactttctcaacctctaaagttgtattttaatttatcaggagaagaattaaaaaaaaatataatcgatctactaaaaaaagtaaggttaggagaattttatatgtcaagatatcctagacaattatcaggtggtgagaaacaaagagttgcagttgcaagagcatttgctgctaagccagatataattttgtgtgatgaggttacatcagctttagatgtttcggttcaagcagccgttttaaacttattacaacaattaaaagaagatctaggaacaacctacgtatttgtttctcatgatctggctgttgttagagcaattagtgatagagttgcagttttatatcaaggaaggttatgtgaaattggtccttctcaaaatgtttataaatttccatcacatccttatactgaagtattattaggtgctgttttggaaccagatccagatataaaaccaaaattagtagctgaggatatagtagaggaaaaaccccctgaaaaaggctgttcttttcaaggaagatgccctaggaaaataggtgatatttgtaattcagaggttccaccatggcaaataggtgaaaatggtaacgctattagatgtcatattaatattgaagaattagcaagtttacagcagtagt

SEQ ID NO: 270829 - DNA, 1524 bp, Unknown
  Bacterial polypeptide expressing nucleotide sequence isolated from the Sargasso Sea
gttaccgtcacaatatttttcttgccacaattattattgcagctttaataagactttttaatacatggataaatattcgcttagctgctgctattggtagtgatataagtataaaagcttttgaatctcttgttaataagccttacaagttttttatctcatctaacagcagttcaattttatcaatatctacgctttacgttaattatgtgtcgcaaatagtcaaacaatttttgacattttttacttctttagtattgtcatgttccattgttattattttactttctataaacttcaaattaacaagtctcatatttatttctttatgtttctgttattttatacaagcatatttttcaaagaaatatctcaatagaaatagcaaattattagcggcagcttctcaaaaacatgtgcaaacagttcaagaaagttactcttcaataagagacttaattatcgataatagtcaaaaaacttttacagaaaattattccaatattgatattcaaatgaggcgatatgaagcgaatatgcaatttgtacaagcatttcctaaatacgtaatagaatgctttggacttgttttggtggcaatcttatgtgtatttctatacaaaacctcagatagcaatcttacagtaatttcaactgtaggaactataagtttaggtttacaaaaactattaccacttctattcgcaatgtattcatcttgggctattttgaaatcatacgtatatgcggtaaatatggttttagacttaacagaaagtccctacaagccttacaaattaccaattaaaacaattaaggattttaattttaaatctcttgtagttagaaatttaagttttaaatataagaaaaattcgcagtatattttaaataatgtaaattttaatattcaagcaggtgacagaattggaattataggagaaaccggcagtgggaaaagtaccttaatagatttacttatgggtttattaattccagattcaggtactattaatttcaattcaattaatatccataacaataaaaaaacgcttttaaactggcgaaaattaatttcacatgtacctcaggacgtggtactttgtgatgcctcaattgcagagaatattgcttttggattaaaaaaagatgagatagatttaattaagctagaggaagttatagttaattccaaattagaagatttagtcaaaagtcttccagatggatatgaaacttttgttggagaaagaggaattaatttaagtggaggacaaaaacaaagaatagcaattgctagagccttgtataagaataaaaaaataatttttttagatgaagcaacaagcgcattagataaaaaaacagaaaaagaaattatagaatccattaaagcacttgataagaatataactgttttctttatttcacacagaatgtctgctttgaagtttttcaacaaaattttaaatgttgaaaatggtaaattagagcaaatagatcagaatagaataaataaatgac

SEQ ID NO: 270830 - DNA, 506 bp, Unknown
  Bacterial polypeptide expressing nucleotide sequence isolated from the Sargasso Sea
aatgtctaaaaatacagaattcgttaagttcgataaagttgataaaagctacgatggtaaggtcttagtagtaaaagatttaaatcttaatatctccgagggtgagtttattactatgcttggcccatctggttcaggaaaaacaacttgtctgatgatgttggctggatttgaaaccccaactaatggcgaaatttatttagactctaatcctatttcaaatattccaccacacaaaagaggaattgggatggtttttcaaaattatgcattgtttcctcatatgacagtttatgaaaatttagcatttcccttaagagtaagaaaagttcaaaaagatgagattgataaaaaagtagataaagctttatcaatggtttctctttcaggatttgaaagtagaatgccagctcaattatctggtggtcagcaacaaagggtagccgttgcaagagctctcgtatttgatccagcagtagttctaatggatgaacctcttggagctt

SEQ ID NO: 270831 - DNA, 913 bp, Unknown
  Bacterial polypeptide expressing nucleotide sequence isolated from the Sargasso Sea
atagctgggttagaaaagatagataatggaaaaatacttttagaagaaaaattactcaacgatttattgccctcaaaaagaaaaatttcaatggtttttcaatcttatgctttatacccacatatgaatgtttatcaaaacatttcatttggactagttacagaaaaaatttcaaaaattgagataaaaaagaaagttattgaagtttcaaaaatactcaaaattttggatcttttggagaggaaacctgctgaattatctggaggtcaaagacaaagggttgcaattggaagggccattattagaaatccaaaactattcttatttgatgaaccattatcaaaccttgatgctgctcttagatcagaaatgagagtagaaatttcaaagttgcataaaaaattaaaaaccaacgttgtttatgtaactcatgatcaaatagaggctatgactttagctgacaaaattgtgatcatgaacaaaggtaatattgaacagtatggaagtccggatgaaatttacaatagccctcaaaatatatttgtagctgaatttattggaaatcccaaaatgaatatcttaaagatttcatctagtgatattattgatcagaatacaataaaactttttgatagaaagataaaatttgaaaatataaaatttagcaataacgtttatgttggatttagaccagaagatatatctttagataaaaatagtgaaatcttcacaaaaattaacattgaactagttgaaaatttaggttctgaaaaaattatttatgggaatttaaatggtaaggaaattagagtaaaaagtgctaaaaatattacagataaaaatattacaatttacttaccaaaaaataagatatatttatttgatgaagataaaaatagactaaaagcatgaa

SEQ ID NO: 270832 - DNA, 745 bp, Unknown
  Bacterial polypeptide expressing nucleotide sequence isolated from the Sargasso Sea
aatgtcattcatcgaacttgtcgacttaaaaaagcggtatggcgaacacgaagtgcttcgcggaatcgaccttaatatcgagaagcatcaggttgttacgttaatcggcgcatcaggttgcgggaagtcgaccctccttcgttgcatcaatgcgcttgagaccatcgacaccggcaaggttctaatcggcggcgacgtcgtatccggcccgggcgtcgacgtcaatcgattgcgcaagcgggtcggtatggtatttcagtcctacaatctctttccccatatgaccgtgctggacaatgtggcgttggggccggtcaagttgctgggggagaatgtcggagcggcacgggagcgtgctcgcgcactgttagaccgagtgaacttgtcgcatcgcgctgaatattatccggatcagctctcaggtggtcagcaacaacgggttgcgattatgcgtactatcgcgatgcgacccgaggccatgcttctggatgaaatcacttccgcgctcgaccccgaactcgtatccgaagtgcttaacattgtccgcgacctggcagcggatggtatgaccatgattctcgcgacgcacgagatgcagttcgctcgggaagtgtctgaccaggttgttttccttgaacagggtcgtgtgctcgagaaagggccgccttcacagttgttcggcgatcccgtagaggcgagaaccagagaatttctcaaaaaaatcgtcgacgcgggcaggctgtaa

SEQ ID NO: 270833 - DNA, 580 bp, Unknown
  Bacterial polypeptide expressing nucleotide sequence isolated from the Sargasso Sea
agaaggagattttgtctcatagttggccaatcaggtagtggaaaatctacattcttaaatatgattggtttattagatagcataactgatggatctattgaaattgaaggaaaagacgtctctgaacttacagataacgagctctcaaagtttagaggtgaaaagattggatttatatttcaaagtttttttctactcccaggattaactgctcaggaaaatgttgctgaaggccttttataccaaggcatttcaagatcagaaagattagaaaaagcaaaggaagttttggaacaagttggccttggagacagattgacccatttacccaaagaattgtctggtggtcaacaacagagagttgcgattgctcgtgctctagtacaagatccggcattcgtattagcagatgaaccaactggaaatttagataaagaatcaggcatcaacatacttaatatcttgaaagacctaaacaaccagggtaaaacagtaattatgattactcacaaccaagaacacgcaagtatgtttaaaaaagttatagaactagttgatggaaaaatagtaaatcaatgaa

SEQ ID NO: 270834 - DNA, 406 bp, Unknown
  Bacterial polypeptide expressing nucleotide sequence isolated from the Sargasso Sea
tctgagatgtttaacagcagaacaaaatgtccagatgggcgccgatttaataaaaggtttaacatatttgcaaagacgtgaaatagcacggaattggttgtcagcagtaggattagaagaacatcataaaaagttgccaaatgacttatctggtgggcagaaacagagagtagcaattgcccgagctttatctgccaacccaaaacttttattagctgatgagcccacttctgctttagatagcgtcacaggaagagaaatagtaacacttttaaggaaactagcaaaagagcaaaattgttctgtacttatggtgacgcatgatccaagaatttctgatatggctgataggatattaaatatggaagatggtaaaatatatagtgctcatagtgagctaatataa

SEQ ID NO: 270835 - DNA, 842 bp, Unknown
  Bacterial polypeptide expressing nucleotide sequence isolated from the Sargasso Sea
tctttcagagagaattaaatcagtaactagtattcagcaagttacaaaagctatgaaaatggtagcagctgctaaagtaaagaaagctcaagaaaaaatggaaatatctaggccttattccaagagtactcaagaattaatttgtagaatcttgccacaaatcagtgtttctgatatttcattagttgaaaaaagaaaagtaaaaaatacaggtatcatagtaataacaagtgatagagggtttgctggctcattcaattcaagtgttatcagattagctgaaagagaaattgagaaattaggaaaggattcagtagaactattttgtttgggtaaaaaagcatcagaatatttttcaaaaagagattttaatgttaagaagacatactttgatttttggaaagatatgaattatgatactgcttcaaaaatttctgcttcatttattaattcatttgaaaataatgaaattgatgaagttcatgttatttacaataaatttaaaactcttgcatctcaagatctaattatggaaaaagtcttacctgtagattttacagcagattataatgcgaccaattacaattacgattatgagcctggtcaaaaagaaattgtttctacattaattcctaagcatataaatgtgcaaatgtggcaacaacttcttgaatcatatagcagtgaagaagcagcaagaatgattgccatggataatgcaacagagaatgcaaaagaaataattaaagaattaaaattagaatttaacaaagctcgtcaggctgcaattacaactgagatgttggaaattgttggtggggcagaagcattagtcgattaag

SEQ ID NO: 270836 - DNA, 742 bp, Unknown
  Bacterial polypeptide expressing nucleotide sequence isolated from the Sargasso Sea
aatgttatcaatgaagaatatcagtaaagtttttaaaacggacttagtagaaacccacgcactgcgggatttcaaccttgaggtaaacgagggtgagtttgtggcggtcacaggcccttcgggttcaggcaaaaccaccttcttaaatatcgctggcttgctcgaaggcttcacccatggggattattttttagatgggattaatgtctccaacctcagtgataacaagagtgccgccgtacgcaatgagaagattggctttatcttccaaggttttaacttgatccccgatcttaacctcgcggaaaacattgaagtgccgctgcgctaccgtggttttagtgccaaggagcgtaaacgccgtgtggagcaagcattagagcaagtgggcttaggtgcgcggatgaagcatttgccgactcaattatccggcggtcaacagcaaagggtagcgattgcccgtgctttagcgggggaaccccgttttctgctcgccgacgaacctacgggtaacctcgacagcttaatggcccgccaagtgatggaattattagagaatattaaccaatctggcaccaccatcatcatggtgacccacgatcctgaactggcccgccgtgcccagcgcaatattcaaattgtcgatggtcaagtctgcgactttaccatgtatcaacccaatgcggcccgcagtgcaagccatagcagtgtcgataaattggttgctaacgcccaaggctag

SEQ ID NO: 270837 - DNA, 1075 bp, Unknown
  Bacterial polypeptide expressing nucleotide sequence isolated from the Sargasso Sea
aatggcctctataacacttaaaaatatttccaaatcttttgctgacaatcaagtaataaagaatgttgacttagaaataaatgatggagaatttgttgtttttgtaggtccctctggatgcggaaagtcaacacttttgagaattatttcaggacttgaagacttaaatgagggtaatatttttatcgacagtgataatgttacagataagattccttatgatcgcgctctttcaatggtatttcaatcctatgctttatacccccatatgaatgtttttgaaaatattggattttctctaaaaacttctggaataaaaaaggatattttgagtaaaaaggttgtagaaatagcaaaaatcctacgacttgaagatcttttaaatagattacctaaacaattatctggtggacaaaagcaaagagtggcgattggaagggcaattattagagaaccaaaagcattcttgtttgatgaacctctttctaatcttgatgcaactcttagagtagaaatgcgtttagagatctctagacttcataaaaaacttggtatcacctcaatttatgttacccatgatcaagttgaagcaatgacacttgcagataaaattgttgttctaaatgaaggtcaaataattcaaactggaactccatatgaactttataattatccaaaaaatctatttgtagctggatttattggcacaccaaaaatgaatattttagattgttatcaaaggggtggtttcatctatttggtaggtaataaagacaaaaaaattaacataaaaacaaaattaatggatgtaaaaaagattggttttagggctgataatgttattttatctgatccaaacaaaaatactttgctgggcgagattaaattttgtgaatacctaggatcagaacagtttgtttatgtagattgtgatataaatgataaacttattgtaataaagataagcccaaaaataaaagttgtccttaacaataaagttgggctaaaatttacttcagaaaatacatatttcttttctcaaaatggtaataggattaataaaaatttaaattaa

SEQ ID NO: 270838 - DNA, 742 bp, Unknown
  Bacterial polypeptide expressing nucleotide sequence isolated from the Sargasso Sea
atgttatcaatgaagaatatcagcaaggtttttaaaacggacttagtggaaacccacgcgctacgggattttaaccttgaggtgaatgagggggagtttgtggcggttacgggtccttcgggctcaggtaaaaccaccttcttaaatatcgctggcttgctcgaaggcttcacccatggggattattttttagatgggattaatgtctccaacctcagtgataacaagagtgccgccgtacgcaacgagaagattggctttatcttccaaggctttaacttgatccccgatcttaacctcgcggaaaatattgaagtgccgctgcgctaccgtggttttagtgccaaggagcgcaaacgccgtgtggagcaagcattagagcaagtgggcttaggtgcgcggatgaagcatttgccgacccaattatccggcggtcaacagcaaagggtggcgattgcccgcgctttagcgggggaacctcgttttctgctcgccgacgaacctacgggtaacctcgacagtttaatggcccgccaagtgatggaattattggagaatattaaccaatctggcaccacgatcatcatggtgacccacgatcctgaactggctcgccgagcccaacgcaatatccaaattgtcgatggtcaagtctgcgactttaccatgtatcaacctaatgcggcccgcagtgcaagccacggtagtgtcgataaactggttgctaacgcccaaggctagg

SEQ ID NO: 270839 - DNA, 1021 bp, Unknown
  Bacterial polypeptide expressing nucleotide sequence isolated from the Sargasso Sea
gatgaacgcagtattcgaacctcggcgccagtcggaccatgcgggcgatcacgtgctggttgccgacaagctggcgcggtactacacggtcaaacgcgggctgttcgcgtccggcacggtgaaggcgctcaacggggtttcgttcgcactcgagcgcggcaagaccctggcggtggtcggtgaatccggctgcggcaaatcgacgctcgcgcggcaactcaccatgatcgaggcgcccagcgcgggccgcctgctgatcgacggtgaagacgtggccggcgccgatcacgcgaagatcgccgcgctgcggcggcgcgtgcagatggtgtttcagaatccgtttgcttcgctgaatccacgcaagactgtcgagcagacgctcggtgaaccgctcgcgatcaacacgcaactgagttcgaccgagcgcgccgaacggatcgcgcagatgatgcgcacggtcggcctgcgtccggagcatgcaaagcgttatccgcacatgttttcgggcggtcagcgtcagcgcgtggcgattgcgcgcgcgatgattctcgatccgcagatcgtggtcgccgatgaaccggtgtccgcgctcgacgtgtcgatccaggcgcagattctcaatctgttcatggatctgcaggagcagttcaagaccagctacgtgttcatctcgcacaatctgtcggtggtggagcacatcgccgacgatgtaatggtgatgtacttcggcggcgtggcggagctcggcgacaagaagcggattttctcgaacccgcgtcatccgtacacgcgtgcgctgatgtcggccacgccttcgatcttcgaagcggatcgcaccatcaagatcaagctgcaaggcgaaatgccttcgccgctgcatccgccgtcgggctgcacgttccatcagcgctgcccgtacgtgatcgaccggtgtcgcagcgaagaaccgaagttgcgtgaagtggatggccgtcaggtgtcgtgtcaccgtgccgaggaggtgggggacgtggatgcctga

SEQ ID NO: 270840 - DNA, 760 bp, Unknown
  Bacterial polypeptide expressing nucleotide sequence isolated from the Sargasso Sea
atgagagacgtgtttggacatggagtttatccatgtcatttagaatcaatagcgagaatctcaatgcaagacgtgttactgcaagtgcaggcggtgagtaagagttatcacgatggcgatgtgaccactcaggtgttgtctgaggtggatttacaggtatttaagggcgagcaactggcgattgtcggtacctctggctcgggcaagagtacgctgctgcatattatgggcaccttagataaaccctccgcgggcaaagtcttgttagcgggtgaggatttatatcaggtgagcagtgcccgtcaggcgcagatccgcaaccaagatttaggttttatttatcagttccatcaccttttgcccgaatttagcgcactggaaaacgtggctatgccggcgtttattcaaggcagagaccgcgctcaggctcaggctgatgccaaagtgttgctcgagagagtagggcttgggcacagaatgagccatattcccgccgagctttcgggcggtgagcgtcaacgggtggcaattgctcgggcgctgatcaacaaacccaaactcgtgctggccgatgaaccaacgggaaacctcgatgccaagagtggcgaggcggtctatgagctgatccgcgaattagccaatcaactcggaacggcgtttgtggtggtgacccacgatcctaaattggcggcgcggatggacagacaactcaccatgaagaatggttatctgcaagctgtcgcggaacacgcccaatgaa

SEQ ID NO: 270841 - DNA, 3442 bp, Unknown
  Bacterial polypeptide expressing nucleotide sequence isolated from the Sargasso Sea
ctgccggaagacaggcgcgatgaccgtgccgacgccttcctcgcactcaccgccgcccagccggtgcgcccctggcccatcaccgccttcatctggcgccattaccgcgggcgcattggcctgctcaccctgctgcaaatgctcggcatgctggcgaccctggccagcccctggctgctcaaccacagcatgacccagctcggtgccggcgcccccacggagcagaaattgctgctggcgttcgccctgtttgcctcggtgctcgcctccggcatgctggcggagcactcgctgcagctggcactcaagatgcacgtgcccatccgccgcctgctggccgagtccctgctcgccaaggtgatgaagctgggtggcaagagcttcgacgaccgggccggtggccgggtgcagaacctcatcaaccgggacgtgtgggacatcacctggattcttgcggaccccgccatgccgctcaccatgctgctgcaactgctcggcaccatcgccctgctggtgtggcaggtgggcagcgccggcctggtcggctttgctgtgctcaccctgctgctgcttatctccacccgggtggtgcgacgcatgaaccagcaggagcagcagctcaagcgtcagcaggacgagcgcaacggcatcctggcggagtacatcaagaagctgcggctggtgcgccagaacgggctcggcgccttcttcacccgggccgccggccacaagcgccagcaggagctgggggtgctggggcgggtgctcaggctcgatgccatcaacgagagcctgatgttgagcaccccgctgctggtgaccctggccaccttcaccacctatctggtctcgggcagagaactcaccctgccccaggtgttcaccaccatcgccctgttcaccgtgctgcgcatccccatgatgcggctgccctacctcatccgcaccctgatcaacttcaacaccggcttcaaccggttgtgcgagtttctcaacagccccgagcagcatcgggatctcaccgatcccagcttgccggtgggcggcctgcggctcgacaacgtcaccgccctgcaccagcaaaaaccggtgctggaggggatcagtctgcacatccagccgggagaactggtggggatcaccggcgctaccggggcgggcaagagctgcctgctgcacctcatcgccggtttcgacaacggcttcgagggtagcatccgtcgccacggccgggtcgcccatctgggccacaagccctggctgatgaacgacaccatccgcaacaacatcctgttcggtcagccctggcatggcgagcgctatcgctgggtgctgggggcctgtgcgctgggcgccgacctcaccctgctcagccacggcgatcagaccctggtgggcgagctcggcacccgcctctccggcggccagcaacagcgggtcgcgctggcccgcgccctctacgcccaggccgacatcctgctgctggacaacccgctctcggcgctcgaccccatcgtctcggcccaggtgctggaacaggggctcgccttcaagccggggccgacccggctgctggtgagccacgatccggacgtgctggcccactgcgatcgggtgatccgcatcgagcagggccgactggtggagctcgatgcccaccagctggcggatctcatccagcatccccgccccaccccgccggtgccgcctcaggaggcggagcagttcagcgaggagaaggtggtggagggcaaggtggattgggggctgttcggcttcatgtggcagcgtctggccgcccccggcgccatcctgctcgccctgttgctcaccctgggccaggaggggctgcgcatcgcctcggatctctggctcggcggcaaggccggggtgaccggagtgagcgagctgctcggcatctatgtgctgctgggggcaggctctctcacctgcatcatggtggtgcgggtcatcaactacaaactcggcctcaagctggcctggaccctgtttgacggtatgctggggcgcatcagccgcgcccccatggccttcttcgacaaggtgccgcaggggcgcatcctcaaccgcttcgatcgggatctgggggaagcccaggagatcctgctgtcgatgctgatggggctgttcggcatgctggtgtcggtggcgctgcaggtggtggtgatcggtgtcaacatgccgctgttgctgctcatcgcccccctggtgggctgggccctctacgtgctgcagcgccgctaccgggcggtgcagctcaagctgcgacgacaggcgtcggtgctgcgctcgccactctacatcagcatcagcgagaccatccgaggcgcccccgccctgcgcctggccggggccgagcgtttcgcgctggatcaggtgctgctgcactatgacaacaacctgcgcagctggtacaccaccacctccatcaaccgctggctcggcatgcaccagaccctgctctccgccgctctggtgggcgccgtggcgctgatggtggcctttggcaacagctcgctgctgggggccgtggccatcacctacgcctttaccgcctccgccatgctcaactccctcatccgcaccttcgccgaggtggagcaggtgatgaacgcggtggagcgggtgcgcgaatacagcgaaattgagagcgagcgtcaggaaggggaggccctcgccaccgctcaccctgcggtgcgtttcgacaacctggggctgcgctatccacaggccagccagtgggcgctgcacaaggtcaacttcgagctggcccccggcgagaaggtcggcgtgtgcggccgcaccggcgccggcaagagctcgctgctgggggtgctgcaggccatgtaccctgcctcccagggggagatctactacggcgagcagccgctgtcccggctggcaccggaggcggtgcgcgatctctacgacaccgtctcccagatcccgctcaccttcttcggtaccctgcgtgccaatctggctcccctgaccgagcacgacgacgcggcactggagcaggcgctggcccgggtcgggctggccgagcgcagcgccggccggctggacgaggagctcgacaagctgcagctctccgccggcgagacccagttgctggtgatcgcccgcatcctgctgtcgcgccgcccgctcatcgtgctggacgaggccacctcggatctcgatcacatcggcatgcgcaagatggcggagctgctctatcgctaccggccggaagccagctatctggtgatcgcccaccatctggaaccgctgctgtcggtggaccgggtggtggtgatggaggccggcaccgtggtggaacagggctcgccggtgagcctgctggccaactcccactcccgcttccaccagctgttcgtgggtcaggtgaaccgccaggtgccccagacggcgtgag

SEQ ID NO: 270842 - DNA, 697 bp, Unknown
  Bacterial polypeptide expressing nucleotide sequence isolated from the Sargasso Sea
tatgcaggaatacgtgcttcaggcgcgcgggatcacgaaggcgttcgtgcagggcggcttcaacgtgcaggtgctcaacaataccgagctgacggtgcggcgcggcgagaagctcgcggtcgtcggcgcgtcgggttccggcaagagcacgctgctgcacgtgctgggcgggctcgacgagccaagtgcgggcgaggtgtcgctgctcggcaagccgttcacgcaactcgccgagcgcgagcgcaacgaactgcgcaaccgtgcgctcggtttcgtctaccagttccatcacctgctgcccgagttcaccgcgctcgacaacgtcgcgatgccgctgcgcattcgccggatgacgaccgaggacgcgcgcgagcaggcccgggcgatgctcgagcgcgtcggtctcggcccgcgtgcgaagcaccggccgggcgagctgtcgggcggcgagcggcagcgcgtggcgatcgcgcgcgcgctggtcacgaagcccgcgtgcgtgctcgccgacgagccgaccggcaacctcgacggcacgacggccgatacggtgttcaacctgatgctcgagttgtccgagacgctcgaaacgagcttcgtgatcgtcacgcacgatcccgatctcgccgcgcgctgcgaccgcatcatgcggctgcgcgacggcgtgctgcacgaggagccggcgctgccggtgtga

SEQ ID NO: 270843 - DNA, 1075 bp, Unknown
  Bacterial polypeptide expressing nucleotide sequence isolated from the Sargasso Sea
tatgtctaaaatagatttaaataatatttcccatacatataatcctaatgatccagaacctacttatgcattaaaccctttttcaatgacttgggaaaatggaaaaagatacgcaatattgggaccttcaggatgtggaaaaactacaatgttaaatattgtatctggactagtaagaccctctgcgggaagtattttatttgatgataaagatgttacagatcttaaaactgaggatagaaatattgctcaagtttttcagtttccagttatttataataccatgacagtctttgaaaatttagcatttcctttaatatgtagagattttaaaaaagaaaaaattaatgaaagagtcaattcagttgcagaaactttaaatttacaatcttttcttaaatctcctgctagaaaacttactgcagatcaaaaacaattaatttcacttggacgaggtttagtgagagaagatgttgctgcagttctaatggatgaaccattaacagttattgatcctgatttgaaatttagactaagaagaaagttaaaagagattaatgaagaatttaaaactaccctagtttatgtcacgcatgatcaaaacgaggcgatgacttttgccgataatattattgttatgagtgatggcgaggttgttcaagcaggaactcctaaggaattatttgagagaccaaacactacatttgttggatattttattggttcaccggcaatgaatttattcgaaacagaagcatcatcaaatgattgtgttaaaatcaatggaactttgattaaaacaaccactaatttgtcaaaacttaaagataaaaaaattaagttaggtattagatctgagtttattaatttagctgaggatcagaaagataatttgctatctgttgaagttgataaggtagaagaccttggaaattttaagttattaaccgctaaaatgggtgaacttacaataaaatcaaaaattaacagagaaacagaggttccttctagtgatgtaaaattacacataccagctgataaatgctgcatttacgagaacgaaattcttatttaa

SEQ ID NO: 270844 - DNA, 1834 bp, Unknown
  Bacterial polypeptide expressing nucleotide sequence isolated from the Sargasso Sea
tttggaatctctcacccctgcccagcgcaacgcccacaacgcgaagctgtcgagctacgcgcatcgaccgattgcgttcctgttccgctacatccgcctgcatcctgtcgcccacctgatcgtgctctgcagcgtgctggccgccgtcggctgcgcgctcggctcgcaatacgcgatcaagcacctgatcgacgtgctggcgaccgggcggcatcaccccggcccgctgtggagcgcattcgcgctgctcgtcgggctgatcgcggccgacaacctgctgtggcgcgtcggcggctggttcgccgcgcacacgttcgtcgcggtcaccggcgatctgcggcgcgacctgttccagtacctgatcggccattcgcccacctactacgcggaaaagcagcccggcacgctcgcgagccgcatcacggccacgtcgaacgccgtctacacgtcggagaacacgatggcgtggaacgtgctgccgccgtgcatcgcggtgatgggcgcgatcctgatgatcatcgtcgtcaatccgatgatggccgccggcctgctcggctgctccgcagtgctctccgtcgtgctgttcaagctggccgggcgcggctcggcgcgccaccacgcgtttgcggcgaaggctgcggcggtcgacggcgagctcgtcgacgtgatcggcaacatgggcctcgtgcgcgcgttcgggatgacgctgcgcgaacagaagcgcttcggcgcaacggtcaaggccgagatggatgcgcgccagcagagcctgctctatctcgagaagctgcgcctgctgcacgcggtgatcaccgcgatgctgtccgccggcctgctcggctgggccctgtggctgtgggaccagggccgcgcgacgtcgggcgacatcgtgctcgtcagctcgctcggcttcacgatcctgcacggcacgcgcgatctcgcggtcgcgctcgtcgacgtcacgcagcacatcgcgcgcctgtccgaagcggtgaaaacgctgctcgagccgcacgggatgcctgaccgctccgacgcgcaaccgctgtcggccaagggcggccgcgtcgatttcgagcgcgtgacgttcgcgtatccgcaccgccgcgcgatcctcgaccacttcgacctccatatcgagccgggccagcgcgtcggcctgatcggcaagtcgggcgccggcaagtcgaccgtgctcgcgctgctgcagcgcttctacgacacgcaggacggcgccgtgaaggtcgacggccaggacgtgaagacgatcacgcaggacagcctgcgccaggcgatcgcgctcgtgccgcaggacatctcgctgctgcaccggacgatctacgacaatatcgcgtacggtcgccccgaagcgacccgtgacgaagtgctcgccgccgcgcgcgacgcccgctgcgcggaattcatcgaagcgatgccggaaggctatgacacgatcgtcggcgaccgcggcgtcaagctgtcgggcggccagcgccagcgtatcgcgatcgcgcgcgcgatcctgaaggatgcgccgatcctgctgctcgacgaagcgacgtccgcactcgacagcgcgtccgaggaagcgatccagagcgcgctcgaccgcctgatggtcggccgcacggtgatcgcgatcgcccaccgcctgtcgacgctgcgcaacttcgaccggatcatcgtgatgaacaacggcaaggtgatcgacgacggcgcgcccgacgtgctgcgcaaccgccccggcctgtaccgcgacctgctcgccaaacagcacggccgccaccacccggcccccgacggcagcacgccgaccggcgaacgcgtggcctga

SEQ ID NO: 270845 - DNA, 1627 bp, Unknown
  Bacterial polypeptide expressing nucleotide sequence isolated from the Sargasso Sea
ctggtgggacggcctgtccgtgatgcgcgaatacgcggtgcgcagcgacgacttctggatcgaggcgatccggcacgtgtcgctcaccggtgcctcggtggctgccgcgctcgtcgcgggcgtgccgctcggcatcgcctgcgcgcgcatcgcggcggtgcgtaccgtcgcgatgcccgtgctcaatatcgtgcagacgatccccagcatcgcgatgtacgggctgatgatggcgccgctcggtttgctcgccgcgcacgtgccgctcgcggccgcgctcggcatccgcggcatcggcgtggcgcctgccgtgctcgcgctgttcctgtattcgctgctgccgatcgcgtcgagcgtcgtggtcgggctcggccaggtgccgccgcacgtgaccgaagcggcgcgcgcgatgggcatgacgcgcgtgcagcggttgctgcgcgtcgatctcgtgctcgcgctgccggtgatcctgagcggcgtgcgcatcgtgctcgtgcagaacatcggattgaccgcggtcgccgcgctgatcggcggcggcggcttcggcaccttcatcttccaggggatcgggcagtcggccgccgatctcgtgctgctcggcgcgatcccgacgatcgcgctcgcgctggtggcggccgtcatattcgaagccgcgaccacgctcgcgaaggggcgtgcaggatgatcgagatcgaacgtgcgggcaaacgcttcggcgatatcgttgccgtcgacgacgtcacgctgacgatgaaacgcggcacgatcaccgcgctcgtcggcgcatcgggcagcggcaagtcgacgctgctgcgcatgatcaaccggctgatcgcgcccaccagcggcacgatccgcatcgacggcgtcgatacggccaccgttgcgcccgagcagctgcggcgcggcatcggctatgcgatccaggggcacgggctgtttccgcactggagcgtcgcgcgcaacatcgcgaccgtgccgcgcctgctcggctggccggccgaccgcatcgacgcgcgcgtgagcgaattgctcgacctgtttcatctcccgccggccgagttcgcggacaagctgccgcacgaactgtcgggcggccagcaacagcgcgtcggcgttgcgcgcgcgctcgcggccgagcccgcgatgctgctgatggacgagccgttcggcgcgctcgatccgatcatccgcaacaaggcgcaggacgacctgtttgcattgcagcgccgcctcggcatcacggtcgtgatcgtcacgcacgatatcgaggaagcgctgaagctcggcgacacgatcgcggtgatggacggcggccggctgctgcaggtcgcaacgcctgccgagattctcggcaagccggcagccggcgtcgtcgaacagctggtcgccggcgtcgaccggccgctgcgcctgctcgcgctgacaccgatcgacgcggtggccgaacccggtcatgccgacggcgaaccgatcgccgcgacacgcacgctgcgcgatgcggtgtcggagctgctgtggcgcggtgtcgatgcgcttccggtcgacgatggcgacggccgcaacccgcgccgcatcacgctcgacgcgatccgtgcacacgcaaggaagcccgcatgac

SEQ ID NO: 270846 - DNA, 892 bp, Unknown
  Bacterial polypeptide expressing nucleotide sequence isolated from the Sargasso Sea
acggcttcacctcaagctccaggaaggccttgcggccatcaaaaggattttcgagatcatggacacggagccggatatcgtctccaaacccgacgccaagcccttcaaatcctttgaaaaatcaattgaactcaaggtcagtgcttttcactatccggagcagccggaggccaccctggaagacatccaactcaaggtgaagaaaggggaagccgtcgccctggtcggcagcagcggagccggaaagacgactcttgccaacctgattcccaggttcttcgatgtcacccggggagaggtcctgatcgatggggtcaacgtgaaagactatgacctccaagccatgcgcagccagatcgctatcgtcacccaagacaccatcctcttcaacgacagcgtggcgaacaacatcatttatggacagcccgactgctccaaggagcgcatgtatgccgctgccagggccgccaatgcccatgaatttgtaagccagcttaccgacggctacgatactttgatcggggaaaaaggcgtcaaactctcaggcggtcagagacagcgtctctcgattgcccgtgccctggtcaaagactcccccatcctcatcctcgatgaggccacctccgccctcgattccgagtcagaaatcgaggtccagcaggccatcgaaaacttgatggaaaaccgcaccaccatggtcatcgcccaccggctctctaccatccgaaacgccgaccggatctgtgttatggaagaaggaaggattgttgaggaaggaacccacgaggagctcctgctcctggaaggacgctacagccagcttcatgccctccagttccgcagcgaaaccgaagaagaattgggcctttcaggaagttatctcgtttcctaa

SEQ ID NO: 270847 - DNA, 859 bp, Unknown
  Bacterial polypeptide expressing nucleotide sequence isolated from the Sargasso Sea
aagcagctagctaacgttaatagtgatatgcagcgtggtatttctgcggcgcaaagtatatttttaatacttgacgaaaatatagaaaaagatataggcacagtatctgtaacaaaagccaaaggtttaattgaggtcaaaaatgtgacctttaaatatcccacaaaagatgagcctgtattaaataacttaacacttacaattcaagcaggtgagagtattgcgttagttgggcgttcgggctcaggtaaatcaacaatttctaatttattaccacgttactatgatttagatttaccaagtcaaatactgttagatggtattcctttaaatgattataagcttacagatttgcgacgccaatttgcgctagtatcgcaacaggttgtgctgtttaacgacactatagctaacaatatatgttatggaattcagcgagacattacagatgctgagctattagaggtagctaagcaggcccacgtgtgggagtttgtaaaagacctacctgaaaagctaaataccatggtaggtgaaaacggagtgatgctctctggtggtcaacgtcaacgcattgctatagccagagctattttaaaagatgcccctattttaatattagatgaggcaacatctgcattagatacagagtctgaaaaactgattcaacatgcgcttgatgacttaatgaaagataaaacatcaattgtcattgcacatcgattatctacaattgaaaatagcgataaaatttacgttatcgataatggccgtgttattgaaagtggcgatcacaccagcttactttcaaacgatggaacttattcagcgttgtgtaaaatgcagtttggcgagtaac

SEQ ID NO: 270848 - DNA, 1597 bp, Unknown
  Bacterial polypeptide expressing nucleotide sequence isolated from the Sargasso Sea
atgttcatttcaaggtgatattcttgaaacatataaacttgctacaggtcctattcgttttaataatataaatcttaatagcaatattatgcattttagagatgaatctctaggtagcaataattgggcagtttcaccaaaaagaacaaaaacaaaatcagccatattagcaaatgatcctcacagaactcatgcagttccttcattaagatatatttcccacttaaatggacccggtataaatgtgattggagcaggtgagcctgccctccccggcatttctattggtcataatgacaatattgcatttgggttaacaatttttgcgatcgatcaggaagatctttattactatgatattgatgataaaaacccaaatcattacaaatacaaaggtcaatatgaagtaattagttctattacagaggaaatattagttagagatcaagaccctgagattgttaaattagaattcacacgccatggaccgattattaaacgtgataaaaatagaatatatgcactaagagcagcttggcttgatgaaggcatggcaccctattttggcagtgttgaatatatgcgttcgaacaattggagagaatttcttgcggctttgaataggtggggagctcctgctgaaaatcaagtatatgcagataaagaagggaatataggatacaagccggctggtttatttccaaaacgcattggttttgatgggttattgccagtatctggacatggtgattatgaatggaacggctactttgatatggatgttttgcctgaagaatacaatccagatcgtggttatgtctttactgctaatggtatgaatcttccagatgattatccaattgatgattatcctctcggttttgagtggtcagcaccttggcggcatcaaagaattgataaggtgctcaacatacaagaaaatcatagttttgacgattcattagatctacaacgcgattatcactctgttttggctgaaaaattaatacaaaaattaccaagtacagcacctgacaatattaaatctttttttagtaaatggaacggatatatggccagagatagtaaggaagcagctttatttgctatttggtattacaggcatctaaatccagcgctcacagaagctatatttggtaatcagtcactaataaattcaattgattcatatactgttctcgatctaattgatgataaggcttatgaaggtgttgttttaacctcactcgaaacatcatttaatgaagcaaagcatcttttaggtgaagatagcaataactggaaatggggagatcttcataagactaattttaaccacccattattggataacaagaacaatatttatgccaatatcatgaaaataaataattacagtcgaggtggtacaggaaatacaccaaatagtacatctttctctccagatgactttcttgtgcgttctggcggttcatggagatttgtcgttgatacgaataattggaatggagctagaatgacgaatgcaccaggacagtcaggtgatccgaggagtaaattttatgataatctcgttgaaggctgggctaacgaaaaa

SEQ ID NO: 270849 - DNA, 594 bp, Unknown
  Bacterial polypeptide expressing nucleotide sequence isolated from the Sargasso Sea
ggcaaaaacagcgtgtaggaattgcccgcgcgctggcgaacaatccggatgtcctgctgtgtgacgaagccacctcggcgctggatccgcaaactaccgatcagatactcgatttactcctcgatattaaccgtcgcttcaaattgaccattgtgctgatcactcatgaaatgcacgtggtacgtaaaatctgcgatcgcgtggcggtaatggaaaatggcaaagttgttgaggaaggtgacgtactcagcgtctttacccatccacagcagccgatcacccgacagttcgttcgtcaggtgagccagtacaccgaggaagacgagtttaatccgcagttggcaagcgagcttggcggcgtagttatcaaacttacgtttaccgggcaacgcacgcaccggcctgtggttggcgagttgaccctgcgctatggcctgccattcaatatcttacacggcaaaatgacgcaaaccgcacacggtgtgtttggtcaactttgggtgcacgtggtggcctctgaggaacaattgaacaatattttggccgacctgcgccagagcgacattgaaggcgaggtgattcaacatggctgaa

SEQ ID NO: 270850 - DNA, 346 bp, Unknown
  Bacterial polypeptide expressing nucleotide sequence isolated from the Sargasso Sea
aatgtctgaagtagaatatataaatattaaaaaaaactttggttctgtagaggtacttaaagatataaatctaaatattggtaatcaaaaatttgttgttttgcttggcccttcagggtgtggaaagactactttactgagaatgaccgctggattagaaactatatctagtggggaaatttcaataggtggagacattattaataacatccacccaagagatagagatatagcaatggtttttcaaaactacgctttataccctcaaatgaatgtctttgataatattgcattcagtttacagataagaaaaatggctagccaagagataaaagaaaaagttgag

SEQ ID NO: 270851 - DNA, 661 bp, Unknown
  Bacterial polypeptide expressing nucleotide sequence isolated from the Sargasso Sea
gctgtcagtgggacaaaggcaaagggtagctatgggcagagcattagtaagagacccaaaggtatttttgttcgatgagcctttgtcaaatctggatgcaaaattaagagcccatatgagattggaaattagaaaattacataatcaacaaaatgctaccactatttatgtaactcatgatcaaattgaggctatgactatggctgacgagatagtgatcatgaacaatggtattattgaacaaatagcaactccaaatgaaatttatgaaaaaccaaataatttatttgttgccgattttattggcactcctgcaattaatcttcttgagggagttgtaacagataagagtagtattaaattaaagtcacaggacctacctcactcaaaaacaaatgtatcaaataatcaaaatgtagtttatggcataagacctactgacgtgagcatagatccaagctcaaatataaaagcagaggtagttttagttgaaacaactggttcagagactcatataatagcaatgttagatgataatgaatttagagtagttcaaaatggtggacgtaccacaattaaaaatggtgatgtcattcctctttcaatcaatattgaaaaagcacatttatttgatcattcatcatccaaaagaatagattaa

SEQ ID NO: 270852 - DNA, 1313 bp, Unknown
  Bacterial polypeptide expressing nucleotide sequence isolated from the Sargasso Sea
aaaaatttatcagttgattttaggcaaggaaaacttgaatacaatgccgtttctaatgcctcgctggatttattccaaggtgagacccttgctctggtgggagaaagtggttctgggaaatctgtaacagcacattctattcttagactattgccattttctgcatctcatccaaacggggaaattatatttgaaggagaaaatttacttcaattagctgattctaagataagaagtattagggggaataggattggtatgattttccaggaacctatgagttcactaaaccctttacacacaattgaaaaacaaattaaagaagttttatttattcatcagggactaggacacaaaaaggcacaagaaaggacaattgaacttttgaaaatggttgaaattcaaaatccagaaaaacgtcttggtgcattccctcatgaattaagtggaggtcaaagacaaagagttatgattgcaatggccttggcaaatcatcctgatatcttaatcgctgacgaaccaactactgcactggatgtaactgtgcaagcacaagttctcaaacttcttgatcaaattcaggaacagtttaagatggccatcattttgatcactcacgatcttggacttgttcggaaacatgcaaacagagtagctgtcatgactcagggcaagataattgagactagcaataccgaatctatctttctgaaacctaaacatcaatacacaaaaaaattattggattcagagccaagtggtattcctgttcccatctcaaattcggaaaaaacatttgtcaaatctaagaatttaaaagtctggttcccaattaaaaaaggtatactgaaaagaacatttgaccatgttaaagcagtggatggtgtcagtttaaatatccggaaaggtcattgtctggggattgttggggaaagtggatctggaaaaaccaccctgggacttgcattgcttagacttgttaaaagtgagggagaaatacaatttggtgatacactaatcaacagtctcaatcaaaagcaaataacaccgctacgtagaacaatgcaaattgtttttcaggatccatttggtagtttgagcccacgcatgactgtggaacagattgttgcggaaggacttgaaattcataatattaataatcataaggatcataaaaatctaattatacaggctcttcaagaagttgatctagatcctgattcaaggaatcgttatccccacgaattttccggaggacaacgacagcgtattgcaattgcacgtgcacttgttttaaaacccagctttcttgt

SEQ ID NO: 270853 - DNA, 319 bp, Unknown
  Bacterial polypeptide expressing nucleotide sequence isolated from the Sargasso Sea
tttggataacatcgtcggagagagaggtattcgtctttctggaggacagcgtcaacggatcgccttggcccgagcgttttatcatagacggaatgtgctggtgatggatgaagcaacaagtgctttagacaataaaaccgaggaagagattgtggatcaaatcaggcgcttgaaaggtcaaataacgacgatcattattgcgcatcggcactcaacggtagaacattgtgacaagatctatcgtttagaacagggaaagcttgtacaagagggctcccctcataatgtcttaactgaattccatcgtgcaaaaaattaa

SEQ ID NO: 270854 - DNA, 1091 bp, Unknown
  Bacterial polypeptide expressing nucleotide sequence isolated from the Sargasso Sea
catagcggatgagccaaccactgcgctcgacgtcaccatccaaaaacagatattagaactgttaaaagatatccagaaaaaactgaacatgtcgctcctcttaattacccatgatctcaccgtggttcggtcattagccaatagaatctgcgtcatgacaaaaggagacatagtcgagcagggacccgcaacagagatatttgagacgccgaagcatgactacactaaacacttactggctgcggagtttctcgagttgccaccagcggcgaaagaagacgctccaattgtcgcggacataaaaaacctccaggtccgctaccccaaaggtcgtcactggtttggcaagcaggagtatctcgatgcggtcaaaggtatttcaatgcaaatacgtcagggtcacacggtggggatcgttggagaatcaggttctggcaaaacgactcttggccttgccttacttagaatgattaattccagcggagaaatatgggtcgacaacagagatctgcaatcactaaataaaaaggatatgaaaccactgcggcgggatctgcaaattgtctttcaagacccatatggcagtctatctccaagaatgaccgtcagccaaattgtaggagaagggctcagaatacacgaacctgaaatctcggaagcggaccgggaccaaaaagtactagaagcgattgttgaggtcggccttgaacccgacatgctacagagatacccgcacgaattttctggaggccagcgccaacgtatctctattgctagggctttagtcctcaagcccaagctaattgtgatggacgagccaacttccgctttagatgtctcagttcaagcacaaattgtagacttactcagagatgttcaacaaaaatacgaccttgtctacttgttcatcagtcacgacctgaaagttgtaaaggccttggctcatcacattgttgtcatgaaagaggggctggtcgtagagcaaggggaagcagcaaccatcttcgacagccctaaagacgtctatacgaaagagctacttaatgctgccttcatgccagaaacattaggcgagagtcagagcaattaga

SEQ ID NO: 270855 - DNA, 1786 bp, Unknown
  Bacterial polypeptide expressing nucleotide sequence isolated from the Sargasso Sea
acggacactcctcccagagaaatttcgaatttcttaaaggattatactaaacctttttattttctttttggagtaaccgcgttctttgcctttttactggcaacaattgaacttctactaatttatggcataggtcaaattgttgacctgatgcaaaatggatcgagacaagaaattttagacaatggtctctttattgcttttttcctaatcctagctggaattggaatgccgttaattgcatcaataaccgttctacttaataacaattcgctaatgccaaatatagcgacattatttcgttggagaggtcacaggcaggttatgcgccagtcggttgggtggtttgaaaacgactttgccggtcggattgccaacagagtcatgcagacccctcggtcagccggtgaagtaatttatcatgtttttgatgcgtttagctatattatcgcttacctggtaggagcattgtttttactattaaacgcagaaatggaactcattattccacttttactttggatgttttcatacggatatttgatagtttttgtggtaaagcgcattcaaccagcctcacaggctgctgcagatgctcgatcaaatttaaacggttatattgtagacgcctacacaaatatccaatctgtaaaattattctctaacgaacaaaaagaactcgaatatgccagagaagctatcacagacacccgaaataccattataaaagaattgagattatattctataatggatatttcactctcctttttaaatggtattttgaccgctggaacaataggttgggccatatggctttggtattcaggccaaacgtcagtgggtgtagtagcagccgcagccactttagtactacgaataagcgcaatgtccggatggataatgtgggctgcttctactttcttccgcgaattgggtgttatccgagaagggctagagacgataaccgaaaaagttgaactagttgatcatgaaaaagctgaccagctgaacctaggtcatgcaaaaatagaagtccaaaatctatatcatcattacggtaaagactttggtggtcttgataatctaaatataaaaattcctgctggacagaaagtcggtttagttggaccctcaggggctggcaagtcaactctttttaagttgcttttgcgtttctatgatgtcgaaaagggaaaaatactaatagatgaccaaaacatttcactcataaagcaggaaagtctgaggcatcatattggaacaatacagcaagacagtagccttttacatcgaagtattagagaaaatataagctatggaaagccagatgcgacagaggaagaaattattaatgctgcgaaaaaagcacgcgcccacgaatttatcattaacttaagagatactgatggcaatcaaggctactcctctaaagttggtgagcgtggggttaaattatccggaggccaaaggcaacgaattgcactcgctcgtgtcattttaaaggatgcgccaattttgcttatggacgaagccacaagtgcgctagatagcgatatagaagctgctattaaagaaactttttcgtatttaatggaggggaaaactgtgatcgcaatagcacatcggctttcaacaattgtcaatatggatcgtatacttgttatgaataatggacgcattatcgaggatggctctcacactgacctattaacaaataacggtctatatgccaaattgtgggcacagcagtctggtggattcatacaaacgactgttaaatgat

SEQ ID NO: 270856 - DNA, 1476 bp, Unknown
  Bacterial polypeptide expressing nucleotide sequence isolated from the Sargasso Sea
gcggccactcgccgacctactactcggaaaagcagcccggtatgctggcgagccgcatcacggcaacgtcgaacgcggtctacaccgccgaaaacaccaccgcctggaacgtgttgcccccgtgtatcgcggtgctcggcgcgatcgtcatgatcatcgcggtgaatccgctgatggcgggcggcctgatgctgtgctcggccatcctgtcggtcgtgctttacaagctggcggggcgcggctcggcgcggcatcatcatttcgccaccaaggcagcgtcggtggacggtgagctggtcgacgtcatcagcaacatgggcctcgtgcgcgccttcggcatgacgtttcgcgagcagcagcgtttcggcgcgaccgtcaaggcggaaatggaagcccgccagcagagcctgctttatctggaaaagctgcgcctgctgcatgcggtgatcaccgccctgctctccgccggtttgctgggctgggcgctgtggctgtgggatcaaggcaaggcgacctccggcgacatcgtgctggtcagctcgctcggtttcacgatcctgcacggcacgcgcgacctggccgtggcgctggtcgacgtcacccagcacgtcgcgcggctcgcggaagccgtgcgcaccctgctcgagccacacggcatgccggaccgcgacggcgctaccgaactcgtgccgcaaggcggccgggtcgatttcgaaagcgtgacgtttgcctatccgcgccgccgaccgattctcgatcacttcgatctgcatatcgagccgggccagcgggttggcctgatcggcaagtcgggcgcgggcaaatccaccgtgctggcgctgctgcaacgcttctatgagacgcagggcggcgccatcaagatcgacggccaggacatcgccaccatcacccaggacagcctgcgccatgcaatcgcgctggtaccgcaggatatctcgctgttccaccgcacggtgtacgagaacattgcttatggccgcccggacgcgagccgtgaggaagtgatcgccgccgcgcgtgaagcccgctgcagcgatttcatcgacgccatgccggagggattcgacacgatcgtcggcgaccgcggcgtcaaactgtccggcggacaacgccagcgcatcgcgattgcgcgcgcgattctgaagaatgcgccgatccttctgctcgacgaagccacctcggcgctagacagtgcatcggaagaggcgatccagaaggcgctcgaccggctgatggtgggccgcacggtgatcgcgattgcgcaccggctgtcgacgctgaacaacttcgaccggatcatcgtgatgagccagggcaaggtcatcgacgacggcagtccggaagagttgcgtctgcgacccggcctgtatcgcgatctgctctcgaagcagtatggcaagggcgcgacgctgcatgtcggcggcaagaaggtggacgagcagcacgtggtctgac

SEQ ID NO: 270857 - DNA, 1339 bp, Unknown
  Bacterial polypeptide expressing nucleotide sequence isolated from the Sargasso Sea
taaaaaatcaattcaactacttaaagaggttggaatagagaacgctgaaaaaagaatagaggactatccacaccaatttagtggcggtatgcgtcaaagagttgtgatagctttagcgataagttgtgaacctgacttaataattgcagatgaaccaacaacagctttggatgtaagtattcaatatcaaatattagaattactcaaagatcttacaaagaaaagaaatcttggtgttataattattacccatgatatgggagtcatagcagagacgactgataaagttatagtcatgagatatggacatattgttgaacaaggtgaaactaaagaattattaacaaatccaaaatcaacagaagcaagaagcttagtaatttcagtgccaccaacaaataagaaaattgatagatttaaattgattagcccagatggtaaggaaataacatctagttccagggatttgactcaaaatattattaaaacatggggcataagagaaaataaaaatcaaaaattattaaaacttgaagaagttacaaaaatttttgatgataattctttaggtagtggtttttcatttatttctaataaaagttcgaatgataaaatagttaaagctgttgataatgtatcttttgaattatttgaaggcgagacacttggattagttggagagtctggttcaggtaaatcaactattgcaaagattattactggattaattgctcctaacaaaggtgatttaatttataataatgaacctctatataattcaaataaaaaatatcaaattcataatagtagaggtcaaattcaaatgatttttcaagatccttactcatctctaaatcctcgttttaaagttaaggatattattgcagaaccaattaaattttttcaaaaaaatattagcaataatgaactttcacaaaatgtttatgacctaatagatattgtgggaatgaccagacaatctctagatcgatatccgcacgaattctcaggagggcaaaggcagagaatatccattgctcgtgccttggcaacaagaccaagattattaatatgtgatgaaccaacttctgcattagatgtaagtatacaagctcaaatattgaatttattaaaagatatacaagatgagcttcatctcactatgctattcattagccatgatcttcctgtaattcgccaaatgtgtaaccggataattgtactaaaaaatggtgctgtttgtgaaacaaaagatacagaggaattgtttaataatcctgagcatgaatatacgaaggaattaattagacttatgcctaaaattgaatcaattatttaa

SEQ ID NO: 270858 - DNA, 688 bp, Unknown
  Bacterial polypeptide expressing nucleotide sequence isolated from the Sargasso Sea
gtaatcgggatcgggaaatctacattagctaatcttatttctagattttattcggattacactggacagatattaatagatggaattccaaacaatgaatatgatttaagttttcttagaaaatccatatcaatagttactcagtcaccaactctatttaatgacactatagaaaggaatatagcctatggtgatgacgaatttgatactgagagagtaatggagtctgccagattggcaggatgtttagattttatagataaattaccagaaggcatgaattcagaaataggtgatgatggtgtactactgtcaggcggtcaaagacaacggcttgcaatagcaagagctttttataaaaattctccaattattatactggatgaggcaacgtctgctctagacactgaatcggaagaattagtgcaagagtcacttgaaaaattaatatccgatagaaccacgatagttatagctcatagattatcaaccattgaaaatgctgatcaaatagtagttctggataatggtcttatatcgcaacaaggaaaacattcagatttacttgaagacgagggcatatacgcctcactatataaaaatgttccaattgaaagtaagaaatcatcatctacatccttacaaaaagtttcatatttacagccaattgatgatgttagaaaataat

SEQ ID NO: 270859 - DNA, 1040 bp, Unknown
  Bacterial polypeptide expressing nucleotide sequence isolated from the Sargasso Sea
aaatataaataaatcttttggagaaaataaagtaattaataattttagtattaaaattgattcaggtgaatttgttgttttggttggaccatcaggatgtggaaagtcaactcttttaagaatggtatcaggattagaaacaattgatcaaggacaaattttattaaatgacaaaatattaaatgatttaatcccatcgaaacgagagatagcaatggtgtttcagtcttatgctctttatcctcatatgaatgtttatgaaaatatgtcatttggtttaaaaatggaaaataaaaataaaaactacattgatgaaaaagttaaagaagctgctaaaatgcttcaaattgaagacttgttagaaagaaaaccaaaagagttatcaggtgggcaaaaacaaagagttgctataggaagagcaatcacaaggaacccaaaaatttttttattcgatgaacctctatcaaatttagatgcagccctaagatctgaaatgagagtagaaatatcaaaattgcacaaaaaaattaatactaatatgatttatgtaactcacgatcaagtagaagcaatgactcttgctgatagaattgtaattcttaacaagggtaatatagaacaattttcaactccgaatgaagtttactctgatccaaataatatttttgtagcagagtttataggaacccctaaaatgaatattataaaattggagaaaaaatatataaaatcaaatataatcaatttttttgaaaatcaaatacgcttggatggttataattttaaagatgaagtatttttaggaataagaccagaacatatagatgtaaataataataataatataaaattagatataaaagttgatttaatagaaaatttaggatctgaaaaaataatctatgcctctataaaaaatcaagaaataagaataaaaactgcagaaaaattagttaaaaatttaaacaaaatatcattttctcaggataatatttattttttcgacaaaaatggaaatcgattaagaaaaacaacttaat

SEQ ID NO: 270860 - DNA, 2239 bp, Unknown
  Bacterial polypeptide expressing nucleotide sequence isolated from the Sargasso Sea
tatggctgaaaatcaattgacttatggaaataaagctaaaaatttagaatttgtagctagaaatacagatattgaaattccatactttaaacaaatttatttagaagatttagaacatattgagaaaattcttgttagtttttctaaaaaaataatgataagaagtaatagttctgaggaggacgaagaaaggttttcaagtgcaggaaaatatctatctttaggtccgatagataaacaaaatatcgtagctattaagaaatcatttacgatggtgcttgatagctacggtgaaaaagttaatcagtcagtaatttttcaaaattatgtagacaacgctaaaagcgtctcagtaataacttcatataaagtaggaactgactcagcatatagatcattttctacttattttgggtctgaaactgaagccgtaacttcaggcaaatatagtgaaatagagaatttctttatgcacagatctgttgattatctgccaaataaatatgaaaaaaataacgtttatctaaaagtaatgacacaacttgaagacttatttaaaaataaacaactagatattgaaatggttcttgataaaaataattccccacagctgctccaagtaagacctttgatgggcaaaaagctaaataaagattctatatttgatgaaaaaaaaattatcgataaaaatttagaaaaatataacaagctaagggaaacaacttcagatcgatttggctcaaataaaatttacagcaatatgtcagatatgaatccagctgaaatgattggtaaaaaacctgacaatattgcttttggtttatataagttcatgttcactgatacaacatggaatatacaacgtggagagtttggttatcgcgaatattctggtggaaaattgatggaaatgtttaataatgtcgcatatataaatgtaaatcacagtcttaatagttttcttacaagaaacttgcaaaaagaaagctgtgaaaaaataattgattatcagctaaataaattaaaagaaaacccgcacttgcatgactctatagagtttgatatttctaggtcgtcttatatttttgatacagttgaagaattttctaaagaatataaaaatataattgacaaaaatgaaattattcaatggcataatgatttagttcaaattgattcaaaaaataaaactactttagaaaagaataaagaaattattttaagaactttctcaaaattggataagagctttgagtatttaaaaaaagagaatatcacactaataagagatactatggcccttccttttactcatcattcgagattaggatttgtatactttgctcaacttaatagccttcttgaaaagggagttattacagaagatcaaaaaaaattgttgcttttatcagttaattccataagtacaaaaatgaaaactgatgcttatgaagtcaaaattggaaaaaaaacattgaacgacttttttgatgtttatggtcatataagagctggaaattataatctttcatcatcaaacttaaaaaacaatttaagttttacagaatcactgattaacaatagtgagcaacctttggaaggcaatattttaccaaaggaaatatttacgaatattgaaaaatatttcatagtaaacaatattcccttaaaggcgtctgcttggatagatatgtttcaagacggaatttcaacaagagaaaactctaaattttattacaccaaaggtatagatggaattttaaatgaaataagtaaaaaaaataccagtgatagagaattgtttgaattactagatattgaatttaatgaagaaaatactagtgatatgagattaaagaatgtattaatgcccgatttaattacttctaacgaagacttttatttttacaaagaaatgagtaaaaatggaaattatataggtcagggaataataaatggggacgttttattgatagatgatgaagctaatcgtcctgaaaatcttgacaataaaatagtcgttattccggctgcagacccaggttgggattggatcttcaactacaaaataaaatcgctaattacaaagtatgggggaccaaactctcatatggccattagatgtgctgaacataatatcccagcaattcttggtgttggagaaaacaattttacagttatagcaaactcaaaaagtttagaaatagatttttctaatgaaagcttttcaaatgtataa

SEQ ID NO: 270861 - DNA, 490 bp, Unknown
  Bacterial polypeptide expressing nucleotide sequence isolated from the Sargasso Sea
catgacccagccctatctggacattcaacatctcaacaagcagttcggtgcttttcaggccctcaaggggatctctctgaccattgagccgggggagtttatctgctttctcggcccctccggctgcggtaaaaccaccttgctcagagccatcgccggactggatctgccagacaccggcgagatttggcaaggggggcgcaatatctcccggctaccgccccagcagcgcgactttggcatcgtgtttcagtcctatgccctctttcccaacctgacggtggcccagaacatcgccttcggccttgagaatcagggactggcgcgggttctcatcaaggagcgggtcgatcactggctggggctggtggatctcacggcccagtcccacaaatacccgagccagatctccggcggccagcagcagcgggtggcgctggcccgggcactcgccctctcccccggtttgctgctgctggacgaaccgctc

SEQ ID NO: 270862 - DNA, 751 bp, Unknown
  Bacterial polypeptide expressing nucleotide sequence isolated from the Sargasso Sea
atgaaggtctctgaagaaattgtaattgaaatttcaaacatgaataaatggtttggccacttccatgtattaagagacatagatctagttgttaataaaggagagcgaatagtaatttgcggaccttctgggtctggaaaatcaactcttataagatgtataaatcggttagaggaacatcaaaaaggaataataaaagttgatgatgttgaattaaatgatgatgttaaaaaaattgataaaataagaagtgaagttggtatggtttttcaatcatttaatttatttcctcatttatctgctctagaaaactgtactttagcaccagtatgggtaagaaaaatgtcaaaaaaggaagctgacgaactcgctatgaaatatttagaaattgtgaaaattccagagcaagcccttaagtatcctggacaattatctgggggtcaacagcaaagagttgctattgcacgtgcactttgcatggagcctaaaattatgttgtttgacgaaccaacatctgcattagaccctgagatgataaaggaagtcctggatacgatgattgaactagctgaagatgggatgacaatgattgttgtaactcatgagatgggctttgcaagaaaagtagctaatagagtgatttttatggatgaagggcaaatcattgaacagaattcaccaaatgaattttttaataatcctaaatctgatagaacgaaacttttcttaagccagataatagatcattagg

SEQ ID NO: 270863 - DNA, 823 bp, Unknown
  Bacterial polypeptide expressing nucleotide sequence isolated from the Sargasso Sea
gatggtctttcaatcttatgccctttatcctcatatgaacgtttatgaaaatatgtctttcggtttaaaaatcgaaaaaagacctaaagaggaaattaatacgaaagttatgcaagctgcaaaaattctaaaaattgaagaattattagagagaaaaccaaaacaattatcaggtggtcaaagacaaagagtagcgataggaagagctattacaagaaatccaaaaatatttttatttgatgaacctttatctaaccttgatgcagcactgagagcagaaatgagggtcgaaatatctaaattacacaaccaaataaaaaccaatatgatttatgtaactcatgatcaagttgaagctatgacactagcagatagaatagttattttaaatcaaggaaatattgaacaggttggtactccagaggaaatttacaatgatcctgcaaatatttttgttgctcaatttattggtacaccaaaaatgaatatcctagatgtgaaagaggaaaatattgtttcagaaaatacaattaacttattaggtaaagatatccagtttgataaattaaaattaaataaatctaaacactttgtgggtattaggcccgagcatttgaaagcaaatcaaaatactcaatttactttcaatcctgaaatagaattaatcgaaaaccttggtaatgaaaaaattgtatatatgaaaaaagatgaacatcaattaagtgcaaaaattccaagcaatattgaaataggaaattctataggttttgatttaagtgatatatttatttttgatgaaaatggaaataggatgaaatcataa

SEQ ID NO: 270864 - DNA, 643 bp, Unknown
  Bacterial polypeptide expressing nucleotide sequence isolated from the Sargasso Sea
aatgaaaacgttaaaaattgaagaactatcaaaaaactttggatcgactgaggtattaaaaaaaattaatttagaaatagacgaaggaaatttcctagttcttttaggaccatctggatgtggaaaatcaactttattaaatattattgcaggattagaaacgattaatgagggtgatgttttcattgatgattataatgttagcaaagtagagccaaaagaccgtaatattgctatggtttttcaatcttacgctctatatccatcaatgaatgttagagaaaacatgatctttggtcttaaacaggcgaaaacatctaaagaaaaaatagaggaacaattagaaaaagtatctaaatttttacaagttgatcaattattagagagaaaaccttcacaattgtctggtggtcaaagacaacgtgtggcaattggtagagctcttgtaagggagccaagaatatttttatttgatgagcctttgtctaacttagatgcaaaattaagagttgagatgaggagagaaattaaaaaacttcaccaacaattaaaaacaacagtcgtatatgtaacacacgatcaaactgaagctatgagtttaggaacaagaattgcaatcatgaaccacggtgttattcagcaa

SEQ ID NO: 270865 - DNA, 1024 bp, Unknown
  Bacterial polypeptide expressing nucleotide sequence isolated from the Sargasso Sea
gttttagtagtaaaagatttaaatttagatattgcagagggtgagttcattacaatgctaggaccatctggttctggaaaaacaacttgcctaatgatgttggcgggtttcgaaactccaactaatggagaaatttatttagactcaaatccaatttcaaacattcctcctcacaaaagaggaattggaatggtgtttcaaaattatgctttgtttcctcacatgactgtttacgaaaatttagcctttccattaagagttagaaaagtttcaaaagaagatactgataaaaaagttgacaaagctttatctatggtttccttgacaggttttgaaaatagaatgccaggccaactatcaggagggcaacaacaaagagtagccgttgctagagctttagtatttgatccagcagtagttttaatggatgaaccattaggagctttggataaaaatttaagagaaagtatgcaatatgaaattaaacacatccatgaaagcatcggagtgacagttgtttatgttactcatgaccaaggtgaagctttaacaatgtcaaatcgaattgcagtgtttaacgatggaaaagttcaacaactatctagtcccgatcagctttatgaagcacccgtaaattcatttgttgcagagtttataggtgaaaataatactttttctggagaagtaaccgatgtttcaaaagaaaaatgcaaagttaaattagattctggtaaagagatagtagcaaatccaattagagtaaaatcgaaaggtgaaaaaactatagtttctttaagacctgaaagagcaattattaatccagaagataaaatggataacagacataatgggaaaattgaagaagtaatttatcatggcgaccacacaagagttagattaaatttattaggaaataaagattttattcttaaagtgccaaatagttctgcgagaatggatataaaagttggtaatgaaataaatgtaggctggaatagccaagactcaagagctttagatccaa

SEQ ID NO: 270866 - DNA, 642 bp, Unknown
  Bacterial polypeptide expressing nucleotide sequence isolated from the Sargasso Sea
aatgtcaaaaattgttattaaaaatctcgaaaaatcttttggtgaaaataaggttatcaacaatttcaacatagacataaaggatggggaatttatagttttagtaggtccttcaggttgtggaaaatcaactttattaagaatggtctctggattagaaagtatcgatcaaggggaaatttttttagatacaaaattaattaataacttgattccttctaagcgtgaaattgcaatggtctttcaatcttacgctttatatccacacatgaatgtttttgaaaacatgtcatttggtttgaaaatggaaaaaatttcaaaaaatgaaattaatgaaaaagtaaatcatgcagccactacacttcaaattgaagatttactagatagaaaacctaaacaactttcaggtggacaaagacaaagggttgcaattggtagagctattacaagaaatcctaaagtatttttatttgatgaaccattgtctaatctagatgcagctttaagatctgaaatgagagttgaaatttctaagttacacaaaaaattaaaaacaaatattatttatgtaacacacgatcaaatagaggcgatgacattagctgatagaattgtagtgctaaataaaggaattatcgaaca

SEQ ID NO: 270867 - DNA, 724 bp, Unknown
  Bacterial polypeptide expressing nucleotide sequence isolated from the Sargasso Sea
atggcaaatataaaatttactggagtacataaatcttttggctccaataaaattattacagacttcaatttatccggcaaggatgatgaatttcttgtattggtaggcccgtctggatgtggaaaatcaactttgttaagaatgatcgcaggtttagaacagattgatgaaggtgaaatatttattaatgatcaaaaaataaacgatctacatccttccaaacgacaaactgcaatggtttttcaatcatatgctctttaccctcacatgaatgtttatgaaaatatgtcatttgggttaaagatagaaaagagatctaaagaagaaatccaaacaaaagttatgcaggcagcaaaaattctaaagatagaagaattattggaaagaagacctaaacaattatcaggtgggcagagacaaagagttgcaattggaagagcaataacaagaaatccaaaaatatttttatttgatgagcctttatcaaatttagatgcagcactaagatcagaaatgagagttgagatttccaaattacataatcaaattaaaacaaatatgatttatgttacgcatgatcaggtagaggcaatgacactagctgataggattgtaatattaaatcttggtaatattgaacaagttggaactccagacgaaatttacaacaatccagcaaatatttttgtagctcaatttattggaactccaaaaatgaacattt

SEQ ID NO: 270868 - DNA, 883 bp, Unknown
  Bacterial polypeptide expressing nucleotide sequence isolated from the Sargasso Sea
aatttcgcagcttctggtgctctggatcggcgcctcgatggttctgaacggtgacctcaccctgggccaattgatcgccttccggatcatcagtggttatgtgacccaaccgctgctgcgcctgtctggaatctggcaacggatccaggaactgcgggtgagctttgagcgcctaggcgatgtggtggacacaccgatggaatccgatgccgtggatcaaagcaaagtggcactgccatcactgaacggtcggattcgcttcgacaacgtcagtttccgcttcgcaccgcacaaacccgatgtactgagccacgtgaatctggagattcaacccggcagtttcgtggcgatcgtcggccagagcggcagcggcaaaagcaccctgatgaaactgctctcgcggctttatgcgccgggtgaaggccgggtgctgatcgatgggtatgacatcgccaaggtggagttgtactcactccgccgtcagatcggcatcgtgcctcaggatccactgctgttttctggcagcgtgcaggacaacatcgccctgacctctcccgacgcccgcagtgaagaggttgttgcagcagccgaggtggcctgtgcccatgagttcatcatggagctgccagaggggtacagcagtgatgtgggtgaacggggcgctgggctcagtggcggacagcgtcaacgggtggccatcgcccggacgctgctcagccgccccaaactcgtgatcatggatgaggccaccagcgccctcgactacgaaaatgaacggcgaatcagcgaaaacctgaggctgcggctgcaggattgcacggtgctgtacatcacccaccgcctcagcacggtgaaacgcgccgatcagatcgtgatgatgcac

SEQ ID NO: 270869 - DNA, 823 bp, Unknown
  Bacterial polypeptide expressing nucleotide sequence isolated from the Sargasso Sea
ctctttttcacttgaggtaaggggccattcaaaagctgacagacgtgcgcgcgccgaggaattgttggagcttgtcgcactcgaaggccaaggtgacaaaaaagtccatgagctttcaggcggacaacgccaacgagtcgcgatcgctcgggccttggccatcgagccagaagtcttgcttcttgatgaaccactctctgcgctcgatctcaaacttcgtcaaaaaatgcgatctgaacttcgggccattcagaaacgtgttggcatcacatttatttacatcacacatgaccagggtgaagcgctgaccatgtctgaccgcatcgccgtcatgaacgaaggcaagattgaacaggttgatacgtgtcagtccgtttatgaacagccaaaaacgccatttgttgccagttttgtgggcgaaaataaccctttttatggtgaagtcaccgcatgcaataacagccggattgaggttttgtgtgatggtaacgaatttgtcaccgacatcagcggcaatgatcgtccggagtcaaaaaagttgaccgtcgggcaaaaaattattttatttgtgcgtcctgagtcgatttccatcaaaagcagtaaagcagagacacccaacagcttttctgcccagttagactctattgaatttgaggggcatctgcgaaacctcttcctgaccaccaattcaggcatgaaggtacgtctaaatgtaccgaatgccgaggaaataattcatctcactgtgggccagaccatggatttaacattttcagctcaaaaagctgtggttctgcctgaaggaaatgtcgcagtggattaa

SEQ ID NO: 270870 - DNA, 805 bp, Unknown
  Bacterial polypeptide expressing nucleotide sequence isolated from the Sargasso Sea
ttttggtcttaaacaagccaaaacatcaaaagaaaaaatcgaagaacaattaaaaaaagtctcatcttttttacaagtagattctttattagaaagaaaaccttctcaattatctggaggccagaggcaacgagtggctattgggagagcgctagtaagagaaccaagaatatttttatttgacgaacctttgtcaaatttagatgccaagttaagagtagagatgagaagagagataaaaaaacttcatcaacaacttaaaactacagtagtctatgttactcatgatcagacagaagctatgagcttaggaaccaaaattgcaatcatgaatcatggtgttattcagcaaaatgatactcctgaaaatatatacaataaaccaagcaatacatttgttgctgactttataggttcaccttcaatgaatttaattaaaggtaatttgaaacaaaattcagataatgtttcttttattgcagaaggatcaaatttagaaattccaattaaacattatgattttaaaaataaatcagaattaagtaacaatgaagtttattttggtattaggccagaacatatttattttaaaaaattaaatgaagatgatttagaaattaatttaagagctgacttaagtgagtatattggtcatgaacaaattgtaacattcaacttttcaaatcaagaaattctagccaaatttccatcaactattaatgtagaattaaataaagaaacaaaattatatgttgatctaactcaagtttcattatttgactctaaaaacgaggaaagaatttaa

SEQ ID NO: 270871 - DNA, 715 bp, Unknown
  Bacterial polypeptide expressing nucleotide sequence isolated from the Sargasso Sea
atttcagaactattagatagaaaacctggacaattgtcaggtggtcaaagacaaagagttgctcttggtcgtgctatggtaagagagcctgttgcctttttaatggatgagcctctttcaaatttagatgcggctttgagagttcacatgcgttctgaactatctgaacttcataattcacttaaaactacttttgtgtacgttacacatgatcaagcagaagcattaactatgtcttctagaatggctgttatgattgatggaaatttattacaacttgatacacctcaagaagtatatgacaatccttcctcattaagtgtggctcagtttgttggaagtccaaaaataaatatatttgaaggaacttcggactcaagtgggacagtaagttttctcaacgttaatttaaaaagaaaaagttctgaaagtaatacagatttacatattggtattcgaccagaacatttagaaattacaaatgaaagtaatgacaatacatttagtggaatagttgcatatagagaaaatttaggttcagatattttctttcatgtaaatattgaagacggttcaaataaaataattgtaaggggcttacctcaatttacacaccaaatttcaaacggttctagtgtgaatattaaaagagtttcagataaagcattactatttaatcaagcaggaatgagagttcaatttactaatgcataat

SEQ ID NO: 270872 - DNA, 735 bp, Unknown
  Bacterial polypeptide expressing nucleotide sequence isolated from the Sargasso Sea
aatgagcaacctatctacaacttacttatcagtaaacgatctttgcaaacattttggagcatttcaggcattaaaaaatatatcgattgaaattaatgaaggagaatttgcttgttttttaggtccttcaggttgtggtaaaacaacacttcttcgttgtatcgcaggactggaaactcaatcttctggatttatttctcaaaaagaaattgagatttcatctcttccaccttcagcaagagatttcggtatcgtgtttcaatcttatgcacttttcccgaatttaacggtcttctctaacatttcctatggtttaattaacaataaatggcggaaggatgaaattaagtccagagtggagcatttactggatctagttggtttgaaatcacatgcagaaaaatatccgagtcaattatctggaggagaacaacaacgtgttgctttagcaagagctttggcaacgtcaccaggattgttattgcttgatgaacccctctcagccctggatgcaaaagtcaggttgtatttgaggaaacagattaaagatctgcaccgaaaattaggaatcaccaccataatggtgacccatgatcaggaagaagctcaatcgatggcagataggatttttgtcatgaaggatggtgaaattattcaatccggcaccccgagagaaatctatgaaaaagctaattctccttttattgcagattttatcggaataactaattttat

SEQ ID NO: 270873 - DNA, 550 bp, Unknown
  Bacterial polypeptide expressing nucleotide sequence isolated from the Sargasso Sea
tatggcatctatcgaacttaaaaatatcgaaaaaagtttcggatcaaacaaggtaataaataaatttgatattaaaataaacgatggagaatttattgttttggttggcccatcaggttgcggaaagtctacactcttaagaatgatctcaggtttagaaacagttgataaaggagaaatttatttagataacaagattataaataatctaattccttctaaacgtgaaattgcaatggtttttcaatcctatgctttgtatccccacatgagtgttttcgagaatatggcttttggcttaaaaatggaaaaaatttcaaaaagcgaaattaatcaaaaagttaataatgctgctgcgactcttcaaatagaggatttgcttgaaaggaaacctaaacagctgtcaggaggacaaagacaaagagtcgcgattggaagagcaatcacaaggagtcctaaggttttcttatttgatgaacctttatcaaacctagatgctgctttaagatctgaaatgagagttgaaatatctaagcttcataaaaaatga

SEQ ID NO: 270874 - DNA, 877 bp, Unknown
  Bacterial polypeptide expressing nucleotide sequence isolated from the Sargasso Sea
atgtcaaataaccagcaatttgttagatttgataaagttgataaaagctacgatggtaaaattctagttgttaaagatttaaatttggacatagcagaaggtgaatttatcacaatgctaggaccctctggttctggaaaaacaacatgccttatgatgttggcaggatttgaaacaccaactaatggagaaatctttttagatcaaaatcctatatcgaatattcctccacataaaagaggaattggaatggtctttcaaaattatgcgttgtttccccatatgactgtctatgaaaatttagcatttcctttaaaggttagaaaggttgcgaaagacgaaatagataaaaaagttgataaagttttatcaatggtttcgctttcaggatttgaaaaaagaatgccaggacaactatctggtggtcaacagcaaagagtcgctgtagcgagagctttagtatttgatcctcaagtagttttaatggatgagcctctaggagcgttagataaaaatctaagagagagcatgcagtatgaaataaaacatatacatgaaagtattggtgttacagttgtttatgtgacccatgaccaaggtgaagcattaacaatgtcaaatcgaatagcagtatttaacgacggaaaagttcagcaactttcaagtcctgataaactttatgaagagccagttaattcttttgtagcagagtttattggtgagaataatacttttactggcgaggttacggatatatcagaaagcaaatgcaaagttagactggattctggtgtagaaatattttcaaatccaattagagtaaaatcaaaaggtgaaaaaacaattgtttctttaagacccgaaagagcaattataa

SEQ ID NO: 270875 - DNA, 1066 bp, Unknown
  Bacterial polypeptide expressing nucleotide sequence isolated from the Sargasso Sea
atggcagttgcctccggcgcctataagaaagttctcgagggcgaccagacaccgaaaaaggtgctggtcaaaatcgaccgggtcacgaagaagttcgacgagacgattgccgtggacgatgtgtccctggaaatcaagaaaggcgagatcttcgccttgctcggcggttcgggttcgggcaaatccaccttgctgcgcatgcttgcaggtttcgagcgcccaaccgaaggtcgcatctacctcgacggtgtggacatcaccgacatgccgccctacgagcggccgatcaacatgatgttccagtcctacgccttgttcccgcacatgaccgtggcgcagaacatcgccttcggcctgcaacaggacaagatccccaaggctgaagtcgacgcacgcgtggccgagatgctcaagctggtacagatgagccagtacgccaagcgcaagccgcaccaattgtccggcggccagcgccagcgtgtggccttggcccgctccttggccaagcgcccgaagctgctgctgctcgatgagccgatgggcgcactggacaagaagctgcgctcgcagatgcaacttgagttggtggagatcatcgagcgcgttggggtgacctgcgtgatggtgacccacgatcaggaagaggccatgaccatggccgaacgcatcgcgatcatgcacctgggctggatcgctcagatcggcagcccgatcgatatctacgaaactcccaccagccgcctggtgtgcgagttcatcggcaacgtcaacattttcgacacccaggtggtggacgacgccgaaggccacgcagtgctcaagtgcccggacctggaccgcgacatctacgtaggctacggcatcgccacctcggtggaagacaagtcggtgacctacgccattcgcccggaaaagctgttggtgaccaccgaaatgccgacctgcgaacacaactggtccagcggcaaggtgcacgacatcgcctacctgggcggccactcggtgttctacgtggagctgccgagcggcaagctggtgcagtctttcgtcgccaacgccgaacgcc

SEQ ID NO: 270876 - DNA, 870 bp, Unknown
  Bacterial polypeptide expressing nucleotide sequence isolated from the Sargasso Sea
tatgaatgacacatctcaaagttttgttaaatttgaaaagatcgataaaagttatgatggagaagtactagtagtaaaaaacttaaacttagatattgctaagggtgagtttgtaacaatgttgggtccatcaggatcaggtaaaacaacaactttgatgatgttagctggttttgaaacacctacaaacggtgaaatatttttagatactaaaccaataagtaaaatacctccttatgaaagagaaattggaatggtatttcaaaactatgccttatttccccatatgactgttgcggaaaatttatcattccctttagaagtaagaaaaatttcaaaaccagatattaaagaaaaagtgcagaaagctcttgatatggttgagttaggtaattttggtactagatttcctgctcaattatctggtggacaacaacaaagagttgctttggcaagagcacttgtatttgaacctcgccttgtattgatggatgagcctttaggtgctcttgataagaatttgcgtgaacagatgcaatacgaaattaaacatattcatgatagaattggaataacagttgtgtacgttacgcatgatcaaagcgaagctttaacaatgtctaataggattgcagtattcaatgatggtgttgtacaacaattatctacacctgatattttatatgagaaacctgaaaattcttttgtagctaaatttattggagaaaataatacactaaatggtgttgtaaaagaaattaatggatcgtcatgtgaagttgaattagaaggtggttttggaaccgttaaagcattaaaaataaatgtaaatgaagttggagaaaaaactcaactatcaatagaccagaa

SEQ ID NO: 270877 - DNA, 733 bp, Unknown
  Bacterial polypeptide expressing nucleotide sequence isolated from the Sargasso Sea
tatggaacaatatttatcagttaaaaatatcaataagttctttggggattttcaagcgcttaatgatgtaagttttgatgttaaagagggtgaatttgtatgtatactgggtccttcaggatgcggaaaaacgactctactaagagtaatcgcaggattagaaagtcaatcacaaggactaattaatcaaaacaataaagacatatctttacttcctcctgatcaaagagactttggaattgtattccagtcctatgctttatttccaaacttaagcgtaaaaaataatatatcatttggattaaaaacaagaaaacaaaataaagaaacaattgataaaagagttgatgaattattagaattagttggtttgagtgatcatataaataaattttctgctcaactatctggtggtgaacaacaacgtgttgcactcgcaagagctttagccccttcaccaggattattacttttagatgaacctttatctgccttagatgcaaaagtaagacagtatttaagattagaaataaaaaatcttcaaagacagctaggagtgacaaccattatggttacgcatgaccaagaagaagcattaactatggcagatagaatcatactaatgaataatggagtgattgaacaagaagggtcacctcaagatctttattcaaaaccaaaaactgcattttctgcaaattttataggaacgacaaatttatttaaagctaaa

SEQ ID NO: 270878 - DNA, 563 bp, Unknown
  Bacterial polypeptide expressing nucleotide sequence isolated from the Sargasso Sea
aatgattcgccttgagaaactgagcagagagttccaagtagggaatcaggttgttcatgcgcttgatgaggtcgacctggaaattaaggaaaatgaatatgtttccataatgggcgtttcaggatcaggtaagtcaacccttctcaacatattagggttattagatacaccaacatccggtgattacattttatcagggatcaatacatcaaagatggacgatgacgaaatggcaggcatcagatcaacaaagatcggttttgtatttcaatcctttcatctgattccaaggctgacagcattcgaaaatatcgagatgccaatgattctatctggaatgaatccaaaagaacgatcagagaaggtcagctcagctctcgaaaaagttggcttgaccgatcgttcagatcacaaaccagagcaactttctggaggtcaaagacaaagagttgcaattgcaagatccattgtcatggaaccagatgtccttctagcggatgaaccaacaggaaacttagatacttcatcaggcaacgaagttgtgaaattaatcgaagagctta

SEQ ID NO: 270879 - DNA, 787 bp, Unknown
  Bacterial polypeptide expressing nucleotide sequence isolated from the Sargasso Sea
ttgtctgaaaactctattagcatccgaaatgttggaaaatattttggaacaggcgcaacaactgtaaaagctctcgatgatgtaagtgtcgagattgctaataatgaatttttcacgcttcttggtccctctggttgtggaaagacgacactactaagattaatcgcaggctttgaaaacccgacatttggctcgatcatgctcggtgaaaatgatatcagtcaccttccgccttacgaacgatcagtaaatactgtttttcaaaattatgccctttttccgcatttaagtgttgcacaaaacataagctttggtctggaaatgttacgccaatcccgaaaagagattgatagaaccgtagatgagatgcttgctttggtacatatggaggatttgaaggatcggcgtaccgatcagatatcaggaggtcaacagcaaagggtggccttggctcgagccctagcgccaaagcccgacgttttgcttttagatgaacctctttctgcacttgactataagctgcgtcgtggaatgcagatcgaattaaaaagactgcaacttgaaacagggattacgtttatttttgtgacgcatgatcaagaagaagccctaacaatgtcggacagaattgctgtgatgaatgaaggccaaattttgcaagttggagcacctgacgaaatatataatgcacctaaacaacgttttgtggccgatttcatcggtgagtcaaattttttggatgtcgaaatcattgataaaatagatggagagattccctcagctacta

SEQ ID NO: 270880 - DNA, 674 bp, Unknown
  Bacterial polypeptide expressing nucleotide sequence isolated from the Sargasso Sea
tatgtcaaagaacttagattttgttaaattcgaaaaagttgacaaaagttacgacggaaaagtacttgttgttaaagatttaaacctagacattgctgaaggcgagttcataactatgttagggccatctggatcaggcaagacaacttgtttgatgatgttagctggttttgaaactcctacaaatggagaaatttatttagataaaaatccaatttcaaatatacccccacacaaaagaggaataggaatggtctttcaaaactatgccttgtttcctcacatgacagtttatgaaaatttagcctttcctttaaaggtaagaaaatttcaaaaagacgagattgataagaaagtagataaagctctttcaatggtatcgttatctggttttgaaaacagaatgccaggacaattatctggtggtcaacaacaaagggtagcagttgcgagatctttagtgtttgatcctcaattagttttaatggacgaaccacttggagctctagataaaaatttaagagagagcatgcagtacgaaattaaacatattcatgaaagcattggggttacggtagtctacgtaacacatgatcaaagtgaagcattaacaatgtctaatagaatagcagtgttcaatgatggaaaagttcaacaactttcatcgccagaca

SEQ ID NO: 270881 - DNA, 945 bp, Unknown
  Bacterial polypeptide expressing nucleotide sequence isolated from the Sargasso Sea
gaaaactacctgtttaatgatgttagctggttttgaaactccaactaatggagagatatatttagataaaaatccaatatcaaacatacctccacataagagaggaataggaatggtttttcaaaattatgcattattcccacacatgacagtatatgaaaatttagcttttccattaagagttagaaaaatagcaaaggacgaagcggacaaaaaaattgacaaagcactatctatggtttcactatctggttttgaaaacagaatgccaggacaattatctggaggacagcaacaaagagtagcagttgcaagagcgttagtatttgatccatcagtagttttaatggatgaacctttgggagcattagataaaaacttgagagaaagtatgcaatatgaaattaaacatattcatgaaagcatcggtgtgacagttgtatatgtaactcacgatcaaggagaagcactcactatgtcaaacagaattgcagtttttaatgacggaaaggttcaacaactttcgtcaccagatgagttatatgaaaaaccagttaattcttttgttgctgagtttattggagaaaataatacatttgctggggagatttctgaaatttcaaatgataaatgtaaagtaagaattgcgggcggtgaaataattgcaaatcctgtatctgttaaaaataagggagaaaagaccactgtttctataagaccagaaagagccttaataaattcaagtagcaaaatggacaataattttaagggtaaaattgaagagattatttatcatggagatcacacgagagtaaggctgaatttgttgggaaattctgaatttattcttaaagtcccaaatagttcagaaaatatggacatcaaactaggcaatcatattaacattggttggaatagtcacgacgcccgggcgctagatccaaa

SEQ ID NO: 270882 - DNA, 895 bp, Unknown
  Bacterial polypeptide expressing nucleotide sequence isolated from the Sargasso Sea
atgtcggttaataaagaattcgttaagtttgataaagtagataaaagttacgatggcaaagttttagttgtcaaagacctccaattagacattgcagaaggtgagtttattaccatgttaggtccctctggatcaggtaaaaccacttgtttaatgatgctagctggatttgaaacaccaaccaatggagaaatataccttgatggaaatgcgatctccagtattcctccacataaaagaggtataggaatggttttccaaaactatgctttatttcctcatatgacagtgtatgaaaatttggcttttccattgagagtcaggaaaattccaaaagatgaagcagataaaaaaattgataaggctttatctatggtgtccttacaaggatttgctcaaaggatgccaggtcaattatcaggtggacagcaacagagagtagcagtagcaagatccttagtttttgacccacaattagttttgatggacgagcctcttggagctttagataaaaatttaagagaaagtatgcaatatgaaatcaaacatattcatgaaagtatcggagtgactgttgtttatgtaactcatgatcaaagtgaagcattaactatgtctaatcgaattgcagtttttaatgacggaaaggtccaacaactttcaagtccagatgaattatatgaaaaacctgttaattcttttgtggcagaatttattggagagaacaacacttttgcaggagaagtttctgatatttcagatggaaagtgtaaagttaagttagcgagtgcggatatactggcaaacccaatctcggttaagggaaaaggtgagagaacgacagtttcattaagacctgaaagagctttaattaatcctagtgataaaatggata

SEQ ID NO: 270883 - DNA, 854 bp, Unknown
  Bacterial polypeptide expressing nucleotide sequence isolated from the Sargasso Sea
tcaatcttacgctctatatccatctatgaatgttaaggagaatatgatttttggtcttaaacaggcaaaaacatcaaaagaaaaaatagaagaacagctagaaaaagtctcaaaatttctacaggtagatcaattgttagagagaaaaccttctcaattatctggaggtcaacgacaacgtgttgctattggtagagctctcgtaagggagccaagaatatttttgtttgacgaacctttatctaacttggatgcaaagctacgggttgaaatgaggagagaaataaaaaaacttcatcaacaattaaaaacaacagttgtttatgtgactcatgatcaaacagaggcaatgagtttgggtactaatattgcaattatgaatcatggagtaattcaacaaaatgacactcctgaaaaaatttataataagccaagcaatacttttgttgcagactttattggatctccatcaatgaatcttattaagggaaacttaaaagaaaattccggagacttattttttacagtgagtggttcaaatttagaaattccaataaaaaattatgattttaaagataaatcaaatttaaataataaagagattttcttcggcattagacctgaacatattttctttaaaaaatttaatgaaagtgattttgaaattgatttaagagcaaatcttagtgaatacataggtcatgagcaaattatgacttttgattatgcaaaccaagaagtgttagctaaatttccatctacaattaaaatagatctggggaaagagacaaatttatactttgatttaacacaagcatctttatttgacgccaaaacagaggaaagaatataat

SEQ ID NO: 270884 - DNA, 631 bp, Unknown
  Bacterial polypeptide expressing nucleotide sequence isolated from the Sargasso Sea
ttgtggaccttcaggttcagggaaatcaacattgattaggtgcgtcaatgcactggagccttttcagactggttctgtcaatgtttgcggaatcagtgttgaaaagaacggaataaatgctacagatattcagagaagagtaggaatggtttttcagcaattcaatctctttccacatttaagtgttttaaaaaactgcactcttgccccttgccgtgtgcttggattatccgttgttgaagccgagtcaaaggcgatgcattatcttgagcgtgtacgtatcccagaacaggcatcaaaatacccggcagacctctcaggcggacaacaacaacgggttgctattgctcgagctttgactatggagcctgaattaatgttgtttgatgaacccacatctgctcttgaccctgaggttgtaactgaagtattagatactatggttgatcttgcagagactggcatgactatgatctgtgttacccatgaaatgggttttgctaaacaagtggctgatagagtagtttttatggatgagggaaaaataattgagattgccactcctgaaaagtttttttcagagccaactcatgaacgtacaaagttttttctcagcagagtcttaggttag

SEQ ID NO: 270885 - DNA, 876 bp, Unknown
  Bacterial polypeptide expressing nucleotide sequence isolated from the Sargasso Sea
aaatttttataaatgatcaaaagataaatgatcttcatccttctaaacgtgagacagcaatggtttttcaatcatatgctctttatccacatatgaatgtttatgagaatatgtcttttggattaaaaattgaaaagagatcgaaagaagaaataaaaactaaagtcatgcaagcagcaaaaattttaaaaattgaagaattacttgaaagaaaacctaaacagttatctgggggacagagacaacgagttgctattggacgtgcaatcacaagaaatccaaaaatatttttatttgatgagcctttgtctaatttagatgctgctttaagagctgagatgagagttgaaatttcaaaacttcataatcaaattaaaacaaatatgatttatgttacacatgaccaagtagaagcaatgacattagctgataggattgtaatattaaatcttggaaatattgaacaagttggaactcctgatgaaatttataataatccatccaatatattcgtagcacaatttattggcactccaaaaatgaatattctacctttaaatagtgaaaatattatctcaaataataaaattaattttttgggtaatgaaatttcttttaaacatattaaatttgataaaaaaaaatactttattggaataagacctgaacattttaatatgtccaatgagtctcaatataaatttaaaccaaaaattgacattgtagaaaatttaggaaatgaaaaaataatttatatgagtaataacaattttgaaataagcgcaaaagtttcaagccaaattaattttgaaaatgagcttaaatttgactctaaagatatctttatatttgatgaaaaaggaaataggatttaat

SEQ ID NO: 270886 - DNA, 736 bp, Unknown
  Bacterial polypeptide expressing nucleotide sequence isolated from the Sargasso Sea
tatggctgatccaataattaagattgaaaatatgaataagtggtttggagactttcaagtattaaaagaaattaatttagaagttgaaaaaaataaaaaaattgttgtatgtggtccatctggatcaggaaaatcaactcttataagatgcattaatagacttgaagaacatcaaaaaggtaccatcatagtagacggaactgaacttacagaaaatacaaaaaatattgaagcaatacgagcagaagttggcatggtatttcaacaatttaatttatttccacatttatctatccttgataactgcacactagcaccaatatgggtaaaaaaaatgcccaagaaggatgcagaaaatcttgcaatgaaacaattagagcaagttcaaatcgtagatcaggcacaaaagtttcctggccagttatctggcggccaacaacaaagatgcgcaattgcaagagccttgtgtatggaaccaaaaattatgctatttgatgaaccaacatcagcattagatccagaaatgattaaggaagtacttgatgcaatggttaatttagcaaaagctggaatgacaatgatagttgtaactcacgaaatgggttttgcaaaagaagttgccgatgaagtaatatttatggatgagggcatgatagtagaaaaagctgaaactaaggagttttttgctaacccaaaaagtgacagaactaaactgtttttaagtcaaattctataa

SEQ ID NO: 270887 - DNA, 742 bp, Unknown
  Bacterial polypeptide expressing nucleotide sequence isolated from the Sargasso Sea
atgtcagattctattatttctttaaaaaatgttaacaagtggtttggtgattttcatgtattacaagatgttaatctagaagttaagaaaaaagaacgcatagttgtttgcggtccttcaggttcaggtaaatctacaatgattagatgtattaatcgacttgaagagcatcaagaaggaactattattgttgatggaattgaattaactggtaatttaaaaaacattgatagtgttagaaaagaagttgggatggtttttcaacagtttaatctttttccacatcttactgctaaagaaaatattacacttgcgcctatttgggtaaaaaaattaccaaaatctgaagctgaagaattagcaatgagacaattagaaatagtaaagattcctgaacaagctaataaataccctggacaattatcagggggtcagcaacaacgtgttgctatagcccgttcattagcaatgaatcctaatataatgctttttgatgaacctacttctgctctagatcctgaaatgattaaagaagttttagatgtaatggttgatttagctgaaggaggtatgactatgatagttgtaactcacgaaatgggttttgcaaaaacagttgcaaatcgtatggtttttatggatgaaggtaagattgttgaggaagcatcaccagataaattttttaacaacccagagagtgaaagaactaaattgtttttaagtcaaattcttaatcattaag

SEQ ID NO: 270888 - DNA, 975 bp, Unknown
  Bacterial polypeptide expressing nucleotide sequence isolated from the Sargasso Sea
gtgctcccgggatcagacggtcaaggcccagaacgtggagatggtcagccgttggcgttggcaggagttctattcccagtacatcgcccgcacgtttgagaagacgatcaccggcaccgctctgaatcagaccagccaggtgctgcagaagatttcgcagctcatggtgctctggatcggtgcctcgatggtgttgaacggtgacctgaccctcggccagttgatcgccttccggatcatttccggctacgtcacccagccgctgctccggttgtcgacgatctggcagagcatccaggaattgcgggtgagcttcgagcggctggcggatgtgatcgacacccctgaagaatccgatgaggtggacaaatccaaggtgatgctgccgccgttgcagggggaggtgcggttcgaggatctgtccttccgtttccgtcccggccaaccggaggtgctgaaggacgtcaacctggagatcaaggccggcacctttgttggcatcgtcggccagagcggcagcggtaagagcaccctgatgaagctgttgccgaggctttacgagcccggtgagggacggatcctgatcgacggctacgacatcgccaaggtggagctgtactcacttcgccgtcagatcggcatcgtcccccaggatcctctgctgttcagcggcaccgtcagcgagaacatcgcgctgacgaaccccgaagcatccagcgaggagattgtgcgggcggcccggctggccaatgcccatgaattcatcatggaactgcccagtggctacagcacaccggtgggtgaacggggggctgccctcagtggcggccagcgccaacgggtggcgattgcgcgcaccctgctgagcaaccccaagttgctggtgatggacgaagccaccagcgcccttgattacgaaaccgaacgcaaggtctgcgacaacctgcttgagaatctcgacgatcagacggtgtt

SEQ ID NO: 270889 - DNA, 943 bp, Unknown
  Bacterial polypeptide expressing nucleotide sequence isolated from the Sargasso Sea
tcattcgtaactgcattgttgctcgcatacgatcccgtaaaaaagctcgttaatttgaacgctcagcttcaggaagggttagcggcaagtgagagaattttcagtgttttagacgtaagacctaaaatcattgataacaccaacgctatcgaactcagcgatatcacgggagagattttaattaaagatctatgcttttcctacgatggcactttcccaattttaagtaatttatcgatgactatacccgctggaaaaacaattgctcttgttggacattccggctcaggaaagagcacacttttaaatttagtcaccaggttttttgatcccgcatctggctgtattttaattgatggcagagacattcaaacagtaaaactctcttcactacgccagcatttcgccatagttagtcaggatatttcactttttaacgacactataaaaacgaatatttgctatggagatcccgatgcacccaacgagaagataatagaggctgctaaaaatgcggcggcacacgattttataaagcagttgccaaatggttatgataccgagattggggagaatggcgtaaaactctctggtggacaaagacagcgagtggccattgctagagccatgttaaaggatgcacccattctattactggatgaagcaacctcggcattagactctgaatctgaaaaagctgtccagaaagcgctgcaacggcttatgcgcaatcgtacaacaattgtaatcgctcatcgcctctcaaccatacaatccgctgatatgatctatgtattagaagagggaagagttgccgaatttggacaacataacgagctgttgaaacaagatggggtctacgcaaatctatataaaattcagtttgctgaaaaggggaaagctaataatcttcaaattccagccgaaagaaatactgaaagat

SEQ ID NO: 270890 - DNA, 685 bp, Unknown
  Bacterial polypeptide expressing nucleotide sequence isolated from the Sargasso Sea
aatgattcgccttgagaaactgagcagagagttccaggtaggaaatcaggttgttcatgcgcttgatgaggtcgacctggaaattaaggaaaatgaatacgtttccatcatgggcgtttcaggatcaggtaagtcaacccttctcaatatattagggttattagatacaccaacatccggtgattacattttatcaggcatcaatacatcaaagatggacgatgacgaaatggcaggcatccgatcaacaaagatcggttttgtatttcaatcctttcatctgattccaaggctgacagcattcgaaaatatcgagatgccaatgattctatctggaatgaatccaaaagaacgatcagagaaggtcagctcagctcttgaaaaagttggcttgaccgatcgttcagatcacaaaccagagcaactttctggaggtcaaagacaaagagttgcaattgcaagatccattgtcatggaaccagatgtccttctagcggatgagccaacaggaaacttagatacttcatcaggcaaggaagttgtgaaattaatcgaagagcttaacattgcgggcctgaccctaatagtggtcactcatgatagagaaatgggcgagcgttcaaatcgcttgattgagttgagagatggaaaaatcattaacgatcaaaatcaaaaaaaggcctaa

SEQ ID NO: 270891 - DNA, 550 bp, Unknown
  Bacterial polypeptide expressing nucleotide sequence isolated from the Sargasso Sea
tattgttgatggtaatgaacttactgaagatacgaaagatattgaaaaaattagagcagaagttggaatggtttttcaacaatttaatttatttccacatttatcaatattagataattgtactttggctcctatctgggtaaaaaaaatgccaaaagcaaaagccgaagaatttggcatgatgcaattagaaaaagttcaaataggagatcaagctaagaaatttcctggtcaattatctggtggtcaacagcaaagagctgctatagcaagagctttgtgcatggagccaaaaattatgctttttgatgaaccaacatcagctttagatccagaaatgattaaagaagttttagatgcaatggtaaatttagcaaaaggcggcatgacaatgattgttgttactcacgaaatgggttttgccaaagaagtagctgatgaagttatttttatggatgaaggaatgatcgttgagagagcttctaccaaagaattttttgcaaatccaaaaagcgatagaacaaaactctttttaagtcaaatattataa

SEQ ID NO: 270892 - DNA, 734 bp, Unknown
  Bacterial polypeptide expressing nucleotide sequence isolated from the Sargasso Sea
tatgtcaaaaaaagaagatttcgtaaaatttgataaagtcgacaaaagctacgatggaaaagtattagtagttaaagatttgaatttagatatcgaagaaggtgagtttgtaacaatgctcggaccctctggttcaggaaaaactacatgtttaatgatgctcgctggttttgaaacaccgactaatggagaaatttatttagataaaaatccaatttcaaatattcctccacataaaagaggcattggaatggtttttcaaaattatgctctgtttcctcatatgacagtttttgaaaatttagcatttccattaaaggtaagaaaaatgtctcaagtggaaatagaaaaaaaagtagataaagctttatcaatggtttcactcggtggatttgcaaacagaatgccaggtcagttgtctggaggtcaacaacaaagagtagcagttgcaagagcattagttttcgatccatctgttgtattaatggatgagcctttaggtgccttagataaaaatttaagagaaagtatgcagtacgaaattaaacacattcatgaaagtattggtgtaacagtagtttatgtaactcatgatcaaggtgaagctttaactatgtcaaatagaatcgcggtatttaatgatggtaaagttcaacaactatcaagtcctgataagttatatgaagaacctgtgaactcctttgttgcagaatttatggagaaaataatacctt

SEQ ID NO: 270893 - DNA, 839 bp, Unknown
  Bacterial polypeptide expressing nucleotide sequence isolated from the Sargasso Sea
gatgtctaaaaatacagaattcgttaagttcgataaagttgacaaaagttacgatggtaaagtcttagtagtaaaagatttaaatcttaatatctcagagggcgagttcattactatgcttggtccatctggttcaggaaaaacaacttgtctgatgatgttggctggatttgaaacaccaaccaatggtgaaatctatttagattctaatcctatttcaaatattccaccgcacaaaagaggaattggaatggtttttcaaaattatgcattgtttcctcatatgacagtttatgaaaatttagcatttcctttaagagttagaaaagttcaaaaagatgagattgataaaaaagtagataaagctttatcaatggtttctttatcaggatttgaaagtagaatgccagcgcaattatctggtggtcagcaacaaagggtagctgttgcaagagctctagtatttgatccagcagtagttctaatggatgaacctcttggagctttagataaaaacttaagagaaagtatgcaatacgaaattaaacatattcatgaaaatattggtgttactgtagtttacgttacacacgatcaaggagaagcattaacaatgtcaaataggatcgcagtttttaatgatggtaaagttcaacaattatcaagtcctgataaattgtacgaagaaccagttaattctttcgttgcagagtttataggtgaaaataatacatttggaggagaagtaactgacatttcaaaagatgtttgtaaagttaaactacaaaatggagaaattttagctaatccagtttcagtaacttccaaaggtgataaaa

SEQ ID NO: 270894 - DNA, 833 bp, Unknown
  Bacterial polypeptide expressing nucleotide sequence isolated from the Sargasso Sea
catgttccatctagaagtgaatcaactgcacaaatcctatggcgacaccaaggtgttcgaggggattgaattcggcatccgcaagggggagctggtgaccctgctcggcccctccggctgtggcaagtccaccctgctgcgggcgctggccgggctcaccccggtggatggtggtcaggtgcgggtggccggtgaagacatcacctggcaggagccccagaagcggggcatcggcatggtgttccagagctatgcgctcttccccaacatgacggtgcgggacaacgtcgcctttggcctcaagatgaagccccagccgggacgggatctcgccgccagcgtgcaggaggcgctggaactggtggagctgaccggcttcgagcgtcgctatccggccgagctctccggcggccagcgccagcgggtggcgctggcccgggctctggtggtgcagccgcggatcctgctgctggacgagccgctctcggcgctggatgcccgcatccgccgcagcctgcgccagcagatccgcgagatccagcagcgccttgagctcaccaccatcttcgtcacccacgatcaggaggaggcgctgaccatgtcggaccggatcttcctgatgaacaagggatccatcgtccagagcggcacgccggagcagatctatacccgtcccgccagcgagttcgtggcgagctttatcggcaactacaacctgctcgatggcgaacaggccagcaccctgttcggcccccgtgttcaggggcagctggcgctgcgaccggagtccctctccctgctgccggccggtgcccgtagcgatgaacctcacc

SEQ ID NO: 270895 - DNA, 708 bp, Unknown
  Bacterial polypeptide expressing nucleotide sequence isolated from the Sargasso Sea
catagaaattcaagatggtgaatttattgttttggtaggaccatctggctgtggaaaatcaactttattaagaatgatttcaggtcttgaaactgttgatgatggagaaatatttttagataaaaaattgataaataatttaatcccatctaaacgaggcatagcaatggtgtttcagtcctacgctctctatccacacatgaacgtttatgaaaatatgtcttttggattaaaaatggagaaactatctaagaatgaaattgatcaaaaagttaatgaagcagctaatacactccagataaaagatttgcttgagagaaaacccaaagaactttcgggtggacaaagacaaagagtagctattggcagagctatcacaagaaaccctaaattatttttatttgatgagccattatcgaatttagatgcagcattaagatcggaaatgagggtagaaatttcaaaacttcatgaaaaaatgaaatcaaatattatttatgtaacccatgatcaagttgaagcaatgacacttgctgacagaatagtcatcttaaataatggaaatatagaacaatttggaactcctaatgaaatttattcagatccaaacaatatctttgttgcagagtttatcggttcaccaaagatgaatataataaaaatagataaagaaaatataattaacagtaatactgtgaatatttttaa

SEQ ID NO: 270896 - DNA, 613 bp, Unknown
  Bacterial polypeptide expressing nucleotide sequence isolated from the Sargasso Sea
ctggagaaccctatgaacgctacggcacctgttgcactgtcggtcaagaacatccataagtcgttcggcgaccaccatgtgcttaaaggcatttcgctggacgcccatcaaggcgacgtgatttcgattctcggcgcgagcggttccggcaagagcacctttctgcgctgcctgaatctgctcgaaacgccggatgacggctcggtcgcgctcggcggcgaagagctgaaaatgaagcggcgcggcgacggcaagctgcagccgagcgaccgccgtcaggtggaccgggtgcgctcgcaactcggcatggtgtttcagaacttcaatctgtggtcgcatatgaccgtgctggagaacctgatcgaagggccgatgcgcgtacagaagcgcagccgcgccgaatcggttgaggaggcggaagcgttgctcgcgaaagtcggccttgcggaaaagcgcggccactatccggcgcatctgtccggcggtcagcagcaacgggtggcgattgcgcgtgctttggcgatgcatccgaaggtgatgctattcgatgaaccgacctcggcgctcgaccccgaactggtcggcgaagtgctgcgtgtgatgcgctcgctcg

SEQ ID NO: 270897 - DNA, 579 bp, Unknown
  Bacterial polypeptide expressing nucleotide sequence isolated from the Sargasso Sea
tatgagtgaaaacttcgtagatatcaataacattgccaagagatggaatggccagcttggtgttgaagatatatcactcaattttgctaaaggatcattcgttgcccttttgggcccatctggatgcgggaaatccacaactctaagacttttatccggactggaacaagcagatcaaggaacgattaaaattgatggcgtagatgtcactgataaacctccatcagaaagaaatctttcaatggtattccaatcctatgctctttttccacatttaaccgtcaaggaaaatgttattttcggccttaaagtacgaaaaactccaccaaaagagcgtcaagaaaaacttatgcgtgcacttgaaattactgggcttgttggctttgaaaatcgaaaaccagccgaactatccgggggccagagacagcgcgttgctctagctagagccattgttgccaatcaaccgctttgccttatggatgaacccttatcaaatttagatgccaaactccgtaactcagtaagaaaagacattaaaaaactaccaagtcgatctgggcatcacagtcgtatatgtaa

SEQ ID NO: 270898 - DNA, 660 bp, Unknown
  Bacterial polypeptide expressing nucleotide sequence isolated from the Sargasso Sea
aatgaaaacattaaaaatagaagatttatctaaaaattttggaactacagaagttttaaaaaaaataaatttagatattgatgaaggtaattttttagtactattagggccttctggatgtggaaaatcaacattattaaacattattgcaggtttagagacgataaatgaagggaatgtatatatagatgattacaatgtaagcaaagtagaaccaaaagacaggaatatagcaatggtttttcaatcatacgctttatatccgtctatgaatgttaaagaaaatatgatttttggtcttaaacaagctaaagcctcaaaagaaaaaattgaagagcaactcaaaaaagtttcatcttttttaaaggtagacgagttgttaaatagaaaaccttctcaattatcaggaggtcaaaggcaacgtgtagcaataggaagagccttagtaagagaacctagaatatttttatttgatgaaccattatcaaatctagatgctaaattaagagtagaaatgaggcgtgaaattaaaaagctacaccaaacattaaaaacaactgttgtttatgttacacacgatcaaacagaggctatgagcttgggtacaaaaatcgcaataatgaatcatggcgtaattcaacaaaatgatacaccagaaat

SEQ ID NO: 270899 - DNA, 574 bp, Unknown
  Bacterial polypeptide expressing nucleotide sequence isolated from the Sargasso Sea
ttcaaaagtaaacgagatgctagatcttgttggattgccaaagcgcgttgctgagagttacccctctcaattatccggtggtcagcggcaacgagtcgcaatagcacgagccctaattatgcgccctgaggtagtaatatgcgatgaaccgacctctgctctagatgtgtcagttcaatcccaaattttgaatttgctacaggatttgcgattagaacttggtttaacctatttgatgattagtcataatttagcagttgttgagcatatggcagatcgagtggcggtgatgtacctcggacgtatcgtggaggaggcagagtcggcagttttattcaaagagcctaagcatccctataccagagcattattgagttcagtgcttacgccggatccgcgtttaggtgtacccgatacgcagctgggcaccatattcccaaatcctatagatccgcccactggctgtagttttcatccgcgatgcgcaagccgaatagatatttgtagtcagaaaacgccagcaccgcatctggaaaaacagcacatggcagaatgtcacttattttcaaagtga

SEQ ID NO: 270900 - DNA, 787 bp, Unknown
  Bacterial polypeptide expressing nucleotide sequence isolated from the Sargasso Sea
tgaaactcctacaaatggagaaatttatttagataaaaatccaatttcaaatatacccccacacaaaaggggaataggaatggtctttcaaaactatgccttgtttcctcatatgacagtatatgaaaatttagcctttcctttaaaggtaagaaaatttcaaaaggatgagattgataagaaagtggataaagctctttcaatggtatcgctatctggttttgaacatagaatgccaggacagttatctggtggtcaacaacaaagggtagcggttgcaagatctttagtatttgaccctcaattagttttaatggatgaaccacttggagctttagataaaaatttaagagagagcatgcagtacgaaattaaacacattcatgaaagtattggtgttacagtagtttatgtaacccatgatcaaagtgaggcattaacaatgtctaatcgaatagcagtttttaatgatggaaaggttcaacaactttcatcaccagataaattgtatgaagagcctgtaaattcttttgttgctgaatttataggtgagaataatacttttgcagggcaagtaaccaatatgtccgccaaagaatgcaaggttaaactaaatgatggaacagaaatagttgcaaatccaatttcagtaaagtcaaatggagataaaactactgtatctcttagaccagagcgggctttaattaacacaaaagaaaaaatggataataactttaaaggaaagatagaagaggttatttatcatggagatcatactagagtaaga

SEQ ID NO: 270901 - DNA, 862 bp, Unknown
  Bacterial polypeptide expressing nucleotide sequence isolated from the Sargasso Sea
ttgaaagatcgctcaaaggaggatgaagtggcagatataaatattaatacagttaataagtactatggagatgtgcacgttattaaggacgtatctcttgatataaaaagtcaatcttttacagttttagtgggaccatcaggttgtggtaaatcaactatgcttagaatgattgcaggattagaagatataaattctggaactatttcaattgatggtcaggtagttaatgatctacctccaaaacaaagaaacattgcaatggttttccaatcatatgccttatacccacacatgacagttttcgataacatggcatttggtctaaaattagagaaaagatcaaaagatgaaatcaatgaacgcgttcaagaagctgcaagaatacttcaaattgaagattacttgcatagaaagcctaaacaattatcaggtggtcaaagacaaagggttgctattggaagagctataactcgtaaaccaaaagtattcttatttgatgaacctttatcaaacttagatgctgcactgcgtgttcaaatgcgtgttgagttagctaaactgcatgatcaacttaatgctacaatgatttatgtaacacatgatcaaacagaagcaatgacactagctaatgatattgtcgttcttgatgaaggtatcgtttcacaaaaaggatcacctatggatctatataatgacccaaataatctttttgtaggaggatttattggatctcctaaaatgaattttatctctactaaaattacaagtaagagtaatgataaaacagaagtagatttaatgggatctaaaaaaatcagtattccaaaaacttcagcatcagcctctgaaggcgatgcgg

SEQ ID NO: 270902 - DNA, 562 bp, Unknown
  Bacterial polypeptide expressing nucleotide sequence isolated from the Sargasso Sea
tatgggtgcaataaaaataaattctgtaggtaaggtctatccaaacggcactagagcattagaagatgtaaatattgagataaagaatggtgagtttgtagttctggtaggtccttcagggtgtggaaaaacaactcttttacgaatggttgcaggtttagaagatattacagagggtgaaatatcaattgataaaaaaatagtaaatgaagtagcaccaaaagatagagatattgctatggttttccaaaactatgctttatatcctcacatgtctgtctacgataatatggcattttctcttaagttacgtaaattggctaaagaagagattgatcaaaaagtaaaagaggctgcaaaaattttagaaattgatgaattacttgagagaaaaccaaaagcgctttctggaggtcagcgtcaacgtgtagctatgggtagagctattgtaagaaaaccagaggcttttttaatggatgaacctctttcaaatctagatgcaaaattaagagttcaaatgagagctgagcttggacagcttcatacacagctagaaactaca

SEQ ID NO: 270903 - DNA, 511 bp, Unknown
  Bacterial polypeptide expressing nucleotide sequence isolated from the Sargasso Sea
gtattaatagataataaaaatgtaaatagagttagagccagtgaaagagatttggcaatggtatttcaatcatatgctctttatcctcatctaacagtaagaagaaatttagaaactccattaagactaagagactataatgcatttgaaagactacccttgattggtaatttttctccaagcaaaaaagagaaaacagaatctataaatcaattagtaaataaaacttctgaaactctaaaaatttcagaactattagatagaaaacctggacaattgtcaggtggtcaaagacaaagagttgctcttggtcgtgctatggttagagagcctgttgcctttttaatggatgaacctctttcaaatttagatgcggctctgagagttcacatgcgatctgaactatctgaacttcataattcacttaaaactacttttgtttacgtaacacatgatcaagcagaagcgttaactatgtattctagaatggctgttatgattgatggaaatt

SEQ ID NO: 270904 - DNA, 666 bp, Unknown
  Bacterial polypeptide expressing nucleotide sequence isolated from the Sargasso Sea
tatggaacaatatttatcagtaaaaaatattaataagtacttcggagaattccaagcacttaaaaatgtaagctttgatgttaaagagggtgagtttgtatgtatacttggcccttcagggtgtggaaaaacaactctactaagggtaatcgcaggattagagagtcaatcagatggcttaattaatcaaaatcataaagacatttcattacttcctcctgatcagagagattttggaattgtattccagtcctatgctttgtttccaaatttaagtgtaaaaaataatatatcctttgggttaaaaacaagaaaacaaaataaagaaataatcgataaaagagtagatgaattattaaaattagttggattaagtgatcatataaataaattttccgctcaactttctggtggtgaacaacaacgtgttgcattagcaagagctttagcgccttcacctggattattattattagatgagcctctttctgctttagatgcaaaagtaagacagtatttaagattagaaataaaaaatcttcaaagacaactaggggtgacaaccattatggttacacatgaccaagaagaagcattaactatggcggatagaatcatactaatgaataatggagtaattgaacaagaaggatcacctcaagatct

SEQ ID NO: 270905 - DNA, 400 bp, Unknown
  Bacterial polypeptide expressing nucleotide sequence isolated from the Sargasso Sea
ggtttatctgaagagtattataacagatttccaaatcaattatcaggaggtcaaagacaaagagtagctattgcaagggcaattattttaaaacctcaaattttgatttgcgatgaaccaacctctgctttagatgttacaatacaatcacaaattttagatcttttaaatgatctaaaacaaaaacttaaaatcactattatattaattagtcatgacatctctgttgtgaaatatttttcagatagaataattgtgatgtataatggccaaattgttgaaactggaaattcagaagagataataaataatcccaaagagacttatactaaaaaacttatgtcttcagtcttttctttaaaacaaaacaataaaattttagacgataattttatctagg

SEQ ID NO: 270906 - DNA, 833 bp, Unknown
  Bacterial polypeptide expressing nucleotide sequence isolated from the Sargasso Sea
tagtggagaaatatatttagagggagaaccaattagcagtattccaccttacaagagaggaataggaatggtttttcaaaattatgctttatttccacatatgactgtaaatgaaaatttagctttcccattagaagttagaaaattatctaaatcagaaatagatgaaaaagttcataaagctttgtctatggttgagttacaagattttggaacaagaatgccacttcaactttctggaggacaacaacaaagagtagctttagcaagagctttagtatttgaaccaagattagttttaatggatgaaccattaggagcattagataaaaagttaagagaacagatgcaatatgaaatcaaacatattcatgagagaataggtatcacagtagtttatgttacacatgatcaaagtgaagcattaacaatgtctaatagaattgcagtttttaatgatggaaaaattcaacaaatttctacgcctgatgttctttacgaaaagcctgataactcctttgttgcacagtttataggagaaaataatcaattaagaggaaaagtaaaatcagttaatggaaagaattgtgttgttgaaactgaaaatggtgatgaaatagtttcattaaaaataaatgtaaacaatgttggcgaacaatctctactttcgttaagacctgaaagagtttgggtaaatgtagaaaatgatggctatgaaaataactttgaagcaaaagtagaagaattaatctatctaggggaccatgtaagaactagagtaaaagtttgtggagatgatcaatttatagttaaaattcctaattcttctgatc

SEQ ID NO: 270907 - DNA, 910 bp, Unknown
  Bacterial polypeptide expressing nucleotide sequence isolated from the Sargasso Sea
cacacatgtgatcaaagatgtttctcttgatataaaaagtgtgtctttcacagttctagtaggcccaagcggatgtggtaaatcaacaatcttaagaatgattgctggtttagaggaaattaattcaggtacaatatctattgatgataaagttgtaaatgatctaccacctaaagaaagaaatattgcaatggtatttcaatcttatgctctttatcctcatatgactgtatttgataatatggcttttggtttaaaaattgaaaaaaaatcaaaagaagagatagagcaaagagtaatggaagctgctaaaattttacagatagaagagtatcttgagagaaaacccaaacaattatctggaggacaacgtcaaagagtagctattggtagagctattacaagaaaaccaaaagttttcttattcgatgaaccattatcgaatctagatgcagcattaagggtacaaatgagagtagaattggcaaaattacatgatcaacttaatgcaacaatgatttacgtaactcatgatcaaactgaagccatgacacttgcaaatgatattgttgtattggatcaaggtatagtttcacaaaagggatcaccaatgaacttatataataacccagataatctgtttgttggtggttttatcggatctccaaaaatgaattttatagatagtaaaattttaagtaaaagttcaaagagttctgaagtagatataatggggactggaaagttaaatgtaccaaaaatttccgaaaatattaaagaaggggatagtataaaaattggaataagaccagagcatttaatattaaacgcagaatcagactcattatgggaaagcaaggtttttgttgtagaaaaattaggttcaggaacttatttatatttagagaaa

SEQ ID NO: 270908 - DNA, 766 bp, Unknown
  Bacterial polypeptide expressing nucleotide sequence isolated from the Sargasso Sea
atgtcttttgggttaaaattgaaaaaaaatctaagggaagaaattcaaacaaaagtaatgcaagcagctaagattttaaaaattgaggagttattggaaagaagacccaaacaattatctggaggacaaagacaaagagttgcaatcggacgtgctatcaccagaaatccaaaaatttttttatttgatgaacctttatcaaatttagatgctgctctaagatcagaaatgagagtagaaatttctaaattacataatcaaattaaaacaaatatgatttatgttacacatgatcaagtggaggcaatgactcttgccgacaggattgtaatattaaaccttggtaatattgaacaagttggtactccagatgaaatttataataatccagcaaatatttttgtagctcaatttattggaactccaaaaatgaatattttacctttaaacaatgaaaatattatctcagaaaataaaattaagtttttgggtaatcaaattatttttgaaaaaactaaatttgacaaaaaaaaatattttttgggaataagaccagagcattttaatttatctaatgaatcacaatttaaatttaaacctaaaattgatcttgttgaaaatttaggaaatgaaaagattgtatatatgagtaacgataacttagagcttagtgcaaaaatttctagtcaggaagattttcaaaatcagataaattttgattccaaagatatttttatttttgacgaaaacggaagaagaatttaaa

SEQ ID NO: 270909 - DNA, 616 bp, Unknown
  Bacterial polypeptide expressing nucleotide sequence isolated from the Sargasso Sea
tatgaatgacgcatctcaaagtttcgttaaatttgaaaagatcgataaaagttatgatggagaagtactagtagtaaaaaacttaaacttggatattgctaagggtgagtttgtaacaatgttgggtccatcaggatcaggtaaaacaacaactttgatgatgttagctggttttgaaacaccaacaaacggtgaaatatttttagatactaaaccaattagtaaaatacctccctatgaaagagaaataggaatggtatttcaaaactatgctttatttcctcacatgactgttgcggaaaatttgtcatttcctttagaagtgagaaaaatttcaaaaccagacattaaagaaaaagtacagaaagcacttgatatggttgagttaggtaattttggtacaagattcccagctcaattatccggtggacaacaacaaagagtagctttggctagagcactggtatttgaaccacgcctagtattaatggatgagcctttaggtgcactcgataagaatttacgtgaacagatgcaatacgaaataaaacatattcatgataggattggtataacagttgtctatgttactcatgatcaaagtgaagcattaacc

SEQ ID NO: 270910 - DNA, 700 bp, Unknown
  Bacterial polypeptide expressing nucleotide sequence isolated from the Sargasso Sea
ttgaaagatcgctcaaaggaggatgaagtggcagatataaatataaatacagtaaataagtattacggtgacgttcacgttattaaagacgtatctttagatataaaaagtcaatcttttacagttcttgttgggccatcaggttgtggtaaatcaacaatgctacgtatgattgcaggtttagaagatattaattctggaactatctcaattgatgggcagatagttaatgatcttcctcctaaacaaagaaacattgcaatggttttccaatcctatgcattataccctcatatgactgttttcgataatatggcttttggtttaaaattagaaaaaagatctaaggatgaaattaatgaaagagttcaagaagccgcgcgcatacttcaaattgaagattatctattaagaaaaccaaaacaactttctggaggtcaaagacaaagagttgcgattggaagagcaatcacacgtaaaccaaaagtttttttatttgatgaaccgctatctaatcttgatgcagcattacgtgtgcagatgagagttgaattagctaaattacatgatcaattaaatgcaacaatgatatatgttactcatgatcaaacagaagcgatgactttagcaaatgatattgtagtattagatgaagggatagtttcacaaaaaggtacgcctatggaactttataacaatc

SEQ ID NO: 270911 - DNA, 469 bp, Unknown
  Bacterial polypeptide expressing nucleotide sequence isolated from the Sargasso Sea
atggaagattttgtaaaatttgaacgtatcgataaaagctacgatggcgaagttctagttgttaaagacttaaatgttgatatcgctgaaggagagtttttaactcttcttggcccttcgggctcaggaaaaacaactactttaatgatgctggctggatttgaaactccaacgaatggtgaaatttatcttaaaggaactccaatcagtaaaattgctccatatgaaagaggcatcggcatggtctttcagaactatgcgctgtttcctcacatgactgttcaagaaaacctcgctttcccactagaggttagaaaaatgtcaaaagcagatgcacaagaaaaagttaaagctgctcttgatatggttgaacttggagaatttggaacacgtttccctgcccaactgtcaggtggacagcaacaacgtgtcgctttagcacgtgctttagtattgaacctcaattagt

SEQ ID NO: 270912 - DNA, 856 bp, Unknown
  Bacterial polypeptide expressing nucleotide sequence isolated from the Sargasso Sea
gctggattagaagatatagttgagggtgaaattcaactagacgataaagtaatgaatcaaatacatccaagagatcgtgatatagccatggtttttcaaaactatgcactttaccctcaaatgaatgtgtttgataacatagcttttagtttacaaattagaaaaatttcaaaagatgaaattgttaaaaaagttaattgggctgctgagattctaaatttaacagagtatttaaaaagattgccaaaagaactatctggtggtcaaagacaacgtgtagccatgggacgtgcattagtaagagatccaaaagtttttttatttgatgaaccattatctaatttagatgctaagttacgaagtcatatgcgttatgaaattagaaaattgcataatgatttacaaacaacaacgatatatgtaactcatgatcaaattgaagctatgactatggcagacgaaattgtcgtaatgaataatggcattattgaacaaattggctctccatttgaaatttatgctaaaccaaataatacttttgtggcagactttataggctcaccatcaattaattttatgaaaggtattgtaactgataataactctgtaaaattaaattcgattgaattacctttaaaaacaatcaagctatcttcgggttcagaagtttattttggagtaaggcctgttgatgtgcttcttgattctacttctaaattaactgttaatgtggatttagttgaaacaacaggatcagaaacgcatctttcaacattttttgataatgagcatttccacatagtcgttcctggcgggcaaactgatattaaaattggagataaattaaatattagtt

SEQ ID NO: 270913 - DNA, 529 bp, Unknown
  Bacterial polypeptide expressing nucleotide sequence isolated from the Sargasso Sea
tatgggagcaattgatattaagtcagccgggaaaatatatccaaatggtactagggctttagaagatgtaagtataactattaatgatggtgaatttgtagtgttagttggtccttcaggatgtggaaaaactactttgctaagaatggttgctgggctagaagacataactgagggggaaattgcaattggtgataaaacagtaaatgaagtagcaccaaaagatcgtgatattgcaatggttttccaaaattatgcgttgtatccgcatatgtcagtttttgacaatatggctttttctttaaaactgagaaaactgccgaaaaatgaaattgaaaaaaaagttaaagatgcagccaaaactttagagataggtgaactattagatagaaaaccgaaagccttatcaggtggacaaagacaaagggtagcaatgggaagagcaattgtaagaaatccgcaagcatttttgatggacgagcctctctctaatttagatgcaaaattaaagagttcagatgagggctga

SEQ ID NO: 270914 - DNA, 550 bp, Unknown
  Bacterial polypeptide expressing nucleotide sequence isolated from the Sargasso Sea
tgatggaattgagttaacaggaaatttaaaaaatattgataatgttagaaaagaagttggaatggtattccagcaatttaatttattccctcatttatctgtaaaagaaaatataacgttagctccaatttgggttaaaaaaatgccaaaggcagaagcagaggaactggctatgagacagttagaaatagtaaaaattcctgaacaagccaacaagtatcctggtcaattatctggtggtcaacaacaaagagtagcaattgctagatctcttgcaatgaatcctaacatcatgctttttgatgaaccaacttcagctctagatcccgaaatgattaaagaggttttagatgttatggttgatttggcaaatggtggaatgacaatgattgttgttacccacgaaatgggttttgctaagacagtagctgatagaatggtgtttatggatgagggtaaaattgttgaggaagctagcccagataagtttttcaataatccagagagtgatcgtacaaagttatttctaagtcaaattcttcatcagtaa

SEQ ID NO: 270915 - DNA, 776 bp, Unknown
  Bacterial polypeptide expressing nucleotide sequence isolated from the Sargasso Sea
actgggagtacataaatcttttggctctaataagattattacagacttcaatttatctggcaaggatgatgaatttcttgtattggtaggcccgtctggatgtggaaaatcaactttgttaagaatgatcgcaggtttagaacagattgatgaaggtgaaatatttattaatgatcaaaaaataaacgatctacatccttccaaacgacaaactgcaatggtgtttcaatcatatgctctttaccctcacatgaatgtttatgaaaatatgtcatttgggttaaagatagaaaagagatctaaagaagaaatccaaacaaaagttatgcaggcagcaaaaattctaaagatagaagaattattggaaagaagacctaaacaattatcaggtgggcagagacaaagagttgcaattggaagagcgataacaagaaatccaaaaatatttttatttgatgagcctttatcaaatttagatgcagcactaaggtcagaaatgagagttgagatttccaaattacataatcaaattaaaacaaatatgatttatgttacgcatgatcaggtagaggcaatgaccctagctgataggattgtaatattaaatcttggtaatattgaacaagttggaactccagacgaaatttacaacaatccagcaaatatttttgtagctcaatttattggaactccaaaaatgaacattttacctttaaataatgaaaatattatttcagaaaataaaattaagtttttaggcaatgaaataacttttg

SEQ ID NO: 270916 - DNA, 742 bp, Unknown
  Bacterial polypeptide expressing nucleotide sequence isolated from the Sargasso Sea
atagacagtaagactattaactcaaaagtaaaagaaattgctgagcttgtttacatacctgagttacttaaaagaaaaccagcgcaactttctggaggccaacagcaacgcgtagcattggcgagagctttaattaggaagccagacattttacttctagatgaacctttagcaaacctagatgctaagcttagactagaaatgcgttcagaaatcaaaagaattcaaaaagaaacaggaataactgctattttagttactcatgatcaggtcgaagccatgtcaatgtgtgatagaattgcgcttatgaaagatggaaagattattcaattatccactcctgatgaaatgtataaaaatccaaaagataaatttgtggcgggttttattggtaatccaccaatatcttttgttgaaggtttttataaaaatggaatgtttagtacaaaagatttaaatattaatttagcaaagaatttaaacatctctgaaaatacagatttaactctaggaattagacctgagcattttggacctcaatatgaagataaaatatctggcaaaatttcttttgtagaaactcaaggaagagaagatttgtatgatgtaaattttaatgattatgttacaatacgatcaatacaaccttcggaaaatagagttgaattaaattcagaggtcaattggggaatattgactgaaggaatattactattcgacaaagatggaaaaagactctaat

SEQ ID NO: 270917 - DNA, 766 bp, Unknown
  Bacterial polypeptide expressing nucleotide sequence isolated from the Sargasso Sea
tacggtctagaaaaccagcgggtgccaaagcctgaaatccgaaagcgggtcgttgaattactggaactggtcgggctgcccgagcaaacctcaaaataccctgcacaactctccggaggccagcaacagcgtgttgccctcgctcgcgctttggcgacctcaccgggattgctattgctcgacgagcctctgagtgctcttgatgcgcgggtccgtgcttcactccggcaggaaatccgtgcactgcatcagcgtctgggcatcaccaccatccttgtcacacacgatcaggaagaagcactttcaatggcggaccgcatcgtggtgatggatcatgggagcatcgagcaggtaggaactccggaggaaatctatagtactcccgcctcaccctttgttgcggattttattggcgtgatgaatttcatggaagcagaggttttggcttccggaacgatacgggtaggagagacctcactttcctgcgacacgacgaatgtttccagcggagaaaaagtccggatgacggtgcgtccggaagatttgcggtgtcacaccaaaacggtagatttaccaaatggacttccagtccatgtcgacaccctcgaatttctggggtcattctgtcgtcttaagctgaagggaccggaaggattcagtaccttgcgggcggacctttcgctccagcaggttcaccaactcaaggctgctccagacgttccgctgaccgtcgaatttccacctgattccctccgcctttttccag

SEQ ID NO: 270918 - DNA, 814 bp, Unknown
  Bacterial polypeptide expressing nucleotide sequence isolated from the Sargasso Sea
gctgcgtgtcagagtatttttgcggtactggatgaagaaatagaaaaagacgcgggttcgcttgatgccaataaaataaaaggcaacataagctttaacaacgtaacatttacctatccgggtaagcacactccggcgattgatagcatgaatctcgatgctcccgccggcaccagtattgcgttggtgggccgttcgggcagcggcaagtcaaccatgtcgagtttacttactcgtttctacttgcccgagcaagggcagatcacgctggataacaccgatatcaatgaatttaagctcactgagctgcgcaaaaatatcgccctggtatctcagcaggtaaccttatttaacgatactatcgccaacaacattgcctatggcgtagccgaaaacgtctcccgggaggccattgaaaaggcggctaaactggctcacgtaatggaatttgcagagttgctcgaagacggtctggataccatgattggtgaggatggctctgcgttgtctggcggacagcggcagcgggtggccatcgccagagcattgctgctggatgcgccggtgttaattctcgatgaggcaacttcggcgctggataccgaatcagaacggatgatccaggatgccctggtgacactgcaacaggatcgcaccagcattattattgcccaccggttatccactatcgaaaatgccgaccagatcctggtgatcgaccagggtaagattattgagcagggcaagcatcaggacttactcaacaagggcggtgcttatgcgcagttacatgcgctgcagtttggggagtagc

SEQ ID NO: 270919 - DNA, 700 bp, Unknown
  Bacterial polypeptide expressing nucleotide sequence isolated from the Sargasso Sea
atgaaaaaagcagaagtaaagtttgaaaatataactaaaaaatttaatgaaactacagcggtagataatgttagctgtaaatttgaagctggaaccttaactactttgcttggtccatctggttgtggaaaaactacttcattaagaattattgcaggtctcgaaagagctacaagtggtaaaatattagtagatgatgaagacgtaacattattgccagcaactgacagagatgtatcaatggtatttcagtcttatgctttatttccacatatgagtgttattgaaaacgtctcatacggattgaaaatgatcaatgtgaataaggaagaatatattcaaaaatctttagaaactctaaaattggtaaatttagaggggtatgaaaatagaatgccatcagaactatctggtggacagcaacaaagggttgcagttgcaagagcaattgtgttggaaccaaaagtattgctattcgatgaacctctttcaaatttagatgcaaaattaagaagacaggtccgagaagatataagagaaatacaacaaaaacttggagttacaaccatttatgtaactcatgaccaagaagaagctttagcaatatctgacaaagtaattgtaatgaataatgcggtaatcgctcaagaaggtagtccaaaagatctttataattatccaaaaaaaataaatttgtagc

SEQ ID NO: 270920 - DNA, 574 bp, Unknown
  Bacterial polypeptide expressing nucleotide sequence isolated from the Sargasso Sea
atggcagattcaaaaaaaaatcagacaaaagtgtctccaagcgtaattaaaatttcgtcattgaacaaatggtttggtaatttccacgttttgcaagatattgaccttactgtttctcaaggtgagaagatcattatttgtggtccatcgggaagcggtaaatcaactcttatccgctgtataaataggcttgaggaacaccaagaaggcacaataatagtaaacggtactgaattgagccacgaccttaaggatatagatgctgtacgaagcgaggttggaatggtttttcaatcttttaacctgtttcctcaccttacagctctagaaaattgcacattagcgctcatttgggttcgtaaaacaccaaaggcagaagcagaagcaacagcaatgcaatacctcgaaagagtaaagatacctgaacaggcgcataaatacccgggtcaactttccggaggccaacaacagcgcgtcgccattgctcgctccttgtgtatgaaacctaagataatgctttttgatgagcctacctcggcccttgatccggaaatgattaaagaggtgctagata

SEQ ID NO: 270921 - DNA, 809 bp, Unknown
  Bacterial polypeptide expressing nucleotide sequence isolated from the Sargasso Sea
aatgtcagaaataataattaaaaatctcaataaatcttacggaaaaaacaaggttattaattcattcaatatagatattcgtgatggtgaatttattgttttggtgggtccatctggatgtggaaaatcaactttactaaggatgatttcaggtcttgaaactgttgatgaaggagaaatttttttagataaaaaactaataaataatttaatcccatctaaaagaggaattgcaatggtatttcagtcttatgctctttacccgcacatgaatgtttatgaaaatatgtcctttggattaaaaatggaaaaattatctaagagcgaaattgataagaaagttactgaagcagcaagtacacttcaaattaaagatttacttgaaagaaaacccaaagaactttcaggtggtcaaaggcaaagagtagctattggtagagctatcacaagaaatcctaaattatttttatttgatgagccattatcaaatttagatgcagcattaagatcggaaatgagggtagaaatttcaaaacttcatgaaaaaatgaaatcaaatattatttatgtaactcatgatcaagttgaagcaatgacacttgctgacagaatagtcatcttaaataatggtaatgtagaacaatttggaactcctaatgaaatttattcagatccaaacaatatctttgttgcagagtttataggttcaccaaagatgaatataataaaaatcgataaagaaaatataattaacggtgatactattaaagttttgaataatgaaattaaattgaaacaaataaatctaa

SEQ ID NO: 270922 - DNA, 736 bp, Unknown
  Bacterial polypeptide expressing nucleotide sequence isolated from the Sargasso Sea
atgtcagataaaataatacagattacagaaatgaataaatggtttggtgatttccaagttttaaaagatattaatttagaagttgaaaaaaataaaaaaattgtagtgtgtggtccatctggttctggtaaatcgacattaataagatgtataaacagattagaggaacatcaaaagggctctattatagttgatggaaacgaattaacggaagacactaaagatatagaaaaaattagggctgaggttggaatggtatttcaacaatttaatttattcccacatctttctattttagataattgtaccttagctccaatttgggtaaagaaaatgccaaaaaaagatgctgaagaattagcacttcaacatctagagaaagtgcaaattgcagatcaagctagcaaatatcctggacaattatctggtggtcaacaacagagatgtgctattgctagagcattatgtatggaaccaaaaataatgttatttgacgaaccaacatcagctttagaccctgagatgattaaagaggtcttagatgctatggttaatttagcaaaagcaggaatgacaatgattgtagtaacacacgagatgggatttgctaaagaagtagctgacgaggttatatttatggatgaaggaatgatagttgaaagagcagaaaccaaagagttttttgccaacccaaagagtgatagaactaagctatttttaagtcaaatcttgtaaa

SEQ ID NO: 270923 - DNA, 712 bp, Unknown
  Bacterial polypeptide expressing nucleotide sequence isolated from the Sargasso Sea
atggcaaaaaataatgaatttgtaaaatttgataaagtcgacaagagttatgatggaaaggtcttagttgttaaagacctaaatttagatatagctgaaggtgaatttataactatgcttggaccatctggttcaggaaaaactacttgcttgatgatgttagcgggatttgaaactccaactaatggagaaatttatctggatggaaatccaatctcaaatattccacctcataaaagaggtattggaatggtatttcaaaactacgcattgtttccacatatgactgtttatgaaaatttggcatttcctttaagagttagaaaaatttcaaaagacgaaacagataaaaaagttgaaaaagcattatcaatggtttcattgacaggttttggaagcaggatgccagctcaactttcaggtggtcaacaacaaagagttgctgtagcgagagccttagtttttgatcctgcggtcgttttaatggatgaaccgttaggtgctttagataaaaatcttagagaaagtatgcaatatgaaattaagcatattcatgaaagcatcggagtgacagttgtatatgtcactcatgaccaaagtgaagctttaacgatgtcaaatagaattgcggtttttaatgacggaaaagtgcagcaactatctagtcctgataaattatatgaagaacccagtaaattcattgttgcggaat

SEQ ID NO: 270924 - DNA, 947 bp, Unknown
  Bacterial polypeptide expressing nucleotide sequence isolated from the Sargasso Sea
tggcaggaatacactcaagggtgtaactaagacgtatggatctcaaagtgtcttaaatgatattaacctagatatcgctgacggtgaattcctcacacttgttggcccatcgggttgtggaaaatctactacattaagaataattgccggcctggaaacacagtctactggtgacgtgtttattgacggttctactgttaacgaaaccaggcctagcaaacgtgatttagcaatggtttttcaatcctatgctctttatccccacttgacagtacatcagaacctcataaccccgctaaagcttagagatttaacagcccttgagagagtccctttattcggacatctaatgcctgagcgtagtaagaaaatgtctactatttctgctgaagtccaaaaagtggctgaaattttgaaaattgagccacttttagatagaaaaccaggtcaactatctggaggtcaaagacagcgggttgctttaggacgggcaatggtaagaaacccagcggcttttcttatggatgaaccattgtcaaatttagatgcaagcttgagagtgcatatgcgcgctgaactttccgaattacaccgggaacttaaagctacatttatttacgtcactcacgatcaggctgaagcacttacgatgtcagatcggatagcggttatgatggatggagatttattacagcttgggcctccagacgaggtttacgaaaaccccaccgacatcagagtagccgaattcatcggaagccctaaaatgaatattttacctgcctcttgtgatgctaaaggctcagtggattgtcttggtcagaaaataaaaattgcccttacgaaaaataaaaaacaaactctatctataggtattaggccggagcatttagttttgccatctggtgctaaaagctctttttcaggtaagctaacctacaaggaaa

SEQ ID NO: 270925 - DNA, 594 bp, Unknown
  Bacterial polypeptide expressing nucleotide sequence isolated from the Sargasso Sea
catgtctgaagctcaacagccctacttaagaattgaggacctcaccaagcattttggggagtttgtcgcggttcgggaactttcgctggaaatcaacggaggagagttcgtatgctttcttggtccttctgggtgcggcaagacaaccctgctccgtgcgattgccggactcaatccccaaaccaccggacgcatcacgcaaaatggacaggacatttccagcctgccgccctccgaacgggattttggcattgtttttcagtcttatgccctcttcccaaacctgacggttttccagaacatcgcctacggtcttgaaaaccagcgggtaccaaagtctgaaatccgaaagaaggtcgttgaattactggaactggtagggctgccggagcaaacctcaaaataccctgcacaactttctggaggccagcaacagcgtgttgccctcgctcgcgctttggcgacctcaccggggttgctgttgctcgacgagcctctgagtgctcttgatgcgcgtgtccgtgcttcactccgtcaagaaatccgtgcactgcatcagcgtctgggcatcaccactatcctcgtcacacacga

SEQ ID NO: 270926 - DNA, 524 bp, Unknown
  Bacterial polypeptide expressing nucleotide sequence isolated from the Sargasso Sea
tatgtcagatccaattataaaaattcaaaatatgaataaatggtttggtgattttcaggttttaaaaaatattaatttagaagttgaagcaaataagaaaattgtagtatgcggcccgtcaggctccggcaaatcaacattaattagatgcatcaatagattagaagagcatcaagagggtgatataatcgttgatggaaatgaactatcagaaaaaacaaaagatattgaaaaaattagagccgaagttggaatggtttttcaacaatttaatttatttccacatctatcaatattagataattgtactctcgcacctatttgggtaaaaaaaatgccaaaaaaagaagctcaagaactagcactagatcaacttaaaaaagttcaaatagatgatcaagctaataaatttcctgggcaactttcaggtggacagcaacagcgttgtgcaattgctagagcattatgtatgcagccaaaaattatgttatttgatgaacctacatctgctttagatccagaaa

SEQ ID NO: 270927 - DNA, 619 bp, Unknown
  Bacterial polypeptide expressing nucleotide sequence isolated from the Sargasso Sea
tatgtcagaaaattcaataatttcattacaaaatgtcaataaatggtttggtgatttccaagttctaaaagatgtgaatttagaggtaaaaaagaaagaaagaatagttgtctgtggtccttcaggatcaggtaaatcaacaatgataagatgcattaatcgattagaagaacatcaggaaggaaaaattgtcgtagatggaattgaacttacaggtaatctaaaaaatatcgacagtgttagaaaagaagtaggtatggtatttcaacagtttaacttgtttcctcatttatctgtaaaagaaaacataacgttagctccaatctgggtaaaaaaaatgcctaaagctgaagcagaagagctcgcaatgaaacaattagagattgttaagattccagagcaagcaaataaatatcccggtcaactatctggaggtcagcaacaaagagtggctattgcaagatcccttgcaatgaaccctaacattatgctttttgatgaaccaacatctgctcttgatcctgaaatgattaaagaagttttagatgttatggttgatttagctgaaggcggaatgactatgatcgttgttacacacgaaatgggttttgctaaaaca

SEQ ID NO: 270928 - DNA, 761 bp, Unknown
  Bacterial polypeptide expressing nucleotide sequence isolated from the Sargasso Sea
aatgtccggtgtaacacttgaaaaaatcgttaaacgttatggttccacggtggcagttgacgatatttcattaaatatcaaagagggagagtttcttactctcctcggaccctcaggctgtggcaaaacaactactttgcgtttgatatcaggttttatccaaccaaccagcggcgccattcattttggagaaaaagatgtaactggaatagcaccacagcaccgacagattggtatggtgttccaagactatgcattgttcccccacttaacagtgagcgagaatataagttttgggctagtggaacgtaagtacgagaaacacgctattaaagaacgggtagatgagctactggctctcataaagcttgaaaacgcggcggagagatatccaagtgaaatatccggtggtcaggcgcaaagggttgcagttgcccgggctgttgcacatcctcccagcgtgttgctaatggacgaacctttaggggcacttgacctcaaactgcgtgaaaccatgcaaacagaacttcgccgtattcagcaagagcttggcattactgctgtttatgtcacgcacgaccaatccgaagcaatgaatatgtccgacagaattgttgttatgaattcgggtgttattgagcaaatcggatcaccaaaggatatatacaccaacccgcagtccgttttcgttgcaaatttcattggacaagtgaacatactgaattgtcacgtggtaaaaaatgaccgcgagaccactgagc

SEQ ID NO: 270929 - DNA, 910 bp, Unknown
  Bacterial polypeptide expressing nucleotide sequence isolated from the Sargasso Sea
gtaaaatcgacccttctgcgcctagttgcaggtttggaagatgttacccagggagaaattgaaattgatggccagcgggtagatcaccttcctcctgcaaaacgaggaattgcaatggtttttcagtcatatgccctttatccgcacatgaacgtttaccaaaacatgtcatttggattaagactggcaaagactgataagaaaataactgaccaaaaagtgagggatgcagcagaaattctgcagattacagaacttttagatcgcaaaccaaaagaactatcaggtggccaaagacagagagtagcaatcggaagagctattgttagagatccaatggtttttctgtttgatgagccgctatcaaatcttgacgctaagcttcgtgtgcaaatgaggatagagcttactaaattgcacagagaactcaatgccactatgatttatgttacacacgatcaggtcgaagccatgactatggcggacaaaatagttgttctccgtgaaggttatgttgaacaggttggagcacctctggatttgtatcataaacctgcaaatatttttgttgcaggtttcatcggttcaccagccatgaattttatggacggaacaacctcaggcatttctgataaggccgtagagcttgagctaaacagtaaattaaagattaaaatcccctgcactccaggaaatgatgcagcaacaggaagtcccgtcagtgtaggtgtccgtccggaacaccttgaactgacatcagataaagaagcaaaattacgcggtgaggttttcgcagtagagcgactcggaggtgaaacatacctttatgtgagcactgaaagcaacaaagagcttactgttcatgctgctggggacaaagttgttagtgtgggtgattctgtatcaatag

SEQ ID NO: 270930 - DNA, 748 bp, Unknown
  Bacterial polypeptide expressing nucleotide sequence isolated from the Sargasso Sea
tatgaaaaagaaaataggtaaagaaataatttcagctgagaatgttgtaaagaaatttggtgattttgctgctttaaaaggtgttacagcaaaaatttttgagaaagaggtagtagttgtgcttggcccttctggatctggaaaatcaacttttataagaactataaatagacttgagccacataattcaggaaaaatagttgttgatggtgttgagattaatgatgatgttaagaatttacaaaaggtaaggtcaaatgtagggatggtatttcagcaatttaatttatttcctcatttgtctgttttaagaaatataactttagctcctcagaaagttaaaggattaagtagagcagaagcgaatgacgttgctatgtctcttcttgaaagagtaggtattcctgagcaagcagagaaatttccatcacaattatcaggaggacagcagcaaagagtagcgatagctagggcattggctatgcagccaaaaattatgttgtttgatgaacctacttcagcattagaccctgaaatgataaaagaagttttagaggtaatgacagaacttgcagagtcaggaatgactatgatttgtgttactcatgagatgggttttgctagaagtgttgctgacagatttttattttttgatgaaggcttgatagttgaagaaggaaccccagagcattttttcaagaatccaaaagaagagagaactaagttattcctaagtcagatattatag

SEQ ID NO: 270931 - DNA, 680 bp, Unknown
  Bacterial polypeptide expressing nucleotide sequence isolated from the Sargasso Sea
aatgtcagataaaataatacagattacagaaatgaataagtggtttggtgattttcaagtattaaaaaatataaatttagaagtagaaaaaaataaaaaaattgttgtctgtggaccttcaggatcaggtaaatcaacattaattagatgtataaacagacttgaagaacatcaacaaggttcaattatagtagatggaaatgaattaacagaggacactaaagacatagaaaaaattagagctgaagttgggatggtgtttcaacaatttaatttatttcctcatctttctattttagataattgcacactagcgccaatttgggtaaaaaaaatgccaaaaaaagatgctgaagaattagcgcttcaacatttagaaaaagtacaaattgcagatcaggcaagtaaatatcctggtcaattatcaggaggtcagcaacaaagatgtgctattgctagagcattatgtatggagccaaaaataatgttatttgatgaaccaacatcagctctagacccagaaatgatcaaagaagttttagatgcaatggttaatttagcaaaagcaggtatgacaatgatagtagtaactcatgagatgggatttgctaaagaggttgctgatgaggttatttttatggatgagggtatgattgttgaaagagctgaaactaaagagt

SEQ ID NO: 270932 - DNA, 793 bp, Unknown
  Bacterial polypeptide expressing nucleotide sequence isolated from the Sargasso Sea
aatgaaaacgttaaaaattgaagaattatcaaaaaactttggatcaactgaggtcttaaaaaaaattaatttagagatagatgaaggtaattttttggttttattaggaccatctggttgtggaaaatcaacattacttaatatcatcgctggtttagagactattaatgaaggaaatgtttttattgatgattacaatgttagtaaagttgagccaaaagaccgtaatattgcgatggtttttcaatcttacgctttatatccatcaatgaatgttagagaaaatatgatctttggtcttaaacaggcaaaaacatctaaagaaaaaatagaggaacaactagaaaaagtatctaaatttttacaagttgatcaattattggagagaaaaccttcacaattatctggaggtcaaagacaacgtgttgcaattggaagagctcttgtaagggaaccaagaatatttttatttgacgaacctttatctaacttggatgcaaagttaagggttgagatgagaagagagattaaaaaacttcatcaacaattgaaaacaacagttgtgtatgtgactcacgatcaaactgaagcaatgagtttaggaacaagaattgcgattatgaatcatggtgttattcaacaaaatgatacacctgaaattatttataataaacctagcaacacatttgtagctgacttcatcggatcaccatctatgaatttaataaatggtactttaaaagaaacttcaagtgaaatatcttttacagcaagtgggttctatattgaaatt

SEQ ID NO: 270933 - DNA, 721 bp, Unknown
  Bacterial polypeptide expressing nucleotide sequence isolated from the Sargasso Sea
aattaaaattaatgatgtaaataagtggtttggtgactttcaggttttaaaaaatattaatttagacgttaaaccaaaacaaaaaattgtagtgtgtggtccatcaggatcaggaaaatctaccttaataagatgtataaatagacttgaggaacatcaagaaggcacaataattgtcgatggtaatgaattgaatgaaaatacaaagaatattgaggaaattagagctgaagttggaatggtttttcaacaatttaacttatttccacatttatcaatcttagataattgtacattggcacccatttgggtaaagaaaatgccaaaaaagaaggcagaagaattagctttaaaacaattagagcaagtccagatagctgatcaagcttacaaatttccaggtcaattatctggtggtcaacaacaaagatctgctattgcaagagcattatgtatggagccaaaaataatgttatttgatgaaccgacatctgcattagatccagagatgattaaagaggttttagatgcaatggtaaaccttgcaaaaggtggaatgacaatgattgtagtaacacatgaaatgggatttgctaaagaagtagcagatgaagttatttttatggatgaaggtatgattgttgaaaaaaatacgactaaagaattttttgcaaacccaaaaagtgatcgtacaaagctatttttaagtcaaattttataa

SEQ ID NO: 270934 - DNA, 885 bp, Unknown
  Bacterial polypeptide expressing nucleotide sequence isolated from the Sargasso Sea
tatggcatctaaaaaagatttcgttaaatttgataaagttgacaaaagctacgatggtaaaattctggttgtaaaagatcttcaattagacatagctgagggtgagtttataacaatgttagggccttctggttctggtaaaaccacctgtttaatgatgttggctggatttgaaacaccaacaaatggtgaaatttatttagatggaaatgcgatttcaagtattccccctcacaaaagaggtataggtatggtttttcaaaactatgcgttatttcctcatatgactgtttatgagaatttagcttttcctttaagagtaagaaaaatacctaaagacgaggcagataaaaaaattgataaagcattatcaatggtatcattacaaggttttgctgcaagaatgcctggccagttgtctggaggacaacaacaaagagtagctgttgcaagatcactggttttcgatcctcaactagttttaatggatgaacctcttggagctttagataaaaatttaagagagagtatgcaatatgaaattaaacatattcatgagagtattggcgttactgttgtttatgttacccatgatcaaagcgaagcacttactatgtcaaaccgtattgctgtatttaatgatggaaaagttcaacaactttccagtcctgacgaattgtatgagaagccagtaaattcttttgttgctgagttcataggtgaaaacaatacttttgtgggtgaagtatcagatatttttgatggtaagtgcaaagtaaagttagctaatgctgaaatattagcaaatccaatttcagttaggggcaaaggtgagaaaacgacagtttcattaagacctgaaagagcattaattaatcccagcga

SEQ ID NO: 270935 - DNA, 795 bp, Unknown
  Bacterial polypeptide expressing nucleotide sequence isolated from the Sargasso Sea
aaggttttagttgttaaagacttaaatcttgatatcaacgaaggtgaatttattacaatgttaggaccttctggttctggaaaaacaacttgcttaatgatgttagcagggttcgagacaccaactaatggtgagatttatttagattctaaacctatatcaagaattcctccacacaaaagaggaatagggatggtttttcaaaactatgctttgtttccacatttaactgtttatgaaaatttagcttttccattaaaagtaagaaaacttgcaaaagatgatatcgataaaaaagttgataaagctttatccatggtttctttatctggatttgaaaaaagaatgcctaatcaactgtcaggcggtcaacaacaaagggttgctgtagcaaggtcattagtatttgaccctcaattagttttaatggatgaacctttaggagctttagataaaaatttaagagagagtatgcagtatgaaattaaacacatccacgaaaatattggtgtaacagtagtttacgttacccatgatcaaagcgaagctttgactatgtctagtagaattgctgtatttaatgatgggaaagttcaacaactatcaagtccagataaattatatgaagaaccagtcaattcatttgttgcagaatttattggtgaaaataatacattttctggacaagtgacagatatctcaggaggtaaatgtaaagttaaactagatactggcgctgaaataatttctaatcctataagggtaaaaacaaaaggagaaaaaactaaagtttca

SEQ ID NO: 270936 - DNA, 352 bp, Unknown
  Bacterial polypeptide expressing nucleotide sequence isolated from the Sargasso Sea
tccggagcagcactgaaataccccggtcaattgtcggggggacagctgcagcgtgtggcaattgcgcgcgcactttgcatgcagccacaattgatgctgttcgacgagccaacctctgccctggatcctgagatgatcaaagaggtccttgacacaatggttgagcttgcagaggacggcatgacaatgatttgtgtgacgcatgaaatgggctttgcccgaaaggtggctgaccgagttatctttatggatgaaggccaaattattgagcagaatgagcctgaagccttttttaataacccccaatctgaccgcacgaagcttttcctaagtcagatccttgggcactagg

SEQ ID NO: 270937 - DNA, 899 bp, Unknown
  Bacterial polypeptide expressing nucleotide sequence isolated from the Sargasso Sea
catgccggcgcgcagcatcggcgtcgtgcgcaaaccgatgcaccgtccaccgtggacgcctgagaggaacgcagccatggctaatcttttcgacgtgccgcagttcattgaagacgccccatcccgcggcttgaatcgcgttgcgcctgacaccgcgcagcacgctgtcgttttcgacaatgtgggcaagcttttcgccaacacgcgcggtgtgtcgaccgcggcgctttcgaacgtcacgctgaaggtggcgcgcggcgaggtgttcggcattatcgggcgcagcggcgcaggcaaatcgacgctgctgcggctcgtcaacggtctggaaaaaccgagttccggcgtggttcgcgtgaatggcgtgagtgtcggcgaactcgacgaacgcgggctggttacgttgcgccggcgcatcggcatggtgttccagcatttcaatctgctctccgcgaaaacggtgcgcgagaacattgcattgccgctaaagatcgccggcgcgccgaaagccgcgatcgacaaaaaggtcgatgggttgctcgatctggtcggtctttccagcaagcgcgacgcttatccggcgagtttgtccggtgggcagaaacagcgcgttggaatcgcgcgcgcgctcgtgaccgacccggacatcctgctatgcgacgaagcgacgtccgcactcgatcccgaaacgacacaggccattctcgcgttgctgcgcgatatcaatcagcggctcaaactgaccattgtgctgatcacgcacgaaatgcaggtgattcgcgaggtctgcgatacggtggcggtgatcgagcgcggcgaagtggtggagaccggttccgtgtggcgcgtgtttggcgacccgcagcatgacgcaacgcgcgcgttgctgcgtacgctgg

SEQ ID NO: 270938 - DNA, 541 bp, Unknown
  Bacterial polypeptide expressing nucleotide sequence isolated from the Sargasso Sea
atgagctctgaattaatgatagaaatgaaaaatgttcacaaatggttcggtgaacttcatgtattaaatgatattaaccttgaaattaacaaaggggaaaagattgttatttgtggtccatccggatctggcaaatcaacacttatcagatgcatcaatagattagaggaacatcaaagaggaaatattatagtagaaggcacagagctgactaacgacagcagaagtatcgagagaattcgtggggaagttggaatggtattccaacaatttaatttatttccacatttatccatattagacaattgttcgcttgcccctatatgggttcgcaaactacccaaagctgaagcaaaagaaaaagctatggaatatttaaaacgagttcaaatagatgatcaggcacacaagtatcctgctcagttatctggtggccaacagcaaagagcggcaatagcacgagcactttgcatggagccgagaattatgctttttgatgaacccacttcagctcttgatcctgagatgattaaggaagtat

SEQ ID NO: 270939 - DNA, 529 bp, Unknown
  Bacterial polypeptide expressing nucleotide sequence isolated from the Sargasso Sea
atgtcgaaaattgttattaaaaatctcgaaaaatcttttggtgataataaagttattaataaattcaacatagatataaaggatggagaatttatagttttagtaggcccttcaggttgtggaaaatcaactttattaagaatggtttcaggactagaaagtattgatcaaggagaaatatttttagatacaaaattaattaataatttaattccttctaagcgtgaaattgcaatggtctttcaatcttatgctttatatcctcacatgaatgtttttgaaaatatgtcatttggtttgaaaatggaaaaaattccaaaaaatgaaattaaagaaaaagtttatagtgcagctgccacacttcaaattgaggatttactagatagaaaacctaaacaactttcaggtggacaaagacaaagagttgcaattggtagagcaattacaagaaatccaaaagtattcttatttgatgaaccattatctaatttagatgcagctttaagatctgaaatgagagttgaaattt

SEQ ID NO: 270940 - DNA, 370 bp, Unknown
  Bacterial polypeptide expressing nucleotide sequence isolated from the Sargasso Sea
gcttgtaagccaagaacctgcgctctttacgggctcgatagcggataacatcaagtatggccagcccgacgcctcgctcgaagacgtgcgccacgccgcgtcgctcgcgaacgcgctacagttcatcgacgcgctgccggagggcttcgacacgcaagtcggcagccgcggcgtccagttgtcgggcggccagaagcagcgcgtcgcgatcgcgcgggccatcgtccgcaacccgcgactgcttatcttggacgaggcgaccagcgcccttgacgcgaagtctgagcagatcgtgcaggccgcgctcgacgggcttgtggccgcgtcgtcgtgcacgacgctggtgatcgcgcaccggttgtctacttag

SEQ ID NO: 270941 - DNA, 640 bp, Unknown
  Bacterial polypeptide expressing nucleotide sequence isolated from the Sargasso Sea
atggccgatgttaaaatgagctccatttacaagtcctttggaaatacagaggttatccacggtgttgaccttgaaatagaagatcatgaatttgtggtgtttgtggggccttccggctgtggtaaatcaaccctcttgcgccttattgccggtttggaagatgttacacagggagagattgaaattgatggccaacgtgtagaccaccttcctcctgcaaaacgaggaatcgccatggtatttcagtcatatgccctttatccgcacatgaatgtttaccaaaacatgtctttcggattaagactagcaaaaaccgacaaaaatataactgaccaaaaagtcagggaggcggcagaaattttgcagattacagaactgctggaccgaaaaccaaaggaactatctggtggccagagacaaagagttgcaatcggaagagctatcgtcagggatccaaaggttttcctgttcgatgagccgctttcaaatctagatgctaaacttcgtgtacagatgagaatagaacttaccaaattacaccgagaactgaatgccactatgatttacgttacacatgatcaggtggaagctatgacgatggcggacaaaatagtggttctccgtgagggttatgtcgaac

SEQ ID NO: 270942 - DNA, 619 bp, Unknown
  Bacterial polypeptide expressing nucleotide sequence isolated from the Sargasso Sea
aatggaagttctcgatcttatacaaatgcaagaatatgcaacaaggaagcctaatcaactatcaggaggacagcaacaaagagtagcattagcaagggcattagctcccgagccaaaggttttacttctcgatgaaccactttcagcattagatttaaaattaagacaggcaatgcgtgttgaactaaaaactttacaaagagaaactggtataacatttgtttttgtaactcatgatcaagaagaagctttaacaatgtctgatcgaatagcagttatcaatgaaggtgagattcagcaaattggtaaaccagaagaaatttatgaaagtccaaataataaatttgtggcaaatttcattggggaggctaatcttttatctgctgtatgtaatagtttgggagaaaatggaacatgcaagttaaatactggacatgaattacgtctttctatcccttctcatattcaaaaaggtgatgaattaactatttttataagacctgaaaggattaagatttcaaaatcctctgctgatgaaagttccgtaagtatttcagagtttacttatttagggaatgctgcatccatacagatgcatgctaataatcaagtgattcat

SEQ ID NO: 270943 - DNA, 862 bp, Unknown
  Bacterial polypeptide expressing nucleotide sequence isolated from the Sargasso Sea
aataattaataatttaattccatcaaaaagaggaattgcaatggtttttcaatcatacgctttatacccacacatgaatgtttatgaaaatatgtcattcggattgaaaaatgaaaaacttgataaaaatgaaatagataaaaaggtaaaagatgcagcaaaaactcttcagattgaagatcttcttgagagaaaaccaagacaactttctggtggacaaagacaaagagtggcaataggtcgtgcaataacgagaaaccctaaattgtttttattcgatgaaccgctttcaaatcttgatgctgctttaagatctgaaatgcgtgtagaaatttcaaaactgcataaaaaacttagcactaatatgatttatgttacacacgatcaagtagaggctatgactttagctgataagattgttattttaaatcaaggtgtgatcgagcaatatggatcaccagatgaaatatataataatccaaataatatttttgtagcagaatttatagggtcaccgagaatgaatattttaaaaattgataaaggaaaaattaaaaacggaaatacaattaatatttttaacagcgatatccagtttaatggttataaatttaatgatgatatttatcttggaattagacctgaacatattaaggctgataattctcaagatataaaagccaagattaagattgatcttatagaaaatcttggatttgataagattatatactcgtccgtagatggtgaagagtttagaataaaaacttcaagcaatatcgataaaaatcattcccaaatatcattctctaaaggaaatgtttatttctttgactcaaataaaaatagaatcaaaaattag

SEQ ID NO: 270944 - DNA, 643 bp, Unknown
  Bacterial polypeptide expressing nucleotide sequence isolated from the Sargasso Sea
tatgtcagatagcatcatccaaattaataatatgaacaaatggtttggtgactttcaagttctaaaaaagattaatttagaagttaaaccaaaagaaaaaattgtagtatgtggtccatcaggatctgggaaatcaaccttgattagatgcatcaatagattagaggaacatcaagagggaaatattattgttgatggaactgaattaacagaggatacaaaaaatattgagcaaataagagctgaagttggtatggtattccaacaatttaatttatttcctcatttatcaattttagataattgtacattagctcctatttgggtaaaaaaaatgccaaaaaaagatgcggaagaacttgcattaaaacacttagaaagagtacaaattcttgatcaagcacaaaaatatccaggccaattatctggaggacaacaacaaagggctgcaatagcaagagctttatgtatggagccaaagataatgctttttgatgaacctacatctgccttagatccagaaatgattaaagaagtgcttgatgtaatggtaaatctagcaaaacaaggtatgaccatgattgttgtaacacatgaaatgggttttgctaaagaagttgccgatcaaatgatattcatggat

SEQ ID NO: 270945 - DNA, 417 bp, Unknown
  Bacterial polypeptide expressing nucleotide sequence isolated from the Sargasso Sea
ttcgtaaattgccaaagagggaggctgaagaactggcggttgaatatctaacgcgcgtcaaaatacctgagcaggctcacaaatacccaggccaattatccgggggccaacaacagagggtcgcgatagcacgatcgctttgcatgcaacccaaaattatgttgtttgacgagccaacctctgcacttgatccagaaatgatcaaagaagtgttggatgtaatgatcgaacttgctgaaactggcatgacgatgctagttgtgacgcatgaaatggggtttgcaagtaaagtggctgatagggtcatcttcatggatgaggggcagattatcgaacagaataaacctcaggctttctttaataaaccaaaatcagatcggacaaagcttttcctcagccaaattctgggacattgat

SEQ ID NO: 270946 - DNA, 499 bp, Unknown
  Bacterial polypeptide expressing nucleotide sequence isolated from the Sargasso Sea
atgaccgaggaacctatcatctcattcgataaagttaacaagtggttcggtgatttccatgtgctacgcgatattgacctcaatgtcaccaaaggagaacggatcgttatttgtgggccttcgggctcgggaaagtccacccttatacgctgtattaataggctcgaagcacatcagagaggctcaataattgtagatggaattgaattgaatgatgacttgaaaaatattgattctattcggtccgaagttgggatggtcttccaatcgtttaatttatttccccatatgacagtgaaagataatctggtcattggccaacatttagtccgcagagttcctaaacgtgatgccgaggacatagctattacctatctcaaacgggttaagattttagatcagattgataaatatcctggacaattatccggaggacaacaacagcgcgtcgctatagctagatccttgtgtatgaagccaaagaattatgttatttgac

SEQ ID NO: 270947 - DNA, 688 bp, Unknown
  Bacterial polypeptide expressing nucleotide sequence isolated from the Sargasso Sea
tatggttgagcaagtgcgcaggctaggcaagatcgagcttatctccttgtcaaaatacttcggcgaaagcgcggccgtcgatgagatttccctatccatacccgccgcttcatattgttgtctactgggtccgtccgggtgcggaaaaacaacaactctgcgcttgatagctgggcacgaaacggctagcgacggcagcgtcctgattagcaaccgcgaagtgaccgacgcgccgccagcaagtcgaggcacagcgatgatgtttcaaaactatgcactttttcctcatcttaattgtcttgaaaacgtcgctttcagtttgcgcatgcagggcatcaacaaagaagagcgaaattctcgggcgacggaattgttgtcgctggtgcacatggattccttcagtggacgcatgccgtcgcaattgtcaggtggccaacaacagcggattgccctagcgcgcgctttgatcacaaaacccgacgtgttgcttctggacgagccattgtctgctcttgacccctttctgagaacccggatgcgcgcggagctgcgccagttgcaaaaaaaattgggcatcacttttgttcacgtaacccattcccaggacgaggctatggccttgtccgacttagtcgtggtcatgcaaagtggccgcatcgagcaagcgggacacccacgcgaggttttt

SEQ ID NO: 270948 - DNA, 446 bp, Unknown
  Bacterial polypeptide expressing nucleotide sequence isolated from the Sargasso Sea
tatgtcaaaaaaagctgatttcgtaaaatttgataaagtagacaaaagttacgacggaaaagtattagtagtaaaagatctgaatttagatattgaagaaggggagtttgtaacaatgcttggaccttctggttcaggaaaaacgacatgtctaatgatgcttgctggttttgaaactccaactaatggagaaatatttttagataacaatccaatttctaatattccaccacataaaagagggatcggaatggtttttcaaaactatgctttatttcctcacatgacagtctttgaaaatttagcatttcctttaaaggtaagaaagatgtctcaagaggatatagagaaaaaagtcgacaaagctttatcaatggtctcattgggtggatttgcaaacagaatgccaggtcaactgtcaggtggtcaacaacaaagagttgcag

SEQ ID NO: 270949 - DNA, 533 bp, Unknown
  Bacterial polypeptide expressing nucleotide sequence isolated from the Sargasso Sea
gatgatcggcggcttgcacgtcaataatctctctcatgcctttggcaacgaaaccgtggtcaatggggtctcggtattcgtggcgccaggcgaagttgtgtgcctgttgggtccatccggctgcggaaagactacattgctccgggtcgcagccgggttggaacggttacaaaagggacaggttcgcattggcgagaccatggttgacgacggtgccacaggccttcatgtgccctctaaccaacgcgatattggtctcatgttccaggattacgcccttttcccgcatctgagcgtccgggagaatattcgctttggggtcagcgccaacacgccgtcgcgctgggcgtgggctgaggtggctttagcgcagatgggcctcagccaccatgccgatagctatccacacaccctttcaggcggtcagcaacaacgggtcgcattgttacgagccctggcgaccaagccttcagtcttgctcttggatgagcccttttctggcctggacattgcgcgtcgcgccgcggtccggg

SEQ ID NO: 270950 - DNA, 630 bp, Unknown
  Bacterial polypeptide expressing nucleotide sequence isolated from the Sargasso Sea
tcaacctgctgctgcgctttcatgatgtgcagtccggccgcatcctcattgacggacaggacattgcgcaggtcacccaggacagcctgcgccgccacatcggcatggtcacgcaagacacctcgctgctgcaccggtccatgcgcgacaacattctgtacggccgccccgatgccagcgaggccgacctgcaccaggcggccgagcgtgccgaagccgccgacttcatcgccaccctcaccgacttgcagggccgtaccggctatgacgcccatgtgggcgagcgcggtgtgaagctctcaggcggtcagcgccagcgtgtggccattgcacgcgtgatgctgaaagacgcgcccatcctgctgctggacgaagccaccagcgcgctcgactccgaggtggaagccgcgatccagcaaagcctggacggcctgatgaaaggcaagaccgtgattgccatcgcccaccgcctgtccaccatcgccgccatggaccgcctcatcgtgatggacgggggccgcattgtggaagaaggcacgcacgcccagctgctgggccagggcggcgtgtatgcccgcctgtgggggcaccagagcggcgggttcctgggcgaatctgaagaggactgag

SEQ ID NO: 270951 - DNA, 731 bp, Unknown
  Bacterial polypeptide expressing nucleotide sequence isolated from the Sargasso Sea
tatgtctgtaaataaagaattcgtaaaatttgacaaggtagacaaaagctatgacggtaaagttttagttgttaaagatcttcaactagatatagctgaaggtgaatttataactatgttgggtccatctggttctggtaaaacaacttgtttaatgatgctagcaggatttgaaacacctaccaatggtgaaatttatttaaatggtaatgctatttcaagtataccacctcacaaaagaggaattgggatggtattccaaaattatgcattatttcctcatatgactgtttatgaaaatctagcttttccactaagagttagaaaaattccaaaagatgaagcagataaaaaaattgataaagctttatcaatggtatcacttcaaggtttcgcttcaagaatgcctggtcagttatctggaggtcaacaacaaagggtagctgttgcaagatctttagtatttgatccacaattagttttaatggacgaacctttgggagctttagataaaaatttaagagaaagtatgcagtatgaaattaaacatattcatgaaaatattggagtaactgttgtttacgtaactcatgatcaaagtgaggctttaacgatgtcaaatcgtattgcagtatttaatgatggaaaagtccaacaactttctagtccggatgaattatatgaaaaaccagttaactcttttgttgcagagtttattggagagaataata

SEQ ID NO: 270952 - DNA, 484 bp, Unknown
  Bacterial polypeptide expressing nucleotide sequence isolated from the Sargasso Sea
tatggtttttcaacaatttaatttatttccacatttatctattctagacaattgcactcttgcacctatttgggttaaaaaattacctaagaaagacgctgaagaattagcattaaaacatttagaaagagtgcaaatattagaccaagctcaaaaatttccaggtcaactatctggtggtcaacagcaacgtgttgcaattgcaagagctttgtgcatggagccaaaaattatgttatttgatgagccaacatcagcactagaccctgaaatgattaaagaagttctagatgtaatggtgaacctagcaaatcaaggtatgacaatgattgtagttacacatgaaatgggatttgctaaagaagttgctgatagcatgatttttatggacgagggaaagatagtagaaaaagctgataccaaagagttttttgctaatcctaaaaatgagagaactaagctatttttaagtcaaattttataa

SEQ ID NO: 270953 - DNA, 754 bp, Unknown
  Bacterial polypeptide expressing nucleotide sequence isolated from the Sargasso Sea
tttaggtccttcaggttgtggtaaatcaacattgttgaggatagttgcgggtttggaaaaagcaactgatggacgtgtattaattgatgcacaggatgtgactgaacaggagcctggaaccagggacattgctatggtctttcagaattacgcactttatccccacatgaccgtttttaaaaatatagcgtatggactgaaaaatcgtaaaattagtggtgtcgaaataaatagtagggttaaagaagttgcggaaacattgcaaattgaagaatacttggaccgtaaaccaagtcatctttcaggcggtcaaagacaaagagtggcaatgggtagagctattgcaaggaatcctaaagtttttctttttgatgaaccattgtccaacttggatgccaaattaagagttcaggtccgtttagaaatcagtcgattgcaatccgaattaggcgtcacatctctttatgtgacacatgatcaggtagaagcgatgacacttggacatcgattggtattaatgaacgatggtcgaatagagcaaataggcgaacctttacaagtttatgaatcaccagaaacccttttcgttgcaggttttattggttctccacctatgaatcttgtacctggtgaattgaatgaaaaaggtgattttattctaggaaccactgttaatataaaattagatgatgttcagacaaaatcaaaaaacgtaactttaggtattaggccagaacatttgtttactgatgaa

SEQ ID NO: 270954 - DNA, 778 bp, Unknown
  Bacterial polypeptide expressing nucleotide sequence isolated from the Sargasso Sea
agaggtattaagaaaaattaatttagaaattgatgaaggaaattttttggttctattaggaccctctggatgtggaaagtcaactttattgaatattattgcgggtcttgaaacaattaatgaggggaatgtttttatagatgattataatgtcagtaaagtagagccaaaagacagaaatattgcgatggtttttcaatcttatgcactttatccttcaatgaatgttaaagaaaatatgattttcggccttaaacaagccaaaacgtcaaaagaaaaaatagaagaacaattagaaaaagtttcaacatttttacaagtagacaaattattagagagaaaaccatcgcaattatctggaggtcagaggcagagagttgctattggtagagccttagtaagagagccaagaatttttctttttgacgaaccattatctaatctggatgcaaaattaagagtagaaatgagaagagaaataaaaaaacttcatcaacaactaaaaaccacagtcgtctatgttactcacgaccagacagaagctatgagtttaggtacaaaaattgccataatgaaccatggagtaattcagcaaaatgatactccagaaatcatttacaacaaacctagcaatacttttgtggcagattttattggttctccttcgatgaatttaattaaaggtaaaataatccataattcaaataatatttcttttattgctgatgggtctactttagaggttccaatcaataattatgacttcaaagagaagtca

SEQ ID NO: 270955 - DNA, 715 bp, Unknown
  Bacterial polypeptide expressing nucleotide sequence isolated from the Sargasso Sea
tatggtttttcaaaattatgctttatttccacatatgacagttcaagaaaatttagcttttccattagaggtaagaaagatttcaaaatcagataccgaaacaaaggttaagcaagcacttgatatggttgaactaggaagttttggaacaaggtttcctgctcaactttcaggaggtcaacaacaaagagtagctttggcaagagcacttgtgtttgaaccgagacttgttttgatggacgaacctttgggggctcttgataaaaatttgagagagcagatgcaatacgaaataaaacacattcatgatagaataggcataacagttgtttatgtaactcatgatcaaagtgaggcactaacaatgtcaaatagaattgcagtttttaatgatggagttgttcagcaattgtcaactccagatatactatatgaaaaacctgaaaattcttttgttgcaaaatttattggagaaaataacactctaaatggaactgttaaagaaataaatggaaatatgtgcaccattgatcttgatgataatcaaggcacagtaaaagctctaaaaataaatgtaaatactgttggagataaaacacaactttctatcagaccagaaagagtaattattaattctgataatcaggaaaacaattttaaaggaaagattttggagctcatctatttaggtgatcatataagggctagacttgat

SEQ ID NO: 270956 - DNA, 520 bp, Unknown
  Bacterial polypeptide expressing nucleotide sequence isolated from the Sargasso Sea
ttaaaaaatatagaacaaattagagctgaagttggaatggtgtttcaacaatttaatttatttcctcatttatcaatattagataattgtaccttagctccaatttgggtaaaaaaattgcctaaaaaagaggcagaagaattagcattaaaacatttagaaagagtacaaatacttgatcaagcacaaaaatatccaggtcaattgtctggtggacaacaacaaagatgtgctattgctcgagctttgtgtatggagcctaaaataatgttatttgatgaaccaacttctgcattagatccagaaatgattaaagaagtattagatgttatggtgaatttggcaaaacaaggtatgacaatgatagtggttactcacgaaatgggttttgcaaaagaagttgccgatcaaatgatatttatggatgaaggaatgatagtagaaaaagctgatactaaagaattttttgctaatccaaagagtgatagaactaaacttttcttgagccagatactataga

SEQ ID NO: 270957 - DNA, 862 bp, Unknown
  Bacterial polypeptide expressing nucleotide sequence isolated from the Sargasso Sea
agttagcggcatagatctcgaaataaaaaataatgaatttgtcgttctggttggtccttctgggtgtggcaaaagtacgaccctccgaatgatcgcgggacttgaggaggtgacggaaggagagattctgatagggggggaactggttaatgatgttccgccaaaagatcgcgatattgcaatggtctttcagaattatgcgctctatcctcacatgacagtatttcaaaatatgtcatttggtcttcggcttagaaaatatcccaaagatgatatacgaaaacgtgttgaggatgcggctgaagtgttaggcatcacggagttattgaatagaaggcccaagcagctctctggaggccaacgtcaacgggtagcaatgggtcgggcgatcgtacgaaatccgcgagtgtttctcttcgatgagccattaagtaaccttgatgcgaagcttcgtgggcaaatgcggatagaaataaagcgtgttcaccaacatttgaaaactactaccgtctacgttacccatgatcaggttgaggcaatgacccttgcagatagagtggtggttatgaacgctggcttgattgaccaagttggcaccccgggagaactatatcattcccctagaacaagatttgttgcaggttttataggttcgccagctatgaatttcttggattgcgaattgggtgaatcggatggaggtcttgttatcaagactggcagcgagctgaccttgcccgtgccctctggacgagtggagaggtataggggccacgtagggaaacccttaacccttgggatacggcccgaacatataacggaagaaagggtgaccgagatggtatctctattcagtagacgt

SEQ ID NO: 270958 - DNA, 556 bp, Unknown
  Bacterial polypeptide expressing nucleotide sequence isolated from the Sargasso Sea
aatgactcaaaaaaaagttaatgcaattgaagttaaaaatgtaactaaggtttatagaagttcgaattcggaaactaaagctttaagaaatgctaacttaacaatttatgacaatgagttttttacattgcttgggccatcaggttgtggaaaaacaaccctattaagattgattgcaggctttgaggatattacagaagggtctataaatctttttgatcaagaaattgtaaacctacctccaaacaaaagacctgttaatacagtttttcaacaatactctttgttcccccacttaaatgtatacgaaaatgttgcttttggtcttagacgtttaaaaaaagatgaaagtttggttaaaagtaggacctttgaagtgctagagcttgtacaaatgaaagagtatgccaatagaaaacctaatcaattatctggaggtcaacaacaaagagttgctctagcaagggcattagctccagaaccaaaagtgttacttttggatgagcctttgtctgctttagatctaaagcttcgtcaagcaatgcgttttgaataa

SEQ ID NO: 270959 - DNA, 828 bp, Unknown
  Bacterial polypeptide expressing nucleotide sequence isolated from the Sargasso Sea
taaagttgttaatgacctacctcctaaagaaagaaatattgcaatggtatttcaatcttatgccctttacccgcatatgacagtatttgataatatggcttttggtttaaaaattgaaaaaaaatcaaaagaggaaatagagcaaagagtaatggaggctgctaaaattttacaaatagaagagtatctagagagaaaacccaaacaattatctggcggacaacgtcaaagagtagctattggtagagctattacgagaaaaccaaaagttttcttatttgatgaaccattatctaacttagatgcggctctcagagtacaaatgcgagtagaattggcaaaattacacgaccaactaaatgcaaccatgatatacgtaacccatgatcaaactgaagccatgacacttgctaacgatattgttgtattggatcaaggtatagtttcacaaaagggatcaccaatgaacctttataataatccagataatttgtttgttggaggttttattggatctccaaaaatgaattttatagatagtataattttaagtaaaagttcaaaaagttctgaggtagatataatggggactggaaagttaaatgtaccaaaaatttccgaaaatattcaggaaggtgacagtattaaaattgggataagaccagagcatttaatattaaacgcagaatcagactcattatgggaaagcaaggtttttgttgtagaaaaattaggttcaggaacttatttatatttagagaaagagggagatccccttgttgtacaaacagatggagatacagatattaaagtaggagatactgttaa

SEQ ID NO: 270960 - DNA, 637 bp, Unknown
  Bacterial polypeptide expressing nucleotide sequence isolated from the Sargasso Sea
tatgagcataatcaaaactgtagatgtcaaaaagtggtttggagatttccaagctctaaaaggaatatctatggaagttgctgaaggggaagtattagtaatatgtggaccttcaggatcaggtaaatcaacttttattaggtgcataaatcggctcgaacaacatcaagaaggcgaaattgttgttgatggaattgagcttacaaatgacctaaaaaacattgaagcaattaggtctgaggtgggcatggtttttcaaagttttaatttgtttccacatttaacagtaatgcaaaatatcactcttgccccgatatgggtaagaaaaaaaagccgtagtgaatcagaagaaaaagctatggagctattagagagagtaggcatacctgaacaggcacaaaaatttccaggacaattatctggtggccagcagcagagagtagctattgcaagagctcttgctatggaacctaaaattatgctttttgatgagccaacttctgccttagatccagaaatgattaaagaggttcttgatgcaatgaaagagcttgcagaatcaggaatgacaatgatcgttgtaacacatgagatgggatttgctaaagaagttgctgatagggtaatgctctttgat

SEQ ID NO: 270961 - DNA, 586 bp, Unknown
  Bacterial polypeptide expressing nucleotide sequence isolated from the Sargasso Sea
atgtctgaccctataataaaaattgaaaatgttaataaatggtttggtgattttcaagttttgaaagatataaatttagaagtagaaaaaaataaaaaaatagttgtttgtggtccatcaggatctggcaaatcaactttaattagatgtataaatagactagaagaacaccaaaaaggaaatataattgttgatggaacagaactttccgaaaatacaaaaaatattgaacaaattagagctgaggttggtatggtttttcaacagttcaatttatttccacatttatcaattttagacaattgtacactagcgcctatttgggtaaaaaaaatgccaaaagttcaagctgaagaattggcaatgaaacaacttaaacaagttcaaatagcagaccaagctaacaaatatccaggccaactttcaggcggtcaacaacaaagatgtgcaatagctagagctctatgcatggaacctaaaattatgctttttgacgaacctacttctgcgttggatcctgaaatgataaaagaagttttagatgcaatggtcaatttagcaaaagctggaatgacaatgatgtagt

SEQ ID NO: 270962 - DNA, 646 bp, Unknown
  Bacterial polypeptide expressing nucleotide sequence isolated from the Sargasso Sea
aatgtcagataaaataattcaaattaaagaaatgaataaatggtttggagatttccaagtcttaaaaaatattaatttagacgttgaaaagaataaaaaaattgttgtttgtggtccgtcaggttcaggtaaatcgacattaattagatgtattaatagacttgaagaacaccaagagggatcaattgtcgttgatggtactgaattaactgaagagacaaaaaatatagaacaaataagagctgaggtcggaatggtttttcaacaatttaacttatttccacatttatcaatattagataattgtacacttgctcctatatgggtgaaaaaaatgcctaaaaaagatgctgaagtattagctttaaaacatttagaaaaagttcaaattgctgatcaagcatacaaatatccaggccaactttctggcggtcaacaacaaagatgtgctattgcaagagcattatgtatggagccaaaaataatgctttttgatgagccaacatctgcgttagatcctgaaatgattaaagaagttttagatgcaatggttaatttagctaaggctggcatgactatgattgttgtaacacatgaaatggggtttgcaaaagaagttgcagatgaagttatttttatggatgaa

SEQ ID NO: 270963 - DNA, 559 bp, Unknown
  Bacterial polypeptide expressing nucleotide sequence isolated from the Sargasso Sea
tatgagcacagttgaattaaagggtatagaaaaaagttttggaacaaacaaagttattaataattttgatattaaaatcgaacacggtgaatttatagttttggttggaccttcaggatgtggaaaatccacacttttgagaatgatctcaggactagagtcggttgatgttggagaaatatttttagacgaaaaattaataaataatttaattccgtccaaaagagagattgcaatggtttttcaatcctacgctctctatccgcatatgaatgtttatgagaatatgtctttcggattaaaaacagaaaaattagataaaaaagagatagataaaaaggttttagccgcagcaaaaactttgcagatagaggatcttctcgataggaagccaagacagttatctggaggtcaaagacaaagggtagcaattggtagagcaattacaagaaacccaaaactttttctatttgatgaacctttatcaaacctagatgcagctttaagatctgaaatgcgtgtggaaatttcaaaactacataaaaagttaaacacaaat

SEQ ID NO: 270964 - DNA, 601 bp, Unknown
  Bacterial polypeptide expressing nucleotide sequence isolated from the Sargasso Sea
atgaaaaaagcagaagtaaaatttgaaaatattacaaaaaaatttaatgagaccgttgctgttgataatgtgagttgtacttttgaagcaggaacactgactacattactaggtccctctggatgcggaaaaactacttctttaagaattattgctggtctagaaagagctactagtggtaaaattttagtagaaaatgaagatgtaacattattaccagcgacagatagagatgtatctatggtatttcaatcttatgctttgttcccacatatgagtgtgcttgaaaatgtatcgtatggtttaaagatgataaatgttccaaaagaagaatttacagaaaaatctttagaaactctgaagttagttaatttagaaggttatgaaaataggatgccctcagagctatctggaggtcagcagcaaagagtagcagttgcaagagcaattgtactgaaacctaaggttctactctttgacgagcctttatctaatttagatgcaaaattaagaagacaagtaagagaggatattagagaaattcaacaaaaacttggagtaactacaatttatgtaactcacgatcaagaggaagcattag

SEQ ID NO: 270965 - DNA, 748 bp, Unknown
  Bacterial polypeptide expressing nucleotide sequence isolated from the Sargasso Sea
cgaaagatagacatgtcagatccaattataaaaattaataatatgaataaatggtttggagactttcaggtcttaaaagatataaatctagaagtagaaaaaaataaaaaaattgtagtttgtggaccttcaggatcaggaaaatcaactttaataagatgtattaatagattagaagaacatcagaaaggtacaattgtagtagatggtacagaattaactgaggaaactaaaaatatagaacatataagagccgaagtaggaatggtatttcaacagtttaatttatttccacacttatcaattttagacaattgtacactcgccccaatttgggtaaaaaaattgcctaaaaaagatgctgaagaattagctttaaaacaattaaaacaagtccaaatcgatgatcaggcaaataaatatccaggtcaattgtctggaggacaacaacaaagatgtgcaatagcaagagctttatgtatggagccaaaaattatgctttttgacgaaccaacgtcggctcttgatcctgaaatgattaaagaagtattagatgcgatggtaagtctcgcaaaagcaggaatgacaatgattgttgtaacccatgaaatgggttttgcaaaagaagttgcagatgaggtaatttttatggatgaaggcatgattattgaaaaagctgagaccaaagaattctttgcaaatccaaaaagtgacagaaccaagctgtttttaagccaaattctttaaa

SEQ ID NO: 270966 - DNA, 766 bp, Unknown
  Bacterial polypeptide expressing nucleotide sequence isolated from the Sargasso Sea
atgaaaaaagcagaagtaaaatttgaaaatattacaaaaaaattttatcagactgttgctgttgataatgtgagttgtacttttgaagcaggaacactaactacattgctaggcccctctggatgcggaaaaactacttctttaagaattattgctggtctagaaagagctactagtggtaaaattttagtagaaaatgaagatgtaacattattaccagcgacagatagagatgtatctatggtatttcaatcttatgctttgtttccacatatgagtgtacttgaaaatgtatcgtatggtttaaaaatgataaatgttccaaaagaagaatttacagaaaagtctttagaaactcttaagttagttaatttagaaggttatgaaaataggatgccctcagagctatccggaggtcagcaacaaagggtagctgttgcaagagcaattgtgctgaaaccaaaggttctactttttgatgagcctttatctaatttagatgcaaaattaagaagacaagtaagagaggatataagagaaattcaacagaaacttggagtaactacaatttatgtaactcatgatcaagaggaagcattagcaatttctgacaaagtaattgtgatgaacaatgctattattgctcaacaaggtagtccaaaagaattatataactttcctaaaactaaatttgtagctaactttataggagacgcaaatgttgttaaagctgaaataattaatcaaaataataatatttacgaga

SEQ ID NO: 270967 - DNA, 739 bp, Unknown
  Bacterial polypeptide expressing nucleotide sequence isolated from the Sargasso Sea
agagttgaaaaagttttagaaatggtcgaacttgggcagtttggagcccgtcggccggcgcaactgtcaggcgggcagcagcaacgagtagctttggcaagagctctcgtttttgaacctgatttggtcctaatggatgaaccgctgggagccttggataaaaatttaagagagcaaatgcaatatgagataaagcatatacatgagaatttaggtatgacggttgtttacgtaacacatgatcagactgaagccctaacaatgtcagatcgtatagcggtatttaatgagggtgttatccagcaattagccccgccaaacgaactttacgaaaaacctgaaaatgctttcgttgcagacttcataggcgagaataatcgtttaacgggaaccataaaagaaacaaacggttcggaatgcttagttgcagtagaggaagcgattatcactgcgaccaatgttcatgaacaaccagaaggcagtagcgtaatattatctctacgcccggaacgagtagtgcttaaccctgaagttggagcgcttaaaaatatttttgaggcggaagttttggagttaatatatctaggtgaccatgttagatgtagaatgagtatttgcacaaacgatgattttgtcgttaaaattccaaacgactacacgaatatctcgttgaataaaggtgatgttgttaagattggatggcaggtaacagattgtagagccctcaatactacgtaaa

SEQ ID NO: 270968 - DNA, 865 bp, Unknown
  Bacterial polypeptide expressing nucleotide sequence isolated from the Sargasso Sea
ggcaaaacaactttgctcatggtattggcagggtttaccaaccctgattatggcagcgttaaatttggtgatgaagaagttattttaaagccacctcaccttcggggcattggcatggtttttcaaaactatgctctattcccgcatatgactgttgaacagaatgtaggttaccctcaaaaattacgcggagtaagtacatcagaaacgaagcgaagtgttgaggaagccctaagcaccgtaaaacttgagggtcttgggcacagaggaattaatgaactttcaggcggtcaacgacaacgggtagcgcttgcacgtgcaatcgtatttaagcccaaaatcttgttgatggatgagccactttcagctcttgataaaaaacttcgtgaagagatgcagatagaattaaggcaattgcacgatacgctgaatatgaccactgtttatgtgactcatgatcagaaagaagctttgaccatgtcggataggatcaccgtaattaatgatggcgagcttatgcagcttgggacgccaaacgagatttatgagcacccaaataatcacttcattgctgattttataggagaatctagccttcttcctgttgccgttcggaatggaaaagtgagcttgaatggtgaagatattacccttgccgagggagctgaaaaaactggtgattttcttctagttgtaagaccagaaaaagcatttttagccgataagaaaatcaaaggttcaaactattttgtgggcaagttaatcgactctatttttcaaggtgaaagccagctcttagttgtgaaactcaacgctgatgatgacgatgggcatgaagttcgggttcgtgtgccaaatgagagtg

SEQ ID NO: 270969 - DNA, 674 bp, Unknown
  Bacterial polypeptide expressing nucleotide sequence isolated from the Sargasso Sea
catgtctaaaaacacagaattcgtaaaatttgataaagttgataaaagttatgacggtaaagttttagttgttaaggatcttaacttagatatcgctgaaggagaattcataactatgcttggaccatctggttcaggaaaaactacttgtctaatgatgttggcaggatttgagactcctacaaatggtgaaatttatttagataaaaatccaatttcaaatatacctcctcataaaagaggcataggaatggtttttcaaaactacgcattatttcctcacatgacagtatatgaaaatttagcatttcctttaagagttcgaaaattgaataaagatgaaattgataaaaaagtagataaagctttatcaatggtttctttgtcaggttttgcaaacagaatgcctggccagttatcaggaggccaacaacagagagtagctgttgcaagagcgttagtatttgatccagcagtagtattgatggacgagcctcttggagctctagataaaaatttaagagaaagtatgcaatatgaaattaaacatatacatgaaagcataggtgtaacagttgtatatgtaactcatgaccaaggtgaagcattaacaatgtccaacaggattgcagtttttaatgatggtaaggttcaacaactttcaagtcccgata

SEQ ID NO: 270970 - DNA, 642 bp, Unknown
  Bacterial polypeptide expressing nucleotide sequence isolated from the Sargasso Sea
tatgggagcaattgatatcaaatctgccgggaaaatttacccgaatggcacaagagcactggaagatgtaaatatcactataaatgacggagagtttgtagttcttgttgggccttctggttgtggtaaaactactctacttagaatggttgcaggtcttgaggatataactgaaggtgaaatttcaataggcgataaaactgttaacgatgtagctccaaaagatcgtgatatagctatggtttttcaaaattatgcgctgtatccacacatgtcagtttttgacaatatggctttttctctaaaactaaggaaattatcaaaagacgaaatagatcaaaaagttaaagatgcggctaagacacttgagataagtgagttattagacagaaaaccaaaagctttatcaggtggacaaagacaaagggtggcaatgggtagagctattgttagaaatcctcaagcgttcctcatggatgaaccactttcaaacttagatgcaaaattgagagtacaaatgagagcagaattgggacagcttcacacacaattacaaacaacgactttatatgttactcatgaccaagttgaagcaatgactatgggtgatagagttgcagtaattagaaaaggtgaattaca

SEQ ID NO: 270971 - DNA, 832 bp, Unknown
  Bacterial polypeptide expressing nucleotide sequence isolated from the Sargasso Sea
atttccccacattggagcgtctttttgagaatattgcatacgggcttaaaaaaagaaggcctacaaaaagaaagcattgaagaaaaagttcagaaaatgctcgctttagtgaaacttgagggttacgagaatagaaaacccaatcaactctctggcggacagtctcaaagagtcgccctagctagatcgcttgtcaaagagccaaaagttcttcttctagatgagcccatggcggcgcttgataaaaaactcagacagagcactcagtttgaacttatggatattcattatgagcttggcataacctttgtaattgtcacacatgaccaagaggaagcaatgacgctctcagatcgaattgcgatcatggagcaagggcagtttgtgcaaataggttctccaaatttaatttatgaaaatccaagatctaagtttgtggctgacttcttgggtaatatcaatctcctagaagcgacgataactgaacaaaatgacaaagagatcgttgtcgactgtgctgcacttggaggtgagttaaagtttgatcaaacagaacaagcgaatgcatctgaaatgactgtggcacttaggccggaaaaggtaatgattgaaaaaaacataccaacgaatgatgaccaaagtcatattaaaggcattgttgaagactttggatacttcggtaatctttctatttatcgtgtcaaaactaagagtgggcatgtcattcaggtcagtaaacaaaacagagatcgagttgagcagtccattaagtgggaagatgaggtttacctttcttgggataatgacagcctgatgttattgggtgaatagt

SEQ ID NO: 270972 - DNA, 493 bp, Unknown
  Bacterial polypeptide expressing nucleotide sequence isolated from the Sargasso Sea
atgacaaacgggggaggaatccaagaaggtaacattgtagatttaaaatccatacaaaaaacctttgatcgcattaaagcagtgaataatgtttctatcgggattaaagaaggcgaatttttttcactactgggcccttcaggatgtggaaagactacactgctcagagtaattgctggatttgaggttcctgaaatgggggaagttttaataaatgaaaaagttgtaaactctgttccacctaataagagaccaaccaatatggtttttcaaaattatgccatcttcccacatctaaacgtagcagaaaatgtagggtatggcttaagaaatagtaagctggataaaaacttattacagaaaagagtaagggagacactgagtctagtaggtttagaaggatttgatactaggtcatcaacagcgctgtctggaggtcaaaggcagagagtggccttggctcgtgccctaatattaaacctagagtgctgtg

SEQ ID NO: 270973 - DNA, 595 bp, Unknown
  Bacterial polypeptide expressing nucleotide sequence isolated from the Sargasso Sea
aatggcaacattaaaagtcagtaacctgactaagagttttggtaacactaaggtacttaagcgcattaatcttgaggtaaatgatggtgaatttattgtcctacttggaccttcaggatgcggtaaatcaactcttctcaatatgattgccggactcgaaagtgttgacgagggagacatacttattgatgaatatgtagttaatcgtgttgaacccaaagatcgcaacatagcgatggtctttcagtcatatgccctatatcctgcgatgactgttcgtaataatgttattttcggccttaaacaaagaaaagtctctaaagagcatatagaaaattcattaaataatttttcaaaaatgctaaaaattgaccaactcttagaccgcaaaccagcacaactttctggtggacagcggcagcgtgtcgcaatgggtcgcgcattagtgcgtgagccacaaatttttctcttcgatgagccattatccaaccttgatgctaaacttcgtgtagaaatgcgccacgaaataaacaagctgcacgaaagcttgggaacgacaatgatttatgtgacccatgatcaagtagaagcaatg

SEQ ID NO: 270974 - DNA, 501 bp, Unknown
  Bacterial polypeptide expressing nucleotide sequence isolated from the Sargasso Sea
taagagctgaagttggaatggtatttcaacaatttaatttatttccccacttatctatattagacaattgctctttagcacctatatgggtaaaaaaacttccaaaaaaacaagcagaagaaatagcaatgaataatttaaaaagagttcaaattgatgatcaagctcttaaatttcctgggcagctatcaggaggccaacaacaacgtgctgcaatcgcaagagcattgtgtatggaacctaaaataatgttattcgatgaaccaacatctgcattagatcctgagatgattaaagaagttttagatgtaatggttgatttagccaaaggtggtatgacgatgatagttgtaacacatgaaatgggttttgcaaaagaagttgctgattacatgatttttatggatgaaggtaagattgttgaaagggctaaaactaaagagttctttgaaaatccgaaatcagaccgaacaaaattattcttaagtcaaattttataac

SEQ ID NO: 270975 - DNA, 642 bp, Unknown
  Bacterial polypeptide expressing nucleotide sequence isolated from the Sargasso Sea
aatggcaagtattaaaatagataaagtaaacaagttttttggtagcacacatgtgatcaaagatgtttctcttgatataaaaagtgagtctttcacagttctggtaggcccaagcggatgtggtaaatcaacaatcttaagaatgattgctggtttagaggaaattaattcaggtacaatatctattgatgataaagttgtaaatgatctaccacccaaagaaagaaatattgcaatggtatttcaatcttatgctctttatcctcatatgactgtatttgataatatggcttttggtttaaaaattgaaaaaaaatcaaaagaagaaatagagcaaagagtaatggaggctgctaaaattttacaaatacaagagtatcttgagagaaaacctaaacaattatctgggggacagcgccaaagagtagctattggtagagctattacaagaaaacccaaagtttttttatttgatgaaccattatctaacctagatgcagcattgagagtacaaatgagggtagaattagcaaaattacatgatcaacttaatgctaccatgatatatgtaactcacgatcagactgaagccatgacacttgcaaatgatattgttgtattggatcaaggtatagtttcaca

SEQ ID NO: 270976 - DNA, 808 bp, Unknown
  Bacterial polypeptide expressing nucleotide sequence isolated from the Sargasso Sea
atggcatctattgaacttaaaaatatcgaaaaaagtttcggatcaaacaaggtaataaataaatttgatattaaaataaaagatggagaatttattgttttagtaggtccatcaggttgcggaaagtctacactcttaagaatgatctcaggtttagaaacagttgataaaggagaaatttatttagataacaagattataaataatctaattccttctaaacgtgaaattgcaatggtttttcaatcctatgctttgtatccacacatgagtgtttttgagaatatggcttttggtttaaaaatggaaaaaattccaaaaagtgaagttaataaaaaagtaaatgatgctgctgcaacacttcaaatagaggatttgcttgaaagaaagcctaaacagctatcaggaggacaaagacaaagggttgcaattgggagagctatcacaaggagtcctaaagttttcttatttgatgaaccattatcaaacctggatgctgctttaagatctgaaatgagagttgaaatatctaagcttcataaaaaaataaattcaaatataatttatgtaacgcatgatcaagttgaagcgatgacattagctgacagaattgtagttttaaacaaaggaaacatcgaacaatatggaacgcctaatgagatttattcaaatccaaacaatatttttgttgctgaatttattggatctccaaaaatgaatataattaagataaataaagagcaaatttctaattcaaacacttttcacttatttaataataaaataacttttaataatttaaaattga

SEQ ID NO: 270977 - DNA, 526 bp, Unknown
  Bacterial polypeptide expressing nucleotide sequence isolated from the Sargasso Sea
gaaaaaaccaaagatattgaaaaaattagagcagaagttggtatggtttttcaacaatttaatttattcccgcatctttcaattttagataattgtacactcgcacctatttgggtgaaaaaaatgccaaaaaaagaggctcaagagctagcattagatcaactaaaaaaagttcaaatagatgaccaagctaataaatttcctggtcaactttcaggtggtcaacaacagcgttgtgcgattgcaagagcattatgtatgcagccaaaaataatgttgtttgatgaacctacttctgctttagatccagaaatgattaaggaagtactagatgcaatggtaagtcttgcaaaaggtggaatgacaatgattgttgttacacatgagatgggttttgccaaagaagtagctgatgaggttatttttatggatgagggcatgattattgagaaggctgatacgaaagaattttttgccaacccaaagagcgacagaacaaagctttttttaagcaaaattctttaaa

SEQ ID NO: 270978 - DNA, 559 bp, Unknown
  Bacterial polypeptide expressing nucleotide sequence isolated from the Sargasso Sea
actgaaagataaaatgtctgaaccaataattaaaattgaaaatgtaaacaaatggtttggagattttcaagttttaaaagatataaatttagatgtatcagctaaacaaaaaattgtagtttgtggtccatctggatctggaaaatcaactttaataagatgtattaataggttagaggaacatcaaaaaggcactatagtggttgatggtactgaactttctgaaaatacaaaaaatattgagcaagttagagcagaagtaggtatggttttccaacaatttaacttatttccacatttatctattttagataactgtacgttagcaccaatttgggtaaaaaaaatgcccaaaaaagaagcacaagatttagcaatgaaacaattagaacaagttcaaattgccgatcaagcaaataagtttccaggacaactatctggcggccaacaacaaagatctgctattgcaagagctttgtgtatgcagcccaaaataatgctttttgatgaaccaacatcagcattagatccagaaatgattaaagaggttcttgatgct

SEQ ID NO: 270979 - DNA, 862 bp, Unknown
  Bacterial polypeptide expressing nucleotide sequence isolated from the Sargasso Sea
aaacgggtgaatgatctcgaacccaaggaccgtgacgttgccatggtatttcagtcttatgcactttacccgaatatgaatgtttatgaaaacattcgctttcctctgaaagttcgcggcattaatcctgccagccatgatgaaaaggttcgccgggcttctacgatggttgaacttgatgattttctgcatcgtaaaccagcagaattgtcaggcggtcagcgccagcgtgtcgcccttgcccgcgccattgtgcgggaacctaatgtcttcctgatggatgagccgctctcgaaccttgatgcgaaactgcgtgtgtccacccgtgcccagatcaaaaatctttcccatgaattggcagtgacaacaatctatgtcacccatgatcagatcgaagccatgaccttggctcaccgtgtggtggtgatggaaaaaggcattatccagcaggtcggcacgcccacagaaatttatgaaaggcctgccaataccttcgtggcaagctttatcggtaacccggccatgaacttgattaaaggccagatcaaatccggcgtcttttcggctggtgctgttgaaatcaaaggcttcaaagtccctgatggtggttacacaattggtttccgtgcagaagacgccaatgttgtttcaatgaaaagcaatatcaacgcgccgacctattcacttgagctactcggtgatgccaccgcggtgaccgtgcgcattgatggccaattggtttcagtgcggtcagataaatcataccgggctgaaatcggcagtaatgtctcgatttcggtgccgaaagaaatttgccatttgtttgatgctcagacaggtgcgcggattgaggtctgttgac

SEQ ID NO: 270980 - DNA, 592 bp, Unknown
  Bacterial polypeptide expressing nucleotide sequence isolated from the Sargasso Sea
tagatgcatcaatagattagaggaacatcaaagaggaaatattatagtagaaggcacagagctgactaacgatagtagaagtatcgagagaattcgtggagaagttggaatggtattccaacaatttaatttatttccacatttatccatattagacaattgttcgcttgcccctatatgggttcgcaaactaccgaaagcggaagcaaaagaaaaagctatggaatatttaaaacgagttcaaatagatgatcaggcacacaagtatcctgctcagttatctggtggccaacagcaaagagcggcaatagctcgagcgctttgtatggagccgagaattatgctttttgatgaacccacttcagcccttgatcctgagatgattaaggaagtattagatgtgatggttggccttgctcaaggcggtatgacaatgattgtcgtcacacacgaaatgggatttgccaaagaggttgctgatagcatcattttcatggatgagggacaaatcgtagaagcaaaaaatccaaaagacttttttgacaatcctgaaagtgagagaactaaaacattcttaagccaaattttataa

SEQ ID NO: 270981 - DNA, 589 bp, Unknown
  Bacterial polypeptide expressing nucleotide sequence isolated from the Sargasso Sea
tgcataaacagattagaagaacatcaacaaggagatatcattgttgatggcaatactttaactgaagatacaaaaaatattgaacaaattagagctgaagttggaatggtatttcagcaattcaatttgttccctcatttatctatagtagataactgcacacttgctcctatttgggtaaaaaaaatgccaaaaaaagaagctgaagaattagcactaaaacatttggaaagagttcaaattctcgatcaagctcaaaaatttccaggccaattatctggtggacaacaacaaagggtagcaattgcgagagctttatgtatggaaccaaagattatgttatttgatgaaccaacatcagcacttgaccctgaaatgattaaggaagttcttgatgtaatggttaatttggctaaccaaggtatgacgatgattgtggttactcacgagatgggatttgctaaagaagttgcagataaaatgatctttatggatgaaggtatgatagtagaaaaagctgatacaaaagagttttttgctaatcctaaaagcgatcgaactaagctatttttaagtcaaatactgtaat

SEQ ID NO: 270982 - DNA, 847 bp, Unknown
  Bacterial polypeptide expressing nucleotide sequence isolated from the Sargasso Sea
aacaagaatagaacatctttatctattttaaacatcagtcaaacatttgtaataatgataggaataactcttatgcttgtcttaacagtatttggaattcagaataaaactatatctgttggtggatttgtagttattaatgcatatatgcttcaactttatcaaccattaaattttctaggaactatttatcgtgagataagacagtctttagttgatatggaaaatatgtttaatcttttaaaggaaaaaaatagcattgatgatagtggaagtgacaatttaaaaaacgataatgcagaaataatttttaaaaatatcttttttggatacgaaaataaaagaacaataattaaaaatatatccttcagtataccagaaggtaaatctttagcgatagttggaccaacaggtgctgggaaatcaacaataagtaaattattgtttcgtttttatgatccagatagtggcgaaatattaattaataagaaaaatattaaaaaatataaacaaaactcattaagacaaatgataggcgtagttcctcaggatacagttttatttaatgatacaattttttataatatttcttatggattaatagactcaagtgaagaagatgtaataaatgcagcaaaaatagctggtattcacgattttattgagagtattcctaacaaatacaatactattgtgggtgagagaggtcttaaattatctggaggagaaaaacaaagagttgctattgcaagagctgttttaaaaaatccatcaattctcttttttgatgaagctacatcagctttagatactaatacagaaaaggaaataaataaaaatttaaaca

SEQ ID NO: 270983 - DNA, 420 bp, Unknown
  Bacterial polypeptide expressing nucleotide sequence isolated from the Sargasso Sea
aagcaccaataaaggttttaaatatagatagagatacggcaaagaaaaaggcgattcataatcttgaactagtagggatgggagattttttagaagctagaccgagtcaactttctggtggacagaaacagagagtcgcaattgcaagggctcttaccatggatccagaccttatactattcgatgagccaacatctgcactagatcctgaaatggtaggagaagtcctatcagcgattagaaatttaagagatttaggtcttactatgattatagtgacccacgaaatggattttgcaaagaaagtatccgataaagtaatattcatggatggtggaaagatcttggaagaaggttctccagaagaaatttttgaaaatcctaagtttgaaagaactagagattttgttaatttttaaa

SEQ ID NO: 270984 - DNA, 616 bp, Unknown
  Bacterial polypeptide expressing nucleotide sequence isolated from the Sargasso Sea
tggatctggcaaatcaacgcttatcagatgcatcaatagattagaagagcatcaaaaaggtaatattatagttgaaggcacagagttgactaatgatagcagaagtatcgagagaattcgtggagaagttggaatggtatttcaacaattcaatttgtttccccatttatctatattagacaattgctctcttgctcctatttgggtacgtaaactaccgaaggctgaagctaaagaaaaagctatggagtatttaaaacgagttcagattgatgatcaggcacacaagtatccggctcagttgtctggaggacagcagcaaagggctgcaattgcaagagctctttgtatggagccaagaataatgctttttgatgagcccacctcagctctagatccggagatgattaaagaagtactagatgtgatggtaggccttgctcaaggcggtatgacaatgattgttgtcacgcacgaaatgggatttgctaaagaggttgccgatagtattatttttatggatgagggccaaatcgtggaagcaaaaaatccaaaagacttttttgacaatcctgaaagtgagcgaaccaaaacattcctaagccaaattctataa

SEQ ID NO: 270985 - DNA, 746 bp, Unknown
  Bacterial polypeptide expressing nucleotide sequence isolated from the Sargasso Sea
tttattgatggagtagatattactgaattatcaccagacaaaagaccaacaaatatggtttttcaaaattatgcaatttttcctcatctaaatgtagaaaaaaatatccagttcggactcagaaaactaggtttaagtaatgatgaaataaataatcgagttaaggatgttctgactttagttaagcttgagggatatgaagaaagatttagtaatcaattatctggaggtcaaaggcaacgtgttgcactcgcaagagctttagtaaggcaaccaaaggtgcttttattagatgaaccactcggcgctttggataaaaaattaagagatgaaatgcagctagaattaagaactctgcaaaaaaatatcggaattacttttgtgtttgttactcatgatcaacaagaggctatcagtatgtcagatagagtggcagtaatgaataatggaaaaattcaacaactatcagcacccaatgaattatataaaaatcccgaaaatatatttgttagtgactttattggtgaaacaaattttcttaaagcaatgacaaaatctattgaaggaggatttatcaatgcttcaatcgaaggactaggggaatttaaaataaaaaataatttgaatattgcagaaaattcatcggatgttgtttgtagcgttcgacctgaatcaatgatgatttctaaagtcaaatcagattgggatatatgtctagaagcaaaaattcgtcaaacatcatatct

SEQ ID NO: 270986 - DNA, 712 bp, Unknown
  Bacterial polypeptide expressing nucleotide sequence isolated from the Sargasso Sea
agttgcaaaaattttaaaaattgaagatctcttagataggaaaccaaaacagctttcaggtggacaaagacaaagagttgctattggaagagctataacgcgaaatcctaaattatttttatttgatgaacctctttctaatctagatgctgctcttagatctgaaatgagagttgaaatttcaaaattacataggaaacttaagagtaatattgtttacgtaactcatgatcaaattgaagctatgactttagctgataaaattgtgattatgaataaaggaaaaattgaacaatttggaagcccagatgacatctataataatccaaataatatttttgtagctgaatttattggaaaccctaaaatgaatatttttaatgtaaaaactgatgatattataaataaaaatacatttaagtttttaggtaaagaaattaaatttgaaaatttaagttttgaaaacggactttatgtaggtatcagaccagaggatatctctttagaaaataaaagcgaattatctgccgaaataagtgttgatctagttgaaaatttagggtctgaaaaaatcatatattcacatttgaatcaaacagaaatcagaataaaaaatgctcaaaatattgaaaataaaaatattacaatttacttacaaaaaaataagttatatttatttgataataataaaaacagaataaaatctttataa

SEQ ID NO: 270987 - DNA, 855 bp, Unknown
  Bacterial polypeptide expressing nucleotide sequence isolated from the Sargasso Sea
aagataggcatataggaatggtattccaatcctatgcattatatccaagtatgactgtcgagaaaaatttatcatttggactaagaatgatgaatactccaaagaatattattaatgaaaaaattgataaagcggcaaatctcctacaaataaatgaattacttaaaagaaaaccttctcaactctctggaggtcaaaggcaacgtgttgctattggtagagctttggttagagatgcaaaagtttttttgtttgacgaacctttaagtaaccttgatgcaaaattaagagctgaactacgttatgaaattaaaaaacttcatagagatttatcaaatacaatgatttacgttactcatgatcagatagaagctatgacacttgctgatcgtatatcagtgatgaaagatggattaatacaacaattagatactccaaagcaaatttataacaaacctgccaatttatttgttgctggttttattggatctcctagtatgaattttttaaaagctagttatgataaaccaaataaaaaaataattgttggaaaaaagcaaattgatatttctaaatatgaaaatataaataatttgatgaatgatcaagaggttgtatttggaataagacctgaaaatataaacatagaaaaaaatgaaaattctattcaatgtaaagttgaattagtggagcctatgggggcagatactcttgtatggactagtgtagaaggtaatccaatatctattaggctagaaggaagttcaaattttaatttaaatgatgaaataaacatttcatttgatataaataaatcttcaatatttgacagtaaatcagaggagagaatttaat

SEQ ID NO: 270988 - DNA, 736 bp, Unknown
  Bacterial polypeptide expressing nucleotide sequence isolated from the Sargasso Sea
tatgtcagatccaattattaaaattgaaggtatgaacaaatggtttggcgattttcaagttttaaaagacgtaaatttatcggttgaaaaaaataaaaaaattgttgtttgtggaccttcaggatctggtaagtctactttaataagatgtattaatagacttgaggaacatcaaaagggatcaataattgtagacggtaaagaactttctgaaaatacaaaagatatagaaaaaattagagcagaagtcggtatggtgtttcagcagtttaatttattccctcacttgtcgattttggataattgtaccttagctccaatatgggtaaaaaaaatgccaaaaaaggaagctgaagaactagcaatgaaacagttaaaacaagttcagattgtagatcaagctaataaatttccaggtcaactttcaggcggacaacaacaacgttgtgcaattgcaagagcactttgtatggaaccgaaaatcatgctttttgatgaacctacatcggcattagaccctgaaatgataaaagaagtgttagatgcaatggttaatcttgcaaaagctggtatgacaatgattgttgttacacatgaaatgggttttgcaaaagaagttgctgatgaagttatattcatggatgaaggaatgattgtagaaaaagctgaaacaaaagaattttttgctaatccaaaaagtgacagaactaaattgtttttaagtcaaattttgtaa

SEQ ID NO: 270989 - DNA, 870 bp, Unknown
  Bacterial polypeptide expressing nucleotide sequence isolated from the Sargasso Sea
tatgaatgacacatctcaaagtttcgttaaatttgaaaatatcgataaaagttatgatggagaagcactagtagtaaaaaacttaaacttggatattgctaagggtgagtttgtaacaatgttgggtccatcaggatcaggtaaaacaacaactttgatgatgttagctggttttgaaacacctacaaacggtgaaatatacttagatactaaaccaataagtaagatacctccttatgaaagagaaattggaatggtatttcaaaactatgctttatttccccatatgactgttgcagaaaatttatcattccctctagaagtaagaaaaatttcaaaaccagatattaaagaaaaagtgcagaaagctcttgatatggttgagttaggtaattttggtactagatttcctgctcaattatctggtggacaacaacaaagagttgctttggcaagagcgcttgtatttgaacctcgcctagtattgatggatgaacctttaggtgcactcgataagaatttacgtgaacagatgcaatacgaaataaaacatattcatgatagaattggcataacagttgtctatgttactcatgaccaaagtgaagcattaacaatgtcaaatagaattgcagtattcaatgatggagttgtacaacaattatctacacctgatatcttgtatgaaaaacctgaaaattcttttgttgcaaaatttataggtgaaaataatacacttaatggtgttgttagggaagtgaatggatcatcatgtactgttgaattggatggtggttttggaatggtgaaagcattaaaaattaatgtgaatgaagttggagaaaaaactcaactatccataagaccaga

SEQ ID NO: 270990 - DNA, 514 bp, Unknown
  Bacterial polypeptide expressing nucleotide sequence isolated from the Sargasso Sea
agatatagaaaaaattagagcagaagttggaatggtttttcaacaatttaatttatttcctcatctatcaattttagataactgcacattagcaccaatctgggttaaaaagactcctaagaaacaagctgaagaatttgccatgaaacaattagaacaggtacaaatagctgatcaagcagctaaatttcctggtcaattatctgggggacaacaacaaagagctgcccttgctagagctttgtgtatggaaccaaaaattatgctttttgatgaaccaacatcagcattagatcctgaaatgattaaggaagttcttgatgcaatggttaatttagctaaaggcggaatgacgatgatagttgtcactcacgaaatgggttttgcaaaagaagtagctgacgaggttgtttttatggacgaaggaatgatagttgaaagagcaaaaacaaaagatttctttgcaaatcctaaaaatgaaagaactaaacttttcttaagtcaaatactttaa

SEQ ID NO: 270991 - DNA, 664 bp, Unknown
  Bacterial polypeptide expressing nucleotide sequence isolated from the Sargasso Sea
aatcttgaagttcaagcaaaacaaaaaattgttgtttgtggaccgtctggttctggtaaatcaactcttattagatgcataaatagactagaagagcatcaacaaggaaatattattgttgatggaaatgaattagatgaaaatactaaaaatattgaggctataagagctgaagtaggaatggtttttcaacaatttaatttatttcctcatttatctattttggataactgcacgcttgcacctatttgggttaaaaaaatgccaaaaaaagatgcagaggaattagcaatgcaacaattagaaaaagtacaaatagctgatcaagctgcaaagtttcctggtcaattatcaggaggacaacaacaaagatgtgcaattgcaagagctttatgtatgcagcccaaaataatgttgtttgatgaaccaacatcagctttagatccagagatgattaaggaagtattagatgcaatggtaaacttagcaaacgcaggcatgacaatgattgttgtaacgcacgaaatgggttttgcaaaagaagtagctgatgaggttatttttatggatgaaggaatgattgtagagaaggctaaaactaaagaattctttgataatccaaaaagtgatagaactaagctatttttaagccaaattttataga

SEQ ID NO: 270992 - DNA, 834 bp, Unknown
  Bacterial polypeptide expressing nucleotide sequence isolated from the Sargasso Sea
catgtctgaaaatgatagtttcgtaaagtttgaaaaagtagacaaaagttacgatggtgaaatactggtcgttaaagatttaaatcttgatgttccaaaaggagagtttttaacaatgttaggaccatcgggatcgggaaaaacaactgttttaatgatgttagctggctttgaaactccgaccagtggagaaatttatctggatggaaatccaataagtagtattccaccaaataaaagaggaatagggatggttttccaaaattatgctttatttcctcacatgactgtaaaagagaatttagcgttcccgcttgaagttagaaaaatgcaaaaatctgaaatcgatgaaaaagtttcgaatgcactctcaatggtcgaattacaagattttggaaatcgtatgcctttacaattatctggaggacaacaacaacgtgttgcattagctagatctttagtatttgaaccaagattagttttaatggatgaaccacttggagcacttgataaaaatttaagagaacaaatgcaatatgaaattaaacacattcatgaaaaaattgggattacagttgtatatgtaactcatgatcaaagtgaagctttaacaatgtctaatcgaattgcagttttcaatgatggaaaggtccaacaaatttcttctccagatgttttgtatgaaaaaccaaatagttcttttgttgcacaatttattggagaaaataatcaactaaaaggaaaagtgaaatcaattaatggagaaaattgtgtaattactacagagtctggagatgatattcaggctttaaaaataaatataaatagcagtgg

SEQ ID NO: 270993 - DNA, 862 bp, Unknown
  Bacterial polypeptide expressing nucleotide sequence isolated from the Sargasso Sea
atggcacaagttaaacttaaaaatgtcaataaatcttttggacaaacaaaagtcattaaagatgttcacttatctatagaaaagggcgaatttgtcgtctttgtgggaccgtcaggttgtggaaaatcaaccttgctcaggctcatcgcgggcttagaaaatttaagtaacggggaaatcattatagccgatcgacctgttatggatttaccaccttcggaaagaggaattgctatggtttttcaatcctatgctctctacccacatatgtctgttttccagaacatggccttttccttaagcctacgaaaattttctaaagctgaaatcagaacgcgcgttgaagctgctgctaaaattcttcaaatggagcatcttcttgatcgaagaccagcagccttgtctggtggacaacgtcagcgtgttgctattggtagagcgatcgtaagagaccctgatgtattcttatttgatgaacctttgtcgaatttggatgctgcgcttcggcatgatacacgagttgaaattgctaagttacacaagcagttagatgcaacaactatttatgtaacccatgatcaggttgaagctatgacactagctgataaaattgtcgttttaagagacggtgaagttatgcaggtgggatcgcccatagatttattcaatttacccgataatgaatttgtggcaggttttttaggttctccacaaatgaatttctttgacggtaacttatcaaaagttacaaaaaatggttcatcaggatctttcaagggtcaaggactcgaagctattggcatacgacttacttctaaaaataagaaaattaatgatactgttcgcttgggtatcgtccaca

SEQ ID NO: 270994 - DNA, 493 bp, Unknown
  Bacterial polypeptide expressing nucleotide sequence isolated from the Sargasso Sea
atgtcaaaaaaagaagatttcgtaaaatttgataaagtcgacaaaagctacgatggaaaagtgttggtagttaaagatttgaatttagatatcgaagaaggtgagtttgtaacaatgcttggaccctctggttcaggaaaaaccacatgtttaatgatgctcgcaggttttgaaaccccaactaatggagaaatttatttagataaaaatccaatttcaaatatccctccacacaaaagaggtattggaatggtttttcaaaattatgctttatttccacatatgacggtttttgaaaatttagcttttccattaagagtaagaaaaatttcaaaagatgatatcgataagaaagtagaaaaagcattatccatggtttcattgtcaggtttcggaaaccgtatgccgggacaactttctggcggtcaacagcaaagagtggcggtagctagagcgttagtgtttgatccagccagttgttttaatggatgag

SEQ ID NO: 270995 - DNA, 545 bp, Unknown
  Bacterial polypeptide expressing nucleotide sequence isolated from the Sargasso Sea
cgacggccagagcgtgcgcggcaacgcggcgacgatccgcaacatccggctcgaagccggcatggtgttccagcagttcaacctgtttccgcagatgaccgcgctcgagaacgtgatgttcgggccgatgcaggtgcgcggtgcgtcacgcgccgaagcgcgcgaccaggcgatggcgctgctcgacaaggtcggcctcgaatcgcgcgcgaatcattatccgtcggagctgtcgggcggccagcagcagcgtgtcgcgattgcgcgtgcgctcgcgatccggccgcggctgatgctgttcgacgagccgacgtcggcgctcgatccggaattgcgccacgaagtgctgaaagtgatgcaggatctcgcgaccgaagggatgacgatgatcgtcgtcacgcacgagatcggctttgcgaagcgggtcggcacgcgcctgctcttcatggatcagggcgggattgccgaggacggccatccggtcgagctgatcgaccggccgccgaccccgcgcctgaaggaattcctgaaacacgtgtcctgaa

SEQ ID NO: 270996 - DNA, 685 bp, Unknown
  Bacterial polypeptide expressing nucleotide sequence isolated from the Sargasso Sea
aatgagcaaaataatagaattaaaaaaagtaaataaatggtttgataaatttcaagttttgaaagatatcgatcttgaggtgcagccaagggaaaaaatagttatttgtggaccctccggatcagggaaatcaactttaattaggtgcataaatagactagaagagcatcaagaaggaaatatcattgttgatggtactgagctttctgagagcacaaaaaatattgaaaaaattagagctgaggttggaatggtatttcaacaatttaatttattccctcatttatctattttagataattgctcattagcacctatttgggttaaaaaatttccaaaaaaacaagctgaagaaatagcaatgaataatttaaaaagggttcaaattgatgatcaagctttaaaattcccaggacaactttcaggcggtcaacaacagcgtgctgcaatcgcaagagctttgtgtatggaacctaaaataatgttattcgatgaaccaacatctgcattagatccagaaatgatcaaagaagttttagatgtgatggttgatttagcaaaaggtggtatgaccatgatagttgtaacgcatgaaatgggatttgctaaagaagttgctgattatatgatttttatggatgaaggtaaaattgtagaaagagctaaaactaaagaattcttttga

SEQ ID NO: 270997 - DNA, 517 bp, Unknown
  Bacterial polypeptide expressing nucleotide sequence isolated from the Sargasso Sea
atgtcaaaaattgtcataaaaaatctcgaaaaatcttttggtgataataaagttattactaattttaacataaatattaatgatggagaatttattgttttagtaggtccttcaggatgtggaaaatcaaccttattaagaatgatctcaggattagaaagtataaatcaaggagaaatttttttagatgaaaaattaataaataatttgctcccttctaaacgggaaattgcaatggtatttcaatcctatgctttatatccacatatgagtgtttttgaaaatatgtcatttggattaaaaatggaaaaaattgataaagatgaaattaatcaaaaagttaatgatgccgctgctacacttcaaattaaggatttacttgagaggaaacctaaacaactttctggtggacaaaggcaaagagttgctattggtagagcaatcacaagaaatcctaaagtttttttgtttgatgaacccttgtcaaatcttgatgctgccttgagatctgaaatga

SEQ ID NO: 270998 - DNA, 871 bp, Unknown
  Bacterial polypeptide expressing nucleotide sequence isolated from the Sargasso Sea
gagctattaaccgaactacaagaagaatttaatatgtctattcttttcataactcatgatttaaatatagtaaaaaagttctcggatgatgtgtgtgtaatgaaagaaggtgaaataattgaagctggatcagttgaagagattttctctaacccaagccactcttacacaaagaaattattagattcaattccaggaaaaaaagaaacatttaatgaagaagaggaaattttacttgatgcaggtcaagtaaatataaattacgtagtttcaagaagtctttttggaaaacctaaagaatttcttaatgcagttaagaaggttgatataaagatatttaaaggctcaacgacaggtttagttggagagtctggttcgggaaaatcctctctagctagggctttgttaggaatagaagatgcagacggagcaatagaatttgatggtatagctattaaggatttagacctaaaaagcatgagggactttaaaaaatatttccaaatagtgtttcaagacccttttggttctctgtctcctagaatgactattggagagatagtgggagagggattaaaggttcacgagcctgaattatctaagaaagatagaattcttaagatagtaagtgcattaaaagatgttgaattagatgaaagttcttattctagatttcctcacgaactttctggaggtcagcgccaaagagttgcgatagcaagagcaataatacttagacccaaactaatccttttggacgagcctacctctgccttggatgtttcaatccaaatgcagatattaaatctactgaaggacttgcaaagtaaacttggattagcttacttgtgtattagtcatgatctaagag

SEQ ID NO: 270999 - DNA, 765 bp, Unknown
  Bacterial polypeptide expressing nucleotide sequence isolated from the Sargasso Sea
ttattaaatattattgcaggattagaaactattaacgagggtgatgtttttattgatgattataatgttagcaaagtagagccaaaagaccgtaatattgctatggtttttcaatcttacgctctatatccatctatgaatgttaaggagaatatgatttttggtcttaaacaggcaaaaacatcaaaagaaaaaatacaagaacagttagaaaaagtctcaaaatttctacaggtagatcaattgttagagagaaaaccttctcaattatctggaggacaaagacaacgtgttgctattggtagagctctcgtaagggagccaagaatatttttgtttgacgaacctttatctaacttggatgcaaagctacgggttgaaatgaggagagaaataaaaaaacttcatcaacagctaaaaacaacagttgtttatgtgactcatgatcaaacggaggcaatgagtttgggtactaatattgcaattatgaatcatggagtaattcaacaaaatgatactcctgaaaaaatttataataacccaagcaatacttttgttgcagactttattggatctccatcaatgaatcttattaagggaaacttgaaagaaaattcaggagacatattttttacagtgagtggttcaaatttagaaattccgataaaaaattatgattttaaagataaatcaaatttaaataataaagaggttttcttcggaattagacctgaacatattttctttaaaaaatttaatgaaagt

SEQ ID NO: 271000 - DNA, 705 bp, Unknown
  Bacterial polypeptide expressing nucleotide sequence isolated from the Sargasso Sea
tatggctgatgttaaaatgagctctattcacaagtcctttggaaatacagaggttatccacggtgttgatcttaaaatagaagatcatgaatttgtggtttttgtagggccttccggttgcggtaaatcaactctactgcggcttattgccgggttggaagatgtttcacagggagaaattgaaattgatggccagcgcgtagatgaccttcctcctgcaaaacgaggtatcgccatggtgtttcagtcatatgccctttatccgcacatgaatgtttaccaaaacatgtctttcggattaagactggcaaaaaccgacaaaaatataactgatcaaaaagtcagggaggctgcagaaattctgcagattacagaactgctggaccgcaaaccaaaggaactatcaggcggccagagacaaagagttgcaatcggaagagctattgtcagggatccaaaggtttttctttttgatgagcctctttcaaaccttgatgcgaaacttcgcgtgcagatgcggatagaacttaccaaattgcatcgagaactaaatgctaccatgatttatgtcacacatgatcaggtggaagccatgacgatggcggataaaattgtagttctccgtgagggttttgttgaacaggttggtgcgcctctggatttgtatcataagccagcaaataaatttgttgcagggtttcattg

SEQ ID NO: 271001 - DNA, 724 bp, Unknown
  Bacterial polypeptide expressing nucleotide sequence isolated from the Sargasso Sea
catgatcacaattaaatccatgcacaagtggtttggtgatttccatgtacttaaaaatattaaccttgaggtaaaacgtggggctaaaattgtgatttgtggaccatccggatcagggaaatccacgcttatacgatgcattaacaggttagaagagcatcagcagggaagtatcgttgtggatggaacagaacttacaagcgacctaaaaaacattgaaattgttcgctcagaagtaggaatggtatttcagcattttaacctttttccacatctgactgcattggaaaactgttctctggcgcctatttgggtcagaaaaacacctaagtccgaagcggaagaaagtgccatggaatacctaaaaagagtaaaaataccggaacaggcacataaatatccggggcaactttcaggaggacaacaacaacgcgtggccatcgcccgttcattatgcatgaatcccagaatcatgctttttgatgagcctacttcggcacttgatccagaaatgatcaaggaggttcttgaggtaatgacagaattggctgaaagcgggatgacaatgctggtggttactcatgaaatgggattcgcaactgctgtggctgacagtgtaatttttatggatgaaggagaaattatagaaagcaatgatccgcataatttttttcacaatccgcagcatgatcggacaaagctctttttgagccagattttataa

SEQ ID NO: 271002 - DNA, 557 bp, Unknown
  Bacterial polypeptide expressing nucleotide sequence isolated from the Sargasso Sea
aatggatgataagaattttataaaaataagcaatctgtcaaaaaattttgacgatgtggttgcagtagataatgttaatataagcattggaaaaggtgaatttttctctcttttaggaccttcaggttgtggaaaaactactttgttaagaattttagcagggtttgaatatccatcagaaggttcagtttcaattgatggctctgatgtaactgatattccggcaaatttaaggccaactaatatggtatttcaaaactatgctatatttccccatataaatgtaaaaagaaatatagagtttggtttaaggaaagaaaaaatttctactgaagaagtaaatcaaagagtaagtgaagctcttaaaatggtaaaattagaaggttatgaaaatagattttctaaccaactttcaggcggtcagcgacaaagagttgctttagctagagcacttgtcaaaaggcctaaagttttattactggatgaaccattaggagcattagataagaaattaagagaagagatgcaaatagagttaagaaacttacaaagaagtg

SEQ ID NO: 271003 - DNA, 604 bp, Unknown
  Bacterial polypeptide expressing nucleotide sequence isolated from the Sargasso Sea
tcaacattaattagatgtataaatagattagaggaacatcaaaaaggcagcattgtagttgatggaacagaattaagtgaaaatactaaaaatatagagcaaattagagctgaagttggaatggttttccaacaatttaacctatttcctcatttatcaattttagataattgcacattagcacctatatgggtgagaaaaatgccaaaaaaacaagctcaagaattagctatgcaagaacttgagaaagttcaaatttcagatcaggcacaaaaatttcctggtcaactttcaggaggacaacagcaaagatgtgcaattgcaagagcattgtgtatggagccaaaaataatgctttttgatgagcctacttctgctttagatccagaaatgattaaagaagtgcttgatgcaatggtaaatttagcaaaaggcggtatgacaatgatagttgtaacccatgaaatgggtttcgcaaaagaagttgccgatgaggttatatttatggatgagggtatgatagttgaaaaagctgagactaaagaattttttgcaaatccaaaaagtgagagaacaaagctatttttaagccaaattttataac

SEQ ID NO: 271004 - DNA, 568 bp, Unknown
  Bacterial polypeptide expressing nucleotide sequence isolated from the Sargasso Sea
aatgggaaaaataattgaactgaaaaaagttaataaatggtttgataaatttcaagttttaaaagatatcgatcttgaagtatctcctcaagagaagattgttatttgcggaccatcaggatctgggaagtcaacattaattagatgtattaatagattagaagaacatcaagaaggaaatattattgttgatggtacagaactttttgagagcacaaaaaatatcgaaaaaataagggctgaagttggaatggtgtttcaacagtttaatttatttcctcacttatctattttagataattgttccttggcacctatatgggtaaaaaaacttccaaaaaaacaagctgaggaaatagcaatgaataatttgaaaagagttcaaattgatgatcaggctttaaaattccctggacaactttcaggaggtcaacaacaacgtgctgcaattgcaagagcattgtgcatggaacctaaaataatgttattcgatgaaccaacatctgcgttagacccagaaatgattaaagaagttttagatgtaatggttgatttagcaaaaggtgga

SEQ ID NO: 271005 - DNA, 661 bp, Unknown
  Bacterial polypeptide expressing nucleotide sequence isolated from the Sargasso Sea
tatgagtgctgatgttgaattgaaaaatatttctgttacctttggaagtttctatgcagctaaaaatgttagtgttaaaattaaagagggagaattttttagttttttaggaccttcaggatgtggaaaaacaactttgttacgtgctatatctggatttctagatccttctgaaggtaaagttttaattggtgggcaagatatggctggtattggtcctaataaaagaccaacctcactaatatttcaaaacctagctttatttcctctaatgtccgttgctgataatattgctttttcattagaagttaggggtacaggaaaagctgaaaggcgaaaaagagccgacgaacttcttgaactaatagctttaactggacagggagataaaaaagttcatgaattatccggtgggcaaagacagcgtgtagccatagcaagggcgcttgctatagaaccagaagttttattattagatgaaccactttcagcactggatttaaaattgcgtcaaaaaatgagaacagaactcagagcaattcaaaaaagagttggcattacatttatatatataactcatgatcaaggagaggcccttacaatgtcagatagagttgatgttatgaatgaaggtgaattagagcaagttgactatgtgacg

SEQ ID NO: 271006 - DNA, 190 bp, Unknown
  Bacterial polypeptide expressing nucleotide sequence isolated from the Sargasso Sea
aatgcccaaagctgaagcagaggagcttgctatgagacaactagaaatagtaaaaattcctgaacaagcaaataaatatcctggtcaattatctggtggtcaacaacaaagagtggcaattgctagatctcttgcaatgaaccctaatataatgctttttgatgaaccaacctcggctctagatcctgaa

SEQ ID NO: 271007 - DNA, 418 bp, Unknown
  Bacterial polypeptide expressing nucleotide sequence isolated from the Sargasso Sea
ggttcgtaaaatgccaaaaaagcaagctgatgatttagctatgagatatctagaaattgttaagataccagaacaagctcttaagtatcctggtcaattgtctggtggacaacaacaaagggttgctatagctagagcattatgcatggaaccaaaaataatgctttttgatgaaccaacatctgctctagatcctgagatgattaaagaagtattagatactatgattgacttagctcaagatggtatgactatgattgtggtcactcatgaaatgggttttgcacgtaaagttgccaatagagtaatatttatggatgagggccaaataattgaacaaaatagccctaaagacttttttgaaaaaccaaaatctgaaagaactaaattatttttaagtcaaatactagatcactaa

SEQ ID NO: 271008 - DNA, 736 bp, Unknown
  Bacterial polypeptide expressing nucleotide sequence isolated from the Sargasso Sea
tatgtcagataaaattatagaaatgaaagatgtaaataaatggtttggagattttcaagttttaaaagatgtaaatttaaatgttaatcagaaacaaaaaattgttgtttgtgggccttcaggatcaggaaaatcaactttaattagatgtattaatagattagaagaacaccaaaaaggaacaattattgtggatggaaacgaacttaccgaagatacaaaagatatagaaaaaattagagctgaagttggaatggtttttcaacaatttaatttatttccacatttatcaatattggataattgtactttagcgcctatgtgggtaaagaaaatgccaaaaaaaaaggcagaagaattagctatgaagcaattagaacaagttcaaatagctgatcaagcaaaaaaatttccaggacaattgtccggaggtcaacaacaaagatgtgctatagcaagagcgttgtgtatggaacctaaaattatgcttttcgatgaacctacgtcagcattagatccagaaatgatcaaagaagttctagacgcaatggtaaacttagcgaaaggtggaatgacaatgatagtagtcactcatgaaatgggttttgctaaagaagttgctgacgaagtaatttttatggacgaaggtatgattgtagagcgtgcgcccaccaaagaattttttgctaatcccaaaagtgataggactaaactctttttaagtcaaatactataa

SEQ ID NO: 271009 - DNA, 778 bp, Unknown
  Bacterial polypeptide expressing nucleotide sequence isolated from the Sargasso Sea
atgaccgcaccactgagccttgccacccttgcccccgaacccgacccgcgttcggtgctgatacgcatcgaaggcctgaacaagcactatggcgcgttccacgtgctgcgtgacatcgacctgcaggtgcgcgaaggcgaacgcatcgtgctgtgcgggccgtccggctcgggcaagtcgaccctgatccgttgcatcaaccgcctggaagtcgcccagcagggcagcatccaggtggacggcatcgacctggcggccaccacgcgcgaggctgcacaggtacgcagcgacatcggcatggtgttccagcacttcaacctgttcccgcacatgagcgtgctcgacaactgcctgctggcccccaccagcgtgcgcgggctgtcacgcaaggacgccgaggagcgggcacgcatgtacctgagcaaggtcggcatcgaaagccaggcgcacaagtaccccagccagctgtccggcggccagcagcagcgcgtggcaatcgcccgggcgctgtgcatgaagccgcggatcatgctgttcgacgagcccacttcggcgctggacccggaaatggtcgccgaggtgctggacgtgctggtgcagttggctggcacgggcatgaccatgctgtgcgtcacccatgaaatgggctttgcccggcaggtcgccgagcgggtgctgttccttgagggagggcagatcatcgaggacagcccgccacaggtgttcttcaaccagccgcgcaccgaccgggccaaggcgttcctggcgcagatactgc

SEQ ID NO: 271010 - DNA, 585 bp, Unknown
  Bacterial polypeptide expressing nucleotide sequence isolated from the Sargasso Sea
tgctgccgcggctgtatgagcccggtgagggccggatcctgatcgacggctacgacatcgccaaggtggagctgtattcgctccgccgccagatcggcatcgtgccccaggatccgctgctgttcagcggcaccgtcagcgagaacatcgccctgacgaatccagaggcatccagcgaggagatcgtccgggctgctcgtttggccaatgcgcacgatttcatcatggaactccccagcggctacagcacgccggtgggcgaacgcggcgcttccctgagtggtggccagcgtcagcgggtagcgattgccaggactctgctgagcaatcccaagttgctcgtcatggacgaagccaccagcgccctcgactacgaaaccgagcgcaaggtctgcgacaacctgctggagaacctggacgaccagacggtgttcttcatcacccaccgcctgtccacgattcgacaggccgatgtgattgtgatgctgcaccagggagccgtggtcgaagtcggcacccatgaggagttgatgaagcatcggggtcgctactacgccctttaccgccagcaggagagcacctgac

SEQ ID NO: 271011 - DNA, 543 bp, Unknown
  Bacterial polypeptide expressing nucleotide sequence isolated from the Sargasso Sea
tatgaatgactcatcacaaagtttcgttaaatttgaaaaaattgacaaaagctatgatggagaagttttagttgttaaaaatttaaacctagacattgctaagggagaatttgtaactatgctaggaccatcaggttctggaaaaactacaaccttaatgatgctagccggttttgaaactccaactaacggagaaatttttcttgatactaaacccataagcaagatacccccttatgagagagaaattggaatggttttccaaaactatgccttattccctcatatgacagtagcggaaaacttatcatttccactagaggttaggaaaatgtcaaaagctgatattaaagaaaaagtgcagaaagcactcgatatggttgagcttggaaattttggtacaagattccccgcacaactttcaggaggtcagcaacaaagagtagctttagcaagagctcttgtttttgaaccaagattagtattgatggatgagcctttaggagctcttgataaaaacttgcgtgaacaaatgcaatacga

SEQ ID NO: 271012 - DNA, 626 bp, Unknown
  Bacterial polypeptide expressing nucleotide sequence isolated from the Sargasso Sea
catgtccgctataaaggttgagaacctggtcaagaactggggaacgttcgtcgcagtcgacaatgtcagcttcgagaccggcgatgccgagtttgtggcgctgctcggtccgtccggttgcgggaaatcgacaacgctgcggctgattgccggactggaacagacaagcagcggccggattaccatcaagggacgggatgttaccgacgcgccctccgccagacgcaatctgtcgatggtattccagtcctatgccctgttcccgcatctcactgtcgccgaaaacatcacgttcggtctttccgtgcggcatgttccgcgcgccgagcgtcaagagcgcctgaaggagacggtggaaatcctcgggctcggccatctgcttgaccgcaagccgagccagctttccggtggtcagcaacagcgcgtggcactgggccgggcactgatttcgaggacgccggtctgcctcctcgacgaaccgctttccaatctcgatgcaaagctgcgaacggaaatgcgcaacgagatccgctctctgcaacgccggctcgggatcacgatgattttcgtcacgcatgatcagtccgaagccatgagcatggccgaccgcgttatcctgatgcgcg

SEQ ID NO: 271013 - DNA, 712 bp, Unknown
  Bacterial polypeptide expressing nucleotide sequence isolated from the Sargasso Sea
atgaataagtggtttggctcttttcatgtgttgcgcgacatcgatctaactgtgaacagaggagagcgcattgtcgtttgcggcccgtcaggttctgggaaatcaacccttattcgctgcattaacgcgcttgaggagcatcagactggtcaaatcattgtcgatggaactgaattaacatctgatataaagaatattgatagaattagatctgaagttggaatggtttttcaacatttcaatctgtttccgcacctaagtattctagagaactgtactctagcacctatttgggtgagaaagattccaaaaaaagaagctgaggaaaccgcgatgcactttttagaaaaagtgaagattcctgagcaggcggataagtatccaggtcagttgtctggcggtcaacagcagcgtgttgcaattgcacgatcactttgcatgcgtcctcggattatgctttttgatgagcctacttctgcgcttgatcctgagatgatcaaagaggtgcttgataccatgattgagctggctgaggacggcatgacaatgatttgtgtcactcacgaaatgggttttgcacgacaggtagctaaccgggttatttttatggatgacggacaaatcgtagagcaaaatgagcctgagcaatttttcagaaaccctcagtcagatcgtacaaaattgtttttaagtcagatattaggtcactagt

SEQ ID NO: 271014 - DNA, 729 bp, Unknown
  Bacterial polypeptide expressing nucleotide sequence isolated from the Sargasso Sea
acgtcaacaacctctccccatgcctttggcgacgaaatggtggtcaacggcgtctcggtattcgtggcgccgggcgaagtcgtgtgcctgctgggtccatccggctgcgggaagacgacattgctgcgggtcgcggccgggttggaacgattacagaagggacagattcgcattggtgagaccatggtcgacgacggcgccacgggccttcatgtgccgcccgaccaacgcggtgtcggcctcatgtttcaagattacgccctatttccgcatctaagcgtccgggaaaacattcgctttggggtcggcgccgacacgcaggcgcgccgggcatgggctgagacggctttagggcagatgggcctcagccgccatggcgacagctatccacacaccctttcaggcggacagcaacaacgggtcgccttgttgcgggccttggcgacggagccttcagtcctgctcttggatgagcccttttctggccttgacgtggcacgacgcgccgccgtccgaggccagtccctagacatgcttcgcgatactggcgtcgccactttgctggttacccatgatcccgaagaagccatgttcatggccgatcggattctggtcatgaacaatggccgcgtggttcaggacggctcgccagagcaaacatattttcaaccggatacggaatttgtcgcggacctgttcggctactgtgaacagattgacgggctcggt

SEQ ID NO: 271015 - DNA, 661 bp, Unknown
  Bacterial polypeptide expressing nucleotide sequence isolated from the Sargasso Sea
catgtctcaaaaagatagtttcgtaaaattcgagaaggtggataaaagttatgatggtgaaatactggtcgttaaagatttaaatcttgatgttccaaaaggtgagtttctaactatgttaggaccatctggatcaggtaagacaacagtgttaatgatgttagctggatttgaaactccaacaagtggagaaatttatttggatggaaatccaataagcagtatcccgcctaacaaaagaggcataggaatggtttttcaaaattatgctttatttcctcacatgactgtaaaagaaaatttagcattcccacttgaagttagaaaaatgcaaaaaactgaaattgatgaaaaagttggaaatgcacttgcgatggttgaattacaagactttggaaatcgtatgccattacaattatctggtggacaacagcaacgtgtcgcattagctagatctttagtgtttgagccaagattagttttaatggatgagccacttggagcgcttgataaaaatttaagagagcaaatgcagtatgaaataaaacatattcacgaaaaaattggaataacagtagtttatgtaacccatgatcaaagtgaagccttaacaatgtcaaatcgaattgcagtatttaacgacggaaagattcagcaaatt

SEQ ID NO: 271016 - DNA, 710 bp, Unknown
  Bacterial polypeptide expressing nucleotide sequence isolated from the Sargasso Sea
aaaaaataatgttaaaaactttaaaacagtctcgataaataatttgagtcacttttatggaaaaaatgaaaataaaaaacaggttcttaatgacgttaatttaaatattgataaaggagagttggttcttttaaaaggaccttctgggtgcggcaagaccactcttttaacgttgattggggccttaagaacctgtcaaagtggtgatttaactgtattaaataatcagttaaatggtgcatcaaggaaaacgcgtcagattcttagaagaagtattggcatgatttttcaaggtcataatcttctgagatgtttaacagcagaacaaaatgttcagatgggctccgatttaataaaaggtttaacatatttgcaaagacgtgaaatagcgaggaattggttgtcagcagtaggtttagaagaacatcataaaaagttgccaaatgatttgtccggtgggcagaaacagagagtagcaattgctcgagctttatctgccaacccaaaacttttactagctgatgagcctacttctgctttagatagcgtcacaggaagagaaattgtaacccttttaagaaaacttgcaaaagagcaaaattgttcagtactcatggtgactcatgatccaagaatttctgatatggctgataggatattaaatatggaagatggaaaaatatatagtgcccatagtgagctaatatgat

SEQ ID NO: 271017 - DNA, 688 bp, Unknown
  Bacterial polypeptide expressing nucleotide sequence isolated from the Sargasso Sea
aatatcactaagcactatgagatgggctctcaaattgttaaagctcttgatggaattaatatcgcggttgaacaaaatgattaccttgccttcatcggctcttctgggtccggaaagtctacgatgctcaacatccttggctgcctcgatagaccgacttcaggccaataccatctcaatgggaagaatgtggaaagactcgttcaaaatgaactttctgaaatcaggaatttggaaattggatttatctttcaaagcttcaatcttttaccccgcgccgatgcgctaggaaatgtgatgcagccattgatctatcgtgatatcggctttcgccgtcgcaaggagatggcaatggaagccttaatcagagtaggacttgaagaacgagttgatcaccttcccaaccaactatccggcggacagcggcagcgcgttgccatcgcccgtgcactggtaacacaaccctctatcctccttgcagacgagccaactggtaacttggactcaagaaccactgtggaaatcatggagctgttcgacgaactgcacagcgagggccacaccctcattgtcgttactcatgaggatgagattgctcgacactgtcatcgagtggtggaaatgaaagacggaataatacatgctgatagtagttcggtcgaaattaccatgacgactaacaattgat

SEQ ID NO: 271018 - DNA, 385 bp, Unknown
  Bacterial polypeptide expressing nucleotide sequence isolated from the Sargasso Sea
gaagatagtgccatggaatacctgaagagggtaaaaataccagagcaggcaaataaatatccgggacagctttcaggaggacaacagcagcgtgtagcgatagcacgatcattatgcatgaatccaagaatcatgctttttgatgagcctacttccgcacttgatccagaaatgatcaaggaggttctcgaggtaatgactgaattagctgaaagtggtatgactatgctagtggttactcatgaaatgggattcgcaactgctgtggctgatagtgtaatttttatggatgaaggagaaattatagaaagcaatgatccgcataattttttcaacaatccgcagcatgagcggacaaagctcttcctaagtcaaattctgtaac

SEQ ID NO: 271019 - DNA, 554 bp, Unknown
  Bacterial polypeptide expressing nucleotide sequence isolated from the Sargasso Sea
tatgtctgagagtattatacaaataagcaacatgaacaaatggtttggagattttcaggttttaaaaggtattaatttagaggtaaaaccaaaacaaaagattgttgtttgtggtccatccggttccggtaaatctactttgataagatgtattaatagattagaggaacatcaagaaggtaatatagttgttgatggtacagagctaacagaagatacaaaaaatatagaacaaattagagctgaagttggaatggtattccaacagtttaatctttttcctcacttatcgattttagacaattgtacactcgcaccaatatgggttaaaaaattacctaaaaaggatgcagaagaattagcattaaaacacttagaaagagtgcaaatccttgatcaagcacaaaaatatccaggtcaattatcgggaggacaacaacaaagagcagctattgcaagagctctttgcatggagccaaaaataatgctttttgatgaaccaacatcagctttggatcctgaaatgattaaagaagttttggatgttatggtaa

SEQ ID NO: 271020 - DNA, 682 bp, Unknown
  Bacterial polypeptide expressing nucleotide sequence isolated from the Sargasso Sea
tatgactagatcgtctaaccagccatttattcagatacaaaatgtttcaaaacattttggtgagttttgcgcgcttgactcggtgtcacttgacatagagctgggccaaaagctggttatttgtggtccatctggctcaggaaaatcaactctgattcggtgtatcaaccgtctcgaaattcatgaaaaaggtgaaatctttatcgatggcaaaattgttgatggcagtctggcaggccaagatgttctgcgcaataatgtcggtatggtgttccaacaatttaacctatttcctcatttgacaattctagaaaatctgatgcttgggccggtacgggctcgccaacttcccgagtccgaagcccgcgatcttgctatgcaatatcttgaacgggtccgcattccagaacagctggacaaatacccggctcagctatcgggtggccaacaacagcgggtagcgattgcccgtgcactctgtatgatgccaaagattatgttgtttgatgaaccaacatcagcgcttgatcctgaaatgattgccgaggtgctggatgtgatcgaagaactggcagatagcggcatgacaatgatttgtgtaacccatgaaatgggctttgcgcgtcaggttgcagatatgatgttgttcatggatcacggcaaaattgttgagaccgggcct

SEQ ID NO: 271021 - DNA, 877 bp, Unknown
  Bacterial polypeptide expressing nucleotide sequence isolated from the Sargasso Sea
aaagatttaaatttagatattgctgaaggtgaatttattacaatgttggggccatctggctcaggtaaaacaacttgtcttatgatgttagcaggttttgaaacaccaactaatggagaaatttatttagactcaaacccaatttcaaatatacctcctcacaaaagaggaattggcatggtatttcaaaattacgctttattccctcacatgacagtttatgaaaatttggcgtttccactaaaggtcagaaaagttacaaaagaagatatagataaaaaagtagataaagcactgtcaatggtttctctttcaggatttgaaaatagaatgccaggtcaactatctggtggacagcaacaaagagttgctgttgcaagagcattagtatttgatcctcaagtagttcttatggatgaaccattaggagcattagataaaaatttaagagaaagtatgcaatatgaaattaaacatattcacgaaagtattggtgtaacagttgtgtatgttactcacgatcaaggggaagccttaactatgtcaaatagaatagcagtatttaatgatggaaaagttcaacagttatctagcccagataaattgtatgaagagccagtaaattcttttgttgctgagtttataggtgaaaataatacttttgctggcgaagtaactgatatttcaaaggacaagtgcaaagttagactagattctggaacagaaataatttcaaatccaataagagtaaaatcaaaaggggaaaaaactattgtgtctttaagaccagaaagagcaattataaatccagaaagtaaaatggataataagcatagtggtaaaatcgaagaagttatttatcatggtgatcacacaa

SEQ ID NO: 271022 - DNA, 742 bp, Unknown
  Bacterial polypeptide expressing nucleotide sequence isolated from the Sargasso Sea
aagatagttatgggaaatataattgaattaaaaaaagtaaataaatggtttgataaatttcaggtgttaaaagatattgatcttgaagttgctccacaagaaaaaatagtaatttgtggtccgtcaggttcaggaaaatcaactttaattaggtgtatcaataggttagaggagcatcaagagggaaatattatcgtagatggcacagaactagctgagaacacaaaaaatattgaaaaaataagagcagaagttggaatggtttttcagcaatttaatttatttcctcatctttcaattttagataactgtactttagcacctatttgggtaaaaaagttaccaaaaaaagaggctgaagaagttgcaatgaaaaatttaacaagagttcaaatagacgatcaggctctaaaatttcctggtcaactctcaggaggccaacaacaaagagcagcaattgctagagcactatgcatggaaccaaaaattatgttatttgatgaaccaacatcagcattagacccagaaatgattaaagaggttttagatgtaatggttgatttagcaaaaggtgggatgaccatgatagtggttacccacgaaatgggttttgctaaagaagttgcagactatatgatttttatggatgaaggaaaaatagttgaaagagcaaaaacaaaagagttttttgataatccaaaatcagatcgaacaaaacttttcttaagtcaaatattataac

SEQ ID NO: 271023 - DNA, 573 bp, Unknown
  Bacterial polypeptide expressing nucleotide sequence isolated from the Sargasso Sea
gatgacgccaatattagagacagtagatttggagtgctctttttggatttctacaggaatgttttcaccgaaaaaagccctggcagcggtaaatggtgtctcagttcagttgctaaagggacaagtgcttggattagttggcgaaagtggctgtggaaaaagtaccttagctaaaatgcttttaggtttacaaaaaccaaccaaaggcaatattttattcgacggacaaccattcgaacggttgtcccaatttgaaagagcagcaagagtgcaacctatatttcaggatccatatagctctcttaatcctcgaaaaacaatttttgaaattataacgctaccactcagcgtacataaagtaggaacgtctcgtgactggctccaaaaagctagagaaatgatggatctttgtggtttagcctctcggtacctgaatagttaccctagccaactatctggtggtcaacgtcaacgcgttgcgatagctagagctctagtgatgaagccagaggtcgtaatatgtgatgaaccaacttctgccttggatgtctcggttcaatcacagatattaaa

SEQ ID NO: 271024 - DNA, 745 bp, Unknown
  Bacterial polypeptide expressing nucleotide sequence isolated from the Sargasso Sea
aatgagtgaagaatcaataatttcattaaaaaatgttaacaaatggtttggagattttcatgtattacaagatgtaaatcttgaagttaagaagaaagaaagaattgttgtttgtggaccctctggttctggaaaatctacaatgatcagatgtattaatagattagaagaacatcaggaaggttcaatagttgttgatggaattgaattaacaggaaatttaaaaaatatagataatgttagaaaagaagttggaatggtattccagcaatttaatttattccctcatttatctgttaaagaaaatataacactagccccaatttgggtaaaaaaaatgcctaaagctgaagcagaggaactagccatgagacagttagaaatagtgaaaattcctgagcaagctaataaataccctggtcaattatctggtggtcaacaacaaagagtagcaattgctagatctcttgcaatgaaccctaatataatgctttttgatgaaccaacttcggctctagatcctgaaatgattaaagaggttttagatgttatggtagatttagcaaatggtggaatgacaatgatcgttgttacacatgaaatgggtttcgctaaaacagttgctgatagaatggtatttatggacgaaggaaagattgttgaagaagctagtccagataagtttttcaataatccggaaagtgatcgtacaaagttatttttaagtcaaattcttcatcagtaa

SEQ ID NO: 271025 - DNA, 721 bp, Unknown
  Bacterial polypeptide expressing nucleotide sequence isolated from the Sargasso Sea
tatgaatgacacatctcaaagttttgttaaatttgaaaagatcgataaaagttatgatggagaagtactagtagtaaaaaacttaaacttggatattgctaagggtgagtttgtaacaatgttgggtccatcaggatcaggtaaaacaacaactttaatgatgttagctggttttgaaacacctacaaacggtgaaatatttttagatactaaaccaataagtaaaatacctccttatgaaagagaaattggaatggtatttcaaaactatgccttatttccccatatgactgttgcggaaaatttatcattccctctagaagtaagaaaaatttcaaaaccagatattaaagaaaaagtgcagaaagctcttgatatggttgagttaggtagttttggtactagatttcctgctcaattatctggtggacaacaacaaagagttgctttggcaagagcgcttgtatttgaacctcgccttgtattgatggatgagcctttaggtgctcttgataagaatttgcgtgaacagatgcaatacgaaattaaacatattcatgatagaattggaataacagttgtctacgttacgcatgatcaaagcgaagctttaacaatgtctaatagaattgcagtattcaatgatggtgttgtacaacaattatctacacctgatattttatatgagaaacctgaaattctttttgtgctaaatttatag

SEQ ID NO: 271026 - DNA, 754 bp, Unknown
  Bacterial polypeptide expressing nucleotide sequence isolated from the Sargasso Sea
aatgtctgatccaataattaaaatagaaggtatgaataaatggtttggagattttcaagttttaaaagatattgatttagaagtagaaaaaaataaaaaaattgttgtttgtggaccttcaggatcaggaaaatcaactcttataagatgcatcaacagattagaagagcatcaaaaaggtacaattatagttgacggaactgaactgacagaaaatacaaaaaatatagaagcaattagagcagaagttggaatggtttttcagcagtttaatttatttccacatctgtccatactagataactgcacgttagcacctgtttgggttaaaaaaatgccaaaaaaagatgcagaagaacttgcaatgaaacaattagagcaagttcaaattgctgaccaagctaaaaaatttcctggtcaattatcaggtggtcaacaacagagatgtgcaatcgctagagctttatgcatggaacctaaaattatgttatttgacgaaccaacatcagcacttgacccagaaatgattaaagaagtgcttgatgcaatggttaatttagctaaggcaggtatgactatgatagttgtaactcatgaaatgggctttgcaaaagaagtagcagatgaagttatttttatggatgaaggaatgatagttgaaaaagcagaaactaaagatttttttgcaaacccaaaaaatgacagaactaaactgtttttagtcaaatactataacctttctaaactacaatag

SEQ ID NO: 271027 - DNA, 586 bp, Unknown
  Bacterial polypeptide expressing nucleotide sequence isolated from the Sargasso Sea
atgtctgatccaatcataaaaattgaaaatatgaacaaatggtttggagattttcaagttttaaaagatattaatctttcggtagaaaaaaataaaaaaattgttgtttgtggaccttctggatctggaaaatctactttaattagatgtataaacagacttgaggaacatcaaaagggtagcattattgttgatggaactgaacttgatgaaaatacaaaaaatattgaagcaattagagctgaagttggaatggtatttcaacaatttaatttatttccacatttatcaattttagataattgtacattggcacctatatgggtaaaaaaaatgcctaaaaaacaagctgaggaattagcaatgaaacagcttgaacaagtacaaatttcagatcaggcaaaaaaatttccaggacagttatccggcggacaacaacagagatgtgcaattgctagagctttatgcatggaaccaaaaattatgttatttgatgaacctacatctgcactggatccagaaatgattaaggaagtacttgatgcaatggtaaatttagcaaaagcccggtatgaccatgatagtt

SEQ ID NO: 271028 - DNA, 862 bp, Unknown
  Bacterial polypeptide expressing nucleotide sequence isolated from the Sargasso Sea
aattttaagattgagcggggtgaattttttgcactgcttggtccttcaggatgcggtaaaacaacacttcttagaatggttgcaggatttgaaatacctgattcaggtgaaatttcaattgataatcaactaatgtctggaattccgccaaatttaagacctgtaaacatggtttttcaaaattatgcaatatttcctcacatggatgtaagaggaaatattgcatttggaatgagaaagtccggactgtcaaaaacagaattaaatcgacgtattgatgagacacttgaactaataaaactccagggatatggtaaacgcagagctgaagaactctcaggcgggcagcgacaacgtgttgcactcgcgagggcattgattaaacaacccaaggtactactgctggatgaacctctgggtgcccttgataaaaaacttagagaacaaatgcagatagaattgcgccaacttcagcagcaggttggaattagttttctttttgtcacccatgaccaggaagaagccctgacactttcagaccgcattgcagtaatgtcagaaggaaatgtaatggaaattgcttctcctggacaactttacgaaaatccaagttcgcggtttgtcgctgactttatcggcagcatgaatttttttccaggagaagtaaccaaatcagaaaacagtaaaattagaatttcaactgattatatgggtgaaatcgacatgccaacctctaattctaaatttggtgtcaaaagccgtgtatggattgctattcgtccggaaaaatttaagcctttattctcagctcctagagatttatcaaaagtaaagcagggagtaatgggcccctcagcctact

SEQ ID NO: 271029 - DNA, 616 bp, Unknown
  Bacterial polypeptide expressing nucleotide sequence isolated from the Sargasso Sea
tggttctggaaaatctactttgataagatgtattaatagacttgaagaacatcaaaagggtcaaattgtagttgatggaaacgaactctctgaaaaaactaaagatattgaaaaaataagagcagaagttggaatggtttttcaacaatttaatttattcccacatttgtctattttagataattgtaccttagctccaatctgggttaaaaaaacaccaaaaaaacaagccgaagagtttgcgatgaaacaattagaacaggttcaaatatctgatcaagcaaataaatttcctggacaattatcaggaggtcaacaacaaagagctgcgctcgcaagagctttgtgtatggaaccgaaaattatgctttttgatgaaccaacatctgcactggaccctgagatgataaaagaagtactcgatgcaatggttaatttagctaaagctgggatgaccatgatagttgttactcatgaaatgggttttgcaaaagaagtggccgatgaagttgtttttatggatgaaggaatgatagttgaaagggccaaaacaaaagacttttttgcaaatcctaaaaatgaaagaacaaaacttttcctaagccaaatactttaa

SEQ ID NO: 271030 - DNA, 823 bp, Unknown
  Bacterial polypeptide expressing nucleotide sequence isolated from the Sargasso Sea
atggtttttcaatcttatgctctttatcctcacatgaatgtatttgaaaatatgtcatttggattaaaaatagaaaaaagacccaaggaagaaattaattccaaagttatgcatgctgcaaaaatattaaaaattgaggaacttttagatagaaggccaaaacaattgtctggaggacaaagacaaagagtcgcaataggaagagcgataacgcgtaatccaaagatatttttatttgatgaacctttatcaaatctagatgcagctttaagagcagaaatgagggtagaaatctcaaaattacacaatcaaattaaaaccaatatgatttatgtaacgcacgaccaagtagaagctatgactttggctgatagaatagttatattaaatcaaggcaatatagaacaagttggaactcctgaggaaatttataatgacccagcaaatatttttgttgcacaatttattggtacaccaaaaatgaatattttagaaattggtgaagaaaatattaaatctgaaaatactttaacattattggggaatgaaattaaattaaatgatattaaattaaaaagaaaaaaacattttattgggattagaccagaacatttaaatgtaaatggtgatttaaattttaaatttactcctgaaatagaacttattgaaaatttgggtaatgaaaaaattgtttatatgaaaaaagataattatttaataaatgccaaaatatctaatggtatagagataaaaaaccaaattggttttaagcttaatgatatttttattttcaatgaaaatgggcaaaggataaaaagctaac

SEQ ID NO: 271031 - DNA, 685 bp, Unknown
  Bacterial polypeptide expressing nucleotide sequence isolated from the Sargasso Sea
atgattcgccttgagaaactgagcagagagttccaagtagggaatcaggttgttcatgcgcttgatgaggtcgacctggaaattaaggaaaatgaatatgtttccataatgggcgtttcaggatcaggtaagtcaacccttctcaacatattagggttattagatacaccaacatccggtgattacattttatcagggatcaatacatcaaagatggacgatgacgaaatggcagggatcagatcaacaaagatcggttttgtatttcaatcctttcatctgattccaaggctgacagcattcgaaaatatcgagatgccaatgattctatctggaatgaatccaaaagaacgatcagagaaggtcagctcagctcttgaaaaagttggcttgaccgatcgttcagatcacaaaccagagcaactttctggaggtcaaagacaaagagttgcaattgcaagatccattgtcatggaaccagatgtccttctagcggatgaaccaacaggaaacttagatacttcatcaggcaacgaagttgtgaaattaatcgaagagcttaacattgcgggcctgaccctaatagtggtcactcatgatagagaaatgggcgagcgttcaaatcgcttgattgagttgagagatggaaaaatcattaacgatcaaaatcaaaaaaaggcctgaa

SEQ ID NO: 271032 - DNA, 715 bp, Unknown
  Bacterial polypeptide expressing nucleotide sequence isolated from the Sargasso Sea
aatggaaaatgtaaataaatggtttggagattttcaggttttaaaagatataaatttggaagttaatcaaaagcaaaaaatagttgtttgtggaccttcaggatcaggaaaatctacattaataagatgtataaatagattagaagaacaccaaaagggaagaattacagttgatggaaacgaattgacagaagatacaaaagatattgaaaagataagggctgaggtaggaatggtttttcaacaatttaacctatttccacatttatctatactagacaattgcacattagctcctatctgggtaaaaaaaatgccaaaaaaagctgctgaggaattagctatgaaacaattggaacaagtccaaattgttgatcaagcaaaaaaatttccaggtcagttatcaggaggccaacaacaaagatctgctatagcacgagctttatgcatgcaacccaaaataatgctttttgacgaaccaacatcagcattggatccggaaatgatcaaagaagttttagatgcaatggtcaatttagcaaaaggtggaatgactatgattgtagtcactcatgaaatgggctttgcaaaggaagttgctgacgaggtaattttcatggacgaaggtatgattgtagaaaaacagcctacaaaagatttttttgcaaatccaaaaagcgatagaactaaacttttcttaagtcaaatattataa

SEQ ID NO: 271033 - DNA, 544 bp, Unknown
  Bacterial polypeptide expressing nucleotide sequence isolated from the Sargasso Sea
gatggaaaagaaatattctgaaaatacaaaggatattgaaaaaatacgtgccgaagttgggatggtatttcaacagtttaatttattccctcatttatcaatattggataactgtactcttgcaccaatatgggtgaaaaaaatgcccaaaaaacaagctgaggaagttgcaatgaaaaatttagaaagagttcaaattgctgatcaagctaaaaaatttccaggtcaactatctggagggcaacaacaacgatgtgctttagctagagcactttgtatggagccaaaaataatgttatttgatgaaccaacgtcagctcttgatcctgaaatgataaaagaagtattagatgcaatggttgatttagctaaagcaggtatgacaatgatagttgttactcacgaaatgggatttgccaaggaagtagctgataatatgatttttatggatgaaggtagaattgtagaaaaggcaaaaacaaaagatttttttaataatccaaaatctgacagaacaaaattgtttttaagtcaaatattataa

SEQ ID NO: 271034 - DNA, 892 bp, Unknown
  Bacterial polypeptide expressing nucleotide sequence isolated from the Sargasso Sea
aaaacttatgaaaagatggctgtgaaatcgacaacatcactgtcagtggtgaacattggccaaggtgggatcattgcacttggtctaacgctcatgatgatcatggctggttttgatatccaaaatggacagttgaccatcggtgattttgttgcggtgaatacttatcttcttcagctttatctgccgttgaattttttgggctgggtgtatcgtgaattgcgccaagcacttgttgatatggaacgcatgtttggcttgcttgatgagaaacctgatattgctgatcgtgaaggtgctgcgccattggtgatttcgggtggcgatctgatttttgacaatgtgcatttcagttatggtgaccatgccattttaaaaggtgtgagctttcgggtgccagctggtaaacgtgtagcaattgtcgggccaagcggatctggcaaaaccacaatttcgcgcttgctgtttcgcttttacgatccgcaatcgggtgcggtgcgtctggatggtcaggatttgcgggatgtaacgcaaaatagcttgcgggcggcgatcgcggttgtcccgcaagataccgtgatgttcaacgccagcattggttataacatcggatatggccgagaagatgcaacccaagctgacattgcaaatgccgccagactagcggcgattgatgtgtttattgcaaaattgccgcaaggctatgaaaccatggtgggtgaacgtgggttaaaattatctggtggcgaaaagcaacgtgttgccattgcacgggcgattttgaagcgcccgtctgtttttctatttgatgaggccacgtcggcactagatagccgcacagaaaaagaaatccaacatgcgctgaataatggtctgaaaaccaaacgacctt

SEQ ID NO: 271035 - DNA, 569 bp, Unknown
  Bacterial polypeptide expressing nucleotide sequence isolated from the Sargasso Sea
tatgtccgaaccaataattaaaatagaaggtatgaacaaatggtttggagattttcaagttttaaaaaatattgatttaaaagtagaaaaaaataaaaaaattgttgtttgcggaccatctggatcaggtaaatcaactcttataaggtgtattaatagattagaagaacatcaaaaaggtacaataatagttgacggaactgaactgacagaaaatacaaaaaatatagaagctataagagcagaagttggaatggtatttcaacaatttaatttatttcctcatttatctattttagataattgtactttagctccaatatgggtaaaaaaaatgcccaaaaaagatgccgaacaacttgcaatgaaacaattagagcaagttcaaattgccgaccaagcacaaaaatttcccggacagttatcaggaggacaacaacaaagatgtgcaattgctagggcattatgcatggaacctaaaataatgttatttgacgaaccaacttcagctttagaccctgaaatgattaaagaagtacttgatgcaatggtaaatttagcaaaagctg

SEQ ID NO: 271036 - DNA, 736 bp, Unknown
  Bacterial polypeptide expressing nucleotide sequence isolated from the Sargasso Sea
atggcatcggttgaattcaagaacgtaaccaagaagttcggtgccttcacggccgcctcggacctcaatatcgaaatcggcgatggtgaattcgtctgcctgctcgggccttccggctgcggcaagaccaccagcctcagaatgatggcgggtctggaatttccgacctccggccaagtgctgatcgatggcaaggacgtcacctatctccatcccaaggaccgtcagatatcgatggtgttccaggactatgcgctctatccgcatatgaatctcgaggataatatcgcctatccgctgaaggtgcggggcgaggctaccgacaagcgccatgcccgcgcgaaggaagtggcggatgtgctgaagatcggcgatctgatgaagcgcctgccaagccagatttccggcggccagcagcagcgcacctcgcttgcccgcgcgctggtctatccaagccaggtctatctgttcgacgagccgctctccaacctcgacgccaagctgcggctcgaggcgcgcggtttccttaaccatctgcagcacgatctcggcataacggcggtctatgtgacgcacgaccaggccgaggcaatggcgctcgcaacccgcgttgccgtgatggaccagggacagatcgtgcaatatgcgccgccgatcgagatctaccgccgtccggccaacaccttcgtcgccaatttcgtcggaaatccgcctatgaaccttttgccggtggagg

SEQ ID NO: 271037 - DNA, 907 bp, Unknown
  Bacterial polypeptide expressing nucleotide sequence isolated from the Sargasso Sea
attgctatggctctagcaaacgaaccagaactattaattgctgacgaaccaacaactgctcttgatgtaactgttgagaaagcactattagaattattatctgacttacagaaagagtttggcatgtctattttattcattacacatgatttaaatattgtaaaaagattttctgatgaagtttgtgtcatgaaagaaggaaaaatagttgaatcagggaaggttaaggatatttttgataatcctaagcatccttataccatcaagttacttaattccatacctggaaagaaagcggaattaaatcttgaaaatgagcagttgctcattggtcgaaaagtggacataaaatatccgataactaagaatatatttggcaaaacagtagattttttgaatgctgtgaaaaaagttgatataacaatacacagcggctcaactactggcttagttggtgaatctggttctggtaagtcatctttggcaagagctttgttaggcattgaaaaggcagaaggtaacatcatttttgatggaagaaatatacatcagttgaactccagtgaaacaaggagatttaaaaaagattttcaaatagtgttccaagatccttttggctctttgtctccaaggatgacagttggagaaatagtaggagaagggctgagagttcatgaacctagtttaatcagaagtgagagagaaaaaaaaatcattaaggctcttgaggatgttgaattagacaaatcttctttttcaagatttccacatgaattatccggtggacaaagacaaagagttgctattgcaagggcaattattttggagcctaaacttatattattagatgagcctacttccgctttagatgtttcaattcagatgcaaatattgcatcttttgaaag

SEQ ID NO: 271038 - DNA, 706 bp, Unknown
  Bacterial polypeptide expressing nucleotide sequence isolated from the Sargasso Sea
tatgccaaataacttagatttcgttaaatttgacaaagttgacaaaagttacgatggaaaagtactggttgttaaagatttaaatttagacatagccgaaggcgagttcataactatgttagggccatctggatcaggcaagacaacctgtttgatgatgttagctggttttgaaactcctacaaatggagaaatttatttagataaaaatccaatttcaaatatacctccacacaaaagaggaataggaatggtctttcaaaactatgcactatttcctcatatgacagtatatgaaaatttagcctttcctttaaaggttagaaaatttcaaaaggacgagattgataagaaagtagataaagctctttcaatggtgtcgctatctggttttgaacatagaatgccaggacagttatctggtggtcaacaacaaagggtagcagttgcgagatctttggtgtttgatcctcaattagttctaatggatgaacctcttggagctttagataaaaatttaagagagagtatgcagtacgaaattaaacatattcatgaaagcattggggttacggtagtctacgtaacacatgatcaaagtgaagcattaacaatgtctaacagaatagcagtgtttaatgatggaaaagttcaacaactttcatcaccagacaaattatacgaagaacctgtaaattcctttgta

SEQ ID NO: 271039 - DNA, 849 bp, Unknown
  Bacterial polypeptide expressing nucleotide sequence isolated from the Sargasso Sea
aatgattgcaggattagaaaaaatagatgaaggtgaaatattttttaatgatcaaaaaattaatgaacttcatccttcaaaacgtcaaactgctatggtttttcaatcgtatgctctttatccccatatgaatgtatatgaaaacatgtccttcggcttgaaaatagaaaaaagacccaaggaagagataaaccaaaaagtaatgcaagctgcaaaaattcttaaaattgaggaactcctagagaggaaaccaaaacaattatctggaggacaacgacaaagagtggctataggaagagctattacaaggaatcccaaaatatttctttttgatgaacctctttcaaatttagatgcagcattaagagcagaaatgagagttgaaatttcaaaattacataatcaaattaaaactaacatgatttatgtgactcatgatcaagtagaagctatgacattagcagacagaatagttattttaaataaaggtaatattgaacaagtaggtacccctgaagaaatatataatgacccagctaatatttttgtagctcaatttataggcacaccaaagatgaatatattagaaattaatgaaaaagatttgatttctgacaattcaattaagttattaggtaatgagatagattttgatagtttaaaattaaaaaaatctaaacattttgtgggtataagaccagaacatttgaaagcaaatcaaaaaactcaatttacttttaatcctgaaattgaattaattgaaaatttagggaatgaaaaaattgcttacatgaaaaaagatcattatcaattaagcgcaaaaattccaagcaatgttgaattaagcaa

SEQ ID NO: 271040 - DNA, 850 bp, Unknown
  Bacterial polypeptide expressing nucleotide sequence isolated from the Sargasso Sea
atggcagaaattaagttacgtaatcttagcaaaagctggggaaattttgttgctgttaaagatttcaatttaacaattgctgataaggaatttcttgtattacttggcccctcaggatgtggcaaaactactactatgagaatgatagctggtctagaggatgtatcagagggtgagatatttattgatggcaaactggtaaacaatttagaaccaaaggacagagacatttctatggtttttcagagttatgctctataccccaatatgaatgtatatgataatattaggtttcctcttaaagttagaaaaataaataaaagtacacaggatagtaaggtaaaaaaagcagcccaaatggttgaattgacggattaccttaatagaaaaccagcagaattatctggaggacagaagcagagagttgcactagcacgtgctattgttagagagcctaatgtttttctgatggatgaacccttatctaacttagatgccaaacttagagtttcaacaagggcccagattaagaatttaagccatgaattagctataactacaatctacgttacgcatgatcaagtagaagcgatgacgcttgcagacagagttgttgtaatgaagcaaggtgttgttcagcaagtgggaagtccaacggatatttatgatatgccggcaaattcctttgtagcaggatttataggttctccagctatgaatcttatagaagggaaaattagcaaaggagttttttcatctcaaaatactttaattaaaggattaaaagcagatgatggtgaaattatactgggttttcgagcagaagatgcaatggtgataaaagaaaaag

SEQ ID NO: 271041 - DNA, 745 bp, Unknown
  Bacterial polypeptide expressing nucleotide sequence isolated from the Sargasso Sea
atgagtgaagaatctataatttcattaaaaaatgttaacaagtggtttggagattttcatgtattacaagatgtaaatcttgaagttaagaagaaagaaagaattgtagtttgtggcccttctggttctggtaaatctacaatgatcagatgtattaatagattggaagagcaccaagaaggttcaattgttgttgatggaattgagttaacaggaaacttaaaaaatattgataatgttagaaaagaagttggaatggtattccagcaatttaatttattccctcatttatctgtaaaagaaaatataacactagctccaatttgggtaaaaaaaatgccaaaggcagaagcagaggaactggctatgagacagttagaaatagtaaaaattcctgaacaagccaacaagtatcctggtcaattatctggaggtcaacaacaaagagtagcaattgctagatcccttgcaatgaatcctaacattatgctttttgatgaaccaacttcagctctagatcctgaaatgattaaagaagttttagatgttatggttgatttggcaaacggtggaatgaccatgattgttgttactcacgaaatgggttttgctaagacagtagctgatagaatggtgtttatggatgaaggaaaaattgttgaggaagctagcccagataagttttttaataatccagagagtgatcgtacaaagttatttttaagtcagattcttcatcagtaat

SEQ ID NO: 271042 - DNA, 503 bp, Unknown
  Bacterial polypeptide expressing nucleotide sequence isolated from the Sargasso Sea
aatagagccggaagtcggaatggtgtttcagcagtttaatttattcccacacttatctatactggataatggtacattagctccaatttgggtaaaaaaacttccaaaaaaacaagctgaagaattagctatgaaaaatttaacacgagtacaaatagatgatcaggcgttaaaatttccaggtcaactctctggaggtcaacaacaacgtgcagcgattgcaagagctctttgtatggaaccgaaaataatgttgtttgatgaacctacatcggcattagacccagagatgattaaggaagttttagatgtaatggtagacttggcgaaaggtggaatgacaatgattgtggtaacacatgaaatgggctttgcaaaagaagtagctgataatatgatttttatggatgaaggaaaaatagttgaaaaagctaaaactaaggaattttttgaaaatcctaagtcagaaagaactaaattatttttaagtcaaatattataac

SEQ ID NO: 271043 - DNA, 559 bp, Unknown
  Bacterial polypeptide expressing nucleotide sequence isolated from the Sargasso Sea
aatgtcgaaaattgttataaaaaatctcaaaaaatcttttggtgataataaggttatcagtaattttaatatagatattaaggatggagaatttattgttttagttggtccttcaggatgtggaaaatcaactttattaagaatgatctcaggattagaaagtataaatcaaggggaaatttttttggatgaaaaattaataaataatttgctcccttctaaacgggaaattgcaatggtctttcaatcctattctttgtatccacacatgagtgtttttgaaaatatgtcttttggattaaaaatggaaaaaattccaaaaagtgaaattaatcaaaaagttaataatgctgcagctacacttcaaattaaagatttactagaaaggaaacctaagcagctttcaggaggacaaagacaaagggttgcaattggaagagcaattacaagaaacccaaaagttttcttatttgatgaaccattatcaaaccttgatgctgcattaagatctgaaatgagagttgaaatatctaaattacataagaaattaaattcaaat

SEQ ID NO: 271044 - DNA, 778 bp, Unknown
  Bacterial polypeptide expressing nucleotide sequence isolated from the Sargasso Sea
atgaatgacacatctcaaagtttcgttaaatttgaaaagattgataaaagttacgatggagaagtactagtagtaaaaaacttaaacttggatattgctaaaggtgagtttgtaacaatgttgggtccatcaggatcaggtaaaacaacaactttgatgatgttagctggttttgaaacacctacaaatggtgaaatatttttagatactaaaccaattagtaaaataccgccctatgaaagagaaataggaatggtatttcaaaactatgctttatttcctcacatgactgttgcggaaaatttgtcatttccgctagaagtgagaaaaatttcaaaaccagacattaaagaaaaagtgcagaaagcacttgatatggttgagttaggtaattttggtacaagatttccagctcaattatctggtggacaacagcaaagagtcgctttggccagagcacttgtatttgaaccacgcctagtattaatggatgagcctttaggtgcactcgataagaatttacgtgaacagatgcaatacgaaataaaacatattcatgataggattggcataacagttgtctatgttactcatgatcaaagtgaagcattaacaatgtccaatagaattgctgtattcaatgatggagttgtacaacaattatctacacctgatatcttgtatgaaaaacctgaaaattcttttgttgcaaaatttataggggaaaataatacacttaatggtgttgttagggaagtgaatggaatcctcatgtact

SEQ ID NO: 271045 - DNA, 715 bp, Unknown
  Bacterial polypeptide expressing nucleotide sequence isolated from the Sargasso Sea
atggcaaaaaataacgaatttgtaaaatttgataaagttgacaaaagttatgatggaaaagtcttagttgttaaagatcttaatttagatatcgctgaaggtgaattcataactatgttgggaccatctggttcgggaaaaactacatgtttaatgatgttagcaggatttgaaactccaactaatggagaaatttatttagatggaaatccaatttcaaatatacctcctcataaaagaggcattggaatggtttttcaaaactatgcattatttcctcacatgactgtttatgaaaatttagcatttcctttaaaagttagaaaattttcaaaagatgaaacagataaaaaagttgaaaaagctttatcgatggtttctttgtcagatttcggaagccgtatgccagctcagttatcaggaggtcaacaacaaagagttgctgtggcaagagctctagtgtttgatcctgcggtagttttaatggatgaacctctgggtgcgttagacaaaaatttaagagaaagcatgcaatatgaaattaaacatattcacgaaagcatcggtgttacagttgtttatgttactcacgatcaaagtgaagccttaacaatgtcaaatagaatagcagtttttaatgatggaaaagtacaacaattgtctagtcctgataagttgtatgaagaacctgtcaactcttttgtagcggaattta

SEQ ID NO: 271046 - DNA, 611 bp, Unknown
  Bacterial polypeptide expressing nucleotide sequence isolated from the Sargasso Sea
aatgtctgatccaataattaaaatagaaggtatgaataaatggtttggggattttcaagttttaaaagatattgatttagcggtagaaaaaaataaaaaaattgttgtttgtggaccttcgggatctggaaaatcaactcttataagatgcataaatagattagaagaacaccaaaaaggtacaattgtggttgatggtaccgaacttacagaaaatacaaaaaatatcgaagctataagagctgaagttggaatggtatttcaacaatttaatttatttcctcatttatcaatactagataattgtactttagcaccagtatgggtaaaaaaaatgccaaaaaaagatgcagaacaattagcaatgaaacagctagagcaagttcaaattgctgatcaagcttataaatttcctggtcaattatccggcggacaacaacaaagatgtgcaattgcaagagcattgtgtatggaacctaaaataatgttatttgacgaacccacatcagcattagatccagagatgatcaaagaagtattagatgcaatggtaaacttagctaaagctggaatgacaatgattgtagttactcatgaaatgggctttgcaa

SEQ ID NO: 271047 - DNA, 714 bp, Unknown
  Bacterial polypeptide expressing nucleotide sequence isolated from the Sargasso Sea
tatgtcagataaaattatagagatgaaaagtgtaaacaaatggtttggagattttcaagttttaaaagatgtaaatttaaatgtaaatcaaaaacaaaaaattgttgtttgtggaccttcgggctctggaaaatcaactttaataagatgcatcaataggcttgaagaacatcaaaaaggaacaattattgttgatggaaatgaacttactgaggatacgaagaacattgaaaaaataagagctgaagttggaatggtttttcaacaatttaatttgtttccacatttatctatattagataattgtactttagcgcctatatgggtgaagaaaatgccaaaaaaacaagctgaggaaatggcaatgaatgaacttaaaaaagttcaaattgccgatcaagctaaaaaatttcccggacagttgtctggcggtcaacaacaaagatctgcaatagcaagagctttatgcatggaacccaaaattatgctttttgatgaacctacatcagctttagatcctgaaatgataaaagaagttttggatgcgatggttaatcttgctaagggtggtatgacaatgatagttgttactcacgaaatgggttttgccaaagaagtagctgatgaagtaatttttatggacgaaggtatgattgtcgaacgtgcaccgactaaagatttttttgcaaatcctaaaaatgatagaacaaaact

SEQ ID NO: 271048 - DNA, 556 bp, Unknown
  Bacterial polypeptide expressing nucleotide sequence isolated from the Sargasso Sea
atggctcaaaacagcgataaaatcctatccaacgacgtggtcgtctccatggatcatgtgaataaatggtttggccaatttcacgttttgcgagatataaatctgcaggtaaacaagggggagaggatcgtcgtatgtgggccgtctggctcgggcaagtctactttaattcgctgtctaaaccgactcgaacaacatcaacagggtgatatccatgtgcatggaatcgagctgaataatgatgtaaaaaacattgatgaaatccgccgtgaagttggcatggtatttcagcatttcaacctgtttccgcatttatcaattttggaaaattgcatgcttgcgccaatctgggtgcgcaaaacaccgcggtctgaggctgaaagaactgccatgcattttctaacccgcgtaaaaattcctgaacaggctcataaatatcccggtcaattatcaggcggacagcagcagcgtgtggccatcgcgcgcgctttgtgtatgcaaccccagctgatgttgtttgatgaaccagacctcggcacttggacccagaaatgat

SEQ ID NO: 271049 - DNA, 565 bp, Unknown
  Bacterial polypeptide expressing nucleotide sequence isolated from the Sargasso Sea
aatgtctgaagcaattatcaaaattgaaaacatgaacaaatggtttggtgatttccaagttttaaaagacattaatttagaagttgaaaaaaataaaaagattgttgtgtgtggaccctcaggatctggaaaatctacacttataagatgtataaatagacttgaagaacatcaaaaaggaagcattgttgttgatggaactgaattaaacgaaaatacaaaaaatattgaacaaattagagctgaagtaggaatggtttttcaacaatttaatctatttccacatttatcaatattagataactgcaccctagctccgatatgggttagaaaaatgccaaaaaaaaaggctcaagagttagcaatgaatgagcttgaaaaagttcaaatttcagatcaagcgcaaaaatttcctggacaactttcaggtggacaacaacaaagatgtgctattgctagagctctgtgtatggagcctaaaataatgctatttgacgaacctacatctgcattggaccctgagatgataaaagaagttcttgatgctatggttaatttagcgaaa

SEQ ID NO: 271050 - DNA, 786 bp, Unknown
  Bacterial polypeptide expressing nucleotide sequence isolated from the Sargasso Sea
aatgatagttgatcttatacatatagagaaatcttttgataaagttaaagcagtcaataatgtatgtctaggaataaaagaaggtgaatttttttcactattaggcccatctgggtgtggtaaaacaacacttttaagaataattgcaggttttgaaaaaactgaaaatggtgatgtttttattaatggtaaaaatgttaattttgttgctccaaataatagacctacgaatatggttttccaaaattacgcaattttccctcatttaaatgtttcagagaatgttggatatggactaagaaatacaaattttagtaaggatgaaatttcaaaaaaaatagatgaagcgctaaagttagtgggcctcaagggattgaacaaaagggcgtcatcggctttatcaggtgggcaaagacagagagtagcgcttgcacgtgcgttgattttaaaacctagagtactacttctggatgaaccactctctgcattggataagaatctaagggagcaaatgcaatttgaattaagacagcttcaaaaatcagtaggtataacatttattttagtaactcatgatcaaacagaagcacttacaatgagtgatagagtaggtgttatgttcaatggaaaagtagatcaagttgcaactcctgaacagatttataataaaccaagaacaaaaatggttgcagcttttatcgggaatatgaatttttttgaaactgaatgcataggtgaaagctctaaaacaattactgtttttcataaagacctgggtaatcttaa

SEQ ID NO: 271051 - DNA, 912 bp, Unknown
  Bacterial polypeptide expressing nucleotide sequence isolated from the Sargasso Sea
tagttttggcgatcagaaagtcctacataatgtcagtcttttggttccttctggtcaattagtgtgcttactggggccatcaggttgcggtaaaactacttttcttcgtttggctgctggactggaggaacttcaatctggtgaaattctaattaatggaaaggtagttgcggactcagaacattctgttccgccgcaaaatagaaagattggtttgatgtttcaagattttgctctatttccgcatttgacggcaacagagaacgttttatttgggttgcaaaacttgcctcctccagagcgtaacgagagagcatcaggtatgcttgataaagttgggatgactcagcatgcagggaaatatcctcacatgttatctgggggacagcaacaaagagtagctctcgcgcgtgctttagcaccggaaccagagttattactcttagatgagcctttttcaggacttgatatagaaatgaggttaaggattagagagcaaactctcgaggtacttaagggtagtggagtggcaactttaatggttacgcatgatgctgaagaagcaatgtttatggccgaccgaataaaggtaatcggcgagagtggacatgttttgcaggcaggtcgaccccatgaaatattttaccatcctcgtcatcagtttgtagcgaaattgtttggaaaaacgaattgcatacaagggattgttaacaaaggtgcggtaaacactccatttggagaggtttcctgtattgggtttatggatggtgaaagggtagagattttgatccgacccgaaggggtgcaattaagtgacaaaaatgatggtgtgcccgcgacaattctgtctacacatctgcttggacacgatagcctgatgcgggttcggttagatcaagagaaaaatggaaa

SEQ ID NO: 271052 - DNA, 736 bp, Unknown
  Bacterial polypeptide expressing nucleotide sequence isolated from the Sargasso Sea
atggcggatatagaattaagatcaattaataaattttttggaaaaactcatgttataaaggatttttcgctcaacattaaaagtcagtcattcacaacattggttgggccatctggatgcggaaagtctacattattaagaatgatagctggattagaagaaactaactcgggcaaaatatcgattggtggagaagaggtaaataacctccctccaaaagaaagaaatatcgccatggtttttcaatcatatgctctttatccccatatgactgtatttgataatatggcatttggactaaaattagaaaaaagacctaaagatgaagttaaacaaagagtgcatgaagctgcaaaaattttacaaattgaagattatcttctaagaaagcctaaacagttgtcaggaggtcaaagacaaagagttgctatcggtagagcaataactagaaagcctaaggtctttttatttgatgaacctttatctaatttagatgccgctttgagagttcaaatgagaattgaattagcaaaattacatgatcacttggatgcaacaatggtttatgtgactcatgaccaaactgaggcaatgactttatctgatgagattgttgtgttagatcaaggtgagatttctcaacaaggtaagccaatagaattatataataatcctaaaaatttatttgttggaggtttcattggctctcccaaagatgaattttgtcaatgctaaa

SEQ ID NO: 271053 - DNA, 851 bp, Unknown
  Bacterial polypeptide expressing nucleotide sequence isolated from the Sargasso Sea
caacgaaggtgaatttatcacgatgttgggaccatctggttctggtaaaacaacttgcttgatgatgttagctggatttgaaacaccaacaaacggtgaaatttatttagactcaaaacctatttctagaattcctccacacaaaagagggataggaatggtttttcaaaattatgctttatttcctcatctaacagtttatgaaaatttagctttcccgcttaaagttagaaaactttcaaaagatgatattgataaaaaagttgataaagctttatctatggtttctctatctggatttgaaaaaagaatgcccaatcagttatctggtggacaacaacaaagagtagctgttgcaagatctttagtatttgatcctcaattagttttaatggatgaaccattaggagctttagacaaaaatttaagagaaagtatgcagtatgaaattaaacacatacacgaaaatattggtgtaacagtagtttacgttactcatgatcaaagcgaagctttaactatgtccagtagaatagcagtatttaatgatggaaaagttcaacaattgtctagtcctgataaattgtatgaagaaccagttaattcatttgttgcagagtttattggagaaaataatactttttcgggagaagtaaccgatatagctggaggtaaatgcaaggttaaattagatactggagctgagataatttctaacccaataagagttaagtctaaaggagaaaaaaccaaagtctctcttagacctgagagagcaataatagatccagaagataaaatggataataaacacaaaggtaaaattgaagaaattatttatcacgggtgat

SEQ ID NO: 271054 - DNA, 745 bp, Unknown
  Bacterial polypeptide expressing nucleotide sequence isolated from the Sargasso Sea
atgactgtcgccattcgtgccactgagctggtcaagagctattcccaaggagttcgagctctcgatggcgtcacccttgaggtgaacagcggcgaagtgctggtggtgatggggccttccggctccggcaagagcacgctgatccgtacgttcaacggtctggagtcgttggatggcggcgccttggatgtgcttggggttcgcttggacgccacccatgcagaacgtcaagtgcgggagatccgcaagcgcgtggggatggtgtttcagcagttcaaccttttccctcacctttccatcctcgacaacatcacccttgccccgatcaaggtgcaacagcgtgccaaggcggctgccgagcagcgggcaatggatctccttgaccagatgggcattcgcgagcaggcccacaagtacccggcgcagctcagcggtggtcagcagcagcgggtggcgatcgcccgggctctggccctggatcctgaggtgatgctcttcgatgagcccaccagtgccttggatccggagcgggtgaaggaggtgttggatgcgatgcgccagctggcgaaaggcggcatgacgatggtggtggtcacccacgaactgggctttgcccgtgaggtggcggatcgggtgatgttcatggatcggggccaggtggtggagacctccgatccagagaactttttcagcaatgccagggaggaacgcagccgcaggttcctcaatcagatgcagcactgaa

SEQ ID NO: 271055 - DNA, 736 bp, Unknown
  Bacterial polypeptide expressing nucleotide sequence isolated from the Sargasso Sea
tatgtcagaagcaataatcaaaataaaagatgtaaataaatggtttggtgattttcaagttttaaaaaatattaatttagaagtaatacaaaagcaaaaaatagttgtgtgtgggccatctggttcaggaaagtcaacattaataagatgtattaatagactcgaagaacatcaagaaggaaatattattgttgatggtaatgaacttactgaagatactaaagatattgagaaaataagagcagaagttggaatggtttttcaacaatttaatttatttccgcatttatcaattttagataattgtactttggcgccaatttgggtcaaaaaaatgccgaaaaaacaagccgaggaattagcgatgaatcaattgaaacaagtacagattcaagatcaagcaaacaaatttccaggtcaattatcaggaggccaacaacaaagatgcgcaatagctagagctctatgcatgcaaccaaaaataatgttgtttgatgagccaacttcagcattagatcctgaaatgataaaagaagttcttgatgcaatggttaatttagctaaacaaggaatgacaatgatagttgttactcatgaaatgggttttgcaaaagaagtagccgatgaagtaatatttatggacgaaggaatgattgtagaaaaggctaatactaaagagttttttgccaatccaaaaagtgacagaacaaaactatttttaagtcagattctttaa

SEQ ID NO: 271056 - DNA, 486 bp, Unknown
  Bacterial polypeptide expressing nucleotide sequence isolated from the Sargasso Sea
tatgtctgatccaattataaaaatagaaagcatgaataaatggtttggagattttcaagttttaaaagatataaatttatcagtagaaaaaaataaaaagattgttgtttgtggcccttcaggatccggtaaatctactcttataagatgtataaatagattggaagaacaccaagacggaaaaattacagtagatggaaatgaattatcagaaaatactaaaaatattgaagctatcagagcagatgtaggtatggtttttcaacaatttaatttatttcctcatttatctatactagacaattgtacgttagctcctatttgggttaaaaaaatgtcaaaaaaaaatgctgaggagttagctttgaaacaattagagcaagttcaaatttctgatcaatctcaaaaatttcctgggcaattatcaggtggtcaacaacaaagagctgcaatagcaagagcattatgtatggaaccaaaaataat

SEQ ID NO: 271057 - DNA, 775 bp, Unknown
  Bacterial polypeptide expressing nucleotide sequence isolated from the Sargasso Sea
agccggcttagaggagattaactcaggaacaatttcaatagatggacaagttgttaatgaacttccaccaaaagaaagaaatatagcaatggtctttcaatcatatgctttgtatcctcacatgacagtgtttgacaacatggcttttggtttaaaaattgaaaaaaaatctaaagatgaaattaccgagcgagttatggaggctgctaaaattcttcaaattgaggaatacttagagagaaaaccaaaacaattgtcaggaggacaaagacaaagagttgcaattggtagagcaataacaagaaaaccaaaagtatttttatttgatgaacctttgtctaatttagatgcagctttaagagttcagatgagagtagagcttgctaaattacatgatcaattaaatgcaacaatgatttatgttactcacgatcaaactgaagcaatgacacttgcagatgatatagttgtgttagatcaaggtattgtatctcaaaaaggatcaccattaaaactatataatgagccagaaaatttatttgttggtggatttattggttcaccaaagatgaactttattaatactaaagtaataagctcaaatagctccagcactgaagttgaaattttagggcaaggaaaaattattattccaaaaacctctaatagtgtatcggctggcgatagtgtaaaaattggtattagacctgaacatattttaattaatagtgaagaaaaatggtgggagagcaaagtattcgtaattgaaaattaa

SEQ ID NO: 271058 - DNA, 940 bp, Unknown
  Bacterial polypeptide expressing nucleotide sequence isolated from the Sargasso Sea
tgtaattagtaaatttaacctagaggttgaaaaaggaaaatttatagttttgttagggccatctgggtgcggaaaatctacattactaagaatgatagcgggattagaaaaaattgataatgggaaaattctattagaaaacaatcctcttaatgatttgttgccttccaaaagacaaatagcaatggtttttcaatcatacgcattgtatccccacatgaatgtttttcaaaatatctcttttggccttaaatctgaaaaaatttcaaaaaatgacattaaggataaagttattgaagctgcaaaaatcctgcaaattgaaaaacttttggataggagaccaaaggaactttcaggagggcaaagacaacgagttgctattggacgagcaataacaagaaatccaaaattatttttatttgatgaacctctttccaatttagatgcatctctccggtcagagatgagagttgaaatttcaaaattacataaaaaactaaaaagtaatattgtttacgtaacccatgatcaaattgaggctatgactttggctgacaaaatagtgattatgaataaaggaaaaattgaacaatttggtagccctagtgaaatttatgataatccaaataatatttttgtcgctgaatttattggaaaccctaaaataaatatttttaagataaaagctgaagatattttgaataaaaatacattcaaattattcaataaagaaattaaaattgaaaatttaaaatttgaaaatgagttttacgtaggtataagaccagaacatatatctttagaaaataaaagtgaatttgcaattaacataaatattgatttaattgaaaatttagggtcggaaaaaattatatattcaaatttagataatacagaaatcagaataagatgttctcaaaatataaaagataaaaatatt

SEQ ID NO: 271059 - DNA, 871 bp, Unknown
  Bacterial polypeptide expressing nucleotide sequence isolated from the Sargasso Sea
aaatactgttaataaatattttggagacgtccatgtaattaaggatatttctcttgatataaaaagtcaatcatttacggttctagttggtccaagtggttgtggtaaatcaactatgttaagaatgatagcaggactggaagacataaattcaggtacaatttcaattgatggtcaagtagtaaatgatttaccgccaaagcaaagaaatattgcaatggtgtttcaatcgtatgcattatatcctcacatgactgtatttgataatatggcttttggtttgaaattagaaaaaagatcaaaagatgaaattaatgagagagttaatgaggcggcaagaattcttcaaatagaagattatcttcaaagaaaaccaaaacaactttcaggtggtcaaagacagcgtgttgctattggaagagcaattactagaaagccaaaagttttcttatttgatgaaccgctttcaaaccttgatgctgcattaagggttcaaatgagagttgaattagcaaaactacataatgaactagaagcaacaatgatttacgttacacacgatcagactgaagctatgaccttagctgatgatattgttgtacttgatacaggtatcgtttcacaaaaaggatcaccactagaactttatgataaaccaaataatatgttcgtaggtggatttattggatcaccaaaaatgaacttcatttcaagtaagatattaagcaaaagttctgatgctacagaagttgatattatgggaatgtcaaaaatatcagtctcaaaaatgtcagcgtcatcctcagagggtgattcagtaactttaggtattagaccagagcacttagtagtaaatggtgatgcggatggg

SEQ ID NO: 271060 - DNA, 727 bp, Unknown
  Bacterial polypeptide expressing nucleotide sequence isolated from the Sargasso Sea
gctcttaagatggttcagttagaaggatatgaaaataggtactcaaatcaattatctggaggtcaaagacaaagaattgctctcgcaagggctttagttaaacaacctaaagtactacttcttgatgaacctcttggcgctcttgataaaaaattaagagaagaaatgcaaattgaattaagaaatttgcaaaagagtcttggtattacttttatttttgttactcatgatcaagaagaggcaatgacaatgtctgacagaattgctgtaatggatgaaggaaatattcttcaagtttcaccaccgagagaaatctatcacaaccctaaaaataaatttgtttctcaatttattggtaatattaatatattggatgctgaccttaaaagtttttcaaatgaaaatctgtcaattgaagtagattgttttggttcaatgcagttaaaaaattataaacaaataattgaaaatgataaaattaatatagcaattagacctgaggaaataacaatttccaaaataagtgactcaaactacgactataattttcaaggatatgttaagaatatatcattctatggagagagtacttattattacgtgctattaaacaactctgaaaaaattttaatggtatctaaaaatgaaactaaagagccctttagtgaaaatgataattgttttgtcaattttaattctaataatgttaaaattataaaggattaaa

SEQ ID NO: 271061 - DNA, 620 bp, Unknown
  Bacterial polypeptide expressing nucleotide sequence isolated from the Sargasso Sea
aatgtcagataaaataatacagattgctgaaatgaataaatggtttggtgatttccaagttttaaaaaatataaacctagaagtagaaaaaaataaaaaaattgtagtttgtggaccatctggttcaggaaaatcaacattaattagatgtataaatagattagaagagcatcaagagggatcaatcatagtagatggaaatgaattaacagcagatactaaagatatagagaaaattagagctgaagttggaatggtatttcaacaatttaatctcttccctcatctttctattttagataattgtactttggcaccaatttgggtaaaaaaaatgccaaaaaaagatgcagaagatttagctattcaacatttagaaaaagtacaaattgcagatcaagcaaataaatacccaggacaactttcaggtggccaacaacaaagatgtgcaattgctagagcattgtgcatggagccaaaaataatgctttttgacgaaccaacgtcagcattagatcctgagatgattaaagaagttttagatgctatggttagtctagcaaaagcaggaatgacaatgatagtagtaacacatgagatgggatttgctaaagaggttg

SEQ ID NO: 271062 - DNA, 706 bp, Unknown
  Bacterial polypeptide expressing nucleotide sequence isolated from the Sargasso Sea
tatgaataaatggttcggtgattttcaagttttaaaaaatataaatcttgaggttgaggcaaataaaaaaattgtagtatgtggaccatcaggatcgggtaaatcaacactaattagatgtattaatagattagaagagcaccaagagggagatataattgttgatggaaatgaactatcagaaaaaacaaaagatattgaaaaaattagagccgaagttggaatggtttttcaacaatttaatttatttccacacttatcaattttagataattgtactcttgcaccaatttgggtaaaaaaaatgccaaaaaaagaagctcaagaacttgcattagatcaacttaaaaaagtacaaatagatgatcaggccaataagttccctggacaactctctggaggtcaacaacagcgttgtgcgatagcaagagcattatgcatgcaaccaaaaattatgttatttgacgagccaacttcagccttagacccagaaatgataaaagaagtgttagatgcaatggtaagtcttgcaaaaggcggaatgacgatgattgttgtgacacatgagatgggatttgcaaaagaagttgctgatgaagtcatttttatggatgagggaatgataattgagaaggcagacactaaagaattctttgctaacccaaagagtgacagaactaagctttttttaagccaaattctttaa

SEQ ID NO: 271063 - DNA, 803 bp, Unknown
  Bacterial polypeptide expressing nucleotide sequence isolated from the Sargasso Sea
gctccgcgtcgccgccggacagacgtgcgcgctctgcgggccgtcgggctctggcaagtcgaccatcattcagctgctcgagcgcttctacgatccgcaaagcggcgtcgtgctgctcgacggcgtcgacatcaagacgctcaacgtgcgctggctgcgctcgcagctgggtctggtgggacaggagcccgtactgttccaaggcaccgtcgccgagaatatcgcctatggcacgccccgcgacatctcccaggcggagatcgaggaggcggcgcagatggccaacgcgcacgacttcatcaccaagagcctgagcgatggctattcgacgcaggtcggccagggcggcggcaagttgagcggcggccagaagcagcgcgtcgccatcgcgcgcgccattgccaagcagccggcggtgctgctgctcgacgaggcgacgtcggcgctcgacaccaagtcggagaaggtcgtgcaggcggcgctcgacgcgatcatggtgcggcagcggcgcacgacgctcgtgatcgcgcaccggctgtcgacgattcgcaccgccgagacgctggccgtgctcaccgacgggcgcgtggtcgaggagggcacgtacgagaagctgatggcgctggaggatggcgtcttccgcggtcttgccgagaagcaggagcgcctcctcgccgccgaccgccggcgcagcctcgcgagcggcggcggcgaggaggcggtggcggcggcggcggcggcgttggaggacgctgcggagggtggggaggccgtcgtggtggaggtggaggaggcggcggtgg

SEQ ID NO: 271064 - DNA, 705 bp, Unknown
  Bacterial polypeptide expressing nucleotide sequence isolated from the Sargasso Sea
catgtctaataataaagaatttgtaaaatttgataaagtagacaaaagttatgacggcaaagttttagtcgttaaagatttaaatttagacatagctgaaggtgaatttattactatgttaggtccttcaggttctggaaaaactacatgcttaatgatgctagccggatttgaaacaccaactaacggtgaaatttatttagattcaaatccaatttcaaatattccacctcataaaagaggaataggaatggtatttcaaaattatgctttatttcctcatatgacagtttatgaaaatcttgcgtttcctttaagagttagaaaaatatcaaaagaagatatagacaaaaaagtggataaagctttatcaatggtttcattgtcaggttttgaaaatagaatgcctggacagttatcaggaggacaacagcaaagagtggcagtagctcgagctttagtgttcgatcctaaagtagtgcttatggatgaacctttgggagcgttagataaaaatttaagagaaagtatgcaatatgaaataaaacatattcatgaaaatattggtgtaacagttgtatatgtcactcacgatcaaggtgaagctttaactatgtcaaatagaattgcggtatttaatgatggaaaggttcaacaattatctagtccagataaactgtatgaagagccagtaaattcatttgt

SEQ ID NO: 271065 - DNA, 898 bp, Unknown
  Bacterial polypeptide expressing nucleotide sequence isolated from the Sargasso Sea
gacagagaatttgtcgctctggttggcccatctggatgtgaaaaatccacattactgcgaatgatagccgggctcgaaaccactacttctggcgatattgcaatcggtgacaaagttgtaaatgatgtgatgccatccgatagaaaagtggcaatggttttccaatcgtatgcgctctatccacatatgactgtgaagcaaaatatgtcatttggtctggaggtaacagggcatccaaaacaagagattattagcaaggtagaaaaagctgcaaatattttgcaacttggtgatttacttgagagaaaacctaaacagttatcaggaggtcaacgtcaacgcgtggccatcggccgcgcaatcgtgagagatccagaagtttttttgtttgatgaaccactgtcaaacctagatgcggaactgcgtgtgcaaatgcgcgttgagcttgccctcctgcacaagcaattaaacgcaaccatgatttatgttacgcacgatcaagtcgaggctatgacactggcagataaaattgttgttttgagagatggcgttatagaacaaataggagcgccaatggaactttataacaaaccggcaaatgaatttgttgccggttttataggttccccaagaatgaatatggttccagtcaagacagctattgatgcgggctggaaaggttcgaaaatcgctggggccgtaaggattggagtaaggccagagcaccttgttaaaagcaaaacagggctcgagggaataatcttccatgtggaacacctgggaggtcagacgctcactcatattaaattgccagatgaaacagacctgacactagttgagcctggggagcacacttacaacaggggagacaaaattacagttcaacctgaagccaaaa

SEQ ID NO: 271066 - DNA, 742 bp, Unknown
  Bacterial polypeptide expressing nucleotide sequence isolated from the Sargasso Sea
gagtgaagaatctataatttcattaaaaaatgttaacaagtggtttggcgatttccatgttttgcaagatgtaaatcttgaagttaaaaagaaagaaagaattgtggtttgcggtccttctggctcaggaaagtctacaatgatcagatgtatcaataggttggaagaacatcaagaaggttcaattgttgttgatggaattgagttaacaggtaatttaaaaaacattgataatgttagaaaagaagttggaatggtatttcaacaatttaatttatttcctcatttgtctgtaaaagaaaatataactcttgctccaatttgggtaaaaaaaatgcctaaagctgaagcagaggaacttgctatgaggcagttggaaatagtaaaaattcctgaacaagctaataagtaccccggtcaattatctggcggtcaacaacaaagagtagcaattgctagatctcttgcaatgaatcctaacatcatgctttttgatgaaccaacttcagctctagatcctgaaatgattaaagaagtcttagatgttatggttgatttagcaaatggtggaatgacaatgattgttgttacacatgaaatgggttttgctaaaacagttgctgatagaatggtatttatggatgaaggaaagattgttgaggaggctagtccggataagtttttcaataatccagagagtgatcgtacgaagttatttttaagtcaaatccttcatcagtaa

SEQ ID NO: 271067 - DNA, 836 bp, Unknown
  Bacterial polypeptide expressing nucleotide sequence isolated from the Sargasso Sea
tgggtgtggtaaaaccactacaatgcgcatgattgcagggcttgaacaagaaactaccggcgaagtttatattaatgatattaaagtgaatgaaatggaaccgaaagacagagacgttgcgatggtctttcaatcttatggcttatatcccaatatgagtgtctttgaaaatataagatttcccctaaaaattagaaagatcgaccctaatacacactccaaacgtgtagaacgtgcagctgaaatggtggaattatccgagtatttacatcgtaaaccttcagaactttctggaggtcagagacaacgagttgctttagcgagggcaattgtcagagaaccaaatgtattcttaatggatgaacctctttcaaatctcgacgcaaaactcagggtatcaacaagagcacagattaaacaccttcatcatgagatgcaggtaaccacattatatgtaacacatgatcaaatagaggcgatgacattagcagaccgtgttgttgtcttaaataaaggcatcatccagcaaattggaactcctttcgaaatttacaataaaccccaaaatttatttgttgctggatttattggaaacccgggtatgaatttaatcccaggaaaaattaaaaataatacatttgaatcagggttaatacgtctggacggatttaagataggtgatggcgatattacagtgggatttagagcagaagatgctattattcagacaacgaaaacgaagcctaaaaatagcaatgaattctcttctgctatctattcaattgaattgctcggcgactctaccatgatatcatttcaaatatcgggcactttaa

SEQ ID NO: 271068 - DNA, 574 bp, Unknown
  Bacterial polypeptide expressing nucleotide sequence isolated from the Sargasso Sea
tatggtattcgataatttaattataagagcaaggtcactttcaaaatcttatggtagtgaagatgttttgacggacttcaatattgacatttggtacggttcaatatttggaattttaggtgtctctggttctggtaaaacaacagcattaaggcttttagctggttttgaaaacccagatcaaggaacaatcgaaatgcataacaaagtcatatttgatgagaaaacaaatgttccacctgaaaaaagaaaaattggtatggtatttcaagattatgcactattccctcatttaacagttgaaaaaaatattgcttttggtttaagtaaagaagaaattaaaaacggaagactcgatgaggtaataagtatgacaaacttaagttcgtacagaaaaaaatttccacaagatatttcaggaggtcaacaacaaagagtagcgcttgcaagagcattggctccaaagccagaagtggttttgctagacgaaccttttacaagtttagatgcacagatggcaagagacttaagagaagaagtagtttcattattacgagccacaaaaacaactgga

SEQ ID NO: 271069 - DNA, 587 bp, Unknown
  Bacterial polypeptide expressing nucleotide sequence isolated from the Sargasso Sea
agtttgtggtccatctggttcaggaaaatctacattaataagatgcattaatagacttgaggaacatcaaaaaggaaatattactgttgatggaatagaattatcagaagaaacaaaaaatatagaggcaataagagcagaagttggtatggttttccaacaatttaatttatttcctcatttatcaatattagataattgtactttagctccaatatgggttaaaaaaatgccaaaaaagcaagctgaagagttagctatgaaacaactagagcaagttcaaatttctgatcaagcaaataagtttccaggacaattatcaggtggtcaacaacaaagatgcgctatagcaagagctttatgcatggaaccaaaaattatgctttttgatgaacctacatcagcattagatcctgaaatgataaaagaggttcttgatgctatggttaatttagctaaagcgggaatgactatgatagtggtaactcatgaaatgggttttgctaaagaagtagcagatgaggtaatatttatggacgaaggaatgatcgtagaaaaagcagaaacaaaagagttttttgcaaacc

SEQ ID NO: 271070 - DNA, 700 bp, Unknown
  Bacterial polypeptide expressing nucleotide sequence isolated from the Sargasso Sea
tacctgagcatccgcggcctgcataaaagctacggcagcacccccatcttcagcgaaatcgattgtgaaatcggcaagggtgagttcatcaccctgctcggtccgtccggttgcggcaaatccactctgctgcgctgcatcgccggcctgaccggagtcaatggtggccagatcatcctcgacggccaggatctggtgccgctgacgccgcagaaacgcggcatcggcatggtgttccagagctatgcactgtttcccaacatgaacgtggcacagaacgtagccttcggcctgcgcatgcagaagatcaaaggcagtgaggccgaacagcgggtcaaacaggtgctggaactggtcgaactcaacgacttcgccgaacgctacccgcaccagctctccggcggccagtgccagcgcgtggccctggctcgttcgctggtcacccgcccacgcctgctgctgctcgatgagccgctgtcggcgctggatgcacggattcgcaaacacctgcgcgaacagatccgcagcatccagcaggagctgggcctgaccaccattttcgtcacccacgaccaggaagaagccctggtcatgagcgaccgcatcgtgctgatgaatgccggcaagatcgtccagagcggcgacgcggaaagtctctacagcgcgccagtggacgccttcgccgccgggtttatcggca

SEQ ID NO: 271071 - DNA, 736 bp, Unknown
  Bacterial polypeptide expressing nucleotide sequence isolated from the Sargasso Sea
aatgtcagataaaataatacagattactgaaatgaataaatggtttggtgattttcaagttttaaaaaatataaacctagaagtagaaaaaaataaaaaaattgttgtctgtggaccatctggttcaggaaaatcaacattaattagatgtataaatagattagaagagcatcaagagggctcaataattgtagatggaaatgaattaacagcagatactaaagatatagagaaaattagagctgaagttggaatggtatttcaacaatttaatctctttcctcatctttctattttagataattgcacactagcgccaatttgggtaaaaaaaatgccaaaaaaagatgcagaagatctagctatccaacatttagaaaaagtacaaatttcagatcaagcgaataaatatccaggtcaattatccggaggtcaacaacaaagatgtgcaattgcaagagcattatgcatggagccaaaaataatgctttttgatgaaccaacgtcagcattagatccagagatgattaaagaagttttggatgctatggttaatctagcaaaagcaggtatgacgatgattgtagtaactcatgagatgggatttgctaaagaggttgctgatgaagttatttttatggatgaaggaatgattgtagaaagagctgaaactaaagagttttttgctaaccctaagagtgatagaactaagctgtttttaagtcagatactataa

SEQ ID NO: 271072 - DNA, 634 bp, Unknown
  Bacterial polypeptide expressing nucleotide sequence isolated from the Sargasso Sea
atggcgcgcgaacgtaacgatcttgtacttgagcatgtatcgcaccgcttcgacacggcggtggcggtcgacgacgcgagcctgacggtcggcgcgagcgaggtcgtctgcttggtcggtccgtcgggatccggcaaaaccacgctgctccgcattgcggcgggcctcgaacccctgcagcagggccgggtcctaatcggtggcgaggtaatgggcgacgcgcgcatgtcggtgtcgcccgaggaccgaaatgtcggtctcgtgtttcaggactatgcgctgtttccgcacctgaccgtacgcggcaatattgccttcggccttaagcagctctcgaccgaccagcgtgatgagcaggtaagccaggcgctcgaacgcacgggcatgtccggctatgcgtcgagttacccgcatcagttgtccggaggacagcagcaacgggtggcgctggcgagggcgctcgcgccgcggcctcggatcgtcctgctcgatgaaccattctcgggcctggacgcatcgctgcgccaccgggtccgcgaccaggcggccgcgatcctgagggattcaggcattgccaccctgatggtgacccatgatccggaagaggcaatgtatctggccgatcggatcgccg

SEQ ID NO: 271073 - DNA, 760 bp, Unknown
  Bacterial polypeptide expressing nucleotide sequence isolated from the Sargasso Sea
gaaagtgaaaattatatgaacaacggtccggtcataaaaattaacaatctgaacaaatggtttgggtcattccaagtcctaaaaaatatagacctccaaataatgaaaggagaaaagattgtgatttgcggaccatctggcagcggaaaatcaactctcatccgatgcataaaccggcttgaagagcaccaggaaggtcaaatatttgttaacgggattgaattgaccaatgacttaaaaaatatcgaggatattcgaaaagaagtgggaatggttttccagtcatttaatctttttcctcaccttactgttcttgataattgtaccttggcgctgcaatgggtaaggaaaatgcctagagaggatgccgaacagtttgcgatggaatatttggagcgagttcaaatacctgaacaagcgatgaaattccccgggcaactttccggaggacaacagcaacgagtagccatcgcgagatctctttgtatgaaccctgaaataatgcttttcgacgaacccacttcggccctcgaccccgaaatgataaaggaagttctcgatgtcatggttgacctagcggaaactggcatgacgatgcttgtggtcactcacgagatgggatttgcgagcagagtcgcagatcgaataattttcatggatgaaggtgagataatcgaacaaaattcacctaaaacttttttcgaaaacccagaaaatgagagaacaaaactctttttaagccagattttagcccattaaa

SEQ ID NO: 271074 - DNA, 897 bp, Unknown
  Bacterial polypeptide expressing nucleotide sequence isolated from the Sargasso Sea
acagaatttgttaagttcgataaagttgacaaaagttacgatggtaaagtcttagtagtaaaagatttaaatcttaatatctccgagggcgagttcatcactatgcttggcccatctggttcaggaaaaacaacttgtttaatgatgttagccggatttgaaactccaactaatggagaaatttatttagactctaatcctatttcaaatattcctccacataaaagaggaattggaatggtttttcaaaattatgcattatttcctcatatgacagtttatgaaaatttagcatttcctttaagagttagaaaagttcaaaaagatgagattgataaaaaagtagataaagctttgtcgatggtttctctttcaggatttgaaagtaggatgcccgcacaattgtcagggggacaacaacaaagggtagctgttgcaagggctctcgtatttgatccagcagtagttttaatggatgagccccttggagctttagataaaaacttaagagaaagtatgcaatacgaaattaaacatatccatgaaaatattggtgtaactgtagtttatgttacacacgatcaaggagaagcattaacaatgtcaaataggattgcagtttttaatgatggtaaggttcaacaattatcaagtcctgataaattatatgaagagccagttaattcgtttgttgcagagtttataggtgaaaataatacatttggaggagaagtaactgacatttcaaaaaatgtttgtaaagttaaattacaaaatggtgaaattttagctaatccaatttcagttaattccaaaggtgacaaaacaacagtttcaataagaccagagagagcattaataaatccaaaagataaaatggataataatcaaactggg

SEQ ID NO: 271075 - DNA, 582 bp, Unknown
  Bacterial polypeptide expressing nucleotide sequence isolated from the Sargasso Sea
atagattagaagagcaccaagaaggagatataattgttgatggaaatgaattatctgaaaaaacaaaagatattgagaaaataagagctgaagttggaatggtttttcaacaattcaatttatttccacatctttcaatattagataattgtacgcttgcacctatttgggtgaaaaaaatgccaaaaaaagaagctcaagaacttgcattagaccaacttaaaaaagtacaaatagatgatcaggccaataagttccctggacaactctctggaggtcaacaacagcgatgtgcgatagcaagagcattgtgtatgcagccaaaaatcatgttatttgacgagcctacttcagccttagatccagaaatgattaaagaagtgctagatgcaatggttagtcttgcaaaaggtggaatgactatgatcgttgtgacacatgaaatgggatttgccaaagaagttgctgatgaagtcatttttatggatgaaggcatgataattgagaaggcagataccaaagaattctttgctaacccaaagagtgacagaactaagctttttttaagccaaattctttaaa

SEQ ID NO: 271076 - DNA, 934 bp, Unknown
  Bacterial polypeptide expressing nucleotide sequence isolated from the Sargasso Sea
catgaatgtaaaccatcaggttctggtagaatttgtagatgtacagaagacctatgatgggactgagttagttatcaaaaacctgaatttgaaaatccataaaggcgagtttttgactcttttgggcccctcagggtctggaaagacaacctgcctaatgatgttagcaggttttgagactccgacgcatggtgtggttatgttaggcgacatagaattgaataatgtgcctccccataaacgaggaattggaatggttttccagaactacgctttgtttccccacatgtcggtttatgagaatctcgcttttcctctggaggttagaaagttaaataaaggggatgtaaaagctagagttgaaaaagttttagaaatggtcgaacttgggcagtttggagcccgtcggccggcgcaactgtcaggcgggcagcagcaacgagtagctttggcaagggctctcgtttttgaacctgatttggtgctaatggatgaaccgctgggagccttggataaaaatttaagagagcaaatgcaatatgagataaagcatatacatgagaatttaggtatgacggttgtttacgtaacacatgatcagactgaagccctaacaatgtcagatcgtatagcggtatttaatgagggtgttatccagcaattagccccgccaaacgaactttacgaaaaacctgaaaatgctttcgttgcagactttataggtgagaataatcgtttaacgggaaccataaaagaaacaaacggttcggaatgcttagttgcagtagaggaagagattatcactgcgaccaatgttcatgaacaaccagaaggcagtagcgtaatattatctctacgcccggaacgagtagtgcttaaccctgaagttggagcgcttaaaaatatttttgaggcggaagttttggagttaata

SEQ ID NO: 271077 - DNA, 514 bp, Unknown
  Bacterial polypeptide expressing nucleotide sequence isolated from the Sargasso Sea
atgaaacaggaaaatgcattagaggctgttaacgtttcttgtatttttagaattaatcagggtttgctcaaaggttctaagcctttagttgcggttaacggcgtctcattacagatcccaaaaggtaaagtggtaggcttagttggtgagtcaggctgtggaaaatcgacccttgccaatattttgttaggcttgcaacgcccaacttctggcgacgtactgtattctggaaaaaccgctgctggattctcaaatcgacatatagctcggcgtatccaaccaatttttcaagatccatattcctccttgaacgttacgaaaacagtaaagtccattatatcgttgccgctgcgtattcataaaattgggaatcccgctagctgggattcaaaagtaaacgagatgctagatctggttgggttgccaaagcgcgttgctgagagttacccctctcaattatccggtggtcagcggcaacgagttgcaatagcacgagccctaattatgcgcacct

SEQ ID NO: 271078 - DNA, 576 bp, Unknown
  Bacterial polypeptide expressing nucleotide sequence isolated from the Sargasso Sea
tatgactgaaaaaattattcaaatggaaaatgtaaataagtggtttggtgattttcaggtattaaaagatattaacctgcaagtttctgaaaaacaaaaaattgtagtttgtggcccatcaggttcaggaaagtcaactttgataagatgtataaacaggcttgaagaacatcaaaaaggaaaaatagtcgttgacggttttgagttatcagaaaaaacaaaaaatattgaacaaattagagcagaagttggtatggtttttcaacaatttaatttatttccacatttatctattttagataattgcactcttgctccaatatgggtaaaaaaaacaccaaagaaaaaagctgaggaacttgcaatgaaacaactggagcaagttcaaatcgcagatcaagctgcaaaattcccagggcaattatcaggaggtcaacaacaaagagcagctcttgctagagctttatgcatggaaccaaaaatcatgttatttgatgaaccaacatctgcacttgatcctgagatgattaaagaggtactagatgctatggttaatttagcgaaacaaggtatgac

SEQ ID NO: 271079 - DNA, 640 bp, Unknown
  Bacterial polypeptide expressing nucleotide sequence isolated from the Sargasso Sea
aaaattgttgtctgcggtccttcgggctcaggtaaatccacattaattagatgtattaatagacttgaagaacaccaagaaggatcaattgttgttgacggaactgaattaactgaagaaacgaagaatatagaacaaataagagctgaggttggaatggtttttcaacagtttaatttatttcctcatttatcaatattggataattgtacattggcaccaatatgggtaaaaaaaatgccaaaaaaagatgcagaagcattagctttaaaacatttagaaaaagttcaaattgctgatcaagcatacaaatatcctggtcaattatctggtggtcaacaacaaagatgtgcaatagcaagagcattatgtatggagccaaaaataatgctttttgatgagccaacgtcagcattagatcctgaaatgattaaagaagttttagatgcaatggttaatttagctaaggctggtatgactatgattgttgtaacacatgagatggggtttgcaaaagaagttgcagatgaagttatttttatggatgaaggtatgatagtagaacaggcagaaacaaaagagttttttgctaatccaaaaagcgatagaacaaagctttttttgagccaaatattataaa

SEQ ID NO: 271080 - DNA, 667 bp, Unknown
  Bacterial polypeptide expressing nucleotide sequence isolated from the Sargasso Sea
aatgtctagttctataataaatatcgaaaatgtaaataaatggtttggtgatttccaagttttaaaagatattaacttagaagtgcaaccaaaacaaaagattgtagtctgcggcccatcaggctctggaaaatcaacgttaataagatgtattaatagattagaagagcaccaagaaggtaaaatcattgttgatggaacagaacttagtgaaaacacaaaaaatattgagcaaattagagctgaggttggtatggttttccaacaatttaatttatttccgcacttatctattttagataactgcactttagcccctatttgggtaaaaaagatgccaaaaaagcaagcagaggaacttgcaatgcaacaattagagcaagttcaaatagctgaccaagcatataagtttccaggtcaattatctggaggtcaacaacaaagatcagctatcgctagagctttatgcatgcagcctaagataatgttatttgatgaaccaacctcagcgcttgatcctgagatgattaaagaggttttagatgcaatggttaaccttgctaaaggtggtatgacgatgatcgttgtaactcatgaaatgggatttgcaaaagaagtagctgatgaggttatttttatggacgagggtatgatagttgaaaaaaaa

SEQ ID NO: 271081 - DNA, 832 bp, Unknown
  Bacterial polypeptide expressing nucleotide sequence isolated from the Sargasso Sea
atgaagacattaaaaattgaagatttatcaaaaaattttggaactacagaagtattaaaaaaaataaatttggatatagacgaaggtaattttctagtacttttgggtccttcaggatgtggaaaatctacattgttaaatataatagcaggattagagacgattaatgaaggaaatctatatatagacgattacaatgtaagcaaagttgaaccaaaagacagaaacattgcaatggttttccaatcttatgctctttatccatcaatgaacgtaaaagaaaatatgatttttggtcttaaacaagcaaaagcatcaaaagaaaaaattgaagaacaacttaaaaaagtttcatcttttttaaaagtagacgaattgttaaatagaaaaccttcccagttgtctggaggtcaaagacaacgagtagcgattggaagagctttagttagagagcctagaatatttttatttgatgaaccactatcaaatttagatgctaaattgagagtagaaatgagacgtgaaattaaaaaattacaccaaacattaaaaacgactgttgtttatgttacacatgaccaaacagaagctatgagtttggggacaaaaatagcaataatgaatcttggtgttattcaacaaaatgatacacctgaaaacatatataataaaccaagcaatacttttgtagccgattttattggctcgccttcaatgaacctgattaaaggtaatataataaaaaaatcagatcaattatcatttgtaggagaaggtgacaataatggtattcaaatccccattaataattacaattttaaagaaaaataga

SEQ ID NO: 271082 - DNA, 708 bp, Unknown
  Bacterial polypeptide expressing nucleotide sequence isolated from the Sargasso Sea
atatgaacaaatggtttggagacttccaagttttaaaagatattaatcttgatgttgaagcaaataaaaaaattgtagtttgtggtccttcagggtcaggcaaatctacattaattagatgcataaatagattggaagaacaccaaaaaggctcaataatagttgatggtacagaattatcagaacaaacaaaaaatattgaacagataagagctgaagttggaatggtatttcaacaatttaatttatttccacatttatcaatattagataattgtacacttgcacctatctgggtcaaaaaaatgccaaagaaagaagctgaagaattagcgcttaaacaattaaaacaagttcaaattgatgatcaagcatataaatatccaggacaactttctggaggacaacagcaaagatgtgccatagcaagagctttgtgtatggaaccaaaaattatgttatttgatgaacctacatcagctttagatccagaaatgattaaagaagtattagatgcaatggttaacctagctaaggcaggaatgaccatgatagttgtaacccatgaaatgggttttgccaaagaggtagctgatgaagttatttttatggatgagggcatgattgttgaaaaggcagaaaccaaagagttctttgccaatccaaagagcgatagaacaaagctttttttaagccaaattctataaa

SEQ ID NO: 271083 - DNA, 913 bp, Unknown
  Bacterial polypeptide expressing nucleotide sequence isolated from the Sargasso Sea
aaagaagacgaatttcttgttttagtaggaccatcaggatgtggaaaatcaacattattaagaatgattgctgggttagaaaaaattgatgaaggtgaaatatttattaatgatcaaaaaattaatgaacttcatccgtcaaagcgacaaactgcaatggtttttcaatcttatgcactttaccctcacatgaatgtttatgaaaatatgtcttttggtttgaaaatagaaaaaagaccaaaagaggaaatcaattcgaaagttatgcaagcggcaaaaattcttaaaattgaagaacttcttgagaggaaaccaaaacaattatcaggaggtcaaagacaaagggttgcaataggaagagctataacaagaaatccaaaaatattcttattcgatgaaccattatcaaatttggatgctgctttaagggccgaaatgagagtggaaatatcaaaattacacaatcaaataaaaaccaatatgatatatgttactcatgatcaggttgaagctatgactttagcagacagaatagttattttaaatcaaggtaacattgaacaggttggtactccagaggaaatttataatgaccctgcaaatatttttgtagctcaatttattggaacaccaaagatgaatatattagaagtaagtgaacaaaacatcatctctgaaaatacaattaagatattagagaacaatattcagtttgatcaattaaaattaaataaatcaaaacattttgtaggtatcagacctgagcacttaaaagcaaatcaagaaaatcagttcagttttaatcctgaaatagagttaatagaaaatttaggtaatgaaaaaattgcttatatgaaaaagaatgagcatcaattaagtgccaaagtcccaagtaatatagaaatggaaataa

SEQ ID NO: 271084 - DNA, 562 bp, Unknown
  Bacterial polypeptide expressing nucleotide sequence isolated from the Sargasso Sea
aatgagtaaaattattgaattaaaaaatgtaaataaatggtttgataaatttcaagctttaaaagatataaacttagaagttaatcaacaagaaaaaattgttatttgcggcccatccggatctggtaaatctactttaataagatgtataaatagacttgaagagcatcaagatggtcaaataattgttgatgggaaagaaatttcggaaaacacaaaggatcttgaaaaaatcagagctgaagttggaatggtatttcaacaatttaatttattcccacatttatcaattttagacaattgtactttagcaccgatatgggtaaaaaaaatgccaaaaaaggatgctgaagaattagcaatgaaaaatctagaacgagttcaaattgcagatcaagcaaaaaaatttccaggtcaactgtctggtggtcaacaacaaagatctgctttagctagagctttgtgtatggagccaaaaattatgctttttgatgaacctacttcagcattagaccctgaaatgattaaggaggttttagatgcaatgggtggatcttgctaa

SEQ ID NO: 271085 - DNA, 610 bp, Unknown
  Bacterial polypeptide expressing nucleotide sequence isolated from the Sargasso Sea
gatgaaaggcatgaatgtgaaccatcagattctggtagaatttgtagatgtacagaagacctatgacgggactgagttagttatcaaaaacctgaatttgaaaattcataaaggtgagtttctaacccttctgggcccctcagggtccggaaagacaacctgcctaatgatgttagcaggttttgagactccgacgcatggcgtggttatgttaggcgacatagaattgaataatgtacctccccataaacgcggaattggaatggtttttcaaaactacgctttatttccccatatgtcggtttatgagaatctcgcttttcctctggaggttagaaagttaaataaagtggatgtaaaagccagagttgaaaaagttttagaaatggtcgaacttgggcagtttggagcccgtcggccagcgcaactgtcaggcgggcagcaacaacgagtagctctagcaagagctctcgtttttgaacctgatttggtgctaatggatgaaccgttgggggccttggacaaaaatttaagagagcaaatgcaatatgagataaagcatatacatgagaatttaggtatgacggttgtttacgtaacgcatgatcag

SEQ ID NO: 271086 - DNA, 470 bp, Unknown
  Bacterial polypeptide expressing nucleotide sequence isolated from the Sargasso Sea
aatgactctaaaaaaagttaacgcaattgaagttaaaaatgtaactaaggtttatagaagttcgaatacagaaactagagctttaagaaatgctaacttaacgatttatgacaatgagttttttacattactcgggccatcaggttgtggaaaaacaaccctattaagattgattgcaggttttgaggatatcacagaaggatctataaatctttttgatcaagaaattgtaaacctacctccaaacaaaagacctgttaatacagtttttcaacaatattcattattccctcatttagatgtctatgaaaacgttgcttttggactgcgacgcctaaaaaaagatgaaagcttaactaaaaaaagaactatggaagtacttgagcttgtacaaatgaaagattatgcaacaagaaaacctaatcagttatcaggaggtcaacaacaaagagtagctttagcaagggctt

SEQ ID NO: 271087 - DNA, 512 bp, Unknown
  Bacterial polypeptide expressing nucleotide sequence isolated from the Sargasso Sea
tatggtattcgataatttaattataagagcaaggtcactttcaaaatcttatggtagtgaagatgttttgacggacttcaatattgacatttggtacggttcaatatttggaattttaggtgtctctggttctggtaaaacaacagcattaaggcttctagctggttttgaaaacccagatcaaggaacaatcgaaatgcataacaaagtcatatttgatgagaaaacaaatgtaccacctgaaaaaagaaaaattggtatggtatttcaagattatgcactattccctcatttaacagttgaaaaaaatattgcttttggtttaagtaaagaagaaattaaaaacggaagacttgatgaggtaataagtatgacaaacttaagttcgtacagaaaaaaatttccacaagatatttcaggaggtcaacaacaaagagtagcgcttgcaagagcattggctccaaagccagaagtggttttgttagacgaacctttcacaagtttagatgcac

SEQ ID NO: 271088 - DNA, 630 bp, Unknown
  Bacterial polypeptide expressing nucleotide sequence isolated from the Sargasso Sea
tatgggagcaattgatatcaaatctgccgggaaaatatacccaaatggtacaagagcactagaagatgtaaatataacaataaatgacggagagtttgtagtgctggtagggccatcaggctgtggtaaaactactctactaagaatggttgcaggccttgaagacattactgaaggtgaaatttcaattggtgataagactgtcaacgatgttgcaccaaaagatcgtgatatagccatggtttttcaaaattatgcgctgtatccacacatgtcagtttatgacaacatggctttttctctaaaactgagaaaattggcaaaagacgaaatagatcaaaaagttaaagacgcggctaagacacttgagataagtgagttattagacagaaaaccaaaagctttatcaggtggacaaagacaaagggtggcaatgggtagagctattgttagaaatcctcaagctttcctcatggatgaaccactttcaaatttagatgcaaaattgagagtacaaatgagggcagaattggggcaactacatacacaattacaaacaacaactttatacgttactcatgaccaggttgaagcaatgactatgggagacagagttgcagtcataagaaa

SEQ ID NO: 271089 - DNA, 716 bp, Unknown
  Bacterial polypeptide expressing nucleotide sequence isolated from the Sargasso Sea
tatgtcgacaattatacaaatgaaagaagtaaataaatggtttggagattttcaagttttaaaagatataaatcttgaagtttctgaaaaacaaaaaattgtggtatgtggtccatccggatcaggaaagtctacattaattcgttgcataaacagattagaagaacatcaaaaaggacaaataattgttgacggaaatgaactttcagaaaaaactaaagatattgaaaaaattagagccgaagttggcatggtttttcaacaatttaatctcttcccgcacttatcaattttagacaactgcactttagctcctatttgggttaaaaaaactccaaagaaaaaagctgaagaacttgcaatgaaacaattagaacaagttcaaattgctgatcaggccacaaaatttcctggacaattatctggtggacaacaacagagagctgcgcttgcaagagctctttgtatggaaccaaaaataatgctttttgatgaaccaacatccgctttagatccggaaatgattaaagaagttttagatgctatggtaaatttagcaaaaggtggaatgaccatgatagtagttacacacgagatgggttttgctaaagaagttgcagacgaagtagtttttatggatgaaggaatgattgttgaaagagcaaaaacaaaagatttttttgctaatccaaagaatgaaagaactaaactatttt

SEQ ID NO: 271090 - DNA, 505 bp, Unknown
  Bacterial polypeptide expressing nucleotide sequence isolated from the Sargasso Sea
gcgcatccgcaggcgagtggggatggttttcagcagttcaatttgtttccccacctctccattctcgagaacatcacgctcgcaccaatgcgtgttcagaagcagacaagggttcaggccgaagcaaaagcgcgcagccttctagagcagatgggcatctcagaacaggcagaaaaatatcctgcacaactcagcggaggacaacagcagagggtcgccattgccagggctttagcgctcaatcctgagatcatgttgtttgacgaaccgaccagcgcactcgatcccgaacgggtaaaagaagtattagatgcgatgcgaacgctcgcgaaccaagggatgacaatggttgtcgtcacccatgaactcggatttgccagggaggttgcagatcgggttctgtttatggatagtgggcgcgtgatcgaaagcgcagacgccaaaaccttttttaatcaggcacaacaagagcgcaccagaaaattcctcaaccagatcaactaat

SEQ ID NO: 271091 - DNA, 551 bp, Unknown
  Bacterial polypeptide expressing nucleotide sequence isolated from the Sargasso Sea
aattgtagatggaaatgagcttactgaagatacaaaaaatattgagaaaataagagctgatgttggaatggtttttcaacaatttaatttatttccacatttatctatattggataattgtactctagctccgatttgggttaaaaaaatgccaaaaagtgatgctgaagaattggcaatgaaacaattagaacaggttcaaattgttgaccaagcaaaaaaatttccaggacaattatctggaggacaacaacaaagatcagctattgcgcgagcattatgtatgcaaccaaaaattatgctttttgacgaacctacatcagctttagacccagaaatgattaaagaagttttggacgctatggttaacttagcaaaaggtggaatgactatgattgtagttacccatgaaatgggttttgcaaaagaagttgccgatgaagttattttcatggatgaaggaatgatagttgaaagagcacctaccaaagaattttttgcaaatcctaagagtgatagaactaaacttttcttaagtcaaattttgtaag

SEQ ID NO: 271092 - DNA, 655 bp, Unknown
  Bacterial polypeptide expressing nucleotide sequence isolated from the Sargasso Sea
atggcagaaaacaccgcaaagatccccggcgtcagcgatgaggtcgcgatctccatccgcaacatgaacaagtggtacggcgatttccacgttctgcgcgacatcgacctgacggtgcagcgcggcgaacggatcgtcatctgcggaccgtccggttcgggcaaatccacgctgatccgctgcatcaatgcgttggaggagcatcagaagggtgagatcgtggtggatggcactgtgctgtcctccgacctcaagaacattgacaagatccggtccgaggtcggcatgtgcttccagcacttcaaccttttcccgcatcttacgatccttgagaactgcaccctggccccgatctgggtgcgcaagatgcccaaggccgaggccgaggaaatcgcgatgcatttcctgaccaaggtgaagatccccgagcaggcggacaagtatcctggccagctgtcgggcggtcagcagcagcgtgtggcgatcgcgcgttcgctgtgcatgaaacctcggatcatgctgttcgatgagccgacttcggcgctcgaccccgagatgatcaaggaggtgctcgacaccatggtctccctcgcggaggaaggcatgacgatgctgtgcgtgacgcatgagatgggctttgcccgtcaggtcgcga

SEQ ID NO: 271093 - DNA, 574 bp, Unknown
  Bacterial polypeptide expressing nucleotide sequence isolated from the Sargasso Sea
tttggatataattgaaaatagcccaattttagaggtgcgtaacctcaagaaaaattatgacaaactttcagttttaaaagacataagtttttcagcatatgcagggtccgtaattagttttattggctcctctgggtctggaaaatcaacattattgcgatgctgtaatttgttagagattccacaggctggtgaaataattttcaagggagaggctgtatcttggactaataaaacagattctaggcagttatctgataaaaagcagattattaagtttagaaccaatttatcaatggttttccaatcatttaatttatggtctcatttgtcgattttggataatgtaattgaagcgccagttaccgttcttagaaaagataggcatattatgcgagatgtagcttattcccttctcgaaaaagttggtatcgcagataaagcagatgcttggccagctcaattatcaggtggtcaacaacaaagggcggctatcgcgagagcacttgcaatggaacccgatgctttattatttgacgagcctacttctgctcttgacccagagctgaacaag

SEQ ID NO: 271094 - DNA, 598 bp, Unknown
  Bacterial polypeptide expressing nucleotide sequence isolated from the Sargasso Sea
tttaataagatgtattaatagactagaggaacatcaaaaaggaagtattattgtagatggaacagaactaaatgaggatacaaaaaatatagaacaaattagagcagaggttggtatggtttttcaacagtttaatttatttccccatttgtccatccttgataactgcactttagctccaatttgggttaaaaaattaccaaaaaaacaggcgcaagaccttgcaatggaacaattagagaaagtacaaatcgcagatcaggcacaaaaatttcctggtcaattatctggtggacaacaacaaagatgtgcaattgcaagagctttatgcatggagccaaaaataatgttgttcgatgaaccaacatcagcacttgatccagaaatgattaaagaagttttggatgcaatggttaatttagctaaaggtggaatgacaatgattgttgtaactcatgaaatgggatttgcaaaagaagttgctgatgaagtaatatttatggacgagggcatgattgttgaaaaagcagatacaaaagagttttttgccaatccaaaaagtgacagaactaagctatttttaagccaaattctttag

SEQ ID NO: 271095 - DNA, 844 bp, Unknown
  Bacterial polypeptide expressing nucleotide sequence isolated from the Sargasso Sea
atgcaggataaaaataatgtggttgatctctcaaaggctttacccattaccattaggagccttacaaaaaaatacggttctctttacgcactagattctatagatttagatgtcagtagcggagagtttcttaccctccttggcccttcaggatctggtaaaactactctactgatggccattgcaggttttaaccgacctgattcaggaagtattcgttttggaaataccgaaatgattcttgccccacctcataaacgtgaagttggaatggtttttcagaactatgctctgtttccgcatatgacagttgcggggaatattggtttccctcttaagcttagaggtttcgcatcaactgaatgtcggcaacgcgttgatgaggccctgtcaaccgttcaactatcagatttaggagatcggagaattgatcagctctcgggcggacaaaaacagagagttgctcttgctagagctttcgtattcagtccaagaatactgcttatggatgaacccttatctgcactggataaaaaacttcgtgaacagatgcagattgaacttaagcaactgcatcggaaacttggtgttaccacagtatatgtgactcatgatcaacgggaagctttgactatgtcagaccgtattgctgtcattaatcatgggaaatttgaacagatagacacccctcaatccatatacaacaaacctgcaaacccctttgttgcagatttcatcggtgaatcagcaatgcttcccatgaaaaaaaattcatcaggagatcttttttatcaggaccttttaatttcatcaggctattcgaattcctctaacgaagaatggc

SEQ ID NO: 271096 - DNA, 550 bp, Unknown
  Bacterial polypeptide expressing nucleotide sequence isolated from the Sargasso Sea
tgttgtagatggcattgagctcactaacgatctccgtaatatcgaaaagatccgatccgaagttggaatggtgttccaacagttcaacctctttccccatctgactgtcttagacaacatcactcttgcaccgatatgggttcgtaagaaacctcgagctgaagctgagagtatggctcgggcgcttcttgaacgagtgggcatccctgaacaagcagagaagtttccagggcagctatcaggaggtcaacagcaacgtgtagcgatagcgcgatctctcgcaatggaacctcgagtgatgcttttcgatgaacctacttctgctctcgatcctgagatgatcaaagaagtgttggacgttatgaaggaactggcccggtccggaataacaatgatggttgttactcacgaaatgggctttgctcgtgaggtcgctgacaggatcatgttcatggagggtggcgaaatcgtagaggtcggaacccctgaacatttctttaccaatccgactgaagaccgaaccaagcttttcttgagccaaattctttaa

SEQ ID NO: 271097 - DNA, 325 bp, Unknown
  Bacterial polypeptide expressing nucleotide sequence isolated from the Sargasso Sea
tatgagttctagagatgtttctgtggaagtccaaggggtgtccaaaagttttggcagtgtgatcgcactaaattctgtttcgttagatatttttaaaggcgaattcttttccctacttggaccttcaggttgcggcaaaaccacacttcttaggatgattggtggctttgaggttccggatgatggctctattttgatagaaggctcggatactgacggtttaccgccttatgagcgaagtactaatatgatttttcagcatctagctctatttcctcacatgaatgtttgggataatgtagcctttggtttaaaaatgaaggga

SEQ ID NO: 271098 - DNA, 544 bp, Unknown
  Bacterial polypeptide expressing nucleotide sequence isolated from the Sargasso Sea
gatggaacagaacttacgtgaaaatacaaaaaatattgagcaaatcagagctgaagttggtatggtttttcagcaatttaatttgtttccgcacttatctattttagataactgcactttagcacctatttgggtaaaaaagatgccaaaaaaacaagcagaagaacttgcaatgcaacaattagaacaagttcaaatagctgaccaagcacataagtacccaggtcaattatctgggggtcaacaacaaagatcagcaattgctagagctttgtgcatgaagcctaagataatgttatttgatgaaccaacctctgcgcttgatcctgagatgattaaagaggttttagatgctatggttaaccttgcaaaaggtggtatgacgatgattgttgtaactcatgaaatgggatttgcaaaagaagtggcagatgaggttatttttatggacgaaggtatgatagttgaaaaaaatactacaaaagaattttttgcaaacccaaaaagtgacagaacgaaacttttcttaagtcaaatattataa

SEQ ID NO: 271099 - DNA, 813 bp, Unknown
  Bacterial polypeptide expressing nucleotide sequence isolated from the Sargasso Sea
gatttttggccttaaacaggccaaaacatcaaaggaaaaaatagaagagcagcttaaaaaagtttcttcatttttaaaagttgatgaattattacatcgaaaaccttcacagttatcaggagggcaaagacaacgtgtagctattggaagagctttggtcagagaaccaaggatatttttatttgacgaacctctatcaaacttagatgcaaaactaagagtagagatgagacgtgaaattaaaaaattacaccaaacattaaaaacaacagtagtctatgttacgcacgatcaaacggaagcaatgagtcttggaacaaaaatagcaatcatgaatcatggagtgatccaacaaaacgatactcctgaaaatatttacaataaaccaaataatacatttgtagcagattttataggatcaccatcaatgaatttaatagaaggtagattaatacaaaattcggataaaatatcatttattgctgacggttctgaagaatcaaaccaaattccaattgataattataattttaaaaaatcatcaggtttaaaagataaacaaatattttttggtatacgacctgaacatattcattttaaaaaattaaatgaaaatgattttgaagttaattttaaagccaatttaagcgaatatattggacacgaacaaattataacatataatttttctcaacaggagattttagcaaaatttccatcaacaattaatatagagttaaataaagaaatgaaattgtattttgacttaagtcaaatttcaatatttgacaaagattcaaaagaaagaatata

SEQ ID NO: 271100 - DNA, 715 bp, Unknown
  Bacterial polypeptide expressing nucleotide sequence isolated from the Sargasso Sea
atgaaaaaagcagaagtaaaatttcaaaatattactaaaaagtttaacgaaacaactgctgttgacaatgtcagttgtagttttgaggcaggaactttaacaactttactaggtccttctggttgtggaaaaactacttcattaagaattattgcaggtcttgaaagagcaacaagtggtaaaattttaattgatagggaagatgtcactttattgccagcaacagatagagatgtttcgatggttttccaatcttatgctttatttcctcacatgagtgtcattgaaaatgtttcatatggattaaaaatgataaaaattaacaaagatgagtatatacaaaaatctttggaaacacttaaattggtaaatttagaaggttatgaaaacagaatgccttccgaattatctggtggacagcagcaaagagttgcggttgcaagagctattgtattagaaccaaaagttttactatttgatgagcctctttcaaacttagatgctaaacttagaagacaagtaagagaggatattagagaaattcagcaaaaacttggggtgacaacaatttatgtaacacatgatcaagaagaggccttagcaatatctgataaagtaattgttatgaataatgcagttattgcacaagaaggtagtccaaaagatctttacaattttccaaaaaataagtttgttgctaactttattggtgatg

SEQ ID NO: 271101 - DNA, 601 bp, Unknown
  Bacterial polypeptide expressing nucleotide sequence isolated from the Sargasso Sea
tacattaataagatgtattaatagattagaagaacatcaaaaaggcacaataattgttgatggaacagagttatcagaaaatactaaaaatatagaacaggtaagagcagaggttggaatggtatttcagcaatttaatctttttccacatttatctattttagacaattgtactcttgcaccaatttgggttaaaaaaatgcccaaaaaagaggctgaagagcttgcaatgaaacaactaacccaagttcaaatctcagatcaggcaaacaagtttcctggacaactatcaggtggtcaacaacaaagatgtgcaattgctagagcattatgtatgcagccaaaaataatgttatttgatgaaccaacatcggcattggatcctgagatgataaaagaggtgttagatgctatggtaaatcttgcaaagggtggaatgacgatgattgtagtaacgcatgaaatgggttttgctaaagaggttgctgatgaagttatttttatggatgagggaatgataatagaaaaagctgaaaccaaagaattttttgctaatccaaaaagcgacagaaccaagctatttttaagtcaaattttataa

SEQ ID NO: 271102 - DNA, 854 bp, Unknown
  Bacterial polypeptide expressing nucleotide sequence isolated from the Sargasso Sea
acctccctatgaagagaattgggatggtttttcaaattatgcacttttccctcacatgactgttcaagaaaatttatctttccctcttgaggttagaaaattatctaaagctgatacaaaagaaaaagttcagaaagctcttgatatggttgagcttggagattttggcactcgttttccagctcagttgtcaggtggtcaacaacaaagggtagctcttgcaagagctttagtatttgagccaagacttgttttaatggatgagccccttggagctttagataaaaatttaagagaacaaatgcagtatgagataaaacacattcatgatcgaataggcataacagttgtttatgttacacatgaccaaagcgaggcattaactatgtcaaatagaatcgcagtttttaatgacggagtagttcaacaactatcaacacctgatattttgtatgaaaaaccagaaaattcttttgttgctcaatttattggagagaataacagaatgactggtacaattaaaagtatggaaaataattattgtttagttgatttagataataaagcaggtgtcgttaaagcgctaaaagtaaatgttggtaatgtaggtgaaaaaacacaactttctgtaagaccagagagagtttctttaggatcagatgacaatggagaaaacttgtttactggcaaagtagaagaacttatttatttaggtgatcacataagagtaagacttgatgtttgtggaaataatgaatttattgttaaagtaccaaatgaaggttcctttaattatagtgagggtgactctataaaacttaactggaatcctgatgatataagggctcttgatt

SEQ ID NO: 271103 - DNA, 622 bp, Unknown
  Bacterial polypeptide expressing nucleotide sequence isolated from the Sargasso Sea
tatgtcagaagattcaataatttcattacaaaatgtaaataagtggtttggagattttcatgtacttaaagatgtggatcttgaagtaaaaaagaaagaaagaattgttgtttgcggaccttcgggttcaggtaaatcaacgatgatacgatgtattaatagattagaagaacatcaagaaggcacaataatagttgatggtattgagcttacaggcaatttaaaaaatatagatagtgtaagaaaagaagttggaatggtttttcaacaatttaatcttttcccacatttgtctgttaaagaaaatattactcttgctccaatttgggtaaaaaaaatgcctaaagctgaagctgaagaattggcaatgcaacaacttgaaattgttaaaatacctgaacaagctgataaatatcctggtcaactatctggcggccaacaacaaagagttgccatagctagatctctagcaatgaaacctaacattatgctttttgatgaacctacatccgctcttgatcctgaaatgattaaagaagttttagatgttatgattgacttagctgaaggtggaatgactatgatagtcgtaactcatgaaatgggttttgctaagactgta

SEQ ID NO: 271104 - DNA, 676 bp, Unknown
  Bacterial polypeptide expressing nucleotide sequence isolated from the Sargasso Sea
aatggcaaatataaaatttactggtgtacataaatcatttggatcaaacaaaattattactgattttaatcttttaggaaaagaggatgagtttcttgttcttgttggaccatctggatgtggaaaatcaacattattaagaatgattgctggactagaaaaaattgatgaaggtgaaatttttattaacgaacaaaaaattaatgaacttcatccttcaaagcgtcaaactgcaatggtttttcaatcttacgctctttatcctcacatgaatgtttatgaaaacatgtctttcggtttaaaaattgaaaaaagaccaaaggaggaaatcaacacaaaagtgatgcaagctgcaaaaattctaaaaattgaagaacttcttgagaggaaaccaaaacaattgtctggaggtcaaagacaaagggttgcaataggaagagctattacaagaaatccaaagatatttttatttgatgaaccattatcaaatttggatgctgctttaagggctgaaatgagagtagaaatatcaaaattacataatcaaataaaaaccaacatgatatatgttactcatgatcaggttgaagctatgactttagcagatagaatagttattttaaaccaaggtaacatcgaacaggtcggtactcctgaagaaatttataacgaccca

SEQ ID NO: 271105 - DNA, 551 bp, Unknown
  Bacterial polypeptide expressing nucleotide sequence isolated from the Sargasso Sea
tatagtagatggaaatgaattaacagaggacacaaaagacatagaaaaaattagagctgaagttgggatggtgtttcaacaatttaatttatttcctcatctttctattttagataattgcacgcttgccccaatttgggtaaaaaaaatgccaaaaaaagaggcagaagatttagctcttcagcacttagaaaaagtacaaattgcagaccaagctaacaaatatccaggacaactttcaggcggtcaacaacaaagatgtgcaatagctagagcattatgtatggagccaaaaataatgttatttgatgaaccaacatcagctcttgacccagaaatgattaaagaagttttagatgcaatggttaatttagcaaaagcaggaatgacaatgattgtagtaacacatgagatgggatttgctaaagaagtagctgatgaggttatttttatggatgaaggaatgattgttgaaagagctgaaactaaagagttttttgctaaccctaaaagcgatagaacaaagctatttttaagtcaaatcttataaa

SEQ ID NO: 271106 - DNA, 601 bp, Unknown
  Bacterial polypeptide expressing nucleotide sequence isolated from the Sargasso Sea
cttatcaaaacggtgaacgggttggagccggtgcaacagggcgtcatcaccgttgatggtaccgtggtgaatgataaaaaaaccgatctggccaaactgcgctctcgtgttggtatggtgttccagcactttgaactgttcccgcatctgtcgatcattgagaaccttactttggcgcaggtaaaagtgcttaagcgcgataaaaagccggcccgcgacaaagcgcaaaagttactggaacgcgttggcctgtcggcacatgccgagaagttccccgcccagctatccgggggccagcaacagcgtgtcgccatcgcccgggcgctgtgtatggatcctatcgccatgctgtttgacgaaccgacatcggcgcttgatcctgaaatgatcaacgaagtactggacgttatggttgaactggccaatgaagggatgaccatgatggtggtgacccatgaaatgggctttgcgcgtaaagtggcgaaccgggtgatcttcatggatgaagggaaaattgttgaagactcaccgaaagaagagttcttcgctaatccgaaatcggaccgcgccaaagacttcctcgcgaaaatcctgcactaat

SEQ ID NO: 271107 - DNA, 781 bp, Unknown
  Bacterial polypeptide expressing nucleotide sequence isolated from the Sargasso Sea
aaaattagaaaaaagatctaaagacgaaattaatgaaagagttaatgaagctgcaagaattcttcaaatagaagattatcttcaaagaaaaccaaaacaactttcaggtggtcaaagacaacgtgttgcaattggaagagcaatcacaagaaagccaaaagttttcttgtttgatgaaccactttctaaccttgatgctgcattaagagttcaaatgagagttgaattagcaaaacttcataatgagctagaagcaacaatgatctacgttacacatgatcaaacagaagcaatgactctagcagatgatattgttgttcttgatacaggtatcgtttcacaaaaaggatcccctctagaactttatgataaaccaaataatatgtttgttggtggatttattggatcaccaaaaatgaactttatttcaagtaagatcttaagcaaaagttctgatgctacggaagttgatattatgggaatgtcaaaaatatcagttcctaaaatgtctgcatcatcatccgagggtgattctgtaagtttaggcattagacctgaacacttagtagtaaatggtgactcagatggttcgtgggagagtaaagtatttgttgtcgaaaaactcggtgacgttacttacctataccttgaaaaagatggagaacctctagttgctgaaactgaaggacattcagaaattaaagttggtgatactgtaaaagttggtttccctgctggaagatgccaattatttgatagttcaggacaagcatttaaataa

SEQ ID NO: 271108 - DNA, 565 bp, Unknown
  Bacterial polypeptide expressing nucleotide sequence isolated from the Sargasso Sea
tatggcatttgacaacctacttattagaacaaggtctgtatctaaatcttatgatgaagaacaggttctttctgacttcaatctagacgtttggaaaggttctattacaggaattctcggttcatcaggctcaggcaaaactactgctttaaggttaatagcaggtttcgatagacctgacgcaggcattatcgagatgaagaatgaagtaattgttagcgatgaagtttggctacctcctgaaaaaagaaatattggtatggtgtttcaagattatgcacttttccctcacttaacagtggaaaaaaatattgcctttggtctaggtaagaatgatttagaaaaaggaagacttaaagaagtcattgatatgtgtaatttgtctggtttaataaataaatttcctcaggaattgtctggaggacaacagcaaagagttgctttggctagagctctagcacctaatccagaagtagtattgttagatgaaccgtttactagtttagatgcacaaatggcgagagtattaagagatgaagttggtgaacttttaaaaaatactgaa

SEQ ID NO: 271109 - DNA, 812 bp, Unknown
  Bacterial polypeptide expressing nucleotide sequence isolated from the Sargasso Sea
aatgtctgttgcagacaatatagctttttcattggaagtaaaaggtatcagcaaaacaaaaagaagagatagagcagaagagttgttagaattaatagcattatcagggcaaggagataaaaaagttcatgaattatcaggaggtcaaagacaaagagttgctattgctagagctttagcaattgaaccagaagtattacttcttgatgaaccactttcagctttagatttaaagctaagacaaaagatgagaactgaactaagggcaattcaaaagagagttggcattacttttatttacattactcatgaccaaggtgaggcattaactatgtctgacagagtagcggttatgaatgaaggtgagttagaacaagtaggcttatgtgatgatgtgtatgattacccccatacaccttttgttgcaacatttgttggagaaaataatcctttttatggcaaggttaaatcggtagataatcataaggttacaattgaatcgcagggcaatacatttttagctaaagctggtaaaattgatgatcaaaataaacacaacttcaaaatcggagatgaagtgattatgtttataagaccagaatcaatttttataaataataacagtaataaattagataataattttgttgcaaaaattaatacaattgaatttgaaggaaatttaaaaaatatctatttaagtataaactctagtatgaatgttagatttagtgttcctaatgcagttgatacgacagacctttctacaaacaaagatgttcaattaacgttttcttctgaaaaagcagttg

SEQ ID NO: 271110 - DNA, 595 bp, Unknown
  Bacterial polypeptide expressing nucleotide sequence isolated from the Sargasso Sea
catagaagaggctgatggatctattgagttcgatggaatagatattaaaaagttagatttaaaaaacatgaggagctttaagaagcactttcaaattgtgtttcaagaccctttcggctcactatctcctagaatgactataggagaaataattggagaaggattaaaggttcatgaacctgggttatctcaggaagatagacttgcaaagataatcagttcgttaaaagatgtagaactggacgaagggtcttattccagattcccacatgagctctctggaggtcagagacagagggttgcaatagctagagcaataatcttaagacctaagcttattcttctagatgaacctacttctgctttagatgtatctatccagatgcagattttgtatttattaaaagatcttcaaagtagattagggctagcatacttgtgcattagtcatgatttaagagttattagatttctttctgatcaagtatacgttatgaaggatggaataattgttgaacatggctcttctgacgaggtttttgaggaaccaaaacataattatacaaaagagcttttagcggcctcaattgcataa

SEQ ID NO: 271111 - DNA, 706 bp, Unknown
  Bacterial polypeptide expressing nucleotide sequence isolated from the Sargasso Sea
ccatcacaattatcgggcggacagagacagcgtgttgcaataggaagagcgttagtgagagaaccaagaatatttttatttgatgaacctttatcaaatttagatgcaaagttaagagttgagatgagacgagaaattaaaaaacttcatcagcaacttaaaacaacagtagtttatgtaacgcatgatcaaacagaagctatgagcttaggtacaaatattgcaattatgaatcatggtgtaattcagcaaaatgatacacctgaaaatatttataataaacctagtaatacttttgtggcagacttcataggctctccatcaatgaatttaataaaaggtaatctaaaagagagttcaaataaagtttcatttattacccatggatcaaatatcgaaattccaataaatggatatgattttaaagaaaagtctaatttagataataaagaggttttttttggaataagaccagaacatatattttttaaaaaatctaatgaagaggattttgagattaatttaagagcagatttaagtgaatatattggacatgaacagataatgacttttaattttgaaaatcaagaggtgttagctaagtttccatcaacagtaaaaatagatctatcaaaaaatacaaaattattctttgatttaactcaaatttcattgtttgatgctaaaacagaggagagaatttaaa

SEQ ID NO: 271112 - DNA, 395 bp, Unknown
  Bacterial polypeptide expressing nucleotide sequence isolated from the Sargasso Sea
cgcagaggttctggcacgaaagtatctagagcgcgtgcacattcccgaacaggcggagaaatatccggcgcagctttctggcggccagcaacagcgtgtcgccattgctcgttcgctctgcatggagccccgcattatgctgttcgacgaacctacctctgccctagacccagaaatgatctccgaagttctggacgtcatggtcgaactggccgaagagggcatgaccatggtctgcgtcacccacgagatgagctttgcccgcaaggtggcggacacgatggttttcatggattccggtgagatcgtcgagatagcgccgccggatcagtttttctcggcgccagaaagcgagcggacccaaaaattcttgaaccaaattttacagtattgac

SEQ ID NO: 271113 - DNA, 892 bp, Unknown
  Bacterial polypeptide expressing nucleotide sequence isolated from the Sargasso Sea
aatgcaatttcaagcattcctcctcataaaagaggaattggaatggtatttcaaaactatgcattatttccacatatgacggtttatgaaaatttagcctttcctttaagagttagaaaaattccaaaagatgaggcagataaaaaaattgataaggcattgtctatggtatctttacaaggttttgctcaaagaatgccaggccagttatctggaggacaacaacaaagagttgcagtagctagatcattagtgtttgacccacaattagttttaatggatgaacctctgggtgccttagacaaaaatttaagagaaagtatgcagtatgagattaaacatatccatgaaaatatcggagtaacagtagtttatgttacccatgaccaaagtgaggctttaactatgtcaaatcgtattgctgtttttaatgatgggaaagttcaacaactatcaagtcctgatgaactgtatgagaaaccagtcaattcatttgttgcagaatttattggagagaataatacttttggtggtgaagtatctgatatttcaggaggaaaatgtaaagtaaaattagctaatgcagaaatattagcaaatccaatttctgttagaggcaaaggtgaaaaaacaactgtttctttaagaccagagagggctttaattaatcctaatgacaaaatggacaacatccataaaggaaaaattgaggaggttatttatcacggtgatcatacaagagttagaattaatcttttaggaaattctgaatttattcttaaagttccaaatagctcatctaatcttgatattaagttaggaaatgagatcaagattggttggaacagtgaagatgctagagctttagacccaaaaataaacaccaattaaa

SEQ ID NO: 271114 - DNA, 760 bp, Unknown
  Bacterial polypeptide expressing nucleotide sequence isolated from the Sargasso Sea
tggtgatgagatagagaagcgagttaaagatgtcctttcattagttaaattagaagggtacgaggaaagatttagtaaccaattatctggaggtcaaagacagcgtgttgcacttgcaagagctctagttagacagccaaaagtgctattattagatgaaccccttggcgctttagataaaaagttaagagatgaaatgcagttagaattaagaactcttcaaaaaaatattggaattacttttgtctttgttactcatgatcaacaagaagctataagtatgtcagacagggttgctgttatgaataatggaaaaatccaacagctgtcagcacctaatgaactttataaaaaccctgaaaatatttttgtcagtgattttattggtgaaacaaattttctaaaagctgaaacaaaatcaaatgatggagaatttataaatgtttcaatagaagaattaggtgaatttaaaattaagaacaatttaaatataacatcaaactcatcaaatgtagtttgtagtattcgtccagaatcaatgatgatttctagggaaaaatcagattgggatgtttgtcttgatgctgagattcgtcaaacttcttatttaggagaaatgactaggttttatgtcgaggctaaaggaatagaaaagctaattactgtttcttctcaacattttgataatcaatcatttgaagataataaatgcttcgttagcattagtttagaagatatttctttattgaataaaaaatag

SEQ ID NO: 271115 - DNA, 785 bp, Unknown
  Bacterial polypeptide expressing nucleotide sequence isolated from the Sargasso Sea
ttcaatatacctccacacaaaaggggtataggaatggtttttcaaaactacgctttattccctcacatgactgtttatgaaaatttatcttttcctttgaaagtacgtaaattatcaaaggaagatattgataaaaaagtagacaaagctctatcaatggtttcactttcaggttttgaaaaaagaatgccgggtcaattatctggaggacaacaacaaagagttgcggttgcaagatcattagtttttgatcctcagttagtattaatggatgaaccattaggagctctggataaaaatttaagggagagtatgcaatacgaaataaaacatattcacgaaagtattggagttacagttgtatatgtaacacatgatcaaggtgaagcacttacaatgtcaaataggatagctgtgttcaatgatggaaaagttcaacaattatcttcacccgataaattgtatgaacaaccagtaaattcttttgtcgcagaatttattggcgaaaataataccttcactggtgaagtaactgatatttcaaaagataaatgtaaaattaaattgaatacaggcaacgaaatttttgctaatccgataagagtaaaatcaaaaggagaaaaaactatagtatctttaaggcctgaaagagctattatcgatcctgaaaataaaattgaaaacaaatttaaaggtaaaatagaagaagtaatttatcatggtgaccacactcgagttagattagatatactaggaaataaagaatttatacttaaagtgcccaa

SEQ ID NO: 271116 - DNA, 794 bp, Unknown
  Bacterial polypeptide expressing nucleotide sequence isolated from the Sargasso Sea
tttgcgtaaagtttttggacaaaatattgaagcagttaaaaacttagatttagttattcaagaaggagagtttatagttttggttggaccttctggatgtggaaaaactacaacattaagaatgattgcaggttttgaagagcctactgcgggagaggttattattgatgatgtaatagttaatgatctagaccctaaggatagaaatttaggtatggttttccaaagccatgcattatttccacataagacggtttttgaaaatatagaatttggtcctcgtatgaaaaaaatgccattagacaaaagaaaaaaaagggtagaggaagtcgccgaaatggttcatataacaccgttacttaataaattgccatctcaatgttctggtggtgaggcacaaagagttgcgttagctagaacattaattactgagccaggatcatttcttttggatgaaccactttctagtttagatgcaaaacttcggagagaaatgagagcggaaattgatcgattacatcaggaacttaagaaaacatttgtttatgttactcatgatcaagaagaggcgatgactcttgctgatagaattgtggttatgcgtgcgggtgaaattgaacaacaaggtacacctatggaaatttatggtgatccaagttcttatttcgtagctgatttttttggcagtccatctatgaacttgatagatggacagattagtagaaattcctctcaagagtcttttgtttttgaaggatgtggtctatctctagatttgccgcaattagaaggtc

SEQ ID NO: 271117 - DNA, 829 bp, Unknown
  Bacterial polypeptide expressing nucleotide sequence isolated from the Sargasso Sea
atggctaaagttgaattaaaaaacctaacaaaaaaatatggtgaagttatagcggttcaaaatatgaatctcacgatcccacataatgagttcttggttttagttggcccatctggttgtggtaaatctactaccttaagaatgattgcgggattagaagaaattactggaggtgacatatatataggagatcaattagttacggaaaaagatcctaaagacagaaatgtttcaatggtattccaaaattatgcattataccctcatatgactgttgaagaaaatttaggtttcagtttaaaaattgctaaagtggaaaagaaagaaattgaagagcgagtcaaaaatgcagtgcaaatacttggattgcaagaacttcaaaaaagaaaaccttcacagttatcaggcggtcaaagacaaagagtggcaatgggtagagcgattgtgagaagacctgatgcatttttatttgatgaacctctttcaaatttagatgcaaaacttagaacgcaaatgagaacagaaataaaaaaactacatcaacaattaaaaacaacagtcatctatgtaactcatgatcaggtagaggctatgacattggctgatcgaatcattattatgaaagatggttttattgaacaaataggatctcctgtagaagtatttaataatcctgtaaatgtttttgttgccacatttattggcagtccaccaatgaatattattgaatgttcagttttagaaagaaataatgaattaatgattgaaatagatgataatataattcttaaatgtccaaaaagtataatgagtaaaattaagaattcaa

SEQ ID NO: 271118 - DNA, 447 bp, Unknown
  Bacterial polypeptide expressing nucleotide sequence isolated from the Sargasso Sea
gggcgcatgacttcatcaccgcgctaccggacggctatgaaacggttgtcggtgaccggggctccagcctttcgggcggagaacgccagcgcgtggcgatcgcccgcgcaatgctcaaggatgcgcccatcctgcttctcgacgaagcgacgagcgcgctggatgcagaatcagagcaacaggtgcaggccgccctcgatcggctcacggccaatcgcaccacactcgtgatcgcccatcgcctcgccaccgtcatgaacgccgacaatattctggtgatggacgatggcacggtggtcgaaaccggcacgcacgaggaactacagcgccaagacggcctgtacgcgcgcctcagccgtctgcagttccgcgacaccgggtcgatcgatgacggcaagagcgaacaggtcgacggcgccgtgaatccggaacgcgccagcgcatgac

SEQ ID NO: 271119 - DNA, 515 bp, Unknown
  Bacterial polypeptide expressing nucleotide sequence isolated from the Sargasso Sea
attgggaaccatatcacttagaaatatttcaaaatcattcgggtcgacccaagtgttaaaagatcttaatgtagacataaaagatggagaattcttaactttagttggtccatctggttgcggcaaatcaactttacttcgaataatagctgggctagagcaacaaacttctggtgatgtcctaattgatgataaaaatgttaataaaattagagccagtgagagagatctagctatggtattccaatcttatgcactctatccccatttaacagtgaggagaaatctggaaactccattaagacttcgagattataattcatttgaaagactaccgttgattggaaacttttcaccaaataaaaaaaataaaactgagtctataaaccaattagtaaacaaaacttctgaaacattaaaaatctctgaactacttgatagaaaaccaggccaactatctggagggcaaaggcaaagagtagctcttggtcgagcgatggtacgagagcctgttg

SEQ ID NO: 271120 - DNA, 754 bp, Unknown
  Bacterial polypeptide expressing nucleotide sequence isolated from the Sargasso Sea
acattattaccagcaactgatagagatgtatctatggtatttcaatcttatgctttgttcccacatatgagtgtgcttgaaaatgtatcgtatggtttaaaaatgataaatgttccaaaagaagaatttatagaaaagtcattagaaactcttaagttagttaatttagaaggttatgaaaataggatgccctcagagctatctggaggtcagcaacaaagggtagctgttgcaagagcaattgtgctgaaaccaaaggttctactttttgatgagcctttatctaatttagatgcaaaattaagaagacaagtaagagaggatattagagaaattcaacagaaacttggagttaccacaatttatgtaactcatgatcaagaggaagcattagcaatttctgacaaagtaattgtaatgaacaatgctattattgctcaacaaggtagtccaaaagaattgtataactttcctaaaactaaatttgtagctaactttataggagacgcaaatgttgttaaagctgaaatcattaatcaaaataataatatttacgaggttcaattagcagaaatgaaaattaatatagaaagtgatcaaaaattagaaagttcagtttccgtttctttaagaccagaaaaaataactatttcaaaaagtcctgaagaaaactcaatacatgcatctgttaataatgcgtcattcgttggaaatagttatcagtatatagttaattcaaaagtcggtaagattt

SEQ ID NO: 271121 - DNA, 592 bp, Unknown
  Bacterial polypeptide expressing nucleotide sequence isolated from the Sargasso Sea
atgggagcaattgatatcaaatctgccgggaaaatttacccaaatggcacaagagcactggaagatgtaaatataactataaatgacggagagtttgttgttcttgttgggccttctggttgtggtaaaactactttacttagaatggttgcaggtcttgaagatataactgaaggtgaaatttcgataggcgacaagactgttaatgatgtagctccaaaagatcgtgatatagccatggtttttcaaaattacgcactctatccacacatgtcagtttttgacaatatggctttttctctaaaactgagaaaattaccaaaagacgaaatagatcaaaaagttaaagatgctgctaagacacttgaaataagtgagttactagatagaaaaccaaaagctttatcaggaggacaaagacaaagggtggcaatgggtagagctattgtaagaaatcctcaagcgttcctcatggatgaaccactttcaaacttagatgcaaaattgagagttcaaatgagagcagaattgggacagcttcacacacaattacaaacaacaactttatatgttactcatgaccaagtgaagc

SEQ ID NO: 271122 - DNA, 712 bp, Unknown
  Bacterial polypeptide expressing nucleotide sequence isolated from the Sargasso Sea
atggcttctgtttcacttaaaaatttaaataaatattttggtaatatacttgttgttaataatgtaagcgtggatattgctgatggagaattcctggtgtttgttgggccttctggttgtggaaaaacaactactctcaggatgcttgcagggttggaatcaataagcgatggggaaattcaaatcggagatcataccgtgaatcaccttccacctggagcgcgagacgttgcgatggttttccagaattacgctttgtattcgcacatgacagttgggaaaaaccttggatttgctcttaaagcacgaagatttgacgatgatgatataaaaaaacgtgtgcttcgtgttgcaaaaatgctcgatctggaagagatgctcgatcggaaaccacgtcagctttccggtggacaaagacaaagggttgcgttaggaagagccattgtcaggaaccctcaagtttttctcatggatgagccgctctcaaatcttgatgctttacttaggcttcaaacccgtaaggaactaatcgaattaacaggagaacttaaaagcacggttatctatgtcactcatgatcaggtcgaagcaatgactatgggccatagattagcagttatgaatgaaggtgaagttgttcaattggatactcctgagaatatttacaaatacccatcaagtcgatttgtcgcagaattcattggaagccctc

SEQ ID NO: 271123 - DNA, 844 bp, Unknown
  Bacterial polypeptide expressing nucleotide sequence isolated from the Sargasso Sea
cagaccgttcaaggtctccagatttctgttgaacgtttggctgatgttgtagatgctgaacctgagcaaccgcttgattcgcgtcccattgcacttccacttattaacggaaagatcgaatttgaccaagttgatttccgttttaatgagcatgctcctcttgtagtaaaacaagtctcttttacaattgagcccggacagtttattgggattgttggtcagagtggtagtggtaaaagtacaatcatgaagttattgccaagaatgtataaagctgcctctggttcaattcgcattgatgattatgatatttcaaaagttgatattgattctttgcgtcagcagattggaattgtccctcaggactcaatgttgtttgatggatcaattcgcgataacatagctttaaattccccggattcaacagacgaagacatcatctatgcagccaaggttgcttgtgctcatgcctttatcatggatcttccgaatggttatgactctcgtgttggtgagcgtggttccgctctttcgggtgggcaacggcaaagggtggcgatcgctcgtgcgattttagctcgtccacgtttgttgatccttgacgaagccacgagtgctttggactatctaacggaacgaactgtctgtgaaaatctgcgtcgtgaattgaaaggtgatacagttttcttcattacacatcgtcttggtacaattcgtaatgctgacaatattcttttaatggatagcggccttcttcaagaaactggctctcatgcggagcttctaaagaagcgtggtttgtattatgccctctatcgccagcaagatgcctccgtcaactgat

SEQ ID NO: 271124 - DNA, 568 bp, Unknown
  Bacterial polypeptide expressing nucleotide sequence isolated from the Sargasso Sea
aatgattgatgccaaaaacgtgacccgtaacttttccatctcacgtggaatgtttcgtggcaaacaaattttgcgggcggtgagtggtgttgacctgacggtcaagaaaggggaggtgctggcactggtcggtgagtccggatgcggtaaaactacattggcaaaaattttacttggacttttaccacaaaccacaggctctgttgatttgtgcggacaaccaatcatagacgtgccgcgccttgagcttgcgcgcacgatacagcctattttccaagacccatattcctctttgaacccgcgaaagacgattgggtcaataatcgggttgccgatgcgtgtccaaggtctcgaggatagtgccacaattcggcgccaggtcgaaaaaaccatggatcttgtcggactggcggcacgtcactataacgcctatccaaaccagctctcaggcggacagcgtcagcgtgtagcgattgcgagggctttggtgaaccggcctcaagtagtcgtatgtgatgagccaacatcggcgcttgatgtatcagttcagtcgcagatattgatttgt

SEQ ID NO: 271125 - DNA, 592 bp, Unknown
  Bacterial polypeptide expressing nucleotide sequence isolated from the Sargasso Sea
gatgaagctgttgccgaggctttacgagcccggtgagggacggatcctgatcgacggctacgacatcgccaaggtggagctgtactcacttcgccgtcagatcggcatcgtcccccaggatcctctgctgttcagcggcaccgtcagcgagaacatcgcgctgacgaaccccgaagcacccagcgaggatattgtgcgggcggcccggctggccaatgcccatgatttcatcatggaactgcccagtggctacagcacaccggtgggtgaacggggggctgccctcagtggcggtcagcgccaacgggtggcgattgcgcgcaccttgctgagcaaccccaagttactggtgatggacgaagccaccagcgcccttgactacgaaactgaacgcaaggtctgcgacaacctgcttgagaatcttgacgatcagacggtgtttttcatcacccaccgcctgtccacgatccgccaggccgatgtgatcgtgatgctgcaccagggggcggtggttgaggttggcacccatgaggagctgatgaaccatcgaggccgttactacgccctttaccgccagcaggagagcacctga

SEQ ID NO: 271126 - DNA, 988 bp, Unknown
  Bacterial polypeptide expressing nucleotide sequence isolated from the Sargasso Sea
atgtctgtaaataaagaattcgtaaaatttgacaaagtgacaaaaagctatgacggaaaagttttagttgtcaaagatcttcaattagatattgcagagggtgaatttataacaatgttaggaccatctggttctggtaaaacaacttgtttaatgatgttggcgggttttgaaaccccaactaatggtgaaatatatttagatggaaatgccatctctagtattcctccacacaagagaggaattggaatggtgttccaaaattatgctttgtttccacacatgactgtttacgaaaatttagcatttccactgagagtcagaaaaattccaaaagatgaagcagataaaaaaattgataaagcattatcaatggtatcccttcaagggtttgcatcaaggatgccaggtcaattgtcaggtggacaacaacaaagggttgctgttgcaagatcattagtatttgatccacaattagttttaatggatgagccgttgggagctttagacaaaaatttaagagaaagcatgcaatatgaaattaaacatattcatgaaagtattggagtaactgttgtttatgtaactcatgaccaaagtgaagccttaacaatgtcgaatcgtattgcagtatttaatgatgggaaagttcaacaactctcaagtccagatgaattatatgaaaagccagtaaattcttttgttgcagagtttattggtgaaaacaatacatttaatggtgaggtttcagatatatctggtggaaaatgcaaagttaaattacctgacgctgaaataatggcaaaccctatatcagtcaagtcaaaaggggagagaactaaagtatcattgaggcctgaaagagctttgattaatccaaaagataaaatggataatattcacaatggtaaaattgaagaagtaatttaccatggcgaccacactagagttcgaataaatctattaggtaattcagaaatttatataa

SEQ ID NO: 271127 - DNA, 815 bp, Unknown
  Bacterial polypeptide expressing nucleotide sequence isolated from the Sargasso Sea
gttgaacacccaacaaagtgactttgtagtatttgagaagatagataaaagttatgatggtgaagttctagtagttaaaaatcttaacctaaatatttcaaaaggtgaatttgttacaatgttaggaccttcgggctcaggtaaaactactacattgatgatgttggctggatttgaaacaccaaccaatggggaaatttttttagactcattacctattagtaaaatacctccttatgaaagacaaattgggatggtttttcaaaattacgctttatttcctcatatgactgtacaagaaaatttagcttttccattagaggttagaaaaatttcaaagtcggaaactaaagacaaagttcaaaaagcacttgatatggttgagttaggtaattttggaacaaggtttcccgctcaactttctggaggacaacaacaaagagtagctttagctagagcgcttgtttttgaacctaggcttgttttgatggatgagcctctgggagctctagataaaaacttaagagagcaaatgcaatatgaaataaagcatattcatgatagaattggaataacagttgtatatgttactcacgatcaaagtgaggcactaacaatgtctaatagaattgcagtttttaatgatggcgttgttcaacaattatcaacaccagatgttttatatgagaaaccagaaaattcttttgttgcgaaatttattggtgagaataatactctcaatggaactgtaaaagatattaatggaactatgtgtactgtagaacttgatgataatcatggtacagtaagagcat

SEQ ID NO: 271128 - DNA, 678 bp, Unknown
  Bacterial polypeptide expressing nucleotide sequence isolated from the Sargasso Sea
gaaattacccaatatggaaaatagaatgccaaaggaatttgtctggaggccaacaacaaagagtggcattagcaagagccctcatagttcaaccaagagttttgttattagatgagccactctcaaatcttgatgcgcatttaagatttgaaatgcgagatcttattagaaatttacaacaaagcatgggtataacaactatttttgtaactcatgatcaagaagaggctgttgtgctagctgatcaagttgcacttattttagatggaaaactaaagcaatatgctcaaccagatgttttctacaaaaaaccaatagatgttgtaacagctaaattttttggaggtcaaaattttataaaaggaacatcaaaaaataatagtttttcatcaaatattggaaaattatctcttccaaaagattgtcttcagggaaatggaatactaacctttaggcctgagaatgttcaaattggaaagggacctaagagcgttaatactatcaaagctaagattattgaaaaaatatttttaggaacgcaaaccagattaaaattatctattaaagatgaagtaattcaagcaattgcaaatcctaatgaagttgatgaaaaagagacaggtattgaaatcgatatcaatataccaccctcaagtctttgggtgattaataattaat

SEQ ID NO: 271129 - DNA, 754 bp, Unknown
  Bacterial polypeptide expressing nucleotide sequence isolated from the Sargasso Sea
atgagtgaaaataatggttttgttgtatttgataaaattgataaaagttatgatggggaagtattagtagtaaaaaatcttaatttaaatatttctaaaggcgaatttgtaacaatgctaggaccatcaggttctggtaaaactaccactttaatgatgttagctggttttgaaactccaactaatggtgaaatatatttgcaaggaaaggcaataagtaaaatcccaccatatgataggcaaatagggatggtttttcaaaattatgctttatttcctcacatgacagtgcaagaaaatttatccttccctttagaggttagaaaattaccaaagtctgatattaaagaaaaagtatcaaaagctttagatatggtagagctaggtgattttggtagtcgttttcctgctcaattgtctggaggtcagcagcaacgagtagcacttgccagagcattagtttttgaacctcaattagttttaatggatgagccgcttggagcattggataaaaatctccgcgaacaaatgcaatatgaaattaagcatatccatgaaagaattggcattacagttgtgtatgttactcatgatcaaagcgaagcattaacaatgtcaaataggattgctgtttttaatgacggtgtagttcagcaactttcaaccccagatgttttatatgagaaaccagaaaattcttttgttgcaaaatttattggcgaaaataatacacttaatggaactgtaaaagaaa

SEQ ID NO: 271130 - DNA, 515 bp, Unknown
  Bacterial polypeptide expressing nucleotide sequence isolated from the Sargasso Sea
aatgagcacagatcaggtaatacatttagaaaaagtaaacaaatggtatgatgattttcatgttttaaaagatattgatttaattgttaataaaggacaaaaaattgttatctgtggtcctagcggctctggtaagtcaacaatgattagatgtataaatcgtctggaggctcatcaaaaagggacaattgttgttcacggaacagagcttacaaatgatcttaaaaacattgatttaattaggaaaaatgtcggtatggttttccagcaattcaatctttttccacacctctctgtattagacaatatttccctagcgccaatttgggtgaaaaaaatgccaaaaaatgaagccgaagatattgcaatgtcttatttagaaaaagttaaaattcctgagcaggctaaaaaatttcctggtcagctctctggaggtcaacagcaacgtgttgctatagctagatcattagctatgaaccctgacattatgttgtttgatgaaccaacatcagctt

SEQ ID NO: 271131 - DNA, 838 bp, Unknown
  Bacterial polypeptide expressing nucleotide sequence isolated from the Sargasso Sea
gagttggtatggtctttcaaactatgctctttttccacatatgtcagtatttttaaatattggttttcctctcaaacttcgaaaaacaccaagtgataaaatcaaagaaaaagttcatgacgctttgaaaactgtccaactttcagattacgcagataggaaaattgatcaactttccggtggccagagacaaagagttgcacttgcaagagcatttgtatttggcccaaggatattgttaatggatgaaccgctctccgcattagataaaaaactaagagagcaaatgcaaattgagttaaagcaactacacaggaagttaggagttacaactgtttatgttactcatgaccagagagaggctttgacaatgtctgatcgaattgctgtaattaacgaaggtaaaattcaacaattaggaacaccaaaagaaatttacaacttaccaaattccagttttgtagctgattttattggggagtcctcttttcttcaacttaatagaaaaggtaatgatctatatttttcatccgaaaaaattataactaataaaaaattaaataaaaataaagagtgggcgatggttataaggcccgagagattatcaatagtaaataaaagttacaggaaaaattcttcgaatattcacttttcaggggaaatttctgaattggtttttcaaggagaaacagccctagcattagtaaaactaatggagggaaacttcttgtccgttaggttaagcactaaatccagtgatgattttgataatttaaaaactggaacaaaaatacaactgtgtatgaaccgaaaagatgtaattattattacacattaa

SEQ ID NO: 271132 - DNA, 729 bp, Unknown
  Bacterial polypeptide expressing nucleotide sequence isolated from the Sargasso Sea
aatgtctgatcctataatcaaaattgaaaatgtgaataaatggtttggagatttccaagttttaaaggatattaatttagaagttgaaaaaaataaaaaaatagtagtttgtggaccttcaggctcaggaaaatcgactttaataagatgtattaacagattagaagagcatcaaaaaggaagtatagttgttgacggaacaactcttgatgaaaatacaaaaaatatagaacaagttagagctgaagtaggtatggtatttcaacaatttaatttatttccacatttatcaattttagataactgtacacttgctcctatttgggtcaagaaaatgccaaaacaaaaagcagaagaattggcaatgaaacaactggaacaagttcaaattgctgaccaagcacaaaaatatcctggacaattatcaggtggacaacaacaaagatgtgcaatagctagagctttatgtatggaacccaagattatgctttttgatgaacctacatcagcattagatcctgaaatgattaaagaagttttagatgcaatggtaaatttagctaaagcaggtatgactatgatagtagtaacacatgaaatgggttttgctaaagaagtggctgatgaagtaatttttatggacgaaggaatgattgtagaaaaagctgttaccaaagacttttttgctaatccaaaaagcgatagaactaagctttttttaagtcaaat

SEQ ID NO: 271133 - DNA, 839 bp, Unknown
  Bacterial polypeptide expressing nucleotide sequence isolated from the Sargasso Sea
aatgaaaacattaaaaattgaagaattatcaaagaactttggatcaactgaggttttaaggaaaattaatttagagatagatgaaggtaatttcttagttcttttaggtccttctggatgtgggaaatctacgctattaaatattattgcaggattagaaactattaatgagggaaaagttcacatagatgattacaatgtaagtaaagtagagccaaaagacagaaatattgcaatggtatttcaatcttatgctttgtacccatcaatgaatgtgcgtgaaaatatgatctttggtcttaaacaagctaaagtttcaaaggagaagattgaagagcaattggaaaaagtatcaaaatttttacaagtagattctttgttagatagaaagccatctcaattatcgggagggcaaagacagcgtgttgcaataggtagagcactagttagagaacctagaatatttttattcgatgaacctttatctaatttagatgcaaagttaagagttgagatgaggagagaaattaagaaacttcatcaacaacttaaaacaacagtggtttatgtaactcacgatcaaacagaagctatgagtttaggtacaaatattgccattatgaatcatggtgtaattcaacaaaatgatacgccagaaaacatttacaataaacctagtaatacttttgtggcagactttataggttctccatcaatgaatttaatcaaaggaaatctaaaagagagtttaaataaagtctcattcattacccgtggatcaattattgaaattccgataaatggatatgatttcaaagaaaagtctaatttagataata

SEQ ID NO: 271134 - DNA, 466 bp, Unknown
  Bacterial polypeptide expressing nucleotide sequence isolated from the Sargasso Sea
atgaattcagcaacagaaaaaacctttgtaaaatttgagaaaattgacaaaagttatgatggtgaagtgctagtagttaaaaacttaaatttagatattgctaaaggtgaatttgtaacaatgcttggcccttcaggttcaggtaaaacgacaacacttatgatgcttgcgggttttgaaacccctacaaatggagaaatctatcttgatggaatgccgattagcaaaattcctccttatgaaagagagataggtatggtttttcaaaattatgctctctttccgcatatgacagttcaagaaaatttagcatttccgcttgaagttagaaaaatgtcgaaagcagaaacaaaagaaaaagttcaaaaagctcttgatatggttgagcttggtgaatttggaacgcgttttcctgcacaactatcaggagggcaacaacaaagagttgcacttgcaagagcactag

SEQ ID NO: 271135 - DNA, 594 bp, Unknown
  Bacterial polypeptide expressing nucleotide sequence isolated from the Sargasso Sea
tcatgaagctgttgccgaggctttacgaacccggtgagggacggatcctgatcgacggctacgacatcgccaaggtggagctgtactcacttcgccgtcagatcggcatcgtcccccaggatcctttgctgttcagcggcaccgtcagcgagaacatcgcgctgacgaaccccgaagcatccagcgaggagattgtgcgggcggcctggctggccaatgcccatgatttcatcatggaactgcccagtggctacagcacaccggtgggtgaacggggtgctgccctcagtggcggccagcgccaacgggtggcgattgcgcgcaccctgctgagcaaccccaagttgctggtgatggacgaagccaccagcgcacttgattacgaaaccgaacgcaaggtctgcgacaacctgcttgagaaccttgacgatcagacggtgttcttcatcacccaccgcctgtccacgatccgtcaggccgatgtgatcgtgatgctgcaccagggggccgtggttgaggtgggcacccatcaggagctgatgaaccatcgaggccgctactacgccctttaccgccagcaggagagcacctgat

SEQ ID NO: 271136 - DNA, 619 bp, Unknown
  Bacterial polypeptide expressing nucleotide sequence isolated from the Sargasso Sea
tatgtctgacagtattattcaaataaaaaatgtaaataaatggtttggtgattttcaggttttaaaagatattaatctagaggttaagccaaaagaaaaaatcgttgtttgtggtccatcaggatcaggtaagtctacattaattagatgtataaatagattagaagaacatcagcaaggtgatattattgttgatggaaacactttaacagaaaatacaaaaaatattgaacaaattagagcagaagttggaatggtatttcaacagtttaatttatttcctcatttatcaattgtagataattgtacacttgcaccaatttgggtaaaaaaaatgccaaaaaaagatgctgaagaattagctttaaaacatttagaaagagttcaaattcttgatcaagcacaaaaatttccaggtcagttatcaggaggtcaacaacaaagggtggctattgctagagctctttgtatggaacctaaaataatgttatttgatgagcctacatcagccttagatccagaaatgattaaagaagttttagacgtaatggttgatttagcaaaccaaggtatgacaatgatagttgttactcatgagatgggatttgctaaagaagta

SEQ ID NO: 271137 - DNA, 604 bp, Unknown
  Bacterial polypeptide expressing nucleotide sequence isolated from the Sargasso Sea
ctgattagatgtattaacaggctagaagttcatcaaaaaggggatataattgtaaatgatgttgagcttacaggcgatttaaaaaaccttgaagctattagaagtgatgttggtatggtattccaatcatttaatctttttcctcacttaacggtattagaaaattgtacattggcaccgatttgggtaaaagggcttccgaaaaaagaagcaaatgatcttgctatggagctgttaacacgagtaaaaataccggaacaggcacttaagtttcctggccaattatctggaggtcaacaacaaagggttgctattgctagatctttatgtatgcagcctaaaataatgttgtttgatgagccaacatctgcacttgatcccgaaatgattaaagaagttttagatactatgattgagcttgcagaaactggtatgactatgcttgttgtaacgcatgagatgggtttcgctaagaaagttgccgacagcgttatttttatggatgagggtgaaataatagaacaaaacgatcctaaaaacttttttaataatccacagaatgatagaactaaactatttcttagccaaatactcaatcattaaa

SEQ ID NO: 271138 - DNA, 739 bp, Unknown
  Bacterial polypeptide expressing nucleotide sequence isolated from the Sargasso Sea
atggcggaagtaaaacttaacaacgtatcgaagcgttggggtagttttgttggcgttgataattttaatattacaatcccagataaagagttccttgtgcttctaggcccttctgggtgcggcaaaactactacgatgagaatgattgctggtctcgaagacccaacagaaggaaatgtaatcattgacggtaatgttgtgaatgacgttgaacctaaagatcgtgatgtcgcgatggtctttcagagttacgcgctttacccaaatatgaatgtctacgaaaatattcgttttcctttgaaagtcagaggtaccccaagtgaaactcatgatgctaaagtaaagcgtgcatcctctatggttgaactcgatgattttctgcatcgaaaacctgcagagctctcaggtggccagcgacaacgagttgcattggctagagcgatagtacgtgagcctaacgtttttttaatggatgaacctttatccaacttggatgctaaacttagaatatcaacccgagctcaaataaaaaacctttcgcacgaactagctgtaaccactatatatgtcacccacgatcaagttgaagcaatgacacttgccgatagagttgttgtgatgaaccatggtgtggtccagcaagttggaacaccaactgagatttataattcaccgttaaatacctttgaaacaggtttcattggtagtcctgctatgaacctacttgagggtacaatat

SEQ ID NO: 271139 - DNA, 630 bp, Unknown
  Bacterial polypeptide expressing nucleotide sequence isolated from the Sargasso Sea
aatgtcaaactcaattatacaaattagcaatatgaataaatggtttggagattttcaagttttaaaagacattaatcttgatgttgaaaaaaataaaaaaattgttgtatgtggtccttcaggttctggaaaatcaactttaattagatgtattaatagactagaagaacatcaaaaaggatcaatcattgttgatggaacagaattaacggaagaaacaaaaaatattgaacaaattagagctgaagttggaatggtatttcagcaatttaatctttttccacatctttcaatattagataattgcacccttgcaccgatatgggtaaaaaaaatgccaaaaaaagatgctgaagagttagcgttgaaacaattaaaacaagttcaaatagacgatcaagcatacaaatatccaggtcaattatctggtggtcaacagcaaagatgcgcaattgcaagagctttatgtatggaacctaaaataatgctattcgatgagcctacatcagctttagatcctgaaatgattaaagaagtattagatgcaatggtaaatcttgcaaaagctggaatgacaatgattgtggtcacacacgagatgggttttgcaaaagaggttgcagacgaagt

SEQ ID NO: 271140 - DNA, 829 bp, Unknown
  Bacterial polypeptide expressing nucleotide sequence isolated from the Sargasso Sea
gcaggcttcgaaactgcaacttacggacaaatctatcttgatggcttgccaataaataacgtgccgccacacaaacgcgacatcggaatggttttccaaaactacgcgctatttccgcatatgacggtcgccgaaaacctcgccttcccactaaaggtgcgcaaaataggtcgatcagaagttgaaaaccgggtaaaacgcgcgcttgacatggttcaactttcgaattttgaagaccgaagaccagcacaactgtctggcggacagcaacaacgtgtcgcggtggcacgggcgctcgtattcgatccaaaacttgtcttaatggatgagccgcttggcgcactcgacaagcaactgcgagagcagatgcaatacgaaataaaacacattcacgataacctgggcatcaccgtcgtttacgtaacccatgatcaatccgaagccttaacaatgtcaaaccgaatagcggtattcaacgatggcgtcatccaacaattggcggccccggttgacatttacgaacggcctgacaactctttcgtcgcacaattcatcggcgagaataacaaacttgtcggaacaattattaagcaaaatggcgacgtatgctccgtcaaacttgaaaccggcgagcatgtgaccgcccttgccatcaacacggacgggcctggcaaacaaaccatgttatctctccggccggagcgcgtcgcgttaaatcctgatgaaggcaaatgtgacacgaaggtcctcggaactgtcaaagaattaatctatctaggcgatcacattcgcacacggatttccgtttgcggatgtgacgactttatcg

SEQ ID NO: 271141 - DNA, 586 bp, Unknown
  Bacterial polypeptide expressing nucleotide sequence isolated from the Sargasso Sea
tatgagcgctgatgtagaactgcaaaatgtttcagtaacctttggaagtttttatgcagcaaaaaatgttagtgtaaaaataaaagaaggagaattttttagtttcttaggcccgtctggatgcggtaagacaactttgttaagggcaatatctggttttcaagatccttcagaaggaaaagtattaatagggggtcaagatatggcgggtataggacctaatagaagaccaacatcacttatatttcaaaatttggcattatttcctcttatgtctgttgcagacaatatagctttttcgcttgaagtaagaggtgtaaacaaaataaaaagaagagaaagagctgatgaattattagaattaatagctctgtctggccaaggagataaaaaagttcatgaattatctggaggacaaagacaaagagttgcaattgcaagagctttagcaattgagccagaagttttacttttagacgaacctttatcagctttagacttaaaattaagacagaaaatgagaaccgaattaagagctatacaaaagagagttggaataacttttatatacataacacatgatcaa

SEQ ID NO: 271142 - DNA, 628 bp, Unknown
  Bacterial polypeptide expressing nucleotide sequence isolated from the Sargasso Sea
ctcgggcgctggtaaatccaccgtgttcaacgtgctcacaaggcttgtcgatcccgagaccggcgcagtcaccatcggcggcgtgcgcaccgacgcgatgcggctggcggatctgcgcggcatgttctcggtggtcagtcaggacgcgctgctgttcgaggacagcctgcgcgagaacatcctgctgggccgcgaggacgtctcagaagagcaacttcaggaggtgctggaggcggcgcatgtgtcggacttcctgccgcgtctgccgcaggggctcgacagccccgccgggacgcggggcagcaacctctcgggcggccagcgtcagcgcgtcgccatcgcccgcgcgctgctgcgcgacacgcccatcctgctgctcgacgaggccacctcggcgcttgatgcggcgtccgagcaggtggtgcaggccgcgctcgaccggctgtcgaccgggcgcaccacgctggtcatcgcgcaccggctgtcgaccatccgcaacgccgacaagatcgtggtgatggatgcaggccgcgtggtcgaacagggcacacatgatgagcttattgcccgcgaaggtgcctatgcgcggctgcacgccatgcagttcgaggatgaacagccgggctga

SEQ ID NO: 271143 - DNA, 823 bp, Unknown
  Bacterial polypeptide expressing nucleotide sequence isolated from the Sargasso Sea
atttttcctcaccttaatgtagaaaaaaatattcaatttggactaagaaaacttggtttaattaatgatgagatagataaacgagttaaaggtgttctctcattagttaagcttgaggggtatgaggaaagatttagtaatcaactatctggtggtcaaaggcagcgtgtcgctcttgcaagagctttagtaaggcaaccaaaagtactattattagatgaaccactaggtgctttagataaaaaattaagagacgaaatgcaattagaattaagagcccttcaaaaaaatatcggaattacttttgtatttgttactcacgatcaacaagaagccataagtatgtcagacagagttgcggttatgaacgatggaaaaattcaacaattatcagcacccaatgaactttataagaatccaaaaaatatatttgtaagtgattttattggtgaaacgaattttcttaaagctgagactaaattaaatgatggagaattcatcaatgtttcaatcgaaggattgggagagtttaaaattaaaaataatttaaatatcgctgcaaattctttagatgttgtttgtagtgttcgcccagaatcaatgatgatctctaaagtaaaatctgactgggatatttgtcttgatgctaagatttgtcagacttcatacttaggagaaatgacaagattttatgttgaagctaaaggaatagataagataatcactgtttcttctcaacattttgataatcagtcttttgagaataacgaatgctttataagtatgagtttagaagatatttctttattgaataaaaaatagc

SEQ ID NO: 271144 - DNA, 517 bp, Unknown
  Bacterial polypeptide expressing nucleotide sequence isolated from the Sargasso Sea
aaaaatatagaacaaataagagcagaagttggaatggtgtttcaacaatttaatttatttccacatttatcaattcttgataattgcacattagctccaatttgggttaaaaaaatgccaaagaaagatgcagaggaattagctcttaaacacttagaaagagtacaaatattagatcaggctcaaaaatatccaggacaattatctggtgggcaacaacaaagagtagctattgcgagagctttatgtatggagccaaaaataatgctttttgatgaaccaacatcagcactagatcctgaaatgattaaagaagtgctagatgtaatggttaatttagcaaaacaaggaatgactatgatagttgttactcatgaaatgggttttgctaaagaagttgctgaccaaatgatattcatggatgaaggaatgatagtagaaaaggcagatactaaggaattttttgctaatccaaagagcgatagaaccaaactttttttaagccagatactatagt

SEQ ID NO: 271145 - DNA, 865 bp, Unknown
  Bacterial polypeptide expressing nucleotide sequence isolated from the Sargasso Sea
ttcttgtatttttagaattaatcagggtttgctcaaaggttctaagcctttttttgcggttaacggcgtctcattacagatcccaaaaggtaaagtggtaggcttagttggtgagtcaggctgtggaaaatcgacccttgccaatattttgttaggcttgcaacgcccaacttctggcgacgtactgtattctggaaaaaccgctgctggattctcaaatcgacatatagctcggcgtatccaaccaatttttcaagatccatattcctccttgaacgttacgaaaacagtaaagtccattatatcgttgccgctgcgtattcataaaattgggaatcccgctagctgggattcaaaagtaaacgagatgctagatctggttgggttgccaaagcgcgttgctgagagttacccctctcaattatccggtggtcagcggcaacgagttgcaatagcacgagccctaattatgcgccctgaggtagtaatatgcgatgaaccgacctctgctctagatgtgtcagttcaatcccaaatcttgaatttgctacaggatttgcgattagaacttggtttaacctatttgatgattagccataacctagcggttgttgaacatatggcagatcgagtggcggtgatgtacctcggacgtatcgtggaggaggcagagtcagcagttttattcaaagagcctaagcatccttatactagagcattattgagttcagtgcttacaccggatccgcggttaggtgtgcccgatacgcagctgggcaccatattcccaaatcctatagatccgcccgctggctgtagttttcatccgcgatgcgcaagccgaatagatatttgtagtcaaaaa

SEQ ID NO: 271146 - DNA, 589 bp, Unknown
  Bacterial polypeptide expressing nucleotide sequence isolated from the Sargasso Sea
atggcatctattgaactaaaaaatatcgaaaaaagttttggaacaaacaaggtaataaataaatttaatataaaaataaatgatggagaatttgttgttttagttggtccatcaggatgtggaaagtctacactactgagaatgatctcaggtttagaatcggttgatataggagaaatttatttagataataaacttataaacaatctaattccttctaaacgtgaaattgcaatggtttttcaatcctatgctttgtatccacacatgagtgtttttgagaatatggcttttggtttaaaaatggaaaaaatttcaaaaagtgaaattaatcaaaaagttaatagtgctgctgctacacttcaaattgaagatttacttgaaagaaaacctaaacagctttcaggtggacaaagacaaagagttgcaattggtagagcaataacaaggagtcctaaagttttcttatttgatgaaccattatcaaaccttgatgctgctttgagatctgaaatgagagttgaaatatctaaactacataaaaaaatgaattcaaatattatttatgtcactcatgatcaaattgaag

SEQ ID NO: 271147 - DNA, 745 bp, Unknown
  Bacterial polypeptide expressing nucleotide sequence isolated from the Sargasso Sea
agataaatattggtctgaatcaataatagaaatcaaaaatgttaacaaatggtttggagattttcaggttttaaaagatattaatcttgaagttcaagcaaaacaaaaaattgttgtttgtggaccgtctggttctggtaaatcaactcttattagatgcataaatagactagaagagcatcaacaaggaaatattattgttgatggaaatgaattagatgaaaacactaaaaatattgaggctataagagctgaagtaggaatggtttttcaacaatttaatttatttcctcatttatctattttagataactgcacacttgctcctatttgggtaaaaaaaatgccaaaaaaagatgcagaggaattagcaatgcaacaattagaaaaagtacaaatagctgatcaagctgcaaagtttcctggtcaattatcaggaggacaacaacaaagatgtgcaatcgcaagagctttatgcatgcagccaaaaataatgttatttgatgaaccaacctcagctttagatccagagatgattaaagaagtattagatgcaatggtaaacttagctaatgcaggaatgacaatgattgttgtaacccacgaaatgggttttgcaaaagaagtagctgacgaagtcatttttatggatgaaggaatgattgtagagaaggccaaaacaaaagaattctttgataatccaaaaaacgatagaactaagctatttttaagccaaattttatag

SEQ ID NO: 271148 - DNA, 515 bp, Unknown
  Bacterial polypeptide expressing nucleotide sequence isolated from the Sargasso Sea
gagcattgagagaattcgaggggaagtggggatggttttccagcaatttaatttatttcctcatttatctattctggataattgctcacttgctccaatctgggtacgtaaattgccaaaggctgaagcaaaagataaggccatggagtatcttaaaagagttcaaattgatgaccaggctcataaataccctgctcagttatctgggggtcaacaacaaagagcagccatagctagagccttatgcatggagccaagaataatgctttttgacgaaccgacctcagcgcttgatcctgagatgattaaagaagtattagatgtgatggtaggtcttgctaaaggcggtatgacaatgattgttgttacgcacgaaatgggatttgcaaaagaagttgctgatactattatttttatggatgagggtcaaattgttgaagcaaaaaatccaaaagatttttttgataaccctgaaagcgagagaactaaaacattcttaagtcaaattttataac

SEQ ID NO: 271149 - DNA, 487 bp, Unknown
  Bacterial polypeptide expressing nucleotide sequence isolated from the Sargasso Sea
catggacgttgaattaagagcaatcaacaaaaattttggtaaagttaaagcagttaacgatttaagtcttgaaattaagcaaggagaatttctggttttgttggggccctcagggtgtggaaaaacaaccgcattgaggatgattgcaggattggaaaccatcgaacaaggtgaattattcattgaaggtcaactcatgaatgaagttttaccgaagtacagagatgttgcgatggtttttcaaagttacgctctatatcctcatatgacggttgaagagaatgttggttatcccttgaagatgagaaagattaaagggcaggaaaggaaagactccattctgcaggcatgcggacaggttcaaatcaatgatctgctggaacgttaccccaaacagttgtctggagggcaacgacaaagagttgctcttgcaagggcgcttgttcgtcgtcctaaagtctttttgatggatgaacctttgtctaat

SEQ ID NO: 271150 - DNA, 736 bp, Unknown
  Bacterial polypeptide expressing nucleotide sequence isolated from the Sargasso Sea
atgtcagataaaataatacaaattactgaaatgaataaatggtttggtgatttccaagttttaaaaaatataaacctagaagtagaaaaaaataaaaaaattgttgtctgtggaccttcaggatcaggtaaatcaacattgattagatgtataaacagacttgaagaacatcagcaaggttcaattgtagtagatggaaatgaattaacggaagatactaaagatatagaaaaaattagagctgaagttggaatggtatttcaacaatttaatctttttcctcatctttctattttagataattgtacattggcaccaatttgggtaaaaaaaatgccaaaaaaagatgcagaagatttagctattcaacatttagaaaaggtacaaattgcagatcaagcgaataaatacccgggacaactttctggcggtcaacaacaaagatgtgcaattgctagagcattatgcatggagccaaaaataatgctttttgatgaaccaacgtcagcattagaccctgagatgattaaagaagttttagatgctatggttaatctagcaaaagcaggaatgacaatgattgtagtaacacatgagatgggatttgctaaagaggttgctgatgaagttatttttatggatgaaggtatgatagtagaaaaagctgaaactaaagagttttttgcaaaccctaagagtgacagaactaagctgtttttaagtcaaatactataaa

SEQ ID NO: 271151 - DNA, 574 bp, Unknown
  Bacterial polypeptide expressing nucleotide sequence isolated from the Sargasso Sea
ctgatttccttatcaaaatacttcggtgaaagcgccgccgtcgatggcatttccctgaccataccggcagcttcctactgttgcctactaggtccctccggttgcggcaaaacaacaactttgcgtttgatcgctgggcatgaaacggctagcgatggcagcgttctgattagcaaccgcgaagttaccggcgcgccgccagcgcggcgcggcacagcgatgatgtttcagaactatgcactgtttccgcatctgaactgccttgaaaacgtcgctttcagtctgcgcatgcagggcatcgacaaagaggagcgaaactctcgggcaatggaattgttatcgctcgtgcacatggaaacttatagggagcgcatgccttcacaattgtcaggcggtcagcaacaacggattgccctggcgcgcgctttgatcactaaacccgacgtcctgctgctggacgagccgctttctgcgctggacccgtttctgagaacccgtatgcgcgcggagcttcgccagttgcagaaaaaattgggcatcactttcgttcacgtcactcactcccaggacgagg

SEQ ID NO: 271152 - DNA, 571 bp, Unknown
  Bacterial polypeptide expressing nucleotide sequence isolated from the Sargasso Sea
tatgtattctgtagatttaaaaaatgttacaaaaaaatggggtgatgttactgctgtagatcaagtaaatctccatattaatgagggtgaatttgtagttcttttaggaccctcaggttgtggtaaaacaactactatgcgtcttgtagctggtttagaagatataactgatggtgagataaaaattggtgacgaagttgtaaacgatgttgatccaagaaaaagagatgtatcaatggtatttcaaaattatagtctttttccccacatgactgttagaaataatattgcctaccctcttaaaatgaaaaaaattcctagttcagagcatgataaactaattaaagaagtttcatcacttgtagaattacaagatttattgcatcgtaaaccagcagaattgtctggtggacaaagacaacgtgtagcactcgctagagctattgttcgtcaaccacgagtatttttaatggatgaaccattatcaaatcttgatgcaattttaagagttaccacgagagcagaattaaaaaatcttcatcaccgacttggtgttacaacaatttatgta

SEQ ID NO: 271153 - DNA, 675 bp, Unknown
  Bacterial polypeptide expressing nucleotide sequence isolated from the Sargasso Sea
taaaagatattaaccttgctgttgaaaaaaataaaaaaattgttgtttgtggaccatcaggttccggcaagtcaactttgattagatgtataaatagactcgaagaacatcaaaaaggaacaattatagttgatggcactgagcttacagaaaatactaaaaatattgaggctattagagctgaagttggaatggtatttcaacagtttaatctttttcctcatttatctattttagataattgcaccttagcaccagtgtgggtaaaaaaaatgccaaaaaaagatgcagaggaacttgcaatgaaacaattagaacaagttcaaatttcagatcaagcagcaaaatttccaggacaattatcaggtggccaacaacaaagatgtgcaattgcaagagcattatgtatggaacctaaaataatgttatttgacgaaccgacatctgctttagatcctgaaatgattaaagaagtgcttgatgcgatggttaatttagctaaagctggtatgacaatgatagtagttactcatgaaatgggttttgcaaaagaagtagcagatgaagttatatttatggatgagggaatgatagtagaaagagctgaaacaaaggaattttttgctaacccaaagaatgatagaactaaactttttttaagccaaatcctttaaa

SEQ ID NO: 271154 - DNA, 490 bp, Unknown
  Bacterial polypeptide expressing nucleotide sequence isolated from the Sargasso Sea
atgtcaaaagattcaataatatcattacaaaatgtcaataagtggtttggtgactttcatgttttacaagatgtaaatttagaagttaagaaaaaggaaagaattgtagtttgtggaccctcaggctctggaaaatctactatgatcaggtgtattaatcgtttagaagagcatcaagagggaacaatcattgttgatggcattgaacttactggtaatttaaaaaatattgatagtgtaagaaaagaagttggaatggtttttcaacaatttaatttatttccacatttatcagtaaaagagaatattacattggcacctatttgggtaaaaaaaatgccaaaagcagaggcagaagaattagcaatgcagcaattagaaattgttaaaattccagaacaggctgataaatatccaggacaactttctggaggtcagcaacaaagagttgcaattgctagatctcttgcaatgaaaccaaacattatgc

SEQ ID NO: 271155 - DNA, 805 bp, Unknown
  Bacterial polypeptide expressing nucleotide sequence isolated from the Sargasso Sea
cttgattggtaatttttctccaagcaaaaaagagaaaacagaatctataaatcaattagtaaataaaacttctgaaactttaaaaatttcagaactattagatagaaaacctggacaattgtcaggtggtcaaagacaaagagttgctcttggtcgtgctatggtaagagagcctgttgcctttttaatggatgagcctctttcaaatttagatgcggctttgagagttcacatgcgttctgaattatctgaacttcataattcacttaaaactacttttgtgtacgttacacatgatcaagcagaagcattaactatgtcttctagaatggctgttatgattgatggaaatttattacaactagatacgcctcaagaagtatatgacaatccttcctcattaagtgtggctcagtttgttggaagtccaaaaataaatatatttaaaggaactgcggactctagtgggacgataagttttctcaacgtgaatctaaaaagaaaaagttctgaaagtaatacagacttacatattggtattcgaccagaacatttagaaattacaaatgaaagtaatgaaaatacatttagtggaacagttgcatatagagaaaatttaggttcagatattttctttcatgtaaatattgaagacggttcaaataaaataattgtaagaggcttaccacaatttacacaccaaatttcaaacggttctagtgtgaatattaaaagagtgtctaataaagcattactttttaatcaagcaggaatgagggtacaatttaataatgcaatgggataa

SEQ ID NO: 271156 - DNA, 461 bp, Unknown
  Bacterial polypeptide expressing nucleotide sequence isolated from the Sargasso Sea
gctggagcattcgatgacccatctgaccttgcaggccgtgaccaggcgcttcaatacgacctatgccgtcgacagcgtcgatctgagcgtgcccgacggcaagctggtgtgctttctcgggccgtccggctgcggcaagaccacgctgctgcggatgattgccggactcgagacgccgagcgcggggagcatccatttcgcgggccgcgatattacgcatctgccggcgaaccagcgcgacttcggcatggtgttccagtcgctcgccctgtttccgcatatgacagtggcgcaaaacgtcgcgtatccgctcaagctgcgcaagaccgcgaaagacgcgcaagcacggcgcgtcgccgagttgctggatctgatccagttaccgcacatggcgaaccggcccgtcacgcaactctccggcggccagcggcagcgcgtggcgattgcgcgtgcaattgcat

SEQ ID NO: 271157 - DNA, 294 bp, Unknown
  Bacterial polypeptide expressing nucleotide sequence isolated from the Sargasso Sea
gagcccaacgacaacgagttgctattgctcgcgcacttgctcggaaaccacgattactaatctttgatgaggctacaagcgcactagacaatagaacccaagccattgtcacaaaaagtctagacaaactaccaatgacgcgtatcatgattgcgcacagattaagtacaattcggaaggcagacagaatcatcgtgatagagaaaggccaactcattgaacaaggcgactatgaaacgcttatgagtaatgacggcctcttcactcgattaatgaaacagcaaatcaaatgag

SEQ ID NO: 271158 - DNA, 752 bp, Unknown
  Bacterial polypeptide expressing nucleotide sequence isolated from the Sargasso Sea
aatggtaggcaaatctttcggagataataaagtaattaataacttcaattttcaaggcaaggatgatgaatttttagttttagttggaccatcaggatgtggcaaatctacacttctaagaatgattgctggcctagaacaaatagatgaaggtgaaattcaaattaacaatgaagtaattaatgaaatgcacccatctaaaagacataccgcaatggtattccagtcctacgctttgtatccacacatgaatgtttatgataatatgtcttttggacttaaaatagaaaaaaaaactaaagaagaaattcacacaaaagttctaagtgcagccaaaacacttaaaattgaagaccttttagaaagaagaccgaaagaactttcaggtggccaaaggcaaagggttgcaattggaagagcgataactcgaaatccaaaaatttttttatttgatgaacctttgtctaatcttgatgcagctcttagagcagaaatgagagtcgaaatctccagacttcatcaaaaaataaaaacaaatatgatttatgtaactcacgatcaagtagaagcgatgactttagcagatagaattgtcattttaaataatggcaacattgaacaagtaggaacaccaaacgaaatttacacaaatccagataatatttttgttgctcaatttataggaactccaaaaatgaatatttttaaaatcaattctgagaacattatctcaaacaacaaaataaatattt

SEQ ID NO: 271159 - DNA, 660 bp, Unknown
  Bacterial polypeptide expressing nucleotide sequence isolated from the Sargasso Sea
ttgatgttgctccacaagaaaaaatagttatttgcggaccgtctggttcaggtaaatcaactttaattaggtgcattaatagactagaagagcatcaagagggaaatataattgttgatggcacggagcttgctgaaaacacaaaaaatatagaaaaaataagagctgaagttggaatggtttttcagcaatttaatttatttccccacttatcaatattagataattgcacattagctcctatctgggtaaaaaaacttccgaaaaaagaagctgaagaattagctatgaaaaatttaacaagagtacagatcgatgatcaagctctaaaatttcctggtcaactttctggaggacaacagcaacgagctgctattgctagagctctctgcatggaacctaaaataatgttattcgatgaacccacatctgctcttgatcctgaaatgataaaagaagttttagatgtaatggttgatttagctaaaggtggtatgactatgattgttgtaactcatgaaatgggatttgctaaagaagttgcggattgcatgatttttatggatgagggaaaaatagtcgaaaaagctaagactaaagaattttttgaaaatccaaagtctgatagaacaaaattatttttgagtcaaatactataac

SEQ ID NO: 271160 - DNA, 898 bp, Unknown
  Bacterial polypeptide expressing nucleotide sequence isolated from the Sargasso Sea
catgtctcaaaaagatagtttcgtaaaattcgagaaggtagataaaagttatgatggtgaaatattagtcgttaaagatttaaatcttgatgttccaaaaggtgagtttttgaccatgttaggaccttctgggtcaggtaagacaacagtattaatgatgttagcaggatttgaaactccaacaagtggagaaatttatttagatggaaatccaataagtagtattcctccaaataaaagaggaataggcatggtctttcaaaattacgctttatttcctcacatgactgtaaaagaaaatttagcatttccacttgaagttagaaagatgcaaaaatctgaaatcgatgaaaaagtgggaaacgcacttgcaatggttgaattacaagattttggaaatcgaatgcctttacaattatccggaggacaacaacaacgagtcgcattagcaagatctttggtgtttgaaccaagattagttttaatggatgagccacttggagctcttgataaaaatttaagagagcaaatgcagtatgaaattaaacatattcatgaaaaaattggaataacagtagtttatgtaactcatgatcaaagtgaagcgttaacgatgtcaaatagaattgcagtatttaacgatggaaagatacaacaaatttcttcaccagatgttttatatgaaaaaccaaatagttcttttgttgctcaatttattggggagaacaatcagctaaaaggaaaagtgaaatcaattaatggagaaaattgtattgttactactgagtcaggagatgatattcatgctttaaaagtaaatgtaagtaacaatggtgatggttcattagtttctttgagacctgaaagagtagctattaattcatcagaaaatttttga

SEQ ID NO: 271161 - DNA, 557 bp, Unknown
  Bacterial polypeptide expressing nucleotide sequence isolated from the Sargasso Sea
aatgactcaaaaaaaagttaatgcaattgaagttaaaaatgtaactaaggtttatagaagttcgaattcggaaactagagctttaagaaatgctaacttaacaatttatgacaatgagttttttacattacttgggccatcaggttgtgggaaaacaaccctattaagattgattgcaggttttgaggatattacagaagggtctataaacctttttgatcaagaaattgtaaacctacctccaaacaaaagacctgttaatacagtttttcaacaatactctttgttcccccacttaaatgtatacgaaaatgttgcttttggtcttagacgtttaaaaaaagatgaaagtttggttaaaagtaggacctttgaagtactagagcttgtacaaatgagagagtatgccaatagaaaacctaatcaattatctggaggtcaacaacaaagagttgctctagcaagggctttagctccagaaccaaaagttttacttttggatgaacctctgtctgctttagatttaaagcttcgtcaagcaatgcgttttgaattaa

SEQ ID NO: 271162 - DNA, 817 bp, Unknown
  Bacterial polypeptide expressing nucleotide sequence isolated from the Sargasso Sea
ggaccatctggttgtggaaaatcaactttattaagaatgatttcaggtcttgaaacagttgatgaaggtgaaatttttttagataacaaattaattaataatttaattccttctaagcggggaatagcaatggtttttcaatcatatgctttgtatccacatatgaatgtttatgaaaatatgtctttcggtcttaaaatggaaaaacattcaaaaagtgatattgaaaaaaaagtaaaccagactgctaaaacacttcaaattcaagatttgcttaatagaaaaccaaaagaactttctggaggtcaaagacagagggttgctataggtagagcaataacgagaaatccaaaactatttttatttgatgaaccattatctaatttagatgcagcattaagatccgagatgagagtagaaatttcaaaacttcataagaaaatgaattctaatattatttatgtcactcatgatcaggttgaggcaatgacactagctgacagaatagtgattttaaataatggaaatatagaacagtttggtacacctaatgaaatttatgctgatccaaataatgtttttgttgcagaatttattggttcgccaaagatgaatataattaaattagaaaaagagaatattgttaataataatataataaatttttttaataatgaaattatgtttgaaaatatcaattttaaagatgaaatatatttaggtataaggcctgaggatataagtgtaaaagactcacatccaataaagatagatgttaatgttgatcttgtagaaaatttaggatttgaaaaaatta

SEQ ID NO: 271163 - DNA, 670 bp, Unknown
  Bacterial polypeptide expressing nucleotide sequence isolated from the Sargasso Sea
atggcaaagaaccagcagttcgttagatttgataaagttgacaaaagctacgatggtaaagttttagtagttaaagatttaaatttggatattgctgaaggagaatttattacaatgttaggtccttctggttctggtaaaacaacttgtcttatgatgttagctggttttgaaacacctactaatggagaaatttatttagacgccaatccaatttcaaatatacctcctcataaaagaggaattggcatggtatttcaaaactatgctttatttccacacatgacagtatatgaaaatttagcattccctctaaaagtcagaaagttttcaaaagaagatatagataaaaaagtagacaaagcattgtctatggtttctctttcaggatttgaaaatagaatgccaggacaattatctggcggacaacaacaaagagttgctgttgcaagagcattagtatttgaccctcaagtagttcttatggatgaaccattgggagcattggataaaaatttaagagaaagcatgcaatatgaaattaaacatattcacgaaagtataggtgtaactgttgtttatgttactcacgaccaaggcgaagcattaacaatgtcaaatagaatagcagtatttaatgatggaaaggttcagcaattatcaagcccag

SEQ ID NO: 271164 - DNA, 529 bp, Unknown
  Bacterial polypeptide expressing nucleotide sequence isolated from the Sargasso Sea
aactgaagagacaaaaaatatagaacaaataagagctgaggttggaatggtatttcaacaatttaatttatttcctcatttatcaatattagataattgtactcttgctcctatatgggtaaaaaaaatgcctaaaaaagatgctgaaacattagctttaaaacatttagaaaaagttcaaatagccgatcaagcatataaatatccaggtcaactttctggtggtcaacaacaaagatgtgcaatagcgagagcgttatgtatggagccaaaaataatgctttttgatgaacccacatcagcattagatcctgaaatgattaaagaagttttagatgcaatggtcaatttagctaaggctggtatgactatgattgttgtaacacacgaaatggggtttgcaaaagaagttgcagatgaagttatttttatggatgaaggtatgattgtagaacaggcagaaacaaaagagttttttgctaacccaaaaagcgatagaacaaagctttttttgagccaaatattataa

SEQ ID NO: 271165 - DNA, 739 bp, Unknown
  Bacterial polypeptide expressing nucleotide sequence isolated from the Sargasso Sea
tatgaaaaatattataaaatttgaaaaggtatcaaaatcttttggtgatttaaaagtattaaatcaattaaatttagaagtaaaagatggagagaaactggccttaatcggaccaagtggttcaggtaaaacgacaattttaagaatattaatgacattagagacgattgatgatgggtttgtatctgttaataatgaatatttatggcatgaaacaattaatgataaaatagttcctgctactgataaacatttacaaaaaatgcgtgatcagattggaatggtttttcaacaattcaatttattccctcatttaactgctatagaaaatgttaaacaacctcagattttagtaaaaaagaaaaacgaaattgaagcaaaagaaaaagcggaggacctttttaacatgattggattaagtgataaaattgatcattatcctcatcagttatcaggtggtcaacagcaaagagttgcaattgcaagagctttagcaatggaccctaagataatgttatttgacgaagtgacatctgcattagatcctgagttggtagacgaagtattagctgttttaagaaaattagctgcagattcagacactactatgttaaccgttacacatgagatgaattttgctcaagactttgctgatagagtgctattttttgacgcaggtcagattgttgaatctggatctcctaaaaaagtattttcaaatccaaaagaagagagaacc

SEQ ID NO: 271166 - DNA, 606 bp, Unknown
  Bacterial polypeptide expressing nucleotide sequence isolated from the Sargasso Sea
tatggctactatcgaattaaaaaatatcgaaaaatcctttggtgcaaacaaggtcatagacaagttcaatatcaaaataaatcacggtgaatttattgttttagtaggtccatcaggatgtggaaagtcgacactactaagaatgatttcaggtttagagtcagttgatgaaggtgaaatacatttagataaaaaaataattaataatttaatcccatcaaaaagaggaattgcaatggtttttcaatcatatgctttatacccgcacatgaatgtttacgaaaatatgtcattcggattgaaaaatgaaaagcttgataaaaatgaaatagataaaaaggtaaaagatgcagcaaaaactcttcagattgaagatcttcttgagagaaaaccaagacaactttctggcggacaacgacaaagagtggcaataggacgtgcaataacgagaaaccctaaattgtttttattcgatgaaccgctttcaaatcttgatgctgctttaagatcagaaatgcgtgtagaaatttcaaaacttcataaaaaacttagcactaatatgatttatgttacacacgatcaagtagaggctatgaccctagctga

SEQ ID NO: 271167 - DNA, 814 bp, Unknown
  Bacterial polypeptide expressing nucleotide sequence isolated from the Sargasso Sea
aatgaattcaggaatagaaaaaacctttgtaaagtttgagaaaattgacaaaagttatgatggcgaagttctcgtagttaaaaacttaaatttagatattgccaaaggtgaatttgtaacaatgcttggcccttcaggttctggcaaaacgacaacacttatgatgcttgctggttttgaaacccctacgaatggagaaatatatcttgacggaatgcctattagcaggatacctccttatgaaagagaaattggtatggtttttcaaaattatgctctctttcctcatatgaccgttcaagaaaatttagcattccctcttgaagtaagaaaaatttcaaaacaggaaacaaaagaaaaagttcaaaaagcccttgatatggttgagcttggtgaatttggaacacgttttcctgcacaattatcaggagggcaacaacaaagagttgcacttgcaagagcgctagtatttgaaccaaggcttgtccttatggatgaacctcttggtgctttagataaaaaccttagagagcaaatgcaatatgagattaaacacatccatgacagaataggtattactgttgtttacgtaacacatgatcaaagtgaggctttaacaatgtcaaataggattgctgttttcaatgatggtgtagtgcagcaattatcaactccagatatattatatgaagcacctgaaaactcttttgtcgctcagtttattggagaaaataatagaatgactggaacaataaaaagtatggaaaataattattgttcggtcgaacttgaaaatggtgctggcactgtaaag

SEQ ID NO: 271168 - DNA, 739 bp, Unknown
  Bacterial polypeptide expressing nucleotide sequence isolated from the Sargasso Sea
atgagctctgaattaatgatagaaatgaaaaatgttcacaaatggttcggtgaacttcatgtattaaatgatattaaccttgaaattaacaaaggggaaaagattgtcatttgtggtccatccggatctggcaaatcaacacttatcagatgcatcaatagattagaggaacatcaaagaggaaatattatagtagaaggtacagagctgactaacgatagtagaagtatcgagagaattcgtggggaagttggaatggtattccaacaatttaatttatttccacatttatccatattagataattgttcgcttgcccctatatgggttcgcaaactaccaaaagctgaagcaaaagaaaaagctatggaatatttaaaacgagttcaaatagatgatcaggcacacaagtatcctgctcagttatctggcggccaacagcaaagagcggcaatagcaagagcactttgcatggagccgagaattatgctttttgatgaacccacttcagctcttgaccctgagatgattaaggaagtattagatgtgatggttggccttgctcaaggcggtatgacgatgattgttgttacacacgaaatgggattcgccaaagaggttgcggatagtattatttttatggatgaagggcaaatcgttgaagcaaaaaatccaaaagacttttttgacaatcctgaaagtgagcgaactaaaacattcttaagccaaattttataat

SEQ ID NO: 271169 - DNA, 761 bp, Unknown
  Bacterial polypeptide expressing nucleotide sequence isolated from the Sargasso Sea
aatggcaaatataaaatttacaggtgtacataaatctttcggatcaaataaaattatttctgattttaatctgttaggtaaagaagatgaatttctagttcttgttggaccatctggatgtggaaaatcaacattattaagaatgattgctggattagaaaaaatagatgaaggtgaaatttttatcaacgatcaaaagattaatgaacttcacccttcaaagcgtcaaactgcaatggtttttcaatcttatgcactttaccctcacatgaatgtttatgaaaatatgtcgtttggtttgaaaatagaaaaaagaccaaaagaggaaatcaatacaaaagttatgcaagcagcaaaaattctcaaaattgaagaacttcttgagaggaaaccaaaacaattgtctggcggtcaaagacaaagggtagcaataggaagagctataactagaaatcccaaaattttcttatttgatgaaccattatctaatttagatgctgctttaagggctgaaatgagagtagaaatatcaaaattacacaatcaaataaaaacaaacatgatatatgttactcatgatcaggttgaagctatgactttagcagatagaatagttattttaaatcaaggtaacattgaacaggtcggtactcctgaagaaatttataacgacccagcaaatatttttgtggctcaatttattggaacacccaagatgaatatattagaggtaagtgaaacaaacatcatctctgaaaata

SEQ ID NO: 271170 - DNA, 663 bp, Unknown
  Bacterial polypeptide expressing nucleotide sequence isolated from the Sargasso Sea
tatgtcttctgcagaacaatcaaaagcaaacggatctgaaatcatgatcacaatcgaatccatgcacaagtggtttggtgacttccatgtacttaagaatatcaaccttgaagtaaaacgtggtgcaaaaattgtgatctgcggaccgtcaggatcaggcaaatcaacacttataagatgtattaataggctggaagaacaccagcagggaagtatagttgttgatgggacagaacttacaagtgatcttaaaaacattgaaatagtccgctcagaagtaggaatggtgtttcagcattttaaccttttccctcatctgactgctcttgaaaactgtactctggctccaatttgggtcaggaaaacaccaaaggcagaagcagaaaatagtgccatggaataccttaaaagggtaaaaataccggagcaggcaaataaatatcctggacaactttcaggaggacagcagcagcgtgttgcaatcgctcgctctttatgcatgaatccaagaattatgctttttgatgagcctacttctgctctggatccagaaatgatcaaggaggttcttgaggtaatgaccgaattggctgaaagcggaatgacaatgctggtggttactcatgaaatgggatttgcgactgctgtggctgatagtgtatt

SEQ ID NO: 271171 - DNA, 498 bp, Unknown
  Bacterial polypeptide expressing nucleotide sequence isolated from the Sargasso Sea
tatggtattcgataatttaattataagagcaaggtcactttcaaaatcttatggtagtgaagatgttttgaaggacttcaatattgacatttggtacggttcaatatttgggattttaggtgtctctggttctggtaaaacaacagcattaaggcttctagctggttttgaaaacccagatcaaggaacaatcgagatgcataacaaagtcatatttgatgagaaaactaatctaccacctgaaaaaagaaaaattggtatggtatttcaagattatgcactattccctcatttaacagttgaaaaaaatattgcttttggtttaagtaaagaagaaattaaaaacggaagacttgatgaggtaataggtatgacaaacttaagttcgtacagaaaaaaatttccacaagatatttcaggaggtcaacaacaaagagtagcgcttgcaagagcattggctccaaagccagaagtggttttgctagacgaacctttcac

SEQ ID NO: 271172 - DNA, 685 bp, Unknown
  Bacterial polypeptide expressing nucleotide sequence isolated from the Sargasso Sea
tgaagatcttcttgagagaaaaccaaaacaactttctgggggtcaaagacaaagggtggctattggcagagcaattactagaaatcccaaactttttttattcgacgaacctctttcaaatcttgatgcagcgctacgttctgaaatgagagttgaaatttcaaaacttcataaaactcttaatacaaatatgatttatgtaactcatgatcaagttgaagcaatgacgttggctgataaaatagtaattcttaataaaggcaacattgaacaatacggtacaccgagtgaaatttacaaaaatccaaataatatttttgttgctgaatttatcggcacacctaaaatgaatatattaaaaataaataaagagaaaattaaaaataataacataataaaattatttaataatgagattaagttcgaaaataataaattcaacgatgatatttatattggaataagaccagaggatatcagtttaaaaaatacaggagaagttaaactcgatattaaaattgatcttgttgagaatctaggtttcgaaaaaattatttattcatctatttcaaatatcgaatttagaattaaaactacagaggacatttctaatgaaaacgaagaaatatcattcgatagaaataaaatttatttattcgataagtataaaaatagaataagataa

SEQ ID NO: 271173 - DNA, 762 bp, Unknown
  Bacterial polypeptide expressing nucleotide sequence isolated from the Sargasso Sea
tatggccgatgttaaaatgacctccatttacaagtcatttggaaatacagaggttatccacggtgttgacctagaaatagaagatcatgaatttgtagtgtttgtggggccttccggctgtggtaaatcaaccctcctgcgtctaattgcaggtttggaagatgttacacagggagagattgaaattgaaggccagcgtgtagaccaccttcctcctgcaaaacgagggatcgccatggtgtttcagtcatatgccctttatccgcacatgaatgtttaccaaaatatgtctttcggattaagactggcaaaaaccgacaagaatataactgaccaaaaagttagggaggctgcagaaattctgcagattacagaactgctggatcgcaaacccaaggaactgtcaggaggacagagacaaagagttgcaatcggaagagctatcgtcagggatccaaaggttttcctgttcgatgaaccgctttcaaatctagatgctaaacttcgtgtgcagatgaggatagaacttacaaagttgcatagagaactgaatgccaccatgatttatgtcacacatgatcaggtggaagccatgacgatggcggacaaaatagtggttctccgtgagggttatgttgaacaggttggggcgccgctggatttgtatcataagccggcaaatatttttgttgcaggattcatcggttcaccggccatgaattttatggacggcacaatttcaggtatttcagacaagtccgt

SEQ ID NO: 271174 - DNA, 919 bp, Unknown
  Bacterial polypeptide expressing nucleotide sequence isolated from the Sargasso Sea
attgttgctagcatacgaccccgtgaaaaaactcgttaatttaaatgctcagcttcaggaagggttagccgcaagtgagagaattttcggtgttttagacgttaggcctaaaatcattgatagcaccaatgctaccgaaatcaccgacgttaccggagagattttagttaaagatctatgcttttcgtacgatggcacttctccaattttaagcaatttatcgatgacggtacccgctggaaaaacagttgcccttgtcggacattccggctcaggaaagagcacgcttttaaatttagtaatcaggttttttgatcccgtatccggctccattttaattgatggcagagacattcaaacagtaaaactctcttcactacggcagcatttcgccatagttagccaggacatttcactttttaacggcactataaaaacaaatatttgttatgggaatcccgatgcgcccaacgagaagataatagaggctgctaaaaatgcggcggcacacgattttataacgcagttaccaaatggttatgataccgagattggggagaatggcgtaaaactctctggtggacaaagacagcgagtggccattgctagagctatgttaaaggatgcacccattctattactggatgaagcaacctcggcattagactctgagtctgaaaaagctgttcagaaagcgctgcaacggcttatgcgtaatcgtacaacaattgtaatcgctcatcgcctctcaaccatacaatccgctgatatgatctttgtattagaagagggaagagttgccgaatttggacaacataaggagttgttgaaacaagatggggtctacgcaaatctatataaaattcagtttgctgaaaaggggaaagctaataatcttcaaattccagccgaaagaaat

SEQ ID NO: 271175 - DNA, 877 bp, Unknown
  Bacterial polypeptide expressing nucleotide sequence isolated from the Sargasso Sea
tatgagcgctgatgttgaattgcaaaatatttcagttacttttggaagtttttatgcagctaaagatgttagtgtcaaaataaaagagggtgaattttttagttttttaggtccttcaggatgtggaaaaacaacattgttacgtgctatatctggattcctcgatccatctcaaggtaaagtattaattggtggaaaagatatggcaggcataggtccaaataaaaggcctacatcattgatatttcaaaacttggcattatttcctctgatgtccgtatctgacaacatcgctttttcacttgaagttagaggtacaggaaaaactgaaaggcgtaaaagagcagacgaacttctcgagctcattgcgttaagtggtcaaggagataaaaaagtacatgaattatcaggaggtcaaagacaacgagtagctatagctagagctttagcaatagagcctgaagttttattgcttgatgaacctttatctgctctggatttaaaattacgtcaaaaaatgagaactgaattaagagcaattcaaaagagagtggggattactttcatttacattacacatgatcaaggagaagcattgaccatgtcagatagagtagcagtgatgaatgaaggagaattagaacaagttggattatgtgatgatgtttatgactaccctaataccccttttgtagccacttttgttggagagaataatcctttttattctaaagtaatttctataaatgataatgaggtaaaggttgaatctcaaggaaatacttttgtcgctactcctggcaaaattaatgaaaatcagaatcattcattttcaataggagatgaagtcataatgtttattagacctgaatcaatt

SEQ ID NO: 271176 - DNA, 787 bp, Unknown
  Bacterial polypeptide expressing nucleotide sequence isolated from the Sargasso Sea
tttatcatttggacttagaatgatgaatactccaaagaatatcataaatgaaaaaattgcaaaagctgcaaatctcctacaaataaatgaattacttaaaagaaaaccctctcaactctctggaggtcaaaggcagcgtgttgctattggtagagctttggttagagatgcaaaagtttttttatttgacgaacctctaagtaatcttgatgcaaaattacgagctgaactacgctatgaaattaaaaaacttcatagagatttatcaaatactatgatctacgttactcatgatcaaatagaagctatgacgcttgcggaccgtatatctgttatgaaagatggattaatacagcaattagatacacctaaacaaatttataacaaaccagctaatttatttgtggctgggtttattggatctccaagcatgaattttttaaatgctaaatttgataaatcaaatcaaaatataatttttggaaaaaaacaaattgatatttctaaatatgaaagcataaataatttgacgactgatcaagaggttgtgtttggaataagacctgaaaatataaatatagaaaaaaatgaacattctattcattgtaaagttgaattagtggagcctatgggggcagatactcttgtttggactagtgttgagggtaatccaatatctattagattggagggaagctcaaattataatttaaatgatgaaataaatatctcttttgatataaaaaagtcttcaatatttgatagtagatctgaggagagaatttaa

SEQ ID NO: 271177 - DNA, 847 bp, Unknown
  Bacterial polypeptide expressing nucleotide sequence isolated from the Sargasso Sea
aggtattggaatggtttttcaaattacgctctttttcctcatatgacagtctttgaaaatttagcttttcctttgagggtgagaaaaatttcaaaagaagatattgagaaaaaagtcgataaagctttgtcaatggtttcattatcagaatttggaaatcgtatgccaggacaactctctggcggtcaacagcaaagagtagccgtagcaagagcattggtatttgatccatctgttgttttaatggatgaacctttaggagctttagataaaaacttaagagaaagtatgcagtatgaaattaaacatattcatgagagtattggtgtaacagttgtatatgttactcatgatcaaggtgaagcattaacaatgtcaaacagaatagctgtatttaatgatggtaaagttcagcaactctcaagcccagataagctatacgaagaacctgttaattctttcgtagcagagtttattggagaaaataatacttttgcaggagaaatctcagatatatcgaatggatcttgtaaagttaaattagctaagggtgaaataatcgcaaatccaatttcagttaaatctgttggagaaaaaactacagtatcaattagacccgaaagagcattaattaatcctaaagataaaatggacaacaatcagaaaggtaaaatagaggaagtgatttatcacggtgatcacactagagtgagacttaatttactaggtaattctgaatttattctaaaagttccaaatagttctcaaaatttagatattaaacttggaaatgagattaatattggctggaatagtcaagatgcaagagctttagacccaaaataac

SEQ ID NO: 271178 - DNA, 738 bp, Unknown
  Bacterial polypeptide expressing nucleotide sequence isolated from the Sargasso Sea
aatgtctcaaattagtctacaaaatctaaagaaatctttcggtaaaacccaggttattcatgatctgagtattgatgtcaaagatggtgagctgattgtaatagttggaccatcaggttgtggaaaatcaactctattaagaatggttgcaggcctagaagatgctaatgaaggaaatattttaattgataataaaaaagtaaatgagcttgaacctatggagcgaaatattgcaatggtatttcaaaattacgctctctatcctcacatgactgtttttggtaacatggcttatggtttaaaaattgcaaaagtgccgaaagaagaaattgagtctagagttcaaaaagctgctgaaattttagagcttggagaattattagagagaaaacccaatcaattatctggtggacaaagacaaagagttgctatgggaagagccattgttagaaacccagtggcttttttatttgatgaaccattatcaaaccttgatgccaaattaagagttcaaatgagattagaaattaaaaaacttcaaactcaattaaaaactacctctctttatgtaacgcacgatcaagttgaagccatgactttagctgatcgaatgattgtaatgaacgaaggtaatgtggaacatattggaacacctttagaagtgtatacaaaaccaaaaactttattcacggctcattttatcggaagtcctgcaatgaatattttaaaaggtaattg

SEQ ID NO: 271179 - DNA, 820 bp, Unknown
  Bacterial polypeptide expressing nucleotide sequence isolated from the Sargasso Sea
ctaacagtaagaagaaatttagaaactccattaagactaagagactataatgcatttgaaagactacccttgattggtaatttttctccaagcaaaaaagagaaaacagaatctataaatcaattagtaaataaaacttctgaaactctaaaaatttcagaactattagatagaaaacctggacaattgtcaggtggtcaaagacaaagagttgctcttggtcgtgctatggttagagagcctgttgcctttttaatggatgaacctctttcaaatttagatgcggctctgagagttcacatgcgatctgaactatctgaacttcataattcacttaaaactacttttgtgtacgttacacatgatcaagcagaagcattaactatgtcttctcgaatggctgtgatgattgatggaaatttattacaacttgatacacctcaagaagtatatgataatccttcctcattaagcgtagctcagtttgttggcagtccaaaaataaatatatttaaaggaactgcggactctagtgggacggtaagttttctcaacgttaatctaaaaagaaaaagttctgaaagtaatacagatttacatattggtattcgaccagaacatttagaaattacaaatgaaagtaatgaaaatacatttagtggaatagttgcatatagagaaaatttaggttcagatattttctttcatgtaaatattgaagatggttcaaataaaataattgtaagaggcttaccacaatttacacaccaaatttcaaacggttctagtgtaaatattaaaagagtgtctaataaagcat

SEQ ID NO: 271180 - DNA, 649 bp, Unknown
  Bacterial polypeptide expressing nucleotide sequence isolated from the Sargasso Sea
tatggtcccagaaatagaaataaaaaatgtaagtaaatggtttggagaatttcaagctctaaaaaatgttagccttaccactatgcaaggtgaaatagtggttgtatgtggtccttcgggttcaggtaaatctactttagtaagatgtattaatagattggaaactcatcaagaaggaacaataaaagtgcgtggagtagagttaactgataagatgtcttcaattgcagaaattcgttcagaagtgggtatggtctttcagcagtttaatttatttcctcatttaacagccttacaaaatattacattaggaccaattaaagcacttggattaagtaaaaaagatgctgaagaaaaagcttcaaaacttcttgaaagagttaaaattcccgagcaagctaacaaacttccaaaacatttatcaggaggacagcaacaaagagttgcaattgcaaggtctttatgtatggaacctaaaattatgttatttgacgagcccacttctgcattggatcctgaaatgatatctgaagttttagatgttatggttgatttggcagaggagggaatgacaatggttgtggtgacacatgaaatgggttttgcaagaaaggttgcagacaggatggtttttatggatgagggaagt

SEQ ID NO: 271181 - DNA, 505 bp, Unknown
  Bacterial polypeptide expressing nucleotide sequence isolated from the Sargasso Sea
atggcatctatagaactgaaaaatattgaaaaaagttttggaacaaacaaggtaatcaataaatttgacataaaaataaacgatggagaatttgttgttttagttggtccatcaggttgcggaaagtctacacttttaagaatgatctcaggtttagagtcagttgatacaggagaaatttatttagataacaaactaataaataatttaattccttctaaacgtgaaattgcaatggtttttcaatcctatgctttatatccacatatgaatgtttttgaaaatatggctttcggcttaaaaatggaaaaaattccaaaaagtgaaatcaatcaaaaagttaatagtgctgctgctacacttcaaatagaggatttgcttgaaaggaagcctaaacagttatcaggtggacaaagacaaagagttgcaattggtagagcaatcacaagaagtcctaaagtttttttatttgatgaaccattatcaaaccttgatgctgctttaa

SEQ ID NO: 271182 - DNA, 901 bp, Unknown
  Bacterial polypeptide expressing nucleotide sequence isolated from the Sargasso Sea
cttgggccatctggatctggcaaaacaacaactctcatgatgcttgctggttttgaaactccgacgaatggagagatatattttgatggacgtccgataaacaatatcccacctcacaaacgtggaataggaatggttttccaaaattatgctttgtttccgcatttatcagtctatgaaaatttagcttttcctctcaaagtaagaaaagtggataaatcagaaattgaagaaagaattaataaaactttgaaaatggtttcattaacaggttatgaaaacagaatgcctgcacaattatctggtggtcagcaacagagagttgctgttgctcgcgcgcttgtgtttgatccaaaacttgtattgatggatgaacctcttggagctcttgataaaaatttacgagagagtatgcagtatgaattaaagcatattcacgagtcattaggggtgactgttgtttatgttacacacgaccagggtgaagcattgaccatgtcaaacagaattgctgtgtttaatgacggtaaggttcaacagctttctggaccaaatgaattatatgaaacgccagtgaattcgtttgttgcaagctttattggagaaaataatactttcactggaactgtaaaagaaatcgcgtctggttcagcaaagattgaaactgactctggtgaaactattgttgctaatccaattgctgtgagctcctctggggaaaaatccagaatttctctaagacctgagcgagtgagtattgacccaaatgaacaacttgaaaataaattcacaagtgagatacgggaaattatctaccatggtgaccatacaagagtacgtgtaaatcttcttggtaatgatgactttattttaaaagttccaaacgcgagcagtgattaaa

SEQ ID NO: 271183 - DNA, 538 bp, Unknown
  Bacterial polypeptide expressing nucleotide sequence isolated from the Sargasso Sea
gttgagataaatgatgacgtaaagaatcttcagagtgttaggtcgaatgtcggtatggtatttcaacaatttaatttatttcctcatctatcagtcttgagaaatataacgttagctccacaaaaagttaaaggtttaactaggtcagaatctaatgaaatagcaatgtcattacttgaaagagtaggtatacctgaacaatcagataaattcccatcgcaattatctggtggccaacagcagcgtgtagcaattgcaagagcattagcaatgcagcctaaaataatgctttttgatgagccaacttcggcattagatcctgaaatgattaaagaggttcttgaagtaatgacagaattagctgaatctggaatgactatgattgttgttactcatgaaatgggatttgcaaaaaatgttgcggatagatttttattttttgatgaaggcttaattgttgaagaaggaacaccaaaacatttttttgaaaatcctaaggaagacagaacaaagttgttcttaagtcaaatattgtagg

SEQ ID NO: 271184 - DNA, 555 bp, Unknown
  Bacterial polypeptide expressing nucleotide sequence isolated from the Sargasso Sea
catgagcatcgacgatgcaacaacagcagctaatgacagattggctgacagcgaagacatgatcgtttgcgtagatgtcgacaagttctacggcgattttcaagccctgaaaggtgtgacggcgacgatcaaggaaggtgaggtagctgttgtctgcggaccttcgggctcgggtaagagcacctggatccgatgcatcaatcgcctagaggttcatcagggtggcgatattgtcgttgacggtattgaacttactaacgaccttcggaacatcgaaaagattcgatcagaagtaggcatggtctttcagcagttcaatcttttcccccacttaactgttctggacaacatcactctggctccgatttgggtgaggaaaaaaccgcgagccgaggctgaggctatggcccgggcactacttgaccgagtggggattccggaacaggcggagaagttcccgggtcagttatcgggcggacagcagcagcgtgttgcgatagcgaggtctcttgcaatggagccacgcgtaatgcttttcgacgaacccacgtctgc

SEQ ID NO: 271185 - DNA, 770 bp, Unknown
  Bacterial polypeptide expressing nucleotide sequence isolated from the Sargasso Sea
tatgtcaaaaaaagaagatttcgtaaaatttgataaagtcgacaaaagttacgatggaaaagtattagtagttaaagatttgaatttagacatcgaagaaggtgaattcgtaacaatgcttggaccctctggttctggaaaaaccacatgcttgatgatgcttgctggttttgaaaccccaactaatggagaaatttatttagataaaaatccaatttcaaatattcctccacacaaaagaggtattggaatggtttttcaaaattatgctttgtttcctcatatgacagtttttgaaaatttggctttccctttaagagtaagaaaaatttcaaaagatgatatagataaaaaagttgaaaaggcattatctatggtttcattgtcaggatttggaaaccgtatgccaggacaactttcaggaggtcaacaacagagagtagccgtagcaagagcattggtatttgatccatcagtagttttaatggacgaacctttgggtgctttagataaaaatttaagagaaagtatgcagtacgaaattaaacatattcatgaaagcattggtgtaaccgttgtctatgttacacacgaccaaggtgaagcattaactatgtcaaacagaatagcagtatttaacgatggtaaagttcaacaactctcgagtccagataagttatacgaagaacctgtaaattctttcgttgcagagtttattggagagaataatacttttgctggagaaatttcagatatatcaaatggatcct

SEQ ID NO: 271186 - DNA, 809 bp, Unknown
  Bacterial polypeptide expressing nucleotide sequence isolated from the Sargasso Sea
taatgtagaaaaaaatattcaatttggactacgaaaacttggtttaagtaatgatgagatagataaacgaattaaagatgtactcacattggttaaacttgaggggtatgaggaaagatttagtaatcaactatctggtggtcaaaggcaacgtgtcgctcttgcaagagctttagttaggcaaccaaaagttctattattagatgaacctctaggtgctttagataaaaaattaagagatgaaatgcaattagaattaagaactcttcaaaaaaatataggaattacttttgtatttgttactcacgatcaacaagaagccataagtatgtcagacagagttgcagttatgaacgatggaaaaattcaacaattatcagaacccaatgaactttataagaatccaaaaaatatatttgtaagtgattttattggtgaaacaaattttcttaaagctgagactacatcaagtgatggagaattaatcaatgtttcaattgaagaattgggagaatttaaaattaaaaataatttaaatatagctgcaaattcttcagaagttgtttgtagtgttcgcccagaatcaatgatgatatctaaagtaaaatctgactgggatatttgtcttgatgccaagatttgtcaaacttcatatttaggagaaatgacaagattttatgttgaagctaaaggaatagacaaaataatcactgtttcttctcaacattttgacaatcagtcttttgagaataacgaatgttttataagtattagtttagaagatatttctttattaaataaaaaatagc

SEQ ID NO: 271187 - DNA, 490 bp, Unknown
  Bacterial polypeptide expressing nucleotide sequence isolated from the Sargasso Sea
gttggcatggtatttcaacaatttaatttatttcctcatctatcagttttgagaaatatacttttagctccccaaaaagttaaaggtttaactaggtcagaatctaatgaaatagcaatgtcattacttgaaagagtaggtatacctgaacaatcagataaattcccatcacaattatctggtggccaacaacaacgtgttgcaattgcaagagcattagcaatgcagcctaaaataatgctttttgacgagccaacttcggcattagatcctgaaatgattaaagaggttcttgaagtaatgacagaattagctgaatctggaatgaccatgattgttgttactcatgaaatgggatttgcaaaaaatgttgccgatagatttttattttttgatgaaggcttaattgttgaagaaggaacaccaaaacatttttttgaaaatcctaaggaagatagaacaaagttattcttaagccaaatattataga

SEQ ID NO: 271188 - DNA, 889 bp, Unknown
  Bacterial polypeptide expressing nucleotide sequence isolated from the Sargasso Sea
tctattaggaccttctggttgtggaaaatcaacattacttaatattatcgctggtttagagactataaatgagggaaatgtttttattgacgactacaatgtaagtaaagttgagccaaaagaccgtaatattgcgatggtttttcaatcttacgctttatatccatcaatgaacgttagagaaaatatgatttttggtcttaagcaggcaaaaacatctaaggaaaaaatagaggaacaattagaaaaagtatctaaatttttacaagttgatcaattattagagagaaaaccttcacaattatctggtggtcaaagacaacgtgttgcaattggtagagctcttgtaagggagccaagaatatttttatttgatgaacctttatctaatttagatgcaaaattaagggttgagatgagaagagagatcaaaaaactccaccaacaactgaaaacaacagtcgtatatgtaactcatgatcaaactgaagcaatgagtttaggaacaagaatagcgatcatgaaccatggtgttattcaacaaaatgatacacctgaaaatatttacaataaaccaagcaatacatttgtagctgactttattggatcaccatctatgaatttaattaagggaactttaaaagaaacttcgggcgaaatatcttttacagcaagtggttcgaatgttgaaattccaattaaagattatgaatttaaagataaatctaatttaaataataaagaagtttactttggtttaaggccagagcatatttactttaagaaatcaaatgaaagtgattttgaaatcaatttaagagcagatttaagtgagtatatcggtcacgaacagataatgacttttgattatgctaatcaagaaatacta

SEQ ID NO: 271189 - DNA, 730 bp, Unknown
  Bacterial polypeptide expressing nucleotide sequence isolated from the Sargasso Sea
atggctaaagggaacaaaacaataaaaaatattaaaaaatcaagaacagtttcgataaataatttaagtcacttttatggaaaaaatgagaataaaaaaaaagttcttaatgatgttaatttaaatatagataagggtgagttggttctcttaaaaggaccttctggatgtggtaaaactactcttttaaccttaattggtgctttgagaacttgtcaaagtggagatttaactgttctaaataatcaattaaatggagcatcaagaaaaacgcggcagattcttagaagaagtattggtatgattttccaaggtcataatcttctgagatgtttaacagctgagcaaaatgttcaaatgggcgctgatttaataaaggacctaacatatctgcaaagacgtgaaatagcacgaaactggttgtcagcagtaggattagaagagcatcataaaaagtttcccaatgacttatctggaggacagaaacagagagtagctattgctcgagctttatctgccaacccaaagcttttactcgctgatgagcccacttctgccttagatagtgtcacaggtagagaaatagtaacgcttttaagaaaactagcaaaagaacaaaattgttctgtacttatggtgactcatgatccaagaatttctgatatggcggataggattttaaatatggaagatggtaaaatatttggtgctcacagtgagctaaaataat

SEQ ID NO: 271190 - DNA, 736 bp, Unknown
  Bacterial polypeptide expressing nucleotide sequence isolated from the Sargasso Sea
aatgtctgacccaataataaaaattcaaaatatgaataaatggttcggtgattttcaagttttaaaaaatataaatcttgaggttgaggcaaataaaaaaattgtagtatgtggaccatcaggatcaggtaaatctacattgattagatgtatcaatagattagaagagcaccaagagggagatataattgttgatggaaacgaactatcagaaaaaacaaaagatattgaaaaaattagagcagaagttggaatggtttttcaacaatttaatttatttccacacttatcaattttagacaattgtactcttgcaccaatttgggtgaaaaaaatgccaaaaaaagaagctcaagaacttgcattagatcaacttaaaaaagtacaaatagatgatcaggctaataagttccctggacaactttctggaggtcaacaacagcgttgtgcgatagcaagagcattgtgtatgcagccaaaaattatgttgtttgatgaaccaacatcagccttagatccagaaatgattaaagaagtgctagatgcaatggtaagtcttgcaaaaggcggaatgacgatgattgttgtgacacatgaaatgggttttgctaaagaagttgctgatgaagtcatttttatggatgaaggaatgataattgagaaggcaaatactaatgaattctttgccaatccaaagagcgacagaactaagctttttttaagccaaattctttaa

SEQ ID NO: 271191 - DNA, 691 bp, Unknown
  Bacterial polypeptide expressing nucleotide sequence isolated from the Sargasso Sea
tttcaagttttacaagatgtaaatttagaagttaaaaagaaagaacgtattgttgtttgtggaccttcgggttctggtaaatcaacaatgattagatgtattaatagacttgaagagcatcaagaggggacaattatagtagacggtattgaattaacaggaaatttaaaaaatattgatagtgtgagaagagaagtaggaatggtttttcaacaatttaatctttttcctcatttatcagtaaaagagaatatcactttagctccaatatgggttaaaaaaatgccaaaagcagatgcagaagagttggctatgaagcaattagaaattgttaaaatacctgaacaagctaataaatacccaggtcaattatcaggaggtcaacaacagcgtgttgctattgctagatctctagctatgaatccaaatattatgctttttgatgaacctacttcagcacttgatccagaaatgattaaagaagttttagatgttatggttgatttagcagaaggtggaatgacaatgattgttgtgactcatgaaatgggttttgctaaaactgtagctaatagaatggtatttatggatgaaggaagaattgttgaagaagcagcgcctgataaattttttaataatcctgaaagtgatagaacaaagttattccttagtcagatactcaatcattaat

SEQ ID NO: 271192 - DNA, 809 bp, Unknown
  Bacterial polypeptide expressing nucleotide sequence isolated from the Sargasso Sea
tttgttagatggaaatataatttctaacattccacctcacaaaagaggaataggaatggtgtttcaaaattatgcactttttcctcatatgactgtttatgaaaatttagctttcccgttaagagttagaaaaatggaaaaagatgaaattgataagaaagttgacaaagctttatcaatggtttcactaaatgggtttgaaacaagaatgccaggacaactttcaggaggacaacaacaaagggtagctgtagctagagctttagttttcgatcccgcagtagttttgatggacgaacctttaggtgcactggataaaaatttaagggagagtatgcagtatgaaattaaacatattcatgaaagcattggagtaactgtagtttacgttactcatgatcaaagtgaagctcttacaatgtcgaatagaattgcagtgtttaatgatggaaaagttcaacagctatcaaatccttcagagctttacgaaaaaccagtaaattcatttgtcgcagagtttattggtgaaaataatacctttaatggtgaagtatcagatatttcaggagatgaatgtaaagttaagctatctaatggagaaataatagccagcgctatttcagtaaaatctaaaggtgaaaaaacaactgtctctctaagacctgagagagctttaatcgaaccaagtgaaaaaatggataatatgtttagtggtaagattgaagaggtaatttatcatggtgatcatactagagttcgaattaatttattaggaaacccagaatttattttaaaggtcccaaacagta

SEQ ID NO: 271193 - DNA, 685 bp, Unknown
  Bacterial polypeptide expressing nucleotide sequence isolated from the Sargasso Sea
  misc_feature (112)..(112): n is a, c, g, or t
gatggtaaggccatatcaagtattcttcctcacaaaagaggtattggaatggtatttcaaaattatgctttatttccacacatgactgtttatgaaaatttagcgtttcctntaagagtaagaaaaattccaaaagatgaagcggataaaaaaattgataaagcattatcaatggtgtctctgcagggatttgcttcaagaatgccaggtcaattatctggtggacaacaacaaagggtagcagtagcgagatctttggtttttgatcctcaattagttctaatggatgaacctttaggagctctagataaaaatttaagagaaagcatgcaatacgaaattaaacatattcatgaaagtattggagtaacagttgtttatgttacccacgatcaaagtgaagctttaactatgtcaaatcgtattgcagtattcaatgatggtaaagtacaacaactttctagtccagatgaactttatgagaaacctgtaaattcatttgttgcagagtttattggtgaaaataatacatttgctggagaggtttcagatatctctggtggaaaatgtaaagtaaaattgtctaatgctgaaatattggcaaatcctatctctgttaagggcaagggagaacgtactacagtatctttgaggccagagcgtgctttaattaatccaactagca

SEQ ID NO: 271194 - DNA, 883 bp, Unknown
  Bacterial polypeptide expressing nucleotide sequence isolated from the Sargasso Sea
attgtaagaagattttctgatgaagtttgtgtcatgaaagaaggaaaaatagttgaatcagggaaggttaaggatatttttgataatcctcagcattcctataccgttaagttacttaattctatacctggcaagaaagcggaattaaatcttgaaaatgagcagttactcactggtcgaaaagtggatataaaatatccaataacaaagaatatatttggcaaaacagtagattttttgaatgctgtaaaaaaagtcgatataacaatacacagtggctccactacaggcttagttggtgaatctggttccggtaagtcatctttggctagagctttgttaggtattgaaaaggcagaaggtaacatcatttttgatggaagaaatatacatcagttgaactccagtgaaacaaggacatttaaaaaggattttcaaatagttttccaagatccttttggctctttgtctccaaggatgacaattggagaaatagtaggagaagggctaagagttcatgaacctagtttaagcagagatgagagagaaaaaaaaatcattaaggctcttgaggatgtcgaattagattattcttctttttcaagatttccacatgaattatcaggtggacaaagacaaagagttgctattgcaagggcaattattttggaacctaaacttatattattagacgagcctacttcggctttagatgtttctattcagatgcaaatattacatcttttgaaagatcttcaatcaaggcttggcttagccttcctttgtattagtcatgacttgaaggttattagatttttatctgattatgtgtatgtgatgaaagacggcattatagttgaggatggaactcagaagatttgtt

SEQ ID NO: 271195 - DNA, 826 bp, Unknown
  Bacterial polypeptide expressing nucleotide sequence isolated from the Sargasso Sea
gacacgaagaatttcaggaggtgacattcttttaggttcaaatatcataaatgatttgcccccagcaaaacgtggaaccgcaatgatgtttcaaaattatgctctttttccacatttatcatgtttagataatgttgcgtttgctttaaagatgcgtggcataaaaaaaaacataagatatgagaaatctctagaaatgttaaaattagttcaaatggaagattactctgatcgatatcctaaccagctttcaggtggacaacaacaacgagtagcgctagcgagagccttgattacaaatccttctatattgcttttagatgaacctttatcagctttagaccctttcttaagaataaaaatgagaagtgaattaaaaacattacaaaaaaagcttggtatatcattcattcatgtaactcattcacaagatgaagcaatggctttagccgacatgattgttgtaatgaataatggaaaaattgaacaagttggtgacccttatgaagtttttaataagcccaaaaacgagtttattgcaaattttgttggaggacacaacgtaatttcaaaaaataacaaatcttattcaatcagaatggaccacatacgaataatcaataatataaaatcaaaagattcgtatccaatgactgtgagtgaaattgaatatcaaggtcaaattgtcaaagttacaggtttaactaaagattttggacgattaagtgtatccataggtgatgagatttttttaaaaaataaatttgatattgacgatgaaatttttttaagttgggataaaacaaaagaaaattcattggtttaa

SEQ ID NO: 271196 - DNA, 714 bp, Unknown
  Bacterial polypeptide expressing nucleotide sequence isolated from the Sargasso Sea
aatgtcggataaaataattcaaataaaagaaatgaataaatggtttggagatttccaagtcttaaaaaacattaatttagatgttgaaaagaataaaaaaattgttgtctgcggtccttcgggctcaggtaaatcgacattaattagatgtattaatagacttgaagaacaccaagaaggatcaattgttgttgatggaactgaattaactgaagaaacaaagaatattgaacaaataagagctgaggttggaatggtttttcaacagtttaatttatttcctcatttatcaatattggataattgtacattagctccaatatgggtaaaaaaaatgccaaaaaaagatgctgaggccttagctttaaaacatttagaaaaagttcaaattgctgatcaagcatacaagtatccaggccaactttctggtggtcaacagcaaagatgtgcaatagcaagagcattatgtatggagccaaaaataatgctttttgatgaaccaacatcagcattagaccctgaaatgattaaagaagttttagatgcaatggttaatttagctaaggctggtatgactatgattgttgtaacacacgaaatggggtttgcaaaagaagttgcagatgaagttatttttatggatgaaggtatgattgtagaacaggcagaaacaaaagagttttttgctaacccaaaaagcgatagaacaaagct

SEQ ID NO: 271197 - DNA, 454 bp, Unknown
  Bacterial polypeptide expressing nucleotide sequence isolated from the Sargasso Sea
gagatagggtttgtttttcagacttttaacctattacctcgtgcttcggcattgcataatgtggaactgcctcttatttatgctggggtgcccgtaagtactcggaagaatcgagccattgaggcactgaaattggtcgaattggaagacaggatgaatcatcggccgaatgagttgtcaggtgggcaacggcagcgcgtagcgattgccagagcgctagtcaatgatccatcgattgttttggccgatgaaccaacaggaaacctcgactcaaaaactggagtagaaattatggccgtgtttgaacggcttcatcggaaaggccatacgatcattttgattactcatgaggtcgatattgccaagcatgcccaccgtgttatccatattcttgatgggacggttgagcgagacgagatgaatcatccgaggaacactcacaaagccgactagc

SEQ ID NO: 271198 - DNA, 891 bp, Unknown
  Bacterial polypeptide expressing nucleotide sequence isolated from the Sargasso Sea
atttagatggtaacccaataagtaaaataccaccttatgaaagagaaataggaatggtgtttcaaaattatgctttatttcctcatatgacagttcaagaaaatttatcttttccacttgaggtaagaaaaatttctaaaagtgatacgaaagaaaaagttcaaaaagctcttgatatggttgagcttggtgaatttggtacccgttttcctgcacaactatctggaggtcaacaacaaagagttgcattggcaagagcacttgtttttgaaccaaggcttgttctcatggatgaacctcttggagctttagataaaaatcttagagaacagatgcaatatgaaattaaacatattcatgatagaattggcataacagtcgtttatgttactcatgatcaaagtgaagctttaacgatgtctaatagaatagcagtttttaatgatggtgtcattcagcaactatctacgccagacatattgtatgagaaacctgaaaattcttttgttgctcaatttatcggtgagaacaacagaatgacaggaacaattaaagatatggatgatacttattgtaatgttgaattagataatggagctggaaatgtaaaagctctaaaagtaaatgttggcaatagtggagaaaaaactcaactctctgttagaccggaaagagtttcacttggttcagagggcgatggtacaaatatatttaccggtaaagttgaagaattaatttatttaggcgatcacattagagtaagactggatgtttgtggtaataatgaatttatagttaaagtaccaaatgaaggttcttttaattataaagaaggagattctataaaattaaactggaatccgaacgatattagagctttagatatataat

SEQ ID NO: 271199 - DNA, 750 bp, Unknown
  Bacterial polypeptide expressing nucleotide sequence isolated from the Sargasso Sea
catgagtcaggaccctataatttcatttcatgacgtaagcaagtcatttggagatgtaaaagcagtaaacagagctaattttgagatacagcggggtgaattttttgcactacttggcccgtcaggatgcggcaaaacaacacttcttcgaatggttgcaggttttgaaataccagattcaggtgagatttcaatcgatagtcaacccatgtccggaactccgccaaatcttaggcctgtgaacatggtgtttcagaattatgcaatctttccacacatggatgtacggagaaatattgcctttggtatgcgaaattctggactgtcaaaaacaaaactaaaccggcgtattgatgagacccttgaactgattaagcttcagggatatggtaaacgtaaggcagatgaactctccggcggtcagcggcaacgagttgcactggccagggcattaatcaaacagcctaaggttttgctgctggatgaaccgcttggagcccttgataagaaactgagagaacaaatgcagattgagttacggcaacttcagcagcaggttgggatcacttttctttttgtaactcatgaccaggaagaggccctgaccctttcagaccgtattgcagtaatgacagaggggcatgtaatggaaattgcctctcctgctcaactttacgaaaatccaagttctcgtttcgtggctgattttatcggtagcatgaattttttccctggggaagtaacaaaatc

SEQ ID NO: 271200 - DNA, 686 bp, Unknown
  Bacterial polypeptide expressing nucleotide sequence isolated from the Sargasso Sea
aatgtctgagtcaattattaaaataaaagatgtaaacaaatggtttggggattttcaagttctaaaaaatattaatttggacgttcagacaacacaaaaaatagttgtttgtggtccgtctggctctggtaaatcaactttaattagatgtataaatagacttgaagaacatcaggagggatcaattatagtagatggaaatgagttaaccgaagatacaaaaaatatagaaatgattagagcagaggttggaatggtttttcaacaatttaatttatttcctcatttatcaatactggataattgtactttagcaccaatatgggttaaaaaaatgccaaaaaaagatgctgaagctttggcaatgaaacaattagaacaagttcaaattgtagatcaagcaagtaaatttcctggccaattatcaggtggtcaacaacaaagatgcgccatagcacgagctctttgtatgcaaccaaaaataatgttatttgatgagccaacttcggcactagatcctgaaatgataaaagaagttttagacgctatggttaatttagcaaaacaaggcatgacaatgatagttgttacacatgaaatgggttttgcaaaagaagtagctgacgaagtaattttcatggatgaaggaatgattgtagaaaaagctaaaacaaaagacttttttg

SEQ ID NO: 271201 - DNA, 460 bp, Unknown
  Bacterial polypeptide expressing nucleotide sequence isolated from the Sargasso Sea
cacctaaccgtactggaaaattgcactctaggcccaatttgggtgcgccagacgccaaaagccgaggctgaagatgcagccatgcattatctcgaacgcgtaaaaattcccgaacaggccaagaagtatccgggtcaactgtcaggcggtcaacaacagagggtggcgatcgcacggtctctttgcatgagccccaaaatcatgctgtttgacgagccgacatcagcgctggacccggagatgatcaaagaagtcctggatgtcatggttgagcttgccgatactggcatgacgatgattgtcgtcagccatgaaatgggcttcgcaaaaactgtcgcagaccgggtaatttttatggatgaaggggagattatcgaacaaaatgaccctcatcagtttttcgataacccccaacatgaccgaaccaagcttttcctgagccaaattttagcacattaga

SEQ ID NO: 271202 - DNA, 745 bp, Unknown
  Bacterial polypeptide expressing nucleotide sequence isolated from the Sargasso Sea
atgagttctgaattaatgatagaaatgaaaaatgttcacaaatggttcggtgaactgcatgtactaaatgatattaatcttgaaattaacaaaggagaaaaaattgtaatttgtggtccatctggatctggcaaatcaacgcttatcagatgcatcaatagattagaagagcatcaaagaggcaatattatagttgaaggcacagagttgactaatgatagcagaagtatcgagagaattcgtggagaggttggaatggtatttcaacaatttaatttatttccccatttatccatattagacaattgttcgcttgctcctatatgggttcgcaaactaccaaaagctgaagcaaaagaaaaagctatggagtatttaaaacgagttcaaatagatgatcaggcacacaagtatcctgctcagttatctggtggccaacagcaaagagcggctatagcaagagcactttgtatggagccgagaattatgctttttgatgaacccacctcagctcttgatccggaaatgattaaggaagttttagatgtgatggttggccttgctcaaggcggtatgacgatgattgttgttactcacgaaatgggatttgctaaagaggttgctgatagcattattttcatggatgagggacaaatcgtagaagcaaaaaatccaaaagacttttttgacaatcctgaaagtgagcgaactaaaacattcttaagccaaaattttataatttggc

SEQ ID NO: 271203 - DNA, 806 bp, Unknown
  Bacterial polypeptide expressing nucleotide sequence isolated from the Sargasso Sea
cgacgcccccatcatcatcgacggcatggacgacgaaacgggtctcaagcccacagacctcaagggctccatcgagtgcatcgacatcacattcgcctacccgtcgcgacctcacatcctcgtggcgaatcacttcgacttcagcgccgctgccggccagacggtcgcgctcgtcggcccgagcgggtgcggcaagtcgacgacggtgctgctcctcgagcgcttctacgatccggtctctggcgtgatcaccatcgacggccacgacctcaagaccctcaacgtgcgccacgtgcgcaagcagatcgggctggtggggcaggagcctgtcctgttctcgggctccatcttctctaacattgccaagggcttgcacggcgagcgtgcaacgatggaagaggtcgaggcggcagcaaagctcgccaacgcccactccttcatctccggtctggagcacggctaccacacagacgtaggagagcgtggcaaccagctctctggcgggcagaagcagcgtgttgccatcgcccgtgcgatcatacgcaagccgacggtgctgttgctcgacgaggcgacgtctgcgctggacaatgaatcggagaaggtggtgcaggcggcgctggatgacctgctcagggcgcagcggcgcaccacgatcgtcatcgcgcaccgcctctcgaccatccgagacgccgacaagatctgcttcatcagtggcggcaaagtcgcggagcagggctctcacaacgagctgctcgacagcaatggcctgtatgcggagatggtggcgtcggcggggcgctagt

SEQ ID NO: 271204 - DNA, 522 bp, Unknown
  Bacterial polypeptide expressing nucleotide sequence isolated from the Sargasso Sea
gctgctcccgatggagccgacggttgagttgaacggtgtctggcattgctacggcaatgcttccgagggctggacccttcaaggggtcgatcttcaagtggcgcaaggggagctgctgggtttgctcggcccctccggttgcggtaaaaccaccctcctgcgcttgattgctggctttgaacgcccccagcgcggcacggtgaagttggcccagcgcaccgtggctggggaaggggcatggatggagccagaacgcaagggtgttggcatggtctttcaggactatgcgctgtttcctcatctgaatgcctggcaaaacgccagttttggtctgccccagcggcaccccaaccctgagcgggtggcctggctgtttgagttgctggggttgcatggattggagcagcgttacccgcaccagctatccggtggtcagcgtcaacggctggccttggcgcgagccctggccccagctccaaaggttgtgctcctggatgagcccttctccagtctggatgtgga

SEQ ID NO: 271205 - DNA, 778 bp, Unknown
  Bacterial polypeptide expressing nucleotide sequence isolated from the Sargasso Sea
ggttcccggcaagtccaccttgctgcggatgctggccggttcgagcgccccaccgaggggcggctgttcctggatggggtcgacattaccgacatgccgccttatgagcgtcccatcaacatgatgttccagtcctatgccctgtttccccacatgacggtggcgcagaacatcgccttcggcctcaagcaggatggcctgcccaaggcagaggtcgacgcccgggtggaggagatgctcaagctggtgcagatgacccagtatgcccgtcgcaagccgcatcagctctccggtggccagcgccagcgggtcgccctggcccgttcgctggccaagcgccccaagctgctgctgctcgatgagcccatgggggcgctggacaagaagctgcgctccaagatgcaactggagctggtggagatcatcgagcgagtcggcgtaacctgcgtcatggtgacccacgatcaggaagaggccatgaccatggcggaacggatcgccatcatgcacctgggttgcatcgagcagatcggcagcccgatggacatctacgaaaccccggccagccggctggtgtgtgagttcatcggcaacgtcaacctgtttgacggcctgctggtggaagatgagcaggaccacgccaccatcgcctgcgcggatctggagcagcccatctacgtgggtcacggcatcagctcccgcgccgagaacaagaaggtgacctacgccctgcggccggaaaaattgctgatgagcctgcacaagccggaggagatcg

SEQ ID NO: 271206 - DNA, 565 bp, Unknown
  Bacterial polypeptide expressing nucleotide sequence isolated from the Sargasso Sea
tatggcaaatataaaatttactggggtacataaatcatttggttctaataagataattaaagattttaaccttctaggtaaagaagatgaatttcttgttttggtaggaccatcaggatgtggaaaatcaactcttctaagaatgattgcaggattagaaaaaatagatgaaggcgaaatatttattaatgatcaaaaaattaatgaacttcatccttcaaaacgtcaaactgcgatggtatttcaatcttatgctctttatcctcatatgaacgtttatgaaaacatgtcttttggtttaaaaattgaaaaaagacccaaagaagaaatcaacacaaaagtaaagcaagctgcaaaaattcttaaaattgaagaactactagagagaaaaccaaaacaattatctgggggtcaaagacaaagagtagcgataggtagagctattacaagaaatccaaaaatatttttatttgatgaacctttatctaacctagacgcagcattgagagctgaaatgagggttgaaatatctaaattacacaaccagatcaaaacaaatatgatt

SEQ ID NO: 271207 - DNA, 850 bp, Unknown
  Bacterial polypeptide expressing nucleotide sequence isolated from the Sargasso Sea
atagcaggtctagaagaaccagataaaggcggtcagattatatttaatgatgaggatgtaagtaaattacaaattgaaaaaaggaatgtgggtatggtttttcaatcctatgcattgttcccgaatatgaacgttaaagaaaatataggttatggcttgaaagtcaggaaattagataaggatcaaattgacaaacgtgtatctgaaatgttagagatgatgcacattactgacttatcaaatagaaatatagatcaactttctggagggcaaagacaaagagtagcgttggctagagctattgcagttaggccaagagtccttttgctagatgaaccattgacagctttagatgcaattttgagagataggctaagagttgaaatagatattcttctcagaagtcttggcataaccgctatatatgttactcatgatcaatctgaagcaatggcacttggtgatagaatagttgtcatgagtaatggacaaatatcacaggtaggtactccaagaaatatatattttaaaccagcaaatgaattcgttgctgattttattgggactgtgaatcgtattcatgtaaaaaatctaaaaaactttagttcttttgaggaggaagaactactttttagaccagatgacatagatatagttgaaaagaaaaattgtcatttttctgggacaataaaagcacaatttttcctaggtgaaaagactcgcttgatagtgaatcttgattcaaaagaggagatttcagttgaaggtaaatttaaaggtgaatatgaaataggttcagaaatttttatgataataaatactgatgcattaattgaattaccaaaatagt

SEQ ID NO: 271208 - DNA, 664 bp, Unknown
  Bacterial polypeptide expressing nucleotide sequence isolated from the Sargasso Sea
cttgaaagatcgctcaaaggaggatgaagtggctgatataaatattaaaagcgttaataaatattttggtgatgttcacgttatcaaagatgtctctgtagatataaaaagtcaatcatttacagttcttgtaggtccaagcggttgtggaaaatcaacaatgcttagaatgattgctggattagaagatataaattctggaactatttcaattgatgatcaggtagttaatgacttgccccctaaagaaagaaatattgcaatggtttttcaatcttatgcactttatcctcatatgactgtatttgacaatatggcttttggtttaaagttagaaaaaagatccaaagaagaaattaatgaaagggtaatagaggctgcaaaaattcttcagatcgaagaatatttaaaaagaaaaccaaaacaactttcaggtggtcaacgacaaagagttgcaatcggaagagcgatcacaagaaaacctaaagtttttttatttgatgagccattatctaatcttgatgctgctcttcgagttcaaatgagggttgaactagctaaacttcatgatcagctaaatgctactatgatttatgttacacatgatcaaacagaagcaatgacattagccgatgatatagttgtgcttaatgaaggtgttatt

SEQ ID NO: 271209 - DNA, 835 bp, Unknown
  Bacterial polypeptide expressing nucleotide sequence isolated from the Sargasso Sea
aacaaaagacctacgtcattaatatttcaaaatttagctttatttccccttatgactgtagctgataatattgctttttcgttagaagttagaggcacaggaaaaactgaaagaagaaaaagagctgatgaacttcttgaattgatagctctaactggtcaaggagataaaaaagttcacgaactttctggaggtcaaagacaaagggtagctatagcaagagccttagcgatagaacctgaggtattgttacttgatgaacctctttcagctttagatttaaaattacgtcaaaaaatgagaacagaattaagagcaattcaaaaaagagtaggcattacttttatttatataactcacgaccaaggtgaggctttaaccatgtcagacagggtagcagtgatgaatgaaggggaattagaacaagtcggattatgtgatgatgtttatgattatcctaacacaccttttgttgctacttttgttggagaaaataatcctttttatgccaaagtattgtcagtaaataataatgaggttaaagttgaatctcaaggaaacacttttattgccactgcaggtaaaatcaatgaaaatcaaaatcattctttttcaacaggtgatgaagtgataatgtttattagaccggaatcaatttttattaagaatgaaaataataaacttgataataatttttcggcaaaagtaagcacaattgaatttgaaggtaatttaaaaaacatttatctaaaaataaattcaaacatggatgttagatttagtgttccaaacgcagtagacacaagcgaactgtcaagcaatacagatgttgaat

SEQ ID NO: 271210 - DNA, 871 bp, Unknown
  Bacterial polypeptide expressing nucleotide sequence isolated from the Sargasso Sea
tccaccctacgaaagagaaattggaatggtatttcaaaattatgctctctttcctcatatgacagttcaagaaaatcttgcatttccattagaggtaagaaaaatttctaaatcagatgtaactacaagagttaaaaaagcattagatatggttgaattgggtgaatttggtaatcgctttccagctcaattatcaggtggccaacaacaaagagttgctttagctagagcgttagtatttgaacctcgcctagttttaatggatgagcctcttggagccttagataaaaatttaagagaacaaatgcaatatgaaattaaacatattcatgatagaattggaattacagtagtttatgtaactcatgatcaaagtgaagcattaactatgtcaaatagaatagctgtatttaatgatggagttgttcaacagttatctacacctgatgttctttatgaaaaacctgaaaattctttcgtggcgcaattcataggagaaaataatagatttacaggaatagtaaaaaagattgaaggtgatttatgtgatgtagaagtaaacggaggggggcaagtaaaagctttaaaagtaaatgtaaattcagaaggagatgaaactgaactatcagttcgtccagaaagagtcacaataaactcaaataaagaactagaaaataactttgaaggagaagttagagaactgatatatttaggtgatcatataagaataagattgaatgtgtgcaataatgacgagtttattgttaaaactccaaatgaaggagtcttatcattaactgaaggagataagattaatgtttcttggagttcagaggatataagggcgctagacagcaaaaatagccagtaa

SEQ ID NO: 271211 - DNA, 890 bp, Unknown
  Bacterial polypeptide expressing nucleotide sequence isolated from the Sargasso Sea
tctaacgttagcaaatcattttggaaatgtcaaagcagtaaacaatgctaattttaagattgagcggggtgaattttttgcactgcttggtccttcaggatgcggtaaaacaacacttcttagaatggttgcaggattcgaaatacctgattcaggccagatttcaattgataatcaactgatgtctggaattccgccaaatttaagacctgtaaacatggtttttcaaaattatgcaatatttccgcacatggatgtaagaggaaatattgcatttggaatgagaaaatcaggactgtcaaaaacagaattaaaccgacgtattgatgagacacttgaactaataaaactccagggatatggtaaccgcagagctgaagaactctcaggtgggcagcgacaacgtgttgcactcgcgagggcattgattaaaaaacccaaggtactactgctggatgaacctcttggtgcccttgataaaaaacttagagaacaaatgcagatagaattgcgccaacttcagcagcaggttggaattacttttctttttgtcacccatgatcaggaagaagccctgaccctttcagaccgcattgcagtaatgtcagaagggaatgtaatggaaattgcttctcctgaacaactttatgaaaatccaagttcgcggtttgtagctgactttatcggaagcatgaatttttttccaggagaagtaaccaaatcagaaaacagtaaaattagaatttcaactgattacatgggagaaatcgacataccaacctctaattctaaatttggtgtcacaagccgtgtatggattgctattcgtccggaaaaatttaagcctttattctcagctcctagagatttatcaaaagtgatgcagggaa

SEQ ID NO: 271212 - DNA, 630 bp, Unknown
  Bacterial polypeptide expressing nucleotide sequence isolated from the Sargasso Sea
aatgtcaaaaattattattaaaaatctcgaaaaatcttttggcgaaaataaagttatcaacaattttaacatagacataaaggatggcgaattcatagttttagtaggtccttcaggttgtggaaaatcaactttattaagaatggtctcaggattagaaagtatcgatcaaggggaaatctttttagatacaaagctaattaataatttaattccttctaaacgtgaaattgcaatggtctttcaatcatatgctttgtatccccacatgaatgtttttgaaaatatgtcatttggtttaaaaatggaaaaaattccaaaaaatgaaattaaagaaaaagtttataacgcagctgctacgcttcaaattgagaatttattagatagaaaacctaaacaactttcaggtggacaaagacaaagagttgcaattggtagagcaattacaagaaatccgaaagtattcttgtttgatgagcctttatctaatttagatgcagctttaagatctgaaatgagagttgaaatttctaaattacacaaaaaattaaaatcgaatatcatttacgtaacacacgatcaaatagaggcgatgacactagctgatagaattgtggttctaaataaagg

SEQ ID NO: 271213 - DNA, 858 bp, Unknown
  Bacterial polypeptide expressing nucleotide sequence isolated from the Sargasso Sea
ggattggcatggtgtttcagaattatgcgttgtttcctcatatgaccgtgggagaaaatctggccttcccattaaaagtgagaaaaatggcatcgtcagaggtggatgaaaaggtccgtaaagcgcttgatatggtgcaaatggttgctttcatcgaccgaaaaccagcccaactgtctggtggacaacaacagcggattgcactcgctagagcccttgtttttgaaccagaactggttttgatggatgagccgcttggtgcgctcgacaaacagttgcgtgagcatatgcaatatgaaatcaagcatattcacgagaatcttggtgtcactgttgtctatgtaacacatgaccagtcagaggcactcacaatgtcaaaccgcattgcggtttttgatgatggtattattcaacagttagcggatccggtgacattgtatgaaaaacctgaaaatgcatttgttgcacaatttattggcgagaataaccggctcaatggcacggtggagtccgttacgaaatctgtcgcaacagtcaagctggacttggggcacaccgtaaaagccttgtcagttaacaatgatataaagggtagccgcacaacattatcagtacgacctgaacgttgtgttttgtcgtcgaaaaaatcatcaagcctaagtatgttagatgcgcgtatcgaagaactaatttacctaggcgatcacgtccgctgtcgaatgaatgtggcgggcgaagatcaattcatagttaaggtgccaaacacttcgggtcagttgggttttaaggttggcgccaaactctatgtcgggtggaagaccgaggattgtcgtgcgcttgattatgtgcgacattaat

SEQ ID NO: 271214 - DNA, 655 bp, Unknown
  Bacterial polypeptide expressing nucleotide sequence isolated from the Sargasso Sea
atgaataatataattagatttgataaagtttcaaaatcttttggtgatttaaaagtgttaaaccaattaaatctagaagttaaagatggtgaaaaattagcactcatcggtccaagcggttcaggtaaaactacaattttgcgtatattaatgactttagaaaccattgatgacggatacgtaactgtaaataatgaatatttatggcatgaaaaaataaatgacaaaatagttccagcaactgataatcatttgcaaaaaatgcgtgatcaaattggcatggtttttcaacaatttaatttatttccacatttaactgcaatagaaaatgttaaacaaccacaaattttagttaaaaagaaaaatgaaattgaggctaaagaaaaagcagaagatctttttaatatggttggattaagtgataaaattgaccattatcctcatcagttatctggggggcaacaacaaagagtagcaattgcaagagctttagcaatggatcctaaaataatgttatttgatgaggtaacatcagcattagatcctgagttagttgatgaagttttggctgttttaagaaaattagcagctgactcagatactactatgttaactgtaacgcatgagatgaattttgcacaaagattttgctgat

SEQ ID NO: 271215 - DNA, 562 bp, Unknown
  Bacterial polypeptide expressing nucleotide sequence isolated from the Sargasso Sea
cgatgcggataagccgctcaagggccagcagaagctcattcgccaactgcgccagcaggccggcttcgtgttccagaacttcaacctgttcccccaccgcacggcgctggaaaacgtcatcgaaggcccggtgcaggtgaagaaggagccgcgcgaagcagccctcgcccatgcccgtgccctgctcgccaaggtgggcctgagcggcaaggaagacgcctaccccaagcgcctctccggcggccagcaacagcgcgtggccatcgcccgtgccctggccatgcgcccgcaggtgatcctcttcgacgaacccacctcggcgctcgaccccgagctggtgggcgaagtgctgaccaccatccgtgatctggccgaagaaaaacgcaccatggtcatcgtcacccacgaaatggccttcgcccgcgacgtggcagaccgggcgatcttcatcgaccaggggcacatcgtcgaacagggcccggccaagaccctgttcaccgcgccccagcacgaacgcacgcggcagtttctcagcaagtttctgctcgaccgctcgctttag

SEQ ID NO: 271216 - DNA, 599 bp, Unknown
  Bacterial polypeptide expressing nucleotide sequence isolated from the Sargasso Sea
cccgacggtcaaccgtcttgagcccatcgaacagggacagatcctgtttgacggcgtcgatattcatggctcaagcacccggctgaaccagctgcgaacgcgaatcggcttcgtcttccagagttttaacctgtttccgcacgtttcggtgctggagaatattatgatgtcgccggtgaaagtgctcggcgagaagcgcgccgaagcccggcgtcatgccggggagctgctggagcgggtggggctgtcgcacaaggccgacgtttacccggcgcagctttccggtggccagcagcagcgggtggcgattgcccgggcgctggcgatgaagccgccggtcatgttgtttgatgaaccgacttccgcactcgatccggagatggtcggcgaggtgctgagcgtgatgcgcgggctggcgcaggaagggatgaccatgatgtgcgtgacccatgaaatgaattttgcccgtgacgtcgccgatacgatctggtttatggatcagggacaaatactggaaaaggccgagccggataaattcttcaccgcgccgcagcatccgcgcgcgaggcgtttcctcaatgatttgctggtccactaga

SEQ ID NO: 271217 - DNA, 769 bp, Unknown
  Bacterial polypeptide expressing nucleotide sequence isolated from the Sargasso Sea
aatgtctgaagccgctcagttgcaagtcagcgacgaagtcgcgatctcaatcgaaaacatgaacaagtggtacggggcgttccatgtgctgcgcgatatcgacctgacggtcaatcgcggggagcggatcgtcatcgccgggccgtcggggtcgggtaaatccacgctgatccgctgcatcaatgcgcttgaggaacaccagaagggcaagatcaccgtggatggcacgctgttgtcctcggacctcaagaacatcgacaagatccggtcggaggtcgggatggtgttccagcacttcaacctgttcccgcatctgaccattctggaaaactgtaccctcgcgcccatttgggtgcgcaagacgcccaagcgcgaggccgaggaaatcgccatgcatttccttgaaaaggtgaagatccccgagcaggccgataaataccccggtcagctttcgggggggcaacaacagcgggtggcgattgcccggtcgctgtgcatgaaaccacggatcatgctgttcgacgagccgacctcggcgctggacccggagatgatcaaggaggttctggacacgatggtctcattggccgaggaaggcatgaccatgctttgcgtgacccacgagatgggctttgcgcggcaggtggccaaccgggtgattttcatggaccagggccagatcgtggaacagaacgagccggaagagttcttcaacaacccgaaatccgagcggaccaaattgttcctgagccagattctgggccactga

SEQ ID NO: 271218 - DNA, 835 bp, Unknown
  Bacterial polypeptide expressing nucleotide sequence isolated from the Sargasso Sea
tatggcttcaaaaaaagatttcgttaaatttgataaagtcgataaaagctatgacggtaaagtcttagttgttaaagatcttcaattagatattgctgagggagaatttattacaatgttgggaccctctggctctggtaaaacaacttgcttgatgatgttagctggtttcgaaactccaacgaatggagaaatatatttagatggtaaagcaatatccagtatacctcctcacaaaagaggaattggaatggtatttcaaaattatgctttgttcccacatatgactgtttatgaaaatttagcttttccattgagagtaagaaaaattccaaaagatgaggctgataaaaaaattgataaggcattatcaatggtatccctacaaggttttgctgcaaggatgccgggtcaattgtctggtggacaacaacaaagagtagcggtagcaagatcattggtgtttgatccacaattagttttaatggatgaacctttaggtgctttagataaaaatttaagagaaagtatgcaatatgagattaaacatattcatgaaagtattggtgtgacagttgtttatgttacccatgatcaaagtgaggctttaacgatgtccaatcgtattgcggtattcaatgatggaaaagttcaacagctctcaagtcctgatgaattatatgagaaaccagtaaattcatttgttgctgagttcattggagagaataatacttttggtggagaagtttctgatatctctggtgggaagtgcaaagttaaattggcaaatgcagaaatacttgcaaatccaatttcagtgaaaggtaaaggagaa

SEQ ID NO: 271219 - DNA, 715 bp, Unknown
  Bacterial polypeptide expressing nucleotide sequence isolated from the Sargasso Sea
aatgtcagataatataatccaaataaacaatatgaataagtggtttggggatttccaagttctaaaaggaattaatctagaagtaaaaccaaaacaaaaaatagttgtttgcggtccgtctggctcaggaaagtctacattaataagatgtataaatagattagaagaacatcaagaaggtgaaataatagttgatggtactgaattaactgaggatactaaaaatatagagcaaattagagcagaggttgggatggtatttcaacaatttaatttatttccacatttatcaattcttgacaattgcacattagctcccatttgggtaaaaaaaatgccaaagaaagaagccgagcaattagcacttaaacatttagaaagagtacaaatattagatcaagctcaaaaatacccaggtcaactgtctggaggacaacagcaaagagtagcaatagctagagctttatgcatggaacctaaaataatgctttttgatgagccaacatctgctttagaccctgaaatgattaaagaagtattagatgtaatggtaaatcttgctaaacaagggatgaccatgatagttgttactcatgaaatgggttttgcaaaagaggtagctgaccagatgatattcatggacgaaggaatgatagtggagagggcagatactaaggaattttttgccaatccaaaaaatgatagaactaagctt

SEQ ID NO: 271220 - DNA, 721 bp, Unknown
  Bacterial polypeptide expressing nucleotide sequence isolated from the Sargasso Sea
attaaaattgaaaatgtaaacaaatggtttggagattttcaggttttaaaagacataaatcttgatgtttctgctaaacaaaaaattgttgtctgtggtccatccggatcaggtaagtcaactttaattagatgtattaacaggttagaggaacatcaaaaaggtactataatagttgatggtactgaactttctgaaaatacaaaaaatattgaacaagtaagagctgaagtaggaatggtttttcaacaatttaatttatttccacatttatctattttagataactgcacactggcaccaatttgggtaaaaaaaatgccaaaaaaagaagctcaagagcttgcaatgaaacaattggaacaagttcaaattgcagatcaagcaaataagtttccaggtcaattatctggcggtcaacaacaaagatcagctatagcacgtgctttatgtatgcaaccaaaaataatgctttttgacgaacctacgtctgcattagatccagaaatgataaaagaagttttagatgcaatggtaaatcttgcaaaaggtggaatgacaatgattgtagtaacacatgaaatgggttttgcaaaagaagttgcagacgaagttatatttatggacgagggaatgattgtagaaaaagctgtaaccaaagaattttttgccaatccaaaaagtgatagaaccaagctatttttaagccaaattttataat

SEQ ID NO: 271221 - DNA, 544 bp, Unknown
  Bacterial polypeptide expressing nucleotide sequence isolated from the Sargasso Sea
ggggagcagattaattatgtcagaaaattcaataatttcattacaaaatgtcaataaatggtttggtgatttccaagttctaaaagatgtgaatttagaggtaaaaaagaaagaaagaatagttgtctgtggtccttcaggatcaggtaaatcaacaatgataagatgcattaatcgattagaagaacatcaggaaggaaaaattgtcgtagatggaattgaacttacaggtaatctaaaaaatatcgacagtgttagaaaagaagtaggtatggtatttcaacagtttaacttgtttcctcatttatctgtaaaagaaaacataacgttagctccaatctgggtaaaaaaaatgcctaaagctgaagcagaagagctcgcaatgaaacaattagagattgttaagattccagagcaagcaaataaatatcccggtcaactatctggaggtcagcaacaaagagtggctattgcaagatcccttgcaatgaaccctaacattatgctttttgatgaaccaacatctgctcttgatcctgaaatg

SEQ ID NO: 271222 - DNA, 793 bp, Unknown
  Bacterial polypeptide expressing nucleotide sequence isolated from the Sargasso Sea
tcaaacaaggtaataaataaatttaatattaaaataaacgatggagaatttattgttttagtaggtccatcaggttgcggaaagtctacacttttaagaatgatctcaggtttagaaacagttgataaaggagaaatttatttagataacaagattataaataatctaattccttcgaaacgtgaaattgcaatggtttttcaatcctatgctttgtacccacacatgagtgtttttgagaatatggcttttggcttaaaaatggaaaaaattccaaaaagtgaaattaatcaaaaagttaataatgctgctgcaacacttcaaatagaggatttgcttgaaaggaaacctaaacaactatcaggaggtcaaagacaaagagttgccataggaagagctattacaagaagtcctaaagtttttttattcgatgagccattatcaaacttggatgctgctttaagatctgaaatgagagttgaaatatctaagcttcataaaaaaatgaattcaaatataatttatgtaacgcatgatcaagttgaggcaatgacattagctgatagaattgtagttttaaacaaaggaaatattgaacaatatggaacacctaatgagatttattcaaatccaaacaatatttttgttgcagaatttattggatctccaaaaatgaatataattaagataaataaagaggaaatttctaattcaaacacttttcacttattcaataataaaataacttttaataatttaaaatttgaagatgaaatttatattggtattagac

SEQ ID NO: 271223 - DNA, 532 bp, Unknown
  Bacterial polypeptide expressing nucleotide sequence isolated from the Sargasso Sea
ttaactgaagagacaaaaaatatagaacaaataagagctgaggttggaatggtatttcaacaatttaatttatttcctcatttatcaatattagataattgtactcttgctcctatatgggtaaaaaaaatgcctaaaaaagatgctgaaacattagctttaaaacatttagaaaaagttcaaatagccgatcaagcatataaatatccaggtcaactttctggtggtcaacaacaaagatgtgcaatagcgagagcgttatgtatggagccaaaaataatgctttttgatgaacccacatcagcattagatcctgaaatgattaaagaagttttagatgcaatggtcaatttagctaaggctggtatgactatgattgttgtaacacacgaaatggggtttgcaaaagaagttgcagatgaagttatttttatggatgaaggtatgattgtagaacaggcagaaacaaaagagttttttgctaacccaaaaagcgatagaacaaagctttttttgagccaaatattataaa

SEQ ID NO: 271224 - DNA, 612 bp, Unknown
  Bacterial polypeptide expressing nucleotide sequence isolated from the Sargasso Sea
aatctacaatgatcagatgtattaatagattggaagagcaccaagaaggttcaattgttgttgatggaattgagttaacaggaaatttaaaaaatattgataatgttagaaaagaagttggaatggtatttcagcaatttaatttattcccccatttatctgtaaaagaaaatataactttggctccaatttgggtaaaaaaaatgcctaaagctgaagctgaagagcttgcaatgaggcagttagaaatagtaaaaattcctgaacaggctaacaagtaccctggtcaattatctggcggtcaacaacaaagagttgctattgctagatctcttgcaatgaatcctaatattatgctttttgatgaaccaacttcagctctagatcctgaaatgattaaagaagttttagatgttatggtcgacttagcaaatggaggaatgactatgattgttgttacacatgaaatgggttttgctaaaacagttgccgatagaatggtatttatggatgaaggaaaaattgttgaggaggctagcccagataagttttttaataatccagagagtgatcgtacaaaattatttttaagtcaaattcttcatcaataat

SEQ ID NO: 271225 - DNA, 546 bp, Unknown
  Bacterial polypeptide expressing nucleotide sequence isolated from the Sargasso Sea
aatgcaagagataatgatagaagccaaaaacatcattaaagattttaagatatcaagaggaattttcaaaccaaaagataacttaagagcagttgataacgtttctattaaagttaaaagaggtgaagtaataggtattgttggtgaatctggttgtggtaaaaccactttctcaaaaattttaatgggtttacttcctccctcatcaggatatgtaaatttatgtggcaaaccagtttttagtataaataaccttgaaagagcaaatcttgttcagcctatttttcaagacccttattcctccttaaacccccgcaaaacaataggatccataattacactaccagtaaaagtgcagggtaataaggatccagaaacttctaagaaacaggttcttgaaacaatggatctagttggtttacagtctagaatgtatgatcaatatcctaatcaattatcgggtggacaaagacaaagagtggcaatagctagagcattaattaataggccggaagttgttgtatgtgacgaacccacatcggcgtt

SEQ ID NO: 271226 - DNA, 527 bp, Unknown
  Bacterial polypeptide expressing nucleotide sequence isolated from the Sargasso Sea
tttaaaaaatattgacagtgttagacgggaagttggaatggtatttcaacaatttaatcttttccctcatttgtctgtaaaagagaatattacactagcacctatatgggttaaaaaaatgccaaaagcagaagcagaagaactagcaatgcagcaattagaaatagttaaaataccagaacaagcaaacaagtatccaggacaattatctggaggtcaacagcaaagagttgctatagcccgttcacttgcaatgaaaccaaacattatgctttttgatgaacctacatcagctttagatccagagatgataaaagaagttttagatgttatggtagagttagctgagggtggtatgactatgattgttgttactcacgaaatgggatttgctaaaacagttgctaacagaatggtatttatggatgaaggaagaattgttgaagaagcagctccagaaaagttttttaataatccagaaagtgatcgaactaaattatttttaagtcaaatacttaatcattaag

SEQ ID NO: 271227 - DNA, 690 bp, Unknown
  Bacterial polypeptide expressing nucleotide sequence isolated from the Sargasso Sea
cgagtggttcggggaagagcacgttgctcagactcattctgcgcgtgtacgacgtgacgagcgggaagatttccatcgacgggcacgacgttcgtgatttacgactcgattctcttcgagaatccgtcgccgtcgttccgcaagacaccgtcttgttcaacgacacgctcgaccacaacattcggtatggccgaccggcggcgagcgatgaagaggtcgccctcgccgcgagccgcgcgcgattggacaagaccgtggaacaaatgccgaagggtttaggcaccatggtcggagaacgcggcgtcaaactgagcggcggcgagaaacaacgcgtcgccatcgcacgtgcgtttctccgcgagccgcgcatgttggtggcagacgaggcgacgagcgcgttggacacggcgacggagcaaggcatcctcgagagtctcgaggacgtcgccagaggtcgcaccgcggtcttcgtcgcccatcgcctctccaccgttcgctcgtgcgaccgaatcatcgtgatggaacagggtaaaatcgtcgaggagggcacgcacgccgagttactcgacggaacgagtcgtggcgaaaaggttggcatgtacgccgcgatgtggaaggcgcaggcgcaggaggaggaagaaaaggagaataagcccaagcccgacgacgtcgtcatcaccgccggatgag

SEQ ID NO: 271228 - DNA, 475 bp, Unknown
  Bacterial polypeptide expressing nucleotide sequence isolated from the Sargasso Sea
tatgtcagactcaataatacaaattaaaaatatgaataaatggtttggagattttcaagttttaaaagatattaatttagatgttgaaaaaaataaaaaaattgttgtttgtggtccttcaggttcaggaaaatctactttaataagatgtataaatagattggaagaacatcaaaaaggttcaattatagttgatggtacagagttaacagaagaaacaaaaaatatagaacaaataagagcagaggttgggatggtttttcaacaattcaatttatttccacatctttcaatattagataattgtactttggcacctatatgggtaaaaaaaatgcccaaaaaagatgctgaagaattagccttgcgacaattaaaacaagttcaaatagacgatcaagcaaataagtatcctggacaattatctggaggtcagcaacaaagatgtgcgattgctagagctttatgcatggag

SEQ ID NO: 271229 - DNA, 640 bp, Unknown
  Bacterial polypeptide expressing nucleotide sequence isolated from the Sargasso Sea
atgaaaaaagcagaagtaaaatttgaaaatattacaaaaaaatttaatgagacggttgctgttgataatgtgagttgtacttttgaagcaggaacacttactacattactaggtccctctggatgtggaaaaactacttctttaagaattattgctggtttagaaagagctactagtggtaaaattttggtagaaaatgaagatgtaacattattaccagcaactgatagagatgtatctatggtatttcaatcttatgctttgttcccacatatgagtgtgcttgaaaatgtatcgtatggtttaaaaatgataaatgttccaaaagaagaatttatagaaaagtcattagaaactcttaagttagttaatttagaaggttatgaaaataggatgccctcagagctatctggaggtcagcaacaaagggtagctgttgcaagagcaattgtgctgaaaccaaaggttctactttttgatgagcctttatctaatttagatgcaaaattaagaagacaagtaagagaggatattagagaaattcaacagaaacttggagttaccacaatttatgtaactcatgatcaagaggaagcattagcaatttctgacaaagtaattgtaatgaacaatgctatta

SEQ ID NO: 271230 - DNA, 766 bp, Unknown
  Bacterial polypeptide expressing nucleotide sequence isolated from the Sargasso Sea
atggctgaaatagaacttaaaaatatttcaaaatcatttagtgacacacaggtcatcaaatctcttgatctatcgatcgcagacggggaattcataaccattgtggggccttcaggatgcggcaaatcaactttattgagaataatcgcaggattagaaactcagtcttcaggagatgtcatcatagagggtcgtgaagtaaataaaataagagccagtgatcgagatttggcaatggtgtttcaatcttatgctctctatccacacttgactgttaaacaaaatttatctgttcctcttaaactgcgagagctatcaaaaattgaaagaattcccatttttaattggtttctgccaaacaggcattcaaagttaaaggaaatcaataataaagttcaaaaagcctcagatactttaaagattactcacctgcttgaaagaaaacctggtcaattatcaggtggtcaacagcaacgtgtagcggttgggagggctatggttagagaaccagttgcttttttgatggatgagccattatcaaatctggatgctgcccttagagtgcatatgcgtgcagaaatttcagaactccatcgtgacctaaaaaccaccttcgtctatgtcacacatgatcaggctgaagctctaacaatgtcagaccgaatggctgtcatgatggatggtgaaattctacaacttgatactccgaatgaaatctataaaaacccttctaatcttatagttgctgaatttataggtagtccca

SEQ ID NO: 271231 - DNA, 608 bp, Unknown
  Bacterial polypeptide expressing nucleotide sequence isolated from the Sargasso Sea
aatgtccgaagctataattaaaattaatgatgttaataaatggtttggagactttcaggtattaaaaaatattaatttggaggttcagcctaaacaaaagatagtagtatgtggaccatcaggttctggaaaatctacactaataagatgcattaatagacttgaagaacatcaagagggaaacattgttgtagatggaaatgagcttactgaagatacaaaagatattgaaaaaattagggctgaagttggtatggtttttcaacagtttaatctatttcctcatttgtcaattttagataattgcactttagctcctatatgggttaaaaaaatgccaaaaaaagaagcagaagaattagctatgaaacaattaaaacaagttcagattgatgatcaagctagtaagtttccaggtcaactatctggtggtcaacaacaaagatgtgctatagctagagctttatgtatgcagccaaaaataatgttgtttgacgaaccaacttccgccttagatcctgaaatgataaaagaagtattagacgctatggttaatttagcaaaacaaggtatgactatgatagtagtaacacatgaaatgggttttg

SEQ ID NO: 271232 - DNA, 735 bp, Unknown
  Bacterial polypeptide expressing nucleotide sequence isolated from the Sargasso Sea
aagatgttcttacattagtcaagctagagggctatgaagaaagatttagcaatcagctatcaggtggtcaaaggcaacgtgttgctcttgcaagagctttagtcaggcaaccaaaagtgctattattagatgaacctcttggtgctttagataaaaaattaagagatgaaatgcaattagaattaagaactcttcaaaaaaatattggaattacttttgtatttgtcactcacgatcaacaagaagctataagtatgtcagacagagttgcagttatgaacgatggaaaaattcaacagctatcagcacccaatgaactttataagaatccaaaaaatatatttgtaagtgattttattggtgaaacgaattttcttaaagcggaaactaaatcgagtgatggagaattcatcaatgtttcaattgaagaattgggagaatttaaaattaaaaataatttaaatatcgcagcaaattcttcgaatgttgtttgtagtgttcgcccagaatctatgatgatttcaaaagtgaaatctgactgggatatttgtcttgatgctaagattagacagacttcatatttaggagaaatgactagattttatgttgaggtgcaaggaattgataagactatcactgtttcttcgcaacattttgacaatcaatcttttgaaaataacgagtgctttataagtattagcttagaagatatttctttattgaataaaaaatagc

SEQ ID NO: 271233 - DNA, 637 bp, Unknown
  Bacterial polypeptide expressing nucleotide sequence isolated from the Sargasso Sea
atgtctcaaaaagatagctttgttaagtttgataatgttgataaaagttatgatggtgaaaccttagtagtaaaaggtttgaatcttgacatacctcaaggtgaattcttaacaatgttaggaccgtctggttctggaaaaactacaactttaatgatgcttgcaggttttgaaactccaaccagtggagaaatatatttagagggtgaaccgatcagtagtataccaccatataaaagaggaataggaatggttttccaaaactatgcgctttttccacatatgacagttaatgaaaatttagcttttcctttggaagttagaaaattatctaagtcagaaataggagagaaagttcataaagcattatctatggtggaacttcaagattttggaacaagaatgccccttcaattatctggagggcaacaacaaagagtagcactagcgagagctttagtatttgagccaagattagttttaatggatgaacctctaggtgccttagataaaaaacttagagagcaaatgcaatatgaaataaaacatatacatgaaaacattggtattacagttgtatatgttactcacgatcaaagcgaagctctaacaatgtcaaatagaatagcagtattta

SEQ ID NO: 271234 - DNA, 901 bp, Unknown
  Bacterial polypeptide expressing nucleotide sequence isolated from the Sargasso Sea
ttcgggatccatttctcaaaaagaaattgagatttcatctcttccaccttcagcaagagatttcggtattgtgtttcaatcttatgcacttttcccgaatttaacggtcttctctaacatttcctatggtttgattaataataaatggaggaaggatgaaattaagtccagagtggagcatttactggatctggttggtttgaaatctcatgcaggaaaatatccgagtcaattatctggaggagaacaacaacgtgttgctttagcaagagctttggcaacgtcaccaggattgttattgcttgatgaacccctctcagccctggatgcaaaagtcaggttgtatctgaggaaacagattaaagatctgcaccgaaaattaggaatcaccacaataatggtgacccatgatcaggaagaagctcaatcgatggcagataggatttttgtcatgaaggatggcgaaattattcaatccggcaccccgagagaaatctatgaaaaagctaatactccttttattgcagattttatcggaataactaattttatcgatgccagtgttgtaaaccaggataaggttttctgtaaggatattcagttggaatgtaatacaactggcttagcagaagaacgttcagtaaaaattgcgatcagaccagaatctattcttctaagtcaaaaaaaaaccaatgaacaaaactgtatccagggaaccattaaagagaacgaatttttaggatcatttcaacgtctttacatagaatctccctccttgtccgaagaacttctcatgatcgatattgctaacacttctcaaactaattttgatttaaaccagggttcaatgatctacttcatctttcctccagatcaaattaaagtttacccaaattcctga

SEQ ID NO: 271235 - DNA, 697 bp, Unknown
  Bacterial polypeptide expressing nucleotide sequence isolated from the Sargasso Sea
aatgtcagatcccattataaaaataaataatatgaataaatggtttggtgatttccaagttttgaaagacattaatctagatgtcgaaaaaaataaaaaaattgtagtttgtggtccatccggttcaggaaaatcaactttaattagatgtattaatagacttgaagaacatcaaaaaggaacaatcatagttgatggtacagaattaaccgaagaaacaaaaaatattgaacaaattagagcagaagttggaatggtatttcaacaatttaatttgtttccacatttatcaatattagataactgtactctagctccgatttgggtaaaaaaattgcccaaaaaagaagctgaagagttagctttaaaacaattaaaacaagttcaaattgatgaccaagcatataaatatccaggtcaattatcaggagggcaacaacaaagatgtgcaattgcaagagctttgtgtatggagccaaagataatgctttttgatgagcctacatcggctctagatccagaaatgattaaggaagtgctggatgcaatggttagtttagcaaaggccggaatgacaatgattgttgtaactcatgaaatgggttttgcaaaagaagtagcagatgaagtgatttttatggatgaaggcatgattatagaaaaggccgagaccaaagagttttttgccaatccaaaa

SEQ ID NO: 271236 - DNA, 718 bp, Unknown
  Bacterial polypeptide expressing nucleotide sequence isolated from the Sargasso Sea
catggcaaccctcgaactgcgcaacgtcaacaaatcctacggcagcggcctggcggacaccctgaagaacatcgaactggccatcgactccggcgagttcctgatcctggtcggcccctccggctgcggcaagtccaccctgatgaactgcatcgccgggctggaggagatcagcggcggggcgatcctggtcgacggcgccgacatcagcggcatgagccccaaggatcgcgacatcgccatggtgttccagtcctacgcgctgtacccgaccatgacggtcaaggacaacatcgccttcggcctgaagatgcgcaagctgccgccggccgagatcgaggccgaggtggcgcgggtggccaagctgctgcagatcgagcatctgctgacgcgcaagcccggccagctctccggcggccagcagcagcgcgtggccatgggccgggcgctggcgcggcggccgaagatctacctgttcgacgaaccgctgtcgaacctcgacgccaagctgcgcgtggagatgcgcaccgaaatcaagctgatgcaccagcgcctgaagaccaccacggtgtacgtcacccacgaccagatcgaggccatgaccctgggtgacaaggtggcggtgatgaaagacggcatcatccagcagttcggcaccccacaagagatctacaacgacccggccaaccagttcgtcgccagcttcatcggttcgccg

SEQ ID NO: 271237 - DNA, 826 bp, Unknown
  Bacterial polypeptide expressing nucleotide sequence isolated from the Sargasso Sea
cataagagagaagtcggtatggtctttcaaaactatgctctttttccacatatgtcagtatttgaaaatatcggttttcctctcaaacttcgaaaagcacccaataatcaaattaaagaaaaagtttatgacgctttgaaaactgtccaactgtcagattacgcagatagaaaaattgatcaactatccggtggccagagacaaagagttgcccttgcaagagcatttgtatttggtccaaggatattgttaatggatgaaccgctctccgcattagataaaaaactaagagagcaaatgcaaattgagttaaagcaactacacaggaagttaggtgttacaactgtttatgttacacatgaccagagagaggctttgacaatgtctgatcgaattgctgtaattaacgaaggtaaaattgaacaattaggaacaccaaaagaaatttacaactcaccaaattccagttttgtagctgattttattggggagtcctcttttcttcaacttaatagaaaaggtaatgatctatatttttcatctgaaaaaattataacgaataaaaaattaaataaaaataaagagtgggcgatggttataaggccagagagattgtcaatagtaaataaaagttacaggaaaaattcttcgaatattcatttttcaggggaaatttctgaattggtttttcaaggagaaacagccctagcattagtaaaactaatggaggaaaatttcttgtctattagattaagtactaaatcaagtgatgattttgataatttaaaaactggaaacaaaatacaactttgtatgaacagaaaag

SEQ ID NO: 271238 - DNA, 453 bp, Unknown
  Bacterial polypeptide expressing nucleotide sequence isolated from the Sargasso Sea
tatgtcagataaaattatacaaatggaaaacgtaaataaatggtttggagattttcaggttttaaaagatataaatttagaagtaaatcaaaaacaaaaaatagttgtttgtggaccttcgggatcaggaaaatcaacattaattagatgtataaatagattagaagagcatcaaaagggaagaattacagttgatggaaacgaactaacagaggatacaaaagatattgaaaagataagagcagaagtaggtatggtctttcaacaatttaatttatttccccatctatctattttagacaattgtacattggctccaatttgggtcaaaaaaatgcctaaaaaacaagccgaagaattagctatgaaacaattacagcaggtccaaattgctgatcaagcaaaaaaatttccaggtcagctttcaggaggtcaacaacaaagatgtgcaat

SEQ ID NO: 271239 - DNA, 694 bp, Unknown
  Bacterial polypeptide expressing nucleotide sequence isolated from the Sargasso Sea
gtttggtgattttcaagtattaaaagatataaatttagaagttgaaaaaaataaaaaaatagtagtctgtggtccatctggttctggcaaatcaactttaataagatgtattaataggctagaagaacatcaaaaaggctcaattgttgtagatggcgtagaactttcagaagatacaaaaaatattgaagctattagagcggaagttggaatggtatttcagcaatttaatttatttccacacctttcaattctggataactgtactttagcacctatttgggtaaaaaaaatgccaaaaaagaaagccgaagaacttgcaatgaaacaattagaaaaagttcaaattgctgaccaggcaaaaaaatttcctggtcaattatcaggtggacaacaacaaagatgtgcaatagctagagctttatgcatggagcctaaaataatgttatttgatgaaccaacatcagctcttgatccagaaatgatcaaggaagttttagatgctatggtgaatttagctaaagcaggcatgactatgatcgttgtaacgcatgaaatgggttttgctaaagaagttgctgatgaagttatttttatggatgaaggcatgatcgttgaaagagccgaaactaaacaattttttgccaatccaaagagtgatagaactaagctttttttaagtcaaattttataa

SEQ ID NO: 271240 - DNA, 509 bp, Unknown
  Bacterial polypeptide expressing nucleotide sequence isolated from the Sargasso Sea
agagcaaataagagcagaagttggaatggtatttcaacaatttaatttatttccacatctatcaatattagataattgcacattggctccaatttgggttaagaaaatgcccaaaagaaaagctgaagatttagcaattaaacaactaaaacaagttcaaattgaagatcaagcaagtaaatttcctggacaattatctggaggtcagcaacagaggtgtgcaattgcaagagcattgtgtatggagcctaaaattatgctttttgatgaacctacttcagccttagatccagaaatgataaaggaagttcttgatgcaatggttaatttagccaaggcaggaatgacaatgattgttgtaactcatgaaatgggttttgcaaaagaagttgctgatgaggtaatttttatggacgaaggcatgatcattgaaaaagctgaaactaaagagttttttgcaaatcctaagagcgatagaacaaagctttttttaagccaaattctataaa

SEQ ID NO: 271241 - DNA, 903 bp, Unknown
  Bacterial polypeptide expressing nucleotide sequence isolated from the Sargasso Sea
aagaaaaagaagatgagtttctcgtattagttgggccatcaggatgtggaaaatcaactcttctaagaatgattgcaggattagaaaaaatagatgaaggtgaaatttttattaatgataaaaaaattaacgaacttcatccttcaaaacgtcaaacagcgatggtttttcaatcttatgctctttatcctcatatgaacgtttatgaaaatatgtcttttggtttaaaaattgaaaaaagacctaaagaagaaattaattctaaagttatgcaagctgcaaaaattttaaaaattgaggatcttttagagagaaaaccaaaacaattatctggaggtcaaagacaacgtgttgctattgggagagctattacaagaaatccaaaaatatttttgtttgatgaacctttatctaacctagatgcagcacttagagcagaaatgagagttgaaatatctaaattacacaatcaaatcaaaacaaatatgatttatgtaactcacgatcaagtggaagctatgacactagccgacagaatagttattttaaatcaaggaaatattgaacaggttggtacccctgaggatatatatgatgatccagcaaatatttttgttgctcaatttattggtacaccaaaaatgaatattttagatgtgaatgaagaaaatattgtttcagaaaatacaattaaattattaggtaatgatatccagtttaataaattaaaattaaataaatctaaacattttatgggtattaggcccgagcatttaaaagcaaatcaaaatactcaatttaccttcaatcctgaaatagaattaatcgaaaaccttggtaatgaaaaaattgtacatatgaaaaaaggtgaacattcaattgagtgcaaaaattccaagtaac

SEQ ID NO: 271242 - DNA, 715 bp, Unknown
  Bacterial polypeptide expressing nucleotide sequence isolated from the Sargasso Sea
atgtcaaaaaataacgcatttgtaaaattcgataaagttgacaaaagctatgacggaaaagttttagtcgttaaagatcttaatttagatatagcagaaggcgagtttataactatgcttggaccatcaggttcaggaaaaactacatgtttaatgatgttggctggtttcgaaacaccaacaaatggagaaatatatttagataacaatccaatatcaaatattccacctcataaaagaggaattggaatggtatttcaaaactatgctttgtttcctcacatgacagtttatgaaaatttagcctttcctttaagagtaagaaaaatatcaaaagaagatatagacaaaaaagttgataaagctctttcaatggtttccctatcaggatttgaaagtagaatgccagcacaattatctggaggacaacaacagagagttgctgttgctagagccttagtttttgatccaacggttgttttgatggatgaaccacttggagcattagataaaaatttaagagaaagtatgcaatatgaaattaaacatattcatgaaagcatcggtgtaacagtagtttatgtaactcatgatcaaggagaagctttaactatgtcaaatagaattgcagtatttaatgatggtaaagttcaacaattatctagcccagataaattatatgaagaacctgttaattcatttgttgcagaattta

SEQ ID NO: 271243 - DNA, 832 bp, Unknown
  Bacterial polypeptide expressing nucleotide sequence isolated from the Sargasso Sea
atgtctcaaaatgatagtttcgtaaaattcgagaaggtagataaaagttacgatggtgaaatactggtcgttaaagatttaaatcttgatgttccaaaaggtgagtttctaactatgttaggaccatctggatcaggtaagacaacagtgttaatgatgttagctggatttgaaaccccaacaagtggagaaatttatttggatggaaatccaataagtagtattccacctaacaaaagaggaataggcatggtctttcaaaattacgctttatttcctcacatgactgtaaaagaaaacttagcatttccacttgaagttagaaagatgcaaaaatctgaaatcgatgaaaaagttggaaacgcacttgcaatggttgaattacaagattttggaaatcgaatgcctttacaattatctggaggacaacaacaacgtgtcgcattagcaagatctttagtgtttgaaccaagattagttttaatggacgagccacttggagcacttgataaaaatttaagggagcaaatgcagtatgaaataaaacatattcatgaaaaaattggaataacagtagtttatgtaacccatgatcaaagtgaagctttaacaatgtcaaatcgaattgcagtatttaatgatggaaaaattcagcaaatttcttctccggatattttgtatgaaaaaccaaatagttcttttgttgcacaatttattggagagaataatcaactaaaagggaaagttaaatcaattaacggagaaaattgtatcgttacaaaagaatctggagatgatattcatgctttaaaaataaatggaataataacgg

SEQ ID NO: 271244 - DNA, 703 bp, Unknown
  Bacterial polypeptide expressing nucleotide sequence isolated from the Sargasso Sea
taaagaagttacaacagtagatccagctaatagaggagttggaatggtatttcaaaattatgccttatatcctcatatgactgttgaagaaaatatgagttttggattgagaatgaataatgctcctaagactaaaattaataaaaaggtcggagaagctgcaaaaatccttcaattaactgaattaatgaagagaaaaccggcatctctatctggtggacaacgacaacgagtggcaataggacgagcaatagttaaaggatccaaagtatttctgttcgacgaaccactttccaatttagatgcagagttaagagtagagatgagaattgaattaactagattacataaagaattgggtgcgactataatttatgtaacacatgaccaaacagaagctatgaccatggctgataaaatagtggtgttacgagatggatgcgttgaacaaattggtaaaccattagaactttatgcaaatccagataataaatttgtagcagggttcttaggatcaccaagtatgaattttttggaggctaaatttgacggaaaagatctaaaaataccctctttagaaaacttaaagatcaagaaatttccaaaattaagtaaagaaaacttaaaagtaaccataggtgtgagaccacaagatgtactatttaaaagatctactaaaggtaaaaaagatagaatttgttga

SEQ ID NO: 271245 - DNA, 900 bp, Unknown
  Bacterial polypeptide expressing nucleotide sequence isolated from the Sargasso Sea
tttcgtaaatttgaaaaaatagataaaagctatgatggagaggtattagtagtcagaaatttaaacttagatattgccaaaggtgaatttgtaactatgttaggtccttccggatctggcaaaactaccacccttatgatgttagctggttttgaaactccaacaaatggtgaaattttcttagatacaaaaccaattagtaagatacctccttatgagagagaaattggaatggtttttcaaaattatgctttattccctcatatgacagtttcagaaaatttatcatttccacttgaagttagaaagatttctaaagctgatacaaaagacaaagttcaaaaagctcttgatatggttgagcttggaatgtttggctcaagatttccagcgcaattatctggtggtcagcaacaaagagtagctcttgcaagagctcttgtttttgagccacgtcttgtattaatggatgaacctcttggagcacttgataaaaatttacgtgaacaaatgcaatatgagattaaacatattcatgaccgcattggtattacagtagtttatgttacacacgatcaaagcgaagcattgacaatgtcaaataggatagcagtatttaatgatggagtggttcaacaattatccactccagatattttatatgaaaaaccagaaaattcatttgtagcgaaattcattggagaaaataatactcttaatggggttgttaaagaggttaacgggagtacttgcatagttgatcttgataatggtcatgggacagttaaggccttaaaagttaatataaatggtgctggtgataaaactcaactttcaatcaggccagagagggtgactattgatagtagtaatccagatgcaaataatttttcaggaaaa

SEQ ID NO: 271246 - DNA, 698 bp, Unknown
  Bacterial polypeptide expressing nucleotide sequence isolated from the Sargasso Sea
catgtcgtttctcaagctcacggacgtgaccaagttctatggcagcacctgcgcggtgcaggccatgaacctcacggtgcaaaagggtgaatttgtgtcgctgctgggcccctcgggctgcggcaagacgaccacgctgcagatggtggcggggttcgaggccgtgaccagcgggcgcatcgaactggacggaaaggacatcacccacgccaaggccaacacgcgtgggctgggtatcgtgttccagagctatgcgctgttcccgcacatgacggtggcggccaacgtgagctttgggctggaaatgcgcaaagtgcccaaggccgagcgtgccgagcgcgtggcccaggcgctggccttggtgcacctggagaaacacgccgcgcgctacccccgcgagctgtccggcggccagcgccagcgggtggcactggcccgtgcgctggtgattgagccgcccgtgctgctgttggacgagcccttgtccaacctcgacgccaagctgcgcgaggagatgcaatttgagctgcggcagatccagcgcaaggtgggcaccaccaccatcatggtcacgcacgaccagagcgaggccatgtccatcagcgaccgcgtggtggtgatggaggccggccgagccacacaaatcgaccacccgcaccgcgtgtacgagcacccgcgtacgcgcttcatctccacct

SEQ ID NO: 271247 - DNA, 547 bp, Unknown
  Bacterial polypeptide expressing nucleotide sequence isolated from the Sargasso Sea
atggccggatcgcagaatggaatcgatcatcgcgtttcgctgttgtcgcagtcccaggccaccgttgccgtccgtgacctatggcatcgctacgacggccctgggggaccctggacgctgcggggcatcgatctggagctcgcagcgggtgagctggttggactgcttgggccttccggctgcgggaaaaccaccctgttgcgactgattgccggctttgagcgcccctcgcaggggtcggtgcacctgcagcagcgccccgtggcggggaacggccattggctgccgcctgagcggcgcgggatcggcatggtctttcaggactacgccctgttcccccatctcacggcgtggcagaacgcttgcttcggtctgcgtcctggtcaggacgacagccgtgcggcctggttgctggagttgctaggtctgcaggggctggagctgcgctatccgcatcagctctccggtggacagaagcaacgccttgccctagcccgagctctggcaccagcccccaagctggtgctgctggatgagcccttctccc

SEQ ID NO: 271248 - DNA, 822 bp, Unknown
  Bacterial polypeptide expressing nucleotide sequence isolated from the Sargasso Sea
ttgtacttttgaagcaggaacactgactacattactaggtccttctggatgcggaaaaactacttctttaagaattattgctggtctagaaagagctactagtggcagaattttagtagaaaatgaagatgtaacgttattaccagcaacagatagagatgtatctatggtatttcaatcttatgctttgttcccacatatgagtgtgcttgaaaatgtatcgtatggtttaaagatgataaatgttccaaaagaagaatttacagaaaagtctttagaaactcttaagttagttaatctagaaggttatgaaaataggatgccctctgagctatctggaggtcagcaacaaagagtagctgttgcaagagcaattgtgctgaaacctaaggttctactttttgacgagcctttatctaatttagatgcaaaattaagaagacaagtaagagaggatattagagaaattcaacaaaaacttggagtaactacaatttatgtaactcatgatcaagaggaagcattagcaatttctgacaaagtaattgtaatgaacaatgctattattgctcaacaaggtagcccaaaagaattgtataactttcctaaaactaaatttgtagccaacttcataggagacgcaaatgttgttaaagctgaaatcattaatcaaaataataatatttacgagattcaattagcagaaatgaaaattaatatagaaagtgatcaaaaattagaaagttcagtttctgtctctttaagaccagaaaaaataactatttcaaaaagtcctgaagaaaactcaatacatgcatctgt

SEQ ID NO: 271249 - DNA, 712 bp, Unknown
  Bacterial polypeptide expressing nucleotide sequence isolated from the Sargasso Sea
atggcaagtccagatagttttgttaaatttgataaagttgataagagctacgacggtgaggtgcttgtagtaaaagatctcaatttggatattccaaaaggtgaatttcttacaatgcttggaccttctggttcaggaaaaactacaacattgatgatgttagctggctttgaaactcctacgggcggagaaatatttttagaaggcgaggctataaataaaattcctcctaacaaaagaggaataggaatggtgtttcaaaactacgcattatttccacatttgacagtaaatgagaatcttgcttttccacttgaagttagaaaattaaacaaatcagaaattgaagaaaaagtaaaaaaaactttggatatggtggagttaggagagtttggaaatcgtatgccgctacaattgtcaggcggccaacagcaacgtgttgctttagcaagatctttggtttttgaaccaagattagtattaatggacgaacctctgggtgctttggacaaaaagcttcgagaacaaatgcaatatgaaattaaacatattcatgagagaattggaattacagttgtttatgttactcacgatcaagctgaagcacttacgatgtcaaatcgtattgccgtatttaatgacggaaaaattcaacagatatcatcaccagatgttttgtatgaaaaacccgaaaatgcatttgttgcaaact

SEQ ID NO: 271250 - DNA, 873 bp, Unknown
  Bacterial polypeptide expressing nucleotide sequence isolated from the Sargasso Sea
aatgtctgaactttcactagaggaacttacgaaggtttatccgaatggctttaaagcggtagatggcttaagcgtcgatatagctgacggggagtttctggtgctagtgggaccttcgggttgtggaaaatcaaccgctcttaggatggttgcgggattagaagaaatcacttcaggagagctctcaatcggtggagaatcaatgaatgaagtcgaacctaaagatcgcaatgttgcaatggttttccaaaattatgctctatacccacatctggatgtcgaaaaaaatattggctttgcactgaaactatctgggctgccaaagcctgagattgacgccaaagtactagaagccgcaacaattctcgaacttgaacctctgctgaagaataaacctgctcaactgtccggaggtcaaagacaaagggttgccatgggtcgagctatagttcgcgacccttcagtttttttgatggatgagcctctatcgaaccttgatgcgaaattacgagttcagatgcgtgctgagataacacgtctgcaacataagttagaagcgaccacactgtatgtaacccatgatcaggttgaagcgatgacgatgggtgacagagtagctgtaatgaaagacggcgttcttcaacagattgacagcccctcatctctctacgactcaccgaataacctcttcgtggccggatttataggcgctccggcgatgaatcttagagaagcaaaacttgacaatgccgcaggtgaatggtctttgaaggtaggtggaatcaaaataccgctagctagaggtattctcgaaaagagacggtccctagccggatacgaagggaaaaatattgtggttggcatccgccctga

SEQ ID NO: 271251 - DNA, 826 bp, Unknown
  Bacterial polypeptide expressing nucleotide sequence isolated from the Sargasso Sea
aaaggtggtcaaattatatttaatgatgaggatgtaagtaaattgcatattgaaaaaagaaatgtgggaatggtttttcaatcctatgcactattcccgaatatgaacgttaaagaaaatataggttatgggctaaaagtcaggcaattagataaagatcaaattgaaaaacgtgtatctgaaatgttaaatatgatgcatattactgatttatcatttaggaatatagatcaactttccggagggcaaagacagagagtagcattagctagagctattgcagttaggccaagagtccttttgctagacgaaccactgacagccttagatgcaattttgagagataggctaagagttgaaatagattttctccttagaagtcttggcataacagctatatatgttacgcatgaccaatctgaagcaatggcacttggagatcgaatagttgtcatgagtgatggacaaatatcacaggtaggtactccaagaaatatatattttaatccagcaaatgaatttgttgctgattttattgggaccatgaatcgtattaatgcaaacaatttaaaaaactttaattcctttaaggggaaagaactactttttagaccggatgacatagatatagttgaaaagaaaaattgccatttcactgggatagtaaaagcttcttttttccttggtgaaaagactcgcttggtagtaaatcttaattcaaaagaggaaattacagttgaaggaaaatttaaggatgaatataaaataggttcagaaatttgcctacgtataaattctgattcattaattaatttgtcaaaatagc

SEQ ID NO: 271252 - DNA, 736 bp, Unknown
  Bacterial polypeptide expressing nucleotide sequence isolated from the Sargasso Sea
atgtctgatccaataattaaaatagaaggtatgaataaatggtttggtgattttcaggttttaaaagatattgatttatcagttgaaaaaaataaaaaaattgttgtttgtggaccttcgggatctggaaaatcaactcttataagatgcatcaatagattagaagagcatcaaaagggtacaatcatagttgacggaactgaacttacagaaaatacaaaaaatattgaagcaataagagcagaagtcggcatggtatttcaacaatttaatttatttccacacctatctattttagataactgcacattagcaccgatatgggtaaaaaaaatgcctaaaaaagatgcagaagaacttgcaatgaaacagttagagcaagttcaaatagttgaccaagctcaaaaatttcctggacaattatcaggtggacagcaacaaagatgcgcaattgcaagagccttatgtatggagcccaaaattatgttatttgacgaaccaacatcagcacttgatccagaaatgattaaagaagtgcttgatgcaatggtaaatttagcaaaggcaggtatgaccatgatagttgtaactcatgaaatgggctttgctaaagaagttgctgatgaagttatattcatggatgaaggtatgatagttgaaaaagcagaaaccaaggagttttttgctaatccaaaaagtgatagaactaaactgtttttaagtcaaatactataat

SEQ ID NO: 271253 - DNA, 658 bp, Unknown
  Bacterial polypeptide expressing nucleotide sequence isolated from the Sargasso Sea
attgaataaattttttggtaccgttcaagcggtaaaagatttttcaataaatgtaaagcctggtgaatttttagttttactaggaccatccggttgtggaaagacaacagcactaagaatgatggctggactagaagctacgagtagcggccaaatcatcataagtgaagaagatgttacaaacctacaacctaaatatcgtgatattgctatggtttttcagtcatatgctctatatccacacaagacagtagctgaaaatattggtttcccatttaaagttcgaggaattaaaggaaaagaaagagacaatgcagtaaaagaagctgcctcgcaggttcgaatggagcatttacttgatcgttatcctaaacaactttctggtggagaaagacaaagagtggcactagctagggctatagttagacgacctgctgtatttttgatggacgaacctttgtcaaatctagatgcgaaattaagaatatacatgcgtgctgaattaaagcgtatgcagcatgaacttggaattaccactgtttatgttactcatgatcaagtggaagctatgactcttgcacatcgagtggcaattatgaaccagggtgttttgcagcaaattggttctcctagagaagtttatgataagccttctaat

SEQ ID NO: 271254 - DNA, 532 bp, Unknown
  Bacterial polypeptide expressing nucleotide sequence isolated from the Sargasso Sea
atgtcccaaaaagatagtttcgttaagtttgacaatgtagacaaaagttacgacggtgaagttttagttgtaaaaggtttaaatttagatattccacaaggagaatttttaacaatgcttggaccttctggttcaggcaaaactactactttgatgatgttggcgggctttgaaacaccaacaagtggagaaatatatttagagggagagccaataagttcaatcccaccatacaaaagaggaattggaatggtttttcaaaactatgcattatttcctcatatgacagtaaatgaaaatttagcttttccattagaagttagaaaattaccaaaagcagaaattgatgaaaaagtttacaaagcattatcaatggtagaacttcaagattttggaactagaatgccaatgcagttatcaggtgggcaacaacaacgtgtagctttggcaagagccttagtatttgaaccaaggttagttttaatggacgaaccacttggtgcacttgataaaaaacttagagaacaaatgc

SEQ ID NO: 271255 - DNA, 598 bp, Unknown
  Bacterial polypeptide expressing nucleotide sequence isolated from the Sargasso Sea
tatgtccgtaaaaaaagactttgttaaatttgataaagtagacaaaagctatgatggaaaggtcttagttgttaaagaccttcaacttgatattgctgaaggtgaatttattaccatgttaggcccctctggttctggtaaaactacctgtctaatgatgttagcaggttttgagacaccaacgaatggggaaatttatttagacggaaaagcaatttcaagtattcctccacacaaaagaggtattggaatggtttttcaaaattatgcattgtttccacacatgactgtttatgaaaatttagcatttccattgagagttagaaaaattccaaaagatgaagctgataaaaaaattgataaagctttatcaatggtttctttacaaggttttgcgcaacgaatgccgggacagctatcagggggacaacaacagagagtagctgtagcaaggtcattagtatttgatcctcaattagtcttgatggatgaacctcttggtgctttagataaaaatttaagagagagcatgcaatatgaaataaaacatattcatgaaaatataggagtaacagtagtttatgtcactcatgatcaa

SEQ ID NO: 271256 - DNA, 736 bp, Unknown
  Bacterial polypeptide expressing nucleotide sequence isolated from the Sargasso Sea
atgtcagataaaataatacaaatcactgaaatgaataaatggtttggtgatttccaagttttaaaaaatataaacctagaagtagaaaaaaataaaaaaattgtagtgtgtggaccatctggttcaggaaaatcaacattaattagatgcataaacagattagaagagcatcaagagggctcaatcattgtagatggaaatgaattaacagcagatactaaagatatagagaaaattagagctgaagttggaatggtatttcaacaatttaatctttttcctcatctttctattttagataattgtacattggcaccaatttgggtaaaaaaaatgccaaaaaaagatgcagaagatttagctattcaacatttagaaaaagtacaaatttcagatcaagcaaataaatacccaggacaactttctggcggtcaacaacaaagatgtgcaattgctagagcattatgcatggagccaaaaataatgctttttgatgaaccaacgtcagcattagaccctgagatgattaaagaagttttagatgctatggttaatctggcaaaagcaggaatgacaatgattgtagtaacacatgagatgggatttgctaaagaggttgctgatgaagttatttttatggatgaaggtatgatagtagaaaaagctgaaactaaagagttttttgcaaaccctaagagtgacagaactaagctgtttttaagtcaaatactataaa

SEQ ID NO: 271257 - DNA, 691 bp, Unknown
  Bacterial polypeptide expressing nucleotide sequence isolated from the Sargasso Sea
atggctaaagttgaattaaaaaacctaacaaaaaaatatggtgaagttgtagcggttcaaaatatgaatctcacgatcccacataatgagttcttggttttagttggcccttctggctgtggtaaatctactaccttaagaatgattgcaggattagaagaaattacaggaggtgatatatatataggagatcaattagttacggaaaaagatcctaaggacaggaatgtttcaatggtattccaaaattatgcattataccctcatatgacagttgaagaaaatttaggctttagtttaaaaattgctaaagtggaaaagaaagaaattgaagaacgagtcaaaaatgcagtgcaaatacttgggttgcaagaacttcaaaaaagaaaaccgtcacagttatcaggaggtcaaagacaaagagtagcaatgggtagagcaattgtgagaagacctgatgcgtttttatttgatgaacctctttcaaatttagatgcaaaacttagaacgcaaatgagaacagagataaaaaaactacatcaacaattaaaaacaacagtaatttatgtaactcatgatcaggtagaggctatgacattggctgatcgaatcattattatgaaagatggttttattgaacaaataggatctcctgtagaagtatttaataatcctgtaaatgtttttgtgc

SEQ ID NO: 271258 - DNA, 570 bp, Unknown
  Bacterial polypeptide expressing nucleotide sequence isolated from the Sargasso Sea
tatgctctatttcctcacatgacagtttttgaaaatttagcatttccattaaaggtaagaaaaatctctcaattggaaatagaaaaaaaagtagataaagctttatcaatggtttcactcggtggatttgcaaacagaatgccaggtcagttgtctggaggtcaacaacaaagagtagcagttgcaagagcattagttttcgatccatctgttgtattaatggatgagcctttaggtgccttagataaaaatttaagagaaagtatgcagtacgaaattaaacacattcatgaaagtattggtgtaacagtagtttatgtaactcatgaccaaggtgaagctttaactatgtcaaatagaatcgcggtatttaatgatggtaaagttcaacaactatcaagtcctgataagttatatgaagaacctgtgaactcctttgttgcagaatttattggagaaaataatacctttggtggagaggtttctgaaatttcaaatggaacatgtagagtgaaattagaaaagggtgaaataattgctaatccgatttcagtaaaatctgttggtgaa

SEQ ID NO: 271259 - DNA, 654 bp, Unknown
  Bacterial polypeptide expressing nucleotide sequence isolated from the Sargasso Sea
tatggcaaatataaaatttaccggtatccataaatcatttggttctaataaaataattaaagattttaaccttcaaggaaaagaagatgagtttctcgtattagttgggccatcaggatgtggaaaatcaactttattaagaatgattgctggattagaaaaaatagatgaaggtgaaatttttattaatgaacaaaaaataaatgaacttcatccttcaaaacgacaaacagcaatggtatttcaatcttatgctctttatccacatatgaatgtgtatgaaaatatgtcatttggtttgaaaattgaaaaaaggcctaaagaagaaattaatacaaaagtcatgcaggctgcaaaaattcttaaaattgaggaacttctagagaggaaaccaaaacaattatctggaggacaacgacaaagggtggctataggtagagcaattacgaggaatccaaaaatatttctttttgatgaacctctttcaaatttagatgcagcattaagagcagaaatgagagttgaaatttcaaaattacataatcaaatcaaaacaaatatgatatatgtgactcatgatcaagtagaagctatgacattagcagatagaatagttattttaaatcaaggaaatattgaacaagtaggtacccc

SEQ ID NO: 271260 - DNA, 561 bp, Unknown
  Bacterial polypeptide expressing nucleotide sequence isolated from the Sargasso Sea
catggctgaaatagaactcaaaagtatttctaaatcgtttagttcaactgaagttataaagtcacttgacctttcaatttccaatggtgagttcattactattgtcggcccctccggatgtgggaaatctaccctattgagaatcatagcaggtttggaaaatcaatcgacaggagatgttataatagatggtaatgtggtcaataataccaaggcaagcgaacgtgatttagccatggtttttcaatcatatgctctctatcctcatctgacagttcagcaaaacttgatggtacctcttaaactccgacgcctgtctattttagaacgctttccgataattggatggtttatgcccaaccgtcgttctaagttagatgagttgttgagcaaggtccaagctgcatcagaaactcttcaaattacacaccttttggaccgtaaaccaggtcaactttctggcggtcagcagcagagagtagcagtaggaagagcaatggtcagagaacctgtagctttcttgatggatgaaccactttccaatttagacgcaggactgag

SEQ ID NO: 271261 - DNA, 601 bp, Unknown
  Bacterial polypeptide expressing nucleotide sequence isolated from the Sargasso Sea
tatgactgagaaaaaaaataatacttaccttgaagttaataatttatctaaatcttttggtaattttgaagcaataaaaaatataggaataaagattaatgaaggtgagtttgtttgttttcttggaccttctggttgcggtaaaactactttattgcgatgtatagctggattagaaacacaaactacaggatcggttattcaaaaagatattgatatttctaatcaaccgccatctaatagagattttggaattgtctttcagtcttatgctttatttccaaatctttctgttttttcaaatatttcttatggcttaataaataataaatggaaaaaagatgacataaaaaaaagagtggatgagttgcttgacttagttaatcttactgaacatgcatcaaagtatcctagccaattatctggaggagaacaacaacgagtagctttagcaagagcacttgctacctctcctggactattattactggatgaacctctatctgcacttgatgcaaaagtacgagtttttttaagaaaacaaataagagatttacaaagaaaacttggagtgacaactattatggtgactcatgatcaa

SEQ ID NO: 271262 - DNA, 706 bp, Unknown
  Bacterial polypeptide expressing nucleotide sequence isolated from the Sargasso Sea
gatgacgagcaaaggccaaatcgagttaattggattaagcaagagctttgacgccgtcatagcagttgattcgataaatttaacaatccagagtggaacttattgttgcctgcttggcccctctggctgcggaaagtcaactactctaaggttgatcgcaggacatgaaacaccaacatctggggacattttaataagcaacaaaaatgtcactgtccggcctcccgcaaagagaggaacggcaatgatgtttcagaattatgcattatttccacatcttaattgtcttgagaacgtcgcttttagcctaaagatggccggagacaaaaaagcagaacgcaacgagcgggctatggcaatgctatcgttagtagagatgcaagacctaaaaaatcgtttaccttcccaactctctggcgggcagcagcaacgcgttgcactcgccagagccttggtaggaaacccagatgtgcttcttctggacgagccgctttcggctcttgatccatttttacgaaaacaaatgagggccgagctgaagcagttacagaggaaattaaatatttccttcgtccatgtaacgcactcccaagaagaagcgatggcacttgctgatctggtggtagtaatgcgggatggtcatatcgaacaagccgacaagccgagaactgtcttcaaggagccaacaaacgagtttgttgcagag

SEQ ID NO: 271263 - DNA, 490 bp, Unknown
  Bacterial polypeptide expressing nucleotide sequence isolated from the Sargasso Sea
aatgagcaacctatctacagcctacttatcagtaaacgatctatgcaaacattttggagcatttcaggcattaaaaaatatatcgattgaaattaatgaaggagaatttgcctgttttttaggtccttcaggttgtggaaaaacaacgcttcttcgttgtatcgcaggattggaaactcaatcttcgggatccatttctcaaaaagaaattgagatttcatcccttccaccttcagcaagagatttcggtattgtgtttcaatcttatgcacttttcccaaatttaacggtcttctctaacatttcctatggtttgattaataataaatgggggaaggatgaaattaagtccagagtggagcatttactggatctggttggtttgaaatcacatgcaggaaaatatccgagtcaattatctggaggagaacaacaacgtgttgctttagcaagagctttggcaacgtcaccaggattgttatttgcttga

SEQ ID NO: 271264 - DNA, 650 bp, Unknown
  Bacterial polypeptide expressing nucleotide sequence isolated from the Sargasso Sea
tatgaatgatacaaatccaagtttcgtaaaattccaaaaaattgacaaaagctatgatggagaaattttagttgttaaaaatttaaatctcgacattgctaaaggtgaatttgttaccatgctagggccatcaggatcaggaaaaacaacgacactaatgatgttagctggttttgaaactccaacaaatggtgaaatatttctagataatagtccaataagtaaaatacctccttacgaaagagaaataggaatggtctttcaaaactatgcattgtttcctcatatgacagtggcggaaaatttatcttttccactagaagtaagaaaaatttctaaatctgaaactaaggaaaaagtgcaaaaagctctagatatggttgagcttggaaattttggaacaagatttcctgcgcaattatctggaggtcaacaacagagagttgctctcgcaagggctctagtttttgagccaagattggttttaatggatgaacctcttggtgctctagataaaaatttaagagaacaaatgcaatatgaaataaaacatattcacgatagaattggaattacagtagtctacgttacacatgatcaaagtgaagctcttaccatgtcaaataggatcgcagtgtttaatgatggtg

SEQ ID NO: 271265 - DNA, 379 bp, Unknown
  Bacterial polypeptide expressing nucleotide sequence isolated from the Sargasso Sea
gatgacctacctcaaccgtgttcacattcccgagcaggccgccaaatatccggggcagctttcgggcggacaacaacaacgtgtagccattgcccgcagtctctgcatgcagcccaaaatcatgctctttgatgaacccacttcggcgcttgatcctgagatgatcaaagaagtactggatgtaatgattgaactcgctgaggacgggatgaccatgatcgtggtcacgcacgaaatgggcttcgccaaaaaggcagcgaacaaagtggtcttcatggatcagggtgaagtagtggagtccgcgcctacggaacagtttttctcccagcctgacagcgaccggaccaaactctttctctcgcagatcctgacacactga

SEQ ID NO: 271266 - DNA, 648 bp, Unknown
  Bacterial polypeptide expressing nucleotide sequence isolated from the Sargasso Sea
aatgccttttttagaatttgaaaatatagacaaatcctttggtgaaaataacgtaattagtaaatttaacctagaagttgaaaaaggtaaatttatagttttgctaggaccatctggatgcggaaaatctacactactaaggatgatagctggattagaaaaaatagataaggggaaaatctttttagaaaataatcttcttaatgatttgttaccatctaaaaggcaaattgcaatggttttccaatcatatgctttgtatccgcacatgaatgtttttcaaaatatctcttttggccttaaatctgaaaaaatttcaaaaattgaaattaaaaataaagtaattgaagcagcaaaaattttaaaaattgaagaacttttggatagaagaccaaaggaactttcaggaggacagaggcagcgagttgctattggaagagctataactagaaatcctaaattatttttatttgatgaacctctttctaatttagatgcagccctaaggtcagagatgagagttgaaatttcaaaattacataagaaacttaaaagtaatattgtatacgtaactcatgatcaaattgaggctatgactttagctgataaaattgtgataatgaataaaaggaaaattgaacaatttgg

SEQ ID NO: 271267 - DNA, 652 bp, Unknown
  Bacterial polypeptide expressing nucleotide sequence isolated from the Sargasso Sea
aatcaacaagagaaaattgttatatgtggtccttctggatcaggaaaatcaacattgattagatgcattaatagacttgaggaacatcaagaaggagaaattatagtagatggtaaggagatttctgaaaatacaaaagatatagaaaaaatacgtgctgaggttggaatggtatttcaacaattcaatttattcccacatctatcaatcttagataattgcacattagctcctatatgggttaaaaaaatgcctaaaaaacaagctgaagaagttgcaatgaaaaatttagaaagagttcaaattgctgatcaagctaaaaagtttccaggtcaactttctggaggacaacaacaaagatgtgctttagctagagctttatgtatggaacccaaaattatgttatttgatgaaccaacatcagcgcttgatccagaaatgataaaagaagtattggacgctatggttgatttagccaaagctggaatgactatgatagttgtaacacatgaaatgggatttgcgaaagaggtagctgacaatatgatttttatggatgaagggagaatagtagaaaaagcaaaaacaaaagatttttttaacaaccctaaatctgaccgaacaaaactttttttaagtcaaatcttataac

SEQ ID NO: 271268 - DNA, 799 bp, Unknown
  Bacterial polypeptide expressing nucleotide sequence isolated from the Sargasso Sea
tatgtctgaaattatcattgaaaacctaaacaaaaagtatggtaaaaatcacgtcatccaagatgtatctcttaatataaagagccaatcattttccgtttttgtagggccgagtggttgtgggaaatctactattctaagaatgattgcaggacttgaagacataaactctggaacaatttccattgacggaaacattgttaatgatttatctccaaaagacagaaatattgcgatggtgttccagtcttatgctttatacccacatatgacggtatataacaatatggcctttgggttaaagttagagaaactaactaaggatgaaatcgatagcagggtttatgatgctgcaaaaattcttcagatagaagaacttctacaaagaaaaccaaaacaactttcaggtggccaaagacaaagggttgccattggacgtgcaattactagaaaacctaaggtttttctatttgatgaacctttatcaaacctagatgccgcattgagagttcaaatgagagttgaattagcaaaattacatgatcaattagatgcaacaatgatatatgtgacccatgatcaaacagaagccatgaccatggctgataaaattgttgtgttagatcaaggtaaaatatcccaatccggaagcccaatggatttataccataatccaaaaaatttatttgttggagggtttattggctctcctaaaatgaattttataaaaacaaaagtattaaaaaagagcagcaaaagcattagcatagatttgcttggtcaaaaagcctttcattaa

SEQ ID NO: 271269 - DNA, 357 bp, Unknown
  Bacterial polypeptide expressing nucleotide sequence isolated from the Sargasso Sea
tggggctctccgcccatgccgataaatacccgccccagctctccggcggtcaacagcagcgcgtggctatcgcccgtgcgctctgtatggatccgattgcgatgctgtttgacgaaccgacttccgcgctggatccggaaatgatcaacgaagtgctggatgtcatggtcgaactggccaacgaaggcatgacgatgatggtggtgacgcacgaaatgggctttgcccggaaggtcgccaaccgggtgatctttatggatgaagggaaaattgtcgaagactctgacaaagaagcctttttcgccaatccgcaatccgatcgcgcaaaagacttcctcgccaaaattctgcattaac

SEQ ID NO: 271270 - DNA, 646 bp, Unknown
  Bacterial polypeptide expressing nucleotide sequence isolated from the Sargasso Sea
atggctaccctcgaactgcgcaacgtcaacaaatcctacggcagcggcctggcggacaccctgaagaacatcgaactggccatcgactccggcgagttcctgatcctggtcggcccctccggctgcggcaaatccaccctgatgaactgcatcgccggcctggaaagcatcagcggcggggcgatcctggtcgacggcgccgacatcagcggcatgagcccgaaggatcgcgacatcgccatggtgttccagtcctacgcgctgtacccgaccatgacggtgaaggacaacatcgccttcggtttgaagatgcgcaagctgccgccggccgagatcgaggccgaggtggcgcgggtggccaagctgctgcagatcgagcatctgctggcgcgcaagccgggccagctctccggcggccagcagcagcgcgtggccatgggccgggcgctggcgcggcggccgaagatctacctgttcgacgaaccgctgtcgaacctcgatgccaagctgcgcgtggagatgcgtaccgaaatcaagctgatgcaccagcgtctgaagaccaccacggtgtacgtcacccacgaccagatcgaggccatgaccctgggtgacaaggtggcggtgatgaaggacggcatcattcagc

SEQ ID NO: 271271 - DNA, 618 bp, Unknown
  Bacterial polypeptide expressing nucleotide sequence isolated from the Sargasso Sea
caggtaaatcaactatgattagatgcattaatagattagaagctcatcaaaaaggacatattgttgttcatggtacagaacttacaaatgacttaaaaaatatagatatgataagaaaaaatgttggaatggtatttcaacaatttaatttattcccacatctatctgtcatagataatatatctctcgctccaatttgggtaaaaaaaatgccaaaaaaagaagcagaagatatagctatgtcatatttagaaaaagtgaaaatccctgaacaggctcagaaatttcccggacagttgtctgggggtcaacaacaacgagttgctatagcaagatctcttgctatgaacccagatataatgttatttgatgaaccaacatctgctcttgatcctgaaatgatcaaggaagttttagatgtgatgattcaattagctgaagagggaatgaccatgttagttgttactcatgagatgggttttgcaaaaactgtagctgatcaaatgatttttatggatgaaggaaagattgtcgaacaagcaacaccagatgagttttttaataatcctaaaagtgatcgtactaaactattcttaagtcaaatacttaatcattaaa

SEQ ID NO: 271272 - DNA, 707 bp, Unknown
  Bacterial polypeptide expressing nucleotide sequence isolated from the Sargasso Sea
tatgtctgattcaatcatcaaaatagaaagtatgaataaatggtttggtgattttcaagttttaaaagatattaatttagaagtagaaaaaaataaaaaaattgttgtttgtggaccctctggctctggcaaatcaaccctaattagatgtattaatagattagaagaacatcaaaaaggaacaattatagttgatggaactgagcttactgagaatacaaaaaacattgaagctataagagcagaagttggtatggtatttcaacaatttaatttatttccgcatttatctattctagataattgcacattagctccaatatgggttaagaaaatgcctaaaaaaaatgctgaagaattagccatgaaacaattagaacaagttcaaattgctgatcaagcacaaaaatttccaggtcaattatcaggaggacaacagcagagatgtgcaattgcaagagctttatgcatggaacctaaaataatgctatttgatgaaccaacttcggccttagaccctgagatgatcaaagaagttctagatgcaatggtaaatttagcaaaagctggtatgacaatgatagtagtaactcatgaaatgggctttgctaaagaggtagcggatgaagtcatatttatggacgaaggaatgatagtagaaaaagcagaaacaaaggagttttttgctaatcccaaaagtgatagaa

SEQ ID NO: 271273 - DNA, 942 bp, Unknown
  Bacterial polypeptide expressing nucleotide sequence isolated from the Sargasso Sea
tacataaatccatttggatataataagataattgcagactttaatcttttaggtatagaggatgaatttcttgttttagtaggaccatcaggatgtggaaaatcaactttattaagaatgatcgctggattagaaaaaatagatgatggtgaaatttttattaatgatcaaaaaataaatgaacttcatccttcaaaacgacaaacagcaatggtatttcaatcttatgctctttatcctcatatgaatgtatatgaaaacatgtccttcggcttgaaaatagaaaaaagacccaaggaagagataaaccaaaaagtaatgcaagctgcaaaaattcttaaaattgaggaacttttagagaggaagccaaaacaattatctggaggacaacgacaaagggtggctataggaagagctattacgaggaatccaaaaatatttctttttgatgaacctctttcaaatttagatgcagcattaagagcagaaatgagagttgaaatttcaaaattacataatcaaattaaaactaacatgatttatgttactcatgatcaagtagaagctatgacattagcagatagaatagttattttaaatcaaggaaatattgaacaagtaggtaccccagaagagatttataatgacccagctaatatttttgtagctcaatttataggtacacctaagatgaatatattggaaattaatgaaatagatgtgatttctgataattcaatcaagttattaggtaatgagacagtttttgatagtttaaaattaaaaaaatctaaacattttgtgggtataagacctgaacatttgaaagcaaatcaaaaaactcaatttacttttaatcctgaaattgaattgattgaaaatttagggaatgaaaaaattgcttacatgaaaaaagatcattatcaattaagcgcaaaaatt

SEQ ID NO: 271274 - DNA, 876 bp, Unknown
  Bacterial polypeptide expressing nucleotide sequence isolated from the Sargasso Sea
acgttacatggaaagaaccaaaagataggcatataggaatggtatcccaatcctatgcattatatccaagtatgacggttgagaaaaatttatcatttggactaagaatgatgaatacgccaaagaatataattaatgaaaaaattgataaagcggcaaatctcctacaaataaatgaattacttaaaagaaaaccttctcaactctctggaggtcaaaggcaacgtgttgctattggtagagctttagttagagatgcaaaagtttttttatttgatgaacctttaagtaaccttgatgcaaaattaagagctgaactacgctatgaaattaaaaaacttcatagagatttatcaaatacaatgatttatgttactcatgatcagatagaagctatgactcttgctgatcgtatatcagtgatgaaagatggattaatacaacaattagatactcctaagcaaatttataacaaacctgccaatttatttgttgctggttttattggatctcctagtatgaattttttaaaagccagctatgataaatcaaataaaaaaataattgttggcaaaaagcaaattgatatttctaaatatgaaaatataaataatttgatgaatgatcaaggggttgtctttggaattagacctgaaaacataaatatagaaaaaaatgaaaattctatgcaatgtaaagttgaattagtggaacccatgggagcagatactcttgtttggactagtgttgagggtaatccaatatctattagacttgaaggaagctcaaattttaatttaaatgatgaaataagtatctcttttgatataaataaatcttcaatatttgatagtaaatctgaggagagaatttaat

SEQ ID NO: 271275 - DNA, 796 bp, Unknown
  Bacterial polypeptide expressing nucleotide sequence isolated from the Sargasso Sea
atggcggaagtagaagttcgtttagtttcaaaacgatatgatgaagtatgggcagtgaggcaaattagcttcattgtctctgctggaagtttcactagtattcttggaccaagtggttgcggtaagacaaccactttacgtttgatagctggattttcctccccagatgaaggtcaggtgtttctagacggtgaaaacatagatgacctccccccatggcagcgtaatcttggtgtggtatttcagaactacgccttgtttccattcatgaatgttcaagacaacgtagcatttggattacgtcgcaggaggttaaataacaccgaaatttcaaaccgtgttgaaaaggcactggatttggttggtcttccagacctcgaaaggcgttatccaagacagctttccggcgggcaacaacaacgagttgcattggctcgtgctttggtcatccagccaaaagttttattgcttgacgagccactttcgaatcttgatgctaagctacgctctgaaatgaggtttgagcttaaaagaattcaacgagaaactggtgttacatcaattttcgttactcatgatcaagaagaagcacttacattatcggaccagattgtggttatgaataatggtgaaattgaaatactaggagccccaaaggttatctgggaagacccaagaagtgcatttgttgcaaattttttgggagttgagaacttaatacccgcacatatctctgaattagttacccaaggtgcttacgcaattgttgaagggtatgatgaaccctataattata

SEQ ID NO: 271276 - DNA, 625 bp, Unknown
  Bacterial polypeptide expressing nucleotide sequence isolated from the Sargasso Sea
tggaccttctggatctggaaagtcaactctaattatatgtattaatagattagaagaacatcaaaaaggaacaatcgtagttgatggaactgaacttactgagaatacgaaaaatattgaagctataagggcagaagttggaatggtatttcaacaatttaatttatttccacatttgtcaattttagacaattgtactttagctcctatatgggtaaaaaaaatgccaaagaagcaggcagaggaacttgcaatgaaacaattagaacaagtccaaattgttgaccaggctcaaaaatttccaggacaattatctggaggacagcaacaaagatgtgcaattgcaagagctttatgtatggagcctaaaataatgttatttgatgaaccaacatcggcactagatcctgaaatgattaaagaagtacttgatgcaatggtaaatttagcaaaagcaggaatgacaatgattgttgtaactcatgaaatgggctttgccaaagaagttgctgatgaagttatatttatggacgaaggaatgataatagaaaaagccgaaactaaagagttttttgtcaatccaaaaagcgacagaactaaactatttttaagtcaaatactataa

SEQ ID NO: 271277 - DNA, 820 bp, Unknown
  Bacterial polypeptide expressing nucleotide sequence isolated from the Sargasso Sea
atgaaatgtcttgaaacaaaaaatttagacgtcgcttacggcaaaaaacagattattttcggttttgattttgaactagatgaatgtcagatcggttgtttactggggccaagtggttgcggcaagacaacagtgctgcggagtatcgctggttttgaacaaccttctaagggtgaaatcatcctgaacgggaaaaaattaaatggaattaaaacatatgtcgcccctgagaagaggaatattggaatggtattccaggacattgcattgtttcctcacctttcagttgaagaaaatatccaattcggtatgcgttcttggtcccgagaaaagagggaaaaacgaagtcaggaactattggatttgattggaatgttgcaatttatgaaaaaataccctcatcaactgtctggaggtcagcaacagaggattgcattggctcgtgcattggcacctaagccttcattgcttctcatggatgaacctttctcgagtcttgatgtagaattaagagagcagcttgctagagaagtaagattgattttgaaacacgaaaatatatctgctcttttggttacgcatgatcaaaacgaagcgtttgctatgggagattatatctgtgtactacaacaaggtagagttcaacaaaccgattctgcttataatctttatcacaaccccaaaaatcgttttgtagcagaatttattggagaaggatcaattttttcagggattgtagtttctaaaaataagattgaaacggctttaggtataattgaaggtattttacctgaatccgttaaattgatggcggatgtag

SEQ ID NO: 271278 - DNA, 736 bp, Unknown
  Bacterial polypeptide expressing nucleotide sequence isolated from the Sargasso Sea
aatgtcagataaaataatacagatttcagaaatgaataagtggtttggtgattttcaagtattaaaaaatattaatttagaagtcgaaaagaataaaaaaattgttgtttgtggaccttcagggtcaggaaaatcaactctaattagatgtataaatagattagaggaacatcaaaaaggttcaataattgtagatggaaatgaattaactgaagatactaaagatatagaaaaaattagagctgaagtaggtatggtatttcaacaatttaacttatttcctcatctttctattttagacaattgtacgcttgctccaatttgggtgaaaaaaatgccaaaaaaagatgccgaagaattggcgatacaacatttagagaaagtgcaaattgcagaccaagctaacaaatatcctggacaattatctggtggccaacaacagagatgtgcaatagcaagagctttgtgtatggaaccaaaaattatgttatttgacgaaccaacatcagcgttagaccctgagatgatcaaagaagttttggatgcaatggttaatttagcaaaagcaggaatgacaatgatagtagtaactcatgagatgggatttgctaaagaagttgcagatgaggttatttttatggatgaaggaatgattgttgaaagagcagaaactaaggagttttttgctaatcctaagagtgataggacaaagctatttttaagtcagatcctataa

SEQ ID NO: 271279 - DNA, 562 bp, Unknown
  Bacterial polypeptide expressing nucleotide sequence isolated from the Sargasso Sea
tatgagtgctgatgtagaattacaaaatgtttctgtaacctttggtagtttttatgctgctaaaaatgttagtgtaaaaattaaagaaggagaattttttagtttccttggtccttctggttgtggtaagactactttgttacgtgcaatctctggttttcttgatccatctgaaggaaaagtactaataggcggtcaagatatggccggtataggacccaacaaaagacctacatcattaatatttcaaaacctagctctctttccccttatgtctgttgctgataatatagctttttcacttgaagttagaggtgttaacaaaataaaaagaagagaaagagcagatgagttattagagttgatcgctttatctggtcaaggggataaaaaagttcatgaattatcaggaggccaaagacagagagttgctatagcaagagctttggcaatagaacctgaagtattgcttcttgacgaacctttatctgcattagatttaaagttacgtcaaaaaatgagaactgaactcagagcaatttcaaaaaagagttggaaataa

SEQ ID NO: 271280 - DNA, 516 bp, Unknown
  Bacterial polypeptide expressing nucleotide sequence isolated from the Sargasso Sea
aaaatattgaacagattagagctgaagtaggaatggtttttcaacaatttaatttatttccacatttatcaatattagataattgtactttagctcctatttgggtaaaaaaaatgcctaaaaaagatgctgaagaattagctctaaaacatttagaaagagtgcaaattttagatcaagcttataaatttcctggtcaactttcaggcggtcaacagcaaagggttgcaattgctcgtgcactttgtatggaacctaaaataatgctttttgatgaaccaacatctgctttagatcctgaaatgattaaagaagtgctagatgttatggtaaatcttgcaaaacaaggaatgacaatgattgtggtaacgcatgaaatgggctttgcaaaagaagttgctgatagtatgatttttatggatgagggaaagatagtagaaaaggctgatactaaagaattttttgccaatcctaagagtgatagaaccaaattattcctcagtcaaatactgtaaa

SEQ ID NO: 271281 - DNA, 511 bp, Unknown
  Bacterial polypeptide expressing nucleotide sequence isolated from the Sargasso Sea
atgtcagatactataattaaaatggaacaagtaaacaagtggtttggggattttcaagttttaaaagatataaatcttgaagttggtttaaaacaaaaaattgttgtttgcggaccatctggatcaggcaaatctactttgataagatgcattaatagacttgaagaacatcaaaaaggaaaaattattgtagatggtaacgagttatcagaaaaaactaaagatatagaaaaaattagagctgaagttggtatggtgtttcagcaatttaatttatttcctcacttatcaattttagacaattgtactttagctcctatttgggtgaaaaaaactcctaagaaaaaagctgaagaatttgcaatgcaacaattggaacaagttcagataagcgaccaagctagaaaatttcctggtcaactatcaggagggcaacaacaaagagcagctcttgctagagctttatgtatggaaccaaaaattatgctttttgatgaacctacatctgcat

SEQ ID NO: 271282 - DNA, 736 bp, Unknown
  Bacterial polypeptide expressing nucleotide sequence isolated from the Sargasso Sea
aatgtctgaaagtataattcaaattaacaacatgaacaaatggtttggagattttcaagttttgaaaagtattaatttagaagttaaaccaaaagaaaaaattgttgtttgtggtccatctggatcaggtaagtctactttaatcagatgcattaacagattagaggaacaccaagaaggtaatataatagtcgacggcacagaattaactgaagatacaaaaaacatagaacaaattagagcggaagtgggtatggtttttcaacaatttaatttatttcctcatttatctattttagacaattgtacattagctcctatatgggttaaaaagatgccaaagaaagaagctgaagaattagctttgaaacatttagaaagagttcaaatacttgatcaagcacaaaaatacccaggtcaattatctggaggacagcaacaaagatgtgctattgctcgggctttatgcatggagccaaaaattatgctttttgatgaaccaacttcagcactagatccagaaatgatcaaagaagttcttgatgttatggttaatttagcaaaacaaggaatgacaatgatagttgttacccatgaaatgggttttgcaaaagaggttgcagatcaaatgatatttatggatgaaggaatgatagttgagaaggctgataccaaagagttttttgctaatccaaagagcgataggacaaaactttttttaagtcagatactatag

SEQ ID NO: 271283 - DNA, 572 bp, Unknown
  Bacterial polypeptide expressing nucleotide sequence isolated from the Sargasso Sea
agagcatcaagaaggtaacatcattatcgatggtactgaaatttcagaagatactaaaaatattgaacaagtaagagctgaagttggtatggtttttcaacaatttaatttatttccgcatttatctattctagacaattgcactcttgcacctatttgggttaaaaaattacctaagaaagaagctgaagaattagcattaaaacatttagaaagggtgcaaatattagaccaagctcaaaaatttccaggccaactttctggcggtcaacagcaacgtgttgcaatagcaagagctttgtgtatggagccaaaaattatgttatttgatgagccaacatcagcactagaccccgaaatgattaaagaagttctagacgttatggtaaatttagcaaatcaaggtatgacaatgattgttgttacacatgaaatgggatttgctaaggaagtggcagacagtatgatctttatggatgaaggtaaaatagtagaaaaagccgataccaaggagttttttgctaatcctaaaaatgagagaactaagctatttttaagtcaaattttataaa

SEQ ID NO: 271284 - DNA, 496 bp, Unknown
  Bacterial polypeptide expressing nucleotide sequence isolated from the Sargasso Sea
atgtcagatcccattatacaaattaataatatgaataaatggtttggagatttccaagtcctaaaagatattaatcttgatgttgaaaaaaataaaaaaattgtagtttgtggtccttcaggctctggtaaatcaactttaattagatgtattaatagacttgaagaacatcaaaaaggctcaatcatagtagatggaacagaattaactgaagatacaaaaaatattgaacaaattagagctgaagttggaatggtttttcagcaatttaatttattcccacatttatcaatattagataattgtacacttgctccaatatgggtaaaaaaaatgccaaaaaaacaggctgaagaattagctctaaaacaattgaaacaagttcaaatcgatgatcaggcacataaatatccaggccaattgtcaggtggtcaacaacaaagatgtgcaattgcaagagctttatgtatggaacctaaaaattatgctctttgac

SEQ ID NO: 271285 - DNA, 661 bp, Unknown
  Bacterial polypeptide expressing nucleotide sequence isolated from the Sargasso Sea
aatggctgatcctattatacaaattaaaaatatgaacaaatggtttggagaatttcaagttttaaaagatataaatcttgatgtcgaagcaaataaaaaaattgttgtttgtgggccatcaggatctggtaaatctacattgataaggtgtataaacagattagaagaacaccaaaaaggttcaatagtagtagatggtacagaattatcagaggaaacaaaaaatattgaacaaataagagctgaagttggaatggtatttcagcagtttaatttatttccacatttatctatattagacaattgtacattggctccaatttgggtaaaaaaaatgcccaaaaaagatgctgaagagttagcacttaaacaattaaaacaagttcaaattgaggatcaagcaaataaatatcctggacaactgtccggtggacaacagcaaagatgcgcaatagcaagagctttatgtatggaaccaaagataatgctttttgatgaacctacttcagctcttgatcctgaaatgattaaggaagtgcttgatgccatggttaatcttgcaaaagctggtatgacaatgattgttgtaactcatgaaatgggttttgctaaagaagttgctgatgaagttatttttatggatgaaggtatgatagtagaa

SEQ ID NO: 271286 - DNA, 635 bp, Unknown
  Bacterial polypeptide expressing nucleotide sequence isolated from the Sargasso Sea
tatggggagttctgacagttttgtaaaatttgataaagtagataaaagctacgatggtgaagtgcttgtagttaaggatcttaatgtagatattcctaaaggtgaatttcttacaatgcttggaccttcaggctcaggaaaaactacaacattgatgatgttagctggatttgaaactcctacaggtggagaaatatatttagaaggtgaggctattaataaaattcctcctaacaaaagaggaatcggaatggtgtttcaaaactatgcattatttccacatttgacagtaaatgaaaatcttgcatttccacttgaagttagaaaattaaataaatccgacattgaagaaaaagtaaaaaaaactttggatatggtggagctaggacaatttggaaatcgtatgccgttacaattatcaggtggtcaacagcaacgtgtcgctttagcaaggtctttagtttttgaaccaagattagtattaatggacgaacctctaggagcacttgataaaaaacttcgtgaacaaatgcaatatgaaattaaacacatacatgagagaattggaatcacagttgtttatgttactcacgatcaaagcgaagcattaacgatgtcaaatcgtatagcagtat

SEQ ID NO: 271287 - DNA, 789 bp, Unknown
  Bacterial polypeptide expressing nucleotide sequence isolated from the Sargasso Sea
tagagcgagatctctaacaaaatcatatggaccagaacaggtattaacagattttaacttggacgtatggaaaggttcaatatttgggatactaggagtttcaggttctggaaaaacaacagccttaaggctgcttgctggttttgagaatccagattcaggttctattgaaatgcatgacagaatagtttttgatcaggaaacaactatacctccggaagatagaaatataggaatggttttccaagactatgctctatttccacatttaaatgttgaaaaaaatattgcatttggcttatcaactaaagacatcaataacggtcgtttagaagaagttttagaaatgtgtaatctaaaaaaatatagaaacaaatttcctcaagacatttcagggggccaacagcaaagagtagctctagcaagagcattagctcctaaaccagatgttgtactgttggatgagcctttcacaagcctagatgctcatatggcaagagaattaagagatgaagtagttcatctcttaagagaaacagagacaacagcaattctagtaactcatgatcaagaagaagcattatccgtctgtgatattgttagtgttcttgaagatggtaaagtaatgcaaagcgcaacacctcaagagatctatttaaacccagttagtcaaaatgttgccaactctgtcggggatccaaatatcattaaaggattttcaaaaaatggaagagtagagacagctctaggtacattcgtgtctgcatacgagggggcattagacgtttc

SEQ ID NO: 271288 - DNA, 466 bp, Unknown
  Bacterial polypeptide expressing nucleotide sequence isolated from the Sargasso Sea
atgtccgaaagtatcattcaaataaataacatgaataaatggtttggagatttccaagttttaaaaggaattaatctagaagtaaaaccgaaacaaaaaattgttgtttgtggtccttctggatcaggaaagtcaacactaattagatgtataaacagattagaagaacatcaagaggggaatataatagttgatggaactgaattaaccgaggacactaaaaatatagaacaaataagagcagaagttggaatggtatttcaacaatttaatttatttccacatttatcaattttggataattgtaccttagctcctatatgggttaaaaaaatgccaaaaaaagaagcagaggaattagctcttaaacatttggaaagagtgcaaattttagatcaagctcaaaaatatcctggtcaactctctggaggtcaacaacaaagggtagctatagctagagctttat

SEQ ID NO: 271289 - DNA, 838 bp, Unknown
  Bacterial polypeptide expressing nucleotide sequence isolated from the Sargasso Sea
gatggtttttcatcctatgctctttacccccataaaacagttagtgaaaacattgcttttccattgaaggtaaggaagataagtggtgatgcccgtgataaagctatacttgatgcagcaaaacaggttcatatggaagatcttttagatcgatatcctcggcaactttcaggcggacaaagacaaagagttgcattagcaagagccattgtcagacaacctgatatatttttaatggatgagcctctttcaaatttagatgcaaaattaagagttcatatgcgaaccgaactgaaaagaatgcaacatgaaatggggattaccacagtttatgtcactcatgatcaagttgaagctatgactttagcaaatcgagtagcgataatgaatgaaggaatattgcaacagattgctcctcctaaggaaatctatggtaatcccaaaaatgtatttgttgctggattcatgggttctccagcaatgaacttcattgatggaactatagaaaataatgaaatgaatattttagaaagaaaatttggactaaatgagaatcttgaaaatcagaatgcccttttaggcattagaccagaacacgcgtccattacagaaaaggacaaggggcatttaaatgcaaaagtttttactactgatcaggcgggtgatcatacccttgtaaatcttaatgttggtgaacaatctattgtcgtgaaaatgccttcagattttgaagttgattttgacaaagaggtaggaataactttttctttagaagacagctatttgtttcaaaaaaataatggtgaaagaatagaagtaagacttgtcgataaatgat

SEQ ID NO: 271290 - DNA, 691 bp, Unknown
  Bacterial polypeptide expressing nucleotide sequence isolated from the Sargasso Sea
tggagattttcaagtattaaaagatattaactttgatgtgcaagcaaacaaaaaaattgttgtttgtggaccatctggttctggtaaatcaactcttataagatgtattaatagattagaggaacatcaagaaggaacaataattgttgatgggaatgaattgtcagaaaatacaaaagatatagaaaatataagagcaaatgttggaatggtatttcaacaattcaatttatttccacatctatctattttagacaactgtactctggcaccaatatgggtaaaaaaaatgccaaagaaagatgctgaagagttagcattaaatcaacttaaaaaagttcaaattgatgatcaagcaaataaatttccaggacaattatccggtggtcaacaacaaagatgcgcaattgcgagggcattatgtatggagcctaaaattatgttgttcgatgaaccaacctctgctctggatcctgaaatgattaaagaggttcttgatgctatggttaatttagcaaaaggaggaatgactatgatagttgttacacatgaaatgggctttgcgaaagaagttgctgatgaggtggtttttatggatgaaggaatgatcgtagaaagggcagaaactaaagaattttttgccaatccaaaaagcgatagaacaaagcttttcttaagccagatattataa

SEQ ID NO: 271291 - DNA, 661 bp, Unknown
  Bacterial polypeptide expressing nucleotide sequence isolated from the Sargasso Sea
tgtggtaaacccaggtcataaagtggcgatagttggtcctactggagctggcaaatctacaatttctaaacttctatttagattctatgatccttcttctggtattatttcgatagataaccaaaatataaaagatgttactcaaagttcattaagatctaatattggagttgttcctcaggatacagttttgttcaatgatactataaagtataatattgcttattctaagcctgaagcatcgatagaagaaattaataacgcagtaaaattatcatctattgacagatttattgctaacttagaaattgggtatgacacgattgttggtgaaagaggtctgaaactttcaggaggagaaaagcaaagagttgccatagcaagagcgcttcttaaaaatcccaaaatttttatttttgatgaagcaacgtctgctttagactcaaaaacagaaaaatcaatagagaaatctctcaaaaaattatctaataaaaatagtactctagttatagctcatagattatcaacaattatagatgcagataaaattattgtgttagagaacggtattattgcagaacagggaagtcacaaagagcttataaagaaaaatggcctttatgcagaaatgtggttgagacaacaagaacagttgaactaa

SEQ ID NO: 271292 - DNA, 529 bp, Unknown
  Bacterial polypeptide expressing nucleotide sequence isolated from the Sargasso Sea
gatttaaagaatattgatgcggtccgtcgagaggttggaatggttttccaatcgttcaatttatttcctcatctatcagtaattgaaaattgtaccctggcgccaatctgggtacgcaagacgccgcaggcagaagctgaaaaactcgcaatggaatatctcgatagggtgaaaatcccggagcaggctcacaaatatcctggtcaactatccggcggtcagcagcaaagggtcgcgattgcgcgttcgctatgtatgaagcctaaaataatgttgtttgatgagcctacttcagcccttgacccagagatgatcaaagaagtgttagacgttatggtcgatctcgcggattccggcatgaccatgcttgtcgtcacccatgaaatgggctttgcggcacaggtagctgatcaagttatttttatggatgagggtcaaattgttgagcagaacacgcctagtgaattttttgataacccgcaatcagaccgaaccaagctttttctgagtcaaattctcagccactagt

SEQ ID NO: 271293 - DNA, 859 bp, Unknown
  Bacterial polypeptide expressing nucleotide sequence isolated from the Sargasso Sea
atagatgaaggcgaaatatttattaatgatcaaaaaattaatgaacttcatccttcaaaacgtcaaactgcaatggtttttcaatcttacgctctttatccacatatgaatgtatatgaaaatatgtcttttggtttaaaaattgaaaaaagaccaaaggaagaaatcaatacaaaagtaatgcaggctgcaaaaattctaaaaattgaagaactattagagagaaaaccaaaacaattatctggaggtcaaagacaaagagtggcgataggaagagccattacaagaaatccaaaaatatttttgtttgatgaacctttatctaatcttgatgcagcattgagagcagaaatgagagttgaaatatctaaattacataatcaaattaaaacaaatatgatttatgtaactcatgaccaagtagaagctatgacactagcagaccgaatagttattttaaatcaaggtaatattgagcaggttggcactcctgaggaaatttataatgatccagcaaatatttttgttgcacaatttataggcacacccaaaatgaatattttagacgtgaaagaggaagatattgtgtcagaaaatacaattaaattgttaggcaatgatattcaatttaataatttaaaattaaaaaaatcaaaacattttgtgggcattagacccgaacatttaaaagcaattcagaatacaaaatttacttttaatcctgaaatagaattaattgaaaatcttggtaatgaaaaaattgcatatatgaaaaaagatgaacaccaattaagtgcgaaaattccgagcaatgttgaaataggaagttccataggttttaatctaaatgacattttta

SEQ ID NO: 271294 - DNA, 770 bp, Unknown
  Bacterial polypeptide expressing nucleotide sequence isolated from the Sargasso Sea
aatgaaaaaagcagaagtaaaatttgaaaatataacaaaaaaatttaatgaaactgtagctgtagataatgtcagttgtagttttgaagctggaactttaacaactttgcttggaccttctggatgtggaaaaacaacttcactaagaataattgcaggattggaacgagctacagaaggtaaaattatgattgataacgaagatgtaactttattaccagcaaccgatagagatgtatcaatggtatttcaatcttatgcgttatttccgcatatgagtgttattgagaatgtttcttatggattgaaaatgattaaggaaaacaaagaagaatatactaaaaaatcattagaaacattaaaattagtaaacttggaagggtacgaaaatagaatgccatctgaattatctggtggtcaacaacaacgagtagctgtggcaagagcaatagttttaaaaccaaaagttttgttgtttgacgaaccactttcaaatttagatgcaaaattaagaagacaagtaagagaggatataagagagatacaacagaaactgggcgtcacaacaatttatgtaacgcacgatcaagaagaagcacttgcaatatcagataaagtaattgttatgaataacgctgtaattgcccaagaaggaactccaaaaattctatataaccatccgaaaaataaatttgttgccaattttataggcgatgccaatgttgtaaaagctgaagtaattaacaaacaatcaaataagtatgagttaa

SEQ ID NO: 271295 - DNA, 522 bp, Unknown
  Bacterial polypeptide expressing nucleotide sequence isolated from the Sargasso Sea
tatgtctgatagcataatccaaataagtaatatgaataaatggtttggagatttccaagttttaaaaggaattaatttagaggtaaaaccaaaacaaaaaattgtagtatgtggtccatcaggttcaggtaaatcaaccttaataagatgtattaacagattagaggaacatcaagaaggaaatatagttgtagacggtacagaattgacagaagatacaaaaaacatagaacagataagagctgaagttggaatggtatttcaacagtttaatttattcccacatttatctattttagataattgtacacttgctccaatatgggtaaagaaaatgcctaaaaaggaggcggaagaattagctttaaaacatttagaaagagtacaaatacttgatcaagcacaaaaatatcctggtcaattatcaggtggacaacaacaaagagcagcaatagcaagagctttatgtatggagccaaaaataatgctttttgatgaaccaacttcagccttagacccaga

SEQ ID NO: 271296 - DNA, 908 bp, Unknown
  Bacterial polypeptide expressing nucleotide sequence isolated from the Sargasso Sea
attgaagagtttaagcgaaatagaatttttatcggtatcaaaatattacgatgaccatttggctgtagataaaattaatctcaaaataccggcaaatacttattgctgtcttctaggcccatcgggatgtggaaaaacaacaagcttaagaatgctcgccgggcatgaaaatgtaagcaaaggggaaattcttcttggtaatcaattagttaatttattacccccatctgagcgcggcacggcaatgatgttccaggattatgcgttatttccacatatgaattgtttagataatattgcattctcgctgaaagtgcggggtatcaataaacctgaacgctatgctaaagcaaataagttattagatttagtccaaatgaacgaatatggccttcgaaaaccagcacaattgtcgggggggcaacaacaacgagtagcattagctcgagccttaattacagatccaaaagtcttactacttgatgaaccattatcggctttagatccatttttacgcataagaatgagggcggaacttaagaaaattcagagagaacttggtattagttttattcatgttacccacgctcaagatgaagctatggcgctcgcggaccaaatagttgttatgaaagagggcaaaattgaacaaatagcaaatcccaaagacctcttcaactgcccggccaatgaatttgtggctagatttatgggtggtcagaacataattcatctcgaatcaggcagttatgctatccgcaaagataaaattaaactggataataaaaaacataaaaattcgaaaagtcacactacctctggtgtaattaattccatcgaatttcaaggcaaccaagttcacatatctctatccattcagggagatactgaagatttttcaatattcc

SEQ ID NO: 271297 - DNA, 625 bp, Unknown
  Bacterial polypeptide expressing nucleotide sequence isolated from the Sargasso Sea
tggaccgtctggatctggtaagtcaacgctaattaggtgtgttaatagattagaagagcatcaagaaggaagtataattgttgatggcacagaactttctgagagtacgaaaaatattgaaaaaacaagagctgaggttggaatggtatttcaacaatttaacttatttcctcacttatctattttagataattgctctttggcacctatatgggttaaaaaacttccaaaaaagcaagccgaagaaatagcaatgaataatttaaaaagagttcaaattgatgatcaggcattaaaatttcctggacagctttcaggtggtcaacaacagcgtgctgcaattgcaagagctttgtgtatggaacctaaaataatgttatttgatgaaccaacatctgcattagatccagaaatgattaaagaagttttagatgtaatggttgatttagcaagaggtggaatgactatgatagttgtgacacacgaaatgggatttgctaaggaagttgctgattacatgatttttatggatgaaggtaaaattgtagaaagagctaaaacaaaagaattctttgaaaatcctaaatctgatcgtacaaaactatttttaagtcaaatattataa

SEQ ID NO: 271298 - DNA, 841 bp, Unknown
  Bacterial polypeptide expressing nucleotide sequence isolated from the Sargasso Sea
tggtgatgtccatgtaataaaggacgtatctctagatataaaaagtcagtcgtttacggttttggttggaccatctggttgcggaaaatcaactatgttaagaatgattgcaggtttagaagatattaattctggaacaatttctattgatggtcaagtagttaatgatctacctccaaaacaaagaaatattgcgatggtttttcaatcctatgcattataccctcatatgacagtatttgataatatggcatttggactgaaattagaaaaaagatcaaaagatgaaatcaacgaccgtgttcaggaagcagcaagaattttacaaatagaagattacctgcacagaaagcctaaacaattatcaggaggtcaaagacaaagagttgctattggaagggcaattacacgtaaaccaaaagtattcttatttgatgaaccactatcaaatctagatgcagctcttcgagtacaaatgcgtgttgaattggctaaacttcatgaccaacttaatgctacaatgatttatgttactcatgaccaaactgaagcaatgacattggcaaatgatattgttgttttagatgaaggtatcgtttctcagaaagggtctccaatggaactttataataacccaaataatttatttgtaggcggatttattggctcacctaaaatgaattttatctctactaaaattacaagtaaaaataatgataagacagaagtagatttaatgggatcctctaaaatcagtattcccaaaacctcagcatcagcctctgaaggtgatatagtacaactaggtattcgccctgaacatctagttgttaatcaagac

SEQ ID NO: 271299 - DNA, 673 bp, Unknown
  Bacterial polypeptide expressing nucleotide sequence isolated from the Sargasso Sea
aatgacaaaaagtgactcaataattaaaatttctaagctgaataagtggtatggtaaatttcatgcgcttaaagatattgacttgtcagttggtagaacggaaaaaattgttatttgtggtccgtctggctctggtaagtcaactcttatacgatgtattaatcgccttgaggttcatcaagaaggttctattcaagtagatggtattgaattaactgatgatataaaacaaataactgaaattagaagtgatgtcggtatggtattccagcatttcaatctattccctcacctcactgttcttgaaaattgctctttagcgccaatatgggttagaaaaaaatcaaaagttgaagcagaggagatggctatgcagctacttgaaaaggttagaataccggaccaagccgataaatatccaggtcaattatcaggtggccagcagcaaagagttgccatcgcacgtgccttgtgcatgcagccacgaattatgctatttgatgaacctacgtccgctcttgatcctgaaatgattaaagaggtactagagacaatgattgagctcgcagactctggtatgaccatgatcgttgtcacgcacgaaatgggttttgcgaatagggttgcggatagaattatattcatggatgaggggcaattgtcgagcaaatga

SEQ ID NO: 271300 - DNA, 735 bp, Unknown
  Bacterial polypeptide expressing nucleotide sequence isolated from the Sargasso Sea
ttatgtcgggatcaattatacaaatgaagaaagtaacaagtgttcggagactttcagttttaaaagatatcaatcttgatgttgctgaaaaacaaaaaattgtagtctgtggtccttctggatctggaaaatctactttgataagatgtataaatagactcgaagaacatcaaaaaggaacaatcatagtagacggatttgagttatctgaaaaaacaaagaatattgaacaaataagagctgaagtaggtatggtttttcaacaatttaatttatttcctcatttatctattttagacaactgtacattagctccaatatgggtaaagaaaactccaaaaaaacaagctgaagaaattgcaatgaaacaattagaacaggttcaaattgccgatcaagcaaaaaaatttcctggtcagttatcaggaggacagcaacaaagagctgctcttgctcgagctttatgcatggaaccaaaaattatgttatttgatgaaccaacttctgccttagatcctgaaatgataaaagaagttttagatgcgatggtaaatttagctaaagcaggcatgacaatgatcgttgtaactcacgaaatgggttttgcaaaagaagttgcagatgaggttgtttttatggacgaagggatgattgttgaaagagctaaaactaaagaattttttgataatccaaaatctgatagaacaaaactctttttaagccaaattttataac

SEQ ID NO: 271301 - DNA, 647 bp, Unknown
  Bacterial polypeptide expressing nucleotide sequence isolated from the Sargasso Sea
  misc_feature (27)..(27): n is a, c, g, or t
  misc_feature (131)..(131): n is a, c, g, or t
aggaggtcaacgtcagagagtagcttnagctcgagctatagtaagagagccaaacgtttttttaatggatgagcctctttcaaatctcgatgccaagttacgagtgtccacacgcgctcaaataaaaaatntaagccatgaacttgcagtaacaactgtttatgtgactcatgaccaagttgaggctatgacactcgcagacagagtagtcgtaatgaaagaaggaatcatccagcaagtaggtagtcctaccgagatatacaataaacctgccaacgcattcgtggcaagctttatcggctctcctgcaatgaatttgattgaaggggaaatctttaataaaaagttcaatgctgatttgacctcagtgagtggattaaacatagaaaactctaaagtcacattaggttttagagctgaagatgcaagtgttgtgaaaagcggtggtcaaattaatgctcccatttatacattagaaatcttaggtgatgcaactatggttaccgttaagattgggcaatcattggtaagcataaaaacagaaaaaaattacagagcgaatattgaggattatgtttcaattcatattccatcaaagaaatgtcacctgtttgatcataaaacgggggatcgaattgggagataat

SEQ ID NO: 271302 - DNA, 487 bp, Unknown
  Bacterial polypeptide expressing nucleotide sequence isolated from the Sargasso Sea
tatggtattcgataatttaattataagagcaaggtcactttcaaaatcttatggtagtgaagatgttttgacggacttcaatattgacatttggtacggttcaatatttggaattttaggtgtctctggttctggtaaaacaacagcattaaggcttctagctggttttgaaaacccagatcaaggaacaatcgaaatgcataacaaagtcatatttgatgagaaaacaaatgtaccacctgaaaaaagaaaaattggtatggtatttcaagattatgcactattccctcatttaacagttgaaaaaaatattgcttttggtttaagtaaagaagaaattaaaaacggaagactcgatgaggtaataagtatgacaaacttaagttcgtacagaaaaaaatttccacaagatatttcaggaggtcaacaacaaagagtagcgcttgcaagagcattggctccaaagccagaagtggttttgctagac

SEQ ID NO: 271303 - DNA, 801 bp, Unknown
  Bacterial polypeptide expressing nucleotide sequence isolated from the Sargasso Sea
taagagcaatatcgggttttttagatccatcagaaggaaaagttttgattgcaggtcaggatatggcaggtattggtccaaacaaaagaccaacatcacttatttttcaaaatttagctttgtttccattgatgtcagtttcagaaaatattgttttttctttagaagtaagaggtgttggaaaacaagaaagacaaaaaagagctgatgaacttttagatcttattgccttaagtggacaaggagataaaaaggtgcacgaattgtcaggaggtcagcgtcaaagagtagctattgctagagcattagccatagaacccaaagttcttttattggatgaaccactatcagctttagatttgaaactgagacaaaaaatgagaacagaacttagggcaatccaaaaaagagttggaataacatttatctacataactcatgatcaaggggaagctcttacaatgtctgatagggttgcagttatgaatgaaggtgaattagaacaagtgggattgtgtgatgatgtatatgactttcctcatactcctttcgttgctacttttgttggtgaaaataatccattttatgcaaaggtagtatcagttgaaggagataaaattagagtagaatctcacaataatacttttgttgctaaatctggtaaaactggtgatggaaaaaatcattccttttcaactggccaggaagtgatcatgttcattagaccagaatcaatttttataaaaaacgagaatactcaacttgataatacttttaaagcaaagagtaaataccgttgaa

SEQ ID NO: 271304 - DNA, 832 bp, Unknown
  Bacterial polypeptide expressing nucleotide sequence isolated from the Sargasso Sea
tatgggagcaattgatatcaaatctgctgggaaaatatacccaaatggtacaagagcactggaagatgtaaatataactataaatgatggagaatttgtagttctggtcgggccatcaggctgtggtaaaactactctactaagaatggttgcaggccttgaagacattactgaaggtgaaatttcgattggtgataagactgtcaacgatgttgcaccaaaagatcgtgacatagcaatggtttttcaaaattatgcactttatccacacatgtcagtttttgacaatatggctttctctttaaaactcagaaaattaccaaaagatgaaatacaacaaaaagttaaggaggctgcaaagacgcttgagataagtgaattgttagacagaaaaccaaaagctttatcaggggggcagagacaaagggtcgctatgggaagagctatcgtgagaaatcctcaagctttcctgatggatgaaccactttcaaacttagatgctaaattgagagttcaaatgagagctgagctagggcaactacatacacaattacaaacaacaactttatacgttactcatgaccaggttgaagcaatgactatgggggacagagttgcagtcataagaaaaggtgagttgcaacaaattgataccccaagggagatttatcttaaaccaaaaaatatttttgtagcaggttttattggtagtccgtcaatgaactttgtgtatgcaaatgtaggtgttaataagaactctattccattaaattttggtaatgatcaaattgaatacaaaggtgaaaaattaggggaattaaaagccttttga

SEQ ID NO: 271305 - DNA, 540 bp, Unknown
  Bacterial polypeptide expressing nucleotide sequence isolated from the Sargasso Sea
aatggcaaatataaaattcacaggcgttcataaatcattcggatcaaacaagataataactgattttaacctaatgggaaaagatgacgaatttcttgtattagttggcccatctggctgtggaaagtcaactttattaagaatgatagctggtttagagaaaattgatgaaggtgaaatatttataaatgatcaaaaaataaatgatcttcatccctcaaaaagacaaacagcgatggtatttcaatcttatgctctttatccacacatgaatgtttatgaaaatatgtcatttgggttaaagattgaaaagaaatctaaggaagaaattgaaacgaaagttatgcaagcagctaaaattttaaaaattgaggagttgcttgaaagaaaacctaaacagttatctgggggtcaaaggcaaagagttgcaattggacgtgcaattaccagaaaccccaaaatatttttatttgatgagcctttatctaacttggatgcagcttttagagcagagatgagggtagaaaattcaaagcttca

SEQ ID NO: 271306 - DNA, 736 bp, Unknown
  Bacterial polypeptide expressing nucleotide sequence isolated from the Sargasso Sea
atgtcagataaaataattcaaataaaagaaatgaataaatggtttggagatttccaagtcttaaaaaatattaatttagatgtagaaaagaataaaaaaattgttgtctgtggcccatctggttcaggtaaatctacattaatcagatgtattaacagacttgaggaacaccaagaaggatcaattgtcgttgatggaactgaattaactgaagagacaaaaaatatagagcagataagagctgaagttggaatggtatttcaacagtttaatttatttcctcatttatcaatattggataactgcacattggcaccaatatgggtaaaaaaaatgccaaaaaaagatgctgaggcattagctttaaaacatttagaaaaagttcaaattgctgatcaagcatacaaatatcctggtcaattatctggtggtcaacaacaaagatgtgcaatagcgagagcgttgtgtatggagccaaaaataatgctttttgatgagccaacgtcagcgttagatcccgaaatgatcaaagaagttttagatgcaatggttaatttagctaaggctggtatgactatgattgtcgtgacacatgaaatggggtttgcaaaagaagttgcagatgaagttatttttatggatgaaggtatgattgtagaacaggcagaaacaaaagagttttttgctaacccaaaaagcgatagaactaagctttttttgagccaaatattataaa

SEQ ID NO: 271307 - DNA, 832 bp, Unknown
  Bacterial polypeptide expressing nucleotide sequence isolated from the Sargasso Sea
tatcctcatctcacagtaagaagaaatttagaaactccattaagactaagagactataatgcatttgaaagacttcctttaatcggtaatttttctccaagtaaaaaggaaaagacagaatctataaatcaattagtaaataaaacttctgaaactctaaaaatttcagaactattagatagaaaaccaggacaattgtcaggtggtcaaagacaaagagttgctcttggtcgtgctatggttagagaacctgttgcttttttaatggatgaacctctttcaaatttagatgcggctttgagagttcacatgcgatctgaactatctgaacttcataattcacttaaaactacttttgtgtacgtaacacatgaccaagcagaagcgttaactatgtcttctcgaatggctgtgatgattgatggaaatttattacaacttgatacacctcaagaagtatatgacaatccttcatcattaagcgtagctcagtttgttggaagtccaaaaataaatatatttaaaggaactgcggactctagtgggacggtaagttttctcaacgttaatcttaaaagaaaaagttctgaaagtaattcagatttacatattggtattcgaccagaacatttagaaattacaaatgaaagtaatgaaaatacatttagtggaacagttgcatatagagaaaatttaggatcagatattttctttcatgtaaatattgaagacggtttaaataaaataattgtaaggggcttaccacaatttacacaggaaatttcaaacggttctaatgttaatattaaaagagtttcagataaagcattac

SEQ ID NO: 271308 - DNA, 768 bp, Unknown
  Bacterial polypeptide expressing nucleotide sequence isolated from the Sargasso Sea
gctgaagggtatcgacctcgaaattgcagatggagagtttcttactctcgtcggcgcgtccggatgcggaaaatcgaccttgcttaggatcattgcggggcttgaaaaccaaaccgacggtgacgtcaagatactcggcgagagcgtaaacagcgtgcgcgccagccggcgcgacctcgcgatggtgttccaatcctacgcgctgtatccgcatctgacggtccgtcagaatatgctgacgccgctgctgctgcgcgacctgtcattttaccagcgtctgccgctagtcggccgagcgatgcctggccacggcgttcggatggatgcgctgaacgacatggtcgaggaaacggcggcgatcctgaagatcaagccgctacttgatcgcaagccgggacaactgtccggcggtcagaggcagcgcgttgcgctcgggcgcgcaatggttcgcaagcctacggcgttcttgatggacgaaccgctgtccaatcttgatgccgctctgcgcgtgcacatgcgggccgagttgtcggacctgcaccggtctctgcgcacgacgtttatctatgtcacccacgaccagtccgaagcgctgaccatgtcgaaccggatggccgtgatgatcgacgggcggatcgttcagcttggcacgcccgacgaggtctatggcgatccccaggatatccgcgtcgcggaatttgtcggcagtccaaagatcaacattattccagggcgagcggacgctcacggccgggtgacagcttacgg

SEQ ID NO: 271309 - DNA, 724 bp, Unknown
  Bacterial polypeptide expressing nucleotide sequence isolated from the Sargasso Sea
catgatcgaattccagaacgtgtcgaagagcttcggccacgtgccggtgctgaagcatatcgacctgaagatcgacgcgggcgaggtggtcgtcgtgatcggcccgtccggctcgggcaagtcgacgatgctgcgctgtatcaacgcgctcgagaaaatcaccggcggcgaactgctcgtcgacggccagagcgtgcgcggcaacgcggcgacgatccgcaacatccggctcgaagccggcatggtgttccagcagttcaacctgtttccgcagatgaccgcgctcgagaacgtgatgttcgggccgatgcaggtgcgcggtgcgtcacgcgccgaagcgcgcgaccaggcgatggcgctgctcgacaaggtcggcctcgaatcgcgcgcgaatcattatccgtcggagctgtcgggcggccagcagcagcgtgtcgcgattgcgcgtgcgctcgcgatccggccgcggctgatgctgttcgacgagccgacgtcggcgctcgatccggaattgcgccacgaagtgctgaaagtgatgcaggatctcgcgaccgaagggatgacgatgatcgtcgtcacgcacgagatcggctttgcgaagcgggtcggcacgcgcctgctcttcatggatcagggcgggattgccgaggacggccatccggtcgagctgatcgaccggccgccgaccccgcgcctgaaggaattcctgaaacacgtgtcctga

SEQ ID NO: 271310 - DNA, 607 bp, Unknown
  Bacterial polypeptide expressing nucleotide sequence isolated from the Sargasso Sea
gagcaacccagcgcccggcagatcaccgtgggcgatatccatatcgatgcggataaaccgctcaagggccagcagaagctcatccgccaactgcgccagcaggccggcttcgtgttccagaacttcaatctgttcccccaccgtacggcactggaaaacgtcatcgaaggcccggtgcaggttaagaaggagccgcgcgcagaagccctggcccatgcccgtgccctgctcgccaaggtgggcctgagcggcaaggaagacgcctaccccaagcgcctctccggcggccagcaacagcgcgtggccatcgcccgtgccctggccatgcgcccgcaggtgatcctcttcgacgaacccacctcggccctcgaccccgagctggtgggcgaagtgctgaccaccatccgcgatctggctgaagaaaagcgcaccatggtcatcgtcacccacgaaatggccttcgcccgcgacgtggcagatcgggcgatattcatcgaccaagggcacatcgtcgaacagggcccggccaaggccctgttcaccgcgccccaacatgaacgcacgcggcagtttctcagcaagtttctgctggaccgctcgctttagt

SEQ ID NO: 271311 - DNA, 859 bp, Unknown
  Bacterial polypeptide expressing nucleotide sequence isolated from the Sargasso Sea
acttctgggcaagtctttattgataatacctcgatggaaggtattgagcctaatttacggccaacaaatatggttttccaaaattatgctatttttccacatttgaatgtggaagaaaatgtggcctacggactgcgaaacaaacgtgaaaatagaaacaaacaaaacaaacttgttgatgaagcacttgaactagtagggttatccggtctgaataaacgttctgctaatgccctttccggcggccaaaaacagcgtgttgctctagcacgtgcactaatattaaaaccaaaagttcttttattagacgagccactctcagctttagataaaaaactaagagagcagatgcaatcagaactaagacacctacagcgagccgttgggataacttttatacttgtaacccatgaccaatacgaagcgcttacaatgagtgacagagtagccgttatgttcgatggaaaggtcgcacaagaagcttcacctagagatctttacgaacttccaacttcacaaaaagttgcgtctttcattggagaaatgacttttattgaaggtgaaattattggtgaaaacaaaaatttacaggttcagtctgaaatttttggacaaataagtatagataagtctcgggtttttggccgatcatctaaaaagattacccttggaatacggcccgagaaaatagccatagttccaaaaacgtctcgatcaaaaaatttagtttctggaaaaataattgatgtatcatacttcggcgaaactaccaactataaagtttcatgcggtactattgaaactttgacgatctcgtcgcaaaattctgttggacagcttagttattccgttggtgaag

SEQ ID NO: 271312 - DNA, 637 bp, Unknown
  Bacterial polypeptide expressing nucleotide sequence isolated from the Sargasso Sea
atgaaaacgctaaaaattgaagaattatcaaaaaactttggatcaactgaagttttaagaaaaattaatttagatatagatgagggaaattttttagttcttttaggaccttctggttgtggtaaatcaactttgttaaatattattgcaggtttggaaacaattaatgaaggtgatgtttttatagatgattacaatgtaagcaaagtagagccaaaagatcgaaatattgctatggtttttcaatcgtatgctttgtatccatcaatgaatgttagagaaaacatgatttttggccttaaacaggcaaaaatttctaaagaaaaaatagagaaacaattagaaaaagtatcaaaatttcttcaggttgatcaattattagaaagaaaaccttctcaattatctggaggtcaaagacaacgtgtagctattggaagggctcttgttagggagccaagaatatttttatttgatgagcccttgtccaacttagatgcaaaattaagagttgagatgagaagagagataaaaaaacttcaccaacaattaaaaacaacagttgtttatgtaactcacgatcaaacagaggcaatgagtttgggtactaatattgcgatcatgaatcatggagtaattc

SEQ ID NO: 271313 - DNA, 688 bp, Unknown
  Bacterial polypeptide expressing nucleotide sequence isolated from the Sargasso Sea
aaaacaacatcttggttaaaaaaaataggattagaaaattataataacagaatgccctatgaaatctcaggagggcagcgtcaaagagttgctttagcaagatctttgatagttgaaccaggagttttattacttgatgaaccattaggggcacttgatgctaatttaagaaaaacaatgcaagttgaacttaaaaaaattcattctgaatttggtattacatttgtttatgtaacccatgatcaagaagaagctctcagtatgtcttcaagaatagtattaatgaaagaaggtgaaattgagcaattatcaaatccaaatgaactttatgaaaaacccaatacagcatttgcagccaaatttatgggattttcaaatattttttctatcagaaatattgaacaaataaattcaaataatattctaaattatttaaatgaagaaaataaacattcaaataaattatgttttagatctaaagatgttggtattgtttcacaaaataatggtgattttaaaattatatcaaaaaattattatggtgactcatataaattccaagctattaatactaatggtttgattattaatttatctgcttcagatattaatatttctaaacttgaaataggtacattagtaaatctaaaaattaataatgaaaaaattattactttagaaaaataat

SEQ ID NO: 271314 - DNA, 592 bp, Unknown
  Bacterial polypeptide expressing nucleotide sequence isolated from the Sargasso Sea
atgtcaaaaataattgaacttaaaaaagtaaataaatggtttgataaatttcaagttttaaaggacattgatctagaagtagctccccaagaaaagattgttatatgtggaccatctggatctggtaagtcaacgctaattaggtgtattaatagattagaagaacaccaggaaggaaatattattgtagatggcacagaactttctgaaagtacaaaaaatattgaaaaaataagagctgaagttggaatggtatttcaacagtttaatttatttcctcacttatctattttagataattgctcgttagctcctatatgggtaaaaaaacttccaaaaaaacaagctgaagaaattgcaatgaataatttaaaaagagttcaaattgatgatcaggctttaaaatttccaggacaactttcaggcggtcaacaacaacgtgctgcaattgcgagagctttgtgcatggaacctaaaataatgttgtttgatgagccaacatctgcattagatcctgaaatgattaaagaagttttggatgtaatggttgatttagcaaaaggtgggaatgactatgatagttggacacacg

SEQ ID NO: 271315 - DNA, 555 bp, Unknown
  Bacterial polypeptide expressing nucleotide sequence isolated from the Sargasso Sea
tatgttaaaaatcaggaatctcaaaaaaacctacaaaacgggtgatgaggcattaaaaagtgttgatattgatatcccaacctctcaagtgatggcacttataggtccatcgggagctgggaaatcaaccttaatacgatgtattaatcgacttgtagaacctacaaatggacaagtttttttaaatgatctcgatttaaccaaactttctagaagaaaacttagatttgcgagaagacgcataggaatgattttccaggaatatgcattagtcgaaagattgacagtcatggaaaatgtgctgtcaggacgattaggttttgtaggtttctggagtagtttttttagaagatttccagaggaggacattcaagaagcatatagactgcttgatcgagtgggcttgtctgaaatggtagacaaaagagcagatgcattatctggcgggcaaagacaacgtgttggaatctgcagggctttgattcagaatccggaactattgttagtggatgaaccaacagcaagccttgacccaaaaacttcgcgtcaaataat

SEQ ID NO: 271316 - DNA, 862 bp, Unknown
  Bacterial polypeptide expressing nucleotide sequence isolated from the Sargasso Sea
tatggtttttcaatcatacgctttatatccgtcaatgaatgttaaagaaaatatggtttttggtcttaaacaagcaaaaacatctaaagaaaaaattgaggatcaattagagaaagtatctaaatttttacaagtcgatcaattgttagaaagaaaaccttcacaattatctgggggacagagacaaagggttgctattggaagagcattggttagagagccaagaatatttttatttgatgaacctttatctaacttggatgcaaaactaagagttgagatgagaagagagatcaaaaaacttcaccaacaactgaaaacaacagttgtctatgtaactcatgatcaaactgaagcaatgagtttaggaacaagaattgcgattatgaaccatggtgttattcagcaaaatgatacacctgaaaatatttacaataaaccaagcaacacatttgttgcagactttattggatcaccatctatgaatctaattaagggaactttaaaagaaacttcaggtaaaatattttttacagtaagtggttctaattttgaaattccaattaaagattatgaatttaaagataaatctaatttaaataataaagaagttttctttggtttaagaccagaacacatttactttaaaaaatctaatgaaagtgattttgaagtaaatttaagagcagatttaagtgagtatataggtcatgaacagataatgacttttgattatgctaatcaagaaattttagctaaatttccttcaactataaaaattgaactggcaaaagaaacaaaattatattttgatttaactcaaacatcattatttgatgctcaaactgaggagagaatataa

SEQ ID NO: 271317 - DNA, 745 bp, Unknown
  Bacterial polypeptide expressing nucleotide sequence isolated from the Sargasso Sea
tatgtctaatattgagttttcaaatctaaataagtcttttggaaataataaaattataactgattttaatcttaaaggaaaagaagatgaatttttagttttagtagggccttctggatgtggaaaatcaaccttactaagaatgatcgcaggattagaaaagatagatgaaggagaaattaaaattaataatcagataattaatgatcttcatccgtcaaaaagacaaactgcaatggtttttcaatcttacgcattatatcctcacatgaatgtatatgagaacatgtcatttggactcaaaatagaaaaaaaatcaaaagaagaaatccaaaataaagttttaaatgctgcaaagatacttaaaatagaagaacttctagataggagaccaaaagaattatcgggagggcaaagacaaagggttgcgataggaagagcaattacacgtaatcctaaaatctttttatttgacgaacctttgtcgaatttagatgcagctttaagagctgaaatgagagtagagatatcaaaattacaccagcaaataaaaacgaatatgatttatgtaacccatgatcaagtagaagctatgaccttagctgatagaatagttattttaaatgaaggtaatattgagcaagtaggtacacctgatgaaatttataaagatccagataatatttttgttgctcaatttattggtactccaaaaatgaatattttggaaattgaacctgaaaat

SEQ ID NO: 271318 - DNA, 658 bp, Unknown
  Bacterial polypeptide expressing nucleotide sequence isolated from the Sargasso Sea
gaagatcgacgcgggcgaggtggtcgtcgtgatcggcccgtccggctcgggcaagtcgacgatgctgcgctgtatcaacgcgctcgagaaaatcaccggcggcgaactgctcgtcgacggccagagcgtgcgcggcaacgcggcgacgatccgcaacatccggctcgaagccggcatggtgttccagcagttcaacctgtttccgcagatgaccgcgctcgagaacgtgatgttcgggccgatgcaggtgcgcggtgcgtcacgcgccgaagcgcgcgaccaggcgatggcgctgctcgacaaggtcggcctcgaatcgcgcgcgaatcattatccgtcggagctgtcgggcggccagcagcagcgtgtcgcgattgcgcgtgcgctcgcgatccggccgcggctgatgctgttcgacgagccgacgtcggcgctcgatccggaattgcgccacgaagtgctgaaagtgatgcaggatctcgcgaccgaagggatgacgatgatcgtcgtcacgcacgagatcggctttgcgaagcgggtcggcacgcgcctgctcttcatggatcagggcgggattgccgaggacggccatccggtcgagctgatcgaccggccgccgaccccgcgcctgaaggaattcctgaaacacgtgtcctga

SEQ ID NO: 271319 - DNA, 697 bp, Unknown
  Bacterial polypeptide expressing nucleotide sequence isolated from the Sargasso Sea
tatgtccgaaaatattatccaaataaacgacatgaataaatggttcggtgatttccaagttttaaaaggaataaatttagaagtaaaaccaaaacaaaaaattgttgtatgtggtccatctggttcaggtaagtcaactttaattagatgtattaatagattagaagaacatcaagaaggaaatattattgttgatggaacagagctcacagaagatacaaaaaatattgaacaaataagagcagaagttggaatggtgttccaacagtttaatttatttcctcatttatctattttagataattgtactttagctcctatatgggtaaaaaaaatgccaaaaaaagatgctgaggaattagctttaaaacatttagaaagagttcaaatattagaccaagcacaaaaatatcctggtcaattatctggtggacaacagcaaagagcagcgattgcgagggctttgtgtatggagccaaaaataatgctttttgatgaaccaacatcagcattagacccagaaatgattaaggaagtgcttgatgtaatggtaaatttagcaaaacaaggtatgacaatgatagtggtaactcatgaaatgggttttgcaaaagaagttgctgatcaaatgatatttatggatgaaggaatgattgtagaaaaggcagatacaaaggaattttttgctaatccctag

SEQ ID NO: 271320 - DNA, 726 bp, Unknown
  Bacterial polypeptide expressing nucleotide sequence isolated from the Sargasso Sea
ataccaaagttatgcaagctgctaaaattctaaaaattgaagaactattagaaagaaaaccaaaacaattatctggtggtcaaagacaacgtgttgctattggaagagctatcacaagaaatccaaaaatatttttatttgacgaacctttatctaaccttgatgcagcactcagagcagaaatgagggttgaaatatcaaaattacacaatcaaatcaaaacaaatatgatttatgtaactcatgatcaagtagaagctatgacactagccgacagaatagttattttaaatcaaggaaatattgaacaggtcggtactcctgaggaaatatataatgatcctgcaaatatttttgttgctcaatttattggtacaccaaaaatgaatattttagatgtgaaagaggaaaatattgtttcagaaaatacaattaaattattaggtaatgatatccagtttgataaattaaaattaaatagaactaaacattatgtaggtattaggcccgagcatttaaaagcaaatcaaaatactcaatttacttttaatcctgaaatagaattaatagaaaatcttggtaatgaaaaaattgtatatatgaaaaaagatgaacatcaaattagtgcaaaaattcctagcaatgtcgaaataggaaattctctaggttttgatttaaatgatatttttatttttgatgaaaaaggaaataggattaaatcataac

SEQ ID NO: 271321 - DNA, 836 bp, Unknown
  Bacterial polypeptide expressing nucleotide sequence isolated from the Sargasso Sea
ttaccttgaagttaataatttatctaaatcttttggtaattttgaagcgattaaaaatataggcattgatataaaagaaggcgagtttgtgtgttttcttggaccttctggttgtggcaaaacaactttactacgatgtatagctggattagaaacgcaaactgcaggttcggttattcaaaaaaatattgatatatctaatgagccgccatctaatagagattttggaattgtctttcaatcttatgctttatttccaaatctttctgttttttcaaatatttcttatggtttaataaataataaatggaaaaaggatgacgtaaaaaaaagagtggatgaattacttaacttagttaatcttactgatcatgcatcgaagtatcctagtcaattatctggaggagaacaacagcgcgtagctttagcgagagctcttgccacttctcctggattattattactcgatgaacccctatctgcgcttgatgcaaaagtaagagtttttttaagaaaacagataagggacttgcaaagaaaacttggagtgacaactattatggttactcacgatcaagaggaagcccaaacgatggcggatagaatatttgttatgaatgaaggtgaaatcattcaatctggcacacctagcgaaatctatacaaaagctaactcaccttttattgcctcttttattggaagtatgaattttatacctgcaactattgataattctaagaaagttaagtgcaaaagtgttgaaataaattgtgacataggctcttttaaagaaaatgactctattcaattagctgttagacctgaggaaatttatt

SEQ ID NO: 271322 - DNA, 841 bp, Unknown
  Bacterial polypeptide expressing nucleotide sequence isolated from the Sargasso Sea
aaagagggatcggaatggtttttcaaattatgctttatttcctcacatgacagtctttgaaaatttagcatttccgctaaaggttagaaagatgtctcaagaggatatagagaaaaaagtcgacaaagctttatcaatggtctcacttggtggatttgcaaacagaatgccaggtcaactgtcaggtggtcaacaacaaagagttgcagttgcaagagctttagtttttgatccggctgttgttttaatggatgagcctttaggtgcgttagataaaaatttaagagaaagtatgcagtatgaaattaaacatattcatgaaagtattggtgttacagttgtatatgtaactcatgatcagggtgaagctttaacgatgtcaaataggattgcagtatttaatgatggtaaagttcaacaactatcaagccctgataagttatatgaagaaccagttaattcttttgttgcagaatttattggtgaaaataatacatttggtggagaagtctctgaaatttcaaatggaacatgtaaagttaaattagaaaagggtgaaataattgctaatccaatttcagttaaatctgttggagaaaaaactacagtatcaataagaccagaacgagctttgataaaccctaaagacaaaatggataataatcaaaaaggaaaaatcgaagaggtcatttaccatggggatcacactagagttagattaaatttacttggtaattcagaatttatattgaaagttcccaacagttctcaaaacctagatataaaacttggtaatgaaattaatattggctggaacagtcatgacgctagagctttagac

SEQ ID NO: 271323 - DNA, 763 bp, Unknown
  Bacterial polypeptide expressing nucleotide sequence isolated from the Sargasso Sea
aatattattagatggaaatataatttctaatattccacctcataaaagaggaatcggaatggtattccaaaactatgcattattcccacatatgacagtttatgaaaacttagctttccctttaagagtaagaaaagttgaaaaaaacgaaattgataaaaaggttgataaagctttgtcgatggtttcattaaatggatttgaaaccagaatgccagctcaactttcaggtggtcaacaacaaagggttgctgtagcaagagccctagtatttgaccctgcagttgtattgatggatgagcctcttggagcactagataaaaatttaagagaaagtatgcaatacgagattaaacatattcacgaaagcatcggggtaacagttgtatatgtaactcatgatcaaagtgaggcattaactatgtcaaatcgaattgcagtatttaatgatggaaaagttcaacaactttcaaatcccgctgaactttatgagaagccagtaaattcttttgttgctgagttcattggtgaaaacaatactttcaatggtgaggttgtggatatagataaagaaaagtgtaaagttaaattagcaaattcagaaatacttgctaatccgatttcagttaagtctaaaggtgataaaacaactgtttctctaagacctgaacgggcattaataaatccaacggataagatggataatatgtttactggtaagattgaagaagtaatctatcatggagatcacacaagagttaga

SEQ ID NO: 271324 - DNA, 693 bp, Unknown
  Bacterial polypeptide expressing nucleotide sequence isolated from the Sargasso Sea
agaactatcaaaaaattttggaacaacagaggtattaagaaaaattaatttagaaattgatgaaggaaattttttggttctattaggaccctctggatgtggaaagtcaactttattgaatattattgcgggcttagagacaatcaatgaaggaaatgtttttatagatgattataatgtcagtaaagtagagccaaaagacagaaatattgcgatggtttttcaatcttatgcactttatccttcaatgaatgttaaagaaaatatgatttttggccttaaacaagccaaaacttcaaaagaaaaaatagaagaacaattacaaaaagtttcaacatttttacaagtagacaaattattagagagaaaaccatcgcagttatctggggggcaaaggcagagagttgctattggtagagctttggtaagagagccaagaatttttctttttgacgaaccattatctaatctggatgcaaaattaagagtagaaatgagaagagaaataaaaaaacttcatcaacaactaaaaactacagtagtttatgttactcacgaccagacagaagctatgagtttagggacaaaaattgccataatgaaccatggagtaattcagcaaaatgatactccagaaatcatttacaacaaacctagcaatacttttgtggcagattttattggttctccttc

SEQ ID NO: 271325 - DNA, 469 bp, Unknown
  Bacterial polypeptide expressing nucleotide sequence isolated from the Sargasso Sea
atgaccggtaccgctgcacgcggggtcaggatttcaggcctgggccactcttatgacaaagaacccatcctgaaagatgtttctctcgaagttgagcccggggaatcaatagcgttacttgggccgagcggttgtggcaaaacaactctcttacgtctgcttgcgggcttggagaagccctcgtccggttcaattcacgttggcgagacaccggtggcgggacctgagtgggttcctcccgagcgtcggcaggtcgggatggtcttccaagactgggccctgttccctcacctgaacgttgcggacaatgtcggctacggcatcgctaaatcatcctcaaaaaagcagcagatagcggcggcgctagagatgatggaactcagcgatctcagtgggcgaatgcccgccacactttctggaggtcagcaacagcgagtcgctttagcgcgcgcactggctcctagaccag

SEQ ID NO: 271326 - DNA, 700 bp, Unknown
  Bacterial polypeptide expressing nucleotide sequence isolated from the Sargasso Sea
atctacacacgtaatcaaagatgtatctctagatattaaaagtgaatctttcactgtattagttgggcctagcggatgtggtaaatcaacaatgctaagaatgattgctggtttagaggagattaactcaggaacaatttcaattgatggacaagttgttaacgatcttcctcctaaagaaagaaatatagcaatggtctttcaatcatatgccttgtatcctcacatgacagtgtttgacaacatggcttttggtttaaaaattgaaaaaaaatctaaagatgaaattactgagcgagttatggaggctgctaaaattcttcaaattgaggaatacttagagagaaaaccaaaacaattgtcaggaggacaaagacaaagagttgcaattggtagagcaattacaagaaaaccaaaagtatttttatttgatgaacctttgtctaatttagatgcagctttaagagttcagatgagagtagagcttgctaaattgcatgatcaattaaatgcaacaatgatctatgttacacacgatcaaaccgaagcaatgacacttgcggatgatatagttgtgttagatcaaggtattgtatctcaaaaaggatctccattaaaactatataatgagccagaaaatttatttgttggtggatttattggttcaccaaagatgaactttattaatactaaggtaata

SEQ ID NO: 271327 - DNA, 623 bp, Unknown
  Bacterial polypeptide expressing nucleotide sequence isolated from the Sargasso Sea
aggatctggtaaatcaacaatgattagatgtattaatcgtttagaggaacatcaagaaggtacaattgtagttgatggaattgaattaacaggtaatttaaaaaacatagatagtgtgaggaaagaagttggaatggtttttcaacaatttaatctttttcctcacttaactgcaaaagaaaacatcacattagcaccaatttgggtaaagaaaatgccaaaagctgaagctgaagcattggctatgagacaattagaaattgtaaaaataccagagcaagcaaataaatatcccggtcaattatcaggtggtcagcaacaacgagttgcaattgcaagatcattagcaatgaatccaaatataatgctttttgatgaacctacttctgcgctagatccagaaatgattaaggaagttttagacgtaatggttgatttagcagaaggtggtatgacgatgatagttgttactcatgaaatgggatttgcaaaaacagtagctaatcgtatggtttttatggatgaaggtaaaattgttgaagaagcagctccagataaattttttaataatcctgatagtgatagaacaaagttatttttaagtcagatacttaatcattaat

SEQ ID NO: 271328 - DNA, 707 bp, Unknown
  Bacterial polypeptide expressing nucleotide sequence isolated from the Sargasso Sea
catgtctcaaaaagatagtttcgtaaaatttgaaaaggtagataaaagctacgatggcgagatactggtcgttaaagatttaaatcttgacgttccaaaaggtgagtttctaactatgttaggaccgtctggatcaggtaagacaactgttttaatgatgttagctggatttgaaactccaacaagtggagagatttatttggatggaaatccaataagtagtattccgccaaacaaaagaggtataggtatggtttttcaaaattacgctttatttcctcatatgactgtaaaagaaaatttagcattcccacttgaagttagaaaaatgcaaaaatctgaaatcgatgaaaaagttggaaatgcacttgcaatggttgagttacaagattttggaaatcgtatgccattacaattatctggtggacaacaacaacgtgtcgcattagcaagatctttggtatttgaaccaaggttagttttaatggatgaaccacttggagcacttgataaaaatttaagagaacaaatgcaatatgaaattaaacacattcatgaaagaattgggattactgttgtttatgtaactcatgaccaaagtgaagctttaacaatgtcaaaccgaatcgcagtttttaacgatggaaagattcaacaaatttcttctccagatgttttatatgaaaaaccaaatagttcttttgttg

SEQ ID NO: 271329 - DNA, 676 bp, Unknown
  Bacterial polypeptide expressing nucleotide sequence isolated from the Sargasso Sea
tatgagctcttcaaaaagttttgtaaaatttgataaagttgacaaaagctacgatggcaaagttttagttgtcaaagatttaaatcttgatattaacgaaggtgaatttataacgatgttgggaccttctgggtcaggaaaaacaacttgcttaatgatgttggcaggttttgaaactccaactaatggtgaaatttatttagactcaaaacctatttctagaattcctccacacaaaagaggaattggaatggtttttcaaaattatgctttgtttcctcatttaacagtgtacgaaaacttagcttttcctttaaaagttagaaagctatcaaaagatgatatagataaaaaagtagataaagccttatctatggtttctttatctggatttgaaaaaagaatgccaaatcaattatcaggcggtcagcaacaaagagttgctgttgcaagatctttggtatttgatccacaattggttttaatggatgaacctttaggggctttagataaaaatttaagagagagtatgcaatatgaaattaaacacattcatgaaaatattggcgtcactgtagtttacgttacacatgaccaaagcgaagctcttactatgtctagtagaatagcggtttttaatgatggaaaagtgcagcaattatctagtccagataaa

SEQ ID NO: 271330 - DNA, 736 bp, Unknown
  Bacterial polypeptide expressing nucleotide sequence isolated from the Sargasso Sea
aatgtcagagtcgattataaaaatgaaagaggtgaataagtggtttggtgactttcaagttttaaaagatattaatcttgaagttaaggaaaaacaaaaaatagtagtttgtggcccatctggttcgggaaaatctactttaataagatgtataaacagacttgaggaacatcaaaaaggtcaaattatagttgacgggaacgaactgtcagaaaaaacaaaagatattgaaaaaattagggccgaagtagggatggtttttcagcaatttaatttatttcctcatttatcaatattagataattgcactcttgctcctatttgggtaaaaaaaaccccaaagaaaaaagcagaagaacttgcaatgaagcaattagaacaagttcaaatagctgaccaagctgcaaaattcccaggccaactctctggaggacaacaacaaagagccgcattagcaagagctttgtgtatggaacctaaaattatgctattcgacgaacctacatctgcattagatccggaaatgataaaagaggttttagatgcaatggtgaatttagcaaagggaggtatgacaatgatcgttgttacccacgaaatgggatttgctaaagaggtagctgatgaagtcgtttttatggacgaaggaatgattgtcgaaagagcaaaaactcaagagttctttgctaatcccaaaaatgacagaacaaaactatttttaagtcaaattctttaa

SEQ ID NO: 271331 - DNA, 703 bp, Unknown
  Bacterial polypeptide expressing nucleotide sequence isolated from the Sargasso Sea
aatggctaacataaaatttactggagtacacaaatcatttggatctaataaaataattacagattttaatcttttaggtaaagaggatgagtttcttgtattagttggaccatctggatgtggaaaatcaactcttctaagaatgattgccggattagaaaaaatagacgaaggtgaaatttttattaatgatcaaaaaattaatgaacttcatccttcaaaacgtcaaactgcaatggtttttcaatcttacgctctttatcctcatatgaatgtttatgaaaacatgtcttttggtctaaaaattgagaaaagaccaaaggaagaaataaatacaaaagtaatgcaagctgcaaaaattttaaaaattgaggagcttttagagagaaaaccaaaacaattatctggaggccaaagacaaagagtagcgataggaagagcaataacaagaaatccaaaaatatttttatttgatgaacctttatctaaccttgatgcagcgttgagagcagaaatgagagttgaaatatctaaattacataatcaaattagaacaaatatgatttatgttactcatgaccaagttgaagctatgaccttagcagatcgaatagttattttaaatcagggaaatattgaacaggttggtactcctgaggaaatttataatgatccagcaaatatttttgttgcccaatttata

SEQ ID NO: 271332 - DNA, 784 bp, Unknown
  Bacterial polypeptide expressing nucleotide sequence isolated from the Sargasso Sea
actgagaacgaaaccgcatcttcaatcagaggagaccgtgaccttgcaaacgcccaagacataatcgtttgtgaaggagtttcaaaatggttcggcgacttccaagctttgaataacgtctctgcaacaattaaagaacaggaagttgtagtcgttttaggaccttccggttctggaaaatccacttggattagatgcataaatagattagaacaacaccaagaaggccgaataatggtagacggcgtcgagctttcaaacgatctccgcaacatagagaaagtcagatcagaagtcggaatggtttttcaaatgttcaaccttttcccccatcttacggtccgtgacaacatcagtcttgcccctatttgggtaagaaaaaagccacgagccgaagcggaagaacaggcatcatctttgctggaaagagttggcattccagagcaggccgacaaatttcctggacaactatcgggtgggcagcaacaaagagtcgccattgcacgtgcattagcaatggaaccaaaaattatgcttttcgatgaacctacttcagccttggatccggaaatgattaaagaagttctagacgtaatgaaagaactcgcattgtctggcatgacgatgatggtcgttacccacgaaatgggattcgctaaagaagtggccgacaaaataatgtttatggaaggtggacaaatagtagaaattggcacacctgaacacttcttcactaatccaaccgaagaacgaacaaaactgttcctttcacaaatactttaga

SEQ ID NO: 271333 - DNA, 610 bp, Unknown
  Bacterial polypeptide expressing nucleotide sequence isolated from the Sargasso Sea
atgtcaaaaataattgaacttaaaaatgttaataaatggtttgataaatttcaagttctaaaagacattgatcttgaagtggccccacaagaaaaaattgttatatgcggaccatctggatctggaaagtcaactttaataaggtgtattaatagattagaagaacatcaagaaggaaatattattgtcgatggtaccgaactttctgaaagtacaaaaaatattgaaaaaataagagctgaagttggaatggtatttcaacagtttaatttattccctcacttatcaatattagataattgttcattagcacctatatgggttaaaaaattgccaaaaaaacaagctgaagaaatagcaatgaataacttaaaaagagttcaaattgatgatcaggctttgaagtttcctggacaactttcaggaggtcaacaacaacgtgctgcgatagcaagagctttgtgtatggaacctaaaataatgttattcgatgaaccaacatctgcattagatcctgagatgattaaagaagttttggatgtaatggttgatttggcaaaaggtggaatgacaatgatagttgtaacacacgtaaatgggttttgctaaa

SEQ ID NO: 271334 - DNA, 496 bp, Unknown
  Bacterial polypeptide expressing nucleotide sequence isolated from the Sargasso Sea
atgtctgactctataattaaaatcaataatatgaacaaatggtttggagattttcaggttttaaaagacattaatttagaagtagaaaagaataaaaaaattgtagtgtgtggaccatcaggttctggtaaatctactttaataagatgtattaatagacttgaagaacaccaagaaggaacaataatagttgatggcactgaactttctgaagatacaaaaaatatagaaactattcgagccgaagttggaatggtttttcaacaatttaacctttttcctcatttatcaatattagataattgcactttagctccaatttgggttaaaaaaatgccaaaaaaagaagctgaaagtttagctatgaagcaattagagcaggttcagatagtcgatcaagctcttaaatttcctggtcaattatcaggaggtcaacaacaaagatgtgcaatagcaagagctttatgtatggagccaaaaaataatgctatttgat

SEQ ID NO: 271335 - DNA, 781 bp, Unknown
  Bacterial polypeptide expressing nucleotide sequence isolated from the Sargasso Sea
tgtatttgaaaatgtagcatttgggttaagaagattaaaaaaaagtagttcctttattaataaaagaacaaaagaagttcttgaactagttcaaatgcaagactttattttaagaaaaactaatcagttgtcaggaggacagcaacaaaggattgcacttgcaagagcgctagccccggaaccgaaggtattgctcttagatgaaccactttcagctctggatctaaaattaaggcaagcaatgagagtagagttaaagactttacaaaaagagactggcattacttttgtttttgtaacccatgatcaggaagaggctcttactatgtcagatagaatcgctgttataaatgaaggtagaattcagcaaattggtgagcctgaaattatttatgaaaaacccagtaaccagtttgttgctaaatttattggtgaggctaacttaatttctggtgaatgtattcaaactggaaaaaatgggatacttcaattaaactcaggacaaaagatttttgttgatatttccttagattatataaaaggtaaaactttaactatttttattcgtcctgaaagagtaaaaattaaaaaatccaataaaaattctaatgcaaaaattcaagaatttacttatttaggtaatgcagctcatatccaaattatttctaatgatgaagttataaatgtaaccttgcctatagacaaagcttcaaattttaaaaaagacgataaaatagatttggaatttcccaaagattttgtcagagttattaattcatga

SEQ ID NO: 271336 - DNA, 793 bp, Unknown
  Bacterial polypeptide expressing nucleotide sequence isolated from the Sargasso Sea
gctcagcaagccgccgcaccatcgtccggtcaacacggtgtttcaatcctacgcactgttcccgcatatgacggtttcggaaaacattgcctttggattacagatgcttaagcggccaaaggcggaaatctctgccaccgttgcagagatgctggaactggtgcagatgacggccatggccgaccgcaagaccgctcagatttcgggcgggcaacagcaacgcgtcgcgctggcccgtgccctcgcgccgcgtccgaaggttctgttgctggacgagccgctctccgcgctggatttcaaactgcgcaaagagatgcagctggaattgaagcgcctgcaacatgaaactggcatcacctttgtctttgtcacccacgatcaggaagaggcgctcaccatgtctgatcgcatcgcggtgatgaatgcgggcaccatccggcaaatcggcgggccacgtgatatctatgatcacccggcggaacgctttgtggcggatttcatcggtgacaccaatttcctcaaggcccaaatgctctcgaccgagggcgccgggtccagggtgcggctgtcgtctggtgcggaaattatggcgaaacctgcacagggcgagcctccagcgacgaatggcgcctccgtgaccctcgccgtgcgtccggagcacgccgatctgtgcgatcccaatggcgcgctcttggccgggagtctgaaaaacgtcgtctatttcggcaccgatacgcattatcatgtgggtctggagagcggggagatgttcattctgcggcgccaaaaccag

SEQ ID NO: 271337 - DNA, 543 bp, Unknown
  Bacterial polypeptide expressing nucleotide sequence isolated from the Sargasso Sea
tatgggaaaaataattgaattaaaaaaagtaaacaaatggtttgataaatttcaagtattaaaagatattgaccttgaagttgctccacaagaaaaaatagttatttgtggtccatctggatcaggtaaatcgactttgataagatgtataaataggcttgaggagcatcaagaaggaaatataattgttgatggtacagaattggctgaaaatacaaaaaacattgaaaagattagagccgaagtaggtatggttttccagcaatttaatttatttccacatctttcaattctagataattgttcgttagcaccaatttgggtaaaaaaattaccaaaaaaagaagctgaagaagttgcaatgaaaaatttaactagagtccaaatagatgatcaagcattaaaatttccaggacaactttcaggcggacaacaacaaagggcagcaattgctagagccctatgcatggagccaaaaataatgttatttgatgaacctacatctgctctagatccggaaatgattaaaagagtgttagatgt

SEQ ID NO: 271338 - DNA, 697 bp, Unknown
  Bacterial polypeptide expressing nucleotide sequence isolated from the Sargasso Sea
atggtttggagattttcaggtacttaaagacataaatcttgaagttgttgaaaaacaaaaaatcgtagtatgtggaccatctggttcaggaaaatctactctgataagatgtatcaataggcttgaagagcaccaaaaaggacaaattatcgttgatggaaatgaattgtctgaaaaaactaaagatattgaaaaaattagagctgaagttggtatggtttttcaacaatttaatttatttccgcatttatcgattttagataattgtactttagctcctatttgggttaagaaaactccaaaaaaacaagctgaagaatttgctatgaaacaattagagcaagtacaaatcgttgatcaagcaatgaaatttcctggacaattatctggaggacaacagcaaagagctgctttagctagagcactttgtatggaacctaaaataatgctttttgacgaacctacatcggcacttgacccagaaatgatcaaagaagttttagatgcaatggttaatttagcaaaaggtggaatgacaatgatagttgtaactcacgaaatgggttttgcgaaagaagttgcagatgaagttgtttttatggatgaaggtatgattgtcgaaagagcaaaaactaaagatttttttgcaaatcctaaaaatgatagaaccaaacttttcttaagccaaatactttaa

SEQ ID NO: 271339 - DNA, 864 bp, Unknown
  Bacterial polypeptide expressing nucleotide sequence isolated from the Sargasso Sea
aaaactagacttcgcttatggtaggaatcaaatcttattcgaatttgattttagtctggaagaaagtcaaatcggctgtttacttggtcccagcgggtgtggtaaaaccactgcgcttcgagcgatcgcaggtttcgagaatccgaccaaaggtgaaattatcttaaacggcaacaaactgaacggctcaaaaatatttgttgaacctgagaaaaggcaaattggaatggtattccaggacattgcattatttccccacctttcgattaaagaaaatatccaatttggtattcgttcattgtctcagaaccttagagacaaacgcactaacgaattgttggatttagttggcatgtctgaattcaaaaaaaaatatccccatgagatctccggaggtcaacagcagcgtattgctttggctcgagcaatagccccaaaaccttcactgctattaatggatgaacccctatctagtttagatgtggaactgagagagcaattggcacgtgagattcgacttattttaaagcaggaaaaggtttccgctatattggtaactcatgatcagaacgaagcctttgctgtgggcgaccatatctgtgttatgcaccaaggccgagttcaacaaaacgattctgcctataatctatatcatcatcctttaaaccgtttcgttgcagaatttataggggaagggaccatacttcctggcgtagttgtagatgaggatactatagcaacagatttgggagaaattaagggtagcttcccagaatcctgcaagcatcaggataaagtcgacgttttgattcggccagagaacgtcattttggcagatgataacgaaaataaagtattgattac

SEQ ID NO: 271340 - DNA, 469 bp, Unknown
  Bacterial polypeptide expressing nucleotide sequence isolated from the Sargasso Sea
tttaatttatttccacatttatcaattttagataattgtacgctagctccaatttgggtaaaaaaaatgccaaaaaaagatgctgaggaattagctttaaaacatttagaaagagttcaaattttagatcaagcacaaaaatatccaggccaactatctggaggacaacaacagagggtagctattgcaagagcactttgtatggagccaaaaataatgctttttgatgaaccaacttctgcattagacccagaaatgattaaagaagtacttgatgtaatggtaaatttagcaaaacaaggtatgacaatgatagtggtaactcatgaaatgggttttgccaaagaagttgccgatcaaatgatatttatggatgaaggaatgattgtagaaaaggctgatacaaaggaattttttgctaatcctaagagtgataggaccaaactttttttaagccagatactatagt

SEQ ID NO: 271341 - DNA, 760 bp, Unknown
  Bacterial polypeptide expressing nucleotide sequence isolated from the Sargasso Sea
aatgagttttttggaattaaaaaaagtaacgaaaatttatcctaacggcactaaagctgtacaaccaacatctcttaaaatagagaaaggagaatttatggtttttgttggaccttcaggttgtggaaaatctacattgttaagaatggtagctggacttgaagatattacaacaggggatattaaacttgataaaaaaattataaataaaattgatccatcagaaagagatgttgcgatggtatttcaaaactacgcattatatccgcatatgaatgtttataacaatttagcttatggattaaaaaatagaggactagctaaagatgtaatagaaaaaaaagtaaaagctgccgcaaagctattacagatatcagattatttagagagaagaccagcattattatcaggaggacaaaggcaaagagtggcaatgggtagagcaattgtaaggagtcctaaaatttttttatttgatgaaccattatctaacttagatgcaaaattacgtattcaaatgaggttagagattaaaaaacttcaaagaaaagttggtgtaacaagtatttttgtaactcacgatcaagtagaagctatgacattagcagatagattggcagtaattaataatggaataattgagcaattaggaacaccaatagaaatttataataatccaacatcagtgtttgtagctggatttataggatcacctcaaatgaattttatcgaaggtgagctaaaaaataaaaaactaaaa

SEQ ID NO: 271342 - DNA, 684 bp, Unknown
  Bacterial polypeptide expressing nucleotide sequence isolated from the Sargasso Sea
catgtctcaaaaagatagtttcgtaaaattcgagaaagtagataaaagctacgatggcgagatactggtcgttaaagatttaaatcttgatgttccgaaaggtgagtttttaactatgttaggaccatctggatcaggtaagacaacagtgttaatgatgttagctggatttgaaactccaacaagtggagaaatttatttggatggaaatccaataagtagtattccgccaaacaaaagaggcataggtatggtttttcaaaattatgcattatttcctcacatgactgtaaaagaaaatttagcattcccacttgaagttagaaaaatgcaaaaatctgaaatcgatgagaaagttggaaatgcacttgcaatggttgaattacaagattttggaaatcgtatgccactacaattatctggtggacaacaacaacgtgttgcattagctagatccttagtgtttgagccaagattagttttaatggacgagccacttggagcgcttgataaaaatttaagagagcaaatgcagtatgaaataaaacatattcatgaaaaaattggaataacagtagtttatgtaacccatgatcaaagtgaagctttaacaatgtcaaatcgaattgcagtttttaacgatggaaagattcagcaaatttcttccccagatattttatatga

SEQ ID NO: 271343 - DNA, 861 bp, Unknown
  Bacterial polypeptide expressing nucleotide sequence isolated from the Sargasso Sea
acaacttgtctgatgatgttggctggattcgaaacaccaaccaatggtgaaatctatttagattctaatcctatttcaaatattccaccacacaaaagaggaattggaatggtttttcaaaattatgcattgtttcctcatatgacagtttatgaaaatttagcatttcctttaagagttagaaaagttcaaaaagatgagattgataaaaaagtagataaagctttatcaatggtttctttatcaggatttgaaagtagaatgccagcgcaattatctggtggtcagcaacaaagggtagctgttgcaagagctctagtatttgatccagcagtagttctaatggatgaacctcttggagctttagataaaaacttaagagaaagtatgcaatacgaaattaaacatattcatgaaaatattggtgttactgtagtttacgttacacacgatcaaggagaagcattaacaatgtcaaataggatcgcagtttttaatgatggtaaagttcagcaattatcaagtcctgataaattgtacgaagaaccagttaattctttcgttgcagagtttataggtgaaaataatacatttggaggagaagtaactgacatttcaaaagatgtttgtaaagttaaactacaaaatggagaaattttagctaatccagtttcagtaacttccaaaggtgataaaacaacagtttcaataagacctgagagggcattgataaatccaaaagataaaatggataataatcaaacgggaaaaatcgaagaagttatttaccatggtgatcacactagagtaagattagatcttttaggtaataaagaatttatttttaaaagttccaaatag

SEQ ID NO: 271344 - DNA, 580 bp, Unknown
  Bacterial polypeptide expressing nucleotide sequence isolated from the Sargasso Sea
agattagaggagcaccaagagggagatataattgttgatggaaatgaattatcagaaaaaacaaaagatattgaaaaaataagagctgaagttggaatggtttttcaacaatttaatttatttcctcatctttcaatattggataattgtacacttgcacctatttgggttaaaaaaatgcccaaaaaggaagctcaagaactagcattagaccaacttaaaaaagttcagatagacgatcaagcaaacaaatttcctggacaactatctggaggtcaacaacagcgatgtgcgatagcaagagcattgtgtatgcagccaaaaattatgttatttgatgaaccaacgtctgcattagaccctgaaatgattaaagaagtacttgatgcaatggttagtcttgcaaaaggtggaatgacaatgattgtagttacccatgagatgggatttgctaaagaagtagctgatgaagtcatttttatggatgagggaatgatagttgagaaggctgacacaaaagaattctttgccaacccaaagagtgatagaactaagctttttttaagccaaattctttaaa

SEQ ID NO: 271345 - DNA, 798 bp, Unknown
  Bacterial polypeptide expressing nucleotide sequence isolated from the Sargasso Sea
aaattgctaaagtcaatcccaatgatattgaagcaaaagtcaaagaagcagttaatattttaggtttagaggatttgagaaaaagaaaaccctctcagctttctggagggcaaagacaaagagtagcaatgggtagagctattgtaaggagacctgatgcttttttatttgatgaacctttatctaatttagatgcaaaacttagaactcagatgagaactgaaataaaaaaacttcatcaaaaacttaaaacaacagttatttatgtgactcatgatcaagtcgaggcaatgactctagcggatagaataattataatgaaagatggttttattgagcaaattggctctccaattgaagtttttaataatccagtaaatgtatttgttgcaacttttatcggcagtcctcccatgaatataattgaatgtgaaataataaaaagtaaagatgaagttatgattaagttggataataacataatggtaaattgtcctcaaaacaaagtatcagaggtagctaatttaaaaaaagtagttgttggaataagggcagaagatatagttcctgtacaaagtaattctaatgaaaaaaaatcattatgggcttttaataaagaaattgatctggctgaacctttaggtactgaaacacaactattttttaaattacaaaatcaagaaattataagtagaatgtacaatccaagaccagttaatgttggggagaaaattaattttgaaatagcagataataaaattcatttttttgattatgaaacaaaaaaagcaatctaaa

SEQ ID NO: 271346 - DNA, 628 bp, Unknown
  Bacterial polypeptide expressing nucleotide sequence isolated from the Sargasso Sea
atgtcagataaaataattcagattacagaaatgaataagtggtttggtgatttccaagtattaaaaaatattaatttagaggtggagaagaataaaaaaattgttgtctgtggaccttcaggatcaggtaaatcaacattaatcagatgcataaacaggcttgaagaacatcaacaaggttcaattatagtagatggaaatgaattaacagaagatactaaagacatagaaaaaattagagctgaagttgggatggtttttcaacaatttaatttatttcctcatctttctattttagataattgtacactagctccaatttgggtaaaaaaaatgccaaaaaaagaagcagaaaatttagctcttcagcacttagaaaaagtacaaattgcagaccaagctaataaatacccgggacaactttcaggcggtcaacaacaaagatgtgcaattgctagagcattatgtatggagccaaagataatgttatttgatgaaccaacatcagctctggacccagaaatgattaaagaagtgttagatgcaatggttaatttagcaaaagcaggaatgacaatgattgtagtaacgcatgagatgggatttgcaaaaagaggttgcagatgaa

SEQ ID NO: 271347 - DNA, 676 bp, Unknown
  Bacterial polypeptide expressing nucleotide sequence isolated from the Sargasso Sea
ttactcaataaaagatagtactattctagaaaatttatcttttaatgtcttatctgaggatatcgtttttataattggtcctagcgcagctggaaaaacaacgcttctaagaataattgcaggtttcgataaagttgatcgtggttatgttcaagtgaatgatgctatcgttgataatacaaagatatttgttgaacctcatagaagaaaagtggggattatttttcaagatattgctctcttcccacatctatcttgtgaagataatattctttttggaatatctacccaggaaaaccataaaaaaaatgaaaggctacaatacttgtctgatattcttggcataaacgaaattaaaaataaattccctcatgagatatcaggtgggcaacaacaaagagttgctattgctagggcactagcccctcagccagaaattctcctgcttgatgaaccattcagcgcgcttgatgaggaacttaaagatcaactcatcaaagacctgagaaaattactaaaagatgagaggataacttcaatcatcattactcataatataaaagaatcttttcaaatatctgataaagtagcatatctatcatcaaagaggattttacagtgtgatacaccttatgatctgtatcataggcctaattcaagagaaattgctaacttt

SEQ ID NO: 271348 - DNA, 780 bp, Unknown
  Bacterial polypeptide expressing nucleotide sequence isolated from the Sargasso Sea
tgatcacagtcaaggatctaaacattttttatcctctgccaaataaaaatttttttaaaaaagattttttccatgcagtaaaagatgtgaacttttctatcccgcaaaaatcaacaataggcttggttggagaatctggttctgggaagtctactcttggcaaagctttagcaggactaattaattatcaaggatcagttctatacgatggtgtgaatattgataaattaaactcaaaggaatcaaagtcaattaaaaaagatatccagattgtttttcaagatccatatggctctctatcgcctagaatgaccgtaggcgaaatagttggagaaggtttagatgtgcattttgatctaaccaaaaaacaaaaagatgaacgcattgcagattgtcttaaggccgtagaaattaatccagatgatagatttaaatatccgcatgagttttctggtgggcaaaggcagcgagttgctatcgcaagatcactgattttgaatccttcatttatggttttagatgagcccacttcggccttagatagatctattcaaattcaggttattgagctattaaaaaatatccaaacagagtatgaattgacatatttatttattagccatgatcttaaggtagttagatcaatgtcagattatatatttgtaatgcagaatgggctcatagttgaatcagggcctgctaaacaagttttctcaaacccagaagaagactatactgataaactccttaatgccgcattacgttattcaaccgtttaat

SEQ ID NO: 271349 - DNA, 680 bp, Unknown
  Bacterial polypeptide expressing nucleotide sequence isolated from the Sargasso Sea
gatgagtacatctggcaatggacaagttgaacttaaaagtttggttaaatcatttggcgaaactcaagcagtaaatgatgtgagtttaactatacctgacggtgcctattgttgtatgattggtccatctggctgtggaaaaactaccatattaagaatgattgctggtcatgaagaacctacttcaggtgaagtattaataggtggagaacaaacagctggtttagagccagttcaaagaggtacctctatgatgtttcaaagttatgctctttttccacatcttactgttgcagaaaatgttgcttttagtcttagagttaaaggcgtagaaaaagatgttagaaggaaaagtgctatggaagtccttgagacagtcaagatgactcacttagctgacaggttacctgctcaattatctggaggccaacagcaaagggtagcattggcaaggtcccttataacaaatcctaaggttttacttttggatgagcctttatcagcattggatgagtttctacgtttacagatgcgtgaagaattaagaagattacaaaaagaaattggaattacatttattcatgtaactcatactcaacctgaagcattggctctagcagatatgattgttgtaatggatcagggagttattgatcaagctggaactgctcaggaaatat

SEQ ID NO: 271350 - DNA, 577 bp, Unknown
  Bacterial polypeptide expressing nucleotide sequence isolated from the Sargasso Sea
tatgtctgatccaataattaaaatagaaggtatgaataaatggtttggagactttcaagttttaaaagatattgacttatcagttgaaaaaaataaaaaaattgttgtttgtggaccatctggatcaggaaaatcgactcttataagatgtattaatagattagaagaacatcaaaagggtacaatcatagttgatggaactgagcttacagaaaatacaaaaaatattgaagcaattagagcagaagttggaatggtatttcaacaatttaatttatttccacatctatcaattttagataactgcacattagcaccgatatgggtaaaaaaaatgcctaaaaaagatgcagaagaacttgcaatgaaacaattagaacaagttcaaatagctgaccaggctcaaaaatttccaggacaattatcaggtggtcagcaacaaagatgcgcaattgcaagagctttatgtatggaacctaaaattatgttatttgacgaaccaacatcagctcttgatcctgaaatgattaaagaagtgcttgatgcaatggttaatctagctaaagcaggtatgacc

SEQ ID NO: 271351 - DNA, 589 bp, Unknown
  Bacterial polypeptide expressing nucleotide sequence isolated from the Sargasso Sea
atgtatcaatagattagaagagcaccaagaaggggatataattgttgatggaaatgagctatcagaaaaaacaaaagatattgaaaaaattagagctgaagttggaatggtttttcaacaatttaatttatttccacatctttcaatattagataattgtacacttgcaccgatttgggtgaaaaaaatgcctaaaaaagaagctgaagaactagccttagaccaacttaaaaaagttcagatagacgatcaagcaaacaaatttcctggacaactatctggaggtcaacaacagcgatgtgcaatagcaagagcattgtgtatgcagccaaaaattatgttatttgatgaaccaacatcagccttagatccagaaatgattaaagaagtgctagatgcaatggttagtcttgcaaaaggtggaatgactatgatcgttgtgacacatgagatgggatttgctaaagaagttgctgatgaagtcatttttatggatgaaggcatgataattgagaaggcagacaccaaagaattctttgctaacccaaagagtgacagaactaagctttttttaagccaaattctttaa

SEQ ID NO: 271352 - DNA, 907 bp, Unknown
  Bacterial polypeptide expressing nucleotide sequence isolated from the Sargasso Sea
atgtctgaactcaagctgaaaaagcttcaaaaaaaatatggtgaaactaccgccgtgcgcaaggttgaccttgttttgaatgaaccaacatattgctgccttttaggtccatccggctgcggaaaaacttcacttttgcgaatgattgctggtcatgaggtgatttcatctggttcagttttgatcgacggccaagatatttcagggaaaccgccatcactgcgaccgacgtcaatgatgtttcagaattatgcactttttcctcatctgaaagtgattgataatgttgcatttgctttaaaaatatctggaatggacaagctcgcaagatatgaacgcgcaatgcaaatgttgcgcggagtccaactccacaaactagcagatcgttttccaaaccaactgtctggtgggcagcagcaacgggttgcacttgctcgtgcgctgattaccgagccacgaatcttactacttgatgaaccactctccgctttggatccatttttacggattgaaatgcgggctgagctgaaagcacttcagagaaaattaggtatctctttcatccacgtgacgcacagtcaagatgaggcaatggcacttgctgacctaattcttgtcatgaatgatggtattgtagaacagcatggaacaccgatggaaattttcaacaaaccgagaaatgcatttgttgcaaattttataggcggccacaatgtgttggcaattggatcaaaattattcgcgataagagaggatcgaataaatctgataccaaatggaaacagcaaggtaaatgcaattgagtttttgggcgctaacgtcaaaatcaacgtgacatatggaaaaagtggaaatctgactgtgagccagtctgacgtttcgtttgctaagtcgaaaatgaagtagg

SEQ ID NO: 271353 - DNA, 756 bp, Unknown
  Bacterial polypeptide expressing nucleotide sequence isolated from the Sargasso Sea
taaaaaaagtatcatcttttttacaagtagattctttattagagagaaaaccttctcaattatcaggaggtcagaggcaacgtgtggctataggtagagcactagtaagagagccaagaatatttttatttgacgaacctttatcaaatttagatgccaagttgagagtagagatgagaagagagataaaaaaacttcatcagcaactaaaaactacagtagtttatgtaactcatgatcagacagaagcaatgagtttaggaacgaaaattgcaatcatgaatcatggagttattcaacaaaatgacactccagaaaatatttataacaaaccaagtaatacatttgttgcggactttataggctcaccatcaatgaatttgattaaaggtaatttaaaacaaaatactgataatttttcttttattgcagaaggttcaaatctagaaattccaattaaacattataattttaaaaaaacatcagaactaggcaacaaagaagtttattttggcatcagaccagaacatatctattttaaaaaattaaatgaagatgatctagaaattaatttaagtgccgacttaagtgagtatattggtcatgaacaaatcgtaacattcaattattctaatcaagaaattttagctaaatttccatcaactattaaagtagaattaaataaagaagcaaaattatattttgatttaacccaagtttcattatttgactctaaaagtgaggaaagaatttaat

SEQ ID NO: 271354 - DNA, 493 bp, Unknown
  Bacterial polypeptide expressing nucleotide sequence isolated from the Sargasso Sea
atgagcgcagatgtagagttaagtgatgtttcggttacatttggcagtttttatgccgccaagaatgttaatgtaaaagtaaatggaggtgagttcttcagcttcttaggaccttcaggctgtggaaagactactctgttaagggctatatctggatttcaagagccttctgaaggtaaagtgcttattgacaataaagatatgtctggaattggtcccaataaaagaccaaccgcgttaatatttcaaaacttagctctgtttcctctcatgagtgtgtcagaaaatattgcattttcccttgaagtaaggggcgtatcaaaagaagaaagaaaaaaaagagcggatgaacttttggaattgatagccttagagggacaaggagataaaaaagttcatcaactctctggaggtcaaaaacaaagagtagccattgcaagagctttagctgttgagccaaaagttcttcttttagatgaaccattgtctgcct

SEQ ID NO: 271355 - DNA, 838 bp, Unknown
  Bacterial polypeptide expressing nucleotide sequence isolated from the Sargasso Sea
tccctccaaacgacaaactgcaatggtgtttcagtcatatgctctttaccctcacatgaatgtttatgaaaatatgtcattcgggttaaagatagaaaagagatctaaagaagaaatccaaacaaaagttatgcaagcagcaaaaattctaaagatagaggaattgttggaaagaagacccaaacaattatcgggcggacagagacagcgtgttgcaattggaagagcaataacaagaaatccaaaaatatttttatttgatgaacctttatcaaatttagatgcagcactaagatcagaaatgagagttgagatttccaaattacataatcaaattaaaacaaatatgatttatgttacacatgatcaggtagaggcaatgactttagcagatagaattgtaatattaaatcttggtaatattgaacaagttggaactccagacgaaatttacaacaatccagcaaatatttttgtagctcaatttattggaactccaaaaatgaatattttacctttaaataatgaaaatataatttcagataataaaattatttttttaggtaatgaaataacttttgaaaaaactaaatttgataaaaaaaaatatttcttaggaataagacctgagcattttaacttatctaatgaatcacaatttaaatttaaacctaaaattgatcttgttgaaaatttaggtaatgaaaagattgtatacatgagtaacgacaacttagaacttagtgcaaaaatttctagtcaggaagattttcaaaatcagattaattttgactctaaagatatttttatttttgacgaaaacggaagaagaatttaa

SEQ ID NO: 271356 - DNA, 787 bp, Unknown
  Bacterial polypeptide expressing nucleotide sequence isolated from the Sargasso Sea
atgcctgaagttctaaaaatagaaaatcttcataagtccttcgataaacttgaagtacttgctggtatcgatctaaccctaaataaaggtgaaactgtagttttggtcggtgcatcagggtcggggaaatcgaccatgttgagatgtgtgaactttatggaaattcccacctcaggcaaaatttatttacagcaaaaactgatcggtaatgaaatcaatggaaagatggtttatcccgaaaaggaattaatcccacttcgtgcccgggtcggtatggttttccagcatttcaatcttttcccacatatgactgctattgaaaacgttatggagggacctaagactgttttgaaactacctaagtctgactgtgaagatcgagccaagacctaccttgaaaaagtaggactcctttggaaatcagacacctacccttcacaactgtccggaggtcagcagcaacgtgtcgcaatcgctcgtgcacttgctatggaaccggacttaatgttatttgatgaggctacatccgcacttgaccctgaactagttggggaggttctcgaaaccatcaaacaacttgctgatgacggtatgactatgatggtggtcacccatgagctagggttcgcttacacagttgccgaccgagtactgtttctttacaaggggactattctggaagaaggtgagccggaatcagtcctgatccacccacaacatgaagctacaaaaaacttcctcagagggcatggctcttttagattaccagagccccaattagattagt

SEQ ID NO: 271357 - DNA, 646 bp, Unknown
  Bacterial polypeptide expressing nucleotide sequence isolated from the Sargasso Sea
agaagatgagtttcttgtattagttggaccatctggatgtggaaaatcaactcttctaagaatgattgccggattagaaaaaatagacgaaggtgaaatttttattaatgatcaaaaaattaatgaacttcatccttcgaaacgccaaactgcaatggtttttcaatcttacgctctttatcctcatatgaatgtttatgaaaatatgtcttttggtttaaaaattgaaaaaagaccaaaggaggaaatcaacacaaaagtgatgcaagctgcaaaaattcttaaaattgaagaacttcttgagaggaaaccaaagcaattgtctggaggtcaaagacaaagggttgcaataggaagagctatcacaagaaatccaaaaatattcttattcgatgaaccattatcaaacttggatgctgctttaagggctgaaatgagagtggaaatatcaaaattacacaatcaaataaaaactaacatgatatatgttactcatgatcaggttgaagctatgactttagctgacagaatagttattttaaatcaaggaaatattgaacaggttggtactcctgaggaaatttataatgatcctgcaaatatttttgtggctcaatttattggtacacccaaaatgaatattcta

SEQ ID NO: 271358 - DNA, 844 bp, Unknown
  Bacterial polypeptide expressing nucleotide sequence isolated from the Sargasso Sea
tattgttctgttaggtccgtctggttgtggaaaatctacattactaagaatgatagctggactagaaaaaatagataatggcaaaatacttttagaaaataatcttttaaataatttattaccttcaaaaagacaaattgcgatggtttttcaatcttacgctttgtatcctcatatgaatgtttttcagaatatatctttcggtcttaaatctgaaaaaatctcaaaaaatgatatcaaagataaagtaaatgaagccgcaaaaattttaaaaattgaagaacttttggatagaagaccaaaagagctttcaggaggtcaaaggcaaagagtagcaattggaagagccataactagaaaccctaaattatttttattcgatgaacccctttctaatctagatgcggccctcaggtcagaaatgagagttgaaatttcaaaattacataaaaaacttaaaagcaatattatttacgtaactcatgaccaaattgaagcaatgaccttagctgataaaattgtaattatgaataaaggaaggatagaacaatttggaaccccagaggatatttataataatccaaataatgtttttgtcgcagaatttattggtaatcctaaaatgaatatttttaaggttaaaactgaagatattataaacaaaaatacatttaaattattcaataaagaaattaaatttgaaaatttagattttaaagatggtctttatgtaggtattagaccagaagatatctctctagaaaataaaagtgaatatacagctgaaattactgtcgatttaattgaaaatttaggatcagaaaaattatatattctcatttaa

SEQ ID NO: 271359 - DNA, 487 bp, Unknown
  Bacterial polypeptide expressing nucleotide sequence isolated from the Sargasso Sea
gtatttcaacagtttaatttgtttcctcatttatccgtaaaagaaaacataacgttagctccaatctgggtaaaaaaaatgcctaaagctgaagcagaagagcttgcaatgaaacaattagagattgttaagatcccagaacaagcaaataaatatcctggtcaactatctggaggtcagcaacaaagagttgctattgcaagatcccttgcaatgaaccctaacataatgctttttgatgaaccaacttcagcactagatcctgaaatgattaaagaagttttagatgttatggttgatttagctgaagggggaatgactatgattgttgttactcacgaaatgggttttgctaaaacagttgctgatagaatggtgtttatggatgaaggaaaaattgttgaggaagctagcccagataaattttttaataatccagagagtgatcgaaccaagctatttttaagtcaaattcttcatcagtaat

SEQ ID NO: 271360 - DNA, 687 bp, Unknown
  Bacterial polypeptide expressing nucleotide sequence isolated from the Sargasso Sea
tatgtcaaagaaccagcaatttgttagatttgataaagttgataaaagctatgacggtaaaattttagtagttaaagatttaaatttagacatagcagaaggtgaatttatcacaatgttgggaccatctggttctggaaaaacaacatgccttatgatgttggcgggatttgaaacaccaactaatggagaaatctttttagatcaaaatcctatttcaaatattcccccacataaaagaggaattggaatggtctttcaaaactatgcgttgtttcctcatatgactgtctatgaaaatttagcatttcctttaaaggttagaaaagttgcgaaagacgaaatagataaaaaagttgataaagttttatcaatggtttcgctttcaggatttgaaaaaagaatgccaggacaattatctggtggccaacagcaaagagttgctgtagcaagagctttagtatttgatcctcaagtagttttaatggatgaaccactaggagctctagataaaaatttaagagaaagtatgcaatatgaaataaaacatatacatgaaagtattggcgttacagtcgtttatgttactcatgatcaaggagaagcccttaccatgtcaaatcgaatagcagtatttaatgacgggaaggttcaacaactttcgagccctgacaaactttatgaaga

SEQ ID NO: 271361 - DNA, 806 bp, Unknown
  Bacterial polypeptide expressing nucleotide sequence isolated from the Sargasso Sea
atagtttcactacttggcccatcaggatgtggtaataccactttattacggatcatagctggtcttgagacacctgatcctggtggcaagatctggtttgatagtgatgacgttactgatctaccagtggaacgaaggcaagttggtatggtttttcagtcatacgctttattcccaaatatgtctgttagagcaaatatcggttatggtttaaaaatgaaaaaactacccaaggctgatattgaagcgcgggtctctgaagtcctagaaatgtgccaactaaatgattacgctcaacgcgcagttactgcattgagtggggggcaaagacagagagtagcattagctcgtgccatcgcacctcgaccaaggttattattgctcgacgaaccattatcagcgctcgacgcagcattgcgagaaactttgcgcgatgaactggcaattcttctgagaaaattcaatataacagcaatttttgttacgcacgatcaaaatgaagctatggcaattgcagatcgcgttgcggtgatgtcacagggagaaatagttcagagtggaacgccagaggaactctaccgaaagcctacttcaaccttcgtagcaagttttgttggcagtgcaatgcatttagcgggcgaaataaatggctcaaaactccaacttaaaggtggcgaggtttcattgccagcagacgggacaggttgcgaagcattcgtaagggccgagaatattcaaataaataaaaatggctcgctttctggatatgtagatacagtaactttccttggtacacattacagagt

SEQ ID NO: 271362 - DNA, 754 bp, Unknown
  Bacterial polypeptide expressing nucleotide sequence isolated from the Sargasso Sea
tccacataaaagaggtattggtatggttttccaaaactatgcattgtttccacacatgactgtatatgaaaatttagcgttcccattaagagtaagaaaagttgaaaaagatgaaatagataaaaaagtagataaagcattatcgatggtttcattaaatggttttgaaactagaatgcctgctcaactttctggtggtcagcaacaaagggtagcagttgcaagagctttagtatttgatccagctgttgtcttaatggacgagcctttaggtgcattagataaaaatttaagagaaagtatgcaatatgaaattaaacatattcatgaaagtattggtgtaacagttgtatatgtaactcatgatcaaagtgaggcattaaccatgtcaaaccgaatagctgtattcaatgatggaaaagtacaacaactttcaaatccttcagaattatatgaaaaaccagtgaattcatttgttgcagagtttattggtgaaaataatacatttaatggagaaatagtagatattgataaagataaatgtaaagttaaattagctaattcagaaatattagctaaccctatatcagtaaagtctaaaggtgaaaaaactactgtttcattgaggcccgaaagagcattgataaatccaagtgaaaaaatggataatatgttttctggtaagattgaagaagtaatttatcacggagatcatacaagggttagattaaatcttttaggtagctctgagttt

SEQ ID NO: 271363 - DNA, 859 bp, Unknown
  Bacterial polypeptide expressing nucleotide sequence isolated from the Sargasso Sea
tttgaaactcctactaatggagaaatctttcttgatggtatgcctattagtaaaatacctccttatgagagagagattggaatggtatttcaaaactatgcactctttcctcatatgacggtacaagaaaatttggcttttccacttgaagtaagaaagatgtctaaagaggaaacaaaatccaaagttcaaaaagctctcgatatggttgagctaggtgaatttggaactcgttttcctgcacaattatcaggaggacagcaacaaagagttgctctagcaagggctctagtttttgaaccaagacttgttttaatggatgaacctcttggggccttagataaaaatctaagagagcaaatgcaatacgagattaaacatatacacgatagaataggtattacagttgtctatgtaactcatgatcaaagtgaggccttaacaatgtcaaatagaattgccgtttttaatgatggggtagttcagcaattatctactccagatattttatatgaaaaacctgaaaattcttttgttgctcagtttattggagaaaataatagaatgactggaacaattaaaaatatggataataattattgttcagttgatcttgataatggggctggtactgtaaaagctctcaaagtaaatgttggaaatattggagaaaaaactcaactatctgttagacctgagagagtatctttgggctcagaaggtaatggagaaaatgtatttactggcaaggtagaggaacttatttatttaggtgaccatatccgtgtaagattagatgtttgtggtaataatgaattcatagttaaggtagcaaatgagggatccttgattataacga

SEQ ID NO: 271364 - DNA, 652 bp, Unknown
  Bacterial polypeptide expressing nucleotide sequence isolated from the Sargasso Sea
atggacaagcccacacgtcatgatcgcgctatgcaaatgttgcgcggcgttcaactcgacaaactggcagatcgatttccgagccagctatctggtggacagcagcaacgggttgcgcttgctcgtgcgctaatcactgagccacgcgttctactacttgacgaaccactctctgctttggatccattcttaaggattgagatgcggtctgagctcaaggcacttcaaagaaaattaggtatatctttcatccacgtgacgcatagtcaggatgaggcgatggcgcttgctgacttaattctggtaatgaatgatggtattgtggagcagtatgggacgccaatggaaatttttaacaaaccgagaaatgcatttgttgcaaattttataggcggccacaatgtgttggcgatcgagtcaaaagtattcgcgataagagaggatcggataaatcttataccgaatggaaacagtagggtaaacgccattgagtttttgggcgctaacgtcaaaatcaatgtgacgtatggaaaaagtgggaatcttactgtgagccagtctgacgtattgtttgccaagtcgaaaattaaggttggcgataatgtaaaagtcagctggaacaaaaaaaatcaactagaacttaagcaatagg

SEQ ID NO: 271365 - DNA, 868 bp, Unknown
  Bacterial polypeptide expressing nucleotide sequence isolated from the Sargasso Sea
tatggccttaaaaaaagatttcgttaagtttgataaagtagacaaaagctatgatggaaaagtcttagttgtgaaagatcttcaattagatattgaggaaggtgaatttgttacaatgttaggaccctctggctctggtaaaacaacttgcttgatgatgctagctggatttgaaacaccaaccaacggtgaaatatatttagatggaaatgcaatttcaagtattccacctcacaaaagaggaataggaatggtgttccaaaattatgcgttattcccgcacatgactgtctatgaaaatttagctttcccactaagagtgagaaaaattccaaaagatgaagctgataaaaaaattgataaagctttatcaatggtttcattacaaggtttcgctcaaagaatgccaggtcaattatctggaggacagcaacaaagagttgctgttgcaagatcattggtatttgatccacaattagtattaatggatgaacctttaggagctttagataaaaatctaagagaaagtatgcaatatgagattaaacacattcatgaaaatattggagtaactgttgtttatgtgacgcacgaccaaagtgaggctttgactatgtcaaatcgtattgcagtatttaatgatggtaaagtacaacaactttccagtccagatgaattgtatgagaaaccagtaaattcttttgttgcagagttcataggtgaaaataatacttttgctggagaagtttcagaaatttctggaggaaaatgtaaagtaaaattagctaatgctgagatcatggcaaatcctatatcagtaaaaggaaaaggagataaaaccacagtatctattagacctgaaaggggc

SEQ ID NO: 271366 - DNA, 709 bp, Unknown
  Bacterial polypeptide expressing nucleotide sequence isolated from the Sargasso Sea
tccgaaacaagagattattgacaaggtagaaaaagctgcaaatattttgcaacttggcgatttacttgagagaaaacctaaacagttatcaggaggccaacgtcaacgcgtggccatcggccgcgcaatcgtgagagatccagaagtttttttgtttgatgaaccactgtcaaacctagatgcggaactgcgtgtgcaaatgcgagttgaacttgcccttctgcataaacaattaaatgcaaccatgatctatgtcacgcatgaccaaattgaggctatgaccctagcagacaaaatagttgtcttgagggatggcgttatagagcaaattggagcgccaatggagctttacaacaaaccagctaatgaatttgttgccggttttataggctccccgagaatgaatatggttccagtccaaaccgctatagatgcaggctggaaaggtgcaaaaatagctgaggccgttaaaattggtataagaccagaacacttggttaggagcaaaacaggactggaaggtgtcatttattatgtagaacatcttggaggtcagacgcttacacacattaaattgctggataatactgatattacattacttgaacctggcgagcatacttacaacaggggagacaaattaaaagttgaacctaaatctaaaacaatgcacgccttcgacaaaggcgcaaaagctattaggaagtaa

SEQ ID NO: 271367 - DNA, 778 bp, Unknown
  Bacterial polypeptide expressing nucleotide sequence isolated from the Sargasso Sea
tatgcagaatgtatcctatggccttaccatgagccgtattagtaaacaagaagtaaaggataaggcacaaactggacttgaattggttggtctttccgagtttggtgaacgtttaccaagcgagctgtctggaggtcagcagcagcgtgtcgccgtagcacgtgcccttgtactggaaccagaagttcttttgtttgatgagcccctgtcaaatcttgatgcaaagctccgaagaagagttcgtgaagaaataagagaattgcagagggaacttggtttgactacagtttatgttactcatgatcaggaagaagcacttgcagtttctgatcgaatcattgtgatgaacgaggccgttatagctcaggagggtaagcctagacagctttacgaagaacctgttaatttgtttgtttctgattttattggtgatgcaaatttggtacagtcaacaattcttgaaattgatggatcaaatgctaaagtagatattggagggcttcaactgcaattacctcatcgaggattgattcctggagaagccatggcagcactaaggccacagtccatttgtttgcatcaatctggaactgaaaaaggaatcttaggaactatactaaagtcatcttatctaggagatcatctcgaatatacaattgaatgtaaacttggtgatttatttgttatagacaacgagattcaaactcagcatcttccaggtgcagaagtctacattactttcaggtcttatggagtaagtttaatccctgaatcttga

SEQ ID NO: 271368 - DNA, 469 bp, Unknown
  Bacterial polypeptide expressing nucleotide sequence isolated from the Sargasso Sea
gtttaaccttttccctcacctcaccgtgcgagacaatatcagtcttgctcctatttgggtaaggaaaaaacctcgcgctgaagctgaagaacaagcaacggcattactggaaagagtcggcattcctgaacaggctgacaagtttcctggacaactatcaggtgggcaacagcagcgagttgctattgcacgtgctctcgcaatggaaccgaaagtaatgctttttgatgaacccacctctgcactggacccagaaatgataaaagaagttttagatgtgatgaaagaattagctttgtcaggcatgacgatgatggtggtcactcacgagatgggtttcgccaaagaagttgcggacaagatcatgtttatggagggtggacagatagttgaaataggaactcctgaacatttctttacaaacccaactgaagaaagaaccaaactttttctttcccaaatcctctaa

SEQ ID NO: 271369 - DNA, 565 bp, Unknown
  Bacterial polypeptide expressing nucleotide sequence isolated from the Sargasso Sea
aatgagttttttagatttagaaaatgtaactaaaatttatccaaatggaacaaaagccgtaaatgaaacttctttaagtattactgagggtgagcttatggtttttgtagggccaagtggttgcggtaaatctactttattgaggatgattgcaggtcttgaagatattacggatggtgaaataaaacttgataataagataattaataaagttgatccttctgaaagagatgttgcgatggtttttcaaaattatgccctttatcctcacatgaatgtatttaaaaatttatcttatggtctaaaaaataaaggtgaatcaaaagaaaaaatagaaaaaaaagttaatgaagtagctgaactattagagattaaagagtttttacaacgtaaacctgcacaactttcaggtgggcaaagacaaagagttgctatgggaagagctattgttagaaatccaaaggcctttttattcgatgagcctctttcaaaccttgatgctaaattaaggggacaagtcagaatagaaattaaaaaattgcaaaaacaaatgggtgtgactagt

SEQ ID NO: 271370 - DNA, 895 bp, Unknown
  Bacterial polypeptide expressing nucleotide sequence isolated from the Sargasso Sea
tatggggagttcagatagtttcgttaaatttgataaagttgacaaaagctacgatggagaaacacttgtagttaaagatctcaatgtagatattcccaaaggggaatttcttacaatgctcggaccttctggttctggaaaaacaactacattaatgatgttagctggatttgaaactcctaccggtggagaaatatatttagaaggtgaagctatcaataaaattcctcctaacaaaagaggaatcggaatggtatttcaaaactatgcattatttccacatttaacagtaaatgagaatcttgcttttccacttgaagttagaaaattaaataaatcagacattgaagagaaagtaaaaaaaactttggatatggtggagctaggagcgtttggaaatcgtatgccgttacaattatcaggcggacaacaacaacgtgttgctttagcaagatctttggtttttgaaccaagattagtattaatggatgaacctttaggagcgcttgataaaaaacttcgtgaacaaatgcaatatgaaattaaacatattcatgaaagaattggaatcacagttgtttatgttactcatgatcaaagcgaagcattaacgatgtcaaatcgtatagcagtatttaacgatggaaaaattcaacaaatatcatcaccagatattttatatgaaaaacctgagaatgcatttgttgcaaactttattggagaaaacaatcaacttaaaggaaaagtaaaatctattaacggaaaaaattgtgttgtaactacagaaaaaggtgatgacattacttctttaaaaataaatgttaattccgtcggagattcctcaacagtttctttgcgtccagaaagagttgagataaattctacccgaaggtaa

SEQ ID NO: 271371 - DNA, 553 bp, Unknown
  Bacterial polypeptide expressing nucleotide sequence isolated from the Sargasso Sea
tatgaataatattattacatttgataaggtttccaaatcttttggtgatctaaaggtattagatcaattaaatttagaggtaaaagatggtgaaaaattagcactgattggcccaagtggttctggtaaaacaacaattttacgaatattaatgacattggagacaatagatagtggatttgtatctgttaataatgagtatttatggcatgaaaaaattaataataaagtagttccagcaactgacaaccatttacaaaaaatgcgtgatcagattggtatggttttccaacaattcaatttatttcctcatttaactgcaatagaaaatgttaaacaaccgcaaattttagtaaaaaagaaaaaagaaattgaggcaaaagaaaaagcagaggatctttttaatatgattgggttaagtgataaaattgatcattatcctcatcagttatctggtggtcaacaacaaagagttgcaattgccagagctttagcaatggatcctaaaataatgttatttgatgaagttacatctgcattagatcctgagttg

SEQ ID NO: 271372 - DNA, 730 bp, Unknown
  Bacterial polypeptide expressing nucleotide sequence isolated from the Sargasso Sea
atgatctcgattaggaatctttcgaaaacctttaataaaaacattcatgctgttaaaaatgttgacttggaaatagccgaaggagaagttgtagtcattgttggtcccagcggttcaggcaaatccacagttcttagatgtattaacaggcttgagatcccgactgaaggatcaatagctatcgatggcatcgagttaaccgacccagaatgtgatatcgacacaataagagctgaagtgggcatggtgtttcaacaattcaacttgttccctcatttaacagtgatggaaaatgtctgtttagctcaacgaaaagtaaggggacgtagcaaaagtgaagctaatgaaatgacaatgaagcaacttacgagagtaggaattcccgacaaggcagattcatatccgcgccaactgtcaggtggacaacaacaaagggtggctattgctaggtcattagcgatggaaccgaaaattatgctttttgacgaacctacttcagcattagatcctgaaatggtaaaagaagttctagatgtaatgcttgagcttgcctcagaaggaatgactatggcagtggttacgcatgaaatgggttttgcgaaagcagctggtgaccggttagtttttatggacgaaggaatggttgttgaaatcggtccacctaatcaggttttcgacagtcctaatgaacaaagaactaaggatttcttcgacaagatcctttattgac

SEQ ID NO: 271373 - DNA, 445 bp, Unknown
  Bacterial polypeptide expressing nucleotide sequence isolated from the Sargasso Sea
aggttttatttttcagggctttaacctgattaaagatttcagtttgtttgacaatatagagttgccgctgcgttatcgtggttttagttcagcagaacgtaaacgccgggttgaacatgcattagaaaccgtaggtttagctgcacgtcgtgattatcacccaagtcagctttctggtggtcagcaacaacgggtcgccatagcccgtgctattgccggtgagccacgcattctgctggcggatgaacctacaggtaacctggattcgttaatggcgcgtcaggtgatggaactgctggaaaaaattaaccagcaaggctgcaccattttgatggtaacacacgacccggatcaggctcgtcgcgccaaccgtcatattcagattgtcgacggtcagttgaatgacgcgactatgtatgaacctttagtcgcagcgggagcttaa

SEQ ID NO: 271374 - DNA, 510 bp, Unknown
  Bacterial polypeptide expressing nucleotide sequence isolated from the Sargasso Sea
ttgaaaaaataagagcagaagttggtatggtttttcagcaatttaatttgttcccacacttgtccatattagataattgtacattagctcctatatgggtaaaaaaaatgcccaaaaaacaagctgaagaattagctatgaaacaattagagcaagttcaaatagttgaccaagcaaaaaaatttccaggtcaattatctggtggccaacaacaaagatgtgcaatagccagagcattatgcatggaaccaaaaataatgctttttgatgaaccaacttcagctctagaccccgaaatgataaaagaagttttggacgcaatggtcaacctagcaaaaggaggaatgaccatgatagttgttactcatgaaatgggttttgctaaagaagtagctgacgaggttatttttatggatgaaggaatgattgttgagcgagctcccacaaaagaattttttgctaatcctaaaagcgatagaactaaactttttttaagtcaaatattgtaat

SEQ ID NO: 271375 - DNA, 884 bp, Unknown
  Bacterial polypeptide expressing nucleotide sequence isolated from the Sargasso Sea
gaatgatcttcctcctggagatcgtgatttagctatggtgtcccagaattatgcgttgtattcccatatgactgtcgcaaagaaccttggatttgcccttaaagcaagaggtttggaggggaatgaaattgaaaaacgtgtccagaaggttgcgcacatgcttgatcttcaggaaatgcttggacgaaaacctcgtcaactttcaggagggcaaaggcagagggttgcagttggaagggcaattgtaaggaatccacaggcttttttaatggatgaacctctttcaaatcttgatgcattgttgcggctacaaactcggaaggaattgattgaattgactggagagctcaaaagtacagtgatttacgttacccatgaccaagtcgaagcaatgaccatgggacatcgactggcagtgatgaataaaggagaagttgtccaacttgatacccctgaaaacattttcagtcaaccttctagtcgttttgtggctgaattcattggaagtccccccatgaattttttaaacgtggagatcgttgagaaaaacaagaaaagaatcttccaacagggttcctttgaggttcctgttcctgattccatgaaagcgttgaaggaaacatcggtaatcctcggattccgtccgaatgaactggaactggtctctcggggggggatttcaggaacggtttccgtagtggaaacactcggttcagagaaacttgtttatctcaaactgggcgaaaaaacgatttccctactggttccttcttcaaaaaaaattaattcaggagaaaatgttcgcttcaaaataaatcctgaatccttgcatctattcaatattgccaacgaaacaaggatctcatttgatgatacagtttaat

SEQ ID NO: 271376 - DNA, 675 bp, Unknown
  Bacterial polypeptide expressing nucleotide sequence isolated from the Sargasso Sea
tatggcaaatattaaattttcaaatgtaggcaaatctttcggagataataaagtaattaataacttcaattttcaaggcaaggatgatgaatttttagttttagttggaccatcgggatgtggcaaatctacacttctaagaatgattgctggcctagaacaaatagatgaaggtgaaattcaaattaacaatgaagtaattaatgaaatgcacccatctaaaagacataccgcaatggtattccagtcctacgctttgtatccacacatgaatgtttatgataatatgtcttttggacttaaaatagaaaaaaaaactaaagaagaaattcacacaaaagttctaagtgcagccaaaacacttaaaattgaagatcttttagaaagaagaccgaaagaactttcaggtggccaaaggcaaagggttgcaattggaagagcgataactcgaaatccaaaaatttttttatttgatgaacctttgtctaatcttgatgctgctcttagagcagaaatgagagtcgaaatctctagacttcatcaaaaaattaaaactaatatgatctatgtaactcacgatcaggtagaagcaatgactttagcagatagaattgtcatattaaataatggcaacattgagcaagtaggaacaccgaacgaaatttacacaaatcc

SEQ ID NO: 271377 - DNA, 645 bp, Unknown
  Bacterial polypeptide expressing nucleotide sequence isolated from the Sargasso Sea
caagcaaactagatcatcatatacctgttgaacaaagaaatattggcatggtgtttcaagattatgtcttatttccacatatggatgtaagtaaaaatataacatttggactaaaggatatttcttccctaagaactaaagaacgtctggatgaattaatcgaactgtttggattaaatgaacatactaacaaatatcctcatcaattgtctggtgggcagcagcagcgagttgcattagcaagagcaatggcaccaagacccagcgtacttttgttggatgagccatttgcgagcttagatattgaattacgcgaatcattggcatgtgaacttcgctccatattaaagcaggatagcgtagcaacaatcatggttactcataatcaattagaggcctttgctatgggagatattattggggttatagataatggaaaactgaaacagtgggataccgcattcaatttgtatcatcaacctaaaacattaaatgttgctaattttattggcgagggaacttttatccaaggagagattataaatagtactgatgtgaaaactgatattggtagaataaaggggcaggtgccccacaacattgatgtaggaaaaaaagttcgtgttttgattcgctccagatgat

SEQ ID NO: 271378 - DNA, 679 bp, Unknown
  Bacterial polypeptide expressing nucleotide sequence isolated from the Sargasso Sea
ctggttcgcttcgccgaagtccagaagagctacgatggcatttccctcgttgttaaaaacctgaatctcgatattgcagatggcgagttccttaccatgttggggccatccgggtcgggcaagacgacctgtctgatgatgctcgccggcttcgagaccgcgacccacggccagatttatcttgacggtgtgccgatcaacaatgtgccgccacacaaacgcgacatcggcatggtgtttcagaattatgcccttttcccgcacatgacggtttcggaaaacctcgcgtttccgttgaaggtccgaaagatggggcaggtggacatcgcggaacgggtacagcgcgcgctcgacatggtgcaattgtccgacttcggtggacgacggcccgctcaactctctggcggccaacagcaacgtgtcgcggtcgcgagagcgctcgtcttcgacccaaaactggttctgatggatgaaccacttggcgcactcgacaagcagctgcgcgagcagatgcagtacgaaatcaagcacattcacgaaaaccttggaattactgtggtctatgttacccatgaccaatctgaggctctgacgatgtccaaccggatcgccgtgtttaatgacggcgtgatccagcaactggcgccccccgccgaactatacgagagcccggagaatt

SEQ ID NO: 271379 - DNA, 738 bp, Unknown
  Bacterial polypeptide expressing nucleotide sequence isolated from the Sargasso Sea
aatgaaacaggagaatgccctagaggctatcagcgtttcttgtgtttttaagataaaccagggtttgttcaaaggatcgaaacctcttgtcgcggttaatggggtctcattgcaaataccaaagggtaaggtcgtaggtttggtaggggagtccgggtgtggaaaatcaacactagccaatattttgttaggattgcaaaacccgacttcaggtgaggttctctattcgggcaaagccgcatcgggtttttcaaatcgccacatagcaaggcgcattcagccaatcttccaggatccttactcgtcgcttaacgccacaaaaaccgtaaagtcgatcatatcgttacctttacgtattcataaaattggagagcctaatacttgggatggaaaagttagggaaatgctggacttggttggtctaccagcacgtgtggcagagagttatccttcacaattatctggtggtcaacggcaacgagttgcaatagctcgagcgcttataatgcgccctgaggttataatatgtgacgaaccaacctccgctctggacgtgtccgtgcaatctcaaatattgaatttattgcaagacctgcggttagagcttgggcttacctatttgatgattagccataaccttgccgttgtagaacatatggctgaccgagttgctgtaatgtatctgggtcgtatcgttgaggaagctgagtcctccatcttatttaaagagcccaagca

SEQ ID NO: 271380 - DNA, 706 bp, Unknown
  Bacterial polypeptide expressing nucleotide sequence isolated from the Sargasso Sea
ggcatgcgcaaagccgggctcacgcgcgccgagctcgacaaacggatcgacgaagcgctggaactcatcaaactgcccggctacggcagccgcggggcagatgaactctcgggcggacaacgccaacgtgtcgcgctggcgagagcgctcatcaagcagcccaaagtgctgctgctggatgagccgctaggcgcgctcgacaaaaaactgcgtgaacagatgcagatcgaattgcgccaactgcagcaacagattggcattaccttcctgtttgtcactcacgatcaggaagaagctctcaccctctctgaccggattgcggtgatgtcggaaggcgccgtcatggagattgcctcgccgggacaactttatgagtcacccggatcgccgttcgtcgcagatttcatcggcagcatgaatttctttgaaggcgagatcctctcctcaactgacagtgcgataacggtggaaaccagcgctctggggactgtcagtgtgacgaactccgatacccagatgaccgctggtcaaaaagcctgggtcgcgatccgacccgagaaaatgcagccggtgttttccgatccgggagaacatgccaacacgacaagcggcacaatgggaccatcagcctatctgggtgaccggagccacttctacgtgcacctgccacagcgcgaagaccctgtgctggttgcgctgcaaaatc

SEQ ID NO: 271381 - DNA, 703 bp, Unknown
  Bacterial polypeptide expressing nucleotide sequence isolated from the Sargasso Sea
aatgaatgatgtcatcatcaacgcccagaacgtggttaaggattacagcatttctcagggcatatttaaaaacaaggaaattttaagagccgttgatggagttaatctagagatttcgagaggcgaggtgttagctctcgtgggagagtctggttgcggcaagacaacattagcaaaaattatattaggcctactccctccaacctccggctcggtgcagttaagtggtcaaccgcttgctcaaattcctcgtcttaaactagctagaatgatacagccagttttccaagacccttattcctctcttaatcctaggaagacaattggttcaataataacactacccttgaaggttcaaggcgatgaaaatccagaaacgtgggaagctagaacccgagaaacaatggacctagtcggcctacatggccgaatgtattatcaatatcctaatcagctctcgggtggacagaggcagcgcgtcgcaattgcccgcgcactaattaatagaccagaggttgttgtttgtgacgagccaacatcagctctagacgtctctgttcaatcacaaatattaaatcttcttaacgaccttcgaagagagttaaacctgacttacataattattagtcataaccttgctgtagtagaacatatggcttcacgggttgcggtgatgtattttgggaaaatggtagaggaggca

SEQ ID NO: 271382 - DNA, 476 bp, Unknown
  Bacterial polypeptide expressing nucleotide sequence isolated from the Sargasso Sea
tatgccagaaagtattattcaaattaaaaatgtcaataaatggtttggcgactttcaggtactaaaagatataaatttagatgttaaaccaaaagaaaaaattgtagtttgtggtccatctggatctggtaaatcaacattaattagatgtattaatagactagaggagcatcaaaaaggatccatagtagtagatggtacagaattatcagaggatactaaaaatattgaggctataagagcagaagtaggaatggtatttcaacaatttaatttgttcccacacctatcaattttagataattgtactcttgctccaatttgggtgaagaaaatgccaaaacaaaaagctgaagaattagcaatgaaacagctaaatcaagtgcaaataggagatcaagcgcaaaaatttccaggacaattatccggaggacaacaacaaagatgcgcaatagcgagagcattgtgtatggagc

SEQ ID NO: 271383 - DNA, 727 bp, Unknown
  Bacterial polypeptide expressing nucleotide sequence isolated from the Sargasso Sea
atgtcaaaaaaagaagatttcgtaaaatttgataaagtcgacaaaagctacgatggaaaagtattagtagttaaagatttgaatttagatatcgaagaaggtgagtttgtaacaatgcttggaccctctggttcaggaaaaactacatgcttaatgatgcttgctggttttgaaacaccgactaatggagaaatttatttagataaaaatccaatttcaaatattcctccacataaaagaggtattggaatggtttttcaaaattatgctctgtttcctcatatgacagtttttgaaaatttagcttttcctttaagggtaagaaaaatttcaaaagacgatatagataaaaaagtagaaaaagcattatcaatggtttcattatcaggattcggaaatagaatgccaggacaactttcaggaggtcaacaacagagagtagccgtagcaagagcattggtatttgatccatccgttgttttaatggacgaacctttgggtgctttagataaaaatttaagagagagcatgcagtatgaaattaaacatattcatgagagtattggtgtaacagttgtgtatgtcactcacgatcaaggtgaagcattaacaatgtcaaacagaatagcagtatttaatgatggtaaagttcagcaactctcaagtccagataagttatatgaagaacctgtaaattctttcgttgcagagtttatggagagaataa

SEQ ID NO: 271384 - DNA, 817 bp, Unknown
  Bacterial polypeptide expressing nucleotide sequence isolated from the Sargasso Sea
tttggaatgtctagatacagtttatatttggaaaaaaagcttaaaacaggtattaacatgggagcagattaatatgtcagaagattcaataatttcattacaaaatgtaaataagtggtttggagattttcatgtacttaaagatgtggatcttgaagtaaaaaagaaagaaagaattgttgtttgcggaccttcgggttcaggtaaatcaacgatgataagatgtattaatagattagaagaacatcaagaaggcacaataatagttgatggtattgagcttacaggcaatttaaaaaatatagatagtgtaagaaaagaagttggaatggtttttcaacaatttaatctttttccacatttgtctgttaaggaaaatattactcttgctccaatttgggtaaagaaaatgcctaaagcagaagctgaagagttggcaatgcaacaacttgaaattgttaaaataccagaacaagctgataaataccctggtcagttatctggggggcaacaacaaagagttgctatagctagatctctagcaatgaaaccaaacattatgctttttgatgaacctacatccgctcttgatcctgaaatgattaaagaagttttagatgttatgattgatttagctgaaggtggaatgactatgatagtcgtaactcatgaaatgggttttgctaagactgtagcagatagaatggtttttatggacgagggaaggattgttgagcaagcagcaccagataaattttttaataatcctgaaagtgacagaactaaattatttttaagtcaaattcttaatcattaa

SEQ ID NO: 271385 - DNA, 736 bp, Unknown
  Bacterial polypeptide expressing nucleotide sequence isolated from the Sargasso Sea
atgtctgacccaataataaaaattcaaaatatgaataaatggttcggtgattttcaagttttaaaaaatataaatcttgaggttgaggcaaataaaaaaattgtagtatgtggaccatcaggatcaggtaaatctacactgattagatgtattaatagattagaagagcatcaagagggtgatataattgttgatggaaatgaattatctgaaaaaacaaaagatattgaaaaaataagagctgaagttggaatggtttttcaacaatttaatttatttccacatctttcaatattagataattgcacacttgcaccgatttgggtaaaaaaaatgcctaaaaaagaagctcaagagctagccttagaccaacttaaaaaagtacaaatagatgatcaggccaataagttccctggacaactctctggaggtcaacaacagcgatgtgcgatagcaagagcattgtgtatgcagccaaaaatcatgttatttgatgaaccaacatcagccttagatccagaaatgattaaagaagtgctagatgcaatggttagtcttgcaaaaggtggaatgactatgatcgttgtgacacacgagatgggatttgctaaagaagttgctgatgaagtcatttttatggatgaaggcatgataattgagaaggcagacaccaaagaattctttgctaacccaaagagtgacagaactaagctttttttaagccaaattctttaaa

SEQ ID NO: 271386 - DNA, 895 bp, Unknown
  Bacterial polypeptide expressing nucleotide sequence isolated from the Sargasso Sea
actggttaccgagacgccgccttatcagcgcgagatcggcatcgtcttccagaactatgcactgtttccgcatatgaacgtggcgaagaacgtcggctacggcctgcgcatgcgtggtgtggcaaaggccgaaatcgcagagcgtgtggagcaggccttggcactggtgaagctgagcggttatggcgagcgcaagccgcgtgagctgtccggtggtcagcagcagcgtgtcgcgctggcccgtgcgttagtcattcgacctaaggtgttgttgctcgatgagcctttctcggcactggacaagaacctcaggctgtcgatgcagatcgagctcaaggacatccagcgcaagctgggtgtgactacggtattcgtgacgcacgatcagggcgaagccttgagcatgagcgaccgtgtggtggtgatgtctgccgggcacattcgtcagatcggcacgccggatgtgatctaccgcaacccgcaggatcccttcgtcgcggggttcgtcggcgatgccaacattctgcctggccgttatctgagtcgtgatgacagcgcctgtgtggaactgggtgacgccaccctgcgcctgcctgccacgcatgtccatggcccggtcggctcgcgtctggacgtctacgcgcggccggagaacatccgcctggtgtcgctgggcgctgacgccctgctcagtggcacggtggtcaaccatgtgtttcagggcgatcacgtcgatatccatctggatgtcccgtcgctgggcaatacgcgcctgttcgtgcgccagtccggcctggaatccctcacccgctggccggttggtgcagtcggtggtttggcgttcgacaacgaaggcgtctgcgccttcgcgactgaaacccaggctacccattga

SEQ ID NO: 271387 - DNA, 546 bp, Unknown
  Bacterial polypeptide expressing nucleotide sequence isolated from the Sargasso Sea
tatgggtgcaataaacattactagtgtaggaaaaatttatccgaatggcacaagggctcttgaagacgtaaatatagaagtaaatgatggtgaatttgtagtcctagttggtccttctggatgtggtaaaacaactttgcttcgaatggttgctggtctagaagatattactgaaggagaaatttctattgctgacaaaattgtaaatgaagttgctccaaaagatagagacatagcaatggtctttcaaaattatgcactttatcctcatatgtccgtatatgacaatatggcattctcattaaaactaagaaaattttcaaaagatgaaatcgataaaaaagtaaaagatgctgcaaaaacactagaaattgatgagctactcgacagaaaacctaaggcattatctggtggacaaagacagagggtggcaatgggtagagctattgtaagaagccctcaggcttttttaatggatgagccactgtcaaatcttgacgcaaaattacgagttcaaatgagagctgagctgggacaattacacac

SEQ ID NO: 271388 - DNA, 825 bp, Unknown
  Bacterial polypeptide expressing nucleotide sequence isolated from the Sargasso Sea
aatggctgaaatacaaataaattcattaagtaaatcttttggtaaatcaaaggttattaaggatatatcactttctattcaaagtcgttcttttacggttattgtaggaccaagtggatgtggcaaatcaaccttattaagaatgatagctggtctagaaaaaatagatactggtgaaataaaaatagctggtaagtcagtaaatgatttaccacctaaagaccgagaaattgcaatggtttttcagtcttatgctctatatccgcacatgactgtttttaacaatatggcttttggtttgaaattagaaaaaaaatctaaatcagagatagaaaatagagtaaaggaagctgctagaattttacagatagaaaatttactagatagaaagcctaaacaattatcaggaggccaaagacagcgggtagccataggtcgtgcaatcactagaaatccaaaagtatttctttttgatgaacctttatcgaatttagatgctgctttaagagttgcaactagaatagagatagcaaatcttcatgattcaatgcctgatgcaacgatggtctatgtaactcatgatcaagttgaagctatgactttagccaatcaaatagttgtactttctgaaggtcaaattgaacaaattggttcacctctagaattatacgaagagccagagaatttattcgtagcaaaatttatcggctctccagctatgaatattattccaattgaaatacttacaacaggtataaatccagtaggaaaaattaatgaaaaaataaaaataaacttggaaacaaaattcagttcttctgataa

SEQ ID NO: 271389 - DNA, 775 bp, Unknown
  Bacterial polypeptide expressing nucleotide sequence isolated from the Sargasso Sea
atggccgaggcgacgcccgcgctggaaatccgcaacctgcacaaacgctacggcgatctcgaagtgctcaagggtatttccctgacggccaaagacggcgacgtcatctcgattctcggctcctccggttccggcaagtccactttcctgcgctgcatcaatctgctggaaaacccgcatcagggtcagattttcgtcgccggcgaggagctcaagctcaaggccgcgaagaatggcgatctggttgctgccgacaacaagcagatcaaccgcctgcgcagcgagatcggcttcgtcttccagaatttcaatctgtggccgcacatgagcgtcctcgacaacatcatcgaggcgccgcgccgcgtgctcggccaaagcaaggccgaagccatcgagatcgctgaggcgctgctggccaaggtcggcatcgccgacaaacgccatgtttatcccaaccagctttccggcggccagcagcagcgcgcggccatcgctcgcaccctggccatgcagccgaaggtaatcctgttcgacgagccaacttctgccctcgacccggagatggtacaagaagtgcttaatgtgattcgcgcgcttgccgatgagggtcgcaccatgctgctggtgacccatgagatgagtttcgctcgccaggtttccagtgaggtggtgttcctccaccagggcctggtcgaggaacaggggccacccgcccaggtgttcgacaacccgaaatcggcacgctgtaaacaattcatgtccagcaatcgctaac

SEQ ID NO: 271390 - DNA, 901 bp, Unknown
  Bacterial polypeptide expressing nucleotide sequence isolated from the Sargasso Sea
tatggcatctattgaattaaaaaatattgaaaaaagttatggaaaaaacaaagtaataaataaatttgatataaaaataaacgatggagaatttgttgttttagttggtccatcaggttgcggaaagtctacactgttaagaatgatctcaggattagagtcggttgatataggagaaatttatttagataacaaactaataaataatctaattccttcaaaacgggaaattgcaatggtttttcaatcctatgctttgtatccacacatgaatgtttttgaaaatatggcttttggtttaaaaatggaaaaaatttcaaaaagtgaaatcaatcaaaaagttaataatgctgctgctacacttcaaatagaggacttgcttgaaagaaagcctaaggagctatcaggtggacaaagacaaagagttgcaattggcagagcaatcacaaggagtcctaaagttttcttatttgatgaaccattatcaaaccttgatgctgctttaagatctgaaatgagagttgaaatatctaagcttcataaaaaaatgaattcaaatataatatatgtaactcatgatcaagttgaagcaatgacgttagctgatagaattgtagttcttaataagggaaatattgaacaatatggaacacctaatgagatttattcagatccaaataatatttttgttgcagaatttattggatcaccaaaaatgaatataattaagattaataaagagcacattattaattcaaacactttgcacttatttaataataaaataacttttgataatttagaatttaaagatgaggtctatataggtattagacctgaggatataagtttaaaaagcaatcatgaaatccagatagatgtgaaagttgatcttgtttga

SEQ ID NO: 271391 - DNA, 608 bp, Unknown
  Bacterial polypeptide expressing nucleotide sequence isolated from the Sargasso Sea
catggctgcactgactctgcaaggcgttaaaaaaacctacgacagcaaacagttcgtgctgcacggtatcgacgtggacgtcgcggacggtgagttcgtggtgatggtcggcccgtcgggctgcggcaaatcgaccttgctgcggatggtggccggcctcgaaagcatttccgaaggcaccatttcgatcgccggcaaagtggtcaatcaactggaaccgaaggatcgcaacatcgcgatggtgttccagaactacgcgctgtatccgcacatgagcgtggccgagaacatgggctatgcgctgaagatcgcgggcgtcgatcgtgcgcagattgcgaagcgcgtgggcgctgccgcgcagattctggaactcgaggcgctgcttacgcgcaaaccgcgcgaattgtcgggtggtcaacggcaacgcgtcgccatgggtcgcgcgatcgtgcgcgaacccgcggtgtttctgttcgacgaaccgctgtcgaatctcgacgcacggctgcgtgtgcagatgcgcctcgaaatccagcgcctgcacgcgcggcttgccaccaccagtctctacgtcacccacgatcagatcgaagcgatgacgctggcgc

SEQ ID NO: 271392 - DNA, 1263 bp, Unknown
  Bacterial polypeptide expressing nucleotide sequence isolated from the Sargasso Sea
ccgtcgattctggtcggcgtgcggttcgcgttcgggctgatgtgggtcacgctgatcgttgccgaaaccatctccgcgcagtcgggcatcggctacatgacgatgaatgcgcgcgaattcctgcaaaccgatgtggtggtggtcggcattctgctgtacgcggggctcggcaagctcgccgacgtgctggccaagagtctcgagcgcgtgtcgctgcgctggcacccggcttatcaacgaggagcgaaatcatgagcgcaaccacattgtcggcgtcgttcggcggcatcgcgggaagcgatctcgaagccgaactggcgcaaccgcgcaccgccgatcacgacgcggatgaggccgcgggtttcgatcgggcggaacccttgcacgatcgtcaacgcgaccagcgcgtgagtgttctgcctgcagcgacgggagcctcggcgcgcaatgacgcacgccgctccaccgactattcggtcgagttgcgcggtgtcggcaagcagtacggcgagcgcaaggtgttgtccgattttgatctgtcgatcgagcgcggcagctttgtcgccatcgtcggccgcagcggctgcgggaaatcgaccttgctgcgcctcgtcgcgggtctggaaaaggccacctcgggtgtgctcgagaaacgcaccgaagacggccggccgctcgacacgcgcattatgtttcaggacgcgcgcctcctgccctggaagagcgtgctgcagaacgtgatgctcgggctcggccgcagcgcgcgtgaggatgcgcgggccgtgctcgccgaagtcggtttgctggaacgcgccaacgactggcccgcgcagctctccggcggtcagcgtcagcgggtcgcgctggcgcgcgcactggtgcatcggccgcaattgctgttgctcgacgaaccgctcggcgcgctcgacgcgttgacgcgcatcgaaatgcacgcgctgatcgaacggctgtggcgtgagcatcgatttaccgcgctgctggtgacgcacgacgtgcatgaagccgtcgcgctaggcgaccggattctgctgatcgaagaagggcgcatcgcgctcgatcagccggtgccgctggcgcgcccgcgggcacgtgcatcggccgggttcgccgcgctggaagaacatgtgttgcaacgcgtactgaagacggcgccgaatgacgacgcgctgtcccagcgtgcttacgacgcacgtgacgagggccgcctcacgcggccgacagacgtccgctgggccgtctgat

SEQ ID NO: 271393 - DNA, 601 bp, Unknown
  Bacterial polypeptide expressing nucleotide sequence isolated from the Sargasso Sea
atgggaaaaataattgaattaaaaaaagttaataaatggtttgataaatttcaggtattaaaagatattgatcttgaggttgctccacaagaaaaaatagttatatgtggtccatcagggtcaggaaaatcaactttaattagatgcatcaatagactagaggagcatcaaaaaggaaatattatcgtcgacgggactgaactagctgagaacactaaaaatattgaaaagataagagctgaagtaggaatggtatttcagcaatttaatttatttcctcacctttcaattttagacaactgtactttagctcctatttgggtaaaaaaattacctaaaaaagaagctgaggaggttgcaatgaaaaatttaacaagagttcaaatagatgatcaagctctgaaatttcctggtcaactttcaggtggtcaacaacaaagagcggcaatagctagagcactttgtatggaaccaaaaataatgttatttgatgaacctacttctgcattagatccagaaatgattaaagaagttttagatgtaatggtcgatttagcaaaaggtggaatgactatgatagtagttactcatgaaatgggat

SEQ ID NO: 271394 - DNA, 2128 bp, Unknown
  Bacterial polypeptide expressing nucleotide sequence isolated from the Sargasso Sea
tctggagctcgctgccggagctgtacctgctgatcatcttcgcgtcgatcttcgagccgagcttcctgctgctgatcgtgctgctgtcgctgttcggctggatcgggctcgccgactacgtgcgcgcggaattcctgcgcaaccgcacgcaggactacgtgcgcgcggcgcgcgcgatgggcctcacgaactggcagatcatctggcgccacgtgctgccgaacagtctcacgccggtgatcacgttcctgccgttccggatgagcggctcgatcctcgcgctcacgagcctcgatttcctcgggctcggcgtgccgccgccgaccccgagcctcggcgagctgctcgcgcagggcaagggcaacctcgacgcctggtggatctcgctgtcgaccttcggcgtgctggttgcgacgctgctgctgctgaccttcatgggcgatgcgctgcgcaatgcactcgacacgcggatcgccgattcggtgcgcgcggcgggaggccagcgatgagcgaaccggtcgtatcgacgcagcgcgagccgctgctggcgctcgagcatctgcatgtgcgcttcggcgacacggtcgcggtggacgacgtgacgctcgcgatcggccgcggcgagcgcgtcgcgctggtcggcgagtcggggtcgggcaagagcgtgaccgcgctgtcgatcctgcggctgctgcgggacgccgacgtgagcggcacgatccgtttcgcggggcaggacctgatggccaagagcgagcgcgagatgcgcgggctgcgcggctcggacatcgcgatgatcttccaggagccgatgaccgcgctcaacccgctgtatacgatcggcgtgcagatcggcgagacgatcgtgctgcacgacggcgtctcggcggtcgaggcgcgcaagcgcgcgatcgcgttgcttgcacgcacgggcatcgccgagccggagaagcgcgtcgacagctatccgcaccagttgtcgggcggccagcgccagcgcgcgatgatcgcgatggcgctcgcctgccggccgcgcctgttgctggccgacgagccgaccaccgcgctcgacgtgacgatccgcgcgcagatcgtcgatctgctgctggaactgcagcgcgaggaagcggaaaagcgcgggatggcgatcctgctgatcacgcacgacctgaatctcgtgcggcacttcgcggatcgcgtcgcggtgatggagcacggccggctcgtcgagagcgggcccgtcgagcgaatcttcgcggaacccgagcacccgtacacgcagcggctcctgaacagccggccgcaacgcgcggtcaccccggtgatgccgatcgcgcccgtcgtgctcgacgcgcagcacgtgagcgtgcagttcgcgcgcaagcggccgggcatcgcgggctggttcggctcggtgccggtgacggccgtcgcggacgtgtcggtgtcggtgcggcagggcgaaacgctcggcatcgtcggcgaatcgggatcggggaagtcgacgctcgcgatggcgctgctcggcctgcagaagacggccggcggcacgatcgaattccagggccgcgcgctgtcgacctatcgcggccgcgaacagaccgcgctgcgctcgaacatgcaggtcgtctttcaggatccgttcagttcgctttcgccgcgtcacacgatcgagcggatcgtcggcgaggggctcgagctgcatcgcccggacatgacacccgatgcgcggcgcgagaagtcgctcgcggtgctgcgcgaagtcggcctcgaccgcacggtgctgcaccgctatccacatgaattctcgggcgggcagcggcagcggatcgcgattgcgcgcgcgctggtgctggagccgcgcatcctgatcctcgatgaaccgacgtccgcgctcgacgtgtcgatccagcagcaggtgctgaaactgctcgcgaatttgcaacagaaatacaacctcggctatgtcttcatcagccatgacctggaggtgatcggggcgatggcgcaccgcgtcgcggtgatgcaggacggggccgtcgtcgagtcgggggaggtggccgacatcttcaccagaccgtcacatccttacacacaaaagctgttgaaagcggtctggaaagcgtga

SEQ ID NO: 271395 - DNA, 698 bp, Unknown
  Bacterial polypeptide expressing nucleotide sequence isolated from the Sargasso Sea
tatgaataattcatttatacagatcaataatatttcaaaacactttaaagaagtaaaagcagttgatgatgtttcatttgatattaaagaaggtgaatttttttcacttttaggaccatctggatgtggcaagacgacattgttgagattattggcaggatttgaataccccacttatggaaatctattaattgatggtacagatattactgctttacctccagataaaagacctacaaatatggtttttcaaaactatgcaatttttccacatcttaatgtagaaaaaaatattcaatttggactaagaaaaattggcttaagtaataatgagatagctaatcgagttaaagatgttctttcattagtaaagcttgaaggctatgaagaaagatttagcaatcaactatctggtggtcaaagacaacgtgtggctcttgcaagagctttagtaaggcaaccaaaagttctattattagatgaacctcttggtgctttagataaaaaattaagagatgaaatgcaattagaattaagaactcttcaaaaaaatattggaattacttttgtgtttgtcactcacgatcaacaagaagctataagcatgtcagacagagtagcggttatgaacgaaggaaaaattcaacaactatcagcacccaatgaactttataagaatccaaaaaatatatttgtaa

SEQ ID NO: 271396 - DNA, 895 bp, Unknown
  Bacterial polypeptide expressing nucleotide sequence isolated from the Sargasso Sea
attggatgggatagatattactgcattacctccagacaaaagacctacaaatatggtttttcaaaactatgcaatttttcctcatcttaatgttgaaaaaaatattaaatttggactaagaaaacttggcttaagtcatgatgagataggtaatagagttaaagatgttcttaaattagtaaagcttgagggctatgaagaaaggtttagcaatcaactatctggtggtcaaagacagcgtgttgctcttgctagagctttagtaaggcaaccaaaagttctattattagatgaacctctaggtgctttagataaaaaactaagagatgaaatgcaattagaattaagaactcttcaaaaaaatattggaattacttttgtatttgtcactcatgatcaacaagaagccataagtatgtcagacagagttgcagttatgaatgatggaaaaattcaacaattatcagcacccaacgaactttataagaatccaaaaaatatatttgtaagtgattttataggtgaaacaaattttcttaaagctgagactaaatcaattgatggaggattcatcaatgtttcaatcgaagaattgggagaatttaaaattaaaaataatttaaatatcgcagcaaattcttctgatgttgtttgtagtgttcgcccagaatctatgatgatttcaaaagtgaaatccgactgggatatttgtcttgatgctaagattagacagacttcatatttaggagaaatgactagattttacgttgaagttaaaggaatagataagactatcactgtttcttcacaacattttgacaaccaatcttttgaaaataacgagtgctttataagtattagtttagaagatatttctttattgaataaaaaatag

SEQ ID NO: 271397 - DNA, 1057 bp, Unknown
  Bacterial polypeptide expressing nucleotide sequence isolated from the Sargasso Sea
atgtccagtattaaattttcaaatattcataagtcctttggtcaaaataaaattattaataattttaatcttaaaggtaaagaagatgagtttttagttttagttggtccatctggatgtggtaagtctactttattgagaatgatagctggtctagaaaaaattgatcaaggaaaaattgaaatcaatgacaagatcataaacgaattacatccttcaaagagagaaactgcgatggttttccaatcttatgcattgtaccctcatatgaatgtttacgaaaatatgtcttttggattgaaaattgaaaaacaaagcaaagaagaaatacaaaaaaaagttttaagggcagcaaaaatacttaaaattgaagagcttttagatagaaaacctaaacaattatctggcggtcaaagacaaagagtagctattggaagagcaattaccagaaatcctaagatatttttatttgatgagcctttgtcaaacctcgatgctgctctaagagctgaaatgagagttgaaatttcaaaacttcatcagcaaataaaaactaatatgatttatgttactcatgatcaagttgaggcaatgacattggccgatagaatagtaattttaaatcaaggaaatattgaacaagtagggacaccagaagaaatttataatgatccagcaaatatttttgttgcacaatttataggcactccaaaaatgaatattttagaaattgatgaaaaagacattaaatcagaaaaaataattaaagtattaggtaatgagcttaatataaatgatataaaacttgaaaaaagaaagcattttattggaattagaccagagcattttaaaataaataatgaaactcaattcaaatttaaacccgagatagatattgttgagaatttaggtaatgaaaaaattgtttatatgaaaaaagataatcatcaactaagcgccaaacttcctagcggtaatgaaataaataatttaattggctttgatcttaaacatgtttttatttttgatgaaaatggaaaaaggattaaaaactagc

SEQ ID NO: 271398 - DNA, 736 bp, Unknown
  Bacterial polypeptide expressing nucleotide sequence isolated from the Sargasso Sea
aatgagcaaaaaaattatagaattaaaaaatgtaagcaaatggtttgataaatttcaagctctaaaagatgtaaatttagaagtcaatcaacaagaaaaaattgtaatttgtggaccgtctggttcaggaaaatctactttaataagatgtattaatagacttgaagaacatcaagagggacaaataatagttgatggcaatgaaatttcagaaaacacaaaagatattgaaagaatcagagccgaggttggtatggtatttcaacaatttaatttatttccgcatttatctattttagataattgcacattagcgccaatatgggtaaaaaagctaccgaaaaaacaagcagaagaaattgctatgaaaaacttagaaagagttcaaatagcagaccaagcaaaaaaatttccaggacaactttcaggtggccaacaacaaagatctgccctcgcgcgagctttatgcatggaaccaaaaataatgttgtttgatgaaccaacatcggctcttgatccagaaatgatcaaagaggttctagatgcaatggttgatttagcgaaagctggtatgacaatgatagttgttactcatgaaatgggatttgcaaaagaggttgcggacaatatgattttcatggatgaaggaaggatcgtcgaaaaagctagaaccaaagatttttttgataatccaaaatcagatagaacaaaactgtttttaagtcaaattttataa

SEQ ID NO: 271399 - DNA, 736 bp, Unknown
  Bacterial polypeptide expressing nucleotide sequence isolated from the Sargasso Sea
tatgtctgactcaatcattaaaatagaaagtatgaataaatggtttggtgactttcaagttttaaaagatattaatttagaagtcgaaaaaaataaaaaaattgttgtttgtggaccatctggttcaggcaaatcaactctaattagatgtattaatagattagaagaacatcaaaaaggtacgattatagttgacggaacagaacttactgagaatacaaaaaatattgaagctataagagctgaagttggtatggtatttcaacaatttaatttatttccacatttgtcaatattagataactgtactttagcacctatatgggtaaaaaagatgcctaaaaaagatgctgaagaattagctatgaaacaattagaacaagttcaaatagttgatcaggcgcaaaaatttccaggtcaattatcaggaggacaacaacaaagatgtgcaattgcaagggctttatgcatggaacctaaaattatgttatttgatgaacctacctcagctctagatcctgaaatgatcaaagaggtattagatgctatggttaacttggcaaaggcaggtatgactatgatagtagtaactcatgaaatgggttttgcaaaagaagtagcagacgaagttattttcatggatgaaggaatgattgtagaaaaggccgagacaaaggaatttttcgctaaccctaaaagtgatagaactaagctatttttaagtcaaattttataa

SEQ ID NO: 271400 - DNA, 1027 bp, Unknown
  Bacterial polypeptide expressing nucleotide sequence isolated from the Sargasso Sea
atgaattacatacaattaaaatacgtctcaaaatattgggggacaactaaagcagtagaaaatttaaatattgaaattaaaaaaggtgagttcgtgatttttttggggccttcgggttgtggtaaatcaacaaccttaaggttgatcgcgggtttggaggaggtttcttccggtcaaattgaaattgacggtacgaatgtaaacaacacggatccagcaaatagaaatgtgtcaatggtatttcagtcatacgcattatttccgcatttgaacgttgctgaaaatataatttttggattaaaagtcagaaaagtagaaaaaaatgaaagaaatgccagattagtcaaagtggctgaaatagttggactagaagatctattgaagagaaagccatctgaattatcaggaggacaaaggcaaagagttgcattggcaagggcaataatcagtgataatccgatatgtttgatggatgaaccactttccaacttggatgcaaaacttagacaccaaatgcgagtagaaataagagaacttcaaaaaaaattaggtattacgatgatctatgtgacccatgatcaaactgaagccatgagcatggcagacaaaattgttttgatgaatgagggacatattgtgcagcagggtaagcctaaggaattatttgaaaaccccagtcatatgtttactgcaaaatttcttgggaatcctccgatgaatatcattgaaaccgagcatgatggagaaactcatttcattaatcataacggggaaaaaattgatttcaggcaggataacaaaaaagatttagtatttggcctacggccggaggacattaaagtttctgataaaggaattaaatgtaatgtgaatttcttggattatcagggctctgaaactatcattaatacaacattgggaattcatgaaataaatataaaaactgattcaaaaaagactgatgatctgaatcaagaaatttatatcaaatggaataaaaaagatattaaggtgtttgaaaaataaa

SEQ ID NO: 271401 - DNA, 1120 bp, Unknown
  Bacterial polypeptide expressing nucleotide sequence isolated from the Sargasso Sea
atgatcaaaaaaaatagtattagtaacgaaaagatagttgatcttttatctatagtaaaatcttttgatcatgttaaagctgtaaacaatgttagtttaggaataaatgagggtgaatttttttcattattaggcccatctggatgtggaaaaacaacacttttaagaataattgcaggtttcgaaaaacctgaaaatggtgatgtatttataaatggaacaaatgttaattctgttgctcctaataatagacctacgaatatggtttttcaaaattatgcgatttttcctcatctaaatgtatctgagaatgttggatatggactaagaaatacaaatttaagtaaggatcaaatattaaaaaaaatagacggttcgttacagttagtaggtctcaaaggatataataaaagggcatcttccgctttatcaggtggacaaagacagagagtagcacttgcacgtgcattgattttaaaacccagagtactactactagatgaaccactctcagcattagacaaaaatctgagggagcaaatgcaatttgaattaagacaacttcaaaaatcagtaggtatcacatttattttagtaactcatgatcaaacagaagcacttacaatgagtgatagagttggtgttatgtttaatgggaaagtagatcaagttgcaactcctgaacagatttacaacaaaccagaaacaaaaaaggtagcagcatttataggtagcatgaatttttttgaaacaaaatgtttagaaaaaagtattaaaacagttactgtttttcataaagatttgggtaattttaaacttttgaaaaataatatttttggggtagagaacactaaattgacaattggtataagaccagaaaatttaaaaattatttctgataatctaaaaattcagtcaaagtcctttacagcaaaaatagtagagaaatcttttatgggagatacaatgttatacagtataaaattaaatcaaagtgaaaacaataatacttataacatttctgtatcagatattaagaattctcctaatcctaatattggggataaaatatcagtcacatttgaagaagatgatgtagttgcttattatgaggaatagg

SEQ ID NO: 271402 - DNA, 634 bp, Unknown
  Bacterial polypeptide expressing nucleotide sequence isolated from the Sargasso Sea
tatgaataaatggtttggaaactttcaagtattaaaagacgttaatttagaagttgagaaaaacaaaaaaatagttgtatgtgggccgtcaggatctggtaaatcaactttgataagatgcattaataggctagaagaacatcaaaaaggaaccatagtagttgatggcacagaactatctgaagatacaaaaaatatagaaactatacgagctgaagttggaatggtttttcaacaatttaacctatttccacacttatcaatattagataattgtacgttagcaccaatttgggttaagaaaatgccaaagaaagaagctgaggacttagcaatgaagcaacttgaacaagtacaaatagttgaccaagctcagaagtttccaggtcaattatcaggaggacaacaacaaagatgtgctattgctagagctttatgtatggaaccaaagataatgttatttgatgaacctacatcagcattagatccagagatgattaaggaagtgcttgatgcaatggtaaatttagctaaagctggtatgacaatgatagttgtaactcatgaaatgggttttgcaaaagaagttgctgatgaagtaatattcatggatgagggcatgattgtgaaaaag

SEQ ID NO: 271403 - DNA, 1843 bp, Unknown
  Bacterial polypeptide expressing nucleotide sequence isolated from the Sargasso Sea
gttgaataaaaatatttactcaagactacttaagtatacctttaaacacaaaggtttattttcactaagtattgttggtttttttatatttgcagcagcagatatatcagctgttgaatggctcaaaagagttataagctacataaataattcaaatcagtcggaacttcttagtccaatctcgttagcactatttcttttagtggtctctgtagttagaggaataggtttttatatgggtaatttcttcatggctaatgttggtttaaaagtagttcataatctgagagaagagttaatcagttctctaatttatcaacctatgagtttttttgatctggcctccaaaggtgagattgtaaacagaatcatatttacaacaaaccaaattactggagcagcaacaaatgccctaaaaatattagctaaagagggattactgcttataggactatttgtttatcttttatatttaagctggaagcttacagttgtagtgcttgtaataactcccttaatagcagttgttgttagttttgcaggaaaaagaatgagaagagtagctagaaaaattcaagaaattatgggcttagtaactcaagtaagtaatgaaattgcaacaggcgcaagggaaattaaatcatttaataatgaagatggtgaaaaagatagatttaaaagggcaaatgatgagaatttaaaacaaaacctgaagatggaaagtacattgaatttatctactccacttattcaagttttcgtagcattctcattagctcttatgagttatcttgcattatcaaacttagatgaactaaatttaccatctgaatcatttgtagctttttttactgcagcaggtttaatggctaggccaataagacaattatccaatttaaacgcagtaatacagagaggactagctgctgcagaagatattttcaatactattgatagctatccagaggatcatgagtctggtattaagcttcaacaaacactgaagggaaatgtagaaatcgaaaacgtttcattttcttatctcgagcattctgatccagttctaaaagagatatcaatatctgcaaaaaaaggtgaaacaattgctcttgtagggagatctggaagtggaaaatctactatcgtgaatcttctaaataggttttatgactgctttgaagggaaaattacgattgatggttatgacataaggaagattaaccttaaagacttaagggaagcaatttcttatgtttctcaggatcctgttctttttaatgacaccataagaaataacatcacctatggtttaaaggaagtaacagagaaggcaatttatgaggctgcgaaggatgctaacgcttacgagtttataacaaatcttccagatggttttgacacaattattggcgatgatggtgttttactttctggtggagaaaaacaaagggttgcaattgctagagcacttcttaaaaaatcttctattttaatttttgatgaagcaacttctgcactagacaatgaatctgaaaaggctattcagacagctattgaaaaggcatctaaagataaaaccactttcattattgcgcatcggctaagcagcgttgagaaagctgacaagatatgtgtaattgaagatggaagaataactcaaatgggtaaacatagtgacctcatgaaacaacaaggactttacaataagcttcaagggaaagggccagaaaaaatagaaaaagaaacccctaagatagaaaaagtattaccagaaatctatgttgagaaattaggattttgggatagggtcggcatattaaacatattgttaatgccgaattag

SEQ ID NO: 271404 - DNA, 901 bp, Unknown
  Bacterial polypeptide expressing nucleotide sequence isolated from the Sargasso Sea
tttgggggttgtgcttatcaatattccaatttcaaatattcctccacacaaaagaggtattggaatggtttttcaaaattatgctttgtttcctcatatgacagtttttgaaaatttggcttttcctttaagagtaagaaaaatttcaaaagacgatatagataaaaaagttgaaaaggcattatctatggtttcattgtcaggatttggaaaccgtatgccaggacaactttcaggaggtcaacaacagagagtagccgtagcaagagcattggtatttgatccatcagtagttttaatggacgaacctttaggtgctttagataaaaatttaagagagagtatgcagtatgaaattaaacatattcatgagagtattggtgtaacagttgtgtatgtcactcatgatcaaggtgaagcattaacaatgtcaaacagaatagctgtatttaacgatggtaaagttcagcaactttcaagtccagacaagttatatgaagaaccggttaactcatttgtcgctgaatttataggagagaataacacttttgctggagaaatttcagatatatcaaatggatcctgcaaagttaaactagatcagggtgaaataatcgcgaatccaatttcagttaaatctgttggagaaaaaactacagtatccattagaccagaaagagcattgattaatcctaaagataaaatggataacaaccaaaaaggtaaaatagaagaggttatatatcatggtgaccacaccagagtgagacttaacttgcttggaaattcagaatttattttaaaagttccaaatagttctcaaaatttagatattaaattaggaaatgagattaatattggttggaatagtcatgacgctagagctttagacccaaaatag

SEQ ID NO: 271405 - DNA, 667 bp, Unknown
  Bacterial polypeptide expressing nucleotide sequence isolated from the Sargasso Sea
aatgaaaacgttaaaaattgaagaattatcaaaaaactttggatctactgaggttttaagaaaaattaatttagagatagatgaaggtaattttttggttctattaggaccttctggttgcggaaaatcaacattacttaatatcatcgctggtttagagactattaatgaaggaaatgtttttattgatgattacaatgtaagtaaagttgagccaaaagaccgaaatattgcgatggtttttcaatcttacgctttatacccatcaatgaatgttagagaaaacatgatctttggtcttaaacaggcgaaaacatccaaagaaaaaatagaggaacaattagaaaaagtatctaaatttttacaagtcgatcaattattagagagaaaaccttcacaattatctggtggtcaaagacaacgtgtggcaattggtagagctcttgtaagggagccaagaatatttttatttgatgagcctttgtctaacttagatgcaaaattaagagttgagatgaggagagaaattaaaaaacttcaccaacaattaaaaacaacagttgtatatgtaacacatgatcaaactgaagcgatgagtttaggaacaagaattgcaatcatgaatcacggtgttattcagcaaaatgatacaccagaaaatatttac

SEQ ID NO: 271406 - DNA, 1078 bp, Unknown
  Bacterial polypeptide expressing nucleotide sequence isolated from the Sargasso Sea
gatgggtaagttagttcaggtaaaaaatgcctttaaaagttttggtgacgttaacgctgtgaatggtgtttctttagacatcgaggaaggccagttctattcacttttaggtccttctggctgtggtaaaactaccctattacgactaattgctggcttcgaaaaaccaacttctgggcaagtctttattgataatacttcgatggaaggtattgagccaaatttacgaccaacaaatatggttttccaaaattacgcgattttcccgcatttaaatgtagaagaaaatgtggcttacggattgcgaaacaaacgtgaaaatagaaccaaacaaaacaaacttgttgatgaagcacttgagctagtaggattatctggtctcaataaacgttctgcgaatgccctttctggcggccaaaagcagcgtgttgctctagcgcgtgcactaatattgaaaccaaaagtccttttattagatgagcctctctcagctttagataagaagctacgagagcagatgcaatcagagctaagacacctacagcgagccgttgggattacttttatacttgtaacccatgaccaatacgaagcgcttacaatgagtgacagagtagccgttatgttcgatggaaaggtcgcacaagaagcatcacctagagatctttacgaacttccaacctcacaaaaagttgcgtctttcattggagaaatgacttttattgaaggtgaaattataggtgaaaaccaaaagttaaaggttcagtctgaaatttttggacaaataactgtagataaatctcgagtttttggccaatcatctaaaaggatagtccttggaatacggcccgagaaaatagctatagttccaaaaacttctcgatcaaaaaatttagtttctggaaaaataattgacgtatcatacttcggcgaaacaactaattataaagtcgaatgcggtactactgaaactttgacaatctcatcgcaaaattctgttggacagcttagttattccgttggtgaagaaatccagttaaaggctgatttggataatataatagctttttcaaattga

SEQ ID NO: 271407 - DNA, 742 bp, Unknown
  Bacterial polypeptide expressing nucleotide sequence isolated from the Sargasso Sea
atggcttttttagaatttgtagatatagataaatcatttggcaataataaagtaattagtaaatttaacctaaaagttgaaaaaggaaaatttatcgtattactaggtccctcaggatgtggaaaatcgactttattaaggatgatagcaggattagaaaaaatagataaagggaaaatagttttagaaagtaaccttctaaatgatctgttaccctcgaaaagacaaatagctatggtttttcaatcatacgctctgtatcctcatatgaatgtttttcaaaatatctcttttggattaactgcggaaaaaatagaaaaaaataaaatcaaacaaaaggttttagaggcttcaaaaattttaaaaattgaagaacttttggatagaaagccaaaagaactttcaggcggtcaaagacagagagttgctataggtagagctattacaagaaatcctaaactcttcctatttgatgagccactatctaatctagatgctgctcttagatcagaaatgagagttgaaatttcaaaattacacaaaaaattaagaagtaatattgtttatgtaactcatgatcaaattgaagcaatgacactagcagataaaatcgtaattatgaataaaggagaaattgaacagtttggtgatccagatgatatttacaataatccaagaaatatttttgttgctgaatttataggaaacccaaaaatgaatattcttaaaatgaaagaaaaaa

SEQ ID NO: 271408 - DNA, 827 bp, Unknown
  Bacterial polypeptide expressing nucleotide sequence isolated from the Sargasso Sea
gatgggttccataaaactcaactccatcgaaaagtggtttgatgaattacaggttattaagggaattgatctagaaataatggacggtgagtttgttattttagtcggaccttcgggttgtggtaagtccacacttctgagaatgattggtggtttggaagaaacctctcgtggctctattattctagatggtaatgatgtaaccgaccagcccccatcaaaacgtggcttgtctatggtttttcagtcatacgccctttatccacacatgactgtccgtgagaacatgggtttcagtctaaaggtcgcggggactcaaaaggacgtgatagatgataaagttggccaagctgcacaaatattgaaacttgaagattttcttgatcgtcgacccaaagatctttctggcggtcaaaggcagcgcgttgccattggtaggtctattgtaagggcgcccactgcttttctttttgatgaaccactttcaaatcttgatgcgtctcttcgtgtggaaatgcgtttggagttggcaaggctacatcagactttgaagactactatggtttatgtaactcatgaccaagtcgaggccatgactcttgcagacagaatagtagtactagaatctggaaaaatagcgcagattgggacaccaaaacaattatacgagaaaccggctaatctatttgtagcgcaatttgttggctccccgaaaatgaacattatttccagacgagcagcagaaagtgccataaaaaacgacaagtttttagaagttttgatcaaaaacaagcaggctgcaaatatggagttaggcctgaacactt

SEQ ID NO: 271409 - DNA, 1096 bp, Unknown
  Bacterial polypeptide expressing nucleotide sequence isolated from the Sargasso Sea
atgacatcttcaaaaagctttgtaaaatttgataaagttgacaaaagttatgatggtaaggttttagttgtcaaagatttaaacctagacattgatgaaggtgaattcataacaatgttaggcccctcaggctcagggaagacaacttgcttgatgatgttagcaggttttgaaacaccaactaacggagaaatctatttagactcaaaacctatttcaagaattccacctcacaaaagaggtattggaatggtttttcaaaattatgctttatttccacatttaacagtttacgaaaatttagcttttcctttaaaagttagaaaactttcaaaagacgatattgataaaaaagttgataaagcattatctatggtttctttaactggatttgaaaaaagaatgcctaatcaattatcaggcggtcaacaacaaagagttgctgttgcaagatctttagtatttgatcctcaattagttttaatggacgaacctctaggagctttagataaaaacttaagagaaagtatgcaatatgaaattaaacatattcatgaaaatattggtgtaactgtagtttatgttactcatgatcaaagtgaagctcttactatgtctagtagaattgcagtttttaatgacgggaaagtgcaacagctatctagcccagataaactatacgaagaaccagtaaattcatttgttgcagaatttataggcgaaaacaacacatttactggacaagtgacagatatctctggaggcaaatgtaaagtgaaactagatactggagctgaaatactttctaatccgataagggtaaaaacaaaaggagaaaaaactaaagtttctttaagacctgaaagagcaattatagatccagaagaaaaaatggacaataaacacaaaggaaaaatagaagaagtcatttaccacggagatcatgcaagagtaagattaaatttattaggtaataaagaattcattttaaaagttccaaacagctcagcaagaatggatataaaacctggtaatgaaataaatgttggctggaacagtcatgatgctagagcgctagaccctaaatcaatctgag

SEQ ID NO: 271410 - DNA, 955 bp, Unknown
  Bacterial polypeptide expressing nucleotide sequence isolated from the Sargasso Sea
ggcactgtcagcatcgacggcagggatgtttccggtgttcgcgcctctgatcgtaacctttccatggtatttcaatcctatgcgctctacccgcatctgacagttcgtgaaaacatcgcggtgcccctgcgcatgcggcaactgagcccttcgcagcgtctgcccctaatcggtagcatgataactcccgctgccacgaaaaaggagattgctgaccaaatctacacggccgccgatatgttggatatcggccgtctgctggaccgaaagccaggccagctttcaggaggtcaacgccagcgtgtagcgcttggccgtgcgttggttcgcaaccccgcggccttcctgcttgatgaaccgctttccaacctcgatgctaaattgagggttcagacacgcgccgaaatcgcccagctgcatcgccagctcaaagccaccttcgtttatgttacccatgaccagatcgaagccatgaccatggcggaccgaatcgccgttatgatggatggtgaaatcttgcaatacgacacaccggaaaacgtttacaaccggccagcatccatccatgtggctgagtttattggctccccaaagatcaatatatttccggcgaggttgatcaaccctgatcagagcgccaaactccagatcggtgtgaggccggaatgcctgaaacagaaaaatggagaatataggctcaaggccgttatcagtcatctggaaaaccttggcccggaaattcaggtccagttcaccctccccggcatcgatacactttttcacactcgggttgacccgaaatcctcaaacaggcttatcatgggtagcacgatcgagctcggctttgatgaggttgattgtcatctctttgatgagaggggttatagcctttcaccacataagactcgagaattcttaagagctcttaaacattcaactcttgaagacgcttaaa

SEQ ID NO: 271411 - DNA, 850 bp, Unknown
  Bacterial polypeptide expressing nucleotide sequence isolated from the Sargasso Sea
atgtctaagaataaagagttcgttaagtttgaaaaggttgacaaaagctatgatggaaaaattttagtagtcaaagatttaaatttagatatttcggagggagagttcattacaatgttgggaccctcaggttctggcaaaacaacttgtttaatgatgttagcagggtttgagacgcctactaacggagaaatctatttagataaaaaccctatatcaaatattcctccacacaaaaggggaattggtatggtgtttcaaaactacgctttatttccgcatatgactgtatatgaaaatctagcatttccattaagagtaagaaaaatgccaaaagatgaagctgataaaaaaattgataaagcattatctatggtatctttattaggttttgaaaatagaatgcctggccaactatctggcgggcaacaacaaagagtagcagttgctagagctttagtttttgatccatcagttgttttgatggatgagcctttaggagctcttgataaaaatttaagagaaagcatgcaatacgaaataaaacatattcatgagagtattggagtaacggtggtatatgtaactcacgatcagggagaagcacttacaatgtcaaatagaatagcagtatttaatgatggtaaagttcaacaattatcttcaccagatcaattatatgaaaagcctgtgaattcatttgttgcagaatttattggtgaaaataacacatttgctggagaaatatcagatatatcaagcgataaatgcaaagtaaaagtaaatggtggtgaaatagttgctaatccaatatctgtaaaatcaaaaggagaaaaaaccactgtatcaa

SEQ ID NO: 271412 - DNA, 1096 bp, Unknown
  Bacterial polypeptide expressing nucleotide sequence isolated from the Sargasso Sea
atgacgtcttcaaaaagctttgtaaaatttgataaagtagacaaaagttatgatggtaaagttttagtcgttaaagacttgaatcttgatatcaacgaaggtgaatttattacaatgctgggaccatctggctcaggaaaaacaacttgcttaatgatgttagcaggttttgaaacaccaactaacggtgaaatttatttagactcaaaacctatttctagaattcctccacacaaaagaggaataggaatggtttttcaaaattacgctttatttcctcatctgacagtttatgaaaatttagcttttccctttaaagttagaaagctcttaaaagatgatattgataaaaaagttgataaagctttatctatggtttctttatctggatttgaaaaaagaatgcctaaccaactctcagggggacaacaacaaagagttgctgttgcaagatctctagtattcgaccctcaattagttttaatggatgaaccattaggagctttagataaaaatttaagagaaagtatgcagtatgagattaaacacattcatgaaaatattggtgtaaccgtagtttatgtcactcatgatcaaagcgaagctcttaccatgtctagtagaattgcagtttttaatgatggaagagtgcagcaactatctagtccagataaattatacgaagaacctgttaattcatttgttgcagaattcataggagagaataatactttttctggtcaagtcacagatatctcaggaggtaaatgtaaagttaaattagatactggcgctgaaataatttctaatcctataagggtaaaaacaaaaggagaaaaaactaaagtttctttaagacctgagagagcgataatagatcctgaagaaaaaatggataataagtataaaggaaaaatagaggaagttatttatcatggagaccatgcaagagttagattaaatttgttgggcaacaaagagttcattttaaaagttccaaacagctctgctagaatggacataaaaccaggtaatgatattaaagttggctggaacagccatgacgctcgggctttagacccgaaatcaatctgag

SEQ ID NO: 271413 - DNA, 937 bp, Unknown
  Bacterial polypeptide expressing nucleotide sequence isolated from the Sargasso Sea
gatccctcagaaggatctgtattaattgataataaagacatgtttggtataggtccaaacaaaagacctacttctcttattttccagaacctagccctattccctctaatgtcagtttctgaaaatattgccttctctcttgaggtaaggggagtctcaaaaaaagataggcaaaaaagagcagatgaacttttagaacttatagcattagaaggacagagcgaaaaaaaagtacatcaattatcaggaggacagaaacaaagagtagcaatcgcaagagcattagcagtcgaaccaaaagttttattattagacgaacctctgtcagctttagatttaaagctaaggcaaagaatgagaactgaattaagagaaattcaaaaaagagttaacatcacatttatctatatcactcatgaccaaggtgaggcactgacaatgtctgataggattgctgtaatgaacgaaggagaaatcgagcagataggaccctgtgatgaagtttacaataatccattaaccccctttgtcgcgactttcgttggagagaacaatcctttatttggaaaggtaaaagagatcaatcaaaacaaggttaaaatagaaacccctgacggcgatttcttatcgacaatgaatgaaaataagaaattaaacattggggatgaagcaattgcctttgtaagacctgaatcattattcataccaagagatggagataattttgacaatcaaattgaggtaaatattgaaagttttgagtttgaaggaaatataaaaaatttctatgcaactttaaagtcgggaacaagaattaagttttctattccaaatgcaattgatacttcatctatatcatcaggcacaaaattacaacttggctttgagtctataaagtcttcaattttacctaaagcacaattagccatagattaaa

SEQ ID NO: 271414 - DNA, 736 bp, Unknown
  Bacterial polypeptide expressing nucleotide sequence isolated from the Sargasso Sea
atgtcagatccgattataaaaattcaaaatatgaataaatggtttggcgattttcaggttttaaaaaatattaatctagaagttgaagcaaataagaaaattgtagtatgtggaccatcaggttcaggaaaatcaacactgataagatgtattaatagattagaagagcaccaagagggcgatataattgttgatggaaatgaactatcagagaaaacgaaagatattgaaaaaattagagctgaagttgggatggtttttcaacaatttaatttatttccacatctctcaatattagataattgtactcttgcacctatttgggtaaaaaaaatgccaaaaaaagaggctcaagaactagccttagatcaacttaaaaaagttcaaatagatgatcaagcaaacaaatttccgggacaactttcaggtggtcaacagcagcgttgtgctatcgctagagcattatgtatgcagccaaaaattatgttatttgatgaacctacatctgctttggatccagaaatgattaaagaagtgctagatgcaatggtaagtcttgcaaaaggtggaatgactatgattgtagtaactcatgaaatgggatttgctaaggaagtcgcggatgaggtaatttttatggacgaaggtatgataattgaaaaggcggaaacaaaagaattctttgctaatccaaagagtgacagaactaagctttttttaagccaaattctttaaa

SEQ ID NO: 271415 - DNA, 751 bp, Unknown
  Bacterial polypeptide expressing nucleotide sequence isolated from the Sargasso Sea
aaacaaaccaaagaaacaattgataaaagagttgatgaattgttaaaactagttggcttgagtgatcatataaataaattttctgctcaactatctggtggtgaacaacaacgtgttgcattggcaagagctctagcgccttctcctggattgcttttgctggatgaacctctatcagctttggatgctaaagtaagacagcatttaaggttagaaataaaaaatcttcaaagacagcttggtgtgacgactattatggttactcatgaccaagaagaagcattaactatggctgatagaatcatactaatgaataatggcgttatagaacaagaaggatcgcctcaagatttatattctaaaccaaaaacagcattttctgcaaattttataggaacgaccaatttatttaaagctaaaaaaatttctgataatagtctagaaattaatggatcaacattagaatgtaatgaaaatatacaagatgaattgtttacagtaacaataagacctgaagatattaaaatttctcaaagtaacaatgaaaaaaatattttaaaaggcacgattaaggagcttgaatttttagggtctattataagaggacatatagaagttaattttaaatcagaaaaagcaaatgtaatttgtaattttgcttctgaatacattttaaataataatattcaaaataattcttctgttagtatatcgctacaaccgcacgcgcttaaagttgttaaggcataga

SEQ ID NO: 271416 - DNA, 676 bp, Unknown
  Bacterial polypeptide expressing nucleotide sequence isolated from the Sargasso Sea
tcaaaagatattaatcttgatgttgaaaaaaataaaaaaattgtagtttgcggtccttctggttcgggtaaatcaactttaattaggtgtataaacagattggaagaacaccaaaaaggaacaataatagttgatggagtagaattatctgaaaatacaaaaaatattgagcaagtaagagctgaagttggaatggtttttcaacaatttaatttatttccgcatttatctatacttgataactgcacacttgctcctatatgggtaaaaaaattacctaaaaaagatgctgaagaattagcattaaaacaattaaaacaagttcaaatagaggatcaagcaaataaatttccaggacaattgtctggtggacagcaacaaagatgtgcaattgcaagagctttatgtatggaacctaaaataatgctttttgacgaaccaacttctgcacttgatcctgaaatgatcaaagaagttttagatgcgatggtaaatttagcaacagcaggtatgactatgatagttgttactcatgaaatgggttttgcaaaagaagttgctgatgaagttatttttatggatgaaggcatgattgtagaaaaagcagaaacaaaagagttttttgccaaccccaaaagcgacagaacaaagctgtttttaagccaaattctttaga

SEQ ID NO: 271417 - DNA, 500 bp, Unknown
  Bacterial polypeptide expressing nucleotide sequence isolated from the Sargasso Sea
tatgtccaataaacccgctgaccgaacttcgaatgacacagcaattcagttgatcgacgttaacaaatggtttggcgagttccacgtcttaaaagatatcaacttgacggtcgagcgtggagagaggatcgtcatctgtggcccatcgggttccggaaaatcaaccatgatcagatgcatcaaccggcttgaggaacatcagcggggccgaattgtcgtagatggaacggagctcaccaacgatctgaaagatattgaaattattcgccgagaggtaggcatggtcttccaacatttcaatctctttcctcatttgactgtcctggagaaccttgttctggcacccatgtgggttcgtaaaatatcccgcgaagaggccgagaaaactggaatgatgtatctcgagagagtgaaaatccccgaacaagcacaaaaatttccggggcagctatcaggtggccaacagcaacgggtggccatcgcccgttctttgtgcatga

SEQ ID NO: 271418 - DNA, 814 bp, Unknown
  Bacterial polypeptide expressing nucleotide sequence isolated from the Sargasso Sea
tatgaacaattcatttatacaaatcaataatatttcaaaacactttgcagatgtaaaagcagttgacgacgtttcatttgagattaaagaaggtgaatttttttcccttttagggccctctggatgtggtaagacaacattgttgagattgttggcaggatttgaataccctacttctggcaatctattaattgatgggatagatattactgcattacctccagacaaaagacctacaaatatggtttttcaaaactatgcaatttttcctcaccttaatgtagaaaaaaatattcaatttggactaagaaaacttggtttaattaatgatgagatagataaacgagttaaaggtgttctctcattagttaagcttgaggggtatgaggaaagatttagtaatcaactatctggtggtcaaaggcagcgtgtcgctcttgcaagagctttagtaaggcaaccaaaagtactattattagatgaaccactaggtgctttagataaaaaattaagagacgaaatgcaattagaattaagagcccttcaaaaaaatatcggaattacttttgtatttgttactcacgatcaacaagaagccataagtatgtcagacagagttgcggttatgaacgatggaaaaattcaacaattatcagcacccaatgaactttataagaatccaaaaaatatatttgtaagtgattttattggtgaaacgaattttcttaaagctgagactaaattaaatgatggagaattcatcaatgtttcaatcgaaggattgggagagtttaaaattaaaaataatttaaat

SEQ ID NO: 271419 - DNA, 1099 bp, Unknown
  Bacterial polypeptide expressing nucleotide sequence isolated from the Sargasso Sea
atggataacatacaatcaatcacacacaccaaaaaattaactttaaataatataaataaaagttttggcgataatcatgttgttaaagatttatcacttaaagtggataaaggggaatttgttgttcttcttggcccttctggttgtggaaaaacaacagctctaagaatgattgctggtttagaatctgttgatagtggagaaatagaaattggtgattcagtagtcacaaataaattacctaagttcagaaatatatcgatggtgtttcaatcctatgctctttacccacataaaacagtcagtgaaaacattgcatttccattgaaggtaagggggattagtggtgatgctcgtgacagagcaatacttgatgcagcaaaacaggttcatatggaagatcttttagatcgatatcctaggcaactttcaggcgggcaaagacaaagagttgcactagcaagagccattgtaagacaacctgatatatttttaatggatgagcccctttcaaatttagatgcaaaattaagagttcatatgcgaactgaactgaaaagaatgcaacatgaaatggggataactacagtttatgtcactcatgatcaagttgaagctatgactttagcaaatcgagttgcgataatgaatgatggggtattacaacagattgctccccctaaggaaatctatggtaatcccaaaaatgtatttgttgctggattcatgggttctccagcaatgaacttcattgatggaactatagaaaataatgaaatgaacattttaggaagaaaatttggactgaatgagaatcttgaaaatcataacgcccttttaggcattagaccagaacacgcgtcaattacagaaaaagacaaggggcatttcaatgcaaaagtttttactactgagcaggcgggtgatcatacccttgtaaatcttaatgttggtgaacaatctatggttgtgaaaatgtcttcagattttgaagctgattttgacaaagaggtaggaataactttttctttagaagacagctatttatttcaaaaaaataatggtgaaagaatagaagtaagacttgtcgataaatgat

SEQ ID NO: 271420 - DNA, 685 bp, Unknown
  Bacterial polypeptide expressing nucleotide sequence isolated from the Sargasso Sea
aatgtcagaaattgcattacgactccaggatgtacacgttacttatggcaacagccagcaatcggtactgagcggattttcaatgtcggtacataaaggtgaaatcgcctgtctgctgggcgcttcaggctgcgggaaaaccacggtgctacgcgcagttgccggatttgaacgcctgcaaaacggagagatctatgtgtcacagcgccgtgttgccggtcccggcattcatctgccaccggaaaaacgtcatgtcggcatggtcttccaggaatatgcgttattcccccatctgaccgcgcagcaaaatgtggcctttggattgcgtcgcatgccgcgtgaggaacaacaggccagagtgactgagctgctgaaaatggtggagttacacagccatgccaaccgctatccgcatgagctttcaggagggcaacaacagcgtatcgcccttgcgcgcgcgttggcgccacatccggaaatcctgttgctcgatgaacccttctccagccttgataagcgcacacgtgaacgtcttggcaacgaggtacgggatattttgcgcgctgccgggcaaacggcgctgttggttacccacagtgaacacgaagctcaactaatggcagaccatattggcgtggtaaaaatggggcagtatcaaataaaaaaagcgacccatccgacctga

SEQ ID NO: 271421 - DNA, 1009 bp, Unknown
  Bacterial polypeptide expressing nucleotide sequence isolated from the Sargasso Sea
atgttccatctagaagtgaatcaactgcacaaatcctacggcgacaccagagtgttcgaggggattgaattcggcatccgcaagggggagctggtgactctgctcggcccctccggctgcggcaagtccaccctgctgcgggcgctggccgggctcaccccggtggatggtggtcaggtgcgggtggccggtgaggacatcacctggcaggagccccagaagcggggcatcggcatggtgttccagagctatgcactgttccccaacatgacggtgcgggacaacgtcgccttcggcctcaagatgaagccccagccgggacgggatctggccgtcagcgtgctggaggcgctggagctggtggagctgaccggtttcgagcgccgctatccggccgagctctccggcggtcagcgccagcgcgtcgcgctggcccgggctctggtggtgcagccgcggatcctgctgctggacgagccgctctcggcgctggatgcccgtatccgccgcagcctgcgccagcagatccgcgagatccagcagcgccttgagctcaccaccatcttcgtcacccacgatcaggaggaggcgctgaccatgtcggaccggatcttcctgatgaacaagggatccatcgtccagagcggcacgccggaggagatctacacccaccccgccagcgagttcgtggcaagctttatcggcaactacaacctgctcgatggcgagcaggccagctccctgttcggcccccgttttcagggcaagctggcgctgcgaccggagtctctctccctgctgccggccggtgcccgcagcgatgaacctcacctgccgggggtcatcagcgggcagcaactgctcggcaacgtgatccgctatcaggtgagctgcgcggcgggcctgctgacggtggactgcctcaaccgctgtgccggcgatctgctgccggtgggcagcgccgtgaccctggtggtggcccgggatcagctctgtgaggtagcatgac

SEQ ID NO: 271422 - DNA, 411 bp, Unknown
  Bacterial polypeptide expressing nucleotide sequence isolated from the Sargasso Sea
ttaaaggtcttagtaggtcagaatctaatgaaattgcaatgtcattgcttgagagagttggtatacctgaacaatctgataaattcccatcacaattatctggtggccagcaacaacgtgtagcaatagcaagagcattagcaatgcaacctaaaattatgctttttgatgaaccaacctcggcattggatcccgaaatgattaaagaggttcttgaagtaatgacagaattagcagaatctggaatgaccatgattgttgttactcatgaaatgggatttgcaaaaaatgttgcagatagatttttattttttgatgaaggtttaattgttgaagaaggaacaccaaaacatttttttgaaaaccctaaagaagaaagaacaaaattattcttaagtcaaatattgtagt

SEQ ID NO: 271423 - DNA, 571 bp, Unknown
  Bacterial polypeptide expressing nucleotide sequence isolated from the Sargasso Sea
gatgtcctctgttacactgatcaatatttttaaaaactatggtcagacaaaggctcttcatgatattaacttagaaatcaagtcaggtgagctttttacactattaggcccaagtggttgtggtaaaacaactcttcttaggaccatcgcaggttttcacaaacaagattcgggatccatcaaaattgatggcaaaattatagatcatctacctgcctatcgaagggatacaggaatggtctttcaggattatgctatttttccacacatgactgtgggagataatgtcagtttcggattaaaaaacaaaaatgtaagtgctaaagaaacaaaggaacttgttactgaagctcttgcaaccgttagacttcttggcctggaaaaaaggatgccaaatgaattaagtggaggacaacagcaacgagtgggtcttgcaagagcaatggttatcaaacctaaagtcttattgatggatgagccactctcaaatcttgatgctaaactaagaattgagctaagagaagatattagagaaatacaaaagaaacttaaaataactacgatttatgtt

SEQ ID NO: 271424 - DNA, 1087 bp, Unknown
  Bacterial polypeptide expressing nucleotide sequence isolated from the Sargasso Sea
atgtcaaaaaaagaggatttcgtaaaatttgataaagtcgataaaagctacgatggaaaagtattagtagttaaagacttaaatttagatatcaaagaaggtgagttcgtaactatgcttggaccttctggttcaggaaaaactacgtgcttaatgatgcttgctggttttgaaactcctactaatggagaaatctatttagataataatccaatttcaaatattcctccacacaaaagaggcattggaatggtttttcaaaattatgctctttttcctcatatgacagtttttgaaaatttagcctttccattaagagtgagaaaaatttcaaaagaagatattgagaaaaaagtagataaagctttggcaatggtttcattgtcagaatttggaaatcgtatgccaggacaactctctggcggtcaacaacaaagagtggctgtggcaagagcattggtatttgatccatcagtagttttaatggacgaacctttaggtgctttagataaaaatttaagagagagtatgcagtatgaaattaaacacattcatgagagtattggtgtaacagttgtgtatgtcactcacgatcaaggtgaagcattaacaatgtcaaacagaatagcagtgtttaatgatggtaaagtccagcaactctcaagtccagataagttatatgaagaacctgttaattctttcgttgcagagtttattggagagaataatacttttgctggtgaaatttcaaatatatcaaatggatcctgtaaagttaaactagataagggtgaaataattgcaaatccaatttcagttaagtctgttggtgaaaaaactacagtttcaattagacctgaaagagcattgattaatcccaaagataaaatggataacaatcaaaagggtaaaattgaggaagtcatttatcatggcgatcacactagagtgagacttaatttactaggcaattctgaatttattttaaaagttccaaacagttctcaaaatttagatattaaacttggaaatgagattaatattggatggaacagtcgagatgcaagagctttagacccaaaataag

SEQ ID NO: 271425 - DNA, 736 bp, Unknown
  Bacterial polypeptide expressing nucleotide sequence isolated from the Sargasso Sea
atggcaactttgaaagtctgtaatcttaccaaaaatttcggcaacacacaggtacttaagcaaataaatttagaggtaattgatggtgaatttgtcgtcctgctaggaccttcaggatgcggaaaatcaactcttctcaatatgattgctggactagaaagtgttgacgagggggacatcttaattgatgaatatttagttaaccgagttgaaccgaaagatcgtaatattgcaatggtattccagtcatatgccctatatccagccatgacagtccgagaaaatgtcattttcggactgaaacaacgtaaaatctctaaagatcagatagaaaaatcactcaatcatttttcacaaatgctacagatagaccaactcttagaccgcaaaccagcacaactttctggaggacaaagacagcgtgtagcaatgggacgggcactggtgcgtgagcctcatattttcctcttcgatgagccactgtcaaatctagatgctaaactacgtgtagaaatgcgtcacgaaatcaataaactgcatgaacgtttgggaacgacaatgatttacgtaactcacgatcaagtcgaagctatgagtctcgccactagaatagctgttatgaacgaagggatcatacagcagattggtacacctcaggaaatctatgacaagcctaacagcgtttttgttgcggactttataggttctcctgctataaacctgatacatgggagat

SEQ ID NO: 271426 - DNA, 1079 bp, Unknown
  Bacterial polypeptide expressing nucleotide sequence isolated from the Sargasso Sea
catgtatgaagctcagcagccttacttaagaattgatgacctcaccaaacattttggggagtttgtcgcggttcgggaactttcgctggaaatcaacggaggagagttcgtctgctttcttggtccttctggatgcggcaagacgaccctgctccgtgctattgccggactcgatccgcaaaccaccggacgcatcacgcaaaatggacaggacatttccagccttccgccctctgagcgggattttggcattgtatttcagtcttatgccctcttcccgaatctgacggttttccagaacatcgcctacggtctagaaaaccagcgggtgccaaagcctaaaatccgaaagcaggtcgttgaattactggaactggtcgggctgcccgagcaaacctcaaaataccctgcacaactttccggaggccagcaacagcgtgttgccctcgctcgcgctttggcgacctcaccggggttgctgttgctcgacgagcctctgagtgctcttgatgcgcgcgtccgtgcttcactccggcaggaaatccgtgcattgcatcagcgtctgggcatcaccaccatccttgtcacacacgatcaggaagaagcactttcaatggcggaccgcatcgtggtaatggatcatgggagcatcgagcaggtaggtactccggaggaaatctatagcactcccgcctcaccctttgttgcggattttattggcgtgatgaatttcatggaagcagaggttgtggcttccggaacgatacgggtaggagaaacctcgctttcctgcgacacgacgaacgtttccagcggagaaaaagtccggatgacggtgcgtccggaagatttgcggtgtcacatcaaaacggtagatttaccaaatggacttccagtccatgtcgacaccctcgaatttctggggtcattctgtcgtcttaagctgaagggaccggaaggattcaataccttgcgggcggacctttcgctccagcaggttcaccaactcaatgctgctccagacgttccgctgaccgtcgaattaccacctgactccctccgccttttcccagacattc

SEQ ID NO: 271427 - DNA, 775 bp, Unknown
  Bacterial polypeptide expressing nucleotide sequence isolated from the Sargasso Sea
atggcgagtattataatagataaagtaaataagtattttggaagtacacatgttatcaaagatgtttctcttgatataaaaagtgagtcttttactgttctagtaggaccaagtggttgtggtaaatctacaattttaagaatgattgctggtttagaagaaattaactcaggtacaatatctattgatgataaagttgttaacgatcttccacccaaagagagaaatattgcaatggtatttcaatcttatgccctttatccgcatatgacggtatttgataatatggcttttggtttaaagattgaaaaaaaatcaaaggaggagatagaacaaagagtaatggaagctgctaaaattttgcaaatagaggagtatctagagagaaagcccaaacaattatctggcggacaacgtcaaagagtagctataggtagagccattacaagaaaaccaaaagtttttttatttgatgagccattatctaacctagatgcagcattaagagtgcaaatgagagtagaattggcaaaattacatgaccaacttaatgcaacaatgatatatgtaactcatgatcagaccgaagcaatgacacttgcaaacgatattgttgttttggaccaaggtatagtttcacaaaagggatcacccatgaacttatataataacccagataatttatttgttggtggctttattggatctccaaaaatgaattttatagatagtataattttaagtaaaagtttaaaaagttctgaggtagatataa

SEQ ID NO: 271428 - DNA, 736 bp, Unknown
  Bacterial polypeptide expressing nucleotide sequence isolated from the Sargasso Sea
aatgtctgatccaataattaaaattgaaggtatgaataaatggtttggagattttcaagttttaaaaaacattgatttagaagtagaaaaaaataaaaaaattgttgtttgcggtccttctgggtcgggaaaatcaactcttattagatgtataaatagattagaagaacatcaaaaaggtacaattgtagttgatggtaccgagcttacagagaatacaaaaaacatagaagctataagagcagaagttggaatggtatttcaacagtttaatttatttccacatttatctatattagataattgtacattggctccaatatgggtaaaaaagatgccaaaaaaacaagcagaagaacttgcaatgaaacaattagaacaagttcaaatagctgaccaagctcaaaaatttcctggacaattatcaggtggacaacaacaaagatgcgcaattgcaagagctttatgcatggaacctaaaattatgttatttgacgaaccaacatcagcacttgatccagaaatgattaaagaagtactggatgcaatggttaatttagctaaggcaggtatgactatgatagttgtaactcatgaaatgggctttgctaaagaagttgctgatgaagtaatatttatggatgaaggaatgatagtagaaaaagctgaaaccaaagagttttttgccaacccaaaaagtgacagaactaaactgtttttaagtcaaatactataa

SEQ ID NO: 271429 - DNA, 974 bp, Unknown
  Bacterial polypeptide expressing nucleotide sequence isolated from the Sargasso Sea
gggctgcggcaaatcgaccttgctgcggatggtggccggcctcgaaagcatttccgaaggcaccatttcgatcgccggcaaagtggtcaatcaactggaaccgaaggatcgcaacatcgcgatggtgttccagaactacgcgctgtatccgcacatgagcgtggccgagaacatgggctatgcgctgaagatcgcgggcgtcgatcgtgcgcagattgcgaagcgcgtgggcgctgccgcgcagattctggaactcgaggcgctgcttacgcgcaaaccgcgcgaattgtcgggtggtcaacggcaacgcgtcgccatgggtcgcgcgatcgtgcgcgaacccgcggtgtttctgttcgacgaaccgctgtcgaatctcgacgcacggctgcgtgtgcagatgcgcctcgaaatccagcgcctgcacgcgcggcttgccaccaccagtctctacgtcacccacgatcagatcgaagcgatgacgctggcgcaacgcgtgatcgtgatgaacaagggtcatgccgagcagatcggcgcgccgaccgaagtctacgaacggccggcgacggtgttcgtcgcgagtttcatcggctcgcccgggatgaatctgctggaaggccgcgtgtcggacgacggctcgacgtttgaagtcgcgggcaacggcccgaagctgccgcttcaaggggttgcatcgatcgggcaggaagtcgccaggggccgcgaatggacgctgggaatccgtcccgaacacatgacgccgggacaagccgacgccgcgcacgctacgctcaccgtcgactcctgcgagctgctcggcgcggacaacctcgcgcacggccgctggggcaagcacgacgtaacggtacgcttgccgcacacgcaccggccggccgctggcgaagcgctgcaagtggcgctgcccgcgcggcatctgcacttcttcgatccgtcgacagggcggcgtgcgaactgag

SEQ ID NO: 271430 - DNA, 952 bp, Unknown
  Bacterial polypeptide expressing nucleotide sequence isolated from the Sargasso Sea
tattgcaggattggaaacaattaatgagggtgatgtttttatcgatgattacaatgtcagcaaagtggaaccaaaagaccgtaatattgctatggtttttcaatcctacgctttatatccatcaatgaatgttagggaaaatatgatttttggtcttaagcaagcaaaaacatctaaagaaaaaatagaagaacagttagaaaaggtctcaaaatttctacaagtagatcagttattagagagaaaaccctcccaattatctggaggacaaagacaacgtgtggctattggtagggccttagttagggagccaagaatatttttatttgatgagcctttatctaacttagatgcaaaactaagagtagagatgagaagagaaataaaaaaacttcaccaacaattaaaaacaacagttgtttacgtaacacacgatcaaacagaagcaatgagtttgggtaccaatattgcaattatgaatcacggggtaattcagcaaaatgatactcctgaaaatatttataacaagccaagcaatacatttgttgcagactttattggatctccatcaatgaatcttattaagggaaacctaaaagagaattcaggagatatattttttacagcaaatggttcaaatctagaagttccaataaaagattatgaatttaaagacaaatcaaatctaaataacaaagaggttttctttggtatcagaccagaacatattttctttaaaaaatttaatgaaactgattttgaaatcactttaagaccagatcttagtgagtacattggtcatgagcaaataatgacttttgattatgcaaatcaagaggtattagctaaatttccgtcaacaattaaaatagatctaggtaaagagacaaaattatattttgatttaactcaagcatctttatttgatgctaaaacagaggaaagaatataa

SEQ ID NO: 271431 - DNA, 736 bp, Unknown
  Bacterial polypeptide expressing nucleotide sequence isolated from the Sargasso Sea
cagatgacccagtatgcccgccgcaagccccatcagctctccggcggccagcgccagcgggtggcgctggcgcgctcgctggccaagcggcccaagctgctgctgctggatgagcccatgggggcgctggacaagaagctgcgctcccagatgcagctcgagctggtcgagatcatcgaacgggtcggggtaacctgcgtcatggtgacccatgaccaggaagaggcgatgaccatggccgagcggatcgccatcatgcaccttggttgcatcgaacagatcggtagtccgatggacatctacgaaaccccggccagccggctggtgtgcgagttcatcggcaacgtcaacctgttcgacggcctgctggtggaggatgagcaggaccacgccaccatcgcctgcgccgatctggagcagcccatctacgtgggccacggcatcagctcccgcgccgagaacaagaaggtcacctacgccctgcggccggaaaaactgctgatgagcctgcaaaagccggtggagatcgagcatccggacttcaactggaccaagggcgaagtctatgacatcgcctatctgggcggtcattcggtttatcacatccagttgccttcgggcaaaatcgttcaggctttcatcgccaatgccgaacgccacggcaagcggccgacctgggatgaccaggtgttcctctactgggaagatgacagcggcgtggtgctgcaatcatgat

SEQ ID NO: 271432 - DNA, 598 bp, Unknown
  Bacterial polypeptide expressing nucleotide sequence isolated from the Sargasso Sea
tatgagctcttcaaaaagttttgtaaaatttgataaagtagacaaaagttatgacgggaaggttttggttgttaaagatttaaacctagacatcgatgaaggagaattcataacaatgttaggcccatcaggatctggaaaaactacttgtttaatgatgttagcaggttttgaaacacctactaatggagaaatttatttagactcaaaacctatttctagaattccacctcacaaaagaggaattggaatggtttttcaaaattatgctttgtttcctcatttaacagtttatgaaaatttagctttcccattaaaagtcagaaaacttccaaaagatgatatcgataaaaaagtagataaagctttatctatggtttcattatctggatttgaaaaaagaatgcccaatcaattatcagggggtcaacaacaaagggtggctgtagctagatctttggtatttgatcctccattagttttgatggacgaacctttaggagcgttagataaaaatttaagagagagcatgcaatatgaaaataaacacatccacgaaaatattggtgtaacagtagtttatgtaacccatgatcaa

SEQ ID NO: 271433 - DNA, 1063 bp, Unknown
  Bacterial polypeptide expressing nucleotide sequence isolated from the Sargasso Sea
atggctgaggtaattttaaaagaggtcaaaaaaaactttgggaaatcaacagttataaacgatgtttccatcaaaattaaagaaggtgatttttgtgtaattgtgggaccatctggctgtggaaaatccactttgcttaggattattgcagggttggaaataccaaccagtggttcgattataattaattctaaagacgttactgctatagatcctgcaaataggggaattggaatggtatttcaaaattatgccttatatccacatatgactgttgaagataatatgagtttcggattaagaatgaataatgcacctaaaactacgattaaaaaaaaggtcggagaagctgcaaaaatccttaaattaactgaattgatgacaagaaaacctgcatctctatctgggggacaaagacaaagggtggctataggtcgtgcaatagtaaaaggctccaatgtgtttcttttcgacgaaccgctttccaatttagacgctgaattaagagtagaaatgaggattgaattaactagattacataaagagttaggtgcaactataatttatgtaacacatgaccaaactgaagctatgacaatggctgataaaatagtagttttaaggaatggatgcgttgaacaaattggtgaccctctagagctttattctaatccagataataaatttgtagctggtttcttaggatcaccaagtatgaattttttggaggctaaatttgatggaaaggatctaaaagtaccatctctagaaaatattaaaatcaaaaaatttccaagtttaagtaaagaaaatccaaaagtaattattggcgttagaccacaagatgttttattgaagaagtccactaaaggtaaaaagatagaatttgttgaaaatttaggaaatttatccatttatcatactcgattggataaaaatcattatttgttatcagaatctaataataaagaaaatcttcctccaggagaaaccattcaagttacccttaatgaaaattcattgtatttttttgatcgaaattcagggttaagaataagatagt

SEQ ID NO: 271434 - DNA, 544 bp, Unknown
  Bacterial polypeptide expressing nucleotide sequence isolated from the Sargasso Sea
atgtctgacccaataataaaaattcaaaatatgaataaatggttcggtgattttcaagttttaaaaaatataaatcttgaggttgaggcaaataaaaaaattgtagtatgtggaccatcaggatcgggtaaatctacactaattagatgtatcaatagattagaagagcaccaagaaggggatataattgttgatggaaatgagctatcagaaaaaacaaaagatattgaaaaaattagagctgaagttggaatggtttttcaacaatttaatttatttccacatctttcaatattagataattgtacacttgcaccaatttgggtgaaaaaaatgcctaaaaaagaagctcaagaactagccttagaccaacttaaaaaagttcaaatagatgatcaagcaaacaaatttcctggacaactttcaggtggacaacaacaacgttgtgcaatcgctagagcattgtgtatgcagccaaaaattatgttgtttgacgaaccaacatccgcattggatcctgaaatgattaaagaggtgcttgatg

SEQ ID NO: 271435 - DNA, 754 bp, Unknown
  Bacterial polypeptide expressing nucleotide sequence isolated from the Sargasso Sea
actggaagttcgtgatctgcacaagtatttcggcacccacgaagtgctcaagggcatcgatatgaccgcccacaagggggatgtgatctcccttatcggctcctccggttcggggaagtcgacctttcttcgttgtatcaatttgctggaaacaccctcttccggcacggtttccctccatggcgaacttattcgcatgaaaaccaaccgggccggtgaacggttgccggaggacgtgcgccaggtggagcgcattcgcagccgcttggccatggtgtttcaaagcttcaatctctggtcccacatgaccatcatgcagaacatcatcgaggtgccgatccaggtgctcaaggtgccccgcgccgaggcgatggccaaggcggaacacctgctcaaccgggtgggactgtgggagcggcgcgactactacccaggtcacctctccggcggccagcagcagcgggcggccattgcccgggcgctggcggtggagcccgaggtgatgctgtttgacgaacccacctcggcgctcgatcccgagctggtgggggaagtgctcggcctgatgcgcgagctggccgaagaggggcgcaccatgctggtggtgacccatgagatgtcgtttgcccgcgatgtgtcgaacaaggtaatgtttttgcatcagggccgcgtggaggaggagggcaatcccaaggagatcttcgcccatcccaagtccgaacggttcaagcaattcatctcctccatctattga

SEQ ID NO: 271436 - DNA, 736 bp, Unknown
  Bacterial polypeptide expressing nucleotide sequence isolated from the Sargasso Sea
atgtcagatcctattataaaaataaataatatgaataaatggtttggtgatttccaagtccttaaagatatcaatcttgatgttgaaaaaaataaaaaaattgtagtttgtggtccatctggttcaggaaaatcaactttaattagatgtattaatagacttgaagaacatcaaaaaggaacaatcatagttgatggaaccgaattaactgaagaaacaaaaaatattgaacaaataagagctgaagttggaatggtatttcaacaatttaatttgtttccacatttatcaatattagataactgtacacttgctccaatttgggtaaaaaaaatgcccaaaaaagaagcagaagatttagctttaaaacaattaaaacaagttcaaattgatgaccaagctcacaaatatcctggtcaattatctggtggacaacaacaaagatgtgcaattgcaagagctttatgcatggaaccaaaaataatgctttttgatgaaccaacatctgcacttgatcctgaaatgattaaagaagtattagatgcaatggttagtttagcaaaagcaggaatgacaatgattgttgtaacacatgagatgggttttgctaaagaagtagctgatgaagtaatatttatggacgaaggaatgattgttgagaaagctaatacaaaagaattttttgccaatccaaaaagtgatagaactaagctatttttaagccaaattctttaga

SEQ ID NO: 271437 - DNA, 814 bp, Unknown
  Bacterial polypeptide expressing nucleotide sequence isolated from the Sargasso Sea
aatggcgagtattaaaatagataaagtaaataagttttttggtaacacacacgtgatcaaagatgtttctcttgatataaaaagtgagtctttcacagttctagtcggaccaagtggttgtggtaaatcaacaattttaagaatgattgctggtttagaggaaattaattcaggtacaatatctattgataataaagttgtaaatgatttaccacctaaagaaagaaatattgcaatggtatttcaatcttacgctctttatcctcatatgacagtatttgataatatggcttttggcttaaaaatagaaaaaaaatcaaaagaagagatagagcaaagagtaatggaagctgctaaaatcttacaaatagaagagtatcttgagagaaaacccaaacaattatctggaggacaacgtcaaagagtagctattggtagagcaattacaagaaaaccaaaagtttttttatttgatgaaccattatctaacttagacgctgcgttaagagtacaaatgagagtagaattagcaaaattacatgatcaacttaatgctactatgatctatgtaactcatgatcagactgaagctatgacacttgcaaatgatattgttgtattggatcaaggtatagtttcacaaaagggatcaccaatgaacttatataataacccagataatttatttgttggaggttttattggatctccaaaaatgaattttatagatagtaaaattttaagtaaaagttcaaagagttctgaagtagatataatgggggactggaaagttaaatgtaccaaaaatttctga

SEQ ID NO: 271438 - DNA, 754 bp, Unknown
  Bacterial polypeptide expressing nucleotide sequence isolated from the Sargasso Sea
ttatgctctatttccacatttaaatgttgaaaaaaatattgcatttggcttatcaactaaagacatcaataacggtcgtttagaagaagttttagaaatgtgtaatctaaaaaaatatagaaataaatttccccaagatatttcagggggtcaacagcaaagagtagctttagcaagagccttagctcctaaaccagatgttgtactgttggacgagcccttcacaagtctagatgcccatatggcaagagaattaagagatgaagtagttcatctcttaagagaaacagagacaacagcaattctagtaactcatgatcaagaagaagcattatccgtctgtgatattgttagtgttcttgaagatggtaaagtaatgcaaagcgcaacacctcaagagatctatttaaacccagttagtcaaaatgttgccaactctgtcggggatccaaatatcattaaaggtttttcaaaaaatggaagggtagagacagccttaggtacattcgtttctgcatacgagggggcattggatgtctctataagaccagaatgtattgagctaagccttgattcaaaaggtgcttacgtggttaaagaatgtattttctatggacacgaccaggttgtttcttttgaaaatagtgcaggccaaatatttagatcgagatccttaccttctacaatttttgaaagtggagacaaaatttctatagaaatttctgaagttacaacttttccttcaaatacttga

SEQ ID NO: 271439 - DNA, 730 bp, Unknown
  Bacterial polypeptide expressing nucleotide sequence isolated from the Sargasso Sea
atgagcataatcaaaactgtagatgtcaaaaagtggtttggagatttccaagctctaaaaggaatatctatggaagttgctgaaggggaagtattagtaatatgtggaccttcaggatcaggtaaatcaacttttattaggtgcataaatcggctcgaacaacatcaagaaggcgaaattgttgttgatggaattgagctcacaaatgacctaaaaaacattgaagcaattaggtctgaggtgggcatggtttttcaaagttttaatttgtttccacatttaacagtaatgcaaaatatcactcttgccccgatatgggtaagaaaaaaaagccgtagtgaatcagaagaaaaagctatggagctattagagagagtaggcatacctgaacaggcacaaaaatttccaggacaattatctggtggccagcagcagagagtagctattgcaagagctcttgctatggaacctaaaattatgctttttgatgagccaacttctgccttagatccagaaatgattaaagaggttcttgatgcaatgaaagagcttgcagaatcaggaatgacaatgatcgttgtaacacatgagatgggatttgctaaagaagttgctgatagggtaatgctctttgatgaggggttaatggttgaagagaatactccaaacgaattttttgataatccaaaaaatgatagaacgaaactattcctaagtcagattctttaaa

SEQ ID NO: 271440 - DNA, 766 bp, Unknown
  Bacterial polypeptide expressing nucleotide sequence isolated from the Sargasso Sea
atgaataatattattacatttgataaggtttccaaatcttttggtgagcttaaagtattagaccaattaaatttagaagtaaaagatggtgaaaaattagcactaattggtccaagtggttctggcaaaactacaatcttaagaattttaatgacattggagacaatagatagcggttttgtatctgttaataatgagtatttatggcatgaaaaaattaatgataaagtagttcccgcaactgataaacatttacaaaaaatgcgtgatcagattgggatggtttttcaacaattcaatttatttcctcacttaacagctatagaaaatgttaagcaacctcaaattttagttaaaaagaaaaatgaaagtgaagcaaaagaaaaagcagaagatctatttaacatgattggattaagtgataaaatcgatcattatcctcatcagttatcgggtggtcagcaacaaagagttgcaattgcaagggctttagcgatggatcctaaaataatgttatttgatgaagtaacatctgcattagatcctgagctagtggatgaagtgttggcagttttaagaaaattagctgcagactcggatacaactatgttaacagtcacacatgagatgaattttgctcaagattttgctgatagagtcctattttttgatgctggtcagattgtagagtcaggctctcctaaagatttattttcaaatccaagagaagagagaactaagtctttcttacgtaaatttatatagt

SEQ ID NO: 271441 - DNA, 1060 bp, Unknown
  Bacterial polypeptide expressing nucleotide sequence isolated from the Sargasso Sea
catggcacaagttgaacttaaaaatgtcaataaatcttttggacaaacaaaagttataaaagatgttcacttatctatagaaaagggcgaatttgtcgtcttcgtgggaccgtcaggttgtggcaaatctacgttgctcaggctcatcgcaggcttagaaaatttaagtaacggtgaaatcataatagccgatcgacctgtcatggatttaccaccctcagaaagagggattgctatggttttccaatcctatgctctctacccacatatgtccgttttccagaacatggccttttccttaagcctacaaaaattttctaaagctgaaatcagaacgcgtgttgaagccgccgctaaaatccttcaaatggagcatcttcttgatcgaagaccagcggcgctgtctggtggacaacgtcagcgtgttgctattggcagagctattgtaagaaatcctgatgtgttcttatttgatgaacccttgtctaatttggacgctgcgcttcgacacgaaacacgtgttgaaattgccaagctacataagcagttggatgcaacaactatttacgtaacccatgatcaagtagaggccatgacgctagctgataaaatcgttgttttacgagacggtgaagtcatgcaggtgggatcgcccatggatttattcaattcaccagataatgaattcgtcgccggctttcttggatcgccacaaatgaatttctttgacgggagtttagcaaaagttacaaaaaatggttcatcaggatcttttaaaggtcaaggctttgaagctggtgatataaggcttactagtcaacaaaagaagaacaatgatcctgtgcgcttaggtattcgaccacaacacttgcagatcaacgaaaaaggtaacctggcaggtcaagtgactctcgtcgaaaggcttggaacggaaaccgtagttgaattgataactgaaaatggaaccccttttagatatgctgcagcggaaacacctgacatagctataggggacaatttaaaatttgaatttgaaacccgtagagcgcacttattctaa

SEQ ID NO: 271442 - DNA, 730 bp, Unknown
  Bacterial polypeptide expressing nucleotide sequence isolated from the Sargasso Sea
aatggttaaagctaataaatcaaaaaataatgttaaaaaccttaaaacagtctcaataaataatttgagtcacttttatggaaaaaatgagaataaaaaacaagttcttaatgccgttaatttaaatattgataaaggagagttggttcttttgaaaggaccttctggatgtggtaaaacgactcttttaacattaattggcgccttaagaacctgtcaaagtggagatttaactgtattaaataatcagttaaatggagcatcaaggaaaacacgtcagattctcagaagaagtattggaatgatttttcaaggtcacaatcttctaagatgtttaacagcagaacaaaatgtccagatgggcgccgatttaataaaaggcttaacatatttgcaaagacgtgaaatagcacggaattggttgtcagcagtaggattagaagagcatcataaaaagttgccaaatgacttatctggtgggcagaaacagagagtagcaattgctcgagctttatctgctaacccaaaacttttattagctgatgagcccacttctgctttagatagcgtcacaggaagagaaatagtaacccttttaaggaaattagcaaaagagcaaaattgttctgtacttatggttacgcatgatccaagaatttcagatatggctgataggatattaaatatggaagatggtaaaatatatagtgctcatagtgagctaatataa

SEQ ID NO: 271443 - DNA, 1075 bp, Unknown
  Bacterial polypeptide expressing nucleotide sequence isolated from the Sargasso Sea
atgcagaataataacacatatcttgaagttaaagatttatcgaaatcatttggaaattttgaagcaataaaaaatattgatataaacatacaagaaggtgaatttgtttgttttcttggcccttcaggttgcggcaaaacaactttactaagatgtatagcgggattagaaactcaaagtacaggatctgttattcaaaaaaatattaatatatcaaatgagcctccatcaaatagagattttggaatcgtctttcagtcgtatgctttatttccaaatctgtctgtcttttcaaatatatcttatggtttgataaataataaatggaaaaaagcagatataaaaaagagagtagatgaattattaagtttagttaatttaactgaacatgcattaaaatatccaagtcagctatctggtggtgagcaacaacgtgtagccttagctagagctttagcaacgtcaccaggtttgttgttattagatgaacctttatctgctttggatgcaaaggttagagtgtttttgagaaaacaaatacgagatttgcaaagaaagcttggtgtaactactattatggttacccatgatcaagaagaagcacaaacaatggcggatagaattttcgtaatgaaagatggcgaaataattcaatcaggaacaccaagtgaaatttatacaaaagcaaattctccttttatagcttcttttattgggagtatgaattttattcctgcgattattaatagttcaaacaaagtaaaatgtaatcaaatagagataaattgcgatataggaaattttaaagcgaatgattctgttcaattagcaattaggcctgaggacattcagtttaagcaaggcaatcaggatgacaatatggttccaggaagaattaaagaagttgagtttttaggatcttttcaacgagtgtattttgaagttaggaattttacagatgaattaattatagttgatgttccgagttcaacggcaagaaaaattgaattagatttgaataaagaattgaatttatatttttctaaagaagatgctcggatttattcaacataat

SEQ ID NO: 271444 - DNA, 1063 bp, Unknown
  Bacterial polypeptide expressing nucleotide sequence isolated from the Sargasso Sea
tatggaaaaatatttatcagtcaaaaatgtaaataagtactttggagatttccaagcacttaaaaatgtaaattttgatgttaaagaaggtgagtttgtctgtatacttggtccttcaggatgtggaaagacaactttattaagagtaatcgcaggattagagagtcaatctgaaggattaattaatcaaaataataaagacatatcattacttcctcctgatcaaagagactttggaattgtattccagtcctatgctttatttccaaacttaagtgtaaaaaataatatatcctttggattaaaaacaagaaaacaaaataaagaaacaatcgataaaagagttgatgaattattaaaattagttggtttgagtgatcatataaataaattttctgctcaactatctggtggtgaacagcaacgtgttgctttggcaagagctttagccccttcacctggattgctattattagatgagccactttcagcattagatgcaaaagtaagacaacatttaagattagaaataaaaaatcttcaaagacagctaggcgtaactactattatggttacacatgaccaagaagaagcattaacaatggctgatagaatcatactgatgaataatggaattattgaacaagaaggatcacctcaagatctttattctaaaccaaaaacagcattttctgcaaattttataggaacgacaaatttatttaaagctaaaagagttgctgacaatagtttagagattaatggatcaacattagaatgcaatgaaaatataaaagatgatttgctaactgtaacgataagacctgaagatattaaaataagtcaaaataataatgaaaaaaatattttaacaggcacaattaaggagcttgagtttctaggatctaatataagagggcatattgaagttaacttcaaatcagaaaaggtaaatgttatttgtaattttgcttctgaatacattttaaataataatattcaaaataattctactgttagtatttcactgcaaccgcacgctcttaaagttgttaaggcataa

SEQ ID NO: 271445 - DNA, 504 bp, Unknown
  Bacterial polypeptide expressing nucleotide sequence isolated from the Sargasso Sea
tctggacgttgcttacggcaaaaaacaaatcgtattcggtttcaattttaaactggaagaatgtcagataggttgttttttgggcccaagtggttgcggtaaaacaacagtgctgcggagcattgctggttttgaacaaccttctaaaggtgaaatcatcctgaacgggaaaaaattaaatggatttaaaacatatatcacacctgagaaaaggaatattggaatggtattccaggacatttcattatttcctcacctttcagttgaagaaaatatccaattcggtatgcgttcttggtcccgagaaaagagaaaaaaacgaagtcaggaattattagaattgatcggtatgtcgcgatttggaaaaaaataccctcatcaactatctggaggccagcaacagaggattgcattggctcgcgcaatggcacctaagccttcattgcttctcatggatgaacctttctccagtcttgatgcagaattaaaagagcagcttgctag

SEQ ID NO: 271446 - DNA, 742 bp, Unknown
  Bacterial polypeptide expressing nucleotide sequence isolated from the Sargasso Sea
aatgacagagcaagtaatccagctagaaaaagtcaataagtggtatgatgactttcacgttctcaaagatattgatttatctgttgataaaggtcaaaaaattgtgatttgtggtcccagtggctccggtaaatcaactatgatccgttgtattaatcgtcttgaagcacatcaagaaggtaaaattgtagttcatggaactgagcttactaatgacctcaaaaatattgatttaattagaaagaacgttggaatggtttttcaacagtttaatctttttcctcacttatcagttttggataatatttctttggctccaatttgggttaaaaaaatgcctaaaaaagaagctgaagaaatcgccatgtcatacttggaaaaggtaaaaattcctgaacaagctgaaaagtttcctgggcaattatcaggtggtcagcaacagcgtgtggctattgcgagatctctcgcgatgaacccagatatcatgttatttgatgagcctacctcggctcttgatcctgaaatgattaaagaggttttggatgtgatgatacaattagctgaagagggtatgactatgttagttgttactcatgagatgggatttgcaaaaactgttgctgatcaaatgatttttatggatgagggaagaattgttgaacaagcatccccagatgaattctttaataacccaaaaagtgatcgaactaaacttttcttaagtcaaattcttaatcattaa

SEQ ID NO: 271447 - DNA, 736 bp, Unknown
  Bacterial polypeptide expressing nucleotide sequence isolated from the Sargasso Sea
atgtctgaagcaattattcaaatcaaagatgtaaacaagtggtttggagactttcaagttttaagtggaataaatcttgaggtgatgccgaaagaaaaaatagtggtatgtgggccttctggttcaggaaaatctactttgataagatgcatcaaccgattagaggaacatcaagaaggtaatataattgttgatggtacagaaatttcagaagatactaagaatattgagcaggttagagctgaagttggtatggtatttcagcaattcaatttatttccacatttatctatattagacaattgtacgcttgcacctatatgggttaaaaaattgccaaaaaaagaagcagaagaattagccttaaaacatctagagagagtacaaatattagatcaagctcaaaaatttccaggacaactatcaggtggacaacaacaacgtgtagctattgcaagagctttatgtatggagccaaaaataatgttatttgacgaaccaacatcagcacttgaccctgaaatgattaaagaagtactagatgttatggtaaatttggctaatcaaggtatgacaatgattgttgttacacatgaaatgggatttgctaaagaagtggcagatagtatgatttttatggatgaaggaaagatagtagaaaaggctgatactaaagaattttttgctaatccaaagagtgagagaactaagctatttttaagtcaaattttataac

SEQ ID NO: 271448 - DNA, 964 bp, Unknown
  Bacterial polypeptide expressing nucleotide sequence isolated from the Sargasso Sea
catgaattcaaaaaagtctgattttgttaaatttgaacaagtcgataaaagttatgatggaaaagagcttgtagttaaaggactcgacttagatattgcagaaggtgagtttcttaccttacttgggccatctggatctggcaaaacaacaactctcatgatgcttgccggttttgaaactccaacgaacggagagatatattttgatggacgtccgataaacaatatcccacctcacaaacgtggcatcggcatggtctttcaaaattatgctttgtttccgcatttatcagtttatgaaaatttagcttttcctcttaaagtaagaaaagtagataaatcagaaattgaagagagaattaataaaactttgaaaatggtttcattaacaggttttgaaaacagaatgcccgctcaactatctggtggtcagcaacagagagttgctgtagctcgcgcgcttgtgtttgatcctaaacttgtattaatggatgaacctcttggagctcttgataaaaatttacgagagagtatgcaatatgaattaaagcacattcacgagtcattaggagtgactgttgtttatgttacacatgatcagggtgaagctctgaccatgtcaaaccgaattgctgtttttaatgacggtaaggttcaacaactttctggaccaaatgaattatatgaaacgccagtgaattcgtttgttgcgagctttattggagaaaataatactttcactggaactgtaaaagaaatcgcctctggctcagcaaagattgaaactgattctggtgaaactattgttgctaatcctattgctgtgagctcttcaggagaaaagtccagaatttctctaaggcctgagcgagtgagtattgacccaaatgaacaacttgagaataaattcacaagtgagattcgcgaaatatttatcatgaagatcatactagggtgcgtgtaa

SEQ ID NO: 271449 - DNA, 817 bp, Unknown
  Bacterial polypeptide expressing nucleotide sequence isolated from the Sargasso Sea
ttgctatgtcaagatacagtttatatttggaaaaaaagcttaaaacaggtattaacatgggagcagattaatatgtcagaagattcaataatttcattaaaaaatgtaaacaaatggttcggtgaattccatgtattgaaagatgtggatcttgaagtaaaaaagaaagaaagaatagttgtttgcggtccttcaggttcaggaaaatccacaatgattagatgtattaatcgattagaagaacatcaagaggggaccattattgttgatggtattgaacttacaggaaatttaaagaacattgatagtgtaaggaaagaagttggaatggttttccaacaatttaatctttttcctcatttatctgttaaagaaaatattactcttgccccaatttgggttaaaaaaatgcctaaagctgaggcagaagaattagcaatgcaacaacttgaaattgttaaaatacctgaacaggctgataaatatcccgggcaattatctggcggacaacaacaaagagttgcaatagcaagatcacttgcaatgaagccaaatattatgctttttgatgagcctacatctgcactagatcctgaaatgattaaagaagttttagatgttatgatcgacttagctgaaggtggaatgaccatgatagttgtaacgcatgaaatgggctttgcaaaaactgttgctgatagaatggtatttatggatgaagggagaatagttgagcaggcagtacctgataaattttttaataatccagagagtgatagaacaaaactattcttaagtcagatacttaatcattaat

SEQ ID NO: 271450 - DNA, 754 bp, Unknown
  Bacterial polypeptide expressing nucleotide sequence isolated from the Sargasso Sea
tatgagtgctaaaaattatatcaaaattaaaaatttatctaaaagttttggagatgttaaagttttaaaaaatattaatcttgaagtagaagagggtgaatttttctcacttcttggaccttctggatgtggaaaaactactttattaagaattttagccggatttgaatatccatcagaaggtgaagtattttttgatgactctaatgtgacatctcttacacccaaccttcgtccttcaaatatggtatttcaaaactacgcaatatttccgcatattaatgttcaaagaaatattgaatttggtttgagaaaagaaaatttaagtaaagatgaaatgcgagaaagagttgaaaatgcccttaagatggttcaactagaaggatatgaaaataggtattcaaatcaattatctggaggtcaaagacaaagaattgctctagcaagagctttagttaagcaaccaaaagtactacttcttgatgagcctcttggtgctcttgataaaaaattaagagaagaaatgcaaattgaattaagaaatttacaaaagagtcttggtattacttttatttttgttactcatgatcaagaagaggcaatgacaatgtctgatagaattgctgtaatggatgaaggtaatattctgcaagtatcgccacctagagaaatttatcacaaccccaaaaataaatttgtttctcagtttattggaaacattaatattttagatgctgctcttaaaactgtttca

SEQ ID NO: 271451 - DNA, 1016 bp, Unknown
  Bacterial polypeptide expressing nucleotide sequence isolated from the Sargasso Sea
gatggcggaagtaaagcttaacaacgtatcgaagcgttggggtagttttgttggcgttgataatttcaatattacgattccagataaagagttccttgtgcttttaggcccttcagggtgtggaaaaaccactacgatgagaatgattgctggcttggaggacccaacagaaggaaatgtagtcattgacggcaatgtcgtgaatgacgttgaacctaaagatcgtgatgtcgcgatggtctttcagagttacgcgctttacccaaatatgaatgtctacgaaaatattcgttttcctttgaaagtcaggggcacaccaagtgagagccatgatgctaaagtaaagcgtgcatcttctatggttgaactcgatgattttctgcatcgaaaaccttcagagctctcaggtggccaaagacaaagagttgcactggctagagcgatagtacgcgagcctaatgtttttttaatggatgagcctttatccaatttggatgctaaactcagaatatcgacccgagcgcaaattaaaaacctttcgcacgaactagctgtgaccactatatatgttacccacgatcaagttgaagcgatgacgcttgctgacagagttgttgtgatgaaccatggtgtggtccagcaagttggaacaccaactgagatctataattcgccactaaatacctttgtcgcaggtttcattggtagtccagctatgaacctacttgagggtacgatatctaatggatgttttgaggctcaaaatacaaaaattagtgggctaaaaatcgaagatggtccagtaacgcttggtttcagggcagaagatgcggaaatttcaaaacgcaaatcagaaattgggtcaactgtttatgcgatggaattgcttggcgacgccacaatggtaaccgtcaaaatcaaagataaattggttagtgtaaaggctgataaaaattttcgcgcagaaattggagatgaaataagtttttcaattcctgcgcaaatttgccacctat

SEQ ID NO: 271452 - DNA, 1060 bp, Unknown
  Bacterial polypeptide expressing nucleotide sequence isolated from the Sargasso Sea
atgagcgaacttcgtatccgcggactgcaaaaatcgttcgacggccatgcggtgctgcacggcatcgatctctccgtcgagcgcggcacgctgctcgcgctgctcggaccgtccggcagtggcaagaccaccttgctgcgcctgctgtgcggcttcgaacgcgccgatggcggcagcgtcgaaatcgacggccgccgcgtcgtcggcgacaacctgcatgtgccttccgaacagcgccgcatcggctatgtgccgcaggagggcgcgctgtttccgcatctttccgtagcggacaacatcgtcttcggcctgccgcgcacgcagcgccgcgcgcggcatcgtgtggccgagttgctggaactggtcggcttgccggcgaacttcgccgaacgcgcgccgcagcagttgtcaggcggccagcaacagcgtgtcgcgctggcccgcgcgctggcgccgtcgccgaccctggtgatgctcgacgagccattttcatcgctcgatgcggctttgcggctcgaaacgcgccaggcggtggccagcgcgttggccgcagccggtgcgaccgccgtgctcgtcacgcacgatcaatcggaggcgttgtcgctcggccacgaggtcgcggtgctgtggaacggccggctgatccagaccgcgacgccggagacgctgtaccgcaggccggtgacgcgcgagcttgcttccttcgtcggtgaagcggtgctgttgccgggcacggtcaggcaggatcgcgtcaactgcgaacttggcgatttgccgttgtgcgagccgatgggcaacggcgcggtcgacgtcatggtccggcctgaacagattcgtctgttgcgtgccgaagaaaccatgccggatggcgcgccgtcgtatgccgccgtggtgcgcgaggtgatttttcaggggcaggacgcgggcgtcgcgctgcaattgcagtccggcgcgcagacgatggtgcgcgctcgtgtgccggggtatctgtcgccgcagccaggcgaaaacgtgcggcttgccgtggatggcgcggtgaccgcttatccgcgggcctgag

SEQ ID NO: 271453 - DNA, 871 bp, Unknown
  Bacterial polypeptide expressing nucleotide sequence isolated from the Sargasso Sea
atgaacgctatcgccgacatgccctcctccgcgtccaccgccgccttcgatacgccgccaggcgcgcccctaatcgaagtgcgcggcttgaaaaaacgcttcggcgaagtcgaggtgctgcgcggcgtcgacctcgagatcgcccgctccgaagtggtctgcatcatcgggccgtccggttcgggtaaaagcacactgctgcgctgccttgccgcgctcgaaacctacgatcagggcgacgtgcgcattgaaggcgagctactgggctatagcgagcgcaatggaaaacgcgtgcgagcgtcgcagaacgagatcaatcgcgtgcggcgcaacgtcggcatggtgtttcagcaattcaatctgtggccgcacatgacagcgctcggcaatgtgatggaagccttgctgcgcgtgcgccatctgtcgcatgacgaagcgcgccgccgcgccaatgcgatgctggaaacggtcggcctcgcgcataagggcgacgcctatcccgcgaaactctcgggcggccagcagcaacgcgttgcgattgcacgcgcgctggcgatggagcctcacatcatgctgttcgacgaaccgacctcggcactcgatcccgagctggtcggcgaagtgttgcaggtgatgaagcagcttgcgcgcgacggcatgacgatggccgtggtcacgcacgaaatgggttttgccgcgcaggtggccgataaggtcatgttcatcgaccagggacgtatcgccgtgcaaggcaagccgcgcgaagtctttcacgatgcggggcagccgcgtttgcggcagttcctgcaaaactatttcgaccgtaatgcgttctggacgcgcggccctgatgacgtggaaccgcaatgaa

SEQ ID NO: 271454 - DNA, 620 bp, Unknown
  Bacterial polypeptide expressing nucleotide sequence isolated from the Sargasso Sea
tatgtctgacagtattattcaaataaaaaatgtaaataaatggtttggtgattttcaagttttaaaagatattaatcttgaggttaaaccaaaagaaaaaatcgttgtttgtggtccatcaggatcaggtaagtctacattaattagatgcatcaatagattagaagaacatcagcaaggtgatattattgttgatggaaacattttaacagaagatacaaaaaatattgaacaaattagagcagaagttggaatggtattccaacagtttaatttattccctcatttatcaattgtagataattgtacactagcaccaatttgggtaaaaaaaatgccaaaaaaagaagctgaagaattggctttaaaacatttagaaagagttcaaattcttgaccaagctcacaaatttcccggtcaattatcaggtggtcaacaacaaagagttgcaattgcaagagcgctttgtatggaacctaaaataatgttatttgatgagcctacatcagctctagatccagaaatgattaaagaagttttagacgtaatggttgatttagcaaaccaaggtatgacaatgatagttgttacccatgaaatgggatttgctaaagaagtag

SEQ ID NO: 271455 - DNA, 1051 bp, Unknown
  Bacterial polypeptide expressing nucleotide sequence isolated from the Sargasso Sea
aatgagttatttacaactgaaaaacctgaccgcctcttatgataaagaaattgttttaaataatttatcccttgatattaaaaagggggaattgctttccttgttgggatccagcggttgtggaaaaacaacgacattacgaatcgtttctggctttttaaaaccaataagtggatccgtgattctggatgatactgacatatctctaaaacctccgaatgaaagaggatttggatatgtttttcagagttatgcgttatttccccatttgactgttgaagataatgtcggatttggcctgaagcaaagaaaagtcagatcagatcagattaaagtcaaagttgatgaaatgcttgacttggtcgatttgagtgattttcggagcagacgtccgaaggaactttcaggaggtcaaaaacaaagggttgcattagctcgtgcgatggctattgacccaggattactcttgctggacgaacccctcagcaacctggatgcggcactcagaataaaaatgcggattgagatcaagaggatccaacaggaacacgcaatgaccgcaatctatgtgactcatgaccaggaagagtgtttttcaatctctgaccgtgttgccatcatgaatgacggactgattgaacaattggcaaaaccggaagaaatttattcttctccaaaaacacagttcgtcgcaaaattcgtcggatttgaaaattttttcaaaggtgaaattaaagattcatcgggcaaatatcactttatcagtgaaaagggagggtatgaaacccccattttggatcaaacaataattcaaagaaaaaccgccatcgctgccttccgtcctaacggttttgagattctttcctcagatcagaaagaccaatctttgatacccgggctgatcagggtgcaaacctacttaggaaaaggctaccgttatttgatcgacacggaattaggtgaattggttgtcgatcatacagagaacaaattttcaatcaacactcaggtatttcttaagcctcttccagaaatgatggttcttttataa

SEQ ID NO: 271456 - DNA, 1084 bp, Unknown
  Bacterial polypeptide expressing nucleotide sequence isolated from the Sargasso Sea
atgaaacaatcaatcaaaaacgctattgaagttcaaaatgttacaaaagtttatggagttggtgaaaattctgtaacagcattaaaggatgcaaatcttacaattaatgataatgaatttttcacccttttaggcccctctggttgtggcaaaaccacacttttaagattaattgcaggctttgaagacattacaaagggagatttaaagctttttggaaaagaaattgtaaatctgccacctaataaaagaccgatcaacacagtttttcagcattatgctctatttccacatttaaatgtttttgaaaatgttgcttttggtctaagacgtttaggtaaaaatcgttctgaaattgagcaaaaaaccaattacgttttaaaattggttcaaatggaagaattttcaaaaagaaggccaaatcaactttctggtgggcaacaacaaagggttgcattagctagagctcttgcccctgaaccaaaagttttactactcgatgaacctttgtcagctttagatttaaagcttcgtcaggcaatgcgtattgagcttaaaacacttcaaagagaaacgggtattacatttgtttttgtaacgcatgaccaggaagaggctttaactatgtcagatagaatagctgtaattagtgaaggagaaatacaacaaataggtgagccaaattctatatatgaaaatccagctaaccagtttgttgcaaattttattggtgaagctaacttattgaaaggactatgtaaaaaaataggtaaaaatggtttatgtaaacttaattctgggcatgaaatctctcttgaaattccgtcattaataaaagtaaatgaccctattacaatttttataagacctgaaagaataaaaattaataaaccaagttcgtcaaaaataaaatctttcatctcacaatttacttatcttggaaatgcagcacatcttgaagttgagagcaacaaccaaaaaataaatattacattgccaatagataaagtaaaaaacttcaaaaaagcagatgaagtaactctggaatttccaaaaaatcatgcacgtgtaataaatcaatgaa

SEQ ID NO: 271457 - DNA, 1081 bp, Unknown
  Bacterial polypeptide expressing nucleotide sequence isolated from the Sargasso Sea
atgaaactatcaaaaactaatgcaattgaagtacaaaatgtaaccaagatttatggatctggtgaaaattctgttaaggctttagacaatgcaaatttaattatctatgataatgaattttttacacttttaggcccatctggttgtggcaaaacaacactacttagactcatagctggttttgaagacatcacaaatggaagaattaatctttttaatgaagagctcatttctctacctccaaataaaaggcctgtaaatactgtatttcaacaatatgctttgtttcctcatttaaatgtttttgaaaatgtagcatttggtcttaggagattagacaaagataacgattttgtgatcaaaagatctaatgaggttttagagcttgttcaaatgcaagattatgccttgaggcgacctaatcaactatctggaggtcaacaacaaagaattgctttagcaagggcattagcaccagagccaaaagttttattattagatgagccactttcagcattggatttgaaactacgccaggcaatgagagtcgaactaaaaacattgcaaaaagagactggaataacttttgtttttgttactcatgaccaagaggaagctcttacaatgtctgatcgtattgctgtaataaatcaaggaagtattcagcaaattggaaatcctgaagaaatttatgaaaagccaagcaatcaatttgttgcaaattttattggtgaagcaaacctaatattaggtaagtgtgaaaaaactggtattaatggaatttgcaaactacaaacaggacataaaatttcaataaatattcctgacaaatttaataaaggcgataatttaacaatctttataaggcctgaaagaataaagattaataaatcaaaggtgtcaagtttatctcaaattcaagaatttacatatttagggaatgcagctcatattgagttattatcaaatggcgtttcagttaatgcaacattaccgattgataaagtaaaaaattttaaaaaaggagacaaaattgaaatagagtttcctaaaagttttgcacaaataattaatacatgaa

SEQ ID NO: 271458 - DNA, 1114 bp, Unknown
  Bacterial polypeptide expressing nucleotide sequence isolated from the Sargasso Sea
tatgagcgctgaagttgagttgcaaaatgtttccatagcctttggaaatttttacgccgcaaaaaatgtgaatgtaaaaataggtgcaggggagttttttagttttcttggtccatcaggttgcggaaaaacaactttattacgagcggtttcaggttttcttgaaccgtcacagggtaaagtactaattgacggtcaagatatgtcaggcataggcccaaataaaaggcccacctcactgatatttcaaaacctcgcactttttccattaatgtcggttgcagacaatattgctttttcacttgaggttcgcggtcatgataagacatctaggcgtaaaagagctgacgagttattagatttagtggctttaaatggacagggcgataagaaagttcatgagttatccggcggtcaaaagcaacgagttgcaatagctagggctttggctgtggagccaaaagttcttttactagatgaaccgttatctgcgttagacctaaaattaaggcaaaaaatgcgaactgagttgagggctattcaacaaagagttggcattacctttatttatatcacgcatgatcagggggaagctcttactatgtcagatagagttggtgtgatgaacgatggagagctagagcaagttggaacttgttacgacgtttatgaagcaccctgtacaccatttgttgcgacatttgttggagaaaataatgcctttttcggaaaagtagaaaaagttgaaggtggtaatgtaaaagtacaaaccggagggtcatcttttataggccaagctggcttgggcttggataacaaaaattataaattcaaagctggagatgaagttattatgtttgtaaggccagaagctataagcttgaaaggcaattcaaagaaggcccagaactctttttcggcagaggttaaaactattgagtttgagggaaatttgaaaaacatatttctgagatctgcagaagacgtcgacatcagatttagtgttcccagtagttcagatacttctggaatggagccgtctaaaaatgtttcactatctttttctcaggataatgctgttgtacttccaaccggggcccttgctctcgattaa

SEQ ID NO: 271459 - DNA, 730 bp, Unknown
  Bacterial polypeptide expressing nucleotide sequence isolated from the Sargasso Sea
gatgtctgaaataagtttaaaaaatttaaaaaaatcttttggatcaacccaggttattcatgatttaagtattgatgtcaaagacggagaactaattgtaatagtaggaccatcaggatgtggaaaatcaacattattaagaatggtggcaggccttgaagatgctaatcaaggtgacatcaccatagatggaaaaaaagttaatgaactcgaacctatggagagaaatattgcaatggtatttcaaaattatgctctttatccgcatatgagtgtttttgataacatggcttatggtttaaagatcgcaaaggtttcaaaagaagaaattaattcaagagttcaaaaggctgcagaaattcttgaactacatgaattattaaaaagaaaacccaaccaattatctggcggtcaaagacaaagagttgctatgggaagagcaattgttagaaatcctgtggcttttttatttgatgaaccactctctaatcttgatgcaaaactaagagtgcaaatgagattggaaattaaaaaattacaaacacaacttaaaactacctctttatatgtaactcatgaccaagttgaagccatgaccctagcggacagaatgatagtaatgaacgagggaaatgttgagcatattggaacacctttagaggtttatactaaacctaaaactttattcaccgctcattttattggaagcccagcaatgaatattttaaat

SEQ ID NO: 271460 - DNA, 676 bp, Unknown
  Bacterial polypeptide expressing nucleotide sequence isolated from the Sargasso Sea
atgtctgatccaatcataaaaattgaaaatatgaacaaatggtttggtgattttcaagttttaaaaaatattgatttatcagttgagaaaaataaaaaaattgttgtatgtggtccatcagggtctggaaaatctactttgataagatgcattaatagattagaggaacatcaagaaggaacaattactgttgatggaactgaactttcagaaaatacaaaaaatattgaagcaatcagagctgaagttggaatggtctttcagcaatttaatttatttccacacttatctatattagataattgcacacttgcacctatttgggttaaaaaaatgcctaaagctaaagcagaagaactagcactagagcatttaaatagagtacaaattagcgatcaggcacaaaagtttcctggacaattatctggaggccaacaacaacgtgctgcaattgctagagcattatgtatggagccaaaaataatgctttttgatgaacctacgtcagctttagatccagaaatgataaaagaagtcttagatgcaatggtaaaccttgcaaaagctggtatgaccatgatcgttgttactcatgaaatgggatttgctaaagaagttgcagatgaagtaatttttatggatgaaggaatgatgttgaaaaagctgagactaaaga

SEQ ID NO: 271461 - DNA, 1693 bp, Unknown
  Bacterial polypeptide expressing nucleotide sequence isolated from the Sargasso Sea
atgaatgatacattgctggacgtaaataatttgtccgtagaattcaaatctaaaaaagattctttcacagctgtagatgatatttccttttcaattgaaaaaggaaagacgctctctttggtaggagaatctgggtctggaaaatcagtaacagctctttctattttgcaattattgccaaatggctcatcaagtcacaatataaactcatcaattaagtttgaaggaaaagaaattattggtagttcgaagggttttattacctcattaagaggaaatagaatttcaatgatatttcaggaacccatgacctcactaaatccttaccaaagagtgggagatcaaattgatgaaacattaaaaattcacaaaggatttaattctgatgaccattctggtatcaaaaacattccagccttctttgaaaagatcttttttagtttttcccaccggaaactttttagatatctcaaggtaaaaaaggatgttagagaaaaaactatagagcttcttgagaaggtaaaaatcccagaaccaagaaaaaaggttaattcttatcctcatcaactatcaggaggtcaaagacagagagttatgattgctatggctttagcaaatgagccagaccttttaattgccgatgaacccacaaccgctttggatgtaactgtggaaaaaactcttttagaacttttaagagatcttcaaaaagaatttaatatgtctattctcttcataactcacgatctaaatatagtgcagaaattttcggatgatgtgtgtgtgatgaaagaaggagaaataattgaggctggttcagtgaatgagatttttgcaaaccctagccatgcttacacaaagaaattactagattcaattccaggaaaaaaagaattacttaatcaagaagaaaaaattctgctagatgctgaacagatagatataaattatgttgtagccagaaatctttttggaaaacctaaagaatttttgaatgcggttaaaaaggttgatataaagatatataaaggctctacaacaggtttagttggagagtctggttcggggaaatcttctcttgctagggcattgttgggcattgaagttgctgatggttttatcgagtttgatggtgaagatattaagagcttaaatagcatgagcatgagaggctttaaaaaagattttcaaattgtatttcaagatccttttggttctctatcgccaagaatgactgttggagagatagtaggagaaggattaaaggttcatgagcctcaattatccaatgaagatagactcgcaaagataataggtgcattaaacgatgtcgaactagatgaaacgtcctactcaagatttccacacgaactttctggtggccagcggcaacgggttgcaatagcgagagccataatacttagacctaaactaatactactagatgaacccacttctgctttggatgtttcaattcaaatgcagatattatatctgttgaaagatctccagagtaaactgggtttagcttatttgtgcattagtcatgatttaagagtgattagattcctctcagatcaagtgtatgtcatgaaagaaggagcaattgttgagcgcggttcttctgaagaagtttttgaagaccctaaacatgaatacaccaaagaacttttagctgcttcaattgcataaa

SEQ ID NO: 271462 - DNA, 730 bp, Unknown
  Bacterial polypeptide expressing nucleotide sequence isolated from the Sargasso Sea
atgagcataattcaggctaaagaagtaaagaaatggtttggagacttccaagctctaaagggcatatcaatggaagttgccgaaggagaagtgctagttatttgcggtccttctggttccggtaagtcaacgttcattagatgtataaatagacttgaacaacatcaagaaggagaaataattgttgatggtatagaactaactaatgatttaaaaaacatagaagcaattagatcagaagttgggatggtttttcaaagctttaatttattcccacacataactgttatgcaaaatattaccttggctcctatttgggtaagaaaaaaaagcaggagcgaatctgaagaaaaagcaatggaacttcttgaaagaatgggtatacctgaacaggcaaataaatatccaggacaactatcaggtgggcaacaacagagagttgcaattgcaagagcattagcaatggaaccaaaaataatgctattcgacgaaccaacatctgctttagaccctgaaatgattaaagaggttctagatgcaatgaaggttttagctgaagatgggatgacaatgatagttgttactcacgagatggggtttgctaaagaagttgctgatagggttatgttatttgacgatggtcaaatggttgaagaaaatactccagagttattttttgataaacctaaacacgataggactaaacttttcttaagtcagatactttaaa

SEQ ID NO: 271463 - DNA, 1075 bp, Unknown
  Bacterial polypeptide expressing nucleotide sequence isolated from the Sargasso Sea
tatgaaaagtagtgttgaagtaaaaaatatatccttcagttatggaaaaattgaaatattaaatgatttaagtcttgatattaaagaaggagaattcatggttttgcttggtccatcaggttgtggaaagactactctattaaactgtattgccggtcttttagatttaacggatggacagatttggattgaagatgataacgttacatggaaagaaccaaaagataggcatataggaatggtatttcaatcttacgcattgtacccaagtatgactgttgaaaaaaatttatcatttggtttaagaatgatgggtacggcaaaagatttaattaatgaaaaaatcaaaaaagctgcaaatctcctacaaataaatgaattacttaaaagaaaaccatctcaactctctggagggcaaaggcagcgtgttgctattggtagagctttagttagagatgcaaaagtttttttatttgacgaacctttaagtaatcttgatgcaaaattaagagctgaactacgttatgaaattaaaaaacttcatagagatttatcaaatacaatgatttacgttactcatgatcagatagaagctatgacacttgctgatcgtatatcagtgatgaaagatggattaatacaacaattagatactccaaagcaaatttataacaaacctgctaatttatttgttgctggttttattggctctcctagtatgaattttttaaaagctacctgtgataaaccaaataaaaaaataattgttggcaaaaagcaaattgatatttctaaatatgaaaatatcaataatttgatgaatgagcaagaggttgtctttggaataagacctgaaaatataaacatagaaaaaaatgaaaattctattcaatgtaaagttgaattagtggaacctatgggggcagatactcttgtgtggactagtgttgaagataatccaatatctattaggctagaaggaagttcgaattttaatttaaatgatgaaataaacatttcatttgatataaataaatcttcaatatttgacagtaaatcagaggagagaatttaa

SEQ ID NO: 271464 - DNA, 736 bp, Unknown
  Bacterial polypeptide expressing nucleotide sequence isolated from the Sargasso Sea
aatgtcccaacctataataaaaatagataatatgaataagtggtttggagatttccaggttttaaaagatattaatcttgaagtagaaaaaaataaaaaaatcgtagtatgcggaccttcaggatctggaaaatcaaccttaataagatgtattaatagattagaagaacatcaaaaagggacaattgttgttgatggaaacgaattatcagaaaatacaaaaaatattgaagctataagagctgaagttggaatggtttttcaacaatttaatttatttcctcatttatcaattttagataactgtactttagctccaatatgggtaaaaaaaatgcccaagaaaaaagcagaggagttagcgctagatcaacttaaaaaagttcaaatagacgaccaagcacataaatttcctggtcaattatctggtggtcaacaacaaagatgtgcaattgcaagagctttgtgtatggaacctaaaataatgttgtttgatgaaccgacttcagcattagatcctgaaatgattaaagaagtattagatgcaatggttaccctagcaaaagctggaatgacaatgatagttgttactcatgaaatgggctttgctaaagaagtagcagatgaagtaatttttatggatgagggaatgatagttgaaagagctgaaactaaggaattctttgctaacccaaaaagtgatagaactaaactatttttgagccaaatactttag

SEQ ID NO: 271465 - DNA, 1051 bp, Unknown
  Bacterial polypeptide expressing nucleotide sequence isolated from the Sargasso Sea
aatgtctgccatcaatatagataatgttgtcaaaaattacgggtcactcagagttctacatgggctggacctggatattaaagaaggagagttcgtttctctacttggtccgtcgggctgtggaaaatccacgctgctttactgtgtcgccgggttggaagagatcaacggcgggcgaattttattcgacgaccgcgatatcgcgggcttgaattcacgcgaacgcaacgtcgcgctggttttccaggattatgccctctacccgcacatgaccgtccgagataatatagcgtttccattgcgccgccaaaaactagataaagagaccgtaaagggccaagtcacatgggcatctgaaacgcttggcttgtcggaattgcttgatcgaatgccatccgatctttcaggcgggcaacgccaacgcgtcgccgtgggtcgcgcgatcgtgcgcaatcccaccgcactgctgatggatgaacctctgtccaaccttgatgctgccctgcgtgttcacatgcggaccgaaatcaaacgactttcgcgcgagttgggcctgacggtcctatttgtcacccacgatcaagaagaagcaatggtgatgtcagatcgcatcgcagtcctttcaaacggccatctccagcaatttggcgaacccatggaaatttaccgaaatccagccaatcgcttcgtggctgagttcatcggatcgcccaagatgaatatgataacgtcagcggaccagaacggcgttttgctgggcctacgtccacacgacctgacaccagcgacacagcaagatgaccaggatgcctttgagcttacaggcgagttagccttaatcgaacctgccggaccgcaattctttttggatgtgatcgttaatggagagatgattaaggctacgacagatgacattggtagctttaccaccggatcagaaatcaaactttcggtgccagcgtaccgcgtctatcggttcgatgcaggcaccggtgatgcccttagcggcacgtcgatttctgcatcatctagaaaaaacactaagccatga

SEQ ID NO: 271466 - DNA, 1045 bp, Unknown
  Bacterial polypeptide expressing nucleotide sequence isolated from the Sargasso Sea
atgaagaaatcaaagctcaaaattgatagtatatcttactcaataaaagatagtactattctagaaaatttatcttttaatgtcttatctgaggatatcgtttctataattggtcctagcgcagctggaaaaacaacgcttctaagaataattgcaggtttcgataaagttgatcgtggttatgttcaagtgaatgatgctatcgttgataatacaaagatatttgttgaacctcatagaagaaaagtggggattatttttcaagatattgctctcttcccacatctatcttgtgaagataatattctttttggaatatctacccaggaaaaccataaaaaaaatgaaaggctacaatacttgtctgatattcttggcataaacgaaattaaaaataaattccctcatgagatatcaggtgggcaacaacaaagagttgctattgctagggcactagcccctcagccagaaattctcctgcttgatgaaccattcagcgctctcgatgaggaacttaaagatcaactcatcaaagacctgagaaaattattaaaaaaagagaggataacttcaatcatcatcactcataacataaaagaatcttttcaaatatctgataaagtagcatatctatcatcaaagagaattttgcagtatgatacaccttatgatctgtatcacaggcctaattcaagagaaattgctaacttttgtggaataggaagttttgttaagggagtggtaatagactctaatcatattgaaacatcattaggagttctttttgggaatacttcaccttttagcaaaaatgatttagtagatgtaatggtaaggccagatgatattatacatgatgatgattcaactcaatctgctaaagtcgtagaaaaattttttcatggatcagattttctatacaaattagaattaaatgatggtcaaaatgtattatgttttactccgagccatcatgatcattctattaatgagatgataggtattaaaactgaattagatcaccttattttatttaacagataat

SEQ ID NO: 271467 - DNA, 1009 bp, Unknown
  Bacterial polypeptide expressing nucleotide sequence isolated from the Sargasso Sea
aatttagatatcgccgaaggtgaattcataacaatgcttgggccatctggatcaggtaaaaccacttgcctgatgatgctagcaggatttgagacaccaacaaatggtgaaatatatttagactcgaatccaatctcaaatattccaccccacaaaagaggaattggaatggtatttcaaaattatgcactattcccacatatgactgtttatgaaaatttagcattccctttaagagtaaggaaagtttcaaaagatgatatcgataaaaaagttgataaagccttatcaatggtttctttaactggctttgaaaatagaatgcctggtcaactatcaggtggccaacaacaaagggtagcagttgcaagagcgcttgtttttgatcctgcagttgtattaatggatgagcctttaggagcattagataaaaatttaagagaaagtatgcaatacgaaataaaacatattcatgaaagtattggtgtaacagttgtatatgtcacccatgatcaaggtgaagcattaacaatgtcaaatagaattgctgtatttaatgacggaaaagttcaacaactttcatctccagataagttatatgaagaacctgtaaattcttttgttgcagagtttatcggagaaaataatacttttggaggtcaagtaacaaatttttccaaagaaaaatgtaaagttaaattggacgatggatcagaaatatttgcaaatccaataactgttaaatctaatggtgataaaacaacagtttcacttagaccagaaagagctttgattaatacaaaagaaaagatggataataactttaaaggaaagatcgaggaagtaatatatcatggagaccatacacgtgtaagattaaatcttttaggaaataaagagtttattttaaaagttcctaatagctcagctaatatggatattaaactaggtaaccaaataaatgttagctggaatagccatgacgcaagggccctagacccaaaataat

SEQ ID NO: 271468 - DNA, 1096 bp, Unknown
  Bacterial polypeptide expressing nucleotide sequence isolated from the Sargasso Sea
atgaaaacgttaaaaattgatgaattatcaaaaaattttggaacaacagaagttttaagaaaaattaatttagaaatagacgaaggaaatttcttagtacttttaggtccttcgggctgtggaaagtcaacattattaaatattatagctggtttagaaacaataaatgagggaaatgtttatatagatgattacaatgtaagcaaagtagaaccaaaagaccgaaatattgcaatggtatttcagtcttatgctttgtatccatccatgaatgtaagagaaaatatgatatttgggcttaaacaagccaaagtatcaaaagaaaaaatagaggaacagttacaaaaagtttcaaaatttttgcaagtagatgctttactagaaaggaaaccttcgcaactttcaggaggtcaaagacaacgtgttgctattggaagagcattagtaagggagcctagaatatttttatttgatgaaccattatcaaatttggatgcaaaattaagagttgaaatgagaagagagattaaaaaacttcatcaacagcttaaaacaactgtagtttatgttactcatgaccaaactgaggctatgagtttaggtaccaatattgcaataatgaatcatggtgtaatccaacaaaatgatacgccagaaaatatttacaacaagcctagtaatacatttgtggcagattttattggttcaccatcaatgaatttgattaaaggtaatctaaaacaaagttcaaatcaaatttcatttgttgcaaatggctcaaattttgaaattccaataaatggatatgattttaaagaaaaatctaatttagaaaacaaagaagtttattttggtattagaccagagcatatattctctaaaaaatctaatgagggagattttgaaattaatttaagagctgacttaagtgagtatattggtcatgagcaaataatgacatttgattatgaaaatcaagaagtgttagctaaatttccttctacaataaaaattgaattatcaaaaaacacgaaattatattttgatttaacacaaatttcattatttgatgctaaaactgaggaaaggatttaaa

SEQ ID NO: 271469 - DNA, 1108 bp, Unknown
  Bacterial polypeptide expressing nucleotide sequence isolated from the Sargasso Sea
atgactagtaagggccaaattgagttagttggattaagcaagagctttgactccgtcatagcagttgattcgataaatttaacaatccagagtgggacttattgttgtctgcttggcccctcgggctgcggaaagtcaactactttaaggctgatcgcaggacacgaaacaccaacatctggagacattctaataagcaacaaaaatgtcactgtccggcctcccgcaaagagagggacggcaatgatgtttcagaattatgcattatttccacatcttaattgtcttgagaacgtcgcttttagcttaaagatggccggagacaaaaaagccgaacgcaacgagcgggctatggcaatgctatcgttagtagagatgcaagacctaaaaaatcgtttaccttcccaactctctggcgggcagcagcaacgcgttgcactcgccagagccttggtaggaaacccagatgtgcttcttctggacgagccactttcggctcttgatccatttttacgaaaacaaatgagggccgagctgaagcagttacagaggaaattaaagatttccttcgtccatgtaacgcactcccaagaagaagcgatggcacttgctgatctggtggtagtgatgcgggatggtcatatcgaacaagccgacaagccgagaactgtcttcagggagccaacaaacgagtttgttgcagagttccttggggatcaaaatattttaactggtcaaatcatatcagcagaaggcagaaccttgacggtcgaaggaccaggtaatttaagatttccgatatcttcagcaaacttttctttaggagaaaaaattagatttgccttgagaaatgacggtttggttctggggggaatcaaaaaaggctcatacagttcaaaggcaaaacttattcagtcagaatatgccggttcgaacgtacaagtacggttacgtagcgatgacggccaagaattcaacgctatttgcggcgaagatcacttcttctcgcataactggcgcgaaggagatgatatcgatatatcgctcgatccagcgaagattcatcccttaagcgccaaaccaacgactgcacacaacctccaatgat

SEQ ID NO: 271470 - DNA, 508 bp, Unknown
  Bacterial polypeptide expressing nucleotide sequence isolated from the Sargasso Sea
atggccgatcctattattcaaattaaagacatgaacaaatggtttggagattttcaagtattaaaagatataaaccttgatgttgaagcaaataaaaaaatagtagtttgtggaccgtctggttctggtaagtctactttaattagatgtattaatagactagaagaacatcagaaaggctcaataatagttgatggtacagaattatcagaagaaacaaaaaatattgaacaaataagagctgaagttggaatggtatttcagcaatttaatttatttcctcatttatcaatattagataattgtacacttgctcctatttgggtaaaaaaaatgccaaaaaaagaagctgaagaattagcacttaagcaattaaaacaagttcaaattgatgatcaagcaaacaaatatcctggtcaattatctggtggtcagcaacagagatgtgcaatagcaagagctctttgtatggaaccaaaaataatgctttttgatgaaccgacatcta

SEQ ID NO: 271471 - DNA, 1087 bp, Unknown
  Bacterial polypeptide expressing nucleotide sequence isolated from the Sargasso Sea
atgtcaaaaaaagaagatttcgtaaaatttgataaagtcgacaaaagctatgatggaaaagttttagtagttaaagatttaaatttagatatcgaggaaggtgagttcgtaacaatgcttggaccctctggctcaggaaaaactacatgcttaatgatgcttgctggttttgaaacaccaactaatggagaaatttatttagataaacatccaatttcaaatattcctccacataaaagaggtattggaatggtttttcaaaactatgctctgtttcctcatatgactgtttttgaaaatttagcctttcctttaagggtaagaaaaatttcaaaagaagatattgacaagaaagttgataaagctctatcgatggtttcattgtcagaatttggaaatcgtatgccaggacaactctcaggaggtcaacaacaaagagtagccgtagcaagagcattggtatttgatccatctgtagttttaatggacgaacctttaggtgctttagataaaaatttaagagagagtatgcagtatgaaattaaacatattcatgagaatattggtgtaacagttgtgtatgttactcacgatcaaggtgaagcattaacaatgtcaaacagaatagcagtattcaatgatggtaaagttcagcaactttcaagtccagataagttatatgaagaacccgtaaattctttcgtcgcagagtttattggagagaataatactttcgctggagaaatttcagatatatcaaatggatcctgtaaagttaaactagataagggtgaaataattgcaaatccaatttcagttaagtctgttggcgaaaaaactacagtttcaattagacctgaaagagcattgattaatcccaaagataaaatggataacaatcaaaaaggtaaaattgaggaagtcatttatcatggtgatcacactagagtgagacttaatttgttaggcaattctgaatttattttaaaagtcccaaacagttctcaaaatttagatattaaacttggaaatgagattaatattggatggaacagtcgagatgcaagagctttagacccaaaataag

SEQ ID NO: 271472 - DNA, 769 bp, Unknown
  Bacterial polypeptide expressing nucleotide sequence isolated from the Sargasso Sea
aatggctgagaagttaaaacttgaagtttctgatgagattgcaattaaggttgagagcatgaataagtggtttggctcttttcatgtgttgcgcgacatcgatctaactgtgaacagaagagagcgcattgtcgtttgcggcccgtcaggttctgggaaatcaacccttattcgctgcattaacgcgcttgaggagcatcagactggtcaaatcattgtcgatggaactgaattaacatctgatataaagaatattgatagaattagatctgaagttggaatggtttttcaacatttcaatctatttccgcacctaagtattctagagaactgtactctagcacctatttgggtgagaaagatcccaaaaaaagaggctgaggaaaccgcgatgcactttttagagaaagtgaagattcctgagcaggcggataagtatccaggtcagttgtctggcggtcaacagcagcgtgttgcaattgcacgatcactctgcatgcgtcctcggattatgctttttgatgagcctacttctgcgcttgatcctgagatgatcaaagaggtgcttgacaccatgattgagctggctgaagacggcatgacaatgatttgtgtcactcacgaaatgggatttgcacgacaggtagctaaccgagttatttttatggatgacggacaaatcgtagagcaaaatgagcctgagaaatttttcagaaaccctcagtcagatcgtactaaattgtttttaagtcagatattaggtcactag

SEQ ID NO: 271473 - DNA, 403 bp, Unknown
  Bacterial polypeptide expressing nucleotide sequence isolated from the Sargasso Sea
gccaagaagcgcggcctcaagatgctggagcgtgtgggtctgattgcgcacaaggacaagttccccggccagctctcgggcggccagcagcagcgtgtggccattgcgcgcgcgctgtcgatggaccccatcgtgatgctgttcgacgaacccacgtcggcgctcgaccccgaaatggtgggcgaagtgctggacgtgatggtgggcctggccaacgaaggcatgaccatgatgtgcgtgacccacgaaatgggctttgcgcgcaaggtgagcaaccgcgtgatcttcatggacgtgggcggcaagatcctggaagactgctcgaaggacgagttcttcaacaaccccgatgcgcgccagccccgcaccaaggactttctcaataagatcctgcagcactgaa

SEQ ID NO: 271474 - DNA, 1489 bp, Unknown
  Bacterial polypeptide expressing nucleotide sequence isolated from the Sargasso Sea
aatggatgtcgctgctcggtgcgtacgcaggcgggctgtgggtgacggtgcagctgaccgtgggttcgcttgctctcgggctgctgctcgcgattccgctcgccgtgctgcgcgtgtcgccgaaccgcttcgtgcacggcccggtggcggtctatacgtggttcatgcgcggcacgccgttgctcgcgcaactgatgatcgtgtattacggcttcggccagttccagtgggtgcaggacgcgtggcagcgcggcaatccgctgctgttgctgctgcgcgatccgttcggctgcgcgatgatcgcgctgacggcgaacacctgcgcgtacaccgtcgaaatcctggccggcgcgatccgcgcgaccgcatacggcgaaatcgaagcggcgcaggcgtacgggatgtcgcgtgcgaccgcctggcgccgcatcgtgttgccgtcggcactgcgccggttcctgcccgcgtacagcaacgaagtcatcctgatgctgcacggcacgtcgctcgtcagcgcgatcacgctgatcgacctgacgggcgcggcgcgcgatttctacgcgaactattacgcgccgttcgaggcgttcatttcggtcggcaccgtctatttcgcgttgaccgggctcgtcgcgctgctgatccgcgcaaccgagcgccggctgctcgttcacttgcggccgctgccgctttccccgctcgcccaatcgcggagccacgccacatgaatgcactgtccgtcgaaaatcttcacaagcgctacggcgacaacgaggtgctgaaaggcgtctcgctggccgccaacccgggcgacgtgatcagcgtgatcggttcgtcggggtccggcaagagcacgctgcttcgatgcatcaatttcctggaatcgccttcgtcgggccgcgtctcgctcggcggcggcgaggtcaggacgtcggtcgaccgcagcggccagatcaggatctcggatcccgtccagttgcgccggatgcgcacgcggctcgcgatggtgttccagcatttcaatctgtgggcgcacatgacggtgctgcagaacgtcgtcgaggcgccgctgcgcgtactgaagctcggccgcgcggaggcgcgcgagcgggcggcgcgctatctcgagcaggtgggcatgacgcgtttcgccgatgcgtatccggcgcacctgtccggcggtcagcagcagcgtgtcgcgatcgcccgcgcgctcgcgatggagcccgacgcgctgctgttcgacgagccgacgtcggcgctcgatccggagctggtcggcgacgtgctcaaggtgatgcgcgatctcgcgcgcgaaggccgcacgatgatcgtcgtcacgcacgagatgggcttcgcgcgcgaagtgtcgaaccacgtgatgttcctgcacgagggcatcgtggaggaggaaggccatccgcgcgacatattgaagacgccgaaaagcgggcgattgcagaagttcctgtccggcgggctcaaatag

SEQ ID NO: 271475 - DNA, 900 bp, Unknown
  Bacterial polypeptide expressing nucleotide sequence isolated from the Sargasso Sea
aatgtctaaaaataatgaatttgtaaaatttgataaggttgacaagagttatgatggaaaggtcttagttgttaaagacttaaatttagatatagccgaaggtgaatttataactatgcttggaccatctggttcaggaaaaactacttgcttgatgatgttagcgggatttgaaactccaactaatggagaaatttatttggatggaaatccaatctcaaatattccacctcataaaagaggcattggaatggtatttcaaaactacgcattgtttccgcatatgacagtttatgaaaacttagcttttcctttaaaagttagaaaattttcaaaagatgaaatagataaaaaagttgagaaagctctatcaatggtttctttgtcagattttggaagtagaatgccagctcaactatctggaggtcaacaacaaagagtagctgtagcaagagctttagtatttgatcctgcagtagtattaatggatgaacctttaggtgctttagacaaaaatttaagagaaagtatgcagtatgaaattaaacatattcatgaaagcattggagttacagttgtttatgttacacatgatcaaagtgaagctttaactatgtcaaatagaattgctgtattcaatgatggaaaagtacaacaattatctagtcctgataaactatacgaagaaccagtaaattcttttgttgcagaatttataggtgaaaataatacctttcaaggtgaagttacagatatatcaaaagatagatgtaaaattaaattagattcaggcaaagaaatattggcaaatcctataagagtgaaatcaaaaggtgaaaaaagtatcgtttcattaagaccagaaagagcaattattgatcctgaggaaaaaatggataa

SEQ ID NO: 271476 - DNA, 2146 bp, Unknown
  Bacterial polypeptide expressing nucleotide sequence isolated from the Sargasso Sea
ttggagcgcgctgccggacctgtacctgctgatcattttcgcgtcgatcttcacgccgtcgctgtggctgctgttcatcctgctgtcgatgttcggctggctcgtgctgtccgactacgtgcgcgccgaattcctgcgcaaccgcgcgctcgactacgtgaaagcggcgcgcacgatggggctgaccaacgcgcagatcatgtggcgccacgtgctgccgaacagcctcacgccggtgattacgttcctgccgttccggatgagcgcggcgatcctgtcgctgacgagcctcgatttcctcggcctcggcgtgccgccgccgaccccgagcctcggcgagctgctgcaggaaggcaagaacaacctggatgcgtggtggatctcgatctcggcgttcgcggcgctggtggtgacgctgctgctgctcaccttcatgggcgatgcgctgcgcaacgcgctcgacacgcgcacgcgcggttcggcattcggcggagggcggtgatgacgattccgttgctgcagatcgacgggttttccgcgcatttcggcgcgaacgcggccgtacaggacctcagcctgtcgatcggccgcggcgagcgcgtggcgctcgtcggcgaatcggggtcgggcaagagcgtgacggcactgtcgatcctgcggctcgcgcagcaggcgacgctgtcggggcggatgctgttcgacggcgaggatctgctcgcgaaaacggagcagcagatgcgcgggattcgcggcgccgacatcgcgatggtgttccaggagccgatgaccgcgctcaatccgctgtatacgatcggcaagcagatcgccgagagcctgcggctgcacgaggggctgcgcccgggcgatgcgcgcgaacgcgggatcgcgctgctgcggcgcaccgggattccggagccggagcggcgcatcgacagcttcccgcatcagctgtcgggcgggcagcggcaacgcgcgatgatcgcgatggcgctggcgtgccggccgcgcttgctgctggcagacgagccgacgaccgcgctcgacgtgacggtgcgccagcagatcgtcgacctgctgatcgagctgcaggagcaggaggccgccgcgcgcgggatggccgtactgctgatcacgcacgacctgaacctcgtgcagcgcttcgcgcagcgcgtggccgtgatggagaagggcgtgctggtggagaccaacacgactgccgcgttgttcgcggcgccgcagcatccgtatacgcgccggctgctcgacagcgcgccgcaacgggcggtcgagccggttgctgacgacgcgcagacgatcctcgacgtgcagcaccttgccgtcgactaccgcatcgcggcaaagggctggcgctcggtgctcggcaagacgacgttccgcgccgtgcacgacgtgcagctgagcctgaagcgcggcgaaacgctcgggatcgtcggcgagtcgggctcgggaaaatcgacgctcgcgtcggccgtgctcggcctgcagcggccggcatcgggcgggatcgagatcgacgggatgccgctggcgtcgctgcgcacgacgcagggccggcgcacgctgtacgggcgcatgcaggtggtgttccaggatccgttcggctcgctgtcgccgcgcatgacggtcgagcagatcgttggcgaagggctgggcgtgcaccggccgcaggtggccggcgacgcgcggcgggcgcggatcgccgcgctgctgcaggaggtgggcctgccgcccgaggcgatgctgcgctatccgcacgagttctccggcgggcagcggcagcggatcgcgatcgcgcgggcgctggcggtggagccggaactgctggtgctcgacgagccgacgagcgcgctcgacgtgtcgatccagaagcaggtgctgaatctgctgacgaatctccaaaagaagtacaaactcagctacctgttcatcacgcacgatctggcggtgatgcgcgcgatggcccaccgggtcatcgtgatgaaggcagggcgcgtggtcgaggagggcgagacgctcgacgtgctgcacgcgccatcccatccgtatacgcgggcgctgctcgcgtcgtccatgccggcgccggtgcacggcccgcaggagaggcaagagagaaccgatgattgac

SEQ ID NO: 271477 - DNA, 943 bp, Unknown
  Bacterial polypeptide expressing nucleotide sequence isolated from the Sargasso Sea
tatgaaaagacttgaagttaaaaaactagacttcgcttatggtagtaatcaaatcttatccgaatttgattttagcctggaagaaagtcaaatcggctgtttgctcggtcccagcgggtgtggtaaaactactttgcttcgagcgatcgcaggtttcgagaatccgaccaaaggtgaaattatcttaaacggcaacaaactgaacagctcaaaaatatttgttgaacctgagaaaaggcaaattggaatggtattccaggacattgcattatttccccacctttcggttaaagaaaatatccaatttggtatacgctcattgtctcagaacctaagagacaaacgcagtaacgaattgttggatttggttggcatgtctgaattcaaaaaaaaatatccccatgaaatctccgggggccaacagcaacgagttgcattggcgagagcgattgcacctaaaccttcgttgctcttgatggacgaaccactctccagtctggatgaagaacttagagaacaactggctcgagagattcgacttattttaaagcaggaaaaggtttccgctattttggtaactcacgatcagaacgaagcctttgctgtgggtgactatatctgtgttatgcaccaaggccgagttcagcaaaacgattctgcctataatctatatcatcatcctttaaaccgtttcgttgcagaatttataggagaagggatcttacttcctggcgtagttgcagatgagggtactatagcaacagatttgggagaaattaagggtaatttaccagaatcctgcaagcatcaggataaagtcgatgttttgatccggcctgagaacgtgatcttggcaaatgataacgaaaataaagtagtgattactgcgcgctattttaggggatccagttacttgtatacttttaaaacgaacagtggtgcg

SEQ ID NO: 271478 - DNA, 1162 bp, Unknown
  Bacterial polypeptide expressing nucleotide sequence isolated from the Sargasso Sea
atgaatagccagtcgggtgcgccggtcgcgggcgcgccgtcctccgtttcctcctccggcgccgatgcgcgcgccgagtcctttgtccagatcgtcgacgtcgtcaagaaattcggcgacaccgaagccgtgcgcagcgtcaacctgaccgtgcgccagggcgagctgttcgcgctgctcggcagctcgggctgcggcaagtcgacgttgctgcggatgctcgccggcctcgagacggtcacgtcgggcaagatcctgatcgatggcgaggacctcgcgcagatgccgccgtacaagcggcccgtgaacatgatgttccagtcgtatgcgctgttcccgcacatgtcggtcgagtcgaacgttgcgttcggtctcaagcaggaaggcacgccgaaggccgagctgaaggcgcgcgtcgcatcggcgctggaactcgtgcagatgagcaagtacgcgaagcgcaagccgcatcagctgtccggcggccagcagcagcgcgtcgcgctcgcgcgctcgctggtcaagcggccgaagctgctgctgctcgacgagccgatgtccgcgctcgacaagcagatccgccagcgcacgcagatcgagctcgtcaacatcctgcagaaggtcggcgtcacctgcatcatggtcacgcacgaccaggaagaagcgatgacgatggccaatcgcctcgcggtgatgagcgaaggccagatcgtgcagatcggctcgccgaacgaagtgtacgaatatccgaacagccgcttctcggccgaattcatcggctcgacgaacctgttcgacggcgtgaccgtcgaggacgaacccgatcacgtgtacatcgagtcgccggagctgccgagccggctgtacgtgagccacgggatctcgggcccgctcgggatgccggtcacggtgtcggtgcgccccgaacggatcgcgctcacgcgcaagccgcccgaaggcgcgttcaactgggcgcgcggccgcatcagcaacgtcgcttacatgggcggctactcgctgtatcacgtgaagctcgacggcggcaagacggtgatcgcgaacgtgtcgagcctcgcgatttcggagctcgacacgccggcgctcggcgacgagatctacgtgcgctggagcgcgacggccggcgtggtgctgacgtcatgac

SEQ ID NO: 271479 - DNA, 1051 bp, Unknown
  Bacterial polypeptide expressing nucleotide sequence isolated from the Sargasso Sea
atgagcgaactacgcatccacggcctgtcgaaatcgttcggatcgcataccgtcctgcacgacatcgacctcacggtgcggcgcggctcgcgcctcgcgctgctcggcccgtccggcagcggcaagaccacgctgctgcgcgtgctgtgcggcttcgagcgcgccgagcgcggcaccgtcgaaatcgatggccgccgcgtggccgcgcccgacgtgcacctgccgcccgaacagcgccggatcggctacgtgccgcaggaaggcgcgctgtttccgcatctgtcggtggccgacaacatcgcgttcgggctgccgcgcgcggcgcggcggcgccatcatcgcgtcgacgaactgctcgagatggtcgggctccccgcgtcgtatgcgagccgtgcgccgcagcaactgtccggcgggcagcagcagcgcgtcgcgctcgcacgcgcgctcgcgcccgagccgtcgctcgtgatcctcgacgaaccgttctcggcgctcgacacgtcgctgcgccacgaaacgcgcagcgcagtcgccgatgcacttgccgcagccggcgcgacatcggtgctcgtcacgcacgaccagcccgaagcaatgaccctcggcgatgaagtagccgtgatgtggcatggccggctcgtgcagacggccgcgccgcagacgttgtatcgtcagcccatcacgcgcgacgtcgcgtcgttcgtcgggcaggcggtgctgctcgcaggccgtgtgcgcggcacgcacatcgcctgcgcgctcggcgacctgccgctcgtcgcgccgctgccggacggtccggccgatgcgatgctgcgtcccgagcagatcggcatcgtgccgctcacgcacgccgatgcggcgcgcggccatacggcgcgtgtcgaagccgcgcagttcgcgggccaggacgccgacgtgctcctgcgcctcgatgccgatggcgacgtgcgcgtgcgcgcacgcgtgccgggacaccggtgtccggccgtcggcgaacgtgtcgcactggtggtggatggcgcggtgatggcgtacgcgtgctgag

SEQ ID NO: 271480 - DNA, 739 bp, Unknown
  Bacterial polypeptide expressing nucleotide sequence isolated from the Sargasso Sea
atggaaaagaagatatctgtagaaacaaaagatgtaactaaattttttggttcttttcaagcattaaaaggtattactgctgatatatatgagggagaagtagttgttgtacttggaccgtcaggctcaggtaaatctacttatattagaactataaatggtcttgaagaacatgattcagggctaataaaagttaatggaacagaactcaataataacatcaagaatattgaaactataagatctcaagttggaatggtttttcaacagttcaatctattccctcatttatctgttcttagaaatataaccttagctccgcagaaagttaagaaacttcctaaatctgaagcagaagacttaggcatgagtctgttagaaagagttggaattccagagcaagcattgaagtatccttcacaactatctggaggtcaacaacaaagagttgcaattgctagagctttagcaatgcaaccaaaaatcatgttatttgatgaaccaacatcagcacttgatcctgaaatgattaaggaagtgttagatgttatgaccgaacttgctcaaagcggaatgacaatgatttgtgttacacacgaaatgggatttgcaaaagaagttgcagatagatttttattttttgatgaagggcttattgttgaatcaggaacacctcaacatttctttgaaaaccctcaagaagatagaacaaaattattcttaagccaaattttataat

SEQ ID NO: 271481 - DNA, 610 bp, Unknown
  Bacterial polypeptide expressing nucleotide sequence isolated from the Sargasso Sea
atggttactgatgaggttgtaattgaaatctcaaatatgaataaatggtttggtcactttcacgttctgcgtgatattgatttaattgtcaacaaaggtgaaagaattgttatatgtggtccttctggatctggaaaatctactttaataaggtgtatcaatcgacttgaagaacatcaaaagggcataattaaagttgacggagtagagttgaatgatgatgtgaaaaaaattgataaaattagaagtgaagtagggatggtttttcagtcattcaatttgtttccacatcttacagcccttgaaaattgtactttagcgcctgtttgggttcgtaaactacctaaaaaagatgcagatgaaattgctatgaaatatttggaaattgttaaaatacctgagcaagctctaaaatatcctgggcaactttctggtgggcagcagcaaagagttgcaatcgctagggctctttgtatggagccaaaaataatgctttttgatgagcctacttctgctcttgatcctgaaatgattaaagaggtccttgatacaatgattgaacttgcagaagatggaatgacaatgattgttgtaactcacgaaatgggat

SEQ ID NO: 271482 - DNA, 1090 bp, Unknown
  Bacterial polypeptide expressing nucleotide sequence isolated from the Sargasso Sea
atgaatgattcaaatcaaagtttcgtaaaatttgaaaaaatagataaaagctatgacggagaggtattagtagttaaaaatttaaacttagatattgctaaaggtgaatttgtaactatgttaggaccttccggatctggcaaaactaccacccttatgatgttagctggttttgaaacgccaacaaatggtgaaattttcttagatacaaaaccaattagtaagatacctccttatgagagagaaattggaatggtttttcaaaactatgctttattccctcatatgacagtttcagaaaatttatcatttccattagaagttagaaagatttctaaagctgatataaaagacaaagttcaaaaagctcttgatatggttgagcttggaatgtttggctcaagatttccagcgcaattatctggtggtcagcaacaaagagtagctctagcaagagctcttgtatttgagccacgtcttgtattaatggatgaacctcttggagcacttgataaaaatttacgtgaacaaatgcaatatgaaattaagcatattcatgatcgtattggtattacagtagtttacgttacgcatgatcaaagcgaagcattaacaatgtcaaataggatagctgtatttaatgatggagtggttcaacaattatccactccagatattttatatgaaaaaccagaaaattcatttgtagcgaaattcattggagaaaataatactcttaacggggttgttaaagaggttaacgggagtagttgcatagttgatcttgataatggtcatgggacagttaaggccttaaaagttaatataaatggtgttggcgataaaactcaactttcaatcaggccagagagggtgactattgatagtagtaatccagatgcaaacaatttttcaggaaaaattgaggaattaatttatttaggcgaccatattagagctagacttgatgtatgtggaaataatgagtttattgttaaagttccaaatgaaggaagttttagtcacaaagagggagatattcttaaattaagctggaatcctgatgatgttagagctctagatatataat

SEQ ID NO: 271483 - DNA, 739 bp, Unknown
  Bacterial polypeptide expressing nucleotide sequence isolated from the Sargasso Sea
atggcaaaagcaattgaaataaagcgccttaacaaatggtttgggtcataccaggcactcaaagatatagaccttaatgtttcccacggggagcgaattgtgatttgcggcccatctggatcaggaaagtcaactttgattcgatgtattaactcacttgaacaccatgattcgggtgagataactgttgacgacaaagagcttaaccagaataaggcatccatcgcagcgatcggtgctgaagtgggcatggtatttcagcagtttaatctctttccccacctaagtgttttgcagaacctcacgttaggcccaactaaagttagaggattatctagatctgaagcagaagaacgtgcaatgcgcattttagagcgtgttcaaattcctgagcaagcgcataagcaacccagtgagctatccggtggccaacagcagcgcgttgcgattgcccgatcattgtgcatggaacccaagattatgttgtttgacgaaccgacatctgcattagaccctgaaatgattgcggaagttctagatgtaatagttgatttagctgaagacggaatgaccatgattgttgtaactcatgagatgggctttgcccgacgtgcagcagatcgtatggtttttatggacaaaggagaaatcatcgagatgggtgcgccaaaagatttctttgaggcccctaaaacaaaacgatgcaaaacctttcttaatcagattctgcaacattagg

SEQ ID NO: 271484 - DNA, 793 bp, Unknown
  Bacterial polypeptide expressing nucleotide sequence isolated from the Sargasso Sea
gatgaacaccgctgctcccgtcgccctgtcggtcaggaacatccacaagtcgttcggcgatcaccacgtgctgaagggcatttcgctcgatgcgcacgaaggcgacgtcatctcgatcctcggtgcgagcggatcgggcaagagtaccttcctgcgctgcctgaacctgctcgaaacgcccgacgacggctcggttgcgctcgccggcgaggaactgaagatgaagcgcgcgcgcgacggcaagctgcatccgggcgaccggcgccaggtcgaccgcatccgctcgcagctcgggatggtgttccagaacttcaacctgtggtcgcacatgaccgtgctcgacaatctcgtcgaagggccgctgcgcgtgcagaagcgcagtcgcgcggaggcggtcgaggaggccgaggcgctgctcgcgcgcgtcggcctcgcggacaagcgcggctactatccggcccatctgtcgggcggccagcagcagcgggtcgcgatcgcgcgggcgctcgcgatgcatccgaaggtgatgctgttcgacgaaccgacgtcggcgctcgaccccgagctggtcggcgaggtgctgcgcgtgatgcgttcgctcgcggaggaagggcgcacgatgctggtcgtcacgcacgaaatgggcttcgcgcggcacgtgtcgaaccgcgtgatgttcctgcatcagggcgaggtcgatgcggacggcacgcccggcgaactgttcggcggccagtgctccgaacgcttccgccagttcgtgtcgagccatcatgaccgcgccgcgaactga

SEQ ID NO: 271485 - DNA, 1111 bp, Unknown
  Bacterial polypeptide expressing nucleotide sequence isolated from the Sargasso Sea
catggcaagcgtgctcctgcgcaacatcgcgaagcgctacgacgacaccgaagtgctgcgcaacgtgaacctcgacatcgccgacggcgaattcgtcgtgttcgtcggcccgagcggctgcggcaaatccacgctgatgcggatgatcgccggcctcgaggatatttcgagcggcgacctgatgatcgacggcgcgaaggtcaacgacgtgccgagcgcgaaacgcggcatcgcgatggtgttccagtcgtatgcgctgtacccgcacatgacgctgtacgacaacatggcgttcggcctgaagctcgcgggtgcgaagaagccggagatcgaccaggccgtgaagcaggccgcgaagatcctgcacatcgaccatctgctcgaccgcaagccgaagcagctgtcgggcggccagcggcagcgcgtcgcgatcggccgcgcgatcacgcgcaagccgaaggtgttcctgttcgacgagccgctgtcgaacctcgacgcggcgctgcgcgtgaagatgcggctggagttcgcgcggctgcacgacgagctgaagacgacgatgatctacgtgacgcacgaccaggtcgaggcgatgacgctcgccgacaagatcgtcgtgctgtcgggcggcgcggtgcagcaggtcggtacgccgaacgagttgtatcacgcgccggcgaaccagttcgtcgcgggcttcatcggctcgccgaagatgaacttcctgaagggcaccgtcgagtcggtcgatgcgggcggcgtgctcgtgcgtttcgacagcggcgagacgcagcgcgctgcggtcgaagcggcggggctgcagcgtggtgcggcggtgacggtcggcgtgcggcccgagcatctgaaagtcgaagcggcggctgccggcgtggccgcgaagacgatggccgtcgagtcgctcggcgatgccgcgtatctgtacgcggagtcggccgtcgcgccggacgggctgatcgcgcggattccgccgctcgacacgtaccgcaccggcgaggcgctccatgtgcacgcgcaggccgagcactgccacctgttcgacgagcacgggcaggcgttccgccggctgagcgcgcacgcgaaggcggcgtga

SEQ ID NO: 271486 - DNA, 751 bp, Unknown
  Bacterial polypeptide expressing nucleotide sequence isolated from the Sargasso Sea
catgccgctcgttgaaacccggggtctcgaaaagaacttcggcacccatcatgtgctcaagggcatcgatctgtccgtcgagcgcgggcaggtcgtgtcgatcatcggccgcagcggctcgggcaagagcacgctgctgcgcacgctcaacgggctcgagagcatcgatgcgggcacgatctcggtcgacggcgaacgcgtcgatgcacggcatgcggacttgcgtgcgctgcggctgaaggtcggcatggtgttccagcaatacaacctgtttccgcacctgagcgccggacagaacgtgatgctcgcgcagtcggtggtgaagaagtcgcaccgccagcaggcgcgcgcgatcgcggagctgatgctcgagcgcgtcggcctcggcgacaagttcgacgcgtttccggaacacctgtcgggcggccagcagcagcgcgtcgcgatcgcgcgtgcgctcgcgatgaagccgagcgtgctgctgtgcgacgaaatcacgtcggcgctcgatcccgagctcgtcggcgaggtgctgggcgtgatcgagcagctcgcgcgcgaggacatgacgctgatcatggtcacgcacgagatgaacttcgcgcgtgcggtgagcgacaggatcgtgttcatgcaccaggggcgcgtgtgggagaccgggacggccgacgagatcttcgagcgtccgcagacggtggaattgacgcggtttctgggcagcgtgcggaacccggaaacggctacgcgctga

SEQ ID NO: 271487 - DNA, 1087 bp, Unknown
  Bacterial polypeptide expressing nucleotide sequence isolated from the Sargasso Sea
atggcctcaaaaaaagatttcgttaaatttgataaagttgataaaagctatgatggaaagatcttagttgtaaaagatcttcaattagatattgaagaaggtgaatttgtaacaatgttaggaccttctggctcaggaaaaacaacttgtttaatgatgttagctggttttgaaacaccaactaacggtgaaatatatttagatggtaatgcgatctcaagtatccctccgcacaaaagagggataggaatggtatttcaaaattacgctttgtttccacatatgacagtttatgaaaatttagcatttcctttaagagttagaaaaattcctaaagatgaagcagataaaaaaattgataaagcattatcaatggtttcgcttcaaggttttgcccaaagaatgccaggtcaattatctggaggacaacaacaaagagttgctgtagcaaggtcattagtatttgatccacaattagttttaatggatgaacctttgggtgctttagataaaaatttaagagagagcatgcagtatgaaattaaacatatccatgaaagtattggggtaactgttgtttatgtaactcatgaccaaagtgaagcacttacaatgtcaaatcgtattgctgttttcaatgatggtaaagttcaacaactttcaagtcctgatgaactgtatgaaaaaccagttaattcatttgttgcagaatttattggagaaaataacacttttgctggagaagtgtcagatatttctggtggaaaatgtaaagtgaagttagctaatgcagaaattttggcaaatccaatttcagttaaaggaaaaggggataaaacaaccgtatcattaagacctgagagagctttaattaatccaaatgataagatggacaatgttcataacggaaaaattgaagaagttatttaccatggtgaccatactagagtgcgaattaatttattaggaaattctgaatttattctcaaagtaccaaatagttcatctaatcttgatattaaattagggaatgaaatcaagattggttggaatagtgaagatgctagagcattagacccaaaataaa

SEQ ID NO: 271488 - DNA, 1159 bp, Unknown
  Bacterial polypeptide expressing nucleotide sequence isolated from the Sargasso Sea
aatggcgagcatttcgttgagaggcgtgcagaaggcgtatggcgacggcgcaccggtgattcgcgacgtcgacctggagatcggcgagaacgagttttgcgtgtttctcggtccgtccggctgcggcaagtccaccttgctgcggatgatcgccggcctcgaagacgtgaccgacggcgacctgtcgatcgccgggcgcctcgtcaacgacgtcccggcggcgcagcgcggcgtggcgatggtgtttcagagctatgcgctgtttccgcatatgaccgtgttcgagaacatggccttcggcctcaagcttgccaaaaccccgaaagaagaaatcgaccgcaaagtgcgggaagcggcgcgcatcctgcaactggaggcgctgctcgagcgccggcccaaggcgctgtccggcggccagcggcaacgcgtggcgatcggccgggccattgtgcgcgagccgggcgtgtttctgttcgacgagccgctctccaatctcgacgcgacgctgcgtggccagacccgcattgaaatcgcgcggctgcataagcagttcgccaaagccagcgtggtgtacgtcacgcacgatcagatcgaggccatgacgctggccgacaagatcgtgttgttgcacgcgggcaaggacaccgagcgctacggcagcatcgcgcagatcggcgcgccgcttgagctatatcaccggccgagaagccgcttcgtcgccggtttcatcggttcgccgcgcatgaatttcctgccggggaaggtgggctcggtcgatcctcaaggcgtgatcgtcacgctcgatcacacagatgaaaacgtgcgcgtgccggtcaacggcgatggccttcatgcatcgcaggccgtcacgctcggcgtgcgcccggagcacctggaattcctcggcgcggaaggttcggaaaacacgcaggatgccgtgctggcgcgcaccgtgtcgctcgtcgaacaactcggcgagcacagttatgtccacctcgatcaacccggtggcgccgcgttgatcgccaaggcgccgggcgacacccgcctcgcgccgggagaccgcgccgccttgcgcgtccccagccgtgcctgccacctgtttaccgaagacggctttgccgctgcttcgctcgaatccgtcgaacattacgcatag

SEQ ID NO: 271489 - DNA, 781 bp, Unknown
  Bacterial polypeptide expressing nucleotide sequence isolated from the Sargasso Sea
atgaactcccagactcagaagcttttcgtcgacgatctgcacaagcggtacggcgacaacgaggtgctcaagggcgtgtcgctgaaggcgaactcgggcgacgtgatcagcgtgatcggctcgtccggctccggcaagagcacgatgctccgctgcatcaacttcctcgagcagccgaacgcgggccgcatcttcgtcgacggcgaggaagtgcgcaccgcgctcgacaagacgggcgcgctgcgcgcggccgattcgaagcagctgcagcgcgtgcgcaccaagctgtcgatggtgttccagcacttcaacctctggtcgcacatgaacgtgatcgagaacgtgatggaagcgccggtgaacgtgctcggcatcccgaagaaggaagccgaggagcgcgcgcgcgagtatctcgagaaagtcggcctcgcgccgcgcgtcgagaagcagtatccgtcgcacctgtcgggcggccagcagcagcgcgtggcgattgcacgcgcgctcgcgatgcatccggacgtgatgctgttcgacgagccgacgtcggcgctcgacccggagctggtgggcgaagtgctgaaggtgatgcagaagctcgccgaggaaggccgcacgatgatcgtcgtcacgcacgagatgggctttgcgcgcaacgtgtcgaaccacgtgatgttcctgcaccagggccgcgtcgaggaagaaggcgtgccgtccgaggtgttcgccaacccgaagagcgaacgcctgcgcgggttcctgtcgggcagcctcaagtaac

SEQ ID NO: 271490 - DNA, 1084 bp, Unknown
  Bacterial polypeptide expressing nucleotide sequence isolated from the Sargasso Sea
atgagcattaaaaattacataaaaattaaaaatttatccaaaagtttcggagatgttgaagttttaaaaaatattaaccttgaagtagaagagggtgaatttttttcacttcttggaccttctggatgtggcaaaacaactttactaagaatattagctggttttgaatatccctcagaaggtgaagttttttttgatgatgccaatgtaacatctctcccaccaaaccttcgtccctcaaatatggtatttcaaaattatgcaatttttccacatattaatgttcaaagaaatattgagtttggattaagaaaagaaaatttaagtaaagatgaaatgcaacaaagagtagaaaatgctctgaagatggttcaactagaaggttatgaaaatagatactcaaatcagttatcaggagggcaaagacaaaggattgcacttgcaagagctttagtcaaacaaccaaaggtgctacttcttgatgaacctcttggtgctcttgataaaaaattaagagaagagatgcaaattgaattaagaaatttgcaaaaaagcttaggtattacttttatctttgttacccacgaccaagaagaggcaatgactatgtctgatagaatagccgttatggatgaaggtaacattctccaagtatctccaccaaaagaaatttatcataatcctaaaaataaatttgtttctcaatttattggaaatattaatatattgggtgctgaaattaaaagtgtttcaaatgaaaatcttttaattgaagtagattgttttggctcaatgcaattaaaaaattatcaacaaataattgaaaatgatagaattaatattgctattagacctgaggaaataacaatttccaaaataagtgaccccaactatgactataattttcaaggtaatgttaaaaatatatcattttatggagagagcacttttttttatgtgcaattaaataactctgataaaattttaatggtatcaaaaaatgaaaccaaagagccttttagtgagaatgataattgttttgtgaattttagttctaataatttaaaaattataaaggattaaa

SEQ ID NO: 271491 - DNA, 736 bp, Unknown
  Bacterial polypeptide expressing nucleotide sequence isolated from the Sargasso Sea
atgtcagataaaataatacagattacagaaatgaataaatggtttggtgatttccaagttttaaaaaatataaacctagaagtagaaaaaaataaaaaaattgttgtctgtggaccttcaggatcaggtaaatcaacattaattagatgtataaacagacttgaagaacatcagcaaggttcaattatagtagatggaaatgaattaacggaagatactaaagatattgagaaaattagagcagaagttggaatggtatttcaacaatttaatttatttcctcatctttctattttagataattgcacactagctccaatttgggtaaaaaaaatgcctaaaaaggatgcggaagatctagctcttcagcacttagaaaaagtacaaattgcagatcaagctagtaaatatccaggacaactttcaggcggtcaacaacaacgatgtgcaattgctagagcattatgtatggagccaaaaataatgttatttgatgaaccaacttcagctctagacccagaaatgattaaagaagttttagatgcaatggttaatttagcaaaagcaggaatgacaatgattgttgtaacacatgagatgggatttgctaaagaggtagctgacgaggttatttttatggatgagggtatgattgttgaaagagctgaaactaaagagttttttgctaatcctaagagcgatagaactaagctgtttttaagtcaaatactataaa

SEQ ID NO: 271492 - DNA, 1813 bp, Unknown
  Bacterial polypeptide expressing nucleotide sequence isolated from the Sargasso Sea
atgaacgacctctcccggcttgccggccgcgcaccgttcgtgcccgacaccgcggcgccggcgggccccgactacgcgaattaccgtgtcgttcccgcccgctatccggcgagaacggccggcaccgtcgcggcgatcgtgctgatcgcggccgtcctctattcggtgctcggtaatccgcgctggggctggaacgtctttgcccactggtttttctcggaagccgtgctcgcgggtctcgggcagacgctgctgctgacggccctcggtgcggtgctcggcttcgcgctggcgattccgctcgcactcgcgcggctctcgcgttcgccgctgctgtcgtcgtgctcatgggcgtacatctggctgttccgctcgattccagccatcgtcctgctgctgttgctgaacaatctcggctatctgtacgacacggtcaggctgggtatcccgttcacggacatcgtgttcctgcacggcccgaccacggatctgatcacgccgttcatggcggccgttctcgggctcacgctgacgcaggccgcgtttgcggcagaggcgatccgcggcggcatcctgtcggtcgatcacgggcaacgcgaagccgcggccgcgctcggcctgccgcgcgcgcgacagacctggcgcatcgtgttgcctcaggcgatgcgcgcgatcctgcctgccgcgttcaacgacgtgatcggcctcgcgaagggcacggcggtcgtctatatcctcgcgatgccggatctgttctacacggtgcagatcatttaccaccgcaacctcgaagtgatcccgatgctgatggtcgcgaccgtctggtatctggtgatcctgaccgtgctgtcggcgatccaggtgcatatcgagcgccactatgcgcgcggtgcgacgcgcgacgcggtcgccgtgccgggcctcttcgcagtcctgcgcaaaagccgtcttgcggtcgaggcattgccgttccgtagctcggtggctcacacccggcctgacgctgctgccgcgccgagtgcggagacggccggctgggcgaagcagcgcatcggcgcggcggtcggcattcaccgcgtatcgaagagcttcggattgttgaaggtgctcgacaacgtgtcgctggcgatcccgtccgggagcgtgacggtcgtgctcgggcagtcgggatcgggcaagtcgacgttgttgcgcacgatcaaccatctggagcgcgtggacgaggggttcatcgacatcgacggcgaactggtcggttatcgccgcgacgggcgcacgctgtacgagctcaaggaaaaggacatcctgcgccgccgcgccgaagtcggcatggtgttccagggcttcaacctgtttccgcatctgaccgtgctcgagaacatcgtcgaggcgccggtcgcggccggcctgccgcgcgtgcaggcggaagcggaagcacgcgcgctgctcactcgggtgggcctggccggcaaggccgacgcgtggccgcgtcagttgtccggcggccagcagcagcgcgtcgcgatcgcgcgcgcgcttgcgctgaagcccaaggtgttgctgttcgacgagccgacttccgcgctcgatccggaactcgtgaacgaagtgctcgacgtgattcgtcagttggcccgttccgggaccacgctgatcatcgtgacgcacgaaatcggtttcgcgcgggaagtggcggacacgatcgtcttcatggacggcgggcgcgtcgtggagtcgggtccgccgtcggcggtgctgacggctccggcgcatccgcgcacgcgcgagttcctgtcgaaggtgttgtcgtagt

SEQ ID NO: 271493 - DNA, 1855 bp, Unknown
  Bacterial polypeptide expressing nucleotide sequence isolated from the Sargasso Sea
gatgttttcgtggtttgaacggcgcctgccgactttcccgctcgaagatcccgtcacgccgccgcggggtttcttctcgttcgtctgggcgtgcacgaaaggcgcgcgcagctggatcctgctgatcgcgctgacgtcggccgcgctggccgcgtacgaagccgcgctgttcgcgatgatgggccgcgtggtcgactggctcgcgtccgcgacgccggccgatttcggcggccggcacttcggcacgcttgccgggttcgcggcgatcctcgccggcagcgcgctgctgatcgcattgcatacgatggtcaagcaccaggtgctcgcgatcaacttcccgatgcggctgcgctggctgtttcaccggctgatgctcgaccagagcctgtcgttctacgcgaacgagttcgccggccgcgtgacgaccaagatcatgcagaccgcgctcgcggtgcgcgatgcgctgttcatgtcggtcgacgtcgtgatcggcgtcgccgcgtacctgatcggcatcctcgcgctcgcggccagcttcgactggcggctgatgatcccgctcgcgctgtgggcgctcggctacggcctggcgtgcgcgtatttcgtgccgcgcctcggtgccgtcggcagccgccaggccgacgcgcgcgcgctgatgacgggccgcatcaccgacgcgtattcgaacatcacgaccgtgaagctgttctcgcacacgcggcgcgaagccgaccacgcgcgccgcgcgatggaagcgttcaaggcgaccggcgacgcgcagatgcggctcgtcagcgcgttcgaggtcgtcaaccacctgctgtcgacactgctgctggtcggctcgaccggcctcgcgctgtatctgtggatgcacggcgaggcgagcgcgggcgtcgtcgcggcggtgatcgcgatggcgctgcgcctgtcgagctattcgcactggatcatgtgggaaatgaccgagctgttcgagaacgtcggcacgatccaggacggcatcaacacgctgacgaaggtacacagcgtggtcgacgcgcccgacgcgaagccgctcgcggtgcagcgcggcgggatcgtgttcgacaacgtgcagttcgcacacgaggacaacgatcgcgctgtgttcgacgggttgaacctgacgatccggcccggcgagcggatcggcctgatcggccgctcgggcgccggcaagtcgacgctcgtgaacctgctgctgcgcttctacgacgtgggcggcggcgcgatccggatcgacgggcaggacatcgcgcacgtgacgcaggacagcctgcgcggcgcgatcgggatggtcacgcaggatacgtcgctgctgcaccggacgatgcgcgagaacctgctgtacgggcgacccgacgcgaccgagcgcgagatgcacgacgcggccgtgcgcgcggaagcgtccgagttcatcgaccggctgcgcgaccgccacggccgcagcggctacgacgtcgaggtcggcgagcgcggcgtgaagctgtcgggcggccagcggcagcgcgtcgcgatcgcgcgcgtgatgctcaaggacgcgccgatcctcgtgctcgacgaagcaaccagcgcgctcgattccgaagtcgaagtcgcgatccagcgcagcctcgacgacctgatgcgcggcaagacggtgatcgcgatcgcgcaccggctgtcgaccatcgcggcgatggaccggctgatcgtgctcgacgaagggcgcatcgtcgaggaagggacgcaccagcagctgctgcaggccggtggcatctatgcggcgctgtgggcgcaccagagcggcggattcctcggagagacggcggatgcggagaaggcggagcagtaa

SEQ ID NO: 271494 - DNA, 1537 bp, Unknown
  Bacterial polypeptide expressing nucleotide sequence isolated from the Sargasso Sea
ctggtcgggcgacgtcggtatcgcgcggcggcgcacgctggacgcaaagcgttcgtacgagatccgctacgtgaacccgaaggaaggcggcctgctgtggttcgacgtgatggcgatcccgaaggatgcgccgcatccggaagccgcgctgaagtggatcaactacatcgaggatccgaagaccaacgccgcgatcacgaacgagatcttctatccgagcgccaacaaggccgcgcgcccgttcgtgacaccggcgatcgtgcaggacccgggcatctacctgtccgacgcgacgatcgcgaaggcgtcgctcgcgatgccgcgcagcgcagacatcgcgcggatgcagaaccgtctgtggctgcagctgaagtcgggtggttgagggagacgacgatgatccatacgctccctgccgcagcggttgcgggcaccgcccgcggcaatgcggacgccttcgtgcgcctcgaaaacgtcgtgaagacattcggcgacagcaccgctgtcgacaacgtgaacctgacgatcgcgaagaacgagctgttcgcgctgctcggcagctcgggttgcggcaagtcgacgttgctgcgcatgctcgccgggctcgagacggccacctccggcaagatcttcgtcgatggcgaggatctcgcgtcgctgccgccgtaccgccgcccggtgaacatgatgttccagtcgtacgcgctgttcccgcacatgacggtcgagtcgaacgtcgcgttcggcctgaagcaggaaggcacgccgaagcaagagatcaaggagcgcgtggccgatgcgctcgcgctcgtgcagatgagcaagtatgcgcagcgcaagccgcaccagctctccggcggacagcagcagcgtgtcgcgctcgcccgctcgctggtgaaacgcccgaagctgctcttgctcgacgagccgatgtccgcgctcgacaagaagatccgccagaagacccagctcgaactcgtgaacatcatcgagaaggtcgacgtgacctgcgtgatggtcacgcacgaccaagaagaagcgatgacgatggccagccgcctcgcggtgatgagcgaaggcaagatcgtccagatcggcgcgccgggcgaggtgtacgaattcccgaacagccgcttctcggccgaattcatcggttcgaccaacctgttcgaagggcgcgtggtcgaggacgagcccgatcacatcttcgtcgagagcgacgacctcgaggcgcgcatgtacgtgagccacggcgtcacgggcccgctcggcatgccggtgggcatctcggtgcgcccggagcgcattcacgtgtcgcgcgagaagccgggctcgaaacacaactgggcacgcggcgtcgtgaccgacatcgcgtacatgggcagctactcgctgtaccacgtgcgcctgccgagcggcaagacggtggtatcgaacctgtcgagctcgcacctgatgaacgacaacgcaccggcgtggaacgacgacgtgttcgtgtcgtggtcgccggccagcggcgtcgtgctgacgcagtgag

SEQ ID NO: 271495 - DNA, 628 bp, Unknown
  Bacterial polypeptide expressing nucleotide sequence isolated from the Sargasso Sea
aatgacgttagaaacaatcgatgatggttttgtttatgttaatgacgaatatttatggcatgaaaaaaatgcagataaaattgttaatgcctcagataagcatttgcaaaaaatgcgtgatcaaatcggaatggtatttcaacaatttaatttattcccgcatttaactgctattgaaaacgttcaagaacctcaaattctaattaagaaaaaaaataaatctgaagcaaatgaaaaagctgaagagttatttaatatgattggattaagtgataaagtagatcattatcctcatcagttatcaggaggtcaacaacaaagagttgctatagctagagcgttagcaatggacccaaagattatgctattcgatgaggttacttctgctttggaccctgaactagtagatgaggttttgcaagttttgcacaaattggcgtcaaattcagatacaacaatgttgacagttacacacgaaatgaactttgcaagagattttgcagacagagttttattctttgataatggtcaaattgttgaatctggcaaaccaagtgatattttttctaatcctaaagaagagcgcacacgatcatttcttaaaaagtttattactagtattaattaa

SEQ ID NO: 271496 - DNA, 939 bp, Unknown
  Bacterial polypeptide expressing nucleotide sequence isolated from the Sargasso Sea
tgatgatgttggctggttttgaaactccaactaatggacaaatttatttagacaacaaagtcatttcagatattcctccacataagagaggaataggaatggtttttcaaaactatgctttgtttcctcacatgactgtttatgaaaatttagcttttccattaagagttagaaaaattccaaaagatgaagctgataaaaaagttgataaagctttatcaatggtttcgctacaagggtatgagtctagaatgccaatgcaattatctggaggtcaacaacaaagggttgctgtagcaagatcattagtttttgatccaaaactagtattaatggatgagcctttgggagccttagataaaaatttacgagaaagtatgcaatatgaaattaagcatatacacgaaagtattggtgtaacagttgtatatgttacacacgatcaaactgaagccttaactatgtcaaatagaattgcagtatttaatgatggaaaagttcaacaactttcaagtcctgatgaattatatgaaagaccagtaaattcatttgttgcagaatttattggtgagaataatacttttgcaggagaagtaactgatgtttcagataacaaatgtaaagtaaaattaaattcaggagccgaaattttagcaaacccaattgttgcaaaatcaaaaggagaaaagactacagtttcattaagacctgaaagagccttgattgatccagagacagaaatggataataatcataaaggcaaaattgaagaagtaatttaccatggtgatcatacgaggttaagattagatttattaggaaacaaagaatttattttgaaagttccaaatagctctaatagaatggatattaaagagggcaaagaaataaatatcggctggaatagcaccgattgtagagcgttagatccaaaataat

SEQ ID NO: 271497 - DNA, 1048 bp, Unknown
  Bacterial polypeptide expressing nucleotide sequence isolated from the Sargasso Sea
atgaataacgcgatcgagattagagatctatcattatcaatcgagggccgttcgatattaaataatatatcttttggtttaggggaaattgatattgcttgtttgttagggccaagcggttgcggtaaaacttcattactacgttgtattgctggatttgaaaagctagctaatggcgaagtttggattaaaggcgttatagcaagtaatccaaaccaccatgtacctgtcgagcaaagaaatatcggaatggtttttcaggattatgttttatttcctcatatgagcgtttcagagaatattatttttggtctgaaaaatctcaaagcaacaagaattaaagatagattagatgagttgatagaattattggatctaggcgaacatattaacaaattccctcatcaaatttccggaggtcagcaacaacgggtggcgctagctagggcaatggcgccgcggcctggtgtgttattgttagacgagccatttgctagtttggatgttgaacttcgtgaacaattagcacacgaacttcgttctatcttaaaacaagatggaataactacaattatggtaactcataatcaattggaagcatttgcgatggcagatgtaattggtgttatgaataatggcgaattaaggcagtgggatacagcatttaacttatatcacatgcctaaaacatcagatgttgcggattttattggcgagggcgtatttatacctggagaagttataaataataatgaggttaaaaccgatattggcaatataagaggccatataccgcagaatctagcaaaagggagtaaagttcgtgttttaattcggcctgatgatattcaacatgatgatgatagtatgacgactgcaaatgttataagtaaagcatttcggggtgccgaatttttatatacactagaaatgaaaaatggtttatgtgtgcaaagccttgtacctagtcatcatgatcatccaatcaatgaaccaattggaataaaattagaaattgatcatttagttatatttatggatgagtaaa

SEQ ID NO: 271498 - DNA, 556 bp, Unknown
  Bacterial polypeptide expressing nucleotide sequence isolated from the Sargasso Sea
atggcaaatataaaattcacaggcgttcataaatcttttggatcaaacaagattataactgattttaaccttatgggaaaagatgacgaatttcttgtattagttggtccatctggctgtggaaagtcaactttattaagaatgatagcaggtttagaaaaaattgatgagggcgaaatatttataaatgatcaaaaaattaatgatcttcatccctcaaaaagacaaactgcaatggtatttcaatcttatgctctttatccacacatgaatgtttatgagaacatgtcatttggactgaagattgaaaagaaatctaaggaagaaattgaaacaaaagttatgcaagcagctaaaattttaaaaattgaggaattacttgaaagaaaacccaagcagttatctggaggtcagaggcaaagagttgccattggacgtgcaattacccgaaatcctaaaatatttttatttgatgagcctttatctaatttggatgcagctttaagagctgagatgagagtagaaatttcaaagcttcataaccaaatcaaaacca

SEQ ID NO: 271499 - DNA, 1081 bp, Unknown
  Bacterial polypeptide expressing nucleotide sequence isolated from the Sargasso Sea
gagctctatttacaaatccttcggaaatacggaggtcattcatggtgttgatcttgaagtagaagatcatgaatttgtagtttttgtgggaccttccggatgtggtaaatcaacactacttcggcttattgccggtttagaagatgtttcacagggagaaatagaaattgatagccagcgtgttgaccacctccctcctgcaaaacgggggattgccatggtttttcagtcatatgccctttatccgcatatgaatgtttaccaaaacatgtcttttggattaagactggcaaaaactgataaaaaaataaccgaccaaaaagttagagatgcggcggagattcttcagattacagagttgttggaacgcaaaccaaaggaactttccggtggacagagacaaagagttgccataggaagagctatcgtcagggatccaaaggtgttcctgtttgatgaaccgctttcaaatcttgatgcaaaacttcgcgtgcagatgaggatagaacttacaaaacttcatcgagaacttaatgcgactatgatttacgttacacatgatcaggtggaagccatgactatggctgacaaaatagttgttctccgtgaggggtatgttgaacaggttggagcaccgctggatttgtatcataagccagcaaataaatttgttgcagggttcatcggttcaccagccatgaattttatggatggtactatctcaggtatttcagacaagtccgtagagcttgagctaaacagtgatttaaaaattcaaattccatgtcaacctgggaaagatgcagctactggaagtcctgtcagtgcaggtgtacgccctgagcacattgaactgacctcagagaaagaagcaaaattaagaggtgaggttttcgcagtggagagacttggaggagaaacatacctgtatgttaatactgaaagtaacaaagaactgactgttcatgcttccggagacaaagttgtaagtgtgggtgactctgtatctataggattttctccaaacacatgccacgtttttgacagacaggggcaggttttcgagaaattagcggcctga

SEQ ID NO: 271500 - DNA, 3103 bp, Unknown
  Bacterial polypeptide expressing nucleotide sequence isolated from the Sargasso Sea
catgcattttgaattaagactatggcaatttacgaagggcgttcggcatagaatcgtttttgctgttttcataggaatgctttctaccatcctgggagtcgcaagactggcactgctcggatgggtcattggtttgattttccaggggcaaaatctttcaggactggttacaccgattgctctaaccgggggttcgattatcctcagaggccttttcgagcactggaggatcatggtggctcatcacaccgcagccatggtccaaatgaccttgcggcaaaacctttatgacaagattgttgaactggggccaggttatgcgggaaggcaacgttccggagagttggtgctttcgatggttgacggcatagaacagttggaaacctatttcggagaataccttcctcaacttctgatttcggcaatcaccccacttctgatttttgcttttgtcgccttcctggatctcccggttgccttgacccttttcatctctgcaatgattgccctgctggcaccgtcactttggcataaatttgacttaaagaaatctcaggagcgtcaaaaagcttatgcagcatttgcatctgagtttttggacgcagtgcagggactcggtacattgaagtcctttggacagagcggtgcaagggcagcatttttaacgaaaaaagcgagagacctgtttcgttctacgatgtgggttcttgctaccaattcgctttcaagaggaatcactgatacttccatcgcactcggtgccgcggtcagtttaggactgggggcccatcgggtggcaacggatcagatggaactctctgcgcttctcatcatcctgatgatgggtgtagaaatttttcgtcccatgagggatttacgtgcaatcctgcatcaaggcatggtgggccaatctgccgcccagggaatttataagattcttgaagcaacacctcctatcgatgaggatccttctgctgaaaaaagagatacacttattccttccataacttttgattcggtatccttcggctatttggagcatcacaaatctgttcacgaaaatctccatttttcaatccagccgggtgaaaaggtcggggtggtcggtgagagcggttccggaaagacaaccatcgccaaacttcttcttcggttttatgaccccgaaaagggttcgatctccattggcggtcataatctaaagggtttaagactcgaacaaatcagaaaagagatttcggtcgtcagtcaggatacttttctttttcatggaacggttcaggaaaatatccgttttggaaaccctgaagcatccgacgaagaaatcgttgaagccgccaaatctgcgaatatccacgatttcatcaaatctcttccggacacttatgaaacattagtaggagaaaaaggcataaaactctctggaggacaacgccaaagggttgccatcgccagggcgattcttcgtgactccaaaattctgattcttgacgaagccctctctgcggttgatgcagaaaatgaggccatcattcaggaagcactgaatgaattaatgaaaggcaagaccaccctgattctggcccatcgtctctccagtatcatttcctgtgacaatattctcgtcttggaccagggcaaagtcgttgaaaatggaacccattcagcccttatggaaaaaggaggactctattcccaactaatgtctcagcaagcgaaggaaagcacccaccaacctctcaaagaaatttctcctgcaaacagccaaacggagagacctttaaatgatcccttggatcaacagataaatgctgaaacagagggcatagtcaaagctgaaggacttaactgggtgcaggtatgtaaggcattgatgagtcatatcatgccttggaaaagaaggctgatcatgacttttttgtttggagtgttgagagtcatagcgtttatcggggtaggagttttaagtgcattgatcgtcatggctttaaagaaccagaccccttttgatgactatctgattttcctgatcataattgcttccgtttcagggattcttcattggctggaatcatgggttgcccatgatatggcgttcaggcttcttgcagagatgagaattcaggttttcaggaaactagatcaaattgctccagcatatttggtgcgaaggagaactggagatttaatggggatcgtcactcaggatgttgagcttgtagagtattttttcgcccacacagttgctccggcatttgtttcggtgcttgtcccgttggtggttgtcattttcctgacaatgacccatccgtgggttgctcttgctttcatcccgtttttaatttttgtaggactcagtccttttttgatgcgcagaagtgtggatgaccttggttccaaatcaagagaagccgcaggagaattggcggcccatgcgattgataccatccaagggcttgctgaggtcgtcgcattccaacaggaaaaaaatcggcgttcagattttagcaaactcggtgaataccacatccaaatccgcctgcctttcttttcaaaactgacccttcaaaaatccctgctcgaagtttttacaggcctcggcggtttggcagtcgttacaactggagccattttggcaggaaatcattcgctcgatcaggccatccttcctctgttaacgatcctggcgatggctgcatttcttcctgtttctgaaattgctcaggtcggcaggcaattggcagacacccttggttcaacacgtaggatttatgccctggagcatgaaccagtgaccatcaaagacggccctcgtaaaatatccagtgaaacggcatcagagttgtcaatttccaatgtcggttttcattacccggggagatctcagaaggttctggaaaacgtgagtattaccattcaaggtgggcaaacggttgctttggtcggaccttccggggcaggaaagacaaccctggcgcaactgctgatgcgtttttgggatccttccgagggaaccatcctgctttcaggaaatgatatcagagaatacggacttgaagcactccgctcaaaaatcgctctcgtcgctcaggatacctacctt

SEQ ID NO: 271501 - DNA, 760 bp, Unknown
  Bacterial polypeptide expressing nucleotide sequence isolated from the Sargasso Sea
gctgcactgtcgccagctcagcctcagccggggcggccgccccatcctggacaggctcgacctcagcctgcaggcgggcagcctcaccgccctgctcggccccaacggcgccggcaagagctcgctgctcaaatgcctcaccggcgagctggaacatcagggagagatccgcctgtttggccgggagcggcaggagtgggctggcaccgagctggcccatcgggtcggggtgctgccgcagagctcgtccctgaacttccccttcctgtgcgaggaggtggtggccatgggccggctgccccacagcgaaccggccagccggcgcgaccagatagtcggggccgccatgacccatgccggggtcgatcacctggcaggccgcctctatcccggcctctccggcggggagcgccagcgggtgcagttcgcccgggtgctagcccagatctggcaggcaccggacgaaccgcagcaagcccggctgctgctgctcgacgagcccacctcggcgcttgatctcaagtaccagcaccagctgctcaccatggcacgcgccctcgccgcccgccataccgccgtgctggtggtgctgcacgacctcaatctggcggcccgttacgctgaccggctggtgatgctggagcagggcagagtgatggcagacggcaccccgcgcgaggtgctgacgcctgatctgatcgaccggctctacgactacccggcccaggtgatcctccaccccgaaagcgggctgcccatg

SEQ ID NO: 271502 - DNA, 736 bp, Unknown
  Bacterial polypeptide expressing nucleotide sequence isolated from the Sargasso Sea
tatgtctgaatcaataatagaaattaaaaatgttaacaaatggtttggagattttcaggttttaaaagatattaatctagaagttcaagcaaaacaaaaaattgttgtttgtggaccgtctggttctggaaaatcaactcttattagatgtataaataggctagaagagcatcaacaaggaaatattattgttgatggaaatgaattagatgaaaatactaaaaatatagaagctataagagcagaagtgggcatggtttttcaacaatttaatttatttcctcatttatctattttggataactgcacacttgcacctatttgggtaaaaaaaatgccaaaaaaagatgcagaagaattagcaatgcaacaattagaaaaagtacaaatagctgatcaagctgcaaagtttcctggtcaattatcagggggacaacaacaaagatgtgcaatcgcaagagctttatgtatgcagccaaaaataatgttatttgatgaaccaacctcagctttagatccagagatgattaaagaagtattagatgcaatggtaaacctagctaatgcaggaatgacaatgattgttgtaacgcacgaaatgggttttgcaaaagaagtagctgacgaagtcatctttatggacgaaggaatgattgttgaaaaggccaaaactaaagaattctttgacaatcctaaaagtgatagaactaagctatttttaagccaaattttatag

SEQ ID NO: 271503 - DNA, 745 bp, Unknown
  Bacterial polypeptide expressing nucleotide sequence isolated from the Sargasso Sea
atgtcagatagttcaattatatcattacaaaatgttaacaaatggttcggtgattttcacgtattacaagacgttaatttagaagttaaaaaaaaggaacgtattgtagtttgtggcccttctggatcgggtaaatcaactatgattagatgtattaatagacttgaagaacatcaagaaggaaaaatagtagttgatggtattgagttaacaggaaatttaaagaatattgatagcgttagaaaagaagttggaatggtttttcaacaatttaatttattccctcatttgtctgttaaagaaaatattactcttgcacctatatgggtaaaaaaaatgccaaaagctgaggctgaagaacttgcaatgaaacaattagaaattgtaaaaattcctgaacaagctaataaatttcccggacaactttcaggcggtcaacagcaaagagtagctattgctagatctttagcaatgaatcccaacattatgctttttgatgaaccaacctctgctcttgatcctgaaatgattaaagaagttttagatgtcatggttgatttagcagaaggtggaatgacaatgattgttgtaactcatgagatgggttttgcaaaaactgtggctaatagaatggtgtttatggatgaaggcagaattgtagaagaggctcctccagataaattttttaataatccagagagtgatagaacaaaattatttttaagccaaatacttaatcattaag

SEQ ID NO: 271504 - DNA, 685 bp, Unknown
  Bacterial polypeptide expressing nucleotide sequence isolated from the Sargasso Sea
aatgattcgccttgagaaactgagcagagagttccaagtagggaatcaggttgttcatgcgcttgatgaggtcgacctggaaattaaggaaaatgagtacgtttccatcatgggcgtttcaggatcaggtaagtcaacccttctcaacatattagggttattagatacaccaacatccggtgattacattttatcaggcatcaatacatcaaagatggacgatgacgaaatggcaggcatccgatcaacaaagatcggttttgtatttcaatcctttcatctgattccaaggctgacagcatttgaaaatatcgagatgccaatgattctatctggaatgaatccaaaagaacgatcagagaaggtcagctcagctcttgaaaaagttggcttgaccgatcgttcagatcacaaaccagagcaactttctggaggtcaaagacaaagagttgcaattgcaagatccattgtcatggaaccagatgtccttctagcggatgagccaacaggaaacttagatacttcatcaggcaaggaagttgtgaaattaatcgaagagcttaacattgcgggcctgaccctaatagtggtcactcatgatagagaaatgggcgagcgttcaaatcgcttgattgagttgagagatggaaaaatcattaacgatcaaaatcaaaaaaaggcctaa

SEQ ID NO: 271505 - DNA, 1381 bp, Unknown
  Bacterial polypeptide expressing nucleotide sequence isolated from the Sargasso Sea
gatggtcaagaaatacttaacttctaatcataaatctttaagaaaaattaggggaaataagatctcaatgatttttcaggaaccaatgacatcactaaatccatttcataaagttggagatcaaattgttgaatctatcatattgcataaaaaacagtctaaatctaatgctattttagaggcaaaaaaattaatggagttggttgaaatacccgaagtcgataggagatttgcctcttatcctcatgagctttcaggcggtcaacggcaaagaattatgattgctatggctctttcaaataaacctaaattacttatcgctgacgagcctactaccgcattggatgtgactgtgcaggcccaaatattagatttaatgacaaaacttaaagatgaggtgggaatgtcaatactattcattactcacgatttagggttgattcaaaaattctctgacaatattacagtcatgcaagaaggcgaggttgtggaacaaggagacacaaaatctgttttttcaaatcctcaacatgcctatacaaaaaaacttattaattctgagccatcagttaaacaagaaacaacacgtgaggaaaattcgtttgttgctgtgaagaatcttaatatttattatcctttaccaaataaaaattttttcaagaaagaatgttttcatgctgtaaaagatgtaaattttgctattccaaaacagtcaactattggattagttggtgaatcaggatccggtaaatcaactcttggaaaagctttggcaggattaattgattatcagggatcggttatttttgatggccaagatgttaatcaattaagttcaaaagaaataaaacttattaaaaaagatattcaaattgtatttcaagatccatatggatctctctcaccaagaatgacaattggagagatagttggtgagggccttgatgttcattttaaactcaataaaagtcaaaaggatgaacgtattgcagaatctttgaaagctgttgaaattaatccagatgatagatttaaatatcctcatgaattttcaggcggacaaagacaaagagtagcaattgcaagatccttaattttaaatccatcatttatgattttagatgagcctacttctgcattagatagatcaattcaaattcaagttattgatttattaaagaatattcagaaagagtttgcgttgacttacttatttattagccatgatttgaaggttgtgcaatcaatgtcagattatatatttgtcatgcaaaatggttatattgttgagtctggtcctgctaaagaagttttctccaacccacaagaagtctatactgataaacttttaaatgctgctttacgttattcaacagtttaa

SEQ ID NO: 271506 - DNA, 1019 bp, Unknown
  Bacterial polypeptide expressing nucleotide sequence isolated from the Sargasso Sea
cctaacggcactaaagctgtaccaaccaacatctctaaaaatagacaaaggagaatttatggtttttgttggaccatcaggctgtggaaaatctaccttgttaagaatggtagcaggacttgaagatataactacaggggatattaaacttgataaaaaaattataaataaaattgatccatcagaaagagatgttgcgatggtatttcaaaactacgcattatatccgcatatgaatgtttataacaatttagcttatggattaaaaaataggggattagctaaagatttaatagaaaaaaaagtaaaagctgctgcaaaactattgcagatatcagattatttagagagaagaccagcattattatcaggaggccaaaggcagagagtggcaatgggtagggcaattgtaaggagtcctaaaatttttttatttgatgaaccattatctaacttagatgcaaaactgcgtattcaaatgaggctagagattaaaaagcttcaaagaaaagttggtgtaacaagtatttttgtaacccacgatcaagtagaagctatgacattagcagatagattggcagtaattaataatggaataattgaacaattaggaacgccaatagaaatttataataatccaacatctgtttttgtagctggatttataggatcacctcaaatgaattttatcgaaggtgagctaaaaaataaaaaattaaaaacccaagcttttgaaattgcaggcattaaaagtgattttaatggaaaagtaattttgggaattagacctgaacatctagtgcaagcttacaatggattaattaaattaaatgtggatttagttgaaaaattaggatctgataatcttatttatggagaaatcaaaggtaaaaaagatctactatgttaccgaacaccaggaaatgaaaaaataaattcaggttctaaattagcattaaatattcaaggcaataaattgtatatatttaataaaaaaactggcaaaagaataatttaaa

SEQ ID NO: 271507 - DNA, 1093 bp, Unknown
  Bacterial polypeptide expressing nucleotide sequence isolated from the Sargasso Sea
atggggagttcagatagtttcgtcaaattcgataaagtagataaaagctacgatggagaaacgctcgtagttaaagatctcaatgtagacattccaaagggagaatttctaacaatgctaggaccttctggttctggaaaaacaaccacattaatgatgttagctggattcgaaactcccacgggtggagaaatatatttagagggtgaggctattaataaaattcctcctaacaaaagaggaattggaatggtgtttcaaaactacgcattatttccacatttgacagtaaacgagaatcttgcttttccacttgaagttagaaaattaaataaatcagacattaaagaaaaagtaaaaaaaactttggacatggttgagttaggagagtttggaaatcgtatgccgttacaattatcaggcggccaacaacagcgtgttgctttagcaagatctttagtttttgaaccaagattagtactaatggatgaacctttaggagcgcttgataaaaaacttcgtgaacaaatgcaatatgaaattaaacatattcatgagagaatcggaatcactgtcgtttatgtcactcacgatcaaagcgaagcgttaacgatgtcaaatcgtatagcagtttttaatgatggaaaaattcaacaaatatcatcgccagatgttttatatgaaaaacccgaaaatgcatttgttgcaaactttattggagagaacaaccagattaaaggaaaagtaaaatctattaatggaaaaaattgtgttgtaactactgataaaggcgatgagattacttctttaaaaataaatgttaaatctgtcggagattcttcgaccgtatctttacgcccagaaagagttgagattaatgctaccgaaggtaattttgaaaattcttttaatgcaaaagtaaaagaattaatttatttaggtgaccacattcgaacaagggttgaagtttgtggcaacgatcaatttattgtaaaggttccaaattcctataaaggagctaatttaaaagaagggtcaaccgttaaactttcttggaaagctagcgattcaagggcactagatctaggttaat

SEQ ID NO: 271508 - DNA, 1255 bp, Unknown
  Bacterial polypeptide expressing nucleotide sequence isolated from the Sargasso Sea
actgttccatccggcgcgagccgtcgtccgcgagtcgcgccatgcgtctcgcgcggagaccctcacgcctgcaatccgtgaagaacgaatggtgaatcccatgcaatcgataccctcttccgctgctgcacgacagacccaaccggcccccgcggcccgcacgcaaaacgacgccttcgtgcgcatcgagaacgtcgtgaagaaattcggcgacagcaccgctgtcgacaacgtgaacctgacgatcgcgaagaacgagctgttcgcgctgctcggcagctcgggctgcggcaagtcgacgttgctgcgcatgctcgccgggctcgagacggccacctccggcaagatcttcgtcgacggtgaagaccttgcgtcgctgccgccgtaccgccgcccggtgaacatgatgttccagtcgtacgcgctgttcccgcacatgacggtcgaatcgaacgtcgcgttcggcctgaagcaggaaggcacgcccaagaacgagatcaaggagcgcgtggccgatgcgctcgccctcgtgcagatgagcaagtacgcgcagcgcaagccgcaccagctctccggcggccagcagcagcgtgtcgcgctcgcccgctcgctggtcaagcggccgaagctgctcttgctcgacgagccgatgtccgccctcgacaagaagatccgccagaagacccagctcgaactcgtgaacatcatcgagaaggtcgacgtgacctgcgtgatggtcacgcacgaccaggaagaagcgatgacgatggccagccgcctcgcggtgatgagcgaaggcaagatcgtccagatcggtgcgccgggcgaggtgtacgaattcccgaacagccgcttctcggcggaattcatcggttcgaccaacctgttcgaagggcgcgtggtcgaagacgaacccgatcacatcttcgtcgagagcgacgacctcgaggcgcgcatgtacgtgagccacggcgtcacgggcccgctcggcatgccggtgggcatctcggtgcgcccggagcgcattcacgtgtcgcgcgagaagccgggctcgaaacacaactgggcacgcggcgtcgtgaccgacatcgcgtacatgggcagctactcgctgtaccacgtgcgcctgccgagcggcaagacggtggtgtcgaacctgtcgagctcgcacctgatgaacgacaacgcaccggcgtggaacgacgacgtgttcgtgtcgtggtcgccggccagcggcgtcgtgctgacgcagtga

SEQ ID NO: 271509 - DNA, 1078 bp, Unknown
  Bacterial polypeptide expressing nucleotide sequence isolated from the Sargasso Sea
cgaacggggtgccgggttctcaagggtgtcaatatcgacatcgaagacggccagttcctgattctcgtcggcggctcgggctgcgggaaatcgacgctgctcaacatgatcgccggcctcgaaaccgtcaccaagggcgagatccagatcgacggcaagacggtgaacaacctctcgccgaaagatcgcgacatcgcgatggtgttccagtcgtacgcactgtatccgtccatgacggtacgcgagaacatctcgttcggtctgaacatccgcaaggtgccgaagcaggagcaggcgcagatcgtcgatcgtgtgtcgaacacactgcagatcacgcacctgctggaccgcaagccgggtcaactgtccggtggccagcgtcagcgtgtggcgatgggccgggcgctcgcgcgcgatccggtgatgttcctgttcgacgaaccgctgtcgaacctcgacgcgaaactgcggatcgagatgcgttcggaaatcaagctgttgcatcagcgtctcggcacgacgatcgtctacgtgacgcacgatcagatcgaagccatgacgctcggcgaccgcatcgcggtgatgaaagacggcatcgtccagcagttcggcgcgccgcaggatatctacgactcgccggcgaatctgttcgtggcgggttttatcggtgcgccgccgatgaatttcatccagggcaagctggtggagcaaggttcgggcgtcggcatcgagctggatacaggctcggcgcgcaacgtgctgaatctgccgttcgattcagcgaaggtgaaatcgcacgtcgggcgcgaagtgattctcggcctacgccccgagcggatcaccgacgcacgcggtgcgcatggcgaccacgcgaacctgcaggcgatcgacgtgaaggtcgacgtgatcgagccgaccggtccggatacgctggtgttcgcgcaggtgaacggcaagcgcatcgtgagccgcgtgcacccggcttcgaatccgcagcccctgtcgaccacgacattgctgttcgatgcctcgaaggccgtgctgttcgatccgaccaatgaagagcggattgcctgaa

SEQ ID NO: 271510 - DNA, 1057 bp, Unknown
  Bacterial polypeptide expressing nucleotide sequence isolated from the Sargasso Sea
atggctaacataaaatttactggagtacacaaatcatttggatctaataaaataatcacagattttaatcttttaggtaaagaagatgagtttcttgtattagttggaccatctggatgtggaaaatcaactcttctaagaatgattgcaggattagaaaaaatagatgaaggtgaaatatttattaatgatcaaaaaattaatgaactacatccttcaaaacgtcaaactgcgatggtatttcaatcttacgctctttatcctcatatgaatgtttatgaaaacatgtcttttggtctaaaaattgagaaaagaccaaaggaagaaataaatacaaaagtaatgcaggctgcaaaaattttaaaaattgaggagcttttagagagaaaaccaaaacaattatctggaggtcaaagacaaagagtggctataggaagagctattacaagaaatccaaagatatttttatttgatgaacctttatctaacttagatgcagcattaagagctgaaatgagggttgaaatatctaaattacacaatcagatcaaaactaatatgatttatgtgactcatgaccaagtagaagctatgactttagcagaccgaatagttattttaaatcagggaaatattgagcaagttggtactcctgaggaaatttataatgatccagcaaatatttttgttgcacaatttataggcactcccaaaatgaatattttagaagtaaacgaggaaaatgttgtttcagaaaatacaattaaattgttaggaaacgacattcaatttgataaattaaaattaaataaatctaaacattttgtgggtattaggcctgaacatttaaaagcaaatcagaatacaaaatttacttttaatcctgaaatagaattaattgaaaaccttggtaatgaaaaaattgtatatatgaaaaaagatgaacaccaattaagcgcgaaaattccaagcaatgttgaaataggaagttccataggttttgatctaaatgacatttttatttttgatgaaaatggaaaaagagtaaaatcataac

SEQ ID NO: 271511 - DNA, 967 bp, Unknown
  Bacterial polypeptide expressing nucleotide sequence isolated from the Sargasso Sea
ctgcttcttgaagctattgagaaaaactacgattcagttaaagcgcttaagggtgtcagcctaaaaatttatcctggtgaattctgtacattactcggcgcttctggctctggtaaatcaactatcctgagagtgatagctggttttgaaacgcttgatagtggcaggttggaaatcaatgataaggatatgagtaaaatgtcaattgcagagagaaatatcggaatggtatttcagaattatgctctttttcctcatatggatgtttttcaaaatattgccttcgggcttgaaatgagaaaactagataaatcccaaataaaagaaaaagttaatgaagttcttgaattggttggcctgaccaatcagaaaaatcgcttgccatcagcactttcaggaggtcagcagcagcgagtggctctagctagagccattgtaattgaaccaaagatactgcttatggatgagcctctcggcgcgctggataaaaacttgagaaacgatatgcaaaaacaaataaaaaatcttcacaaagatctcaacataaccgtagtgtatgttacacacgatcaagatgaagcgatgtttctgtcagataaaattgtcttaatggatgaaggaaagataatccaaacaggaacctgtgaagagctgtacacaaaaccaaaaaatagatttgttgcaaattttcttggtgaatgcaatttctttactcttgattcgggaaaaaagatcggcattcgtccagagtgtcttcgcattagtactgacaataaaaatgataggaatagttttcaagtcgatgttgaagatgtggtatttcaaggacgaatgatcaaattgataggaaattataatgatcaggaaattattgcttctatcagccccctggagtatgagctagaatccacccataaagataaaatattcctgacatatgatagtgaatcattgatgaatatatgag

SEQ ID NO: 271512 - DNA, 1057 bp, Unknown
  Bacterial polypeptide expressing nucleotide sequence isolated from the Sargasso Sea
atgagtaaactaaatattaaaaatttaatcaaaagttttcctagcatgggtagaccagcagtaaataatgtaaatttagatattgaaagtggagaacttgttgcatttctcggaccttcaggttgcggtaaaacaactattttgaaaatgatcacaggattgtttcaacctgatagtggagatattattcttgatgagcaatcactattaaaaattccaactgaaaaaagaggggtagttatggttttccaaaattatcttttgttcccttatatgaatgtaaatgaaaatgttggatttgcattaaaaatgaaaggtgtagataaaaatataatagatcaaaaagtaaaagaaatgttagaactggtaaaattaccagatattggattaagaaagccaaaacagctttctggaggtcaacaacaaagagttgcactagccagagcattgatatctaatcctagaatattgcttctagatgaaccgttaagtaatcttgacgcgcatttaagagatgaaatgcgagatttaattgtgactattcaacaaaaattaaaagtaacaacaatatttgtaacacatgatcaagaagaagcggttcttctagcagataagatagctttaatttttgatggcgaattacaaaattttacttctccaaaaaaatattatgaaaaaccaaaaaatataaaagctgcaaaattttttggtggagttaattttattaatgcaaagaaacataatgataatctatctactaatattggaacagttcattacaaaggtgaaaattatacagatttaaatgaacataatataataactattagacccgaaaatataaagttaagtaaaaataatgatttcaatgataattcattcaaaggcttaattaaatcagttatattttcaggaactcatactagatacaaaattatagtaaacgatttagaattagaatgctcattacaatctgtaggattacaagacataaaaacagatgatacaatttatgttcatttacccagtgataaaatatgggcgatgaatgaataaa

SEQ ID NO: 271513 - DNA, 1081 bp, Unknown
  Bacterial polypeptide expressing nucleotide sequence isolated from the Sargasso Sea
tatgaacaatattaatgaatcaattaatattcaaaatgttctgaaaatctacaagagtgaaactgatgtttatgctcttaatgatgtgtcattggtgattcagcagaacgagtttttcactttattagggccttcaggttgtggaaagacaacattactaagattgatagctggttttgaacatccaacaagtggtacaatcctactcaacaaaaaggacatttcactacttcccccaaataaaagaccagtcaacacagtttttcaaagttatgcactatttccccacatgacggtcggaggaaatattgcttttggtctggaaatgttaggttggtctaaagagaatgtttccaaagctgtagatgaaatgttggctctagttaagatggaagagttgaaaaatagaaggccttctgagatatctggaggacagcagcaacgtgttgcccttgctagagcattagctccaaagcctgaggttcttctgttggatgagcctctttcagcgctagatctgaaattaagaaaacaaatgcaaatcgagctaaaacgacttcaatctgaaactggtataacttttgtgtttgtgacccacgatcaggaagaggcacttacgatgtctgatcgaattgcagttatggataaaggtaaaattctgcagttcgggacgcctcgggaaatttatcatcaccctgaaaataggtttgtagctaattttattggtgacagtaattttttatccgccactattgaggaagaacatgctgtactttctgatggcacaaaattagccttatccagcaaaaatagttcagctaatattggaaaaagatctatcttgattaggcctgagcatgtccaaatgaagaaatcaaatggcaataatggatctttccaagggaagataagtaatattgtttactttggtacagacactcattttcatcttgagctgaaaaatggagatgagtttactattagaaaacaaaatgcgcccgatggaggtaaggaattcgaaataggttcaaccgttgagctaaaaattgataaaggtgcaattcaaattctaagggattaa

SEQ ID NO: 271514 - DNA, 853 bp, Unknown
  Bacterial polypeptide expressing nucleotide sequence isolated from the Sargasso Sea
atgagtgctgatgtagagctacaaaatgtttcggttacatttggaagtttttatgcagctaaaaatgtaagtgtaaaaattaaagagggagaattttttagttttcttggtccttctggttgcggtaagacaactttattacgtgcaatatctggttttttagatccatctgaaggaaaagtattaataggtggtcatgatatggctggaattggaccaaataaaagaccaacatctttaatatttcaaaaccttgctcttttcccgcttatgtctgttgctgataatatagctttttcacttgaagttagaggtattagcaaaataaaaagaagagaaagagcagatgaattattagaattaatagctttgactggtcaaggagagaaaaaagttcatgaactatcaggaggtcagagacaaagagttgcaattgcaagagctctagcaatagaaccagaagttttacttcttgatgaacctttatcggccttagatctaaaattacgtcaaaaaatgagaactgaattaagagcaattcaaaagagagttggtataacatttatttatataactcatgatcaaggtgaagctttaaccatgtctgatagagtggctgtaatgaatgaaggtgaattagaacaagtaggactgtgcgatgatgtatatgattttcctcatactccatttgttgcaacttttgttggagaaaacaatcctttttatgcaaaagttatatcaagtgatggagatatggtaaaagtagagtcagaaggtaattcttttttagcaaaagctggtaaaattaatgatcaaaataaacattcctttaatacaggcgatgaagttatta

SEQ ID NO: 271515 - DNA, 952 bp, Unknown
  Bacterial polypeptide expressing nucleotide sequence isolated from the Sargasso Sea
ctgcgccgcgcgcgacctgcgcgacgcttcccatccctatacgcgcgggctgctcgcagcgaacccgccgctcgcgaacccgccggacgaactgcccgtgctgcggcgcgatccggcgtggctcgaacccgcgtcgcatgccggcacgccggccgatcgacaggaggcagcaagatgatcgacgtcgatcacgcatcgatccgtttcccgacccgcacgggtcacgtcgacgccgtgcgcgacgcgagcttcgccgtgcgcgacggcgaggtgttcgggctcgtcggtgaatcggggtccggcaagtcgacgctgctgcgcgcgctgacgggcctcgtgccgctcgcgtccggcagcctgtcgatcgacggccggccggtgggcggcacgcccgatcgtgccttccgccgccacgtgcagatggtgttccaggatccgtacgcatcgctgcatccgcgcttcacggtcgaccagacgctgcgcgagccgctgtcgatccacgggatcgatgatgccgatgcgcgcatcgcccgcgcgctgtccgaggtcgggctcggcccggcgttccgcttccgctacccgcaccagctgtcgggcggccagcggcagcgtgtcgcgattgcgcgtgcgctgatcgtcgagccgcgcgtgctgctgctcgacgagccgacgtccgcgctcgacgtgtcggtgcaggccgagatcctgaacctgctgcgccgcctgcatcgcgaacgcaacctgacgatgatcctcgtcagccacaacctcgcggtgatcggcttcctgtgccagcgcgtcgcggtgatgcagcatggcgaaatcgtcgagcagctccggatcgagaacgtgcgcgccgggcaggtggcgcgcgactacacgcgcacgctgctgcgcgcgaccgagggctaccgccgtctcgacccggtggcgggcgcgccggcgacctgac

SEQ ID NO: 271516 - DNA, 1057 bp, Unknown
  Bacterial polypeptide expressing nucleotide sequence isolated from the Sargasso Sea
tatgagttttattgaaataagtaatgtctctaaattttggggagatgttaaggcagttgaaaatataaatataaatgtagatgaaggggaatttgtagtcttattaggaccttcaggatgcggtaaatcaacaacattaagattaatagctggattagagagtgtttcatcaggagaaatatcgatagcgggtaaaaatattaataatctagatccatcattaaggaatatttcgatggtttttcagtcctatgcacttttcccacatttgaatgtagaagaaaatatagtttttggcttaaaagtcaggaatgttaaaagtactgacagggaaattaggttaaaaaaagttgctgaaaaagtaggtttaactaattatttaaaaaggaaacctgctgaactgtcaggaggacaaagacaaagagttgctcttgctagagcaattattagtgacaataaaatttgtttgatggacgagccattatcaaatttagatgcaaaattaagaaatcaaatgcgactagaaattcgttccctccaaaaagatttaaacattactcttctttatgtaacacatgatcagacagaagcaatgagtatggctgacaaaattgttttattaaatgaaggtgaaattgttcagcaaggtaatccaaaaatgctttatgaaaaaccagacaacatatttacagcaaaatttcttggtaatccacctatgaatttaataaatatatttgttgaaaaagatgagaattttctttctagcatggatgaaaagcatttcattcctaagaattttaaaaataaaacttatttaggtataagaccagaggatattgaaatatcaaaagaaggtattaaatgcttaataaacgatattgattatcaaggtgcagatatagtcttaaatttaaagttagggaatcaagaaatatttgcaaggctcgattctaaaaaagtagatgaattagataaggaagtatttataaattggaatgaagagaatttacatttttttgattttgaatctggagaaaggatttttgaaaattcctga

SEQ ID NO: 271517 - DNA, 736 bp, Unknown
  Bacterial polypeptide expressing nucleotide sequence isolated from the Sargasso Sea
atgtctgaacctataataaaaattcaaaatatgaataaatggtttggtgacttccaagtattaaaagatgtaaacctagaagtagaaaaaaacaaaaaaattgttgtatgtggcccatcaggatcaggtaaatcaacattaattagatgcataaatagattagaagagcatcaaaaaggaaatattattgttgatggaactgaacttaatgagaatacaaaaaatatcgaacaaattagagctgaagttggaatggtttttcaacaattcaatttatttccacatttgtcaattttagacaattgtactttggctccaatatgggttaaaaaaatgccaaaaaaagatgcagaagaactcgcaatgaaacaacttgagcaagttcaaatatctgatcaagcaaaaaaatttcctggccaactttctggtggtcaacaacaaagatgtgcaatcgctagagctttatgtatggaacctaagataatgctttttgatgaaccaacatccgcacttgatccagaaatgataaaagaagttttagatgctatggttaacttagcaaaagctggtatgacaatgattgttgttacgcatgaaatgggttttgctaaagaagttgcagatgaagttatttttatggatgaaggtatgatagttgaaaaagctaataccaaagagttttttgcaaacccaaaaagtgatagaacaaaactatttttaagccaaattttataat

SEQ ID NO: 271518 - DNA, 739 bp, Unknown
  Bacterial polypeptide expressing nucleotide sequence isolated from the Sargasso Sea
aatgactacagcaatagagataaaaaatgtaagcaaatggtttggggattttaaggcgctagatgatgttagtcttacaacttctcagggtgaaaaagtggttatctgtggaccttcaggttcaggaaaatcaacacttgtaagatgtattaacaggttggaaattcaccaaaagggtacaattaaagttcggggaattgaattaacagatcatgattcgtctatttctgaaattcgatctgaggtaggaatggtttttcaacagttcaatttatttcctcatttaacagttcttcaaaatttgactcttggtccaactaaagcattgggtctttcacagaaagaagctaacgaaagagcttttaaattgcttgaaagggtgagaatacctgagcaagcaaataaaaagccaggtcatttatctggagggcaacaacaaagagttgcaattgctagatcattatgtatggaacctaagattatgctttttgatgaaccaacatcagcacttgatcctgagatgatttctgaagttttggatgtaatagtcgatttggcaaatgagggtatgaccatggtagttgttacacacgaaatggggtttgcacgaaaagtagcagacagaatggtttttatggatgaaggcaagataattgaaatgggaaaaccaaaagatttttttgattcaccaaaaactgaaagatgtaaactatttttgaaccaaattttacaacattaa

SEQ ID NO: 271519 - DNA, 1051 bp, Unknown
  Bacterial polypeptide expressing nucleotide sequence isolated from the Sargasso Sea
atgtctaatataaaattcaatggtgtaaacaaatcatttggatcaaataaaataataactgactttagtttattaggtaaagaagatgaattcttagttttagttggtccctctggatgtggtaaatcaacattattgagaatgattgctggattagaaaagattgatgaaggtgaaatttttataaatgatcaaaaaataaatgacttacatccttctaaaagacaaacagcgatggtatttcagtcatacgctctttacccacatatgaatgtttatgaaaatatgtcttttggactaaagattgaaaaaagatccaaagaagaaattcaaacaaaagtaatggaagcagctaagattttaaaaattgaggagttgttggaaagaagacccaaacaattgtcaggaggacaaagacaaagagttgcaatcggacgtgcgattacaagaaatcctaaaatttttttatttgatgaacctttatcgaatttagatgctgccttaagatctgagatgagagttgagatttcaaagttacataatcaaattaaaacaaatatgatttatgtcacacacgatcaagtagaggcaatgacacttgcagataggattgtaatattaaatcttggtaaaattgaacaagttggaacaccagatgaaatatataacaatcctgctaatatttttgttgctcaatttataggaacaccaaaaatgaatattttacccttaaacaatgaaaatattgtttcagataataaaattaattttttaggtaatgaaataatttttgaaaaaattaaatttgataaaaaaaaatattttttgggaatacgacctgagcattttaatttatcaagtagttcacaatttaaaattaagcctagaattgatttagttgagaatttaggaaatgagaagattgtttatatgagcaatgataatctagaactaagtgcaaaaatttcgagccaagaagattttcaaaatgaaataaattttgacttgaaagatatttttatatttgatgaagatggaaatagagtttagt

SEQ ID NO: 271520 - DNA, 814 bp, Unknown
  Bacterial polypeptide expressing nucleotide sequence isolated from the Sargasso Sea
atgagcttatcggctgcgcccgtcgctaaacaacattttgaacgtactcaactaaccgtggatagactcagctacgctatcggcgataaagcggtgttaaaggacattagtgtgcaatttcaaccgagcagtgtcaccgcactgttagggcctaatggcgcgggtaagtccacactgttaaaggcactgtgccaagagatccccgccgcgcgcggcagcattcggcttgggcactgcccgcttgtcgattggccaagggcagaactggcaaaatcgctcgcggtgctaccacagcacgcaagtttaacctttccctttaaggtccatgaagtggttgccatgggcttgtatcccctcacgctgagccaacaggcgggacaaaacctagtgaccaaatggctcaccgaggtagagatagtgcacttggcgcagcgtagctaccccaccctttcgggtggcgaaaaacaaagggtgcaactggcgcgggtattaactcagttgagccaatcccccttcccgccgattttactgctcgacgaacccacctcggcactggatctggcgcagcaacacaaggtattagcgctggcaaaaaatctcgctcacaagcacgcctacactgtgattgtggtactacacgatctcaatcaagccgcccgttacagcgacagggttatcgtcctcaagcagggcgaaattgtcagtgaaggctcggcaagcaaggccttatcggccgagattattcggcaggtatgggattatgaacctgagtttattcctgcaccacagggcggttacccattgattttttaat
